United States Patent Application Publication US 2026/0191920 A1 - sequence listing, part 7

SEQ ID NO: 28784 - protein, 269 aa, unidentified
  source 1..269: note = Amesbacteria bacterium
  REGION 1..269: note = tr|A0A0G1RH99|A0A0G1RH99_9BACT 7-carboxy-7-deazaguanine synthase OS=Candidatus Amesbacteria bacterium GW2011_GWA2_47_11 OX=1618357; GN = queE PE=3 SV=1
MKLLETDYRPTPEDKARIKILSDMFKVSGDGVFATLQGEGLTTKEGGTAGLPVVFLRLHFCNLTCGFPTGWQCDTRYTWNPRMEEFWKEPRDWSINQTAVNIRQAWRQNHPQIETGHRLVISGGEPLLQQGKIVELIRELSEFEIEIETNGTILPLPELEDCQFNCSPKLSGSGNSRKRRFHPDVITHIARLQKSWLKFVVTDLAELNEIRTIQQECQIPNEKIIVMPQGRSWESIQAQAQLLEPSVSERNWHIGYRHQLNWFGDQRGT

SEQ ID NO: 28785 - protein, 269 aa, unidentified; identical to SEQ ID NO: 28784
  source 1..269: note = Amesbacteria bacterium
  REGION 1..269: note = tr|A0A1F5A1Q7|A0A1F5A1Q7_9BACT 7-carboxy-7-deazaguanine synthase OS=Candidatus Amesbacteria bacterium RIFOXYD1_FULL_47_9 OX=1797267; GN = queE PE=3 SV=1

SEQ ID NO: 28786 - protein, 189 aa, unidentified
  source 1..189: note = Aminicenantes bacterium
  REGION 1..189: note = tr|A0A1F5BYL0|A0A1F5BYL0_9BACT 7-carboxy-7-deazaguanine synthase OS=Candidatus Aminicenantes bacterium RBG_19FT_COMBO_58_17 OX=1797275; GN = queE PE=3 SV=1
MRQGEPTVFVRLAGCDRRCSFCDTKYAWEGGEDYAVDRIIENVQRIRRRFPVRWVCLTGGEPFMQDVRLLVRLLKRDNCRVQMETNGTRYYATAADWLTVSPKPKGYLVRPEFQRLAKEVKLVVNRELDLAVIRRIRTAFPGRTPVLLQPESNRRWSQKRALRLLKEAAAAHLDNIRISVQLHKIIGLR

SEQ ID NO: 28787 - protein, 225 aa, unidentified
  source 1..225: note = Aminicenantes bacterium
  REGION 1..225: note = tr|A0A524GND7|A0A524GND7_9BACT 7-carboxy-7-deazaguanine synthase OS=Candidatus Aminicenantes bacterium OX=2052149 GN=queE PE=3 SV=1
MFIAETFTSLQGEGVLVGVPSFFIRTSGCNLRCRWCDTPYTSWLPEGDRRSLEDLVAEARASGVKHAVVTGGEPLLQREIGLLTRELRAAGLHVTVETAATVAPDFDCDLLSVSPKTANSDPQGVWRERHRRLCADREPLRSLLHRFPEYQIKFVVAEPDDLAEVLAVLEEIGGIDASRVLLMAEGRDAAEVAVKAGVVADLCSEHGFRYTPRLHLDLFGAGRGV

SEQ ID NO: 28788 - protein, 183 aa, unidentified
  source 1..183: note = Amulumruptor caecigallinarius
  REGION 1..183: note = tr|A0A4Q0U787|A0A4Q0U787_9BACT 7-carboxy-7-deazaguanine synthase OS=Candidatus Amulumruptor caecigallinarius OX=2109911 GN=queE PE=3 SV=1
MKQYRVNEIFYSLQGEGVHTGLPAVFVRFSGCNKRCGFCDTDFAAFTLMSAADIVAAVMHYPSDTVILTGGEPALQIDDALVVALHDAGRRIHVETNGSLPLPSGIDWVTCSPKDRDIRLLHADEVKVVFTGDDPQWAAELFDGAVLSLQPMSCLNTAATVDYIKSHPWWRLSLQTHKLIDIP

SEQ ID NO: 28789 - protein, 219 aa, unidentified
  source 1..219: note = Aquarickettsia rohweri
  REGION 1..219: note = tr|A0A429XSK2|A0A429XSK2_9RICK 7-carboxy-7-deazaguanine synthase OS=Candidatus Aquarickettsia rohweri OX=2602574 GN=queE PE=3 SV=1
MFGTNAKLPFEKGDGNSLKIHSIFETIQGEGPYCGHQAIFVRLSGCNLACKFCDTDFDDYKLLLNTDILNKIKSFNQIKPLIVITGGEPFRQNISQLCTLLIQNNYKIQLETNGTLYSNIPKQVELVCSPKISNGKYSLIRDDILKQAIAIKFLISSNNISYSDISEVGQTKHNIPVYVQPMDEYNDKINHKNIILAQKIAKKHKAILSLQIHKILNID

SEQ ID NO: 28790 - protein, 209 aa, unidentified
  source 1..209: note = Atelocyanobacterium thalassa
  REGION 1..209: note = tr|A0A086CGF0|A0A086CGF0_9CHRO 7-carboxy-7-deazaguanine synthase OS=Candidatus Atelocyanobacterium thalassa isolate SIO64986 OX=1527444; GN = queE PE=3 SV=1
MEKSIQLNKNDLTTYPIAEIFHSIQGEGAWTGVSAFFIRLAGCNVGCPWCDQKESWKHKTFPKYSSKTLAIEAHKANASIIVITGGEPLMYNLFPLTNALQNLGMQVHLETSGSYPFSGNFDWITLSPKPFKIPHESIYDKASELKVIVANQKDFDWAEEQKNKTNSQSINFLQPEWNSDISSSLIYNYIRKHPEWRISLQTHKFLGIR

SEQ ID NO: 28791 - protein, 126 aa, unidentified
  source 1..126: note = Atribacteria bacterium
  REGION 1..126: note = tr|A0A1V5SVG5|A0A1V5SVG5_9BACT 7-carboxy-7-deazaguanine synthase OS=Candidatus Atribacteria bacterium ADurb.Bin276 OX=1852833 GN=queE; PE = 4 SV=1
MKSIKLIECMNFTWQAEGDDCGKKMLLTRFKYCNRAHGYLEENGLHPCPFCDTITKMKIETESDYYIKDLQMMIEENNLALMISGGEPGFGLNLQSNGQSRRVHRYRQLLKPHSSREERVERFQNR

SEQ ID NO: 28792 - protein, 214 aa, unidentified
  source 1..214: note = Aureabacteria bacterium
  REGION 1..214: note = tr|A0A3A4R4B4|A0A3A4R4B4_9BACT 7-carboxy-7-deazaguanine synthase OS=Candidatus Aureabacteria bacterium SURF_26 OX=2093366 GN=queE PE=3; SV = 1
MIFSVNEVFYSIQGESRFAGYPCVMVRFSGCNLSCSYCDTAYARDEAEEWDFNRLMESIDQFQCPLVELTGGEPLLQTNIQFLTEQLILKGYRVLIETNGSCDINTISPKVIFIMDVKCPGSGHTNVFCEKNLSYIKTDDELKFVLSGRSDYDWAKNFISHYGLWGKVNILFSPVWNKLNIRDLATWMLSDRLYSARLQLQLHKLIWGPDKRGV

SEQ ID NO: 28793 - protein, 221 aa, unidentified
  source 1..221: note = Azambacteria bacterium
  REGION 1..221: note = tr|A0A350QJJ1|A0A350QJJ1_9BACT 7-carboxy-7-deazaguanine synthase OS=Candidatus Azambacteria bacterium OX=2053511 GN=queE PE=3 SV=1
MYKVNEIFETIQGEGSFTGAPAIFVRLQGCPVGCAWCDTKHTWTVNPDLQVAPQTLMAKSAETEQWSTFTAEQLLALFQENGYQAKHVVITGGEPCMYDLNPLCDTLHAVGYQTQIETSGTFEILVPSKSWVTVSPKVNMKGGYKVLQSALDRANEIKHPVAMDKHIEQLLQLLKQTDIGSKLIYLQPISQQAKATALAIAYCKKHNWRLSVQVHKYLGIE

SEQ ID NO: 28794 - protein, 264 aa, unidentified
  source 1..264: note = [Bacteroides] periocalifornicus
  REGION 1..264: note = tr|A0A0Q4AXQ4|A0A0Q4AXQ4_9BACT 7-carboxy-7-deazaguanine synthase OS=Candidatus [Bacteroides] periocalifornicus OX=1702214 GN=queE PE=3; SV = 1
MPTKTLYLAPEGIFPLVGRTSGLTSLGLPFGGTLQGEGLLAGMPSLFIRLAGCNLRCTWTGHGGRTIACDTPQALAVSHGRGSTISELIGTLEGALGALTHLVITGGEPLTQAEGLVTLLKAIRQSPTLRLLHITLETNGTLFNAEVAKSVDLVSLSPKWNATPQGFSSRYIHVLQCWLDAKVLPNSLQLKFVVGSKEDEDQIANDILPHLNLCHHPPILVMPLGATPEELRLSAPYAVAAAIRQNWRFCPRLQVELWGNRAGT

SEQ ID NO: 28795 - protein, 223 aa, unidentified
  source 1..223: note = Baumannia cicadellinicola
  REGION 1..223: note = tr|A0A088MXV7|A0A088MXV7_9GAMM 7-carboxy-7-deazaguanine synthase OS=Candidatus Baumannia cicadellinicola OX=186490 GN=queE PE=3 SV=1
MQYPLNEICQTLQCEGYFTGVPAIFIRLQGCAVGCSWCDTQYTWHQNTMKQVTAEEMMLKKAHSCDWASLSTEDIIAIITQRGWTAIHVVITGGEPCMHDLLPLTYTLEQQKFRCQIETSGTQEIRCTPQTWVTVSPKINMRCGFQVLAQALSRSNEIKHPVARQRDIENLDKLLQTLNDGKQRVIALQPISQKKAATRLCINTCIARNWRLSIQLHKYINIS

SEQ ID NO: 28796 - protein, 240 aa, unidentified
  source 1..240: note = Beckwithbacteria bacterium
  REGION 1..240: note = tr|A0A1J5AZI5|A0A1J5AZI5_9BACT 7-carboxy-7-deazaguanine synthase OS=Candidatus Beckwithbacteria bacterium CG2_30_44_31 OX=1805035 GN=queE; PE = 3 SV=1
MPNMLKVSGDQVFATFQGEGITAGQPAVFLRLHYCNLACSWCDTKYTWDKTRKEFWQEPIDWSYPEAVTKIKAAWLQKFGLKTPDSKKRLVITGGEPLLQQAKIVKLLQFLPNWRVEIETNGTIIPLAELSNCQINCSPKLENSGNLLSLRFKSEVLKQINSLPNSWFKFVVVKAKDLEEIDEIVTCCALNPEKILIMPEGYTVETISEHLIQVKTEVQKRKWRVIQRNQIIWYGNKRRT

SEQ ID NO: 28797 - protein, 238 aa, unidentified
  source 1..238: note = Berkelbacteria bacterium
  REGION 1..238: note = tr|A0A554JAS8|A0A554JAS8_9BACT 7-carboxy-7-deazaguanine synthase OS=Candidatus Berkelbacteria bacterium Gr01-1014_85 OX=2017150 GN=queE; PE = 3 SV=1
MSSLIQPSLAHLVVSGDGAFYTLQGEGATLGMPAVFLRLHHCNLDCNWCDAAYTWNRQLPAFVTERQKWTVETTAKRVQSLGANHCKRLVITGGEPLLQQRSIIQLLRYLPDWNIEFETNGTIKPVEQLCYCQFNCSPKLANSGIELARRFKPEVLAVINQLPKSWFKFVVTGPDDILEMEETYRPYIDAKKIILSPEGTDVATIHAVQRSVVELALSRGYRLTPRLHIELWGNERRK

SEQ ID NO: 28798 - protein, 211 aa, unidentified
  source 1..211: note = Brocadia sapporoensis
  REGION 1..211: note = tr|A0A1V6M088|A0A1V6M088_9BACT 7-carboxy-7-deazaguanine synthase OS=Candidatus Brocadia sapporoensis OX=392547 GN=queE PE=3 SV=1
MKINEIFKSIQGETSYAGLPCTFIRITGCNIRCSYCDTTYAYEEGTEMPIGSILEHVAEFKTKLACITGGEPLSDKDTPSLIEELLSINYTILVETNGSYDIRMIPQKAIKIMDIKCPDSGTSHLMHWQNVRYLTKRDEVKFVLHSRNDYEWAKNVIAEYRLSEVAQVLIGTVFNALPPRTVVQWILEDNLPVRFQLQLHKYIWDPQTRGV

SEQ ID NO: 28799 - protein, 211 aa, unidentified
  source 1..211: note = Brocadia caroliniensis
  REGION 1..211: note = tr|A0A1V4AV16|A0A1V4AV16_9BACT 7-carboxy-7-deazaguanine synthase OS=Candidatus Brocadia caroliniensis OX=1004156 GN=queE PE=3 SV=1
MKINEIFKSIQGETSYAGLPCTFIRITGCNLRCSYCDTTYAYDEGTEMPISSILERVARYKTKLICITGGEPLADKDTPALINELLFGNYTVLVETNGSYDIRAIPQRAIKIMDIKCPDSKMSHLMHWQNIAYLTKSDELKFVLHSRGDYEWAKEVIEKYRLSEITKILIGTVFDILSPRMVAQWILEDNLNVRFQLQLHKYIWDPQTRGV

SEQ ID NO: 28800 - protein, 218 aa, unidentified
  source 1..218: note = Brocadiaceae bacterium
  REGION 1..218: note = tr|A0A5C6D564|A0A5C6D564_9BACT 7-carboxy-7-deazaguanine synthase OS=Candidatus Brocadiaceae bacterium S225 OX=2528033 GN=queE PE=3 SV=1
MNKKEPLLRINEIFVSIQGESSYAGIPCIFVRLTGCNLRCSYCDTVYAYNEGSLMSLDEILQRVNGYESGNVCITGGEPLLQENISKLINLLKKNHYNVYIETNGSMNIDVLPKGIVRIVDIKCPGSGMEQEMDWQNIKRLKNKDEVKFIISSKEDYEWAKGITMKYKIRDTATVLFGLVHEKLKSKTLAGWILKDGLDVRLQLQLHKIIWQDKARGV

SEQ ID NO: 28801 - protein, 211 aa, unidentified
  source 1..211: note = Brocadiaceae bacterium
  REGION 1..211: note = tr|A0A5C6F385|A0A5C6F385_9BACT 7-carboxy-7-deazaguanine synthase OS=Candidatus Brocadiaceae bacterium B188 OX=2528032 GN=queE PE=3 SV=1
MKINEIFKSIQGETSYAGLPCTFIRITGCNLRCSYCDTTYAYEKGTAMPIGSILERVAGFKTKLVCITGGEPLSDKDTPSLIEELLSINYTILVETNGSYDIRMIPQKAIKIMDIKCPDSGASHLMHWQNIRYLTKRDEIKFILCSRDDYEWAKGVIAEYRLSEVAQVLIGTVFNALPPRTVVQWILEDNLPVRFQLQLHKYIWDPQARGV

SEQ ID NO: 28802 - protein, 210 aa, unidentified
  source 1..210: note = Burkholderia pumila
  REGION 1..210: note = tr|A0A0J7JGP6|A0A0J7JGP6_9BURK 7-carboxy-7-deazaguanine synthase OS=Candidatus Burkholderia pumila OX=1090375 GN=queE PE=3 SV=1
MTYAVKEIFYTLQGEGANAGRPAVFCRFAGCNLWSGREEDRAEALCQFCDTDFVGTDGENGGKYRTPADLVGMIAALWPEGEANKFVVCTGGEPMLQIDQPFVDALHEAGFEIAIETNGSLPVDESIDWICVSPKADAPLVVTKGHELKVVVPQDNQHLSELEKLDFEYFLVQPMDGPSRDINTKLAIDWCKRHPKWRLSMQTHKYLNIS

SEQ ID NO: 28803 - protein, 210 aa, unidentified
  source 1..210: note = Burkholderia verschuerenii
  REGION 1..210: note = tr|A0A0L0M798|A0A0L0M798_9BURK 7-carboxy-7-deazaguanine synthase OS=Candidatus Burkholderia verschuerenii OX=242163 GN=queE PE=3 SV=1
MTYAVKEIFYTLQGEGANAGRPAVFCRFAGCNLWSGREEDRAEAVCQFCDTDFVGTDGENGGKYRTPADLVAMIASQWPEGEANKFVVCTGGEPMLQIDQPFVDALHDAGFEMAIETNGSLPVLESIDWICVSPKADAPLVVTKGNELKVVVPQDNQRLAELEKLDFEYFLVQPMDGPSRDINTKLAIDWCKRHPKWRLSMQTHKYLNIP

SEQ ID NO: 28804 - protein, 209 aa, unidentified
  source 1..209: note = Chryseobacterium massiliae
  REGION 1..209: note = tr|A0A3D9BFL6|A0A3D9BFL6_9FLAO 7-carboxy-7-deazaguanine synthase OS=Candidatus Chryseobacterium massiliae OX=204089 GN=queE PE=3 SV=1
MNLTEEILLKEGKMLPVMEHFYTLQGEGAHTGKAAYFIRLGGCDVGCHWCDVKESWDPNLHPLMNAADIAETAAKHCKTIVLTGGEPLMWNLDILTGKLKELGCSIHIETSGAYPMSGQIDWITLSPKKTGLPKEEIYTKAHELKVIVFNNNDFKFAEEQASKVSKNCTLYLQSEWSKRDDMYPKITDFILENPEWRASVQTHKYLNIP

SEQ ID NO: 28805 - protein, 210 aa, unidentified
  source 1..210: note = Cloacimonas sp.
  REGION 1..210: note = tr|A0A1V4R5W6|A0A1V4R5W6_9BACT 7-carboxy-7-deazaguanine synthase OS=Candidatus Cloacimonas sp. 4484_140 OX=1956163 GN=queE PE=3 SV=1
MELSEIFYSLQGESSYAGLPCVFVRLAGCNLRCTYCDTKYAYEPKFLLSIDEILKKVEKYYPVKLIEITGGEPLLQADSIELMKLLINKKYDVLLETNNSISLKDIPQEVIKIVDFKTPSSGMCNSILWDNIKYFNGNDELKFVIADRQDFDWSLGIINKYDLIKHHILFSPVYEKLDRKELAEWIIETKLPIRLNIQLHKLLWGDSRGA

SEQ ID NO: 28806 - protein, 144 aa, unidentified
  source 1..144: note = Cloacimonas sp.
  REGION 1..144: note = tr|A0A3C1LMT5|A0A3C1LMT5_9BACT 7-carboxy-7-deazaguanine synthase (Fragment) OS=Candidatus Cloacimonas sp. OX=2053534 GN=DCQ12_04730 PE=3 SV=1
MLQVIEVFASLQGESSYAGLPCVFIRLSGCNLRCNYCDTDYAFEGGEWLSVEQILSQVKKYGIPLVEVTGGEPLQQKESIQLMQALVKSGYQVLLETNGSLSIADVPAEVIRIIDYKLRGSGEGGSFAEANYQLLGDGGEIKFV

SEQ ID NO: 28807 - protein, 212 aa, unidentified
  source 1..212: note = Cloacimonetes bacterium
  REGION 1..212: note = tr|A0A1W9VQX9|A0A1W9VQX9_9BACT 7-carboxy-7-deazaguanine synthase OS=Candidatus Cloacimonetes bacterium 4572_65 OX=1972455 GN=queE PE=3; SV = 1
MIQLIEIFCSVQGESSYVGYPCIFIRLAECNLRCNYCDTKYSYIADYSLSVEAIIEEVKRYHPIKLVEITGGEPLLQKEVYSLITQLERENFKVLLETNGSLPLDAVSKTVHKIVDVKCPDSGSKDSFCPSNLHTLNETDELKFVISSYDDYLWSKSYVIENNLLNSNVLFSAVFEKVEPKVLVDWIIQDRLNVRFQLQIHKYIWNPNKKGV

SEQ ID NO: 28808 - protein, 209 aa, unidentified
  source 1..209: note = Cloacimonetes bacterium
  REGION 1..209: note = tr|A0A2N2KZY2|A0A2N2KZY2_9BACT 7-carboxy-7-deazaguanine synthase OS=Candidatus Cloacimonetes bacterium HGW-Cloacimonetes-2 OX=2013734; GN = queE PE=3 SV=1
MMVTLEICEIFYSLQGESTYAGYPCIFIRLADCNLDCLYCDTRYSHAPGKRMTIPEIISEVQKYPAKLVELTGGEPVLQDEITELISALNELDYKILLETNGSLYLGEIQDYVIKIVDVKCPGSGEGESFMKWNMKFLKEHDELKFVLSTFYDYQFALKFIEDNALWGKTIHFSPVSRFLKAEDLALWILRDGLNVRLQLQLHKLLNIQ

SEQ ID NO: 28809 - protein, 240 aa, unidentified
  source 1..240: note = Coatesbacteria bacterium
  REGION 1..240: note = tr|A0A1W9S0F2|A0A1W9S0F2_9BACT 7-carboxy-7-deazaguanine synthase OS=Candidatus Coatesbacteria bacterium 4484_99 OX=1970774 GN=queE PE=3; SV = 1
MGRKAYITEIFNSIEGEGLKVGTLSLFIRFAGCNLRCPPCDTQYAWEKKPEMCTIYLRKGEKKIKNPIDISTLIDIIFDYKSVERLVLTGGEPLLNAGYIEELAEQLQYDRDICVETNSTIPQGLARVITSISEVSCDIKLKSVWGLEQDTQRLKRFLKIAKKRLVWVKCVVKPDTPPREIEGVSQVVASVSPIIPLILHPMDNSGDFNLDTIATMIRGGLKHLKEVRFLPRIHRTLGLR

SEQ ID NO: 28810 - protein, 215 aa, unidentified
  source 1..215: note = Competibacteraceae bacterium
  REGION 1..215: note = tr|A0A3S0VV66|A0A3S0VV66_9GAMM 7-carboxy-7-deazaguanine synthase OS=Candidatus Competibacteraceae bacterium OX=2053538 GN=queE PE=3 SV=1
MRYSVKELFYTLQGEGAWSGRPAVFCRFVGCNLWSGREVDREKAICRFCDTEFVGADGPGGGKFATAEALASAIAARWPASQLPQARPYVVCTGGEPLLQLDDALIVALHDRGFAVAVETNGTLLAPLDLDWICVSPKANAPLRITHGDELKLVYPQAEPEAQPERFTDLTFRHFFLQPLDGPDLERHTQATIAYCLANPQWRLSLQTHKLLGIP

SEQ ID NO: 28811 - protein, 215 aa, unidentified
  source 1..215: note = Competibacteraceae bacterium
  REGION 1..215: note = tr|A0A433ILA2|A0A433ILA2_9GAMM 7-carboxy-7-deazaguanine synthase OS=Candidatus Competibacteraceae bacterium OX=2053538 GN=queE PE=3 SV=1
MSYAVKELFYTLQGEGAQAGRPAVFCRFAGCNLWSGREIDRAAAICRFCDTDFIGTDGPGGGRFATAAQLAQAIAGHWPATTLPGAQPYVVCTGGEPLLQLDAPLIEALHMAGFTVAVETNGTLPAPPGLDWICVSPKAGAPLRLTRGDELKLVYPQIEPEAQPTRFIDLDFRYFFLQPLDGSEREVHTQAAVAYCLAHPQWRLSLQTHKLLGIP

SEQ ID NO: 28812 - protein, 235 aa, unidentified
  source 1..235: note = Contendobacter odensis
  REGION 1..235: note = tr|A0A2G6PFM7|A0A2G6PFM7_9GAMM 7-carboxy-7-deazaguanine synthase OS=Candidatus Contendobacter odensis OX=1400860 GN=queE PE=3 SV=1
MDKLIKISEIFGPTLQGEGVLIGQSTVFVRTGGCDYRCSWCDTPYAVKCEYRRDWVSMSAEQIFEEVSALSCGKPLMVSLSGGNPAIHPLQPLIDIGHTQGYRFGLETQGSVAQDWFKTLDVLTLSPKPPSSTMETDWKKLDDCIAAANGIPKTVLKMVVLDEEDYRYTREVASRYPALPVYLQPGNHKTEGDADLEGLNQRLLWLASRVNADQWFNVTILPQLHVLLWGNKRGV

SEQ ID NO: 28813 - protein, 216 aa, unidentified
  source 1..216: note = Cyclonatronum proteinivorum
  REGION 1..216: note = tr|A0A345UKQ8|A0A345UKQ8_9BACT 7-carboxy-7-deazaguanine synthase OS=Candidatus Cyclonatronum proteinivorum OX=1457365 GN=queE PE=3 SV=1
MFLSGEQMISGTDVKDFDSVEYPIMEHFYTIQGEGAHSGRAAYFIRTAGCDVKCWWCDVKDSWDASKHPRLKTGMVADLAKASGAAFVVVTGGEPLLHDLLPLTSSLKARGLEVHIETSGSSPLSGQLDWITLSPKRFKKPVDEIYPYVDELKVVVLTKKDLTWAEEHAAKCPVGTRLLLQPEWDTPKSMPLIVDYVKANPQWGISLQTHKFLNVP

SEQ ID NO: 28814 - protein, 219 aa, unidentified
  source 1..219: note = Dactylopiibacterium carminicum
  REGION 1..219: note = tr|A0A272EQP9|A0A272EQP9_9RHOO 7-carboxy-7-deazaguanine synthase OS=Candidatus Dactylopiibacterium carminicum OX=857335 GN=queE PE=3 SV=1
MSSPRSSTRLRISEIFHSLQGESTRVGLPTVFVRLTGCPLRCVWCDTEYAFTGGQIRTLDDVLQEVAGHGAHYVCVTGGEPLAQKSCLVLLTALCDAGYSVSLETSGALDVADVDPRVSKIMDLKAPGSGEVSKNRLTNLAHIGLADEIKMVLADEADYLWAREMIATHRLSERCSVLVSPVQGKLDPQDLAAWVLRDRLAVRMQLQMHRIIWGERTGV

SEQ ID NO: 28815 - protein, 213 aa, unidentified
  source 1..213: note = Dadabacteria bacterium
  REGION 1..213: note = tr|A0A1F5IT46|A0A1F5IT46_9BACT 7-carboxy-7-deazaguanine synthase OS=Candidatus Dadabacteria bacterium RIFCSPHIGHO2_12_FULL_53_21; OX = 1797756 GN=queE PE=3 SV=1
MNISEIFYSIQGEGVEIGLPTVFVRLFACDLRCSWCDTMYAVEGRDFKKMTVGEIRAGIAGFGCRRVCITGGEPLIQKDEAGELTEYLIKDGYRVVLETSGHKLPPPVFWTENCIISMDCKCPGSGMQERMDFGLFQKLRPQDQLKFVIADEADYEYAKQILSKYTIKANIIFQPAGGQGLGWLPERVIGDNLERVRVLPQLHKLIWGDKRGV

SEQ ID NO: 28816 - protein, 214 aa, unidentified
  source 1..214: note = Dadabacteria bacterium
  REGION 1..214: note = tr|A0A520V6S0|A0A520V6S0_9BACT 7-carboxy-7-deazaguanine synthase OS=Candidatus Dadabacteria bacterium OX=2080303 GN=queE PE=3 SV=1
MKLKVSEIFCSIQGEGLDVGSPNIFLRLFGCNLRCSWCDSMYAVEGNDYENLSLDIILAKIRDLKYKKICITGGEPLLQQKTLVVLVENLLKDDYKIILETAGHIKPEGIFEDPNVLISMDCKCPESNMVDKSNISILKTLSNKDQIKFVIKDKSDYTFAKKIVLKEKFNAEVIFQPVYGSDSRLLVKHILEDKLNVRFVPQVHKFIWGDIKGV

SEQ ID NO: 28817 - protein, 217 aa, unidentified
  source 1..217: note = Deianiraea vastatrix
  REGION 1..217: note = tr|A0A5B8XI86|A0A5B8XI86_9RICK 7-carboxy-7-deazaguanine synthase OS=Candidatus Deianiraea vastatrix OX=2163644 GN=queE PE=3 SV=1
MFGKNPKRPPENTDGSLLFVQEIFPTIQAEGIFAGRPAIFIRLGGCNLACSFCDTEFENFSQMSLEDILAQVQKHQVQYSKINLIVITGGEPMRQNIIPLCNKLHKNFTVQIETNGTIYRNLPDFVKVICSPKIVNGKYTIPADGLQIDALKFLISASLEHYNKIPDWAFDFKEIFIQPMDEQDAQKNAANNALAVKIAMENNLKLSIQMHKFLQIP

SEQ ID NO: 28818 - protein, 213 aa, unidentified
  source 1..213: note = Delongbacteria bacterium
  REGION 1..213: note = tr|A0A2G6P7I2|A0A2G6P7I2_9BACT 7-carboxy-7-deazaguanine synthase OS=Candidatus Delongbacteria bacterium OX=2044594 GN=queE PE=3 SV=1
MIKINEIFYSLQGESVYAGLPCIFVRLTGCNLRCSWCDTEYSFYNGDYLTLNEIEKKIKSFPSKLVEFTGGEPMLGYEKIKPLIDSLLSEGYTILMETNGTISIKNLDKRVVKIVDYKTVSSGESGKFLLENLKFLDKKDQIKFVVSTKEDFEDLLLFYGSNRENIKCEMLISKVGNSELTHEEIAKMIIDSKINFRYQVQLHKIIWGDKSGV

SEQ ID NO: 28819 - protein, 213 aa, unidentified
  source 1..213: note = Delongbacteria bacterium
  REGION 1..213: note = tr|A0A348NXN3|A0A348NXN3_9BACT 7-carboxy-7-deazaguanine synthase OS=Candidatus Delongbacteria bacterium OX=2044594 GN=queE PE=3 SV=1
MAMIVNEIFESLQGESSYAGYPCLFIRLTGCNLRCTWCDTKYAYEDGKEIHCNEIVRLINSSKTDIIEFTGGEPLLQKDELIKVISGIDSSKTILLETNGSVSLEDIPERVVKIVDIKLTGSGEGKSFLFENLKYLTKIDEIKFVLRDIFDYNEFKEHYKNYELGRKCVILVSKVKDSSLTDREIAEMIIEDGLRVKYQIQLHKYIWNDERGR

SEQ ID NO: 28820 - protein, 254 aa, unidentified
  source 1..254: note = Dependentiae bacterium
  REGION 1..254: note = tr|A0A1V5UBF1|A0A1V5UBF1_9BACT 7-carboxy-7-deazaguanine synthase OS=Candidatus Dependentiae bacterium ADurb.Bin246 OX=1852839 GN=queE; PE = 3 SV=1
MLEVNEIFGPTIQGEGKLVGNLSIFIRFGKCNFKCVGFNVEYETPSGVKKCACDSYYAVDMEFKNSWKSYENYLDIVNEVDKLLENCNYKNRVDIVITGGEPLLYWNNQEFQNLIKHYINKNHKLTIETNASLNIDFQEEYQKNILFSMSVKLSNSLEPLKKRVNKSTLTKILENTKESYLKFVIGNDFLENAIVEIEDILKNIPQCEVYLMPLGDSSETIDINSEKVVNLAIKYGFKYSDRLHIRIWNNKRGV

SEQ ID NO: 28821 - protein, 289 aa, unidentified
  source 1..289: note = Desantisbacteria bacterium
  REGION 1..289: note = tr|A0A2M6ZH87|A0A2M6ZH87_9BACT 7-carboxy-7-deazaguanine synthase OS=Candidatus Desantisbacteria bacterium CG07_land_8_20_14_0_80_39_15; OX = 1974549 GN=queE PE=3 SV=1
MTKGWLCEIFDSIQGEGIYLGVRQIFLRFAGCNLRCEYCDTPQALRRHKYCRAMSHESCVMSKIENPMTVDSIIFILKSYLSNIQYPGSNIYHSVSLTGGEPLLQVDFIKELIPQLKKLGLKIYLETNGVLPDALKKIVDEVDFIAMDIKLPTAIGQKLWKEHKKFLKQCAMNYTTTILDRKMKCALVFVKIVITPRTSGGEIKKAAELIAEVNREIPLVLQPDSKKRDSPRPAVAGAPTTSSVNSDGPQGQSLFYYQEIASRILKDVRIIPQLHNVSQAICHLSRPDT

SEQ ID NO: 28822 - protein, 241 aa, unidentified
  source 1..241: note = Desantisbacteria bacterium
  REGION 1..241: note = tr|A0A2M7JBZ6|A0A2M7JBZ6_9BACT 7-carboxy-7-deazaguanine synthase OS=Candidatus Desantisbacteria bacterium CG_4_8_14_3_um_filter_40_12; OX = 1974545 GN=queE PE=3 SV=1
MIEPKGNIVEIFKSIQGEGLWIGEGQIFLRLAGCNLSCKNCDTNYALEIPQKYKIEDNDYRNNPVTLTETIETIKSYGLFSTTVSVTGGEPLLQIDYLKMLLPILKSEGCKIYIETNATLPEQLALILPWIDIVSADIKLPSFTGEEDIPKEHREFLRIAKEKDLFVKVVVTDETIMNEISIAVDIVMGVDRNIPLVIQPAMKNGKLMENQERLFGFHDYAAKRLTTVRLIPQIHKLIGWK

SEQ ID NO: 28823 - protein, 212 aa, unidentified
  source 1..212: note = Desulfofervidus auxilii
  REGION 1..212: note = tr|A0A127AKQ4|A0A127AKQ4_9DELT 7-carboxy-7-deazaguanine synthase OS=Candidatus Desulfofervidus auxilii OX=1621989 GN=queE PE=3 SV=1
MELKITELFYSIQGESSYIGLPCIFIRVCGCNLRCHYCDTKYAYHEGKYYSIEKIMKFVGKYHTKLVTITGGEPLLQPSVIPLTNCLLEKGYVVLVETNGSLPINVFSPKVIRVMDIKCPGSGMSNFMEWKNIDYLTIKDEVKFVLSDRDDYDWAKEIVLKYRLQRRCQVLFSPVFQKLSLSILAEWILSDQISVRLQPQLHKIIWGEIRRR

SEQ ID NO: 28824 - protein, 244 aa, unidentified
  source 1..244: note = Desulforudis sp.
  REGION 1..244: note = tr|A0A3A6N5K9|A0A3A6N5K9_9FIRM 7-carboxy-7-deazaguanine synthase OS=Candidatus Desulforudis sp. OX=2093368 GN=queE PE=3 SV=1
MTSGSIVEVFTSVQGEGPHVGYRQLFVRLAGCNLDCKYCDTDFRAAPTFRLEDDPGSGRFRKEANLVAPDVLVEYIARLKASDYHSVSFTGGEPLVQDAFLMEVLAAVKALGWRTYLETNGTLTTSLERLIALCDIVAMDIKLPSVTGRPLPQSHAGFLRVASAREVFVKVVVSEETSKAEIQVAARLIREVDQGIHLVIQPVTCRDRTGSIPARRILELQRTALGELKHVRVIPQTHHCAGMP

SEQ ID NO: 28825 - protein, 246 aa, unidentified
  source 1..246: note = Desulforudis audaxviator
  REGION 1..246: note = tr|A0A3S8S577|A0A3S8S577_9FIRM 7-carboxy-7-deazaguanine synthase OS=Candidatus Desulforudis audaxviator OX=471827 GN=queE PE=3 SV=1
MTITAPVTEVFTSVQGEGPYLGCRHMFVRFAGCNLQCAYCDTPAPAGRRCRVENTPGRRVFTWYPNPVTVQMLLDWTSRAVAPHFHALALTGGEPLLHADFLESFLVGFREYGGRCYLETNGTLPEAMKRLARLVDIVAMDVKLPSMTGFPFPEAEHRRFLEAIGPAHAFVKVVVGSETTDAELDAVCALLSAGAGRTMLVLQPVTPVSGVRPAPPERLLEMQERCLARLPDVRVIPQVHRTLGVL

SEQ ID NO: 28826 - protein, 244 aa, unidentified
  source 1..244: note = Desulfosporosinus infrequens
  REGION 1..244: note = tr|A0A2U3LU42|A0A2U3LU42_9FIRM 7-carboxy-7-deazaguanine synthase OS=Candidatus Desulfosporosinus infrequens OX=2043169 GN=queE PE=3 SV=1
MLNLPITEIFSSIQGEGPYVGVRQIFLRLPKCNLRCPYCDTETTVPEQFRIETVPGSRYFDMMSNPISLEKLQELLFLTYDFSLHHSLSVTGGEPLLWVNELKVLLPFIRAKGLNIYLETNGTLPEHLHQVLPWVDVISMDIKLPFTGQTFWDVHETFLRYSLQKEVFVKIVIHKETTLKDLQNACDLIAGVDPTILTILQPVTETQGIMTPKPYQLLNWQSLFLKKLSNVRVIPQTHVFLGQL

SEQ ID NO: 28827 - protein, 255 aa, unidentified
  source 1..255: note = Dojkabacteria bacterium
  REGION 1..255: note = tr|A0A3M0YZS0|A0A3M0YZS0_9BACT 7-carboxy-7-deazaguanine synthase OS=Candidatus Dojkabacteria bacterium OX=2099670 GN=queE PE=3 SV=1
MSVNIYKPTTEDRERIKHQFDKLKISGDGVFATLQGEGQTTGKPAVFLRLHFCNLHCSWCDTRYTWDKNSREFWQEPEDWSYGETAVRINNAWESVFPTNQEKRLVITGGEPLLQQRKIVNLLQRLPGWEIEIETNGTIMPIPELYTCQFNCSPKLENSGNPLQIRYKPEVLRVINNLSKSQFKFVVTKPLDLDEIDLIVSNCNLNPTKILIMPEGQTKKEVEIRYQMIKDAVEARGWGITLRNQLIWFGSKRRT

SEQ ID NO: 28828 - protein, 226 aa, unidentified
  source 1..226: note = Edwardsbacteria bacterium
  REGION 1..226: note = tr|A0A1F5RCI5|A0A1F5RCI5_9BACT 7-carboxy-7-deazaguanine synthase OS=Candidatus Edwardsbacteria bacterium GWF2_54_11 OX=1817851 GN=queE; PE = 3 SV=1
MKPTAKITEIFHSLQGEGIYLGDPTTFVRLAGCNLDCSYCDTPQAKDDGKATEMNVSEVLAKISAVTQPGQFVSFTGGEPLLQSGSLSAIIPVLKEKKFITYLETNGTLPRELAPLISGIEVISMDIKPPSACGEDLWDVQREFLTIAKEKAFVKMVVCDNTVPGEVERAAKMIADIDKKIIFILQPAEGRSAPDIQAVRRYQGLAGQFLTQVSIIRQMHKIWQIR

SEQ ID NO: 28829 - protein, 226 aa, unidentified; identical to SEQ ID NO: 28828
  source 1..226: note = Edwardsbacteria bacterium
  REGION 1..226: note = tr|A0A3D0J7C7|A0A3D0J7C7_9BACT 7-carboxy-7-deazaguanine synthase OS=Candidatus Edwardsbacteria bacterium OX=2053551 GN=queE PE=3 SV=1

SEQ ID NO: 28830 - protein, 221 aa, unidentified
  source 1..221: note = Eisenbacteria bacterium
  REGION 1..221: note = tr|A0A1F5RN12|A0A1F5RN12_9BACT 7-carboxy-7-deazaguanine synthase OS=Candidatus Eisenbacteria bacterium RBG_16_71_46 OX=1817856 GN=queE; PE = 3 SV=1
MTDTLRISEVFLSIQGEGPSAGTPAHFVRLQGCDVGCRWCDTKYSWEFGGGREATPAAVIDEALALGAAPLLVVTGGEPLEHPGIAALLERGLAGWPRVEVETSGVAPPPLSHARLAWNVSPKLPAATGRWADTWRHTAAWLAEPNATFKIVVGDPPDPDDARRLVAEHRLPSGRVMLMPEGLTDEAVRRHALALAELCLREGFRLSPRLHVWMWGVRRGV

SEQ ID NO: 28831 - protein, 228 aa, unidentified
  source 1..228: note = Eisenbacteria bacterium
  REGION 1..228: note = tr|A0A538TNN9|A0A538TNN9_9BACT 7-carboxy-7-deazaguanine synthase OS=Candidatus Eisenbacteria bacterium OX=2212470 GN=queE PE=3 SV=1
MERLPSFRVNEIFLSVQGEGLHVGERTVFVRFYGCPLHCVWCDQPEALTHTGVGRFEEMEPESVRGAVVGHPSTRRVCLTGGEPVIAPKASLLWLLRELKAAGYWISIETSGARVVEELFEWIDFWTVSPKGRSAETFDGDPVEQQVTRLRRFLSVPPEKRQFKFVIQDERDVEDAIAVLDALGYVGAVVLQPEHARGSGKALFESWPWDRYPGARLIPQTHKLSGLH

SEQ ID NO: 28832 - protein, 222 aa, unidentified
  source 1..222: note = Electronema sp.
  REGION 1..222: note = tr|A0A521G272|A0A521G272_9DELT 7-carboxy-7-deazaguanine synthase OS=Candidatus Electronema sp. GS OX=2005002 GN=queE PE=3 SV=1
MTDTLHISELFYSIQGESTRTGLPCAFVRLCGCNLRCTYCDSSYTWDEEGRRMSVAEVCAWLAQYPGVLVEITGGEPLLHEAVYPLMQELLAQGRAVLLETSGSLSIARVPAAVGVILDIKCPDSGMIEKNDWGNLALLQHRKAVGSTDEIKFVLSSEKDVTWAVQIVREQCLTQLAPVLFSPVMNKLSPARLAAMILPEQLPVRLQLQLHTQIWPRLNRGV

SEQ ID NO: 28833 - protein, 224 aa, unidentified
  source 1..224: note = Electrothrix aarhusiensis
  REGION 1..224: note = tr|A0A3S3R3P6|A0A3S3R3P6_9DELT 7-carboxy-7-deazaguanine synthase OS=Candidatus Electrothrix aarhusiensis OX=1859131 GN=queE PE=3 SV=1
MPDSGSLLVSELFYSIQGESTRAGLPCAFVRLCVCNLRCSYCDSRYTWEEEGRVMSIEQVCTWLEDFPGALVEITGGEPLLQEAVYPLLQKLIAGGQEALLETGGSLSIERVPVEVGIILDIKSPDSGMMDRNHWPNIALLEQRQKAGSRDEIKFVLCSPADVAWAVDIVRQYKLTELVPVLFSPVIDRLSPAILADLILQEQLPIKLQLQLHTRIWPDAHRGV

SEQ ID NO: 28834 - protein, 224 aa, unidentified
  source 1..224: note = Electrothrix communis
  REGION 1..224: note = tr|A0A3S3UDY2|A0A3S3UDY2_9DELT 7-carboxy-7-deazaguanine synthase OS=Candidatus Electrothrix communis OX=1859133 GN=queE PE=3 SV=1
MPDSDSLLVSELFYSIQGESTRAGLPCAFVRLCGCNLRCSYCDSRYTWEEEGNVMSIGQVFAWLEDFPGTLVEITGGEPLLQETVYPLLQKLTASGREVLLETGGSLSIERVPVEVGIILDVKAPDSGMTEQNHWPNLALLEQRQQAGSHDEVKFVLCSPEDVAWAVDIVRQHKLTELVPVIFSPVIGHLPPSLLADLVLQKQLPIRLQLQLHTQIWPDAPRGV

SEQ ID NO: 28835 - protein, 218 aa, unidentified
  source 1..218: note = Endobugula sertula
  REGION 1..218: note = tr|A0A1D2QLY7|A0A1D2QLY7_9GAMM 7-carboxy-7-deazaguanine synthase OS=Candidatus Endobugula sertula OX=62101 GN=queE PE=3 SV=1
MTKNSYSLKVTEIFLSIQGEAQTIGRPTVFIRLTGCPLRCHYCDSEYAFFGGERMTIEDIVLKVATYGVQYVCVTGGEPLAQANVKVLLTSLCNQQYNVSLETSGAMPISGIDPRVSIVMDLKTPASGEVEKNDYSNCALLKPADQVKFVICDRQDYEWALFKLNEYQLVDKVAEVLFSPSYGQMKSTDLVDWILEDRLPVRFQMQLHKALWGDKPGS

SEQ ID NO: 28836 - protein, 212 aa, unidentified
  source 1..212: note = Endolissoclinum sp.
  REGION 1..212: note = tr|A0A1Z9XYA2|A0A1Z9XYA2_9PROT 7-carboxy-7-deazaguanine synthase OS=Candidatus Endolissoclinum sp. TMED26 OX=1986636 GN=queE PE=3 SV=1
MTFSVKETFYTLQGEGANAGRPAVFCRFSGCNLWSGLERDRAQAICRFCDTDFVGTNGAGGGKFRTAKDLAAHVQSFWPAAASAGAKLVVCTGGEPALQMTPELVAALHDFDFEIAIETNGTLALPDDIDWVCVSPKAGTELAVRSGQELKVIYPQAGLDLQQLITLPFRHHLLQPMDGASRQESEAASVQACLDDPRWRLSVQTHKYLGFA

SEQ ID NO: 28837 - protein, 295 aa, unidentified
  source 1..295: note = Endolissoclinum sp.
  REGION 1..295: note = tr|A0A1Z8SQC0|A0A1Z8SQC0_9PROT 7-carboxy-7-deazaguanine synthase OS=Candidatus Endolissoclinum sp. TMED37 OX=1986638 GN=queE PE=3 SV=1
MNVKYSEIFHSFQGEAELAGKPSVWLRFFGCNLECNGFGQTNPADENTWDLPYKNLDVDKFKSVEELPVFSKGCDSSYSWSSKYKHLCPSVSVKEVCDKLEEQLPTGKFAPTLSGQTDTQLCFTGGEPMLRQKQIIAILEELDSRGNLPQTVTIETNATKPLSNELKAYIEAYTCRDDNRWHWAMSPKILHTSGEVDAVKPDVIGQYWDVEGNVSAILKFVCNGSKESWDEIEKALDDIDTVIYSSEFPDVWIMPAGATKEAQEDVVSIVQETMRRGYQVATRNHAYVFGNQIGT

SEQ ID NO: 28838 - protein, 232 aa, unidentified
  source 1..232: note = Enterovibrio luxaltus
  REGION 1..232: note = tr|A0A291BB73|A0A291BB73_9GAMM 7-carboxy-7-deazaguanine synthase OS=Candidatus Enterovibrio luxaltus OX=1927128 GN=queE PE=3 SV=1
MVTFKFDCLSCMYNVNDIFETIQGEGTFTGIPAIFVRLQGCPVGCPWCDTKQTWNTLPSDERDFSTVVAKTDYSQLWTKVDTQKILEHLQANYTAKHVVITGGEPCIFDLQPLIYMLEAAGYRCQIETSGTYHVSVTDNTWVTVSPKINMRGKLPVLNTVLIRANEIKYTVGTVTDIEKLDRLLKGVNLRPDAEIALQPISQKSRTTALCIETCIKRNWRLSIQVHKYLDIT

SEQ ID NO: 28839 - protein, 199 aa, unidentified
  source 1..199: note = Enterovibrio escacola
  REGION 1..199: note = tr|A0A2A5T108|A0A2A5T108_9GAMM 7-carboxy-7-deazaguanine synthase OS=Candidatus Enterovibrio escacola OX=1927127 GN=queE PE=3 SV=1
MFIRLQGCPVGCPWCDTRHTWGALPTDERNFETIISKTNDNSLWASINADIIALYVEQNYSSKHVVISGGEPCIYNLQPLTWRLESSGYRCQIETSGTYPVKSSKDTWVTVSPKINMRGKLPVLKCVLQRANEIKHPVATESDIEKLDTLLDGITLLDSIEITLQPINQKSRATALCIKTCIKRNWRLSIQIHKYLNII

SEQ ID NO: 28840 - protein, 246 aa, unidentified
  source 1..246: note = Eremiobacter sp.
  REGION 1..246: note = tr|A0A2W5XSB7|A0A2W5XSB7_9BACT 7-carboxy-7-deazaguanine synthase OS=Candidatus Eremiobacter sp. RRmetagenome_bin22 OX=2599629 GN=queE; PE = 3 SV=1
MPSAAGAGRLGRRGEKQRMITQTATLMVNETFVSIQGEGERIGAPALFIRLDKCPLRCSWCDTPYALAGDAGVERSVEELRVAAGSLRNVVITGGEPLLQDIRPLVAVLADRHVTVETSGTIFADLPAVSLFSISPKVGTSGYSPKLSVLRKYCATAAARMQLKFVIGEPGDFEEAVACIRQLGGAPLAMPIIFQPESTRAGSSASYLNFLEQLTQAVLARAELRPYDVRVLPQLHYLLWNGAPGR

SEQ ID NO: 28841 - protein, 191 aa, unidentified
  source 1..191: note = Eremiobacteraeota bacterium
  REGION 1..191: note = tr|A0A2W5X7J0|A0A2W5X7J0_9BACT 7-carboxy-7-deazaguanine synthase OS=Candidatus Eremiobacteraeota bacterium OX=2052317 GN=queE PE=3 SV=1
MLQVNEIFYSFQGEGTHTGIPAVFVRLAGCNLSCRFCDTDYSLKALLGVDDVLAQVQTLSPECPTVILTGGEPLAQTQTPDLIDALARNGRRVHIESNGTVPVPLSEDVWLTVSPKERLHSSMAARANEIKLIVDERVPLEWLDQFPLATPAFLQPENNKPKNVALAMAAIAANPKRLRLSVQTHKLVGAR

SEQ ID NO: 28842 - protein, 223 aa, unidentified
  source 1..223: note = Erwinia haradaeae
  REGION 1..223: note = tr|A0A451DIG9|A0A451DIG9_9GAMM 7-carboxy-7-deazaguanine synthase OS=Candidatus Erwinia haradaeae OX=1922217 GN=queE PE=3 SV=1
MQYPINAIFQTLQGEGVYVGVPSIFIRLQGCPVGCQWCDTKYTWNKLSHKEISWESIPLKISNNNSWGLADTTEILDTITNLGWTAKHVVITGGEPCLYDLRPLSIALQATGLTCQIETSGTHAILCSMETWVTVSPKIKKNKNHSLLHQALKRADEIKHPVGRQRDIDALVNCIKTITDEKKRIILLQPINHITSAIQLCIKTCIQKNWRLSIQTHKYINIP

SEQ ID NO: 28843 - protein, 223 aa, unidentified
  source 1..223: note = Erwinia dacicola
  REGION 1..223: note = tr|A0A1E7Z406|A0A1E7Z406_9GAMM 7-carboxy-7-deazaguanine synthase OS=Candidatus Erwinia dacicola OX=252393 GN=queE PE=3 SV=1
MQYPINEMFQTLQGEGVYTGVPAIFIRLQGCPVGCSWCDTKHTWDKLTDRETSLGEILLKTVKTDAWGAADAAALLGVIRQHGWTAKHVVITGGEPCIHDLTPLTVALQDDGFSCQIETSGTHEVLCTPETWVTVSPKVNMCGGYDVLNQALILADEVKHPVARQRDVDALDDLLATLSDEKTRIIVLQPISQKDDATKLCIETCIARNWRLSMQAHKYLNIA

SEQ ID NO: 28844 - protein, 199 aa, unidentified
  source 1..199: note = Fermentibacteria bacterium
  REGION 1..199: note = tr|A0A496U997|A0A496U997_9BACT 7-carboxy-7-deazaguanine synthase OS=Candidatus Fermentibacteria bacterium OX=2044591 GN=queE PE=3 SV=1
MADYRVKEMLLTLQGEGAKTGTAVVLLRFEGCNLKCSFCDTDFTGTDGEGGGVFATAQELADAVQKKWRSSLPLNVLCTGGEPLMQLDEKLIKEFHARGYNILLETNGTFVLPENPDWVCISPKAGTVTVLNAGDEIKIVFPQEGIDPRQYENMNFTHFWIQPMYNADYKQNLKASIDYCIAHPKWRLSLQTHRFTGMP

SEQ ID NO: 28845 - protein, 201 aa, unidentified
  source 1..201: note = Fermentibacteria bacterium
  REGION 1..201: note = tr|A0A2G6LVC7|A0A2G6LVC7_9BACT 7-carboxy-7-deazaguanine synthase OS=Candidatus Fermentibacteria bacterium OX=2044591 GN=queE PE=3 SV=1
MCEKNYRIKEMYPTLQGEGYYTGRTVVLLRFQECNLSCSFCDTDFAGTDGPGGGVFSSPVELAEAVAEKWPGKTGIPAVLCTGGEPLLQLDEPLVEAFHSLGFQVLLETNGTFPVPGGVDWVCVSPKSDRCLLREGDELKIVWPSEAVDPDTWAETLFGHFWLQPKYDESYEYNLRLCIDRCLEDPRWRLSLQTHRYIGMP

SEQ ID NO: 28846 - protein, 209 aa, unidentified
  source 1..209: note = Filomicrobium marinum
  REGION 1..209: note = tr|A0A0D6JIW9|A0A0D6JIW9_9RHIZ 7-carboxy-7-deazaguanine synthase OS=Candidatus Filomicrobium marinum OX=1608628 GN=queE PE=3 SV=1
MYHVKEIFLTLQGEGANAGRAAVFCRFAGCNLWSGREVDRSEATCQFCDTDFVGTDGTGGGRFGTAPDLASAILSNWAGGENERFVVLTGGEPMLQVDAALIDELHRLCFEVAIETNGTLPVPDIVDWICVSPKSGAKLQQIHGHELKLVYPQPGLDPEDLAYLDFGHRYVQPMDGPDLAANTAAAVAYCRKHPEWRLSLQTHKLIGIA

SEQ ID NO: 28847 - protein, 231 aa, unidentified
  source 1..231: note = Firestonebacteria bacterium
  REGION 1..231: note = tr|A0A1F5V2G4|A0A1F5V2G4_9BACT 7-carboxy-7-deazaguanine synthase OS=Candidatus Firestonebacteria bacterium RIFOXYC2_FULL_39_67 OX=1817861; GN = queE PE=3 SV=1
MSKTGFLDEIFVSYQGEGVFAGVRQVFIRFSLCNLKCSYCDTAAAGEIKGSFKAFGENFSNPVKALEVIKIVKRFKGLVHSVSLTGGEPLVQREFAVLLAAGLKRAGFKVYLETNGTLLQNLKSILPYTDVVAMDIKLPSSSGQKGLWEKHSKFIKAAEKKAFVKLVISEDTKPAEIIRAVKMAKRAIVILQPEYKSSIKKVVKLINSSRVFELGADVRLIPQIHRFIGIK

SEQ ID NO: 28848 - protein, 232 aa, unidentified
  source 1..232: note = Firestonebacteria bacterium
  REGION 1..232: note = tr|A0A1F5UC85|A0A1F5UC85_9BACT 7-carboxy-7-deazaguanine synthase OS=Candidatus Firestonebacteria bacterium RIFOXYA2_FULL_40_8 OX=1817859; GN = queE PE=3 SV=1
MNKKGFLDEIFVSWQGEGAFAGVRQIFIRFALCNLECSYCDTAAAGEIKESFSAFGKRKINNPVSIDDVLKIVKGFNSHVHSVSLTGGEPLVQGEFAALLAKGLKKSGFKVYLETNGTLSKHLKNILPFTDVVAMDIKLPSASGQKGLWKKHIKFLKLAGKKAFVKIVISDKTKPGDITKAVRLAKNRIIILQPEYRSNIRKVIKLIDKCRNFKSGVDIRLMPQIHRYIGIR

SEQ ID NO: 28849 - protein, 211 aa, unidentified
  source 1..211: note = Fischerbacteria bacterium
  REGION 1..211: note = tr|A0A1F5V5U6|A0A1F5V5U6_9BACT 7-carboxy-7-deazaguanine synthase OS=Candidatus Fischerbacteria bacterium RBG_13_37_8 OX=1817863 GN=queE; PE = 3 SV=1
MKEVLLVNDIFYSIQGESSFAGSRCIFIRLAGCNVKCEWCDTTYAYNEGCELTIGDILIKVGAWDCDLVEVTGGEPLLQEHSIQLMEELVAKGYRVLLETSGTESIMNVPQKVVIIMDIKCPSSGAVDKNKEDNIALLKSNDEIKFVIADRNDYEWAKEKVRSLREGGCTNVILFSPVRDCMNSNELALWILEDNLPVRLQLQLHKLAGMK

SEQ ID NO: 28850 - protein, 231 aa, unidentified
  source 1..231: note = Fokinia solitaria
  REGION 1..231: note = tr|A0A2U8BSJ2|A0A2U8BSJ2_9RICK 7-carboxy-7-deazaguanine synthase OS=Candidatus Fokinia solitaria OX=1802984 GN=queE PE=3 SV=1
MFGNNEKLNIENRDGKHLKVTEIFHTIQGEGPNAGRVAIFIRLSGCNLACSFCDTQFDKYVQLAIQDILEKVLEEKTKMYSDTEIQLNTHRILAVITGGEPFRQNIGILCQLLEENGFEVQIETNGTLYFEVPHNTTIVCSPKIVNNTYFPIRHDVLQKTIALKFIISSHLEGYGDIQEVGQQTFNIPVYVQPMDEYDQEKNSKNIDQAIKVAIKHNAIISMQLHKIMNIR

SEQ ID NO: 28851 - protein, 145 aa, unidentified
  source 1..145: note = Frackibacter sp.
  REGION 1..145: note = tr|A0A139CK96|A0A139CK96_9FIRM Queuosine biosynthesis protein QueE (Fragment) OS=Candidatus Frackibacter sp. T328-2 OX=1785949 GN=AWU54_1554 PE=3 SV=1
MVNNIFSSIQGESIYSGFPTTFIRFTGCNLKCDYCDTTYAYEEGEELNTEAIMEQVEKLNNNYVCLTGGEPLLQEDVQQLINELTNYGYQISIETNGTVALDQFNLEEVKVVMDLKLPSSGEYRSELNVIDNNIRTLNNKDDLKF

SEQ ID NO: 28852 - protein, 217 aa, unidentified
  source 1..217: note = Frackibacter sp.
  REGION 1..217: note = tr|A0A1H7ZWL4|A0A1H7ZWL4_9FIRM 7-carboxy-7-deazaguanine synthase OS=Candidatus Frackibacter sp. WG12 OX=2017977 GN=queE PE=3 SV=1
MLVNNIFSSIQGESIYSGFPTTFIRFTGCNLKCDYCDTTYAYEEGEELNTEAIMEQVEKLNNNYVCLTGGEPLLQEDVQQLINELTNYGYQISIETNGTVALDQFNLEEVKVVMDLKLPSSGEYRSELNVIDNNIRTLNNKDDLKFVTGSREDFQLARDLVIEKELQEKINIIFSPVFGQLSPEILVEWLVEETKLNQCRLQLQLHKVIWDEETKGV

SEQ ID NO: 28853 - protein, 227 aa, unidentified
  source 1..227: note = Fukatsuia symbiotica
  REGION 1..227: note = tr|A0A2U8I8G9|A0A2U8I8G9_9GAMM 7-carboxy-7-deazaguanine synthase OS=Candidatus Fukatsuia symbiotica OX=1878942 GN=queE PE=3 SV=1
MLYPINEIFQSLQGEGYFTNVPAIFIRLQGCPVGCSWCDTKHTWEKKNDREVDLQRIMVKNSVSDDWSNANELQLLNVLQEQGYSARHVIITGGEPCIYDLVPLTAELEKNGYRCQIETSGTHEVHCSAATWVTVSAKVDMRGGLKVLEQALQRADEIKHPVARERDIEQLDELLAKLHDDKKRIIALQPIGKENKQTDGATQLCIKTCIARNWRLSVQMHKYLNIA

SEQ ID NO: 28854 - protein, 219 aa, unidentified
  source 1..219: note = Gallionella acididurans
  REGION 1..219: note = tr|A0A139BXC4|A0A139BXC4_9PROT 7-carboxy-7-deazaguanine synthase OS=Candidatus Gallionella acididurans OX=1796491 GN=queE PE=3 SV=1
MPHASMDVQLRITEIFHSLQGETSRVGLPTVFIRLTGCPLRCTYCDTAYAFSGGKNTSLTEILRQVVQFSPQYVTVTGGEPLAQKNCLPLLRALCDAGYTVSLETGGALDIGSVDARVMRVVDIKTPASGELEKNRWENLALLTGHDEIKFVLCDENDYQWAKKILQQHHLNEKCPVLFSPAHGMLNATQLADWILRDNLPVRMQVQLHKLLWNNEPGH

SEQ ID NO: 28855 - protein, 226 aa, unidentified
  source 1..226: note = Gastranaerophilales bacterium
  REGION 1..226: note = tr|A0A292RCQ7|A0A292RCQ7_9BACT 7-carboxy-7-deazaguanine synthase OS=Candidatus Gastranaerophilales bacterium HUM_9 OX=1916320 GN=queE; PE = 3 SV=1
MNNKAKIKEIFSSIQGEGLLVGVEQIFIRFCKCNLACKYCDTDFSSDYKEYSPQELADYLRNNFDFNKINSISLTGGEPLLWIDFLAEFLPLVDLPIYLETNGTIIKDVEKIIDSIDYVSADIKLPSCSGLINSFEKHDKFFETFCNSKATVFAKIVFDEKITDEEIKLATDLSKKYGFEIILQPKMIGDKMSINSAFIRKIFYKFLEYTKNVRVIPQVHKFLGVE

SEQ ID NO: 28856 - protein, 227 aa, unidentified
  source 1..227: note = Gastranaerophilales bacterium
  REGION 1..227: note = tr|A0A292SQ40|A0A292SQ40_9BACT 7-carboxy-7-deazaguanine synthase OS=Candidatus Gastranaerophilales bacterium HUM_21 OX=1916319 GN=queE; PE = 3 SV=1
MTRTAKVAEIFDSVQGEGPYIGYRQLFVRFCGCNLLCDYCDTEFDKGDDYTVAQLVEKIKSFKLEPLHSVSLTGGEPLLQYEFLKEFLPSLKQLGLKIYLETNGTMDRALDKVIEYIDIVSMDFKLDSSAKIGDLYSKHDAFLEICKKHSKDTFAKLVFDETIRDFEIDECVKLAQKYKIPVILQPKMDGDKIKVSHDKIVETFNKFSEKYHDTRLIGQVHKFFSIR

SEQ ID NO: 28857 - protein, 224 aa, unidentified
  source 1..224: note = Gastranaerophilus sp.
  REGION 1..224: note = tr|A0A2L2X5G7|A0A2L2X5G7_9BACT 7-carboxy-7-deazaguanine synthase OS=Candidatus Gastranaerophilus sp. (ex Termes propinquus) OX=2029980; GN = queE PE=3 SV=1
MLNKAQIKEIFYGIQGEGPHVGEKHLFVRFCGCNLACAYCDTDYSQVGALEYTIDELYDAISPLKPAVLALTGGEPLLWGDFLASFFEKYGSKLGKIYLETNGTLSQELEKIADYVDIISADIKLKSATDEVADFADVVKFLEQATDREHVKCFVKIVFDKNITEGEISSVSLLAQKYKLPIVLQPKMPLELEGSSLEEIFEKFYKIYPNVRLVPQMHKFLNLK

SEQ ID NO: 28858 - protein, 221 aa, unidentified
  source 1..221: note = Glassbacteria bacterium
  REGION 1..221: note = tr|A0A1F5YUC8|A0A1F5YUC8_9BACT 7-carboxy-7-deazaguanine synthase OS=Candidatus Glassbacteria bacterium RIFCSPLOWO2_12_FULL_58_11; OX = 1817867 GN=queE PE=3 SV=1
MSQIKGPQLLTVCETFVSLAGESGWQGLVSTFIRFSGCDVDCAWCDTAYARQEKGTPVSIGDIMSICRANRIRKVVLTGGEPLLQEELPELCRALLEEGFDVQVETSGTRLCDKLDSLVMKVLDIKPPSAKTEKGFHWGNLDLLGKRDEIKFVLADRKDYDWSLSIMRKCKLESRCKVLFSTVAGSLDPAELAGWMIEDGLSVRLQLQLHKLLWPSETRGK

SEQ ID NO: 28859 - protein, 210 aa, unidentified
  source 1..210: note = Glomeribacter gigasporarum
  REGION 1..210: note = tr|G2JAM3|G2JAM3_9BURK 7-carboxy-7-deazaguanine synthase OS=Candidatus Glomeribacter gigasporarum BEG34; OX = 1070319 GN=queE PE=3 SV=1
MTYAVKEIFYTLQGEGANAGRPAVFCRFAGCNLWSGREEDRAGAMCRFCDTDFVGLDGENGGKYRTADALAAMIAALWPPHEARRFVVCTGGEPMLQLDNALIDALHRARFTVAIETNGTLPVLSSIDWICVSPKADTQLIVTQGNELKVVIPQDNQRLAEYEALDFAHFFVQPMDGPSRNINTRLAIDWCKRHPLWRLSIQTHKHLGIP

SEQ ID NO: 28860 - protein, 209 aa, unidentified
  source 1..209: note = Goldbacteria bacterium
  REGION 1..209: note = tr|A0A2N1W684|A0A2N1W684_9BACT 7-carboxy-7-deazaguanine synthase OS=Candidatus Goldbacteria bacterium HGW-Goldbacteria-1 OX=2013807; GN = queE PE=3 SV=1
MKKEKQLFVCELFEDLEGEGRFQGYPTFFIRLSECNLRCNWCDTKESYAKGKPYGITKLAKMASESDCCNISITGGEPLLQKSGVKVLIKALRKKCPGKKITVETNGSISVAGLNADNVSMDIKLLSSGVSEKMMLSNLKVLKPKDQVKLVAGSLADLRYAQAVLKKHRTKAEIIVQPVFGRIKFSAIREFILRRGLKWRAMVQLHKMK

SEQ ID NO: 28861 - protein, 254 aa, unidentified
  source 1..254: note = Gottesmanbacteria bacterium
  REGION 1..254: note = tr|A0A2H0NHC3|A0A2H0NHC3_9BACT Radical_SAM domain-containing protein (Fragment) OS=Candidatus Gottesmanbacteria bacterium CG11_big_fil_rev_8_21_14_0_20_37_11 OX=1974 575; GN = COV53_03970 PE=3 SV=1
MKIYRPTVLDKQRIKPIPNMLKVSGDQVFATFQGEGITAGQPAVFLRLHYCNLACSWCDTKYTWDKTRKEFWQEPIDWSYPEAVTKIKAAWLQKFGLKTPDSKKRLVITGGEPLLQQAKIVKLLQFLPNWRVEIETNGTIIPLAELSNCQINCSPKLENSGNLLSLRFKSEVLKQINSLPNSWFKFVVVKAKDLEEIDEIVTCCALNPEKILIMPEGYTVETISEHLIQVKTEVQKRKWRVIQRNQIIWYGNKR

SEQ ID NO: 28862 - protein, 256 aa, unidentified
  source 1..256: note = Gottesmanbacteria bacterium
  REGION 1..256: note = tr|A0A1F6AVM3|A0A1F6AVM3_9BACT 7-carboxy-7-deazaguanine synthase OS=Candidatus Gottesmanbacteria bacterium RIFCSPLOWO2_01_FULL_46_21; OX = 1798393 GN=queE PE=3 SV=1
MELYKATSEDKLFLRPKPDMLKVSGDQVFATLQGEGVTAGKPAVFLRLHFCNLACSWCDTKYTWDQNREEFWREPVDWSFSEATTNIGKAWTEKFGFEVPSFEKRLVVTGGEPLLQQKKIVSLLKLLPDWNIEIETNGTITPLPELQGCQINCSPKLENSGNLKNRRYRPETLKAINAMQNSWFKFVVTSEGDVTEIEEIVKECNLNPKKILIMPEGTTLNATTAHLKLVEEVVRRKAWSVTKRNQLVWFGDKRRT

SEQ ID NO: 28863 - protein, 224 aa, unidentified
  source 1..224: note = Gullanella endobia
  REGION 1..224: note = tr|A0A143WQV2|A0A143WQV2_9ENTR 7-carboxy-7-deazaguanine synthase OS=Candidatus Gullanella endobia OX=1070130 GN=queE PE=3 SV=1
MQYPLNEIFQTLQGEGYFTGVPAIFIRLQGCPVGCSWCDTKYTWKRNENNQVTLKEILSKTDSSNCWASLTVEEIIMLIAKKNWTARHIVITGGEPCLYNLIPLTCSLENQGFSCQIETSGTKEIYCTQKTWVTVSPKINMCKKLSISNQALNRSDEIKHPVARKCDIEKLDILLSTLKNDIKKRIISLQPISQKKRATCLCIETCIARNWRFSMQTHKYLNIA

SEQ ID NO: 28864 - protein, 223 aa, unidentified
  source 1..223: note = Hamiltonella defensa
  REGION 1..223: note = tr|A0A249DY35|A0A249DY35_9ENTR 7-carboxy-7-deazaguanine synthase OS=Candidatus Hamiltonella defensa (Bemisia tabaci) OX=672795 GN=queE; PE = 3 SV=1
MLYPINEIFQTLQGEGHFMGTPAIFIRLQGCPVACSWCDTKHTWEKKNEQQVDLFSILQKKTANDFWSHSNEQELLAVIRAQGYQASHVVITGGEPCLHDLTPLTQLLEQEGYFCQIETSGTHLVHCTPSCWVTVSPKINMRGGFKIQHQALERADELKHVIARKRDIETLDALIGNLKDRKKRIISLQPVSQKKSATQLCIDTCIERNWRLSVQMHKYLGIE

SEQ ID NO: 28865 - protein, 223 aa, unidentified
  source 1..223: note = Hamiltonella defensa
  REGION 1..223: note = tr|A0A2D3T015|A0A2D3T015_9ENTR 7-carboxy-7-deazaguanine synthase OS=Candidatus Hamiltonella defensa OX=138072 GN=queE PE=3 SV=1
MLYPINEIFQTLQGEGHFMGTPAIFIRLQGCPVGCSWCDTKHTWEKKNEQQVDLFSILQKKTANDFWSHSGEQNLLAVIRAQGYQASHVVITGGEPCLHDLTPLTQLLEQEGYFCQIETSGTHLVHCTPSCWVTVSPKINMRGGFKIQHQALERADELKHVVARKRDIETLDALIGNLKDRKKRIISLQPVSQKKSATQLCIDTCIERNWRLSVQMHKYLGIE

SEQ ID NO: 28866 - protein, 309 aa, unidentified
  source 1..309: note = Hydrogenedentes bacterium
  REGION 1..309: note = tr|A0A3M2FF05|A0A3M2FF05_9BACT 7-carboxy-7-deazaguanine synthase OS=Candidatus Hydrogenedentes bacterium OX=2030809 GN=queE PE=3 SV=1
MAGDAAKNGHLLPDRVGPLMGETPLREPKGGVLYEPVFAGEMPTLPGWPVYRNLTLSTICHAPTVAFRWSLLYNPALMKKKDNTILIAELYTSLQGETRFVGLPSFFIRTAGCPLRCSWCDSPHAFSGGKRMTIREIVAQSLSGPEFVTVTGGEPLVQGAVPRLLSRLIEAKKSVLLETSGAFSIADLPPEIIVILDWKGQSSGEADRMLKDNLSRLRPHDELKFVIATEEDYRDARELLRSESLHRRCHVTFSWAFPPPDPHPLKPFPKEQRRISLAELAGRILEDRLPVRMIPQVHKFVWPEEGSGR

SEQ ID NO: 28867 - protein, 216 aa, unidentified
  source 1..216: note = Hydrogenedentes bacterium
  REGION 1..216: note = tr|A0A2A5DLX7|A0A2A5DLX7_9BACT 7-carboxy-7-deazaguanine synthase OS=Candidatus Hydrogenedentes bacterium OX=2030809 GN=queE PE=3 SV=1
MDTTLLITETYKSIQGESTWVGLPCTFIRLARCNLRCRWCDTTYSFTGGDKRSIKTLLDECNDYGCSLVEITGGEPLAQAECPTLAQALIDAGYTVLVETSGSLPINVLPPECIRIMDLKCPGSGECDKNDWSNIEALTDRDEVKFVLASREDYEWARDVIRKHSLADRCQDILMSPVFGDIDPKDIVDWILEDALPVRFQLQLHKFVWPPDQKGV

SEQ ID NO: 28868 - protein, 228 aa, unidentified
  source 1..228: note = Hydrothermae bacterium
  REGION 1..228: note = tr|A0A496U4X9|A0A496U4X9_9BACT 7-carboxy-7-deazaguanine synthase OS=Candidatus Hydrothermae bacterium OX=2250085 GN=queE PE=3 SV=1
MLLISEIFSSIQGEGPRSGVPSIFLRLGGCNLRCRYCDTAYSSFPEYRDQWLKLSTQKVVDKILKIKKREKNLVITGGEPLLQENALFLMLKIIHAEFATIEVETNGTIKPSRLLHIGSKLHFNVSPKLSNSGIRENLRLNPDALFFFSSMPGTIFKFVVKNRKDVNEVEEIIKKYGIRRENVYLMPLAKTKIALSRIASLIANEAIRIGVNYSDRLQIRLWEGERGK

SEQ ID NO: 28869 - protein, 288 aa, unidentified
  source 1..288: note = Izimaplasma sp.
  REGION 1..288: note = tr|A0A094IFI2|A0A094IFI2_9BACT 7-carboxy-7-deazaguanine synthase OS=Candidatus Izimaplasma sp. HR2 OX=1541960 GN=queE PE=4 SV=1
MEAMLYKPLTKLNVKCLVCRHYCVLKDGQRGICGVRENKAGTMHVLNYGKTVAASIDPIEKKPIHNYMKKSNTYSFAAVGCNMDCPWCQNYLISQSPKPYKHIEGMYITPEEHVYKAVHYRCPSISYTYSEPTIFLEYAYDTMKLAKAEGLKNIWVTNGYMSKETLDLVLPFLDAVNVDYKGQNGLYEKYSLGNAQAILENMRVMKEAGVHLEVTTLVIPGLNDKPEDILEIANDLKTYVGVDTPWHISRFFPAYKMKDIQVTPKDTLLIAKKIGQDVGFKNIYLGNI

SEQ ID NO: 28870 - protein, 211 aa, unidentified
  source 1..211: note = Jettenia caeni
  REGION 1..211: note = tr|I3INJ2|I3INJ2_9BACT 7-carboxy-7-deazaguanine synthase OS=Candidatus Jettenia caeni OX=247490 GN=queE; PE = 3 SV=1
MKINEIFKSIQGETSYAGLPCTFIRITGCNLRCRYCDTTYAYEDGVEMSMNSILESIHDFSSNLVCITGGEPLSNEDTPLLIQRLLDKNYTVLVETNGSYDIRTIPEKAVTIMDIKCPGSTMSHTMHWQNIAYLRQSDEVKFVLASRDDYKWTKDVIQKYNLSEIAKVLLGTVFNTIAPRSVVQWILEDNLKVRFQLQLHKYIWEPHTRGV

SEQ ID NO: 28871 - protein, 211 aa, unidentified
  source 1..211: note = Jettenia ecosi
  REGION 1..211: note = tr|A0A533QA43|A0A533QA43_9BACT 7-carboxy-7-deazaguanine synthase OS=Candidatus Jettenia ecosi OX=2494326 GN=queE PE=3 SV=1
MKINEIFKSIQGETSYAGLPCAFIRITGCNLRCRYCDTTYAYEDGVEMSMNSILESIHDFSSNLVCITGGEPLSNEDTPLLIQRLLDKNYTVLVETNGSYDIRTIPEKAVKIMDIKCPGSTMSHTMHWQNIACLTQSDEVKFVLASRDDYEWAKDVIQKYNLSGIAKVLLGTVFNTISPRSVVQWILEDNLKVRFQLQLHKYIWEPHTRGV

SEQ ID NO: 28872 - protein, 236 aa, unidentified
  source 1..236: note = Kaiserbacteria bacterium
  REGION 1..236: note = tr|A0A2M7FC53|A0A2M7FC53_9BACT 7-carboxy-7-deazaguanine synthase OS=Candidatus Kaiserbacteria bacterium CG17_big_fil_post_rev_8_21_14_2_50_51_7 OX=1974613 GN=queE; PE = 3 SV=1
MTELKVHSIFPSFNGEVCHAGQGSSAIFVRLAGCNLAAAGHPCLWCDTPDAQTDWHSLSLPIGEVLNTVLDLGERIRNVTITGGEPLAQDGTLVLVKSLLAVDKHVSIETNGTLSIEPYAFRCKDLHFVMDYKPPSAGEAVFDSFLEENLSYLGEDDFVKIVVLTDQDLFSLSEMLMKARVNTKAKIAVGVPFNNPVLAKAIVDEVIQWRLDVTLNFQLHKIITPTIEGAVQGAYN

SEQ ID NO: 28873 - protein, 234 aa, unidentified
  source 1..234: note = Kapabacteria sp.
  REGION 1..234: note = tr|A0A1M3KXT3|A0A1M3KXT3_9BACT 7-carboxy-7-deazaguanine synthase OS='Candidatus Kapabacteria' thiocyanatum OX=1895771 GN=queE PE=3 SV=1
MFVQPTREILPVDDPLTLGFNVNEIFYSIQGEGTRAGVPCTFVRLQGCKLRCVWCDTPYALDKRHRERSMTGADILAEIERIGCRFVEFTGGEPLEQINVFPLMALLCDKGYTVAVETGGHVDVSLLDRRIVRILDVKCPDSKMSSLNYWPNLDVLDANDEVKFVIASRDDYEWARDVVRKYALGERTAAVLFSCVFDAVPFVDLVNWILEDHLPVRFQLQVHKFVWDPQTRGV

SEQ ID NO: 28874 - protein, 241 aa, unidentified
  source 1..241: note = Kentron sp.
  REGION 1..241: note = tr|A0A450XJY7|A0A450XJY7_9GAMM 7-carboxy-7-deazaguanine synthase OS=Candidatus Kentron sp. MB OX=2138164 GN=queE PE=3 SV=1
MKQSTTEGRDQRPKRQPRPARATQDPRPLITEIFHSLQGETRTIGYPTAFIRFTGCPLRCAYCDTTYAFQGGRRISLPQILATIHPWQPRFVTVTGGEPLAQPACRPLITRLCDAGYQVSLETSGALDIALIDPRASIVMDLKTPGSGQEQSNHYPNLTRISPNDQIKFVLCDRHDYQWAKAKIAQFHLLQQCEVLFLPVQGKQGFDLPPADLADWILADRLPVRMQIQLHKHLWGDAPGR

SEQ ID NO: 28875 - protein, 208 aa, unidentified
  source 1..208: note = Kentron sp.
  REGION 1..208: note = tr|A0A450V5Z7|A0A450V5Z7_9GAMM 7-carboxy-7-deazaguanine synthase OS=Candidatus Kentron sp. H OX=2126337 GN=queE PE=3 SV=1
MGYPTLFVRLTGCPLRCRYCDTRYAFQGGRRMSLAEVLRAVRGITDPSGQPRFVTVTGGEPLAQPACRELLALLCEAGYRVSLETGGALDISGVDERVSIVMDIKTPGSGEMAANRPANLAALSHKDQVKFVICDRRDYEWARDRLAVSHIAARCEVLFLPVQGERESGQPPADALARELAEWILADRLPARLQIPLHKYLWGDVRGK

SEQ ID NO: 28876 - protein, 210 aa, unidentified
  source 1..210: note = Kinetoplastibacterium galatii
  REGION 1..210: note = tr|M1MAP5|M1MAP5_9PROT 7-carboxy-7-deazaguanine synthase OS=Candidatus Kinetoplastibacterium galatii TCC219 OX=1208921 GN=queE PE=3 SV=1
MTYSVKEIFKTLQGEGFYTGRAAVFCRFTGCNFWNGNDLDRINAVCKFCDTDFVGINGCNGGKFRSASLLAREISRIWGEEYFGRYVVLTGGEPLLQLDSALLSELHNNGFEVGIETNGSIIPPKNVDWICVSPKDLNRMILREGNELKLVFPQNDICPDNFVDMNFQHFYLQPMYSDYLALNIDLAVNYCKNNPKWRLSLQTHKYIGIP

SEQ ID NO: 28877 - protein, 210 aa, unidentified
  source 1..210: note = Kinetoplastibacterium desouzaii
  REGION 1..210: note = tr|M1LU49|M1LU49_9PROT 7-carboxy-7-deazaguanine synthase OS=Candidatus Kinetoplastibacterium desouzaii TCC079E OX=1208919 GN=queE PE=3 SV=1
MSYSVKEIFKSLQGEGFHTGRVAIFCRFSGCNLWNGKEYSKSSALCKFCDTDFVGTDGINGGKFKSADSLAQKILEEWGDGRDNRYVILTGGEPLLQVDIFLIEALHKINFTVAIETNGTIVPPNGIDWVCVSPKGSSNIILKEGNELKLVYPQLEIDPSIFLRWNFQYFFLQPLDDYNVKFNTKLTVDYCINNPKWRLSLQTHKYIGIP

SEQ ID NO: 28878 - protein, 221 aa, unidentified
  source 1..221: note = Kryptonium thompsoni
  REGION 1..221: note = tr|A0A0P1P5E0|A0A0P1P5E0_9BACT 7-carboxy-7-deazaguanine synthase OS=Candidatus Kryptonium thompsoni OX=1633631 GN=queE PE=3 SV=1
MKANKPENILTVNEIFFSIQGESSWMGFPCVFVRLTYCDLRCVWCDTEYAFYEGVDMTIDEIIEQVRSYNCNLVEITGGEPLFQENTLKLIEKLCDENFTVLLETGGHRDISKVDPRAHIIMDIKCPGSKMSHRNRWENIEYLSKKDEVKFVIKDRADYEWAKEIIKKFNLTERVKTVLFSPVFGEIEPVTLATWILEDKLPVRFQLQMHKYIWSPTARGV

SEQ ID NO: 28879 - protein, 195 aa, unidentified
  source 1..195: note = Lambdaproteobacteria bacterium
  REGION 1..195: note = tr|A0A1F6GLU7|A0A1F6GLU7_9PROT 7-carboxy-7-deazaguanine synthase OS=Candidatus Lambdaproteobacteria bacterium RIFOXYD2_FULL_56_26; OX = 1817773 GN=queE PE=3 SV=1
MWVSEVFYSIQGEGAHMGRPAAFVRFFGCDLDCDFCDEPLHKTQKHRMSPKAVVEQLLGWPVRFVILTGGEPSLEDRNLFIGLLHSHGFEVAVETNGYEPDNIGTADWITYSPKDWDHIKTEPFYDELKLVCDIHSNKAQVLQIAALSKKPVFLQPKAQTDLLVSLANAEFCRQLILEQPKLRLSLGLQRFLRFK

SEQ ID NO: 28880 - protein, 196 aa, unidentified
  source 1..196: note = Lambdaproteobacteria bacterium
  REGION 1..196: note = tr|A0A1F6GAA7|A0A1F6GAA7_9PROT 7-carboxy-7-deazaguanine synthase OS=Candidatus Lambdaproteobacteria bacterium RIFOXYD2_FULL_50_16; OX = 1817772 GN=queE PE=3 SV=1
MQVSEIFYSVQGEGSHQGRAAAFVRFFGCDLDCDFCDEPLHRSTQTQMSEGEILAAIEPWPSRLVVLTGGEPSLEDRNHLITILQQAGFEVAVETNGYSFENIQTANWITYSPKDWAQIHFDAPFSELKLVVQATDDPAQITQILTQSPAPVFLQPMSLAGDPAASKANVTFCLAQIKSHPDLRLSLGLQRFLGFH

SEQ ID NO: 28881 - protein, 211 aa, unidentified
  source 1..211: note = Latescibacteria bacterium
  REGION 1..211: note = tr|A0A3N5XSW5|A0A3N5XSW5_9BACT 7-carboxy-7-deazaguanine synthase OS=Candidatus Latescibacteria bacterium OX=2053570 GN=queE PE=3 SV=1
MKVTEIYASLQGETTHAGRPSVLVRFTGCSLRCRYCDTAYAFYGGEESAPEEVADAVRAYGIGLVLLTGGEPLEQVELARLVSILLDRGHEVLIETGGHRPIAGIDSRAIKIVDVKCPGSGHDADVLWENFEALGPRDEIKFVLTGRADYEWAKETLRSRLGRWRGTVLFSAAEKRLAPADLAAWILEDRLPVRLQIQLHKVLWPDRDRGV

SEQ ID NO: 28882 - protein, 211 aa, unidentified
  source 1..211: note = Latescibacteria bacterium
  REGION 1..211: note = tr|A0A3B8MMR2|A0A3B8MMR2_9BACT 7-carboxy-7-deazaguanine synthase OS=Candidatus Latescibacteria bacterium OX=2053570 GN=queE PE=3 SV=1
MSDIDSIPDASEHSRPVWNDGQILQINEIFYSIAGEGARVGQPTIFVRLAKCNLRCFFCDTEFDSFTEMSLQEIIDEVRIHTGEWVSLTGGEPLGQNIAPLCEALRRLGYRLHIETSGSLPPQTELFDLIEHWTVSPKRKRVVEGFERITELKYVVGKVFREDQVEEDRSELIYLQPESSKPEYIHKALEILQRHPTWRLSCRIHKMLHLP

SEQ ID NO: 28883 - protein, 210 aa, unidentified
  source 1..210: note = Liberibacter americanus
  REGION 1..210: note = tr|U6B5B3|U6B5B3_9RHIZ 7-carboxy-7-deazaguanine synthase OS=Candidatus Liberibacter americanus str. Sao Paulo OX=1261131 GN=nrdG PE=3 SV=1
MKFYSVKEIFLTIQGEGAHAGRVSVFCRFTGCNLWSGREKDRSSAKCRFCDTDFVSIDGTKGGSYTSETLANAILSEWIGGKDNRYCVLTGGEPLLQVDTPLIDALHKRDFKIAIETNGTIKAPEGIDWICVSPKEGCDLKIKTGNELKLVFPQINAHPDNYSMFDFDRYSLQPMDGSDLAKNTNLTIEYCSKNPKWRVSIQMHKLIGVR

SEQ ID NO: 28884 - protein, 212 aa, unidentified
  source 1..212: note = Liberibacter europaeus
  REGION 1..212: note = tr|A0A2T4VX95|A0A2T4VX95_9RHIZ 7-carboxy-7-deazaguanine synthase OS=Candidatus Liberibacter europaeus OX=744859 GN=queE PE=3 SV=1
MKFYSVKEIFLTLQGEGADVGRVSVFCRFSGCNLWSGREKDRAYAQCRFCDTDFVGTNGTMGGRYSAEELADVIAGEWIGLENNEHRYCVLTGGEPLLQVDAPLIKALHQRNFEIAVETNGTIEPPEGIDWICVSPKGGCDIKIKKGNELKLVFPQLDAHPNRYSMFDFERFSLQPMDGIDLEKNTNLAIDYCFKHPQWRISMQVHKFIGIR

SEQ ID NO: 28885 - protein, 238 aa, unidentified
  source 1..238: note = Lindowbacteria bacterium
  REGION 1..238: note = tr|A0A1F6LJX7|A0A1F6LJX7_9BACT 7-carboxy-7-deazaguanine synthase OS=Candidatus Lindowbacteria bacterium RIFCSPLOWO2_12_FULL_62_27; OX = 1817870 GN=queE PE=3 SV=1
MYISEIFRSFQGEGKLAGVPSVFVRTSGCNLRCVWCDTRYTSWEPEGSDRAVGDIMAEVRRLVREGEAPVRHAVVTGGEPTLEESLPELCSGLASEGFHVTIETNATRFLNLDAHLISLSPKLGNSSPLRSPAEIPKSHDALRNRPEVVRAYLDAYADPPARDCQIKFVIEREEDLAEVAEFERAANIPKDKILLMPQSVEPSDLARKTAWLVDLAAKRGYGFSPRLHIAKYGNRRGV

SEQ ID NO: 28886 - protein, 222 aa, unidentified
  source 1..222: note = Macondimonas diazotrophica
  REGION 1..222: note = tr|A0A4Z0F7U0|A0A4Z0F7U0_9GAMM 7-carboxy-7-deazaguanine synthase OS=Candidatus Macondimonas diazotrophica OX=2305248 GN=queE PE=3 SV=1
MKTAHARLDQHLRVSEIFYSLQGEADSVGWPTVFIRLTGCPLRCSYCDTSYAFHGGTTIAIADVLTEVARYPVRHVCVTGGEPLAQGDACRALLAALCERRHVVSLETSGALSIAGIDSRVSRVVDVKSPGSGEMDRNHWSNLDLLTERDQLKFVLCDRRDYEWAMGQVTERALASRCMVWFSPVHGRLDPRRLAEWLLEDGLPVRMQIQLHKLLWGEAPGH

SEQ ID NO: 28887 - protein, 215 aa, unidentified
  source 1..215: note = Magnetobacterium bavaricum
  REGION 1..215: note = tr|A0A0F3GJQ7|A0A0F3GJQ7_9BACT 7-carboxy-7-deazaguanine synthase OS=Candidatus Magnetobacterium bavaricum OX=29290 GN=queE PE=3 SV=1
MQETLRVCEFFTSIQGESSYAGLPCVFVRLTGCNLRCSYCDTRYAYTEGTDVPVAQLLRDVQATNLRLVEITGGEPLLQDATPILIDGLIGMGLKTLIETNGSVNISRFNRGAIFIVDLKAPSSGMSDHNDLSNLKALSPTDEVKMVIANRDDYQWASDLIARHRLTQRCHVLLSSVAGELQPETLAAWILHDALDVRLNLQLHKYIYGADRRMV

SEQ ID NO: 28888 - protein, 215 aa, unidentified
  source 1..215: note = Magnetobacterium bavaricum
  REGION 1..215: note = tr|A0A0F3H057|A0A0F3H057_9BACT 7-carboxy-7-deazaguanine synthase OS=Candidatus Magnetobacterium bavaricum OX=29290 GN=queE PE=3 SV=1
MKETLRVCEFFTSIQGESSYAGLPCVFIRLTGCNLRCSYCDTRYAYTEGTDIAVVQLLRDVQATNIRLVEITGGEPLLQDAIPILIDGLIGMGLKTLVETNGSINIGHFNRDAVFIVDLKAPSSGMSDHNDLSNLKTLSPTDEVKMVLGNRDDYQWASDLIARYRLTQRCHVLLSPIVGELQPETLAAWILHDALDVRLNLQLHKYIYGADRRMV

SEQ ID NO: 28889 - protein, 211 aa, unidentified
  source 1..211: note = Magnetoglobus multicellularis
  REGION 1..211: note = tr|A0A1V1PDS6|A0A1V1PDS6_9DELT 7-carboxy-7-deazaguanine synthase OS=Candidatus Magnetoglobus multicellularis str. Araruama OX=890399; GN = queE PE=3 SV=1
MSICDTYKINEIFKSRQGEGFNTGKEVMFIRLSGCRMSCSWCDTDHKKYEIMSVGQICNLLTSDDTSDNILITGGEPTDQSLLPLLKKIRQHANWIGLETNGTNNISQYKEFFDYITVSPKTKGDLHPSSVLNADEVRIVTGIEVNLNYIKRMDKLMLPSTHRFLSPLSFLSLNKTETNLPYTISLLSQINQQSKNPWHLSIQTHKLIGIK

SEQ ID NO: 28890 - protein, 215 aa, unidentified
  source 1..215: note = Margulisbacteria bacterium
  REGION 1..215: note = tr|A0A1F6QBX7|A0A1F6QBX7_9BACT 7-carboxy-7-deazaguanine synthase OS=Candidatus Margulisbacteria bacterium GWE2_39_32 OX=1817872 GN=queE; PE = 3 SV=1
MLINEIFSSIQGEGIYAGYRQIFIRFAGCNLSCDYCDEQHQEQRKYEIDALAKEVKQFTKSWHHSISLTGGEPLLQVDRIKQLIPLLPLPIYLETNGTLPQHFKEIADLVDIVSLDYKEGYENEFIDFLHIAKDKDVFVKYVVRKETNVKKLSDITSLISEISRDIPFILQPVTPYGKIKQGPRLEDLLRFYQTAKNHLSDVRVIPQTHKLMRIK

SEQ ID NO: 28891 - protein, 215 aa, unidentified; identical to SEQ ID NO: 28890
  source 1..215: note = Margulisbacteria bacterium
  REGION 1..215: note = tr|A0A2W4HU80|A0A2W4HU80_9BACT 7-carboxy-7-deazaguanine synthase OS=Candidatus Margulisbacteria bacterium OX=2053573 GN=queE PE=3 SV=1

SEQ ID NO: 28892 - protein, 254 aa, unidentified
  source 1..254: note = Marinamargulisbacteria bacterium
  REGION 1..254: note = tr|A0A328RNV0|A0A328RNV0_9BACT 7-carboxy-7-deazaguanine synthase OS=Candidatus Marinamargulisbacteria bacterium SCGC AG-439-L15; OX = 2184346 GN=queE PE=3 SV=1
MSKKENKELKVSETFYSIQGEGVSMGTPSIFLRLQGCNLTCGGPTTIQSKKIENGATWRCDTIEVWKKGEALTVDAILAQWENNNYLNHLSQGAHLVITGGEPLLQTTELEIFLEQLQKKLPKKGYFEIETNGTITPTKTIDKLISHYTVSPKLANSGMSLTSRIQKNTLEWFSKKQNAYFKFVISDISDITEIQSQLIQPFKISSQQVYLMPACDTKDTLLKQLPKIADLCKRNHYKLSSRLQLSIWDQTVGV

SEQ ID NO: 28893 - protein, 265 aa, unidentified
  source 1..265: note = Marinamargulisbacteria bacterium
  REGION 1..265: note = tr|A0A328RLM3|A0A328RLM3_9BACT 7-carboxy-7-deazaguanine synthase OS=Candidatus Marinamargulisbacteria bacterium SCGC AAA071-K20; OX = 2184347 GN=queE PE=3 SV=1
MENPLFKISKATSRIMPHTLPVSESFYSIQGEGKCTGVPAVFLRLKGCNLSCGGINTIKTKSLDSGATWRCDTIEVWTKGETINIVDLLESWEQNGWLNHLKNGAHLVITGGEPLLWQDKLVKFLNDFKQFQSFLPFIEVETNGTITPTKKLDSFISQYNVSPKLKNSGMKKEDRLINEALTFFTESQKGYYKFVVSNQSDCDEITNSFIIPFKIPSQKIQLMPGAETKDDCLALSPQVVEWCKEKGLGFSSRLHLLLWDKKTGC

SEQ ID NO: 28894 - protein, 213 aa, unidentified
  source 1..213: note = Marinimicrobia bacterium
  REGION 1..213: note = tr|A0A2E6AXM3|A0A2E6AXM3_9BACT 7-carboxy-7-deazaguanine synthase OS=Candidatus Marinimicrobia bacterium OX=2026760 GN=queE PE=3 SV=1
MKLKINEIFYSIQGESSYTGLPCVFIRLTYCNLRCSYCDSEYAFYEGRNMSFSDINTEIKKYPTKLAMITGGEPLLQKKSVDLMQLLIEDGYSVMLETSGSLSLENVPKEVIKIVDFKCPSSKMKHKNDWSILNDIDNKDEIKFVIGNEEDYNWSKSKIVKYNLNEKCQILFSPIYGSIDIKELCNWILNDGLNVRLQTQLHKLIWGPDKKGV

SEQ ID NO: 28895 - protein, 212 aa, unidentified
  source 1..212: note = Marinimicrobia bacterium
  REGION 1..212: note = tr|A0A4Y8I3C3|A0A4Y8I3C3_9BACT 7-carboxy-7-deazaguanine synthase OS=Candidatus Marinimicrobia bacterium MT.SAG.3 OX=2552982 GN=queE PE=3; SV = 1
MLKISEIYSSIQGESSYQGLPCVFVRLTGCNLRCSWCDTAYAFFGGEEMSIDEILNDVKEKGISLVEITGGEPLIQEECYGLMTALCDEGMIVLLETGGSIDTVKVDERVKKIIDFKAPSSLMVDENDWNNVSRLTAGDELKFVIGDRADYDWSLEMIKEYELEEKTIINLSPVHNVLQPADLVKWVLEDGLDVRVNLQLHKYIWGEKAMGV

SEQ ID NO: 28896 - protein, 253 aa, unidentified
  source 1..253: note = Melainabacteria bacterium
  REGION 1..253: note = tr|A0A1F6RN25|A0A1F6RN25_9BACT 7-carboxy-7-deazaguanine synthase OS=Candidatus Melainabacteria bacterium RIFOXYA2_FULL_32_9 OX=1801611; GN = queE PE=3 SV=1
MTKNETNIIEIFSSIQGEGPYIGYRQLFIRFALCNLNCAYCDTAFSPEEYCKIEVCPGSGSFKQVKNPVTVEQLIHEIDRLNYFHHHSLSLTGGEPLLNSEFINNFLSEIQEIKANNNLKIYLETNGTLSEELIKVIKNIDIISMDFKLESSYGKTAPWDKHREFINIAQKNNKEIFAKVVVTSKIKPEEVSQIISLISGLGKKIPVILQPVFSKDKALIPEPVKVMEIQEALLKKLTDVRVIPQVHKYLSLL

SEQ ID NO: 28897 - protein, 226 aa, unidentified
  source 1..226: note = Melainabacteria bacterium
  REGION 1..226: note = tr|A0A327JH21|A0A327JH21_9BACT 7-carboxy-7-deazaguanine synthase OS=Candidatus Melainabacteria bacterium OX=2052166 GN=queE PE=3 SV=1
MSISGENKVKIKEIFASVQGEGPYVGCEQIFVRFCDCNLNCNYCDTDFKGEKEYTANSLKEHIEKYDLSTVHSLSLTGGEPLIFSKFLNEFLPLVNVKKYLETNATLWKDLEKIEKHIDIISADIKLPSSTKIKPLWTLHDKFFETAKKYNKEIFAKVVFNDEITEDEIKNCIQLAKKHELELILQPQTKNNEILPKSTSKVFERFLSEYNHTRLIPQVHKYLGIE

SEQ ID NO: 28898 - protein, 213 aa, unidentified
  source 1..213: note = Methylomirabilis limnetica
  REGION 1..213: note = tr|A0A2T4TYH6|A0A2T4TYH6_9BACT 7-carboxy-7-deazaguanine synthase OS=Candidatus Methylomirabilis limnetica OX=2033718 GN=queE PE=3 SV=1
MSLRVNEIFYSIQGESTYAGRPCVFVRLTGCNLRCRWCDTAYAFHEGESRSVEQALEQVRSYKCPLVEITGGEPLLQEDVYPLISRLLLEEYEVLIETGGSLSVDRLDPRVVKILDLKAPGSEMDPHNNFDNLRYLDRKDQIKFVVADRRDYEWAKQVMAEHTLAEKVQVLFSPVFGELHPGELAEWLLADRLAARLQIQLHKYLWEPSRRGV

SEQ ID NO: 28899 - protein, 214 aa, unidentified
  source 1..214: note = Methylomirabilis oxyfera
  REGION 1..214: note = tr|D5MMR5|D5MMR5_9BACT 7-carboxy-7-deazaguanine synthase OS=Candidatus Methylomirabilis oxyfera OX=671143; GN = queE PE=3 SV=1
MMSLRVNEIFYSIQGESTYAGRPCVFVRLTGCNLRCRWCDTTYAFHEGEQRSIEQVLEQVRGYKCPLVEITGGEPLLQEAVHPLIDRLLLEGYEVLIETGGSLSIDRLDRRVVKILDLKAPGSGMDPHNNLENLRHLDRKDQIKFVVADRRDYEWARRVMAEHALAEKAHVLFSPVLGELHPRELAEWILTDRLNVRLQIQLHKYLWDPNRRGV

SEQ ID NO: 28900 - protein, 213 aa, unidentified
  source 1..213: note = Methylopumilus rimovensis
  REGION 1..213: note = tr|A0A5B8DH63|A0A5B8DH63_9PROT 7-carboxy-7-deazaguanine synthase OS=Candidatus Methylopumilus rimovensis OX=2588535 GN=queE PE=3 SV=1
MTQLKIFEIFYSLQGESSRMGLPTIFIRLSGCPMRCHYCDTAYAFQGGSMMDIEDIMVSIKKYDTRYVTVTGGEPLAQKEVLKLLKTLADSNYEVSIETGGGLSIKEVDPRIKIILDIKTPESGEEKKNHWENLDIIDSKDEIKFVLCSREDYDWAKKILDQYKLTEKCSVLFSPVYQKLNVTDLGNWILKDQLHVRMQIQFHKLLWGEKPGV

SEQ ID NO: 28901 - protein, 213 aa, unidentified
  source 1..213: note = Methylopumilus universalis
  REGION 1..213: note = tr|A0A5B8CYX0|A0A5B8CYX0_9PROT 7-carboxy-7-deazaguanine synthase OS=Candidatus Methylopumilus universalis OX=2588536 GN=queE PE=3 SV=1
MTQLKIFEIFYSLQGESSRIGWPTIFIRLSGCPMRCHYCDTAYAFQGGSMMDIEDIMTSIKKYDTRYVTVTGGEPLAQKEVHNLLKTLADSNYEVSIETGGGLSIKEVDPRIKIILDIKTPESGEEKKNHWENLEIIESKDEIKFVLCSREDYDWAKKIIDQYKLTQKCSVLFSPVYQKLDVTDLGNWILKDQLHVRMQIQLHKLLWGEKPGV

SEQ ID NO: 28902 - protein, 213 aa, unidentified
  source 1..213: note = Methyloumidiphilus alinensis
  REGION 1..213: note = tr|A0A2W4RPY4|A0A2W4RPY4_9GAMM 7-carboxy-7-deazaguanine synthase OS=Candidatus Methyloumidiphilus alinensis OX=2202197 GN=queE PE=3 SV=1
MGKLRITEIFLSIQGESSLVGWPTVFVRLTGCPLRCVYCDTAYAFSGGVICTIAEILEQVRSYKIRHVCVTGGEPLAQLDCLALLRALIGEGYEVSLETSGALDVAEVDRRVVKVLDLKTPSSGEEGKNLYANLSHLFPGDQVKFVIMNDDDYRWSVEKLLEYRLNERCEVLFSPAMGQQDPKELAEKILSDRLPVRFQLQLHKILWGNTPGR

SEQ ID NO: 28903 - protein, 253 aa, unidentified
  source 1..253: note = Microgenomates bacterium
  REGION 1..253: note = tr|A0A3A4ZKM3|A0A3A4ZKM3_9BACT 7-carboxy-7-deazaguanine synthase OS=Candidatus Microgenomates bacterium OX=2093373 GN=queE PE=3 SV=1
MFGMNSLTKQYLDVQGDLHVNSIFNTFQGEGPFAGMPATFIRLQGCCLKCYFCDTAFDAGVCLSVDEIVRSIEQLNRESKRTPTRACHAFGNKHLVVITGGEPFVQNLVPLISALLDNNYAVQIETAGVLWYPHGGSLSWDMGLLCRQPECSIVVSPKTGKVAEEVCSLAKAWKYIIEHGKVSQEDGLPMESTQVKGTTRKLQRPFAGVPIYVQPCDSYDAAKNALNLKEAMNSAEKFGYILSIQQHKIIGVD

SEQ ID NO: 28904 - protein, 215 aa, unidentified
  source 1..215: note = Micropelagos thuwalensis
  REGION 1..215: note = tr|U2WUX8|U2WUX8_9PROT 7-carboxy-7-deazaguanine synthase OS=Candidatus Micropelagos thuwalensis OX=1397666; GN = mhpD PE=3 SV=1
MTYSVKEMYYTLQGEGAQSGRPAVFCRFAGCNLWSGLETDRATATCTFCDTDFVGTDGENGGKFSTAEELADKIAALWPDKDALADAYVVFTGGEPLLQLDTKLLEACKAHGFETGVETNGTQIAPAHLDWVCVSPKPDSPLVQDSGHELKFIYPQETLSPHEFADYDFEHFFIQPMEVEDPGAYHHNIQASIVFCLQNPQWRLSLQTHKIIGIS

SEQ ID NO: 28905 - protein, 346 aa, unidentified
  source 1..346: note = Micropelagos thuwalensis
  REGION 1..346: note = tr|U2WUW1|U2WUW1_9PROT UDP-3-O-acylglucosamine N-acyltransferase OS=Candidatus Micropelagos thuwalensis; OX = 1397666 GN=queE PE=3 SV=1
MVDSRFYPPGKTFSIAELAGFLNVEIKQGDGNASINGVSSLLDAQQSDIVFYNDVKYKNDLAVTRAGALLISAGDIDSIGDFPAAVLVVDDPYKSYALIAQKIFPDQAQAKPVVGVQAEQIHDDAIIGTNVEIGYGAVICAGAEIGEDTIIGANAVIGPGCVVGRRSVISANSVVQFALIGDDVHIHPNVSIGQDGFGYAPDFSGHVKIPQLGRVIIQNHVSIGVGSDIDRGTLSDTMIGEGTKLDNQVHVAHNVRIGRHCLIAGQVGFAGSTIIEDYVMSGGQAAFNGHIHVGKGARILGASVVVKSIPAGQEVAGYPARASSLWRKETALLGQLLRKRKTNKGE

SEQ ID NO: 28906 - protein, 232 aa, unidentified
  source 1..232: note = Muproteobacteria bacterium
  REGION 1..232: note = tr|A0A1F6TVD1|A0A1F6TVD1_9PROT 7-carboxy-7-deazaguanine synthase OS=Candidatus Muproteobacteria bacterium RBG_16_65_34 OX=1817760 GN=queE; PE = 3 SV=1
MTTLPKPDSRDRESAVLPVAERLRITEIFYSLQGEARTVGLPTAFVRLTGCPLRCGYCDTEYAFSGGEWMSLEDILARVSEYRPRYVTVTGGEPLAQRPCRELLRRLCDRDYEVSLETGGALEIGDIDPRVSIVMDLKTPGSGEERKNLYANIERLRPGDQVKFVICDREDYEWSRARLAEYRLDEICEVLFSPAYGQVSPTDLAEWILADRLPVRLQIQLHKLLWGEARGR

SEQ ID NO: 28907 - protein, 230 aa, unidentified
  source 1..230: note = Muproteobacteria bacterium
  REGION 1..230: note = tr|A0A1F6TWK1|A0A1F6TWK1_9PROT 7-carboxy-7-deazaguanine synthase OS=Candidatus Muproteobacteria bacterium RIFCSPLOWO2_01_FULL_60_18; OX = 1817768 GN=queE PE=3 SV=1
MPPSETAAVTLRPGSSASDRLRITEIFYSLQGEARTVGYPTVFIRLTGCPLRCTYCDTEYAFYGGQWLDLDDILKRVAEHAPRYVTVTGGEPLAQRPCRELLVALCERGYEVSLETGGALDIAGIDPRVSIVMDLKTPGSGEEQRNLYANIAHLEKKDQVKFVICDRTDYEWSRAKLAEHRLDRICDVLFSPCYGQMNPTDLAEWILQDHLPVRMQIQLHKLLWNDARGR

SEQ ID NO: 28908 - protein, 199 aa, unidentified
  source 1..199: note = Nephrothrix sp.
  REGION 1..199: note = tr|A0A2B8A0T0|A0A2B8A0T0_9BACT 7-carboxy-7-deazaguanine synthase OS=Candidatus Nephrothrix sp. EaCA OX=2044729 GN=queE PE=3 SV=1
MKNLPVMEMFYSLQGEGCHQGSAAFFIRLGGCDVGCVWCDVKESWNENEHPVFSVERIVQEAKAAACKKVIVTGGEPTRHDLSELTRALKKEGKQTHLETAGVYPLTGEWDWICFSPKKFKTPERSVYEAAHELKIIVFHRSDLAWAEEHAKLTNENCHLYLQPEWSRAEEMLPLIVNYVKTEPRWKISLQQHKYIHIP

SEQ ID NO: 28909 - protein, 213 aa, unidentified
  source 1..213: note = Nitrosoglobus terrae
  REGION 1..213: note = tr|A0A1Q2SK27|A0A1Q2SK27_9GAMM 7-carboxy-7-deazaguanine synthase OS=Candidatus Nitrosoglobus terrae OX=1630141 GN=queE PE=3 SV=1
MSRLRITEIFYSLQGESRTVGYPTAFVRLTGCPLRCRYCDTDYAFQGGVWMNLEQIFTTVATFSTHYVTVTGGEPLAQPACLEFLAQLCNAEYETSLETSGALDISAVDPRVIKVMDLKTPGSGEENRNFYANLDYLLSHDQIKLVLCDREDYDWAKTILEKYRLFGRCEVLLSPSYNQLNPTVLAGWILEDHLPVRMQIQLHKYLWGEEPGR

SEQ ID NO: 28910 - protein, 211 aa, unidentified
  source 1..211: note = Nitrospira inopinata
  REGION 1..211: note = tr|A0A0S4KRX6|A0A0S4KRX6_9BACT 7-carboxy-7-deazaguanine synthase OS=Candidatus Nitrospira inopinata OX=1715989 GN=queE PE=3 SV=1
MRVTEIFHSIQGESTFAGLPCVFVRLTGCPLRCSWCDTDYAFYGGTERSIDSIIETVRAYGCPLVEVTGGEPLAQPDCGSLLSRLCDEGFTVLLETSGAVDTAPVDHRVRVVLDVKCPGSGMTNRMYWPNVERLRAQDEAKFVIADRRDYDWAKDIMARFDLNRRCVVLFSPVFGVLDPRRLAEWVLADRLPVRYQLQLHKFVWSPDMKGV

SEQ ID NO: 28911 - protein, 211 aa, unidentified
  source 1..211: note = Nitrospira nitrificans
  REGION 1..211: note = tr|A0A0S4L7D6|A0A0S4L7D6_9BACT 7-carboxy-7-deazaguanine synthase OS=Candidatus Nitrospira nitrificans OX=1742973 GN=queE PE=3 SV=1
MRVTEIFHSVQGESTFAGLPCVFIRLTGCPLRCTWCDTDYAFFGGTDRSIDDILDRVRSYGCQLVEVTGGEPLAQPDAGTLLRRLCREGFTVLLETSGAVDTAIVDPSVRIILDVKCPGSGMTDRMHWPNVERLRPQDEAKFVMQDRSDYEWAKTILDRFRLTARCSVLFSPVFGALDPRQLAEWLLADRLPIRLQLQLHKHIWTPDMRGV

SEQ ID NO: 28912 - protein, 219 aa, unidentified
  source 1..219: note = Nitrotoga sp.
  REGION 1..219: note = tr|A0A3E1DJV3|A0A3E1DJV3_9PROT 7-carboxy-7-deazaguanine synthase OS=Candidatus Nitrotoga sp. LAW OX=2184310 GN=queE PE=3 SV=1
MITCSVSEQLRITEIFYSLQGETSRVGLPTVFVRLTGCPLRCSYCDTAYAFSGGQNMTIAGILTEVARYNTRYVTVTGGEPLAQKNSLSLLSALCNAGYEVSLETSGALDVSSVDVRVMKILDIKTPASGEVKKNLWSNLIALHAHDEIKFVLCDESDYIWAKQVLRERDLAGKFTVLFSPAQDRLSPTVLADWILRDSLPVRLQVQLHKLLWGSQQGK

SEQ ID NO: 28913 - protein, 219 aa, unidentified
  source 1..219: note = Nitrotoga sp.
  REGION 1..219: note = tr|A0A3E1D762|A0A3E1D762_9PROT 7-carboxy-7-deazaguanine synthase OS=Candidatus Nitrotoga sp. MKT OX=2184311 GN=queE PE=3 SV=1
MITCSVSEQLRITEIFYSLQGETSRVGLPTVFVRLTGCPLRCSYCDTAYAFSGGQNMTVAGILTEVARYNTRYVTVTGGEPLAQKNSLFLLSALCNAGYEVSLETSGALDVSSVDVRVMKVLDIKTPASGEVKKNLWSNLIALHAHDEIKFVLCDESDYIWAKQVLRERDLAGKFTVLFSPAQDQLSPTVLADWILRDSLPVRLQVQLHKLLWGSQQGK

SEQ ID NO: 28914 - protein, 460 aa, unidentified
  source 1..460: note = Omnitrophica bacterium
  REGION 1..460: note = tr|A0A1J4VN28|A0A1J4VN28_9BACT Multifunctional fusion protein OS=Candidatus Omnitrophica bacterium CG1_02_49_10 OX=1805289 GN=queE PE=3 SV=1
MKKKAVVLLSGGLDSATTLYLAKDQGYKCHSLVFDYGQRHKRELRSARKIAAAAGADYKVLKITLPWKGSSLLDKRGPLPRSDFKKRTGPKIPSTYVPGRNIIFLSFAISYAEAIGADVVFIGANAIDYSGYPDCRADFYRSFVETARLGTRRGREGKAVEVLTPLINKTKSDIVKLGTSLGVPYRYTWSCYRGGKAPCGRCDSCLLRAKGFKEAGLKDPLLKGLKADAAKAGITEIFSSIQGEGIFLGVKQIFVRFKKCNMACAYCDVPRELAPKVYGAGDLLGKIEELEKNKGPHHSISFTGGEPLLYADLLAEILPELKKRRFKVYLETNGTLPEELKKIIDHADVIAMDLKLPSSTGERSFWKEHAEFLKIASLKKVFVKVVVTPRTNKIDISKSIEIVKDVDGKIPLIIQPASPVFKDTKAISDNRLFEFLELASARGVSNTRIVPQLHKILGVR

SEQ ID NO: 28915 - protein, 223 aa, unidentified
  source 1..223: note = Omnitrophica bacterium
  REGION 1..223: note = tr|A0A2H0Y5Q6|A0A2H0Y5Q6_9BACT 7-carboxy-7-deazaguanine synthase OS=Candidatus Omnitrophica bacterium CG08_land_8_20_14_0_20_41_16; OX = 1974743 GN=queE PE=3 SV=1
MKGKIAEVFDSVQGEGLYLGEKQIFVRFFGCNLSCRFCDTKLYSFSEYGPQELYERLKMYRKNYHSVCFTGGEPLVQKDFLKEISKLTHKDNLKNYLETNGTLPDALKDVIDYIDIVAMDFKFPSSTDLNSFWDAHRLFLEVASAKEVFIKAVICESTEEGDLIDALRLIREVAKNTILILQPDSGASSESLINKLDGFKDICRREKITTCVIPQVHKIMGLK

SEQ ID NO: 28916 - protein, 238 aa, unidentified
  source 1..238: note = Omnitrophus magneticus
  REGION 1..238: note = tr|A0A0F0CKH2|A0A0F0CKH2_9BACT 7-carboxy-7-deazaguanine synthase OS=Candidatus Omnitrophus magneticus OX=1609969 GN=queE PE=3 SV=1
MALATKNAKISEIFLSYQGEGPFAGSRQLFVRFYGCDKTCAFCDTKFTSYKSFTPDSLLTKIFSFEDNYNELSITGGEPLEHSEFLIEFLKLYKTYKKNPVYLETNGLLPQELTTVIKYIDIIAMDFKLPSSAGEILPNNQDIWAIHKKFSEIAIQKKLIIKAVVTDKTKMQDIKEMGNIVISLKGALEVVLQPVTPVNDEVKAPDAEMLYYFKRYLEKIMGRDILAVGQLHKIFNIP

SEQ ID NO: 28917 - protein, 209 aa, unidentified
  source 1..209: note = Ornithobacterium hominis
  REGION 1..209: note = tr|A0A383TZ34|A0A383TZ34_9FLAO 7-carboxy-7-deazaguanine synthase OS=Candidatus Ornithobacterium hominis OX=2497989 GN=queE PE=3 SV=1
MVSKNQELVETGEYLPIMEDFYTLQGEGAHTGKASYFIRIGGCDVGCHWCDVKESWDASKHPVTSIKTLIERIPENVKTVVLTGGEPSSYNLYPLTKLLKQRGFKIHMETSGSNEIRGHVDWICLSPKKLQRPVEKVINNAHELKCIIYNQNDFKFAEEYAAKVKESCELFLQPEWSKSKGIVPQIIHYILKNPKWKISIQTHKFLNIP

SEQ ID NO: 28918 - protein, 246 aa, unidentified
  source 1..246: note = Ozemobacter sibiricus
  REGION 1..246: note = tr|A0A367ZS65|A0A367ZS65_9BACT 7-carboxy-7-deazaguanine synthase OS=Candidatus Ozemobacter sibiricus OX=2268124 GN=queE PE=3 SV=1
MTGRLVEVFPSIQGEGLQVGVMQLFIRFAGCNLACRHCDTVHLREAGATFPLQPWPGHRPRPLPNPVGVDELVAALEEAYPLDDFHSISMTGGEPLGQPAFLLRLVRRLQEKRRAVFIETNGTLPDPVPELVPYVSYWSVDLKLSKGWGLPGTILGKHRRFLAALPPEKTYLKLVIDANDDPEDVCRHLGDGRFRAFPLVIQPLATAQSTLMDWDSFSILEWMRLLRPFFREVRWIPQVHKLLRIP

SEQ ID NO: 28919 - protein, 211 aa, unidentified
  source 1..211: note = Pandoraea novymonadis
  REGION 1..211: note = tr|A0A2P6UYN9|A0A2P6UYN9_9BURK 7-carboxy-7-deazaguanine synthase OS=Candidatus Pandoraea novymonadis OX=1808959 GN=queE PE=3 SV=1
MAYAVKEIFYTLQGEGANVGRPSVFCRFAGCNLWNGLEEDRAEAFCQFCDTDFVGTHGENGGKFRTPSDLVTQIVARWPEADQFNRFVVCTGGEPLLQLDAPLIDALHMENFKIAIETNGTQPVPAGIDWVCVSPKVGVPLVVTQGDELKVVVPQGGQLLKNYQELDFKYFYLQPMDGPLRERNTRLAIDYCKQDPRWSLSIQMHKYVNIP

SEQ ID NO: 28920 - protein, 223 aa, unidentified
  source 1..223: note = Pantoea carbekii
  REGION 1..223: note = tr|U3U201|U3U201_9GAMM 7-carboxy-7-deazaguanine synthase OS=Candidatus Pantoea carbekii OX=1235990 GN=ygcF; PE = 3 SV=1
MFYPINEIFQTLQGEGFYTGVPSLFIRLQGCPICCTWCDTKYTWKKLINRNNSLNAILLKKVKNDTWSNADLVTLIDTIQKKGWTARHVVITGGEPAIYDLYPLTHALEGLGFHCQIETSGTHKLKCSHNTWVTVSPKVNMHNGYPVLDQTLQRADEIKYPVLNAQDLEVLKKLLLRLGDSKKRIIALQPISLDETATKLCIKTCIDRNWLFSIQMHKYINIS

SEQ ID NO: 28921 - protein, 209 aa, unidentified
  source 1..209: note = Paraburkholderia kirkii
  REGION 1..209: note = tr|G4M7T8|G4M7T8_9BURK 7-carboxy-7-deazaguanine synthase OS=Candidatus Paraburkholderia kirkii UZHbot1; OX = 1055526 GN=queE PE=3 SV=1
MTYAVKEIYYTLQGEGANAGRPAVFCRFAGCNLWSGREEDRADAVCQFCDTDFVGTDGENGGKYRTPAELVAKIASFWPEGAGHRFVVCTGGEPMLQIDEPFVDALHEAGFEMAIETNGSLPVLESIDWICVSPKADAPLVTKGNELKVVVPQDNQRLADYEKLDFDYFLVQPMDGPSRDINTKLAIDWCKRHPKWRLSMQTHKYLNIP

SEQ ID NO: 28922 - protein, 210 aa, unidentified
  source 1..210: note = Paraburkholderia kirkii
  REGION 1..210: note = tr|A0A0L0M0S8|A0A0L0M0S8_9BURK 7-carboxy-7-deazaguanine synthase OS=Candidatus Paraburkholderia kirkii OX=198822 GN=queE PE=3 SV=1
MTYAVKEIFYTLQGEGANAGRPAVFCRFAGCNLWSGREEDRADAVCQFCDTDFVGTDGESGGKYKTPAELVAKIASLWPEGAAHRFVVCTGGEPMLQIDLPFVDALHEAGFEMAIETNGSLPVLESIDWICVSPKADAPLVVTKGNELKVVVPQDNQRLAEYEKLDFDYFLMQPMDGPSRDINTKLAIDWCKRYPKWRLSMQTHKYLNIP

SEQ ID NO: 28923 - protein, 229 aa, unidentified
  source 1..229: note = Parcubacteria bacterium
  REGION 1..229: note = tr|A0A3M0WZA6|A0A3M0WZA6_9BACT 7-carboxy-7-deazaguanine synthase OS=Candidatus Parcubacteria bacterium OX=2053309 GN=queE PE=3 SV=1
MSTETIVVSEIFKSIQGEGLRTGTPSVFVRLTGCNLMCGKGNATWTCDSIEVWKKGNRVAVQQLAQQVNDYKLNNIVVTGGEPLLQQTALSKFFSLLNQRIGIEIETNGTIKPLPDIDAHLPFYNVSIKLQNSGEEKKVRLISEAIKFLAECERSMFKFVVAEESDMREIQKIIDCFAIRQNKIMLMPAGSTRDELNRVSPLIAKLAIEQNYVYSDRTHIRIWDKATGV

SEQ ID NO: 28924 - protein, 295 aa, unidentified
  source 1..295: note = Pelagibacter sp.
  REGION 1..295: note = tr|A0A1Z9MM11|A0A1Z9MM11_9PROT 7-carboxy-7-deazaguanine synthase OS=Candidatus Pelagibacter sp. TMED202 OX=1986810 GN=queE PE=3 SV=1
MEKLRYSEIFYSVQGEGRFVGVPSVFFRVFGCNFNCHGFGQGRDKSKWLKPEEMPYMTQDLSHVKHVRDLPVVEIGCDASASWASRYKHLVSWDTVDDIAVKVKQYTPNNKWTNDNGSDIHFIITGGEPMLWQRETQQLLRQPEFNDLKNLTIETNCTQPFKAEFERFLQGLVHGDYTKEPVHITWSTSPKLSISGEHWAKAIKPFVARQYHKIPNTHLYFKFVVQDEQDLEEVEMARKEYNELGVDADIYLMAVGATQEGQAKTSKQVADIALQNGYKYSPRLHVDLFGNKWGT

SEQ ID NO: 28925 - protein, 210 aa, unidentified
  source 1..210: note = Peregrinibacteria bacterium
  REGION 1..210: note = tr|A0A1F7AE91|A0A1F7AE91_9BACT 7-carboxy-7-deazaguanine synthase OS=Candidatus Peregrinibacteria bacterium RIFCSPLOWO2_02_FULL_39_10; OX = 1801899 GN=queE PE=3 SV=1
MQVTEIFYSLQGEGLFLGIPAVFLRLNGCNLRCKWCDTKYALDPKNARQMTIDEITKIIKKYPAKHLVITGGEPLLQQKEILSLIKKLKNYYIEVETNGTIKSTLDNYVDLYSCSPKLAHAKTLNLPLQKFPGKKTFYKFVIEHPANIEEVKNFIRKYKIKKSRVLLMPLGTKEKELKERSKWLAELCKKEDLRFSPRLQITLWGTTRAR

SEQ ID NO: 28926 - protein, 213 aa, unidentified
  source 1..213: note = Peregrinibacteria bacterium
  REGION 1..213: note = tr|A0A2H0L002|A0A2H0L002_9BACT 7-carboxy-7-deazaguanine synthase OS=Candidatus Peregrinibacteria bacterium CG11_big_fil_rev_8_21_14_0_20_46_8 OX=1974793 GN=queE; PE = 3SV=1
MILNEVFFSVQGEGVNIGKPAIFVRFGNCNLKCTWCDTKYTWDPAVADNVRVDLPELFGKIRAYDCKHLVITGGEPMLQQDVICAIREEFLDYYIEVETNGSFAATEKCAEAVDLFTVSYKTSNSGNAPYELKMFGLACVYKFVVDAVGDFEEIEAVIAKYKLPAEKIYLMPQGVTRDELLKKHDMLIARCKEKGYTFTPRLHILTWGAERRK

SEQ ID NO: 28927 - protein, 225 aa, unidentified
  source 1..225: note = Peribacteria bacterium
  REGION 1..225: note = tr|A0A1F7BMY8|A0A1F7BMY8_9BACT 7-carboxy-7-deazaguanine synthase OS=Candidatus Peribacteria bacterium RIFCSPHIGHO2_01_FULL_55_13; OX = 1801917 GN=queE PE=3 SV=1
MVISEIFHSIQGEGPTTGRPAVFVRLGMCNLQCNFCDTPYTWKPGQEDYSDEANERIVEEIAKLLIAHPGTNMMIWTGGEPMLQQRDIVATIDYLKERIADRVLEHEVETNGTIAAHPELDKRIDRYNCSPKTAMSGNNTYSVRLRDYAKTIYKYVVGTKEHCEEALREIERQKLPRDRCFFMVLGTTAEEMLQRSPTIAEVCKKEGITLCIRLQSVLWNSARGV

SEQ ID NO: 28928 - protein, 216 aa, unidentified
  source 1..216: note = Phaeomarinobacter ectocarpi
  REGION 1..216: note = tr|X5MEM0|X5MEM0_9RHIZ 7-carboxy-7-deazaguanine synthase OS=Candidatus Phaeomarinobacter ectocarpi; OX = 1458461 GN=queE PE=3 SV=1
MTYSVKEMFPTLQGEGGQAGRAAVFLRFAGCNLWTGREEDRADAVCTFCDTEFVGTDGDGGGKFSTPDDLAAAVTSKWQGGPAGRLVVCTGGEPLLQLDGPLIDALHTAGFEIAVETNGTLEAPEGKTGGIDWICVSPKANAPLVLTSGQELKLVYPQSEAEAQPERFETHDFQHFYLQPMDSPARDKNTQLAVSYCLSHPKWRLSLQSHKYIGIP

SEQ ID NO: 28929 - protein, 222 aa, unidentified
  source 1..222: note = Photodesmus blepharus
  REGION 1..222: note = tr|A0A084CM91|A0A084CM91_9GAMM 7-carboxy-7-deazaguanine synthase OS=Candidatus Photodesmus blepharus OX=1179155 GN=queE PE=3 SV=1
MYTINEIFETIQGEGHFTGTPSVFIRFQKCLVRCTWCDTKQTWDASPKNERTLNEISTKPKGSSTWCASSSQEIVEAYRKQGFFSKHIVITGGEPCIYDLRPLSEKFEEIGCRCQIETSGTSEILTSKMTWVTVSPKVSKKQGLTVTNAALCRANEIKHLVKTRRDIEILDRLLSETNINENTVIALQPMSQNIRATKLCIEICIQRNWKLSVQTHKYLNIP

SEQ ID NO: 28930 - protein, 222 aa, unidentified
  source 1..222: note = Photodesmus katoptron
  REGION 1..222: note = tr|S3E084|S3E084_9GAMM 7-carboxy-7-deazaguanine synthase OS=Candidatus Photodesmus katoptron Akat1; OX = 1236703 GN=queE PE=3 SV=1
MYKVNDIFETIQGEGSLSGIPSVFVRLQGCTVGCSWCDTKDTWNVNFQNQCDLNEILNKTYPSESWCLSSAQEIIDVYRKRGFLAKHIVITGGEPCIYDLRPLLNGFEIIGCSCQIETSGTSEIRVSKRTWVTVSPKFLMKNKLPVLNSALYRADEIKYPVAVEKDIKKLDKLLSSIKISDKTIISLQPVSQKTHATELCIRTCIQRNWRLSIQSHKYLNIV

SEQ ID NO: 28931 - protein, 217 aa, unidentified
  source 1..217: note = Phycorickettsia trachydisci
  REGION 1..217: note = tr|A0A2P1P9D0|A0A2P1P9D0_9RICK 7-carboxy-7-deazaguanine synthase OS=Candidatus Phycorickettsia trachydisci OX=2115978 GN=queE PE=3 SV=1
MFGNNPIRGLEKGSGDELFVQDIFLTIQGEGPFVGHAAVFMRLGGCNLACKFCDTEFESFTQIPIDKILEKILSFQTKLVVITGGEPMRQPIEKFCQLLLDNNLKVQIETNGTIFRNLPEKVHIVCSPKAPNGKYYKLREDMLRRINALKFLISTKFEAYKDVPDVGQSGYNIPTYVQPMDEYDAELNKQNTQHAIKLAQKFGYILSVQTHKFIGIP

SEQ ID NO: 28932 - protein, 211 aa, unidentified
  source 1..211: note = Phycosocius bacilliformis
  REGION 1..211: note = tr|A0A2P2E987|A0A2P2E987_9PROT 7-carboxy-7-deazaguanine synthase OS=Candidatus Phycosocius bacilliformis OX=1445552 GN=queE PE=3 SV=1
MTYMVKECFYTLQGEGGQAGRPAVFLRFAGCNLWSGREQDRASAVCSFCDTDFVGTDGEGGGKFETAEALAAHVTALWPDPGQGRPYVVCTGGEPLLQLDEALIDALHAAGFEIAVETNGTHVAPPGIDWICVSPKATAPVVLTRGDELKLVYPQPTAMPDRFAKLDFTHFFLQPMDGPNKVANTQAAVDYCLAHPQWRLSLQTHKVLGIP

SEQ ID NO: 28933 - protein, 225 aa, unidentified
  source 1..225: note = Poribacteria bacterium
  REGION 1..225: note = tr|A0A2D6CYZ0|A0A2D6CYZ0_9BACT 7-carboxy-7-deazaguanine synthase OS=Candidatus Poribacteria bacterium OX=2026781 GN=queE PE=3 SV=1
MKYSEVFHSIQGEGKLVGTPSVFVRTSFCNLRCAWCDTPYTSWEPEDRDISVDELLGAVANFGCRHVVITGGEPFIQERELAELCARLREGGKHVTVETNATVFAPVAADLISMSPKLRNSTPVGDTWEARHEDRRIAPDVIRAFLAAYECQVKFVLDAPDDIDEVHELRGRVPIAAEDIILMPQGLTADETQRRMAWLSEACTRHGYRLSPRMHVDIWGAKRGV

SEQ ID NO: 28934 - protein, 226 aa, unidentified
  source 1..226: note = Poribacteria bacterium
  REGION 1..226: note = tr|A0A3D2RSC4|A0A3D2RSC4_9BACT 7-carboxy-7-deazaguanine synthase OS=Candidatus Poribacteria bacterium OX=2026781 GN=queE PE=3 SV=1
MKYSELFYTIQGEGILIGIPSVFLRTSYCNLRCIWCDTPYTSWKPEDKNISVNKAIEEITKYNCKHVVITGGEPFIQAKELVDLCYKLSKNGHHITIETNATVYEDVSAHLISMSPKLRNSNPKPDNHYYEMHQHKRIQTDVIHKFLDNYTCQLKFVMETPEDLEEIKCLQVEIGIPDEEIVLMPQGISTEETQAKQEWIIELCKQHGYRYSPRVHIDIWGNQRGV

SEQ ID NO: 28935 - protein, 219 aa, unidentified
  source 1..219: note = Propionivibrio aalborgensis
  REGION 1..219: note = tr|A0A1A8XJG6|A0A1A8XJG6_9RHOO 7-carboxy-7-deazaguanine synthase OS=Candidatus Propionivibrio aalborgensis OX=1860101 GN=queE PE=3 SV=1
MVGSNNRLSLKVSEIFFSVQGESSRAGLPTVFVRLTGCPLRCVWCDTEYAFTGGQSMTLNRILEEVGTFKTRLVCVTGGEPLAQKNCLLLLTALCDSAYEVSLETSGAIDIAIVDPRVSRVVDLKAPGSGESGKNRWQNLELLTPHDELKFVIKDRTDYEWARNTIVENRLDTVCPVLFSPVQGAIEPRMLAEWILADRLPVRFQLQLHKLLWGNIRGK

SEQ ID NO: 28936 - protein, 220 aa, unidentified
  source 1..220: note = Pseudomonas adelgestsugas
  REGION 1..220: note = tr|A0A481QP19|A0A481QP19_9PSED 7-carboxy-7-deazaguanine synthase OS=Candidatus Pseudomonas adelgestsugas OX=1302376 GN=queE PE=3 SV=1
MPVATMQNTLRITEIFYSLQGETRTAGLPTVFIRLTGCPLRCQYCDSAYAFSGGTVYTIDNIIEQVAYFKPRYACVTGGEPLAQPNSIQLLKRLCDTGYEVSLETSGALDISAVDLRVSRVVDLKTPDSKEAHRNLYDNIDLLTANDQVKFVICSRGDYNWATSKLIQYDLNRRAGEVLFSLSHDDLNARDLADWVVADNLPVRLQLQLHKYLWNNDPGR

SEQ ID NO: 28937 - protein, 213 aa, unidentified
  source 1..213: note = Raymondbacteria bacterium
  REGION 1..213: note = tr|A0A1F7FL05|A0A1F7FL05_9BACT 7-carboxy-7-deazaguanine synthase OS=Candidatus Raymondbacteria bacterium RIFOXYD12_FULL_49_13 OX=1817890; GN = queE PE=3 SV=1
MDLVVSEIFVSLQGESSEAGRRCAFVRLAGCNLDCAYCDTRYARTGGKKMTLAQVITAVEKLNCPLVEVTGGEPLHQPKSVDLMKALLKKGHEVLLETNGSCDLSPVPRRIKIIMDIKTPSSNMTQYNMLSNIRLLKRTDEIKFVITDKRDYSFSRQIIKKYKLDKKCRVLLSPEQTQGSAQHLAQWILNDKLNVRLNLQLHKIVWPGRKKGI

SEQ ID NO: 28938 - protein, 265 aa, unidentified
  source 1..265: note = Regiella insecticola
  REGION 1..265: note = tr|E0WR21|E0WR21_9ENTR 7-carboxy-7-deazaguanine synthase OS=Candidatus Regiella insecticola LSR1 OX=663321; GN = queE PE=3 SV=1
MKFALGANKGVSQNMRGQFGEKITICNNHRSFLLLLEILMLYPINEIFQSLQGEGYFTNVPAIFIRLQGCPVACSWCDTKHTWDIKKDKEIDIQGITVKTVAKDTWSNANEQQLVAICKEKYQARHVVITGGEPCLYDLQPLTSLLEENGYRCQIETSGTHPVRCSTASWVTVSPKIGMKGGLKLLDQALQRADEIKHPVARERDIERLNNLLDKLNDGKKPVIALQPIRKTEKESEEATKLCIETCIKHNWRLSVQMHKYLKIR

SEQ ID NO: 28939 - protein, 271 aa, unidentified
  source 1..271: note = Roizmanbacteria bacterium
  REGION 1..271: note = tr|A0A2G9Y6L7|A0A2G9Y6L7_9BACT 7-carboxy-7-deazaguanine synthase OS=Candidatus Roizmanbacteria bacterium CG23_combo_of_CG06-09_8_20_14_all_35_49 OX=1974863 GN=queE P E=3 SV=1
MGNSYEYGCLYKKRSMKIYRPTVLDKQRIKPIPNMLKVSGDQVFATFQGEGITAGQPAVFLRLHYCNLACSWCDTKYTWDKTRKEFWQEPIDWSYPEAVTKIKAAWLQKFGLKTPDSKKRLVITGGEPLLQQAKIVKLLQFLPNWRVEIETNGTIIPLAELSNCQINCSPKLENSGNLLSLRFKSEVLKQINSLPNSWFKFVVVKAKDLEEIDEIVTCCALNPEKILIMPEGYTVETISEHLIQVKTEVQKRKWRVIQRNQIIWYGNKRRT

SEQ ID NO: 28940 - protein, 276 aa, unidentified
  source 1..276: note = Roizmanbacteria bacterium
  REGION 1..276: note = tr|A0A1F7I248|A0A1F7I248_9BACT 7-carboxy-7-deazaguanine synthase OS=Candidatus Roizmanbacteria bacterium RIFCSPHIGHO2_12_FULL_39_8; OX = 1802050 GN=queE PE=3 SV=1
MPLLAKKTEMKIKKNTKRASDFLKSKVPKKYKDFDKLRMMEECFKVSGDGVFYTVQGEGISTGLPSCFLRLHTCNLRCVWCDTWYTWNHNTKEFWTEFQDWTIEKTKEKIEKTWGCENSLIQKRLVITGGEPLIQKNKIDKLVELMPGWVFEVETNGTIMPTENMLKKFQFNCSPKLQNSLNPKAARIKKDVLIHLNKVNTMFKFVVTSAKDLEEIENDFIRPFSLDVNRIVVMPQGITSDELQINMRKIVEAVKKRGYRLMGRLQCEIWGGRRKV

SEQ ID NO: 28941 - protein, 228 aa, unidentified
  source 1..228: note = Rokubacteria bacterium
  REGION 1..228: note = tr|A0A0T5ZYY1|A0A0T5ZYY1_9BACT 7-carboxy-7-deazaguanine synthase OS=Candidatus Rokubacteria bacterium CSP1-6 OX=1640509 GN=queE PE=3 SV=1
MLQRADLRKSLTGRIAEVFFSIQGEGPTAGMPAVFVRLQGCSVGCAWCDTKYSWDPRAGREVALDEVVEEAAAFPCRRSVITGGEPLESSLFAPLVEALTTRGFTLEVETSGTLAPPAVAVAQWNVSVKLAGSGVPEAKRINPDAIREFLRLGAWWKFVVVDASNVAEVLRLAERFAIPRERILLMPEGVRREEILERSPWVWEECKRYGFRFSPRLHILLWGAKRGV

SEQ ID NO: 28942 - protein, 232 aa, unidentified
  source 1..232: note = Rokubacteria bacterium
  REGION 1..232: note = tr|A0A2V6R4H5|A0A2V6R4H5_9BACT 7-carboxy-7-deazaguanine synthase OS=Candidatus Rokubacteria bacterium OX=2053607 GN=queE PE=3 SV=1
MWAMPTAAALRSNDLTLRVSEVFASIQGEGVTAGTPSVFVRLQGCAVGCAWCDTKYSWSPTGGRETTLASLMAEVTAAGCDNVVVTGGEPLEHPAFAPLVAALKQLGRRVEVETAGTRVPPEAPVDQWNVSLKLAHAGVAESTRLRPEAIERLRDLDAWFKFVVATPADLAEVMELQARYRLPSERILLMPLGMRRQEQETLTPAVVDWCRERGFRFSPRLHILIWGPRRGV

SEQ ID NO: 28943 - protein, 209 aa, unidentified
  source 1..209: note = Saccharicenans subterraneum
  REGION 1..209: note = tr|A0A3E2BNS2|A0A3E2BNS2_9BACT 7-carboxy-7-deazaguanine synthase OS=Candidatus Saccharicenans subterraneum OX=2508984 GN=queE PE=3 SV=1
MLPPPTLKISEIFFSAAGEGLRQGQPTIFVRFSGCNLRCSFCDTKYAWKGGKELLPEEILDRIAPLKNRYKTNWVCLTGGEPLLQDVGALVRLLRRVSFRVHIETNGTRPVPVKPDWLTVSPKPPVYKITSDCLRLASEVKLVVTRSLKPGEIGRIREKFSENIPLLLQPQSHAAWSYKKAWKLYIQAIQEGLPNIRLSGQLHKIYGIK

SEQ ID NO: 28944 - protein, 245 aa, unidentified
  source 1..245: note = Saganbacteria bacterium
  REGION 1..245: note = tr|A0A2H0XXH1|A0A2H0XXH1_9BACT 7-carboxy-7-deazaguanine synthase OS=Candidatus Saganbacteria bacterium CG08_land_8_20_14_0_20_45_16; OX = 2014293 GN=queE PE=3 SV=1
MSTTEAQLVDIFNSIQGEGLYVGERQIFVRLAGCNISCQYCDSESALQIPQEFTVETDPGMHKVQKFKNPTSVDQLVQLIEAFGKDFPVSLTGGEPLLQVDFLKNFLPKLKQKKYLETNGTLPDHLAEIIELIDVVAMDIKLASATGLSSYDKEHRRFLEVAYMKEVFVKIVFTKKSKIKEIDEAVRLIADVDEKIPLVLQPVTPHGAIKHRPLPDQIFAFYNVARRRLKTVRVIPQVHKVLGLS

SEQ ID NO: 28945 - protein, 218 aa, unidentified; identical to SEQ ID NO: 28800
  source 1..218: note = Scalindua brodae
  REGION 1..218: note = tr|A0A0B0ENF4|A0A0B0ENF4_9BACT 7-carboxy-7-deazaguanine synthase OS=Candidatus Scalindua brodae OX=237368 GN=queE PE=3 SV=1

SEQ ID NO: 28946 - protein, 216 aa, unidentified
  source 1..216: note = Scalindua sp.
  REGION 1..216: note = tr|A0A523CM97|A0A523CM97_9BACT 7-carboxy-7-deazaguanine synthase OS=Candidatus Scalindua sp. AMX11 OX=2555784 GN=queE PE=3 SV=1
MNESRLMVNELFMSIQGESSHAGIPCIFIRLTGCNLRCTYCDTTYAYDKGVEMSLQTIEEKIEAFHCKNICITGGEPLLQNNIKELIRVLLHLKYKVFVETNGSVNISLLPKNVIRVMDIKCPDSHMHGEMDWDNIERLRPNDDVKFVISTKDDYEWAKQITITYNLTSKSNVLFGVVYGTLEPRILAEFILRDKLDVRFQLQLHKYIWPNKTRGV

SEQ ID NO: 28947 - protein, 212 aa, unidentified
  source 1..212: note = Schekmanbacteria bacterium
  REGION 1..212: note = tr|A0A1F7RQY2|A0A1F7RQY2_9BACT 7-carboxy-7-deazaguanine synthase OS=Candidatus Schekmanbacteria bacterium RBG_16_38_10 OX=1817879 GN=queE; PE = 3 SV=1
MKICEIFYNIQGESTFSGLPCVFIRTSGCNLRCSYCDTRFAYEEGYEIKTGKILEKIKKFNCNLIEITGGEPLLQEEVYDFIEKSLEANYRILIETNGSILTNRLPKQVIKILDIKCPGSGQSEMMDLNNLSYLKMNDQVKFVIMDEGDYNWAKNLISENNLTSITENILFSSVYGILDPKKLAEWILKDNLNVRLQLQIHKIIWGSCMRGV

SEQ ID NO: 28948 - protein, 211 aa, unidentified
  source 1..211: note = Schekmanbacteria bacterium
  REGION 1..211: note = tr|A0A1F7RD82|A0A1F7RD82_9BACT 7-carboxy-7-deazaguanine synthase OS=Candidatus Schekmanbacteria bacterium GWA2_38_11 OX=1817876 GN=queE; PE = 3 SV=1
MKICEIFYSIQGESTFSGFPCIFVRTSGCNLRCTYCDTKFAYEEGSEMTVNEIIERIKQYNCRMLEITGGEPLLQEDVYKLIERALKKKYKVLLETNGSLRINKLPVQVIKILDVKCPGSGQSDLMDFENLSYLNKEDQIKFVLSDRADYDWAKEIMLADNLINRVNVLLSPVFGSLELKKLAEWILADNLDVRFQIQLHKIIWDPCMRGV

SEQ ID NO: 28949 - protein, 204 aa, unidentified
  source 1..204: note = Schmidhempelia bombi
  REGION 1..204: note = tr|A0A484GCR2|A0A484GCR2_9GAMM 7-carboxy-7-deazaguanine synthase OS=Candidatus Schmidhempelia bombi str. Bimp OX=1387197 GN=queE PE=3 SV=1
MTKFNIVEIFESLQGEGYNTGMPAIFIRFAGCNLNCQWCDTNFRQYTKMTLEMILEKIALFESKNIIITGGEPTLQKYLPLLLSQLKKNGYFIAIESNGLGKIDPHFDYIALSPKFCYWNRYQTIQQPQIDEIRIVVEEKSDFYDFCLFIEKHFHAKRYYLSPCELDGQFNILATIQILGRINQGRTDNKWLLSFQTHKFANID

SEQ ID NO: 28950 - protein, 226 aa, unidentified
  source 1..226: note = Sodalis pierantonius
  REGION 1..226: note = tr|W0HHY6|W0HHY6_9GAMM 7-carboxy-7-deazaguanine synthase OS=Candidatus Sodalis pierantonius str. SOPE; OX = 2342 GN=ygcF PE=3 SV=1
MQYPLNEIFQTLQGEGYFTGVPAIFIRLQGCPVGCSWCDTKHTWQQDETDHVPAGEIPLKTADSSRWASLTAEEMIAMIAMIAQQGWTARHVVITGGEPCLHDLMPLTHALEQQGFSCQIETSGTQDVHCTPQTWVTVSPKINMRGGLPVLAQALGRSDEIKHPVARQRDIDELDALLQTLHDTKQRVIALQPISQKEAATRLCIETCIARNWRLSMQTHKYLNIA

SEQ ID NO: 28951 - protein, 212 aa, unidentified
  source 1..212: note = Sulfobium mesophilum
  REGION 1..212: note = tr|A0A2U3QH80|A0A2U3QH80_9BACT 7-carboxy-7-deazaguanine synthase OS=Candidatus Sulfobium mesophilum OX=2016548 GN=queE PE=3 SV=1
MKICEIFTSIQGESTYAGLPCTFVRLSGCNLRCRYCDTKYSYYEGVEMSAEDIIGHVRAAGVPLVEITGGEPLLQQQDALLLVRDLLNEGYEVLVETNGSLSICEIDKRAVIILDVKTPGSGMSNQMDFSNFDCLKPSDEVKFVVCDRSDYDWAKDVVAEFRLKEKAKVLFSPAVGTIQPAELARWIINDKLDVRFNLQIHKYIFGPEERGV

SEQ ID NO: 28952 - protein, 223 aa, unidentified
  source 1..223: note = Sulfopaludibacter sp.
  REGION 1..223: note = tr|A0A2N9MHT4|A0A2N9MHT4_9BACT 7-carboxy-7-deazaguanine synthase OS=Candidatus Sulfopaludibacter sp. SbA3 OX=2043164 GN=queE PE=3 SV=1
MKIAELFYSIQGEGSLVGVPSVFIRTSGCNLRCAWCDTPYTSWQPEGTELSLDQILDEVKAHPARHVVVTGGEPMIAPEILPLTERLRALGLHITIETAGTVFAPVACDLMSISPKLSNSTPAGSWSAQHNRLRIQPQVLAELMGRYDYQLKFVIARREDMEELRAIVQFLGARRECVILMPEGIDSERLRERGLWLAEICKEEGFRFSPRLHVDLWGNQRGV

SEQ ID NO: 28953 - protein, 223 aa, unidentified
  source 1..223: note = Sulfopaludibacter sp.
  REGION 1..223: note = tr|A0A2U3LWY6|A0A2U3LWY6_9BACT 7-carboxy-7-deazaguanine synthase OS=Candidatus Sulfopaludibacter sp. SbA4 OX=2043165 GN=queE PE=3 SV=1
MKIAELFYSLQGEGSLVGVPSFFIRSSGCNLRCSWCDTPYTSWEPEGCDMTIRQILDEVKAHPARHVVVTGGEPMIASEIIPLTERLRGLGLHITIETAGTVFQPVACDLMSISPKLANSTPEGRWAAQHDRLRIQPETLAKLMERYEYQLKFVVEKPADLEEVRSLTESLAAPRERVILMPEGTDAEGLRQRGVWLAEICKDEGFRFSPRLHVDLYGNRRGV

SEQ ID NO: 28954 - protein, 226 aa, unidentified
  source 1..226: note = Sulfotelmatobacter sp.
  REGION 1..226: note = tr|A0A2N9N501|A0A2N9N501_9BACT 7-carboxy-7-deazaguanine synthase OS=Candidatus Sulfotelmatobacter sp. SbA7 OX=2043160 GN=queE PE=3 SV=1
MQITEIYKSIQGESTHAGLPCVFVRLTGCNLRCSWCDSEYTFTGGHRMSMEEVLEQVEQLSPGGLVEITGGEPMLQEKEVVPLMQRLLDDGYTVLLETSGERPLQSVPKGVIKIVDVKCPHSGEPDTFDLENLEVISSGDEVKFVLSDRTDYEFARDFEARHELTRRVNAVLFSPAFTKDAHGGRDTSHCLLDPRELAEWMLADNVPARLGLQLHKFIWDPALKGV

SEQ ID NO: 28955 - protein, 227 aa, unidentified
  source 1..227: note = Sulfotelmatobacter kueseliae
  REGION 1..227: note = tr|A0A2U3L1K8|A0A2U3L1K8_9BACT 7-carboxy-7-deazaguanine synthase OS=Candidatus Sulfotelmatobacter kueseliae OX=2042962 GN=queE PE=3 SV=1
MQITEIYKSLQGESTYAGLPCVFVRLTGCNLRCTWCDSEYTFQGGRKMATEEVRDEVSRLNPGGGLVEITGGEPMLQEKEVVPLMQHLVNDGYRVLLETSGERPLERVPAGVVKIVDVKCPDSGEVGTFRVDNLKALTARDEVKFVLASRADYEFAREFIRQHNLAEEVNAVLFSPAFRKDGTGPHDSSQCLLDPKELAEWMIADNVPARLGLQLHKFIWDPARKGV

SEQ ID NO: 28956 - protein, 212 aa, unidentified
  source 1..212: note = Sulfotelmatomonas gaucii
  REGION 1..212: note = tr|A0A2N9LC67|A0A2N9LC67_9BACT 7-carboxy-7-deazaguanine synthase OS=Candidatus Sulfotelmatomonas gaucii OX=2043161 GN=queE PE=3 SV=1
MSYAVKEIYYTLQGEGAQTGRPAVFCRFAGCNLWSGREQDRASAICKFCDTDFADTNGIGGGHFAVAEALAAAIERKWPADAGVPERFVVCTGGEPLLQLDADLIVALHKRGFEIAIETNGTIEAPEGLDWICVSPKAGAEFRQRSGDELKLIYPQPGADPTEFEGLPFRHFFLQPMDGPHRDENTTLALNYCLEHPRWRLSLQTHKIIGIP

SEQ ID NO: 28957 - protein, 252 aa, Sulfuricurvum sp.
  REGION 1..252: note = tr|K7SCK0|K7SCK0_9HELI 7-carboxy-7-deazaguanine synthase OS=Candidatus Sulfuricurvum sp. RIFRC-1; OX = 1249480 GN=queE PE=3 SV=1
MLYLVEHFYSVQGEGKYTGVPSLFFRFGGCNLKCEGFGCTERSPDGSEVLGCDTVYAVDRKAFGELWMEIEELQSLIWIMNGYRLPPHVDVVLTGGEPLIYANEPIFVEFIEYLIGQGHRVTFETNATIAPDFKRYPFYAQATYALSVKLSNSGEPLDKRVKPEAYGAIIANAKESFFKFTVDEPSLVSYIESEIDEIIALHPYTPVYCMPLGGDKAHIEANCEAVIEFCKRRGFIYSDRLHIRIWDQNHGV

SEQ ID NO: 28958 - protein, 166 aa, unidentified
  source 1..166: note = Sumerlaea chitinovorans
  REGION 1..166: note = tr|A0A2Z4Y550|A0A2Z4Y550_9BACT Queuosine Biosynthesis QueE Radical SAM OS=Candidatus Sumerlaea chitinovorans OX=2250252 GN=BRCON_1507 PE=4 SV=1
MVLSRILSQVHELGCPLVEVTGGEPLAQRECITLLHALLEQGYTVLLETSGAYSLREVPTEVHRIVDLKCPSSGEMHRNCWENISLLTLRDEVKFVVGTREDYEWAQDQIHQHRLFDRCGAVLFSPVWGQLAPRELASWLLADHLFAARLQIQLHKVIWPTESRGV

SEQ ID NO: 28959 - protein, 111 aa, unidentified
  source 1..111: note = Synechococcus spongiarum
  REGION 1..111: note = tr|A0A1T1D6Z6|A0A1T1D6Z6_9SYNE 7-carboxy-7-deazaguanine synthase QueE (Fragment); OS = Candidatus Synechococcus spongiarum LMB bulk15N; OX = 1943583 GN=BV53_01140 PE=4 SV= 1
MSTGGLLRVVEHFHSIQGEGVHMGLSAVFLRLAGCSVGCPWCDTKESWPAHGHPLVPVERLVDTVRQARPALVVITGGEPLQQDLTSLCQALAPLAIPRHLETSGVAPLSG

SEQ ID NO: 28960 - protein, 207 aa, unidentified
  source 1..207: note = Synechococcus spongiarum
  REGION 1..207: note = tr|A0A1T1D207|A0A1T1D207_9SYNE 7-carboxy-7-deazaguanine synthase OS=Candidatus Synechococcus spongiarum LMB bulk15M OX=1943582 GN=queE; PE = 3 SV=1
MSTGGLLRVVEHFHSIQGEGVHMGLSAVFLRLAGCSVGCPWCDTKESWPAHGHPLVPVERLVDTVRQARPALVVITGGEPLQQDLTSLCQALAPLAIPRHLETSGVAPLSGAFEWITLSPKRHHPPQPALLARCHELKVVIHEPADLDFAMAMATTCQNMCAASPGPQLCVQPGAGSATGAHLAIRHVKQYPQWRLSLQTHKWLGVR

SEQ ID NO: 28961 - protein, 247 aa, unidentified
  source 1..247: note = Syntrophonatronum acetioxidans
  REGION 1..247: note = tr|A0A424YFI5|A0A424YFI5_9FIRM 7-carboxy-7-deazaguanine synthase OS=Candidatus Syntrophonatronum acetioxidans OX=1795816 GN=queE PE=3 SV=1
MEAYLREIFSSFQGEGIFIGYRQVFLRFAGCNLNCFYCDTERGECPSFCCLEEKEGSGYFKKLPNPFKYNDLLKAINNFPLNKHHSLSLTGGEPLLHGEFLKDFLPLIKEQGNIKIFLETNGTLPDYLEIILPYIDIIAMDFKLPSSLKGKNYLKRHLKFLKMSLQKEAFIKIILTEHSREEEIVEFLTATREISDSVPVVFQPMVNPGNAYSSLSPEKILNFQSLGLDYYPGIRVIPQAHKILKCM

SEQ ID NO: 28962 - protein, 207 aa, unidentified
  source 1..207: note = Syntrophosphaera thermopropionivorans
  REGION 1..207: note = tr|A0A4V2ZQ46|A0A4V2ZQ46_9BACT 7-carboxy-7-deazaguanine synthase OS=Candidatus Syntrophosphaera thermopropionivorans OX=2593015 GN=queE; PE = 3 SV=1
MSLNICEIFYSLQGESTYSGLPCIFIRLSGCNLRCSWCDTTYTWSNGKEMSIEQILQEIRKYPCSLVEITGGEPLLQKRTIELMEILHQEKYRILLETNGTQSLQNVPDYVVKIVDVKCPGSGFGESFLMENLNFLLPVDEIKFVLASREDYMFALNFIRNNALEDRILLFSPVIGHLAPETLAQWMLKDGVPAHLQFQLHKLLQLA

SEQ ID NO: 28963 - protein, 221 aa, unidentified
  source 1..221: note = Tachikawaea gelatinosa
  REGION 1..221: note = tr|A0A090BWG1|A0A090BWG1_9ENTR 7-carboxy-7-deazaguanine synthase OS=Candidatus Tachikawaea gelatinosa OX=1410383 GN=queE PE=3 SV=1
MNYPINEVFQTLQGEGFYTGTPAIFIRMQYCQIKCNWCDTKYTWNKKNEKKISINNILKKKKKDQWCLANPQQLLNIILKKKWTARHLVITGGEPTKYDLRPLIYVFEKFGFFCQIETSGAYPIYCFKNTWVTVSPKKNIKKKSILTDSLLRANEIKYPVFSEKDISDLDFLLSILKNRKKYIVSLQPINQNNIATNICIKTCIARNWRLSVQMHKYLNLK

SEQ ID NO: 28964 - protein, 244 aa, unidentified
  source 1..244: note = Tagabacteria bacterium
  REGION 1..244: note = tr|A0A2M8L9G1|A0A2M8L9G1_9BACT 7-carboxy-7-deazaguanine synthase OS=Candidatus Tagabacteria bacterium CG10_big_fil_rev_8_21_14_0_10_40_13; OX = 1975022 GN=queE PE=3 SV= 1
MVNKAALSNTLRVSGDLEFATLQGEGDSIGKPAVFLRLQMCNLKCKWCDTKYSWDQSTDEYWNGFQDWTYKKAANRVEMSWQDCFHTSPNKRLVITGGEPLLQQKGIEELVKLLPEYIVEIETNGTVAPNLNLSRKCQFNISPKLESSNNPLELRYKPEILKEFNKLKQSWFKFVVVSLEDFKEIDKIVYECDLRQNKIIIMPEGVTNEEVTKKLRIIHKEVCSRGWRLLPRFHLQLFGAKRRT

SEQ ID NO: 28965 - protein, 234 aa, unidentified
  source 1..234: note = Tectomicrobia bacterium
  REGION 1..234: note = tr|A0A1F7TRL7|A0A1F7TRL7_9BACT 7-carboxy-7-deazaguanine synthase OS=Candidatus Tectomicrobia bacterium RIFCSPLOWO2_12_FULL_69_37; OX = 1802343 GN=queE PE=3 SV=1
MTHASATARALRFPLADPLFYSLQGEGATLGRPSVFARLMGCTVGCAWCDTKYSWAGPPAAELAGEEILAYCRERPGCQVVVTGGEPLESPFFEVLLAMLHEEGLRIEVETSGYLEPSLVALALADQWNVSPKLASAGIAEEKKPRSLGWLHRAKEPYLKFVLHKPAEIAEVDALLQSLGLAGWPPERVIISPGGKKRPEMEKRLLPLAEAALARGFRFTPRLHVLLWGDKRGV

SEQ ID NO: 28966 - protein, 234 aa, unidentified; identical to SEQ ID NO: 28965
  source 1..234: note = Tectomicrobia bacterium
  REGION 1..234: note = tr|A0A1F7THA9|A0A1F7THA9_9BACT 7-carboxy-7-deazaguanine synthase OS=Candidatus Tectomicrobia bacterium RIFCSPLOWO2_02_FULL_70_19; OX = 1802342 GN=queE PE=3 SV=1

SEQ ID NO: 28967 - protein, 220 aa, unidentified
  source 1..220: note = Tenderia electrophaga
  REGION 1..220: note = tr|A0A0S2TI87|A0A0S2TI87_9GAMM 7-carboxy-7-deazaguanine synthase OS=Candidatus Tenderia electrophaga OX=1748243 GN=queE PE=3 SV=1
METRSAQQTRLRITEIFYSLQGEARSVGFPTVFIRLTGCPLRCGYCDTSYAFQGGEWWLIDDILDEVTKYAARHVCVTGGEPLAQSACLELLQILCDKGFQVSLETSGALDVSQVDPRVSKVMDLKTPASGEQGRNRLENLEYMSAHDQLKFVICDRNDYLWAKEMIIRSELAERGEILMSPGYGVQDATELADWILQDRLPVRFQVQLHKILWGDEPGR

SEQ ID NO: 28968 - protein, 237 aa, unidentified
  source 1..237: note = Terasakiella magnetica
  REGION 1..237: note = tr|A0A1C3RLT2|A0A1C3RLT2_9RHIZ 7-carboxy-7-deazaguanine synthase OS=Candidatus Terasakiella magnetica OX=1867952 GN=queE PE=3 SV=1
MSKPINICEIFGPTIQGEGAQIGRPTVFVRTAGCDYRCSWCDTLYAVDTAHANDWRKVMAADVMAEIEQLSQNTPMSVTLSGGNPAMQPLGELIELGQEKGYDFSMETQGSLARDWFSKLDNLTLSPKPPSSGIETDWSLFKDCVEAAGSKTNISLKIVIFDEADYKYAQLAAKLFPQLPLYLQAGNHMVDDQSDADIDGVLERLRWLAEKVAQDRWQKACVLPQLHVLAWGNKRAA

SEQ ID NO: 28969 - protein, 204 aa, unidentified
  source 1..204: note = Termititenax aidoneus
  REGION 1..204: note = tr|A0A388T956|A0A388T956_9BACT 7-carboxy-7-deazaguanine synthase OS=Candidatus Termititenax aidoneus OX=2218524 GN=queE PE=4 SV=1
MLQIVSVRTDIQRRGLYAGQRQLLIEFALSNIASSLSGVEGNTGEGQAYEPEELLLAVKDEAKRKGEVICLTGGEPLLQINELLPLLESMPLPLYLETNATLPDRLPEIQPYVSLFGLKYTPDYQKEFLESLALLQKEETFVLLPIAKDTQLAAVESLAKLLSVIRRDLPVVIEPAAAVKNALALQTVALRYLQNVRVVPALRI

SEQ ID NO: 28970 - protein, 231 aa, unidentified
  source 1..231: note = Termititenax persephonae
  REGION 1..231: note = tr|A0A388TI61|A0A388TI61_9BACT 7-carboxy-7-deazaguanine synthase OS=Candidatus Termititenax persephonae OX=2218525 GN=queE PE=3 SV=1
MIMQANIQEIFRSIQGEGFYAGTPTTFVRFSGCNLRCAYCDTKKSWRKTKYCAYQPVEFTRRWVRVPNEVAVADCADLILGLSPRGLVSFTGGEPLLHAGYIARVIKSLGGAYTYLIETNGTLPAAVRRLPDLPNIVYSIDIKNRGFVKFYQAVPRKSGKYVKIILTKKTEAEETLPTLREAGVSARTPIFLQPVDNKLDKKQLQKFMYILEKNGYTFKVIPQLHRFVHLK

SEQ ID NO: 28971 - protein, 212 aa, unidentified
  source 1..212: note = Thermochlorobacter aerophilum
  REGION 1..212: note = tr|A0A395M320|A0A395M320_9BACT 7-carboxy-7-deazaguanine synthase OS=Candidatus Thermochlorobacter aerophilum OX=1868324 GN=queE PE=3 SV=1
MLKVNEIFFSIQGESSQMGWPCVFVRLAECDLRCTYCDTEYAFYEGEMLSLEHIIEKVSSYGCKLVEITGGEPLLQSEVYELMTRLCDLGFSVMLETGGHILVDKVDARVKKIIDMKTPSSGMLRKNDYRNLEIAAPTDEIKFVIGSRLDYDWAKQVIEQYRLTERLTVLMSVVFGELSPQTLAEWILADRLPVRFQLQMHKYIWSPETRGV

SEQ ID NO: 28972 - protein, 212 aa, unidentified
  source 1..212: note = Thermochlorobacteriaceae bacterium
  REGION 1..212: note = tr|A0A081SIQ2|A0A081SIQ2_9BACT 7-carboxy-7-deazaguanine synthase OS=Candidatus Thermochlorobacteriaceae bacterium GBChlB OX=1519464; GN = queE PE=3 SV=1
MLRINEIFYSIQGESSRMGLPCVFVRLTECNLRCTYCDTEYAFYEGTDRSLESIIDEVRAYNCNLVEITGGEPLLQAPVYELMTRLCDLGYEVMLETSGHILVDKVDPRVKKIIDMKSPTSGMLKKNDYRNLEIASPNDEIKFVLGSRLDYDWAKKVIEEYQLTEKLTVLMSVVFGDLAPQELAEWILADRLKVRFQLQMHKFIWSPETRGV

SEQ ID NO: 28973 - protein, 219 aa, unidentified
  source 1..219: note = Thermokryptus mobilis
  REGION 1..219: note = tr|A0A0S4MVI6|A0A0S4MVI6_9BACT 7-carboxy-7-deazaguanine synthase OS=Candidatus Thermokryptus mobilis OX=1643428 GN=queE PE=3 SV=1
MRKGKNILTVNEIFFSIQGESSWMGMPCVFVRLTYCDLRCVWCDTEYAFYEGVDMTIDEVIEKVKSYNCGLVEITGGEPLLQENSLELMKRLCDEKFTVLLETGGHRDISVVDPRVHIIMDVKCPGSKMSHKNRWENISYLTKKDEVKFVIKDRVDYEWAKEVVNKYNLFERVGAVLFSPVFGEIEPSILAGWILEDRIPVRFQIQLHKYIWSPEARGV

SEQ ID NO: 28974 - protein, 213 aa, unidentified
  source 1..213: note = Thiodiazotropha endoloripes
  REGION 1..213: note = tr|A0A1E2US09|A0A1E2US09_9GAMM 7-carboxy-7-deazaguanine synthase OS=Candidatus Thiodiazotropha endoloripes OX=1818881 GN=queE PE=3 SV=1
MSQLRITEIFVSLQGESNTVGLPTVFIRLTGCPLRCVYCDTEYAFSGGEKMPIESILQQLSNLRINRVCVTGGEPLAQAACTELMSGLCDAGYEVSLETSGALDISTVDPRVVRVIDLKTPGSGEVSKNRLTNLDCLREGDQLKFVISDRDDYEWSRAMLKDHELESRCEILFSPVHGKQNPTQLAEWILQDRLNVRFQMQLHKLLWDDQPGR

SEQ ID NO: 28975 - protein, 213 aa, unidentified
  source 1..213: note = Thiodictyon syntrophicum
  REGION 1..213: note = tr|A0A2K8U269|A0A2K8U269_9GAMM 7-carboxy-7-deazaguanine synthase OS=Candidatus Thiodictyon syntrophicum OX=1166950 GN=queE PE=3 SV=1
MTYLVKEVFYSLQGEGARTGRAAVFCRFAGCNLWSGRDEDRSRAVCTFCDTDFRGTDGVGGGRYPDAARLAARVRAAWPAPAASGAVPYVVCTGGEPLLQLDPPLIAALHAQGFEIAVETNGTRTAPPGIDWVCVSPKAAAGLRLLAGQELKLVYPQADAPPERFTNLAFRHFFLQPMDGPDLAANTARAIAYCKAHPRWRLSLQTHKLLGIP

SEQ ID NO: 28976 - protein, 211 aa, unidentified
  source 1..211: note = Thioglobus sp.
  REGION 1..211: note = tr|A0A432TSQ6|A0A432TSQ6_9GAMM 7-carboxy-7-deazaguanine synthase OS=Candidatus Thioglobus sp. OX=2026721 GN=queE PE=3 SV=1
MVNLNINEIFYSLQGEAREVGLPTVFVRLTGCPLRCTYCDTEYAFKGNNMLSIDQILTEIKQYNTRYVCVTGGEPLAQIDCHVLLDALIKDGYQVSLETSGSIDIGAVNPGVSVVMDVKTPSSNESKHNKYDNIAKLKLKDQLKFVIGSKEDFDWSVDTMNQYPTEAGVLFSPVFEAVTPTQMADWILDKQLNVRMQVQMHKLLWGDEPGR

SEQ ID NO: 28977 - protein, 74 aa, unidentified
  source 1..74: note = Thioglobus sp.
  REGION 1..74: note = tr|A0A432TYM5|A0A432TYM5_9GAMM 7-carboxy-7-deazaguanine synthase QueE (Fragment); OS = Candidatus Thioglobus sp. OX=2026721 GN=DSZ18_04250; PE = 4 SV=1
KLKDQLKFVIGSKEDFDWSVDTMNQYPTEAGVLFSPVFEAVTPTQLADWILDKQLNVRMQVQMHKLLWGDEPGR

SEQ ID NO: 28978 - protein, 205 aa, unidentified
  source 1..205: note = Thiomargarita nelsonii
  REGION 1..205: note = tr|A0A0A6S393|A0A0A6S393_9GAMM 7-carboxy-7-deazaguanine synthase OS=Candidatus Thiomargarita nelsonii OX=1003181 GN=queE PE=3 SV=1
MSYSLKEIFYTLQGEGLHTGRAAVFCRFTGCNLWSGRENDRAKAVCQFCDTDFVGIDGGGKFATAQALVDKVVATWPSTGRPYVVCTGGEPLLQLDTPLIEAFHQAGFEIAIETNGTLPAPPEIDWICVSPKAPLVLESGDELKLVFPQPDAPPDKYQKLDFKYFFLQPMDGPQRELNTQLALRYCLAHPQWRLSLQTHKWLGIS

SEQ ID NO: 28979 - protein, 242 aa, unidentified
  source 1..242: note = Tokpelaia hoelldoblerii
  REGION 1..242: note = tr|A0A1U9JSK1|A0A1U9JSK1_9RHIZ 7-carboxy-7-deazaguanine synthase OS=Candidatus Tokpelaia hoelldoblerii OX=1902579 GN=queE PE=3 SV=1
MNAAEMIRISEIFGPTIQGEGMLIGEPTVFVRTAGCDFRCSWCDTLHAVDSASRHTWRLLDVDTIWAEVRRLSGGKPLTISLSGGNPAIQPLEALLQKGRQEGYRFAMETQGSLFKPWFAQLDTLVVSPKPPSSNMENDWQTISRCLALSSVQTILKIPVLDETDYQFARMAGLRFPHVQTFLQPVNQTPPPLDETQPDGLDMDDILNRFRWLVERCMEDQWYDVRLLPQLHVLVWGNLKGV

SEQ ID NO: 28980 - protein, 234 aa, unidentified
  source 1..234: note = Wallbacteria bacterium
  REGION 1..234: note = tr|A0A352M5B9|A0A352M5B9_9BACT 7-carboxy-7-deazaguanine synthase OS=Candidatus Wallbacteria bacterium OX=2053640 GN=queE PE=3 SV=1
MKKENDAKNLKFKVNEIFKSVQGESSYAGLNCAFVRLSGCNLRCSYCDTQYAYKYGRYLTAGEIIEKVDRLGAHIVELTGGEPLFQKDARLLIDALADYVEGRSALRPNAIAPRLLIETSGSLSIKGINPKAVIIMDIKTPSSGCAGMMEPENLKYIRPVDEIKFVIGDRDDYEYCKKIILDNSLTERCGVLLSAVYGRIKPEKIIGWMLKDCIDARFQLQMHKYVWPADKKGV

SEQ ID NO: 28981 - protein, 234 aa, unidentified; identical to SEQ ID NO: 28980
  source 1..234: note = Wallbacteria bacterium
  REGION 1..234: note = tr|A0A1F7WTK6|A0A1F7WTK6_9BACT 7-carboxy-7-deazaguanine synthase OS=Candidatus Wallbacteria bacterium GWC2_49_35 OX=1817813 GN=queE PE=3; SV = 1

SEQ ID NO: 28982 - protein, 247 aa, unidentified
  source 1..247: note = Woesebacteria bacterium
  REGION 1..247: note = tr|A0A2H0BJH1|A0A2H0BJH1_9BACT 7-carboxy-7-deazaguanine synthase OS=Candidatus Woesebacteria bacterium CG22_combo_CG10-13_8_21_14_all_39_10 OX=1975059 GN=queE; PE = 3 S V=1
MTKSYKPTPDERLRLKLKPDQFKVSGDQVFFTIQGEGESIGKPAVFLRLHFCNLHCGWCDTGYTWNKNLKEFWQEGKNWSFQRVLQEVSGYPAKRLVITGGEPMLQQEKTGEFIKLIPDWEVEIETNGTIAPLPLLARKCQFNVSPKLGNSGNSLRVRYKPEVLKVFNALPKTTFKFVVQAERDLEEIGRIESECGLDPSKIIITPEGSTQNDIKNHALSVSEQVKQRGWRLLPRLQIMLWGKKRRL

SEQ ID NO: 28983 - protein, 247 aa, unidentified; identical to SEQ ID NO: 28982
  source 1..247: note = Woesebacteria bacterium
  REGION 1..247: note = tr|A0A2M7TP91|A0A2M7TP91_9BACT 7-carboxy-7-deazaguanine synthase OS=Candidatus Woesebacteria bacterium CG_4_10_14_0_2_um_filter_39_14; OX = 1975054 GN=queE PE=3 SV=1

SEQ ID NO: 28984 - protein, 210 aa, unidentified
  source 1..210: note = Candidimonas bauzanensis
  REGION 1..210: note = tr|A0A1M5ZIU4|A0A1M5ZIU4_9BURK 7-carboxy-7-deazaguanine synthase OS=Candidimonas bauzanensis OX=658167 GN=queE PE=3 SV=1
MTYSVKEIFLTLQGEGAQAGRPAVFCRFSGCNLWSGREQDRGTAQCQFCDTDFVGTDGTLGGKYKTTAQLADLLQAAWGGQERHRFVVFTGGEPLLQLDEALIAAVHERGFEIAVETNGTVLPPAGIDWLCTSPKAGTEWIVRQGQELKLVFPQAGMDPAEFEDLPFDEFWLQPMDGPDQAANTRAAIAYCLAHPRWRLSIQTHKLIGIR

SEQ ID NO: 28985 - protein, 210 aa, Candidimonas sp.
  REGION 1..210: note = tr|A0A432DJW2|A0A432DJW2_9BURK 7-carboxy-7-deazaguanine synthase OS=Candidimonas sp. SYP-B2681 OX=2497686 GN=queE PE=3 SV=1
MTYSVKEIFLTLQGEGAQAGRPAVFCRFSGCNLWTGREQDRAMAQCQFCDTDFVGTDGTLGGKYKTADELADLIQATWGVNPRHRFVVFTGGEPLLQLDTSLINALHEREFEIAVETNGTVLPPPGIDWLCTSPKAGTDWILRQGQELKLVFPQPGIDPADFEELPFDEFWLQPMDGPDQAANTQAAIEYCLSHPRWRLSIQTHKLIGIR

SEQ ID NO: 28986 - protein, 210 aa, Candidimonas sp.
  REGION 1..210: note = tr|A0A522GXR3|A0A522GXR3_9BURK 7-carboxy-7-deazaguanine synthase OS=Candidimonas sp.; OX = 1912597 GN=queE PE=3 SV=1
MTYAVKEIFKTLQGEGAHTGRAAVFCRFSGCNLWSGREEDRGKAQCQFCDTDFVGTDGTQGGKYPAPDILADRIESIWGGEADGRFVVFTGGEPLLQLNSQLIDALHARGFTIAVETNGTVQPPHGIDWLCVSPKAGTDWIVRNGDELKLVFPQFSLDPLELEKLEFDHFWLQPMDGLSQQANTNAAIEYCLNHSRWRLSTQTHKLIGIR

SEQ ID NO: 28987 - protein, 210 aa, Capnocytophaga canimorsus
  REGION 1..210: note = tr|F9YQM0|F9YQM0_CAPCC 7-carboxy-7-deazaguanine synthase OS=Capnocytophaga canimorsus (strain 5) OX=860228; GN = queE PE=3 SV=1
MLKKEIQIAVDKGEMLPLMEAFYTIQGEGFHKGTAAYFIRVGGCDVGCHWCDVKESWNAEKHPPTHIEDIVKQANNHSKTIVVTGGEPLTWNMNPLTQKLKAVGLSTHIETSGAYPLSGDWDWICLSPKKLKPPTAEILQKANELKIIIYNKHDFVFAQEMAAKVASNCILYLQPEWSRREKVIPEIVDFVMNNPKWKVSLQTHKYLNIP

SEQ ID NO: 28988 - protein, 210 aa, Capnocytophaga canimorsus
  REGION 1..210: note = tr|A0A0B7H5V7|A0A0B7H5V7_9FLAO 7-carboxy-7-deazaguanine synthase OS=Capnocytophaga canimorsus OX=28188 GN=queE PE=3 SV=1
MLKKEIQIAVDKGEMLPLMEAFYTIQGEGFHKGTAAYFIRVGGCDVGCHWCDVKESWDAEKHPPTHIEDIVKQANNHSKTIVVTGGEPLTWNMNPLTQKLKAVGLSTHIETSGAYPLSGDWDWICLSPKKLKPPTVEILQKANELKIIIYNKHDFVFAQEMAAKVASNCILYLQPEWSRREKVIPEIVDFVMNNPKWKVSLQTHKYLNIP

SEQ ID NO: 28989 - protein, 210 aa, unidentified
  source 1..210: note = Capnocytophaga canis
  REGION 1..210: note = tr|A0A0B7I620|A0A0B7I620_9FLAO 7-carboxy-7-deazaguanine synthase OS=Capnocytophaga canis; OX = 1848903 GN=queE PE=3 SV=1
MLDKETQKAVDKGEMLPLMEAFYTIQGEGFYKGTAAYFIRVGGCDVGCHWCDVKESWDAEKHPPTHIEDIVNQSLKYSKTIVVTGGEPLMWNMFPLTQKLKEKGMKTHIETSGSHSLTGIWDWICLSPKKLRLPTSEIYQKANELKIIIYNSHDFIFAEEMASKVSDDCILYLQPEWSRRDKVIPEIVDFVMKNPKWKVSLQTHKYLNIP

SEQ ID NO: 28990 - protein, 210 aa, Capnocytophaga cynodegmi
  REGION 1..210: note = tr|A0A0B7HFI4|A0A0B7HFI4_9FLAO 7-carboxy-7-deazaguanine synthase OS=Capnocytophaga cynodegmi OX=28189 GN=queE PE=3 SV=1
MLDKETQKAVDKGEMLPLMEAFYTIQGEGYYKGSAAYFIRVGGCDVGCHWCDVKESWDAEKHPPTHIDTIVNEAVKYSDTIVITGGEPLMWNMFPLTQKLKDSGVKTHIETSGSHTLTGVWDWICLSPKKMKLPTPEIFGEANELKIIVYNNHDFIFAEEMASKVSEKCILYLQPEWSRREKVIPEIVDFVMKNPKWKVSLQTHKYLNIP

SEQ ID NO: 28991 - protein, 210 aa, Capnocytophaga cynodegmi
  REGION 1..210: note = tr|A0A0B7HSC0|A0A0B7HSC0_9FLAO 7-carboxy-7-deazaguanine synthase OS=Capnocytophaga cynodegmi OX=28189 GN=queE PE=3 SV=1
MLDKETQKAVDKGEMLPLMEAFYTIQGEGYYKGSAAYFIRVGGCDVGCHWCDVKESWDAEKHPPTHIDTIVNEAVKYSDTIVITGGEPLMWNMFPLTQKLKDSGVKTHIETSGSHTLTGVWDWICLSPKKMKLPTPEIFEEADELKIIVYNNHDFIFAEEMASKVSEKCILYLQPEWSRREKVIPEIVDFVMKNPKWKVSLQTHKYLNIP

SEQ ID NO: 28992 - protein, 200 aa, Capnocytophaga gingivalis
  REGION 1..200: note = tr|C2M6F0|C2M6F0_CAPGI 7-carboxy-7-deazaguanine synthase OS=Capnocytophaga gingivalis OX=553178 GN=queE; PE = 3 SV=1
MDGTILPLMEDFYTIQGEGFYRGTAAYFIRLAGCDVGCHWCDVKESWDASVHPRVPIEEIAQRALAHSKTIIITGGEPLMYNLQPLTELLKSKGARTHIETSGAHPLTGVWDWICLSPKKNKRPLPEVHQRASELKMIIYNHHDFLFAEEMSALTQPDCIRYLQPEWSRRERMVPLIVDYVMENPQWKISLQMHKYLDIP

SEQ ID NO: 28993 - protein, 200 aa, Capnocytophaga gingivalis
  REGION 1..200: note = tr|A0A250FMY0|A0A250FMY0_9FLAO 7-carboxy-7-deazaguanine synthase OS=Capnocytophaga gingivalis OX=1017 GN=queE PE=3 SV=1
MDGTILPLMEDFYTIQGEGFYRGTAAYFIRLAGCDVGCHWCDVKESWDASVHPRVPIEEIAQRALAHSKTIIITGGEPLMYNLQPLTELLKSKGARTHIETSGAHPLTGVWDWICLSPKKNKRPLPEVHQQASELKMIIYNHHDFLFAEEMSALTQPDCIRYLQPEWSRRERMVPLIVDYVMENPQWKISLQMHKYLDIP

SEQ ID NO: 28994 - protein, 200 aa, Capnocytophaga granulosa
  REGION 1..200: note = tr|A0A381DXX7|A0A381DXX7_9FLAO 7-carboxy-7-deazaguanine synthase OS=Capnocytophaga granulosa OX=45242 GN=queE PE=3 SV=1
MSGELLPLMEAFYTIQGEGYYKGTAAYFIRLAGCDVGCHWCDVKESWDATAHPLVPIEQIAEQALTHSKTIIITGGEPLMYNLLPLTQLLRSHGARTHIETSGAHPLSGEWDWICLSPKKNKRPLSPIHQVANELKMVIYNHHDFLFAEEMSALTHADCIRYLQPEWSRREKMIPLMVDYVMEYPQWKISLQMHKYLDIP

SEQ ID NO: 28995 - protein, 210 aa, Capnocytophaga haemolytica
  REGION 1..210: note = tr|A0A125S450|A0A125S450_9FLAO 7-carboxy-7-deazaguanine synthase OS=Capnocytophaga haemolytica OX=45243 GN=queE PE=3 SV=1
MLSSQTQIALRKGEILPVMEAFYTLQGEGFYKGTAAYFIRLGGCDVGCHWCDVKESWEAEKHPILQVRDIVEEALKHSKTIIITGGEPLMWNLDLLTKYLKEGGARIHIETSGAHPLSGDLDWICLSPKKLKLPKEEVFAKTNELKMIIYNNNDFLFAEQMAAKVSSDCLLYLQPEWSKREKVIPKIVDYVMAHPQWKASLQMHKYLEIP

SEQ ID NO: 28996 - protein, 210 aa, Capnocytophaga leadbetteri
  REGION 1..210: note = tr|A0A250FB21|A0A250FB21_9FLAO 7-carboxy-7-deazaguanine synthase OS=Capnocytophaga leadbetteri OX=327575 GN=queE PE=3 SV=1
MLDEYKLTALHQGEALPLMEAFYSLQGEGYYKGSAAYFIRLGGCDVGCHWCDVKESWAAEAHPIVPVEDIAAEALKHSRLIIITGGEPLMWNLDKLTALLREGGARTHIETSGAHPLSGTWDWICLSPKKIKRPVGGVLQQANELKMVIYNNNDFLFAEEMAAQVSPDCLLYLQPEWSKSAIVIPKIVDYVMTHPQWRASLQMHKYLDIR

SEQ ID NO: 28997 - protein, 210 aa, Capnocytophaga leadbetteri
  REGION 1..210: note = tr|A0A2T5XYX9|A0A2T5XYX9_9FLAO 7-carboxy-7-deazaguanine synthase OS=Capnocytophaga leadbetteri OX=327575 GN=queE PE=3 SV=1
MLDEYKLTALHRGEALPLMEAFYSLQGEGYYKGSAAYFIRLGGCDVGCHWCDVKESWAAEAHPIVPVEDIAAEALKHSRLIIITGGEPLMWNLDKLTALLREGGARTHIETSGAHPLSGTWDWICLSPKKIKRPVGGVLQQASELKMVIYNNNDFLFAEEMAAQVSPDCLLYLQPEWSKSAIVIPKIVDYVMTHPQWRASLQMHKYLDIR

SEQ ID NO: 28998 - protein, 210 aa, Capnocytophaga ochracea
  REGION 1..210: note = tr|A0A2X2SLI6|A0A2X2SLI6_CAPOC 7-carboxy-7-deazaguanine synthase OS=Capnocytophaga ochracea OX=1018 GN=queE PE=3 SV=1
MLNKDTQIALQKGELLPLMEAFYTLQGEGFYKGTAAYFIRLGGCDVGCHWCDVKESWQAEAHPLVPIDTIVAEALAHSKTIIITGGEPLMWNLTLLTEKLRAGGARTHIETSGAHPLSGTWDWICLSPKKIKRPVGDVLQKANELKMVIYNNHDFIFAEEMASQVSPECLLYLQPEWSKRAEVMPKIVDYVMAHPQWKASLQMHKYLEIR

SEQ ID NO: 28999 - protein, 210 aa, Capnocytophaga ochracea
  REGION 1..210: note = tr|C7M7W1|C7M7W1_CAPOD 7-carboxy-7-deazaguanine synthase OS=Capnocytophaga ochracea (strain ATCC 27872 / DSM 7271 / JCM 12966 / NCTC 12371 / VPI 2845) OX=521097; GN = q ueE PE=3 SV=1
MLNKDTQIALQKGELLPLMEAFYTLQGEGFYKGTAAYFIRLGGCDVGCHWCDVKESWQAEAHPLVPVDTIVAEALAHSKTIIITGGEPLMWNLTLLTEKLRAGGARTHIETSGAHPLSGSWDWICLSPKKIKRPVGDVLQKANELKMVIYNNHDFIFAEEMAAQVSPECLLYLQPEWSKRAEVMPKIVDYVMAHPQWKASLQMHKYLDIR

SEQ ID NO: 29000 - protein, 210 aa, Capnocytophaga sp.
  REGION 1..210: note = tr|L1NM82|L1NM82_9FLAO 7-carboxy-7-deazaguanine synthase OS=Capnocytophaga sp. oral taxon 380 str. F0488; OX = 1127693 GN=queE PE=3 SV=1
MLNKDTQIALQKGELLPLMEAFYTLQGEGFYKGTAAYFIRLGGCDVGCHWCDVKESWQAEAHPLVPIDTIVAEALAHSKTIIITGGEPLMWNLTLLTEKLRAGGARTHIETSGAHPLSGSWDWICLSPKKIKRPVGDVLQKANELKMVIYNNHDFIFAEEMASQVSPECLLYLQPEWSKRAEVMPKIVDYVMAHPQWKASLQMHKYLDIR

SEQ ID NO: 29001 - protein, 200 aa, Capnocytophaga sp.
  REGION 1..200: note = tr|U2AQJ7|U2AQJ7_9FLAO 7-carboxy-7-deazaguanine synthase OS=Capnocytophaga sp. oral taxon 863 str. F0517; OX = 1227266 GN=queE PE=3 SV=1
MSGEMLPLMEAFYTIQGEGYHKGTAAYFIRLAGCDVGCHWCDVKESWDAAAHPLVSIEEIAQKALAHSKTIIITGGEPLMYNLSPLTQLLRSQGARTHIETSGAHPLSGEWDWICLSPKKNKRPLPLIHQRAHELKMVIYNHHDFLFAEEMAALTHPDCLRYLQPEWSRREKMIPLMVDYVMEHPQWKISLQMHKYLDIP

SEQ ID NO: 29002 - protein, 210 aa, Capnocytophaga sputigena
  REGION 1..210: note = tr|A0A250FJ22|A0A250FJ22_CAPSP 7-carboxy-7-deazaguanine synthase OS=Capnocytophaga sputigena OX=1019 GN=queE PE=3 SV=1
MLDKNTQVALQKGEILPLMEAFYSLQGEGFYKGTAAYFIRLGGCDVGCHWCDVKESWAAEAHPLVPVDTIVTDALAHSKTMIITGGEPLMWNLDLLTQKLRAAGARTHIETSGAHPLSGTFDWICLSPKKIKRPVGDVLQKANELKMVIYNNNDFLFAEEMAAQVSPDCLLYLQPEWSKRNKVIPKIVDYVMAHPQWKASLQMHKYLDIR

SEQ ID NO: 29003 - protein, 210 aa, Capnocytophaga sputigena
  REGION 1..210: note = tr|A0A250F1X6|A0A250F1X6_CAPSP 7-carboxy-7-deazaguanine synthase OS=Capnocytophaga sputigena OX=1019 GN=queE PE=3 SV=1
MLDKNTQVALQKGEILPLMEAFYSLQGEGFYKGTAAYFIRLGGCDVGCHWCDVKESWAAKAHPLVPVDTIVTDALAHSKTMIITGGEPLMWNLDLLTEKLRAAGARTHIETSGAHPLSGTFDWICLSPKKIKRPVGDVLQKANELKMVIYNNNDFLFAEEMAAQVSPDCLLYLQPEWSKRNKVIPKIVDYVMAHPQWKASLQMHKYLDIR

SEQ ID NO: 29004 - protein, 210 aa, unidentified
  source 1..210: note = Capnocytophaga stomatis
  REGION 1..210: note = tr|A0A250FZ61|A0A250FZ61_9FLAO 7-carboxy-7-deazaguanine synthase OS=Capnocytophaga stomatis OX=1848904 GN=queE PE=3 SV=1
MLDKETQKAVEKGEMLPLMEAFYTIQGEGYHKGSAAYFIRVGGCDVGCHWCDVKESWDAEKHPPTHIDTIVSEAVKYSKTIVITGGEPLMWNMFPLTEKLKENGVKTHIETSGSHPLTGVWDWICLSPKKMKLPTPEIFKEADELKIIVYNNHDFIFAEEMASKVSDKCILYLQPEWSRREKVIPEIVDFVMKNPKWKVSLQTHKYLNIP

SEQ ID NO: 29005 - protein, 232 aa, unidentified
  source 1..232: note = Capsulimonas corticalis
  REGION 1..232: note = tr|A0A402CT64|A0A402CT64_9BACT 7-carboxy-7-deazaguanine synthase OS=Capsulimonas corticalis OX=2219043 GN=queE PE=3 SV=1
MSSTLVLQPHNGRPYLGATPDPAAATRDAMAAAKSGALPLVEIFYSLQGEGLRTGQATVFVRFAGCNLACEFCDTDFRVQRLGTPEEIADEIASLAPDCRWVCFTGGEPTIQDLQALSDLLHARGYHLQMETNGTRPQPGWGIDHVTVSPKQPQGGRLDSWYEANAAEFKYVVDDDADLARALDGARGHGRMTFLQPNALNKDAVALCIEAVKAHPALFRLSLQTHKFLDIR

SEQ ID NO: 29006 - protein, 244 aa, Carboxydocella sporoproducens
  REGION 1..244: note = tr|A0A1T4LNU8|A0A1T4LNU8_9FIRM 7-carboxy-7-deazaguanine synthase OS=Carboxydocella sporoproducens DSM 16521 OX=1121270 GN=queE PE=3 SV=1
MQAAFLIEMMSSFQGEGTVVGLRQLFLRFAGCNLACAYCDTRYSLHAQETWKVEFPPGTGCWNILTNPVTVEQLLEQIKKFNPDKHHSLSLTGGEPLLHSDFLQEFLPKIKQMGWKIYLETNGTLVHNLKQVLDYIDIIAMDIKLESATGAPTPWEEHQKFLELAMNKSCFIKVVVNSRTDRREIGQVAQLGPERTIAIDIVLQPQTGSELPPANRWIEWQEILKPFYREVRIIPQTHKILGVL

SEQ ID NO: 29007 - protein, 244 aa, Carboxydocella thermautotrophica; identical to SEQ ID NO: 29006
  REGION 1..244: note = tr|A0A2R4N0C0|A0A2R4N0C0_9FIRM 7-carboxy-7-deazaguanine synthase OS=Carboxydocella thermautotrophica OX=178899 GN=queE PE=3 SV=1

SEQ ID NO: 29008 - protein, 238 aa, Carboxydothermus hydrogenoformans
  REGION 1..238: note = tr|Q3ADI3|Q3ADI3_CARHZ 7-carboxy-7-deazaguanine synthase OS=Carboxydothermus hydrogenoformans (strain ATCC BAA-161 / DSM 6008 / Z-2901) OX=246194 GN=queE PE=3 SV=1
MANIVEIFPSLQGEGLYAGVSTLFIRFSGCNLNCSYCDTEDAREKRERFTVTKEDGSLLEFLNPVTPEKLVEILRENYDFTYFPQLALTGGEPLLHASFLKEFLPKLSYPGEVLLETNGTLPDKLNEVLNSVDIISQDFKLKPFIAEDCFTLHREFLQEASRKKVYVKMVISPEVQDSEFNGAINEIALVNSKIPLILQPVMPINYSLDFLFQKQKMALKKLWDVRIIPQVHKLLQLK

SEQ ID NO: 29009 - protein, 238 aa, Carboxydothermus islandicus
  REGION 1..238: note = tr|A0A1L8D4T0|A0A1L8D4T0_9THEO 7-carboxy-7-deazaguanine synthase OS=Carboxydothermus islandicus OX=661089 GN=queE PE=3 SV=1
MANIVEIFPSIQGEGLYAGVSTLFIRFSGCNLNCSYCDTEDAREKKERFTVKKEDGSLLEFLNPVTPEKLVEILRENYDFTYYPQLALTGGEPLLHSAFLKEFLRKLSYPGEVLLETNGTLPENLKEVLRYVDIVSQDYKLQPFVTNEYHAIHREFLRIAAAKKTYVKMVLSPEVEDRVFNEALESIAAVNSYIPLILQPVTPIAYSLDFILGKQKKALEKLWEVRVIPQIHKFLQLK

SEQ ID NO: 29010 - protein, 244 aa, unidentified
  source 1..244: note = Carboxydothermus pertinax
  REGION 1..244: note = tr|A0A1L8CUE9|A0A1L8CUE9_9THEO 7-carboxy-7-deazaguanine synthase OS=Carboxydothermus pertinax OX=870242 GN=queE PE=3 SV=1
MKLGESMASIVEIFPSIQGEGLSVGVSTLFIRFSGCNLNCSYCDTKYAKEEKEKFTVTKEDGTVLEFLNPVTPERLVEILRENYDFTYFPQLALTGGEPLLHASFLKDFLAKLSYPGDVLLETNGTLPEKLREVISYIDIVSQDYKFKPFVTEEFKAVHREFLRIAIYKKTYVKMVISPEVQDLPFNEAIDTIALVNSKIPLILQPVTPITYSLDFLFQKQKKALEKLWEVRLIPQVHKLLQIK

SEQ ID NO: 29011 - protein, 285 aa, unidentified
  source 1..285: note = Carboxylicivirga sp.
  REGION 1..285: note = tr|A0A553GN63|A0A553GN63_9BACT 7-carboxy-7-deazaguanine synthase OS=Carboxylicivirga sp. M1479 OX=2594476 GN=queE PE=3 SV=1
MEKLILAKEGVFPVTKDWHGGLLEDTPKTGLQIAGTIQGEGKLAGVPSLFIRLSGCNLRCIWQMEDGTYSRCDTRYASFQPNETIELEVDQVVDWVKHNIGNIKHVVITGGEPLLQRRGVADLCQKLKEQLNVHITVESNGSIFDEEVAKGVDLFSISPKLSNSVPSPEKLAIFGLKENAVFKKHNQKRLNIEALQSYIDLANSSNKELQLKFVVGRKNDFKEILSDFINQLNNCKPSDILLMPLGATKVEISRSAPMVLDMAIANGWRFSPRVHIELFGSKSGV

SEQ ID NO: 29012 - protein, 242 aa, Caryophanon tenue
  REGION 1..242: note = tr|A0A1C0YLB5|A0A1C0YLB5_9BACL 7-carboxy-7-deazaguanine synthase OS=Caryophanon tenue; OX = 33978 GN=queE PE=3 SV=1
MSKVPVIEMFGPTIQGEGMVIGQKTMFVRTAGCDYTCAWCDSAFTWDSSGKHLITHMTAEEIWEQLEAIGGKRFSFVTILGGNPALLKNLAPFITLLKQKNIQIGVETQGSKWQDWFYDIDELTISPKPPSSTMTTDFDILTTILHKLEQSTSSQRISLKVVVFTEEDYAYAKDVHTRYPDVPFFVQVGNDELMMVDEQQLTVYLLQKYERLIDCVMQDEEMNRVKVLPQLHALLWGNKRGV

SEQ ID NO: 29013 - protein, 219 aa, unidentified
  source 1..219: note = Catalinimonas alkaloidigena
  REGION 1..219: note = tr|A0A1G9GXG1|A0A1G9GXG1_9BACT 7-carboxy-7-deazaguanine synthase OS=Catalinimonas alkaloidigena OX=1075417 GN=queE PE=3 SV=1
MMITKTPTEQGESVVTRHAPSRDLPLMEAFYTLQGEGFHQGRAAYFIRLGGCDVGCHWCDVKESWDASRHPAVSVSQIVAGAAARPGRLAVITGGEPLMHPLDELCGALHEAGFRTHIETSGTHPLSGQWDWICFSPKKFKAPRPEILQKADELKVVIYHKSDLAWAESFAAQVRPDCHLFLQPEWDRREQMLPLMIDYVQQHPRWRVTLQSHKYLNIP

SEQ ID NO: 29014 - protein, 240 aa, Catellatospora citrea
  REGION 1..240: note = tr|A0A419XJR2|A0A419XJR2_9ACTN 7-carboxy-7-deazaguanine synthase OS=Catellatospora citrea; OX = 53366 GN=queE PE=3 SV=1
MTALLAAMPHRPLLVSEIFGPTVQGEGPSTGRQALFIRLSRCNLTCGRCDTPYTWDWSRFDAAEQTQKISGEELVAWALGHPTRLVVISGGEPLIQQQLLDPVVRALAAAGREVEIETNGTFAPTTAVAGAVTAFNVSPKLASFAPSDDEPRRIVGAALKALEATGKARFKFVVSDPADLQEVASLQREFGLTEIWIMPEGAKPEQVIARTRQIADEVIERGWNLSTRLHVLVWGDTRGR

SEQ ID NO: 29015 - protein, 221 aa, Catenovulum agarivorans
  REGION 1..221: note = tr|W7QQS1|W7QQS1_9ALTE 7-carboxy-7-deazaguanine synthase OS=Catenovulum agarivorans DS-2 OX=1328313; GN = queE PE=3 SV=1
MNYPVNEIFETIQGEGAKTGVPSVFLRLQGCPVGCSWCDTKHTWEVDKTKLTSIENVVDVSNTSDCWADLDENMLLSRLQKYSAKHIVITGGEPCMYDLRPLTALLHQNGFTTQIETSGTFEIYTHENTYVTVSPKVGMKGGYSVLVSALNRANEIKHPVATEQHIRDLQALLAKISHNQFVEVCLQPISQKKRATELAIAECIKHNWRLSVQMHKYLMID

SEQ ID NO: 29016 - protein, 221 aa, unidentified
  source 1..221: note = Catenovulum maritimum
  REGION 1..221: note = tr|A0A0J8GRP2|A0A0J8GRP2_9ALTE 7-carboxy-7-deazaguanine synthase OS=Catenovulum maritimum; OX = 1513271 GN=queE PE=3 SV=1
MNYPVNEIFETIQGEGCYTGVPAIFIRLQACPVGCAWCDTKHTWEKSESTQVKQSLVIDISNESDCWADFTENDILNLLAKYTAKHVVITGGEPCIYDLIPLTELLNNAGYSTQIETSGTFEIKTHANTYVTVSPKVNMKGGYEVLNSALNRANEIKHPVATQQHIDDLDELLAKIDDLTDKTVCLQPISQKKRATELVIQTCIKRNWRLSAQMHKYLFID

SEQ ID NO: 29017 - protein, 214 aa, Catenovulum sp.
  REGION 1..214: note = tr|A0A2S0VXA9|A0A2S0VXA9_9ALTE 7-carboxy-7-deazaguanine synthase OS=Catenovulum sp. CCB-QB4 OX=2172099 GN=queE PE=3 SV=1
MFETIQGEGAYTGTPSIFIRLQGCPVGCPWCDTQQTWYVEEKDKISAKDMLAKQGDSPTWSTLTVAEIMLVIEQQGYHAKHVVITGGEPCMYDLTELTTVLQTAGYQCQIETSGTFEIKTHTDTWVTLSPKVNMKGKYPILDTCLARANEIKHPVATEQHIIELEALLARGDFTKLIYLQPISQKSRATEFAIKTCIEKNWRLSIQTHKYLNIS

SEQ ID NO: 29018 - protein, 210 aa, unidentified
  source 1..210: note = Caulobacter flavus
  REGION 1..210: note = tr|A0A2N5CNM4|A0A2N5CNM4_9CAUL 7-carboxy-7-deazaguanine synthase OS=Caulobacter flavus; OX = 1679497 GN=queE PE=3 SV=1
MTYSVKEIFLTLQGEGGQAGKAAVFCRFSGCNLWTGREQDRHKAVCTFCDTDFVGTDGEGGGKFATADALADAVEAAWTGGPDDRLVVCTGGEPLLQLDAAIVEALHARGFQIAMESNGTLPAIDGIDWICVSPKADAPVVQTSGQELKLVFPQDKAMPERFADMDFERFYLQPMDGPDRDRNTQLAVAYCLAHPKWRLSVQTHKYLGLP

SEQ ID NO: 29019 - protein, 210 aa, Caulobacter henricii
  REGION 1..210: note = tr|A0A0N7JHV8|A0A0N7JHV8_9CAUL 7-carboxy-7-deazaguanine synthase OS=Caulobacter henricii; OX = 69395 GN=queE PE=3 SV=1
MTYSVKEIFLTLQGEGGQAGKAAVFCRFAGCNLWTGREQDRAKAVCTFCDTDFVGTDGEGGGKFATPELLADAVEAAWTGGAKDRLVVCTGGEPLLQLDPPAIAALHARGFMIAVESNGTVSAPEGIDWVCISPKADAPVIQTRGQELKLVYPQDKAMPERFESLDFERFYLQPMDGPDRDRNTQLAVAYCLSHPQWRLSVQTHKYLGLP

SEQ ID NO: 29020 - protein, 210 aa, Caulobacter mirabilis
  REGION 1..210: note = tr|A0A2D2B3P7|A0A2D2B3P7_9CAUL 7-carboxy-7-deazaguanine synthase OS=Caulobacter mirabilis; OX = 69666 GN=queE PE=3 SV=1
MTYSVKEIFLTLQGEGGQAGKAAVFCRFAGCNLWTGREQDRAKAVCTFCDTDFVGVDGEGGGKFATPEALAAAVDAAWTGPQSDKLVVCTGGEPLLQLDPPLIEALHARGFMIAVETNGTIKAPPGIDWICVSPKADAEVVQTSGQELKLVYPQRGVDPERFAGLDFERFFLQPMDNTARQENTTAAVAYCLSHPRWRLSVQTHKYLGLP

SEQ ID NO: 29021 - protein, 210 aa, unidentified
  source 1..210: note = Caulobacter radicis
  REGION 1..210: note = tr|A0A2T9JRU1|A0A2T9JRU1_9CAUL 7-carboxy-7-deazaguanine synthase OS=Caulobacter radicis; OX = 2172650 GN=queE PE=3 SV=1
MTYSVKEIFLTLQGEGGQAGKAAVFCRFSGCNLWTGREQDRAKAVCTFCDTDFVGTDGEGGGKFATADDLANAVEAAWTGGLDDRLVVCTGGEPLLQLDAAIVEALHARGFQIAMESNGTLPAIDGIDWICVSPKADAPVVQTSGQELKLVFPQEKAMPERFEAMDFERFYLQPMDGPDRDRNTQLAVAYCLAHPKWRLSVQTHKYLGLP

SEQ ID NO: 29022 - protein, 210 aa, unidentified
  source 1..210: note = Caulobacter radicis
  REGION 1..210: note = tr|A0A2T9JD48|A0A2T9JD48_9CAUL 7-carboxy-7-deazaguanine synthase OS=Caulobacter radicis; OX = 2172650 GN=queE PE=3 SV=1
MTYSVKEIFLTLQGEGGQAGKAAVFCRFSGCNLWTGRERDRAKAVCTFCDTDFVGTDGEGGGKFATADDLANAVETAWTGGPDDRLVVCTGGEPLLQLDEAIVEALHKRGFQIAMESNGTLPAIDGIDWICVSPKADAPVVQTSGQELKLVFPQEKAMPERFEAMDFERFYLQPMDGPDRDRNTQLAVAYCLAHPKWRLSVQTHKYLGLP

SEQ ID NO: 29023 - protein, 210 aa, unidentified
  source 1..210: note = Caulobacter rhizosphaerae
  REGION 1..210: note = tr|A0A561NXM1|A0A561NXM1_9CAUL 7-carboxy-7-deazaguanine synthase OS=Caulobacter rhizosphaerae OX=2010972 GN=queE PE=3 SV=1
MTYTVKEIFLTLQGEGGQAGKAAVFCRFAGCNLWTGREQDRHKAVCTFCDTDFVGTDGEGGGKFATAHALAAAVEAAWTGGPDDRLVVCTGGEPLLQLDAAAIDALHARGFMIAVETNGTVVAPAGIDWVCVSPKADAPVVQTSGQELKLVYPQDKALPERFAGLDFERFYLQPMDGPDRERNTQLAVAYCLSHPQWRLSVQTHKYLGLP

SEQ ID NO: 29024 - protein, 210 aa, Caulobacter segnis
  REGION 1..210: note = tr|A0A2W5VQ82|A0A2W5VQ82_9CAUL 7-carboxy-7-deazaguanine synthase OS=Caulobacter segnis; OX = 88688 GN=queE PE=3 SV=1
MTYSVKEIFLTLQGEGGQAGKAAVFCRFSGCNLWSGREQDRAKAVCTFCDTDFVGTDGENGGKFSTAEDLAAAVEAQWTGGPDDRLVVCTGGEPFLQLDDAAIKALHARGFQIAVESNGTLPAPAGIDWICISPKADAPVVQTSGQELKLVFPQEKAMPERFADLDFERFYLQPMDGPERDRNTQLAVAYCLSHPQWRLSVQTHKYLGLP

SEQ ID NO: 29025 - protein, 210 aa, Caulobacter segnis
  REGION 1..210: note = tr|D5VI53|D5VI53_CAUST 7-carboxy-7-deazaguanine synthase OS=Caulobacter segnis (strain ATCC 21756 / DSM 7131 / JCM 7823 / NBRC 15250 / LMG 17158 / TK0059); OX = 509190GN=queE PE=3 SV=1
MTYSVKEIFLTLQGEGGQAGKAAVFCRFSGCNLWSGREQDRAKAVCTFCDTDFVGTDGENGGKFATADDLAAAVEAQWTGGPDDRLVVCTGGEPFLQLDEAAIAALHARGFQIAVESNGTIQAPPEIDWICISPKADAPVVQTSGQELKLVFPQEKAMPERFADLDFERFYLQPMDGPDRDRNTQLAVAYCLSHPQWRLSVQTHKYLGLP

SEQ ID NO: 29026 - protein, 210 aa, Caulobacter sp.
  REGION 1..210: note = tr|A0A3S9VC63|A0A3S9VC63_9CAUL 7-carboxy-7-deazaguanine synthase OS=Caulobacter sp. FWC26; OX = 69665 GN=queE PE=3 SV=1
MTYSVKEVFLTLQGEGGQAGKAAVFCRFSGCNLWSGREQDRAKAVCTFCDTDFVGTDGENGGKFATAEDLAAAVEAQWRGGPDDRLVVCTGGEPFLQLDEAAIAALHARGFQIAVETNGTLQAPAGVDWICVSPKADAPVVQTSGQELKLVFPQEKAMPERFAGLDFERFYLQPMDGPDRDANTQLAVAYCLSHPQWRLSVQTHKYLGLP

SEQ ID NO: 29027 - protein, 210 aa, Caulobacter sp.
  REGION 1..210: note = tr|A0A0Q6UZ00|A0A0Q6UZ00_9CAUL 7-carboxy-7-deazaguanine synthase OS=Caulobacter sp. Root343 OX=1736520 GN=queE PE=3 SV=1
MTYSVKEIFLTLQGEGGQAGKAAVFCRFSGCNLWTGREQDRAKAVCTFCDTDFVGTDGENGGKFATADDLAAAVEAQWTGGPDDRLVVCTGGEPFLQLDEAAIAALHARGFQIAVESNGTLEAPAGIDWICISPKADAPVVQASGQELKLVFPQAKAMPERFAGLDFERFYLQPMDGPDRDRNTQLAVAYCLSHPQWRLSVQTHKYLGLP

SEQ ID NO: 29028 - protein, 210 aa, Caulobacter vibrioides
  REGION 1..210: note = sp|Q9A3P3|QUEE_CAUVC 7-carboxy-7-deazaguanine synthase OS=Caulobacter vibrioides (strain ATCC 19089 / CB15) OX=190650 GN=queE PE=3 SV=1
MTYSVKEIFLTLQGEGGQAGKAAVFCRFSGCNLWSGREQDRAKAVCTFCDTDFVGTDGENGGKFATAEDLAAAVEAQWTGGPDDRLVVCTGGEPFLQLDDAAIAALHARGFQIAVETNGTITAPAGVDWICVSPKADAPVVQTSGQELKLVFPQEKAMPERFAALDFERFYLQPMDGPDRDANTQLAVAYCLSHPQWRLSVQTHKYLGLP

SEQ ID NO: 29029 - protein, 210 aa, Caulobacter vibrioides
  REGION 1..210: note = tr|A0A290MR06|A0A290MR06_CAUVI 7-carboxy-7-deazaguanine synthase OS=Caulobacter vibrioides OX=155892 GN=queE PE=3 SV=1
MTYSVKEIFLTLQGEGGQAGKAAVFCRFSGCNLWSGREQDRAKAVCTFCDTDFVGTDGENGGKFATAEDLAAAVEAQWTGGPDDRLVVCTGGEPFLQLDAGAIAALHARGFQIAVETNGTIQAPAGVDWICVSPKADAPVVQTSGQELKLVFPQEKAMPERFADLDFERFYLQPMDGPDRDVNTQLAVAYCLSHPQWRLSVQTHKYLGLP

SEQ ID NO: 29030 - protein, 210 aa, unidentified
  source 1..210: note = Caulobacter zeae
  REGION 1..210: note = tr|A0A2N5D8I2|A0A2N5D8I2_9CAUL 7-carboxy-7-deazaguanine synthase OS=Caulobacter zeae; OX = 2055137 GN=queE PE=3 SV=1
MTYSVKEIFLTLQGEGGQAGKAAVFCRFSGCNLWTGREQDRAKAVCTFCDTDFVGTDGEGGGKFATADALADAVEAAWTGGPDDRLVVCTGGEPLLQLDAAIVEALHARGFQIAMESNGTLPAIDGIDWICVSPKADAPVVQTSGQELKLVFPQEKAMPERFEDMDFERFYLQPMDGPDRDRNTQLAVAYCLAHPKWRLSVQTHKYLGLP

SEQ ID NO: 29031 - protein, 210 aa, unidentified
  source 1..210: note = Caulobacteraceae bacterium
  REGION 1..210: note = tr|A0A4V1UGZ8|A0A4V1UGZ8_9CAUL 7-carboxy-7-deazaguanine synthase OS=Caulobacteraceae bacterium OX=1978230 GN=queE PE=3 SV=1
MSYAVKEIFLTLQGEGGQAGQPAVFCRFAGCNLWSGREEDRAAAVCTFCDTDFVGMDGEGGGRFATADLLAQAVEAAWIGGPDNRLVVCTGGEPLLQLDPVLIEALHARGFRIAMETNGTLKAPPGIDWICVSPKAQAQVVQTSGQELKLVYPQVGVDPASFEHLDFERFLLQPMDGPARVENTQAAIAYCLAHPRWRLSVQTHKYLGIP

SEQ ID NO: 29032 - protein, 210 aa, unidentified
  source 1..210: note = Caulobacteraceae bacterium
  REGION 1..210: note = tr|A0A4Q3S9W3|A0A4Q3S9W3_9CAUL 7-carboxy-7-deazaguanine synthase OS=Caulobacteraceae bacterium OX=1978230 GN=queE PE=3 SV=1
MNYAVKEIFLTLQGEGGQAGKAAVFCRFAGCNLWSGREKDRATAVCTFCDTDFVGTNGPGGGRFRSAEKLAEAVEAAWTGGPDDRLVVCTGGEPLLQLDAAAIEALHARGFAIAVETNGTLPAPAGIDWVCVSPKADAPVVQTRGQELKLVWPQPGVDPQRFAGLDFERFYLQPMDGPDREAATAACIAYCLSHPRWRLSTQTHKYLGIA

SEQ ID NO: 29033 - protein, 211 aa, unidentified
  source 1..211: note = Caulobacterales bacterium
  REGION 1..211: note = tr|A0A258FBA4|A0A258FBA4_9PROT 7-carboxy-7-deazaguanine synthase OS=Caulobacterales bacterium 32-69-10 OX=1970503 GN=queE PE=3 SV=1
MTYSAKEVFLTVQGEGGQAGRPAVFLRFAGCNLWSGREQDRAIAVCSFCDTDFVGTDGDGGGKFATADLLADHVAAMWRGRAGDPKLVVCTGGEPLLQLDPPLIAALHARDFEVAIESNGTLAAPDGIDWICVSPKADADLIQVKGQELKLVYPQAKALPDRFEDLDFERFWLQPMDGPDQAANTAAAIEYCLTHPQWRLSVQTHKYIGVR

SEQ ID NO: 29034 - protein, 210 aa, unidentified
  source 1..210: note = Caulobacterales bacterium
  REGION 1..210: note = tr|A0A1Q3JJ86|A0A1Q3JJ86_9PROT 7-carboxy-7-deazaguanine synthase OS=Caulobacterales bacterium 68-7 OX=1895737 GN=queE PE=3 SV=1
MTYSVKEIFLTLQGEGGQAGRAAVFCRFAGCNLWTGREQDRAKAVCTFCDTDFVGTDGVGGGKFETADGLAAAVEATWIGGVEARLVVITGGEPMLQLDEALIAALHSRGFSIAVESNGTLVAPPGVDWLCISPKADSVIVQTSGQELKLVYPQPGVDPTRFEAMAFERFYLQPMDGPDREANTAAAVAYCLEHPRWRLSVQTHKYLGLP

SEQ ID NO: 29035 - protein, 181 aa, unidentified
  source 1..181: note = Caviibacterium pharyngocola
  REGION 1..181: note = tr|A0A2M8RW94|A0A2M8RW94_9PAST 7-carboxy-7-deazaguanine synthase OS=Caviibacterium pharyngocola OX=28159 GN=queE PE=3 SV=1
MSCIFIRFGKCNLACPWCDTNFNQFERLPLSRILQKVRSFSAKNIIITGGEPTIQPKLTALLAALKAEGYFLAIETNGLKNVPPQIDYIAVSPKRAYWEQYRRRHITAADEVRIVADENVVDFCQWVETHIRATNYYLSPCEINGEMNLLDVITQLGLLNTRRDKPLWRLSLQTHKLIGIE

SEQ ID NO: 29036 - protein, 241 aa, unidentified
  source 1..241: note = Cecembia calidifontis
  REGION 1..241: note = tr|A0A4Q7PAI4|A0A4Q7PAI4_9BACT 7-carboxy-7-deazaguanine synthase OS=Cecembia calidifontis; OX = 1187080 GN=queE PE=3 SV=1
MGVFLLDFFAATFCSNFAVQKKAVQSPASTKIEMDKTQKIREGLMLPLMEAFYTVQGEGIHTGVPAYFIRLGGCDVGCVWCDVKESWDAGKWPVLDIEEIVDQALVYPGRTVVITGGEPLMYNLGPLTALLKEKGFSTHIETSGAHPFSGNFDWVCFSPKKFKAPHPSIYAHADELKVVIYNKSDFDFAEKHAELVKQTCKKLIQPEWSKSGQLMESIVAFVKNHPNWKISLQTHKFMDIP

SEQ ID NO: 29037 - protein, 208 aa, unidentified
  source 1..208: note = Cecembia lonarensis
  REGION 1..208: note = tr|K1KZ25|K1KZ25_9BACT 7-carboxy-7-deazaguanine synthase OS=Cecembia lonarensis LW9 OX=1225176 GN=queE; PE = 3 SV=1
MDKKLKIKEGLMLPVMEAFYTIQGEGMHAGNPAYFLRLGGCDVGCVWCDVKESWEAEKWPVLGIEEIVDQALIYPGRMIVITGGEPLMYNLDPLTALLKERGFTIHIETSGAHPFSGNFDWVCFSPKKFKAPHPSIYTKADELKVVIFHKSDFEFAEKHAALVNKACKKLLQPEWSKSTQMLEGIINYVKNHPDWKISLQTHKFMDIP

SEQ ID NO: 29038 - protein, 197 aa, unidentified
  source 1..197: note = Cecembia rubra
  REGION 1..197: note = tr|A0A2P8DWZ4|A0A2P8DWZ4_9BACT 7-carboxy-7-deazaguanine synthase OS=Cecembia rubra; OX = 1485585 GN=queE PE=3 SV=1
MLPVMEAFYTVQGEGMHTGVPAYFIRLGGCDVGCVWCDVKESWEAEKWPILGIEEIVDHALIYPGRMVVITGGEPLMYNLDPLTTLLKERGFSTHIETSGAHPFSGHFDWVCFSPKKFKAPHPSIYENADELKVVIFHKSDFDFAEKHAALVKEDCKKLLQPEWSKSSQVMGAIVDYVKTHPNWKISLQTHKFMDIP

SEQ ID NO: 29039 - protein, 228 aa, Cedecea davisae
  REGION 1..228: note = tr|S3J0Z8|S3J0Z8_9ENTR 7-carboxy-7-deazaguanine synthase OS=Cedecea davisae DSM 4568 OX=566551 GN=queE; PE = 3 SV=1
MTEIIMQYPINEMFQTLQGEGYFTGVPAIFIRLQGCPVGCAWCDTKHTWDKLADREVSLFSILAKTKESDKWGAGSAEDLLAVIGRQGYTARHVVITGGEPCIHDLTPLTELLEKNGFSCQIETSGTHEVRCSANTWVTVSPKVNMRGGYDILSQALERADEIKHPVGRMRDIEALDDLLATLTDEKSRIIALQPISQKEDATRLCIETCIARNWRLSMQTHKYLNIA

SEQ ID NO: 29040 - protein, 223 aa, Cedecea lapagei
  REGION 1..223: note = tr|A0A447UY19|A0A447UY19_9ENTR 7-carboxy-7-deazaguanine synthase OS=Cedecea lapagei; OX = 158823 GN=queE PE=3 SV=1
MQYPINEMFQTLQGEGYFTGVPAIFIRLQGCPVGCAWCDTKHTWDKLADREVSLFSILAKTKESDKWGAGSAEELLAVIGRQGYTARHVVITGGEPCIHDLTPLTHLLEKNGFSCQIETSGTHEVRCTANTWVTVSPKVNMRGGYDILSQALERADEIKHPVGRMRDIEALDELLATLTDEKSRIIALQPISQKEDATRLCIETCIARNWRLSMQTHKYLNIA

SEQ ID NO: 29041 - protein, 223 aa, Cedecea lapagei
  REGION 1..223: note = tr|A0A2N0CSD1|A0A2N0CSD1_9ENTR 7-carboxy-7-deazaguanine synthase OS=Cedecea lapagei; OX = 158823 GN=queE PE=3 SV=1
MQYPINEMFQTLQGEGYFTGVPAIFIRLQGCPVGCAWCDTKHTWDKLADREVSLFSILAKTKESDKWGAGSAEDLLAIIGRQGWTARHIVITGGEPCIHDLMPLTELLEKNGYSCQIETSGTHEVRCSHSTWVTVSPKVNMRGGYDVLSQALERADEIKHPVGRVRDIEALDELLATLTDEKQRIIALQPISQKDDATRLCIETCIARNWRLSMQTHKYLNIA

SEQ ID NO: 29042 - protein, 223 aa, Cedecea neteri
  REGION 1..223: note = tr|A0A089Q1K9|A0A089Q1K9_9ENTR 7-carboxy-7-deazaguanine synthase OS=Cedecea neteri; OX = 158822 GN=queE PE=3 SV=1
MQYPINEMFQTLQGEGYFTGVPAIFIRLQGCPVGCAWCDTKHTWDKLADREVSLFSILAKTKESDKWGAGSAEDLLAVIGRQGYTARHVVITGGEPCIHDLTPLTDLLEKNGFSCQIETSGTHEVRCTANTWVTVSPKVNMRGGYDILSQALERADEIKHPVGRMRDVEALDELLATLTDEKSRIIALQPISQKDDATRLCIETCIARNWRLSMQTHKYLNIA

SEQ ID NO: 29043 - protein, 223 aa, Cedecea neteri
  REGION 1..223: note = tr|A0A291DTT8|A0A291DTT8_9ENTR 7-carboxy-7-deazaguanine synthase OS=Cedecea neteri; OX = 158822 GN=queE PE=3 SV=1
MQYPINEMFQTLQGEGYFTGVPAIFIRLQGCPVGCAWCDTKHTWDKLADREVSLFSILAKTKESDKWGAASAEDLLAVIGRQGYTARHVVITGGEPCIHDLKPLTDLLEKNGFSCQIETSGTHEVRCTANTWVTVSPKVNMRGGYDILSQALERADEIKHPVGRMRDVEALDELLATLTDEKSRIIALQPISQKDDATRLCIETCIARNWRLSMQTHKYLNIA

SEQ ID NO: 29044 - protein, 223 aa, Cedecea sp.
  REGION 1..223: note = tr|A0A1X7KGF7|A0A1X7KGF7_9ENTR 7-carboxy-7-deazaguanine synthase OS=Cedecea sp. NFIX57; OX = 1566286 GN=queE PE=3 SV=1
MQYPINEMFQTLQGEGYFTGVPAIFIRLQGCPVGCAWCDTKHTWDKLADREVSLFSILAKTKESDKWGAASAEDLLAVIGRQGYTARHVVITGGEPCIHDLTPLTDLLEKNGFSCQIETSGTHEVRCTANTWVTVSPKVNMRGGYDILSQALDRADEIKHPVGRMRDVEALDELLATLTDEKNRIIALQPISQKEDATRLCIETCIARNWRLSMQTHKYLNIA

SEQ ID NO: 29045 - protein, 222 aa, Celerinatantimonas diazotrophica
  REGION 1..222: note = tr|A0A4V2PRE6|A0A4V2PRE6_9GAMM 7-carboxy-7-deazaguanine synthase OS=Celerinatantimonas diazotrophica OX=412034 GN=queE PE=3 SV=1
MSDVIYRVNEVFETIQGEGFYSGTPAVFIRMQGCDVGCPWCDTKHTWTVALDDERSLAEINQPSGDRQRWAQASADELLVLIQSYQAKHIVITGGEPCWYDLKPLTAKLHDQGYMCQLETSGTYDIQIDERSFVTVSPKINMRGKRDVLASAMQRANEVKHPVGRQSDIDALDALLVHCPTEAQIALQPISQQKRATDLCIQTCIDRNWRLSVQLHKYIGVL

SEQ ID NO: 29046 - protein, 211 aa, Cellulomonas sp.
  REGION 1..211: note = tr|A0A1I3SYV8|A0A1I3SYV8_9CELL 7-carboxy-7-deazaguanine synthase OS=Cellulomonas sp. KH9; OX = 1855324 GN=queE PE=3 SV=1
MTYKVKEIFYTLQGEGTHAGRPAVFCRFASCNLWTGREEDRARAVCQFCDTDFVGTDGPGGGRFKTARALAAAVGEKWPAAVDGDRMVVCTGGEPLLQLDTEAVEAFHAEGFYVAVETNGTRTPPTGVDWLCVSPKIGAPLVVTGGDELKLVYPQAGGDPAQFEHLDFGSFRLQPMDGPDVTENTTSAVDYCLEHPMWHLSMQTHKYLGIR

SEQ ID NO: 29047 - protein, 215 aa, Cellulophaga algicola
  REGION 1..215: note = tr|E6XCD7|E6XCD7_CELAD 7-carboxy-7-deazaguanine synthase OS=Cellulophaga algicola (strain DSM 14237 / IC166 / ACAM 630) OX=688270 GN=queE PE=3 SV=1
MYLCKMVENDVLALVNKGEMLPLMEEFYTIQGEGFHKGTAAYFIRVGGCDVGCHWCDVKESWNADTHPPTATETIISNAAKYSDTIVITGGEPLTWDMGPLTKGLKARNLQTHIETSGAYPLTGVWDWICLSPKKNKLPEGRIYDEAHELKMIIFNKHDFIFAEEQAAKTNKECILYLQPEWSVRDKMVPLIVDYVMKNPKWKVSLQTHKYLNIP

SEQ ID NO: 29048 - protein, 210 aa, Cellulophaga baltica
  REGION 1..210: note = tr|A0A1G7EGJ1|A0A1G7EGJ1_9FLAO 7-carboxy-7-deazaguanine synthase OS=Cellulophaga baltica; OX = 76594 GN=queE PE=3 SV=1
MVENDVLTLVNKGEMLPLMEEFYTIQGEGFHKGTAAYFIRVGGCDVGCHWCDVKESWNADTHPPTATDTIISNAAKYSDTIVITGGEPLTWDMGPLTKGLKARNLQTHIETSGAYPLSGEWDWICLSPKKNKLPEGRIYDEAHELKMIIFNKHDFIFAEEQAAKTNKDCILYLQPEWSVRDKMVPLIVDYVMKNPKWKVSLQTHKYLNIP

SEQ ID NO: 29049 - protein, 210 aa, Cellulophaga baltica; identical to SEQ ID NO: 29048
  REGION 1..210: note = tr|A0A0A7K1R1|A0A0A7K1R1_9FLAO 7-carboxy-7-deazaguanine synthase OS=Cellulophaga baltica 18 OX=1348584 GN=queE PE=3 SV=1

SEQ ID NO: 29050 - protein, 215 aa, Cellulophaga fucicola
  REGION 1..215: note = tr|A0A1K1P2B4|A0A1K1P2B4_9FLAO 7-carboxy-7-deazaguanine synthase OS=Cellulophaga fucicola; OX = 76595 GN=queE PE=3 SV=1
MYLCIMVKNEVLALVDKGEMLPLMEEFYTIQGEGFHKGTAAYFIRVGGCDVGCHWCDVKESWNAETHPPTTIKAIVDNAAKYSNTIVVTGGEPLTWNMVPLTDALKAKNLQTHIETSGAYTLTGTWDWICLSPKKNKLPEGIIYDKADELKMIIYNKNDFKFAEEQAAKVNKDCILYLQPEWSVKDKMTPLIVDFVMKNPQWKVSLQTHKYLNIP

SEQ ID NO: 29051 - protein, 215 aa, Cellulophaga lytica
  REGION 1..215: note = tr|F0RF37|F0RF37_CELLC 7-carboxy-7-deazaguanine synthase OS=Cellulophaga lytica (strain ATCC 23178 / DSM 7489 / JCM 8516 / NBRC 14961 / NCIMB 1423 / VKM B-1433 / Cyl20) OX=867900 GN=queE PE=3 SV=1
MYLCIMVKNEVLALVDKGEMLPLMEEFYTIQGEGFHKGTAAYFIRVGGCDVGCHWCDVKESWNAATHPPTTIDAIVNNAAKYSNTIVVTGGEPLTWNMAPLTEALKAKNLQTHIETSGAYTLTGIWDWICLSPKKNKLPQGIIYDKADELKMIIYNKNDFKFAEEQAAKVNKDCILYLQPEWSVKDKMTPLIVDFVMKNPQWKVSLQTHKYLNIP

SEQ ID NO: 29052 - protein, 215 aa, Cellulophaga sp.
  REGION 1..215: note = tr|A0A559NBB6|A0A559NBB6_9FLAO 7-carboxy-7-deazaguanine synthase OS=Cellulophaga sp. RHA_52 OX=1250036 GN=queE PE=3 SV=1
MYLCIMVKNEVLALVDKGEMLPLMEEFYTIQGEGFHKGTAAYFIRVGGCDVGCHWCDVKESWNAATHPPTTIDAIVNNAAKYSNTIVVTGGEPLTWNMAPLTEALKAKKLQTHIETSGAYTLTGIWDWICLSPKKNKLPQGIIYDKADELKMIIYNKNDFKFAEEQAAKVNKDCILYLQPEWSVKDKMTPLIVDFVMKNPQWKVSLQTHKYLNIP

SEQ ID NO: 29053 - protein, 210 aa, Cellulophaga tyrosinoxydans
  REGION 1..210: note = tr|A0A1W2AR94|A0A1W2AR94_9FLAO 7-carboxy-7-deazaguanine synthase OS=Cellulophaga tyrosinoxydans OX=504486 GN=queE PE=3 SV=1
MIENDVLTLVNKGEMLPLMEEFYTIQGEGFHKGTAAYFIRVGGCDVGCHWCDVKESWNAETHPPTAIESIISNAAKYSDTIVITGGEPLTWDMGPLTLGLKERNLQTHIETSGAYPLSGVWDWICLSPKKNKLPEGEIYDKAHELKIIIFNKHDFIFAEEQAAKTNKNCILYLQPEWSVRDKMVPLIVDYVMKNPKWKVSLQTHKYLNIP

SEQ ID NO: 29054 - protein, 252 aa, Cellvibrio japonicus
  REGION 1..252: note = tr|B3PC23|B3PC23_CELJU 7-carboxy-7-deazaguanine synthase OS=Cellvibrio japonicus (strain Ueda107); OX = 498211 GN=queE PE=3 SV=1
MQGWASKSRRFWVHCASFVNRHLKHYLSSSGFPIASMTQASLKITEIFYSLQGEARTVGLPTVFVRLTGCPLRCGYCDSEYAFYGGERLSLDEILARVARYHPRHVCVTGGEPMAQRECVTLLKMLCDAGYGVSLETSGAMPLEDVDPRVSKVMDLKTPGSGEVGRNRWENIPLLGEQDQVKFVICNREDYEWARFKLDEYELASRAGEVLFSPSHGQVKPVELAEWILADNLPVRFQLQLHKLLWNDEPGH

SEQ ID NO: 29055 - protein, 216 aa, Cellvibrio mixtus
  REGION 1..216: note = tr|A0A266Q5M9|A0A266Q5M9_9GAMM 7-carboxy-7-deazaguanine synthase OS=Cellvibrio mixtus; OX = 39650 GN=queE PE=3 SV=1
MTQASLKITEIFYSLQGESNTVGLPTVFVRLTGCPLRCGYCDSEYAFYGGERLLIDDILAQVASFNPRYICVTGGEPLAQRECLTLLSALCDAGYSVSLETSGALPVDDVDPRVIKVMDLKTPGSGEVGRNRWENIPLLTAQDQIKFVICSREDYEWARFKVDEHQLVGRVAEVLFSPSFGQVTPLSLAEWILADNLPVRFQLQLHKLLWNDVPGH

SEQ ID NO: 29056 - protein, 216 aa, Cellvibrio sp.
  REGION 1..216: note = tr|A0A1U9NEZ6|A0A1U9NEZ6_9GAMM 7-carboxy-7-deazaguanine synthase OS=Cellvibrio sp. PSBB023 OX=1945512 GN=queE PE=3 SV=1
MTQASLKITEIFYSLQGESNTVGLPTVFVRLTGCPLRCGYCDSEYAFYGGERLLIDDILAKVASFNPRYICVTGGEPLAQRECLTLLSALCDAGYSVSLETSGALPVDDVDPRVIKVMDLKTPGSGEVGRNRWENIPLLTAQDQIKFVICSREDYEWARFKVDEYQLVGRVAEVLFSPSFGQVAPLSLAEWILADNLPVRFQLQLHKLLWNDVPGH

SEQ ID NO: 29057 - protein, 222 aa, Cellvibrio sp.
  REGION 1..222: note = tr|A0A5J6P151|A0A5J6P151_9GAMM 7-carboxy-7-deazaguanine synthase QueE OS=Cellvibrio sp. KY-YJ-3 OX=454662 GN=queE PE=4 SV=1
MTQTSTMTQASLKITEIFYSLQGESNTVGLPTVFVRLTGCPLRCGYCDSEYAFYGGERLSLDEILAKVASFNPRYICVTGGEPLAQRECLTLLGALCDAGYSVSLETSGALPVDDVDPRVVKVMDLKTPGSGEVGRNRWENIPLLSGQDQVKFVICSREDYEWARFKVDEHQLVGRVAEVLFSPSFGQVTPLSLAEWILADNLPVRFQLQLHKLLWNDVPGH

SEQ ID NO: 29058 - protein, 216 aa, unidentified
  source 1..216: note = Cellvibrionaceae bacterium
  REGION 1..216: note = tr|A0A545U9G9|A0A545U9G9_9GAMM 7-carboxy-7-deazaguanine synthase OS=Cellvibrionaceae bacterium R142 OX=2591008 GN=queE PE=3 SV=1
MSESALRITEIFYSLQGEARTVGRPTVFVRLTGCPLRCHYCDSEYAFYGGEKFTLDTILAKVAAYRPAFVCVTGGEPLAQPNCLPLLAALCDAGYEVSLETSGALSLQGIDARVVVVMDLKTPASGEVKRNDYGNLALLKPRDQVKFVICDRSDYEWARFKVSEYALERRVEDVLFSPSEGQLAPRELAEWILEDNLPVRFQLQVHKLLWGDQPGH

SEQ ID NO: 29059 - protein, 215 aa, unidentified
  source 1..215: note = Cellvibrionales bacterium
  REGION 1..215: note = tr|A0A1Z8Z964|A0A1Z8Z964_9GAMM 7-carboxy-7-deazaguanine synthase OS=Cellvibrionales bacterium TMED79 OX=1986768 GN=queE PE=3 SV=1
MLSQLRITEIFHSLQGEARSAGLPTVFVRLTGCPLRCQYCDTEYAFSGGAMMSFDSILESVGSFDCKTICVTGGEPLAQAACNDLLNVLCDTGFDVSLETSGAMSIEDTPTAVSRVVDIKTPDSKESHRNLWTNVALLTPNDQVKFVICSREDYEWARFKLDEYALVSRVSDVLFSPSHHDIAASDLADWIVADRLPVRFQMQLHKILWNDEPGR

SEQ ID NO: 29060 - protein, 239 aa, unidentified
  source 1..239: note = Cellvibrionales bacterium
  REGION 1..239: note = tr|A0A2E8KH20|A0A2E8KH20_9GAMM 7-carboxy-7-deazaguanine synthase OS=Cellvibrionales bacterium OX=2026722 GN=queE PE=3 SV=1
MALFKPVSVVSQPLVTDLSLRVSEIFYSLQGESSWVGFPTVFVRLTGCPLRCSYCDTPYSFKGGSVKPLSVLIDEIDAYKTEYICVTGGEPLAQSNCIIFLTQLCDKGYKVSLETSGALDIADVDPRVKRIVDLKTPSSKELDKNRYENIPLLVPQDEVKFVICNREDFLWSVDIIHQYQLYDRVDNILFSPVFDVEGVIQREDDFNEQLLAQWILEGQLPVRMQMQMHKLIWGDESGR

SEQ ID NO: 29061 - protein, 243 aa, Centipeda periodontii
  REGION 1..243: note = tr|F5RP98|F5RP98_9FIRM 7-carboxy-7-deazaguanine synthase OS=Centipeda periodontii DSM 2778 OX=888060; GN = nrdG2 PE=3 SV=1
MRENIIEIFSSIQGEGKYVGCRQIFVRLEGCNLDCTYCDTENEIGRHPVCMVEERAGTHELVPYENPLSVEQAAEIVARLVADVPHHSLSITGGEPLLHVPFIKELATHIDLPVFLETNGTLDRALAECIDCISHISMDLKLPDVLSAPVWDAHARFLEVARAKDVYVKVVVAADTCADDVERAAHLVAEIAPATLLILQPVTPYGGCTVPSPARLLELQRIALHHLTDVRVIPQTHRMMDLL

SEQ ID NO: 29062 - protein, 160 aa, Cesiribacter andamanensis
  REGION 1..160: note = tr|M7N228|M7N228_9BACT 7-carboxy-7-deazaguanine synthase OS=Cesiribacter andamanensis AMV16 OX=1279009; GN = queE PE=4 SV=1
MEAITQLDETQCRFCVITGGEPLLHIDAPLIKALHEKGYEIAVETNGTVALQKNCWDAESQQLLPPDWIACSPKLGQQHLALEYFDELKLVVPSYQPRDFQEFLLRQRKHLRSGQLVPLLWLQPEDGPRLKESIQLAVTLALQDPAWRVGAQTHKLLNVE

SEQ ID NO: 29063 - protein, 230 aa, unidentified
  source 1..230: note = Cetia pacifica
  REGION 1..230: note = tr|A0A3N1YP77|A0A3N1YP77_9PROT 7-carboxy-7-deazaguanine synthase OS=Cetia pacifica; OX = 1424653 GN=queE PE=3 SV=1
MKKIPISEIFYSIQGEGKYCGTPSVFVRVGGCNLRCPGFGDKGCDSYYAVDKRYQKEWELKSIEDIKTEIKKYLKFDPHLVITGGEPTLYFKELYPLIEWFEGQITIETNATIDIDFEKFPAYKKVAFAMSVKLSNSGEEYNKRVKKNVIKSYAKNAKKSFFKFVIDKDLKKEIEDITKNINLSIYCMPLGATKEELEKNAPFVFEFCLKNGYRYSDRIHIRLFGKKKGV

SEQ ID NO: 29064 - protein, 258 aa, Chamaesiphon minutus
  REGION 1..258: note = tr|K9UJE6|K9UJE6_CHAP6 7-carboxy-7-deazaguanine synthase OS=Chamaesiphon minutus (strain ATCC 27169 / PCC 6605) OX=1173020 GN=queE PE=3 SV=1
MTALTANLIEIFSAIQGEGINVGTRQIFVRFGGCDLRCHYCDSQHTWQKQPTCQIEQTPGKRDFVTYDNPIEMSQLLEWVERQNQPHLHDSISITGGEPLLHSLFLAQFLPRVKELTHLPIYLETGGHRPSQLVQVLPYLDLVGMDIKLPSVSGETHWEKHAEFLRSSRDAGVDIFVKIIISQTTNPEELRQAARLVAEVNSQIVIFLQPMTALAQPHTNPTLTAPNPEQVLAWQALMKEYLPHIRVIPQTHKMIGQL

SEQ ID NO: 29065 - protein, 258 aa, unidentified
  source 1..258: note = Chamaesiphon polymorphus
  REGION 1..258: note = tr|A0A2T1GCW7|A0A2T1GCW7_9CYAN 7-carboxy-7-deazaguanine synthase OS=Chamaesiphon polymorphus CCALA 037 OX=2107692 GN=queE PE=3 SV=1
MTALTANLIEIFSAIQGEGINVGTRQIFVRFGGCDLRCHYCDSQHTWQKQPTCEIEQTPGARDFVTHDNPIEMSQLLEWVDRQNQPQLHDSISITGGEPLLHAPFLAQFLPRVKELTHLPIYLETGGHRPSQLAQVLPYLDLVGMDIKLPSVSGETHWEKHAEFLRSCRDAGVDVFVKIIISQTTNPDELRQSARLVAEVNDKTIIFLQPMTALAQPHTNPNLTAPKPEQVLAWQALMKEYLPHIRVIPQTHKMIGQL

SEQ ID NO: 29066 - protein, 223 aa, unidentified
  source 1..223: note = Chania multitudinisentens
  REGION 1..223: note = tr|W0LG29|W0LG29_9GAMM 7-carboxy-7-deazaguanine synthase OS=Chania multitudinisentens RB-25 OX=1441930; GN = queE PE=3 SV=1
MQYPINEMFQTLQGEGYFTGVPAIFIRLQGCPVGCSWCDTKHTWEKGAEREVDMQRILLKTTESDTWGSAKAEQLLRVVHQQGYTARHIVITGGEPCIYDLLPLTTLFESHGYACQIETSGTHEIFCSPNTWVTVSPKVKMRGGLTVLDQALRRADEIKHPVGRERDIAALDELLATLHDKKRRIIALQPISQKEEATRLCIETCIARNWRLSMQTHKYLNIA

SEQ ID NO: 29067 - protein, 246 aa, Chelativorans sp.
  REGION 1..246: note = tr|Q11B07|Q11B07_CHESB 7-carboxy-7-deazaguanine synthase OS=Chelativorans sp. (strain BNC1) OX=266779; GN = queE PE=3 SV=1
MTSDKSETHIRVAEIFGPTIQGEGPLIGLPTVFVRTGGCDYRCAWCDSLHAVDTQYRHDWEPMTAKAVWEKVQVLSANTPLMVSLSGGNPAIQPLGDLIALGKSSGYRFALETQGSLAREWFSELDVLIISPKPPSSGMEMDWQRLSDCIARAGEGTEVALKIVIFDEADYAFARAVSARHGGLPLYLQPGNHTPPPADAHYAPIDIEGVMRRMRWLINKVAADAWFSVRVLPQLHVLVWGNKRGV

SEQ ID NO: 29068 - protein, 205 aa, Chelonobacter oris
  REGION 1..205: note = tr|A0A0A3AMD9|A0A0A3AMD9_9PAST 7-carboxy-7-deazaguanine synthase OS=Chelonobacter oris; OX = 505317 GN=queE PE=3 SV=1
MTAEIEYNIVEIFESLQGEGFNTGMPSIFIRFGKCNLACPWCDTNYNQFERWTFSRILRQVRSYGAKNIIITGGEPTIQPKLESLLDRLKADGYFLAIETNGLKTIPPQIDYIATSPKLLYQHKYRQRCIPSADEVRIVNDGDILPFCEQIERQIQAKHYYLSPCEQQGEMNLLDTVRKLGQLNQRLNGRKWQLSLQTHKLLGIE

SEQ ID NO: 29069 - protein, 215 aa, unidentified
  source 1..215: note = Chishuiella changwenlii
  REGION 1..215: note = tr|A0A1M6YX05|A0A1M6YX05_9FLAO 7-carboxy-7-deazaguanine synthase OS=Chishuiella changwenlii OX=1434701 GN=queE PE=3 SV=1
MIHIASTTAEEQDLIKEGKLLPVMEHFYTIQGEGMYTGVASYFIRLGGCDVGCHWCDVKDSWDAEKHPLTDVDELVELATSQAKTIIITGGEPLMWDLTYLTKKLHEKGARIHIETSGAYPLSGEIDWVCLSPKKTMLPLDDVCEAAHELKCIIFNQHDFQFAEEQAARVGENCTLFLQTEWGKREKNLPLIIDYVKENPKWRYSLQTHKYLDIP

SEQ ID NO: 29070 - protein, 214 aa, Chitinimonas sp.
  REGION 1..214: note = tr|A0A2G3K1Q0|A0A2G3K1Q0_9BURK 7-carboxy-7-deazaguanine synthase OS=Chitinimonas sp. BJB300 OX=1559339 GN=queE PE=3 SV=1
MSQSLRITEIFFSLQGETSRLGLPTVFVRLTGCPLRCGYCDSAYAFHGGERMSLTAIVKEVAKHGTPYVCVTGGEPLAQAGCHDLLTRLCDAGYSVSLETSGHLPIETVDPRVSRIVDIKTPGSGEVEKNLWANLNHLNARDELKFVLVHRHDYEWARDLLLDNHLQTLCPVIFSPVWESLPPRDLAEWVIADKLPVRVQVQLHKILWGDKPGV

SEQ ID NO: 29071 - protein, 215 aa, Chitinimonas sp.
  REGION 1..215: note = tr|A0A516SFG0|A0A516SFG0_9MICO 7-carboxy-7-deazaguanine synthase OS=Chitinimonas sp. R3-44 OX=2594795 GN=queE PE=3 SV=1
MSATRLRITEIFFSLQGETSRLGLPTVFVRLTGCPLRCGYCDSAYAFHGGKLQSLDDIVAEVASHGTPYVCVTGGEPLAQAACHDLLRRLCDDGFSVSLETSGHLPIETVDPRVSRIVDIKTPGSGEVEKNLWENLPHLNARDELKFVLVHRHDYEWARDLLLDNGLHTLCPVLFSPVWESLKPADLAQWVLADKLPVRVQVQLHKILWGDKPGV

SEQ ID NO: 29072 - protein, 214 aa, Chitinimonas taiwanensis
  REGION 1..214: note = tr|A0A1K2H4Q8|A0A1K2H4Q8_9BURK 7-carboxy-7-deazaguanine synthase OS=Chitinimonas taiwanensis DSM 18899 OX=1121279 GN=queE PE=3 SV=1
MSQSLRITEIFHSLQGETSRLGLPTVFVRLTGCPLRCGYCDSAYAFHGGERMSISAILEEVARHGTPYVCVTGGEPLAQAGCHDLLKRLCDAGFSVSLETSGHLPIETVDARVSRIVDIKTPGSGEVEKNLWTNLNHLGAHDELKFVLVHRHDYEWARDLLLDNGLHTLCPVIFSPVWESLPPRELAEWVIADKLPVRVQVQLHKILWGDKPGV

SEQ ID NO: 29073 - protein, 215 aa, Chitiniphilus sp.
  REGION 1..215: note = tr|A0A4V6WIC5|A0A4V6WIC5_9NEIS 7-carboxy-7-deazaguanine synthase OS=Chitiniphilus sp. HX-2-15 OX=2571148 GN=queE PE=3 SV=1
MRSASLRISEIFHSLQGETSRIGLPTVFVRLTGCPLRCTWCDSAYAFHGGETMTIADILEKVAGYDARHVCVTGGEPLAQKPVHQLLRDLCDAGYSVSLETSGALPVNEVDARVSRIVDLKAPGSGETEKNLWSNLDMLGANDEIKFVLAGREDYEWARTVIRDRNLEQVAPILFSPVWDSLPPARLADWVLEDKLPVRMQVQLHKILWGEKPGV

SEQ ID NO: 29074 - protein, 221 aa, unidentified
  source 1..221: note = Chitinivibrio alkaliphilus
  REGION 1..221: note = tr|U7D6T5|U7D6T5_9BACT 7-carboxy-7-deazaguanine synthase OS=Chitinivibrio alkaliphilus ACht1 OX=1313304; GN = queE PE=3 SV=1
MPPITSDSPVSTLTVCELFTSLQGESTHAGRVCSFIRLAGCNLRCHYCDTTYSYGGGQRKSFQELLAWLATEKTSLVEITGGEPLCQDAVVDFSALLLQQGYEVLVETNGTWDVSVLPGEVQKIIDYKLPGSGATTPFFRENFSHISSRDEVKFVISDRADYECAKEIVQNQDIAGEVLFSPVEQSCSLKGLAEWIVEDRLRVRLGVQLHKVIWGSDTKGV

SEQ ID NO: 29075 - protein, 208 aa, Chitinophaga arvensicola
  REGION 1..208: note = tr|A0A1I0QTU7|A0A1I0QTU7_9BACT 7-carboxy-7-deazaguanine synthase OS=Chitinophaga arvensicola OX=29529 GN=queE PE=3 SV=1
MSVLTKNINTDTLPLMERFYTIQGEGYHQGRAAYFIRLGGCDVGCVWCDVKDSWDADKHPQVAVADMVSEAAAYPGRIAVITGGEPLLHNLDSLTRTLHKQGFQTHIETSGSSPLSGKWDWITLSPKKFKAPLPEICKVAHELKVVIFNKTDFAWAEKYAALAGKHCKLYLQPEWERSAEMTPLITEYIKDHPEWTMSLQIHKYINVP

SEQ ID NO: 29076 - protein, 206 aa, unidentified
  source 1..206: note = Chitinophaga barathri
  REGION 1..206: note = tr|A0A3N4MTZ5|A0A3N4MTZ5_9BACT 7-carboxy-7-deazaguanine synthase OS=Chitinophaga barathri; OX = 1647451 GN=queE PE=3 SV=1
MQSTIIQTAALPVMESFYTLQGEGFHQGKAAYFIRLGGCDVGCVWCDVKESWDADKHPQIAISDLVREAAANPGRIAVITGGEPLMHNLDGLTKALHKAGFRNHIETSGSSPLSGSWDWITLSPKKFKAPLAEVCAQAHELKIIIYNKSDFAWAEKYAAMAGKHCRLYLQPEWSRAAEMTPLIVDYVKDNPQWQISLQIHKYINVP

SEQ ID NO: 29077 - protein, 193 aa, unidentified
  source 1..193: note = Chitinophaga caeni
  REGION 1..193: note = tr|A0A291R0X3|A0A291R0X3_9BACT 7-carboxy-7-deazaguanine synthase OS=Chitinophaga caeni; OX = 2029983 GN=queE PE=3 SV=1
MEAFYTLQGEGFYQGQAAYFIRLGGCDVGCHWCDVKDSWDIDKHPRQAVREIVDTAASQPGRIAVITGGEPLLHDLTLLTKYLHKAGFRTHIETSGSSPISGSLDWITLSPKKFKAPLTEVTQRAHELKVVIYNKSDFAWAEKYAAQTNKHCKLYLQPEWSRAAEMTPLIVDYIKENPQWQLSLQIHKYINVP

SEQ ID NO: 29078 - protein, 205 aa, unidentified
  source 1..205: note = Chitinophaga costaii
  REGION 1..205: note = tr|A0A1C4BX53|A0A1C4BX53_9BACT 7-carboxy-7-deazaguanine synthase OS=Chitinophaga costaii; OX = 1335309 GN=queE PE=3 SV=1
MTTLQLTDTLPVMEDFYTLQGEGMYQGQAAYFIRLGGCDVGCHWCDVKESWDENKHPQVAITDLVAKAAAFPGRLAVITGGEPLLHNLDVLCTTLHAAGFRTHMETSGSSPLSGDWDWITLSPKKFKAPLPAVSAAAHELKVVIFNKADFAWAEEHAALAGHHCKLYLQPEWSKADAMTPLIVDYIKAHPQWQLSLQTHKYINVP

SEQ ID NO: 29079 - protein, 206 aa, unidentified
  source 1..206: note = Chitinophaga cymbidii
  REGION 1..206: note = tr|A0A512RJZ7|A0A512RJZ7_9BACT 7-carboxy-7-deazaguanine synthase OS=Chitinophaga cymbidii; OX = 1096750 GN=queE PE=3 SV=1
MSTTAVHTVTLPVMESFYTIQGEGFHQGKAAYFIRLGGCDVGCVWCDVKESWDADKHPQRAIPDLVREAAAHPGRIAVITGGEPLMHNLHELTGALHTAGFRTHMETSGSSPLSGDWDWITLSPKKFKAPLNEVCQQAHELKIVVYNKSDFAWAEKYAAMVGKQCRLYLQPEWSRAAEMTPLIIDYVKDHPQWQISLQVHKYINVP

SEQ ID NO: 29080 - protein, 193 aa, unidentified
  source 1..193: note = Chitinophaga dinghuensis
  REGION 1..193: note = tr|A0A327VM61|A0A327VM61_9BACT 7-carboxy-7-deazaguanine synthase OS=Chitinophaga dinghuensis OX=1539050 GN=queE PE=3 SV=1
MERFYTIQGEGLYQGRAAYFIRLGGCDVGCHWCDVKDSWDADKHPQLTIDNIVSEAASYPGRIAVITGGEPLLHQLDGLTKALHKQGFRTHMETSGSSPLSGNWDWITLSPKKFKAPLPEVCKAASELKVVIFNKSDFAWAEKHAAMVGKNCRLYLQPEWSKSAEMLPLIIDYIKDNPQWQLSLQVHKYINVP

SEQ ID NO: 29081 - protein, 208 aa, Chitinophaga eiseniae
  REGION 1..208: note = tr|A0A1T4Q8W2|A0A1T4Q8W2_9BACT 7-carboxy-7-deazaguanine synthase OS=Chitinophaga eiseniae; OX = 634771 GN=queE PE=3 SV=1
MSVITTNIKTSTLPVMESFYTLQGEGYYQGKAAYFIRLGGCDVGCHWCDVKESWDAAKHPQREIVDIVEEAASHPGRLAVITGGEPLMHHLDALTKALHKKGFRTHMETSGSSPLSGSWDWITLSPKKFKAPLPEVCRVASELKVVIFNKSDFAWAEKYAALVGKQCKLYLAPEWDRSAEMTPLIIDYIKDHPEWGLSLQVHKYINVP

SEQ ID NO: 29082 - protein, 209 aa, Chitinophaga filiformis
  REGION 1..209: note = tr|A0A1G7GJP6|A0A1G7GJP6_CHIFI 7-carboxy-7-deazaguanine synthase OS=Chitinophaga filiformis OX=104663 GN=queE PE=3 SV=1
MSTTTADIATSLQLPVMERFYTLQGEGNYQGQAAYFIRLGGCDVGCHWCDVKDSWDASRHPLIAISELVQDAAVHPGRIAVITGGEPLMHNLDALTDALHKEGFRTHMETSGSSPLSGHWDWITLSPKKFKAPLPEICGVAHELKVVIFNKTDFAWAEKYAALAGSHCKLYLQPEWDRAAEITPLIIYYIKENPQWQLSLQVHKYINVP

SEQ ID NO: 29083 - protein, 193 aa, unidentified
  source 1..193: note = Chitinophaga flava
  REGION 1..193: note = tr|A0A365Y7A2|A0A365Y7A2_9BACT 7-carboxy-7-deazaguanine synthase OS=Chitinophaga flava; OX = 2259036 GN=queE PE=3 SV=1
MESFYTLQGEGFHQGRAAYFIRLGGCDVGCHWCDVKDSWDASRHPQREVADIVEEAAAHPGRIAVITGGEPLLHNLDALTKALHKKGFHTHMETSGSSPLSGSWDWITLSPKKFKAPLPEICKVAHELKVVIFNKSDFAWAEKYAALVGKDCRLYLQTEWERGAEMTPLIVDYIKDHPEWTLSLQSHKYIHVP

SEQ ID NO: 29084 - protein, 208 aa, Chitinophaga ginsengisegetis
  REGION 1..208: note = tr|A0A1T5NLQ2|A0A1T5NLQ2_9BACT 7-carboxy-7-deazaguanine synthase OS=Chitinophaga ginsengisegetis OX=393003 GN=queE PE=3 SV=1
MSVTTINISTDTLPLMERFYTIQGEGYHQGRAAYFIRLGGCDVGCVWCDVKDSWDADKHPQVAVSDIVTEAAAYPGRIAVVTGGEPLLHNLDALTRSLHKQGFHTHIETSGSSPLSGKWDWITLSPKKFKAPLPEICKAAHELKVVIFNKTDFAWAEKYAALAGKHCKLYLQPEWERSAEMTPLITEYIKDHPEWTMSLQIHKYINVP

SEQ ID NO: 29085 - protein, 193 aa, Chitinophaga ginsengisoli
  REGION 1..193: note = tr|A0A2P8GGK3|A0A2P8GGK3_9BACT 7-carboxy-7-deazaguanine synthase OS=Chitinophaga ginsengisoli OX=363837 GN=queE PE=3 SV=1
MERFYTLQGEGNYQGQAAYFIRLGGCDVGCHWCDVKDSWDASRHPLLAISDLVKDAAVHPGRIAVITGGEPLMHNLDALTDALHKEGFRTHMETSGSSPLSGHWDWITLSPKKFKAPLPEICGLAHELKVVIFNKTDFAWAEKYAALAGPHCKLYLQPEWDRAAEITPLIIDYIKENPQWQLSLQVHKYINVP

SEQ ID NO: 29086 - protein, 210 aa, Chitinophaga japonensis
  REGION 1..210: note = tr|A0A562TAW6|A0A562TAW6_CHIJA 7-carboxy-7-deazaguanine synthase OS=Chitinophaga japonensis OX=104662 GN=queE PE=3 SV=1
MSTTITHSNVQTETLPVMERFYTLQGEGFYQGQAAYFIRLGGCDVGCHWCDVKDSWDAARHPVLPVTELAAEAAQHPGRIAVITGGEPLMHNLDALCQALHQQGFRTHIETSGSSPLSGQWDWITLSPKKFKAPLPEICAQANELKVVIFNKTDFAWAEKYAALAGKDCKLYLQPEWDRAAEMTPLIIDYIKAHPEWQLSLQVHKYINVP

SEQ ID NO: 29087 - protein, 207 aa, unidentified
  source 1..207: note = Chitinophaga jiangningensis
  REGION 1..207: note = tr|A0A1M6W1M1|A0A1M6W1M1_9BACT 7-carboxy-7-deazaguanine synthase OS=Chitinophaga jiangningensis OX=1419482 GN=queE PE=3 SV=1
MSVLISNSTSTLPVMEQFYTIQGEGLYQGKAAYFIRLGGCDVGCHWCDVKESWDADKHPQLTIDSIVQEAAANPGRIAVITGGEPLMHRLDALTKALHKKGFRTHMETSGSSPLSGSWDWITLSPKKFKAPLPEVCKAANELKVVIFNKSDFAWAEKHAAMVDKSCRLYLQPEWGKSAEMTPLIIDYIKDNPQWQLSLQIHKYINVP

SEQ ID NO: 29088 - protein, 206 aa, Chitinophaga niabensis
  REGION 1..206: note = tr|A0A1N6HCV5|A0A1N6HCV5_9BACT 7-carboxy-7-deazaguanine synthase OS=Chitinophaga niabensis OX=536979 GN=queE PE=3 SV=1
MQSTVIHTATLPVMESFYTIQGEGFHQGKAAYFIRLGGCDVGCVWCDVKESWDADKHPQRDITGMVQEAAAHPGRIAVITGGEPLMHHLDGLTKALHKAGFRNHIETSGSSPLSGSWDWITLSPKKFKAPLPEACKQANELKIVIYNKSDFAWAEKYAALVGKQCKLYLQPEWSRAAEMTPHIIDYVKDNPQWQISLQVHKYINVP

SEQ ID NO: 29089 - protein, 208 aa, Chitinophaga niastensis
  REGION 1..208: note = tr|A0A2P8HVC1|A0A2P8HVC1_9BACT 7-carboxy-7-deazaguanine synthase OS=Chitinophaga niastensis OX=536980 GN=queE PE=3 SV=1
MSVITTNINTSTLPVMERFYTIQGEGYHQGRAAYFVRLGGCDVGCVWCDVKDSWDAEKHPQVPVTDIVAEAAKFPGRIAVITGGEPLLHQLDVLTKTLHKQGFQTHIETSGSSPLSGSWDWITLSPKKFKAPLPDICKAAHELKVVIFNKTDFAWAEKYAALAGKHCKLYLQPEWERSAEMTPLIIDYIKDNPQWTMSLQIHKYINVP

SEQ ID NO: 29090 - protein, 201 aa, unidentified
  source 1..201: note = Chitinophaga parva
  REGION 1..201: note = tr|A0A2T7BNI7|A0A2T7BNI7_9BACT 7-carboxy-7-deazaguanine synthase OS=Chitinophaga parva; OX = 2169414 GN=queE PE=3 SV=1
MTTLALPVMEDFYTLQGEGMYQGQAAYFVRLGGCDVGCHWCDVKESWDESKHPRIAIDAIVAKAAAHPGRLAVITGGEPLLHNLDALCDALHAAGFRTHMETSGSSPLSGHWDWITLSPKKFKAPLPEVSVAAHELKVVVFNKSDFAWAEEHAALAGPHCKLYLQPEWSKADAMTPLIVDYIKAHPQWQLSLQTHKYINVP

SEQ ID NO: 29091 - protein, 193 aa, Chitinophaga pinensis
  REGION 1..193: note = tr|A0A561J1F7|A0A561J1F7_9BACT 7-carboxy-7-deazaguanine synthase OS=Chitinophaga pinensis; OX = 79329 GN=queE PE=3 SV=1
MERFYTIQGEGNYQGCAAYFIRLGGCDVGCHWCDVKDSWEADRHPQLELTDIVSEAASYPGRIAVITGGEPLMHNLDALTADLHAAGFRTHIETSGSSPLSGNWDWITLSPKKFKAPLPDICALANELKVVIFNKSDFAWAEKYAALAGPHCKLYIQPEWNKAAEMTPLIIDYIKDNPKWQLSLQVHKYINVP

SEQ ID NO: 29092 - protein, 209 aa, Chitinophaga pinensis
  REGION 1..209: note = tr|C7PR94|C7PR94_CHIPD 7-carboxy-7-deazaguanine synthase OS=Chitinophaga pinensis (strain ATCC 43595 / DSM 2588 / NCIB 11800 / UQM 2034) OX=485918 GN=queE PE=3 SV=1
MSTITADTATSLQLPVMERFYTLQGEGNYQGQAAYFIRLGGCDVGCHWCDVKESWDASRHPLIAISELVRDAAVHPGRIAVITGGEPLMHNLDPLTDALHAASFRTHMETSGSSPLSGHWDWITLSPKKFKAPLPEVCEVAHELKVVIFNKSDFAWAEKYAALAGPHCKLYLQPEWEKSAQVTPLIIDYIKENPKWQLSLQTHKYINVP

SEQ ID NO: 29093 - protein, 208 aa, unidentified
  source 1..208: note = Chitinophaga polysaccharea
  REGION 1..208: note = tr|A0A561Q5B7|A0A561Q5B7_9BACT 7-carboxy-7-deazaguanine synthase OS=Chitinophaga polysaccharea OX=1293035 GN=queE PE=3 SV=1
MSVITTNIKTDTLPLMERFYTIQGEGYHQGRAAYFIRLGGCDVGCVWCDVKESWDADKHPQVSITDIATEAARYPGRIAVVTGGEPLLHNLDALTKALHKQGFKTHMETSGSSPLSGSWDWITLSPKKFKAPLPEVCKAAHELKVVIYNKTDFAWAEKYAALAGKNCKLYLQPEWERSAEMTPLITEYIKDHPEWTMSLQIHKYINVP

SEQ ID NO: 29094 - protein, 214 aa, Chitinophaga rupis
  REGION 1..214: note = tr|A0A1H8BMW3|A0A1H8BMW3_9BACT 7-carboxy-7-deazaguanine synthase OS=Chitinophaga rupis; OX = 573321 GN=queE PE=3 SV=1
MIKTMPITTTNNNTPTTALPVMESFYTIQGEGYHQGRAAYFIRLGGCDVGCHWCDVKDSWDAAKHPVINITDIVNEAAQHPGRIAVITGGEPLMHNLDTLCKTLHKQGFRTHMETSGSSSLSGQWDWITLSPKKFKAPLPEVCKQAHELKVVIFNKTDFAWAEKYAAQVNKHCKLYLQPEWSKAAEITPLIIDYIKDNPQWELSLQIHKYINVP

SEQ ID NO: 29095 - protein, 208 aa, Chitinophaga sancti
  REGION 1..208: note = tr|A0A1K1RE41|A0A1K1RE41_9BACT 7-carboxy-7-deazaguanine synthase OS=Chitinophaga sancti; OX = 1004 GN=queE PE=3 SV=1
MSTTATYQHVRTLPVMERFYTIQGEGNYQGCAAYFIRLGGCDVGCHWCDVKDSWEADRHPQLELTDLVSEAASYPGRIAVITGGEPLMHNLDALTADLHAAGFRTHIETSGSSPLSGNWDWITLSPKKFKAPLPEICALANELKVVIFNKSDFAWAEKYAALAGPHCKLYIQPEWNKAAEMTPLIIDYIKDHPKWQLSLQVHKYINVP

SEQ ID NO: 29096 - protein, 207 aa, Chitinophaga skermanii
  REGION 1..207: note = tr|A0A327Q3W1|A0A327Q3W1_9BACT 7-carboxy-7-deazaguanine synthase OS=Chitinophaga skermanii OX=331697 GN=queE PE=3 SV=1
MDTSIATNNRTLPVMEYFYTIQGEGFYQGQAAYFIRLGGCDVGCHWCDVKESWDADKHPKYDVADIVSQAAQFPGRIAVITGGEPLMHNLDALTSALHEAGFRTHIETSGSSPLSGSLDWITLSPKKFKAPLEEVNRAAHELKVVIFNKSDFAWAEKHAALASPGCKLYLQPEWSKAKEMTPLIVDYIKDHPQWQLSLQVHKYINVP

SEQ ID NO: 29097 - protein, 193 aa, Chitinophaga sp.
  REGION 1..193: note = tr|A0A5B9WWA7|A0A5B9WWA7_9BACT 7-carboxy-7-deazaguanine synthase OS=Chitinophaga sp. XS-30 OX=2604421 GN=queE PE=3 SV=1
MESFYTIQGEGFHQGKAAYFIRLGGCDVGCVWCDVKESWDADKHPQVPVMEIVQEAAAFPGRIAVITGGEPLMHNLDGLTKSLHKTGFRTHIETSGSSPMSGNWDWITLSPKKFKAPLDEVCKQAHELKIVVYHKSDFAWAEKYAAQVGKQCKLYLQPEWSRAAEMTPLIIDYVKDHPQWQISLQIHKYINVP

SEQ ID NO: 29098 - protein, 210 aa, Chitinophaga sp.
  REGION 1..210: note = tr|A0A5B2VLT1|A0A5B2VLT1_9BACT 7-carboxy-7-deazaguanine synthase OS=Chitinophaga sp. BN140078 OX=2607653 GN=queE PE=3 SV=1
MSLVVTNTNIQTTTLPVMERFYTIQGEGYHQGRAAYFIRLGGCDVGCHWCDVKDSWDAAKHPKLAISDIVREAAQHPGRIAVITGGEPLMHNLDALCDTLHEQGFRTHIETSGSSPLSGQWDWITLSPKKFKAPLPEICQQAHELKVVIFNKTDFAWAEKYAALAGGHCRLYLQPEWEKAAEMTPLIIDYIKEHPEWELSLQIHKYINVP

SEQ ID NO: 29099 - protein, 208 aa, Chitinophaga terrae
  REGION 1..208: note = tr|A0A1H4DCV6|A0A1H4DCV6_9BACT 7-carboxy-7-deazaguanine synthase OS=Chitinophaga terrae Kim and Jung 2007 OX=408074 GN=queE PE=3 SV=1
MSAVLTNIKSTALPVMESFYTIQGEGFYQGHAAYFIRLGGCDVGCVWCDVKESWDASKHPSVEIADIVTTAAANPGHIAVITGGEPLMHQLDELTTALQNAGLRTHIETSGSSPLSGKWDWITLSPKKFKAPLQEACDAANELKVVIYNKTDFAWAEKYAALVKPDCKLYLQPEWSKSAAMTPLIIDYVKANPQWTLCLQIHKYINVP

SEQ ID NO: 29100 - protein, 204 aa, unidentified
  source 1..204: note = Chitinophagaceae bacterium
  REGION 1..204: note = tr|A0A3C1NML7|A0A3C1NML7_9BACT 7-carboxy-7-deazaguanine synthase OS=Chitinophagaceae bacterium OX=1869212 GN=queE PE=3 SV=1
MEHFYTLQGEGFHQGRAAYFIRLGGCDVGCVWCDVKESWDANAHPRVRIDEILQYIHSGTQIFVQDNHSKTKPFVVVTGGEPLMHNLDELTAAIRTAGYPAHIETSGAHPLSGRWDWICVSPKKFKAPLDEVLAHADELKVVIYHPSDFEWAEKHAQKVKPGCLLYLQPEWDRSEKMTGLIVDYIKYHPEWRLSLQIHKYIHVP

SEQ ID NO: 29101 - protein, 202 aa, unidentified
  source 1..202: note = Chitinophagaceae bacterium
  REGION 1..202: note = tr|A0A3C0INP8|A0A3C0INP8_9BACT 7-carboxy-7-deazaguanine synthase OS=Chitinophagaceae bacterium OX=1869212 GN=queE PE=3 SV=1
MEHFYTLQGEGFHQGRAAYFIRLGGCDVGCFWCDVKDSWDASKHPQYAVATIVDMATTAIAAEQKNTEVKPIIVITGGEPLMHDLTTLTQAFQQLGFETNIETSGSSPMSGSWDWVCLSPKKFKAPLPEVLPLANELKVVIYNKTDFEWAEQFAAQVSKHCKLYLQPEWDKRDAVLPLIINYIKANPQWRLSAQVHKYISVP

SEQ ID NO: 29102 - protein, 214 aa, Chlamydia sp.
  REGION 1..214: note = tr|A0A1M3B7J9|A0A1M3B7J9_9CHLA 7-carboxy-7-deazaguanine synthase OS=Chlamydia sp. 32-24; OX = 1895742 GN=queE PE=3 SV=1
MDLSLIEIFKSVQGETSFTGLPTTFIRLAACNLRCSWCDTTYSFGKGTPFTLDSIIEQTKLFACKHVCITGGEPLLQKNVYFLMQKLCDENYIVSLETSGSLLIDEVDPRVNVILDIKCPKSLMEHKNEWKNIALLKSHDEVKFVIQDFEDYSYAKNICEKYQLFTKVKEVLFSPVFEKLATHELVEWILKDNLPVRLNLQIHKFIWDPLTKGV

SEQ ID NO: 29103 - protein, 210 aa, unidentified
  source 1..210: note = Chloracidobacterium sp.
  REGION 1..210: note = tr|A0A257B2R9|A0A257B2R9_9BACT 7-carboxy-7-deazaguanine synthase OS=Chloracidobacterium sp. CP2_5A OX=2012633 GN=queE PE=3 SV=1
MRITEIFFSIQGESSYAGLPCAFVRTTGCDLRCAWCDSEYTFTGGTHLSVEEIVERLRAYPTRLVELTGGEPLLQKDIHALADCLLEEGYTVLIETGGHRDVSGLDPRIIKILDIKCPGSGMAEKNLWSNLDYVTRRDEVKFVLADMADYFWAREILRIYRLEQRASVLFSTVFGVERRPIVERILADGLQVRFQAQLHKLIWPADARGV

SEQ ID NO: 29104 - protein, 210 aa, unidentified
  source 1..210: note = Chloracidobacterium thermophilum
  REGION 1..210: note = tr|G2LFE7|G2LFE7_CHLTF 7-carboxy-7-deazaguanine synthase OS=Chloracidobacterium thermophilum (strain B); OX = 981222 GN=queE PE=3 SV=1
MRITEIFFSIQGESSYAGLPCAFVRTTGCDLRCTWCDSEYTFTGGTHMSVEEILERIRAYPTRLVELTGGEPLLQKDIYELAGRLLDEGYTVLIETGGHRDVSRLDPRIIKIMDIKCPGSGMVEKNLWSNLDHITRRDEVKFVLADLADYFWAREILRIYRLEQRTNVLFSTVFGVEQRPIVERLLADGLQVRFQTQLHKLIWPADMRGV

SEQ ID NO: 29105 - protein, 210 aa, unidentified
  source 1..210: note = Chloracidobacterium thermophilum
  REGION 1..210: note = tr|A8DK01|A8DK01_9BACT 7-carboxy-7-deazaguanine synthase OS=Chloracidobacterium thermophilum OX=458033; GN = queE PE=3 SV=1
MRITEIFFSIQGESSYAGLPCAFVRTTGCDLRCTWCDSEYTFTGGTHMSVEEILERVRAYPTRLVELTGGEPLLQKDIYELSERLLEEGYTVLIETGGHRDVSRLDPRIVKILDIKCPGSGMVEKNLWSNLDYITRRDEVKFVLADLNDYFWAREILRIYRLEQRTNVLFSTVFGVERRPIVERILADGLQVRFQTQLHKLIWPADMRGV

SEQ ID NO: 29106 - protein, 220 aa, Chlorobaculum limnaeum
  REGION 1..220: note = tr|A0A1D8D0J5|A0A1D8D0J5_CHLLM 7-carboxy-7-deazaguanine synthase OS=Chlorobaculum limnaeum OX=274537 GN=queE PE=3 SV=1
MSTETTLCVSEIFHSIQGESSFAGWPCAFVRLAGCGHGCRYCDTAYAEEAGTAMTVEQIVRRALAFEAPCVEVTGGEPLLQPGAFELLSTLCDHHPAVLLETGGFLPVERVDPRVHAIIDIKAPSSGVAAENCATNFALALDTPERFEFKIVVASREDYEWAKSYIAGHDLPGKCSIIFGPVFGHLEPRLLAEWILRDRLPVRMQLQLHKYIWNPDARGV

SEQ ID NO: 29107 - protein, 219 aa, Chlorobaculum parvum
  REGION 1..219: note = tr|B3QQA7|B3QQA7_CHLP8 7-carboxy-7-deazaguanine synthase OS=Chlorobaculum parvum (strain NCIB 8327); OX = 517417 GN=queE PE=3 SV=1
MTTATISISEIFHSIQGESSFAGWPCAFVRLAGCGHGCNYCDTTYAEEAGTAMTIDEVVRRALTFDAPIVEVTGGEPLLQPEVYPLLSALCDKGAKVLLETGGFLPVNRVDPRVHTIIDIKTPSSGVAEQNCMDNIPLALASPKRFEFKIVVASEEDYLWARDFITKQGLLGKCTLIFGTVFGQLEPRLLAEWILRDRLPVRMQLQLHKYIWNPETRGV

SEQ ID NO: 29108 - protein, 220 aa, Chlorobaculum sp.
  REGION 1..220: note = tr|A0A4Q1DFL9|A0A4Q1DFL9_9CHLB 7-carboxy-7-deazaguanine synthase OS=Chlorobaculum sp. 24CR OX=2508878 GN=queE PE=3 SV=1
MSTETTLRVSEIFHSIQGESSRVGWPCAFVRLAGCGHGCRYCDTAYAEEAGTAMTVEQIVRRVLAFDAPCVEVTGGEPLLQPGAFELLAELCDRHPVVLLETGGFLPVERVDPRVHAIIDIKAPSSGVAAENCATNFALALDTPERFEFKIVVASREDYEWAKSYIAGHGLPGKCSIIFGPVFGHLEPRLLAEWILRDRLPVRMQLQFHKYIWQPDARGV

SEQ ID NO: 29109 - protein, 220 aa, Chlorobaculum tepidum
  REGION 1..220: note = sp|Q8KFK8|QUEE_CHLTE 7-carboxy-7-deazaguanine synthase OS=Chlorobaculum tepidum (strain ATCC 49652 / DSM 12025 / NBRC 103806 / TLS) OX=194439 GN=queE PE=3 SV=1
MSTEAPLNISEIFYSIQGESSFAGWPCAFVRLAGCGHGCRYCDTTYAEEPGTAMTIDEIMHRVLAFDAPCVEVTGGEPLLQSGTFGLLSALCDRHPVVLLETGGFLPVDRVDPRVHAIIDIKAPSSGVMEHNCAANFTLALNEPERFEFKIVVASEADYLWAKSYIAGHGILGKCSIIFGPVFGQLEPRLLAEWMLRDRLPVRMQLQLHKYIWNPDARGV

SEQ ID NO: 29110 - protein, 220 aa, Chlorobaculum thiosulfatiphilum
  REGION 1..220: note = tr|A0A5C4S4B5|A0A5C4S4B5_CHLTI 7-carboxy-7-deazaguanine synthase OS=Chlorobaculum thiosulfatiphilum OX=115852 GN=queE PE=3 SV=1
MSTETTLRVSEIFHSIQGESSLAGWPCAFVRLAGCGHGCRYCDTAYAKEAGTVMTVEQIVRRALAFDAPCIEVTGGEPLLQPGAFELLSELCDRHPVVLLETGGFLPVERVDPRVHAIIDIKAPSSGVAAENCATNFALALDTPERFEFKIVVASREDYEWAKSYIAGHGLPGKCSIIFGPVFGHLEPRLLAEWILRDRLPVRMQLQLHKYIWQPDARGV

SEQ ID NO: 29111 - protein, 200 aa, unidentified
  source 1..200: note = Chlorobi bacterium
  REGION 1..200: note = tr|A0A3M1LXC8|A0A3M1LXC8_9BACT Radical SAM protein (Fragment) OS=Chlorobi bacterium OX=2268192 GN=D6747_02535; PE = 3 SV=1
RAGMPCTFIRLQGCSLRCAWCDTPYALDHRTPEHVLTAAEVLERVEQIGTPFVELTGGEPLEQLASFRLIEWLCDRGYTVAIETGGHISIEHVDRRAICIVDVKCPDSRMAPLNYMPNLSLLRPQDEVKFVIASRQDYQWARALIEEHKLAENVAAVLLSPAFGLLEPRVLAEWILADRAPVRLQLQMHKFIWDPSMRGV

SEQ ID NO: 29112 - protein, 159 aa, unidentified
  source 1..159: note = Chlorobi bacterium
  REGION 1..159: note = tr|A0A136K8M0|A0A136K8M0_9BACT 7-carboxy-7-deazaguanine synthase OS=Chlorobi bacterium OLB4 OX=1617411 GN=queE PE=4 SV=1
MYGEKLIDLCNELRKVNPGIHITLETNGTYPGKYLESFDLISVSPKLASSVPIDTSHRESHERQRINPDALKQINSLHRLGLVDVQWKFVYTGVSDVGEIKQFQILSGFRNSDVYLMPEGITGNELELKRMETAETAIRHGWNYTDRLHIMIWGNKRGV

SEQ ID NO: 29113 - protein, 226 aa, unidentified
  source 1..226: note = Chlorobium chlorochromatii
  REGION 1..226: note = tr|Q3AT97|Q3AT97_CHLCH 7-carboxy-7-deazaguanine synthase OS=Chlorobium chlorochromatii (strain CaD3); OX = 340177 GN=queE PE=3 SV=1
MSQNALNALRISEIFYSIQGEAFFAGFPCAFIRLAGCGHGCNYCDTSYAEEKGELMAQAEIIKQALSYHAPIIEITGGEPLLQPAVYPLMEELCNRGEQVLLETGGFLSVEKVDKRVHKIIDLKAPSSGVAEKNNPANIRLALEAAPEEQRRFEFKMVIANREDYEWAKTLLEEHHIAAASTVTMGTVFGALSPTQLAEWILHDRLPVRLQLQLHKYLWEPSRHGV

SEQ ID NO: 29114 - protein, 224 aa, unidentified
  source 1..224: note = Chlorobium ferrooxidans
  REGION 1..224: note = tr|Q0YUM3|Q0YUM3_9CHLB 7-carboxy-7-deazaguanine synthase OS=Chlorobium ferrooxidans DSM 13031 OX=377431; GN = queE PE=3 SV=1
MSTPTLNISEIFHSIQGESSYAGWPCTFIRLAGCGHGCRHCDTAYAEHPGREMNIEEIIERVVELGAPLVEITGGEPLLQEEVYPLMEKLCNRWKERVLLETGGFLSVAKADPRVHKIIDLKPPSTGVSDKNNPENIALALKQKDHANRLIELKIVVADREDYLWARELLTRTGLPDACTVMMGVAFGMLEPVNLANWILEDRLNVRMQLQLHKYIWDPGRRGV

SEQ ID NO: 29115 - protein, 220 aa, Chlorobium limicola
  REGION 1..220: note = tr|B3EEJ5|B3EEJ5_CHLL2 7-carboxy-7-deazaguanine synthase OS=Chlorobium limicola (strain DSM 245 / NBRC 103803 / 6330) OX=290315 GN=queE PE=3 SV=1
MTISISEIFHSIQGESSFAGWPCAFVRLAGCGHGCRYCDTTYAEKPGTEMETDEIFEKIDEIGAQLVEITGGEPLLQKEVYPLMERLCDRKEKVLLETGGFLSVAKVDQRVHKIIDLKAPSSGVCNKNNPQNIELAMRSGKAEISSFEFKIVVADREDYLWARTMLTDTGLAEACTVMLGVVFGKLEPERLAQWILEDRIRVRMQLQLHKYIWPPEMRGV

SEQ ID NO: 29116 - protein, 223 aa, Chlorobium phaeobacteroides
  REGION 1..223: note = tr|A1BHW5|A1BHW5_CHLPD 7-carboxy-7-deazaguanine synthase OS=Chlorobium phaeobacteroides (strain DSM 266); OX = 290317 GN=queE PE=3 SV=1
MILKELSISEIFHSIQGESSFAGWPCAFVRLAGCGNGCNFCDTTYAETDGFMLEIPDIIMQTQAFRAPIIEITGGEPLLQPAVYPLMQQLCNLGETVLLETGGFLSVDKVDSRVHKIIDLKPPSSGVCERNCPENITLALHAGKKLSQTFEFKIVVASREDYDWAKALLLQHQLYCSCIVMMGVIHEKLEPSTLAEWILRDRLPVRMQLQLHKYIWPLATRGT

SEQ ID NO: 29117 - protein, 223 aa, Chlorobium phaeobacteroides
  REGION 1..223: note = tr|B3ELV5|B3ELV5_CHLPB 7-carboxy-7-deazaguanine synthase OS=Chlorobium phaeobacteroides (strain BS1); OX = 331678 GN=queE PE=3 SV=1
MSETVLINEIFRSIQGESTFAGTPCTFIRLSGCDSACRWCDTRYASVENGTAMTLSEIERRADGFRTSLVEITGGEPLQQEPVYALMQQLCDKGHTVLLETGGFLPVDRVDPRVHKIIDLKAPSSGESGRICTSNIELAVSAAEPLKKSFEFKLLLASREDYDWAVDLLNRYRLNQHCTVLMGTVFNKLHPAELAAWILEDNLNVRLQLQLHKYIWPPDMRGV

SEQ ID NO: 29118 - protein, 223 aa, Chlorobium phaeovibrioides
  REGION 1..223: note = tr|A4SDE4|A4SDE4_CHLPM 7-carboxy-7-deazaguanine synthase OS=Chlorobium phaeovibrioides (strain DSM 265 / 1930) OX=290318 GN=queE PE=3 SV=1
MNEALLKISEIFRSIQGESSYAGWPCAFIRLAGCSHNCRYCDSLYARNTEERLTTREVVSRALALKTEIIEITGGEPLEQPGVHQLMTELCNTGRKVLLETGGFIPVAGIDPRVHKIIDLKPPSSGESGKNCMENITLAFKAGKELQKSFEFKMVVADRNDYLWSRDLLRMHPLQKSCTVLMGVVAGELAPAQLADWILEDGLRVRMQLQLHKLLWPERTRGA

SEQ ID NO: 29119 - protein, 223 aa, Chlorobium phaeovibrioides; identical to SEQ ID NO: 29118
  REGION 1..223: note = tr|A0A3S0N9T0|A0A3S0N9T0_CHLPH 7-carboxy-7-deazaguanine synthase OS=Chlorobium phaeovibrioides OX=1094 GN=queE PE=3 SV=1

SEQ ID NO: 29120 - protein, 223 aa, Chlorobium sp.
  REGION 1..223: note = tr|A0A4R0QJU0|A0A4R0QJU0_9CHLB 7-carboxy-7-deazaguanine synthase OS=Chlorobium sp. N1; OX = 2491138 GN=queE PE=3 SV=1
MMEQMLDISEIFHSIQGESSYAGWPCTFIRLAGCSHTCRYCDTLYAKTAERRMSIAETIDEARRHRPHLIEVTGGEPLEQPSVHHLLRALCDGGGTILLETGGFLSVRDVDPRVHKVIDLKPPSSGCAEENCMENVELALAAVTAERKRFEFKIVAADRRDYLWAQELLTRTRLAEACTVMMGPVWGVLQPSELAGWILRDRLHVRMQLQLHRHIWPARERGV

SEQ ID NO: 29121 - protein, 223 aa, Chlorobium sp.
  REGION 1..223: note = tr|A0A533TCS2|A0A533TCS2_CHLSQ 7-carboxy-7-deazaguanine synthase OS=Chlorobium sp.; OX = 1095 GN=queE PE=3 SV=1
MSATTLGISEIFHSIQGEGSYAGWPCAFIRLAGCGHGCAGCDTGYAEEKGITLEREEIIQKALTFQPPCIEITGGEPLLQPAVYPLMTQLCDLDQKVLLETGGFISVEKVDTRVHKIIDLKPPSSGVAEQNHPDNIRLALAAEPPHRHTFEFKIVIAGKEDYEWATSLLQKHQLTDSFTVMMGVAFGKLDPAELAEWMLRDRLRARLQLQLHKYLWEPSRRGV

SEQ ID NO: 29122 - protein, 231 aa, unidentified
  source 1..231: note = Chloroflexi bacterium
  REGION 1..231: note = tr|A0A2N5K918|A0A2N5K918_9CHLR 7-carboxy-7-deazaguanine synthase OS=Chloroflexi bacterium; OX = 2026724 GN=queE PE=3 SV=1
MNVMEIYRSVQGEGTLMGVPTTFVRFFACNLRCAWCDTKYSWSVREGGWWDKLSPIDVALEVERLGARHVVLTGGEPTLQHELSTLAQLLKAHDHHLTVETNATIFPAAVVPLIDLWSLSPKLGSAGEAYLRHAVIERFLDTLRPDQQQWKFVVRDDIDEAGLRDLLQRYPVFARRQLPIVLQPEGDVASENYPAALERLTERVRAPFWDDYYVRVLPQMHVIVWGRRRLV

SEQ ID NO: 29123 - protein, 252 aa, unidentified
  source 1..252: note = Chloroflexi bacterium
  REGION 1..252: note = tr|A0A535F8H3|A0A535F8H3_9CHLR 7-carboxy-7-deazaguanine synthase OS=Chloroflexi bacterium; OX = 2026724 GN=queE PE=3 SV=1
MATDRGTNTAIHNIMISECFGPTLQGEGALVGRPTVFVRTGGCDYKCSWCDTLYAVLPEYKADWHAMTTEEVFAEIQRLSGYKPILVTLSGGNPAIQPLGDLLDLGHSHGYTFAIETQGSVAQSWFAKLDYLTLSPKPPSSKQITRWERLDRCITYARHGRDGRQPEICLKIVVFDNEDYAYAKDVAARYPNLPVYLQAGNHTPPHIAQEIDIPGILNRLDWLIQRVTQDQWYSVTVLPQLHTLLWGNKRGV

SEQ ID NO: 29124 - protein, 254 aa, Chlorogloea sp.
  REGION 1..254: note = tr|A0A2T1EKJ9|A0A2T1EKJ9_9CHRO 7-carboxy-7-deazaguanine synthase OS=Chlorogloea sp. CCALA 695 OX=2107693 GN=queE PE=3 SV=1
MSNKTARLIEVFSAIQGEGLNVGTRQIFIRFAICDLRCNYCDSAHTWVTPAEYRIEVHPGLRDFEVYSNPVELTTLLKFVERQNVPLLHDSISLTGGEPLLHAPFLKEFLPEVRSLTNLPIYLETGGHRPEQLLTILPYLDSVGMDLKLPSVSGESHWQAHAQFLQSCYNSQIEVFVKIIISSQTDVAELERAANLVAAVSPEIIIYLQPVTPLEVGTMFAPTPEQVLTWQALMKKWIKQVRVVPQTHKMLQQL

SEQ ID NO: 29125 - protein, 199 aa, Chlorogloeopsis fritschii
  REGION 1..199: note = tr|A0A3S0XNX4|A0A3S0XNX4_CHLFR 7-carboxy-7-deazaguanine synthase OS=Chlorogloeopsis fritschii PCC 6912 OX=211165 GN=queE PE=3 SV=1
MFLIHETFQETIQGEGYWTGSVCDFIRLYGCPVKCHFCDSSYSSGGSHIQYTRRTLEDLVSELKSSMVVISGGEPFVNKQLSLLVDELLVHNKRVHIETSGAFWQEIPPRVWVTVSPKEYVSPKYPVDERMWQRANEIKIVISDGSEVDFYKDKLSECSLIFLQPEWGNPNSLQLTLGLLRENPQYRLSLQTHKYIGVS

SEQ ID NO: 29126 - protein, 265 aa, Chlorogloeopsis fritschii
  REGION 1..265: note = tr|A0A3S1FRA3|A0A3S1FRA3_CHLFR 7-carboxy-7-deazaguanine synthase OS=Chlorogloeopsis fritschii PCC 6912 OX=211165 GN=queE PE=3 SV=1
MTTKTVTKPTARLIEVFSAIQGEGLNVGTRQIFIRFALCDLRCHFCDSAHTWSTPTTCRIERSPGLRDFEIYSNPVSLTQLIEWVKRQNILPLHDSISLTGGEPLLHAQFLVEFLPQVRTVTGLPIYLETGGHRPEQLANILPYLDSVGMDFKLPSVSGESHWQEHAKFLQLCYESQVEVFVKIIVSDKTDPTDLEDAGLLVAEVSPQIPIFLQPVTPLAASEQLTQNPIFAPAPEQVLIWQALMKRFVKQVRVVPQTHKMLNQL

SEQ ID NO: 29127 - protein, 219 aa, Chloroherpeton thalassium
  REGION 1..219: note = tr|B3QS64|B3QS64_CHLT3 7-carboxy-7-deazaguanine synthase OS=Chloroherpeton thalassium (strain ATCC 35110 / GB-78) OX=517418 GN=queE PE=3 SV=1
MLKVNEIFHSIQGESSKAGWPCVFIRLSGCDLRCSYCDTGYAFFDGKEFSQEEILEQVAFYKTRLVEITGGEPLLQPNVYPLMTALCEAGYEVLLETGGHHDVEKVDPRVYKIIDIKTPSSEMSEWNCYRNLELSIAEAKSGVLKTEFKIVLSSEGDYRWAKNLIERYDLARFVPVIFSAAFGALHPRQIAEWILADHLPVRLQLQLHKYIWPADMRGV

SEQ ID NO: 29128 - protein, 204 aa, Chondrocystis sp.
  REGION 1..204: note = tr|A0A1Z4RW69|A0A1Z4RW69_9CHRO 7-carboxy-7-deazaguanine synthase OS=Chondrocystis sp. NIES-4102 OX=2005460 GN=queE PE=3 SV=1
MNTTTQAITYPIVETFHSIQGEGYWTGVSAFFIRLGGCDVHCPWCDTKHSWNAQRHPLKSTEELSKIAKQVNPAIVVITGGEPLMHNLYPLTTELHNAGMQVHLETSGAHPLSGDFDWITFSPKQFKAPDKSIYKYAKELKVVITNEYDLQWAKQQAALVPKTAFCYLQPEWNSPQSQKLILNYIFQNPQWRMSLQTHKLLEIQ

SEQ ID NO: 29129 - protein, 212 aa, Chondromyces apiculatus
  REGION 1..212: note = tr|A0A017SUX4|A0A017SUX4_9DELT 7-carboxy-7-deazaguanine synthase OS=Chondromyces apiculatus DSM 436 OX=1192034 GN=queE PE=3 SV=1
MSYFVKELFYSLQGEGLRAGRPAVFCRFTGCNLWTGREEDRARAVCRFCDTQFVGTDGQGGGQFATAADLVRAVAATWPGKAAGGKPYVVCTGGEPLLQLDEALITGLHDAGFEVAVETNGTRKAPRGIDWICVSPKAGAEVVLRSGNELKLVFPQEDAMPERFEHLDFEHFLLQPMDGLRRQRHTELAVRYCLEHPRWRLSLQTHKILNIP

SEQ ID NO: 29130 - protein, 212 aa, Chondromyces crocatus
  REGION 1..212: note = tr|A0A0K1EDX3|A0A0K1EDX3_CHOCO 7-carboxy-7-deazaguanine synthase OS=Chondromyces crocatus; OX = 52 GN=queF PE=3 SV=1
MAYFVKEIFYTLQGEGLRAGRPAVFCRFTGCNLWTGREEDRSRAICRFCDTQFVGTDGPGGGQFATAGALARAVAAAWPQGVSGGKPYVVCTGGEPLLQLDEPVISALHDEGFEVAVETNGTRPAPRGIDWICVSPKAGTELSLRSGHELKLVFPQEGAEPERYEHLAFEHFLLQPMDGPRRERHTELAVRYCLEHPRWRLSLQTHKILQIP

SEQ ID NO: 29131 - protein, 215 aa, unidentified
  source 1..215: note = Chromatiaceae bacterium
  REGION 1..215: note = tr|A0A3D4S0N3|A0A3D4S0N3_9GAMM 7-carboxy-7-deazaguanine synthase OS=Chromatiaceae bacterium OX=2049432 GN=queE PE=3 SV=1
MSYSVKECFYTLQGEGARAGRAAVFCRFSGCNLWTGREQDRAAAICNFCDTDFRGTDGDGGGRFDTPEALASYVQGFWQPDRAIASGARPYLVCTGGEPLLQLDRALIRALHARAFEIALETNGTLPVPDGVDWICVSPKADAQLVQTSGHELKLVFPQPLAMPERFETLSFRHWFLQPMDGPMLAANTAAAVDYCMAHPRWRLSLQLHKILEIR

SEQ ID NO: 29132 - protein, 221 aa, unidentified
  source 1..221: note = Chromatiales bacterium
  REGION 1..221: note = tr|A0A1S9D1R4|A0A1S9D1R4_9GAMM 7-carboxy-7-deazaguanine synthase OS=Chromatiales bacterium USCg_Taylor OX=1934255 GN=queE_2 PE=3 SV=1
MPATVHKSSPEASLRVTEIFLSLQGESSRVGLPTVFVRLTGCPLRCHYCDTAYAFHGGTRLPFNTILERITEYHARYVTVTGGEPLAQPGCPALLQQLCDLGYRVSLETSGALDIRSVDKRVMKVMDLKTPGSGEAGKNDYLNIQYLAANDEVKFVIRDRNDYDWAKEIMQRFSFPCEILFSPSSGEINPAQMAEWILEDRLPVRFQIQLHKVIWGEIPGR

SEQ ID NO: 29133 - protein, 213 aa, unidentified
  source 1..213: note = Chromatiales bacterium
  REGION 1..213: note = tr|A0A524KGY8|A0A524KGY8_9GAMM 7-carboxy-7-deazaguanine synthase OS=Chromatiales bacterium OX=2026725 GN=queE PE=3 SV=1
MSDLRITEIFHSLQGESRPVGYPTAFVRLTGCPLRCGYCDTAYAFHGGQRLKIPDVLARIVDFQVRHVCVTGGEPLAQPACLDLLTALCDTGYLVSLETSGALDITAVDRRVAVVLDLKTPASGECARNLWSNLPHLKRDDQVKFVICNRTDYDWACEQLHRHDLTSRCEVLFSPAWDEQPARELADWILADRLPVRFQVQLHKYLWGNVPGH

SEQ ID NO: 29134 - protein, 210 aa, Chromatium okenii
  REGION 1..210: note = tr|A0A2S7XMF5|A0A2S7XMF5_9GAMM 7-carboxy-7-deazaguanine synthase OS=Chromatium okenii; OX = 61644 GN=queE PE=3 SV=1
MTYHLKEMFYSLQGEGAQVGRPAIFCRFTGCNLWSGREVDRAQAKCRFCDTDFRGTNGINGGRYADVDALVQKICALWPNTAVRPYIICTGGEPLLQLDAALIAALRQRECEIAVETNGTLPAPAGLNWICVSPKAGAPLRQTSGDELKLVYPQYAALPEQFTGLAFRYFFLQPLADANCAAHTAQAIDYCKSHPQWRLSIQTHKLLDIP

SEQ ID NO: 29135 - protein, 225 aa, Chromatocurvus halotolerans
  REGION 1..225: note = tr|A0A4R2KWR8|A0A4R2KWR8_9GAMM 7-carboxy-7-deazaguanine synthase OS=Chromatocurvus halotolerans OX=1132028 GN=queE PE=3 SV=1
MAHVNTAVHQSATVLRITEIFYSLQGEARTVGRPTVFVRLTGCPLRCVYCDTAYAFTGGTMMALTQVISEVAAYQPRYVTVTGGEPLAQPACLPLLSALCDAGYEVSLETSGALPVQAVDPRVVKVLDLKTPASGEAHRNDYRNVSCLAPHDQVKFVVCDREDYEWARFKLDEYSLADRVGDVLLSPSHEQLAPRELAEWILADNLPVRLQLQLHKLLWNDEPGH

SEQ ID NO: 29136 - protein, 230 aa, Chromatocurvus sp.
  REGION 1..230: note = tr|A0A2N5Y6L3|A0A2N5Y6L3_9GAMM 7-carboxy-7-deazaguanine synthase OS=Chromatocurvus sp. F02 OX=1905677 GN=queE PE=3 SV=1
MTTLLSPLSQSVSTSAALTLRITEIFYSLQGEARTVGLPTVFVRLTGCPLRCVYCDTAYAFSGGEMQSLEQIVTAVAAYQPRYVTVTGGEPLAQKNCLPLLVALCDAGYEVSLETSGALPVAGVDPRVCKVLDLKTPASAECHRNDYGNIALLTRNDQVKFVICDREDYEWARFKLDEYQLPGRVSDVLFSPSHGQLHGRDLAQWILDDRLPVRLQLQLHKLLWDDAPGH

SEQ ID NO: 29137 - protein, 217 aa, unidentified
  source 1..217: note = Chromobacterium amazonense
  REGION 1..217: note = tr|A0A1S1XBB1|A0A1S1XBB1_9NEIS 7-carboxy-7-deazaguanine synthase OS=Chromobacterium amazonense OX=1382803 GN=queE PE=3 SV=1
MPSRNSVTTYTVKEIFYTLQGEGRQAGRAAVFCRFAGCNLWSGREEDRAKAICQFCDTDFVGAGPDGGKFDGAAALAARIASEWPEDAGGVRYVVCTGGEPLLQLDSELIDALHAEGFEIAVETNGTVAAPPGIDWICVSPKAGAELKQLSGNELKLVYPQAAQLPDTVAHLDFDTFYLQPMDGPDLAAHTRAAIAYCMAHPKWRLSVQTHKMVNIR

SEQ ID NO: 29138 - protein, 211 aa, Chromobacterium haemolyticum
  REGION 1..211: note = tr|A0A1W0CG28|A0A1W0CG28_9NEIS 7-carboxy-7-deazaguanine synthase OS=Chromobacterium haemolyticum OX=394935 GN=queE PE=3 SV=1
MTTYTVKEIFYTLQGEGRQAGRAAVFCRFAGCNLWSGREEDRAKAVCQFCDTDFVGVGPDGGKFKSAAALAERIASEWPAGAGGTPYVVCTGGEPLLQLDAQLIAELHQRGFEVAVETNGTVVAPPGLDWICVSPKAGAELLLRSGDELKLVYPQATQMPETVEQLDFDTFYLQPMDGPNLAANTRAAIAYCMTHPRWRLSVQTHKVTNIR

SEQ ID NO: 29139 - protein, 211 aa, Chromobacterium haemolyticum
  REGION 1..211: note = tr|A0A1W0D3N4|A0A1W0D3N4_9NEIS 7-carboxy-7-deazaguanine synthase OS=Chromobacterium haemolyticum OX=394935 GN=queE PE=3 SV=1
MTTYTVKEIFYTLQGEGRQAGRAAVFCRFAGCNLWSGREEDRAKAVCQFCDTDFVGVGPDGGKFKSAAALAERIASEWPTGAGGTPYVVCTGGEPLLQLDAELIAELHRLGFEVAVETNGTVAAPPGLDWICVSPKAGAELLLRSGDELKLVYPQATQMPETVEQLDFDTFYLQPMDGPNLAANTRAAIAYCMTHPRWRLSVQTHKVTNIR

SEQ ID NO: 29140 - protein, 249 aa, Chromobacterium sp.
  REGION 1..249: note = tr|A0A2T5NKM4|A0A2T5NKM4_9NEIS 7-carboxy-7-deazaguanine synthase OS=Chromobacterium sp. Panama OX=2161826 GN=queE PE=3 SV=1
MYHVYIPLFRSFSPCLALARKIVNTFYACPFITFRERAVTTYTVKEIFYTLQGEGRQAGRAAVFCRFSGCNLWSGREEDRAKAVCQFCDTDFVGVGPDGGKFKSAAALAERIAAEWPAGAGGAPYVVCTGGEPLLQLDAELIAELHRLGFEVAVETNGTVAAPPGLDWICVSPKAGAELLLQSGDELKLVYPQATQTPESVEQLDFDTFYLQPMDGPNLAANTRAAIAYCMAHPRWRLSVQTHKVTNIR

SEQ ID NO: 29141 - protein, 211 aa, Chromobacterium sp.
  REGION 1..211: note = tr|A0A344UG41|A0A344UG41_9NEIS 7-carboxy-7-deazaguanine synthase OS=Chromobacterium sp. IIBBL 274-1 OX=2202142 GN=queE PE=3 SV=1
MTTYTIKEIFYTLQGEGRQAGRAAVFCRFAGCNLWSGREEDRAKAVCQFCDTDFVGAGPDGGKFDGAAALAARIAAEWPQGAGGVPYVVCTGGEPLLQLDAALIDALHAEGFEIAVETNGTIAAPEGIDWICVSPKAGSELQQCSGDELKLVYPQIAQLPETVAHLDFGTFYLQPMDGPQLADNTRAAIAYCMAHPQWRLSVQTHKVVDIR

SEQ ID NO: 29142 - protein, 211 aa, unidentified
  source 1..211: note = Chromobacterium sphagni
  REGION 1..211: note = tr|A0A1S1X129|A0A1S1X129_9NEIS 7-carboxy-7-deazaguanine synthase OS=Chromobacterium sphagni OX=1903179 GN=queE PE=3 SV=1
MTTYTVKEIFYTLQGEGRQAGRAAVFCRFAGCNLWSGREEDRGKAVCQFCDTDFVGTGPDGGKFSGAAKLAARIASEWPEDAGGVRYVVCTGGEPLLQLDEALIRALHAEGFEVAVETNGTIAAPAGLDWICVSPKAGSELKQLSGNELKLVYPQQAQLPETVSHLDFDTFYLQPMDGPDIAANTRAAIEYCMAHPKWRLSVQTHKVVHIR

SEQ ID NO: 29143 - protein, 211 aa, unidentified
  source 1..211: note = Chromobacterium vaccinii
  REGION 1..211: note = tr|A0A1D9LFG3|A0A1D9LFG3_9NEIS 7-carboxy-7-deazaguanine synthase OS=Chromobacterium vaccinii OX=1108595 GN=queE PE=3 SV=1
MTTYTVKEIFYTLQGEGRQAGRAAVFCRFAGCNLWSGREEDRAKAVCQFCDTDFVGAGPDGGKFDGAAALAARIAAEWPQDAGGAPYVVCTGGEPLLQLDAELVDALHAEGFEIAVETNGTVAAPAGLDWICVSPKAGSELKQRAGDELKLVYPQATQMPETVAHLDFGAFYLQPMDGPDLTANTRAAIAYCMAHPQWRLSVQTHKVVNIR

SEQ ID NO: 29144 - protein, 211 aa, unidentified
  source 1..211: note = Chromobacterium vaccinii
  REGION 1..211: note = tr|A0A2L2BFU8|A0A2L2BFU8_9NEIS 7-carboxy-7-deazaguanine synthase OS=Chromobacterium vaccinii OX=1108595 GN=queE PE=3 SV=1
MTTYTVKEIFYTLQGEGRQAGRAAVFCRFAGCNLWSGREEDRAKAVCQFCDTDFVGAGPDGGKFDGAAALAARIAAEWPKDAGGAPYVVCTGGEPLLQLDPELVDALHAEGFEIAVETNGTVAAPAGLDWICVSPKAGSELKQRAGDELKLVYPQATQLPETVAHLDFGTFYLQPMDGPDLAANTRAAIAYCMAHPQWRLSVQTHKVVNIR

SEQ ID NO: 29145 - protein, 211 aa, Chromobacterium violaceum
  REGION 1..211: note = tr|A0A1R0MK85|A0A1R0MK85_CHRVL 7-carboxy-7-deazaguanine synthase OS=Chromobacterium violaceum OX=536 GN=queE PE=3 SV=1
MTTYTVKEIFYTLQGEGRQAGRAAVFCRFAGCNLWSGREEDRAKAVCQFCDTDFVGAGPDGGKFDGAAALAARIAAEWPKDAGGSPYVVCTGGEPLLQLDAELIDALHAQGFEIAVETNGTVAAPAGLDWICVSPKAGAQLKQRAGDELKLVYPQAAQMPETVADLDFGTFYLQPMDGPELAANTRAAIAYCMAHPQWRLSVQTHKVVDIR

SEQ ID NO: 29146 - protein, 211 aa, Chromobacterium violaceum
  REGION 1..211: note = tr|A0A381FVP0|A0A381FVP0_CHRVL 7-carboxy-7-deazaguanine synthase OS=Chromobacterium violaceum OX=536 GN=queE PE=3 SV=1
MTTYTVKEIFYTLQGEGRQAGRAAVFCRFAGCNLWSGREEDRAKAVCQFCDTDFVGAGPDGGKFDGAAALAARIAAEWPQDVGGAPYVVCTGGEPLLQLDAELVDALHAEGFEIAVETNGTVAAPAGLDWICVSPKAGSELKQRAGDELKLVYPQATQMPETVAHLDFGAFYLQPMDGPDLAANTRAAIAYCMAHPQWRLSVQTHKVVNIR

SEQ ID NO: 29147 - protein, 214 aa, Chromohalobacter canadensis
  REGION 1..214: note = tr|A0A285VVH4|A0A285VVH4_9GAMM 7-carboxy-7-deazaguanine synthase OS=Chromohalobacter canadensis OX=141389 GN=queE PE=3 SV=1
MYSVKEAFYTLQGEGARAGRASVFCRFTGCNLWSGRERDRATSHCRFCDTDFVGTDGQNGGRFENAQALATHLMSLWPHAQEAAVPYVVFTGGEPLLQLDTPLIEAMHAQGFEIAVETNGTLTPPDGIDWLCVSPKGEAALRITQGDELKLVFPQSDAMPEHFTHLAFRHFFLQPMDLAPRGGRGTTMEDTVAYCLDHPQWRLALQTHKIAGID

SEQ ID NO: 29148 - protein, 214 aa, Chromohalobacter japonicus
  REGION 1..214: note = tr|A0A1Q8TB26|A0A1Q8TB26_9GAMM 7-carboxy-7-deazaguanine synthase OS=Chromohalobacter japonicus OX=223900 GN=queE PE=3 SV=1
MYSVKEAFYTLQGEGARAGRASVFCRFTGCNLWSGRERDRATSHCRFCDTDFIGTDGQHGGRFADAQALANHLMSLWPHAQEAAAPYVVFTGGEPLLQLDTPLIEAMHAQGFEIAVETNGTLPSPDGIDWLCVSPKGDATLRITQGDELKLVFPQSDAMPEQFTHLAFKHFYLQPMDLSPRGGQGTTMKDTVSYCLAHPQWRLSLQTHKIAGID

SEQ ID NO: 29149 - protein, 214 aa, Chromohalobacter marismortui
  REGION 1..214: note = tr|A0A4R7NPX8|A0A4R7NPX8_9GAMM 7-carboxy-7-deazaguanine synthase OS=Chromohalobacter marismortui OX=42055 GN=queE PE=3 SV=1
MYSVKEAFYTLQGEGARAGRASVFCRFTGCNLWSGRERDRATSHCRFCDTDFIGTDGQHGGRFADAQALAAHLMSLWPHDQDVGVPYVVFTGGEPLLQLDTPLIDAMHAQGVEIAVETNGTLTPPDGIDWLCVSPKGDAPLRITQGDELKLVFPQSDAMPEHFTHLAFTHFFLQPMDLVPRGGQGTTMRETVSYCLAHPTWRLSLQTHKIAGID

SEQ ID NO: 29150 - protein, 215 aa, Chromohalobacter salexigens
  REGION 1..215: note = tr|A0A317QWM2|A0A317QWM2_CHRSL 7-carboxy-7-deazaguanine synthase OS=Chromohalobacter salexigens OX=158080 GN=queE PE=3 SV=1
MYSVKEAFYTLQGEGARAGRASVFCRFTGCNLWSGRERDRAQSRCRFCDTDFVGTDGQNGGRFADAHALATHLHRLWPGTDDTAATPYVVFTGGEPLLQLDTALITAMHAHGFEVAVETNGTLTPPDGIDWLCVSPKGDAPLRITQGDELKLVYPQDDAPPANFTHLDFAHFFLQPMDLAPRGGQGTTMTDTVAYCLDHPQWRLALQTHKIAGID

SEQ ID NO: 29151 - protein, 215 aa, Chromohalobacter salexigens
  REGION 1..215: note = tr|Q1QVW8|Q1QVW8_CHRSD 7-carboxy-7-deazaguanine synthase OS=Chromohalobacter salexigens (strain DSM 3043 / ATCC BAA-138 / NCIMB 13768) OX=290398 GN=queE PE=3 SV=1
MYSVKEAFYTLQGEGARAGRASVFCRFTGCNLWSGRERDRAQSRCRFCDTDFVGTDGQNGGRFADAHALATHLHRLWPGTDDTAATPYVVFTGGEPLLQLDTALITAMRAHGFEVAVETNGTLTPPDGIDWLCVSPKGDAPLRITQGDELKLVYPQDDAPPANFTHLDFAHFFLQPMDLAPRGGQGTTMTDTVAYCLDHPQWRLALQTHKIAGID

SEQ ID NO: 29152 - protein, 205 aa, unidentified
  source 1..205: note = Chroococcales cyanobacterium
  REGION 1..205: note = tr|A0A3N5J311|A0A3N5J311_9CHRO 7-carboxy-7-deazaguanine synthase OS=Chroococcales cyanobacterium metabat2.561 OX=2485785 GN=queE PE=3 SV=1
MKTVSINHCTYPVVETFHSLQGEGFWTGSNAFFLRLGGCDVYCPWCDQKESWNAQRYPQKSLGELVEMAKDANPAMVVITGGEPLMHNLDPLTRELKNQGLRVHLETSGAHPFTGVFDWVTFSPKTYKMPDPSIYAQVNELKIVVAHPEDLDWAAMQESKLSEGVIKYLQPEWNKVESKELVFNYVLRHPQWRLSLQTHKFLGVR

SEQ ID NO: 29153 - protein, 258 aa, unidentified
  source 1..258: note = Chroococcales cyanobacterium
  REGION 1..258: note = tr|A0A2G7GGD4|A0A2G7GGD4_9CHRO 7-carboxy-7-deazaguanine synthase OS=Chroococcales cyanobacterium IPPAS B-1203 OX=2049454 GN=queE PE=3 SV=1
MTTTTRLIEVFSAIQGEGLNVGTRQIFIRFALCDLRCRFCDSAHTWTVPSTCHIERSPGLRDFELYDNPVSLDLLLQWVQQLDVPGLHDSISLTGGEPLLHSTFLLKFLPQLQKYTGLPIYLETGGHRPQQLAVVLPHLDSVGMDLKLPSVSGESHWQEHAEFLQLCYQANVEIFVKVIVSSETDIAELHQAAELVANVSPEIPLFLQPVTPLNNIQKSDQVIFAPTPAQVLTWQAKIKQMLKHVRVVPQTHKMLNQL

SEQ ID NO: 29154 - protein, 258 aa, unidentified
  source 1..258: note = Chroococcidiopsis cubana
  REGION 1..258: note = tr|A0A433VJG4|A0A433VJG4_9CYAN 7-carboxy-7-deazaguanine synthase OS=Chroococcidiopsis cubana SAG 39.79 OX=388085 GN=queE PE=3 SV=1
MTTARLIEIFSAIQGEGLNVGTRQIFIRFALCDLRCHFCDSAHTWSVPSTCRVERSPGLRDFETHPNPVPLNTLLTWIERQNSPGLHDSISLTGGEPLLHAPFLVEFLPLVRRATGLPIYLETGGHRPQQLQLILPYLDSVGMDIKLPSVSGEDRWNEHAEFLQACYPADIEVFIKAIVSSQTDLGDLAKAAKLVASVNPEIPVFLQPATPLTPSQQFGGIPIQAPTPAQVLHWQALMKQELKQVRVIPQTHKMLNQL

SEQ ID NO: 29155 - protein, 258 aa, unidentified
  source 1..258: note = Chroococcidiopsis sp.
  REGION 1..258: note = tr|A0A2P8QLX5|A0A2P8QLX5_9CYAN 7-carboxy-7-deazaguanine synthase OS=Chroococcidiopsis sp. CCALA 051 OX=869949 GN=queE PE=3 SV=1
MTTARLIEIFSAIQGEGLNVGTRQIFIRFALCDLRCHFCDSAHTWSVPSTCRVERSPGLRDFETHPNPVPLNTLLTWIERQNSPGLHDSISLTGGEPLLHAPFLVEFLPLVRRATGLPIYLETGGHRPQQLQLILPYLDSVGMDLKLPSVSGEDRWNEHAEFLQACHQADVEVFIKAIVSSQTDLGDLAKAAKLVASVNPEIPVFLQPATPLTPSQQFGGIPIQAPTPAQVLHWQAMMKRELKRVRVIPQTHKMLNQL

SEQ ID NO: 29156 - protein, 266 aa, unidentified
  source 1..266: note = Chroococcidiopsis sp.
  REGION 1..266: note = tr|A0A2S6VA93|A0A2S6VA93_9CYAN 7-carboxy-7-deazaguanine synthase OS=Chroococcidiopsis sp. TS-821 OX=1378066 GN=queE PE=3 SV=1
MSVITTAETTTARLIEVFSAIQGEGLNVGTRQIFIRFALCDLRCHFCDSAHTWSVPRTYRVERSPGLRDFETYDNPVALDLLLQWVQRLNTPGLHDSISLTGGEPLLHSAFLVQFLPQVQKSTGLPIYLESGGHRPQQLAMVLPHLNSVGMDFKLPSVSGENYWQEHAEFLQRCYKSDVEVFIKVIVSAATDVAELHRAAELVAAVDPEIVLFLQPVTPLASTQQHSQTDFAAPTPAQVLTWQAEMKRLLKHVRVVPQTHKMLNQL

SEQ ID NO: 29157 - protein, 258 aa, unidentified
  source 1..258: note = Chroococcidiopsis thermalis
  REGION 1..258: note = tr|K9TUT2|K9TUT2_CHRTP 7-carboxy-7-deazaguanine synthase OS=Chroococcidiopsis thermalis (strain PCC 7203); OX = 251229 GN=queE PE=3 SV=1
MTTARLIEIFSAIQGEGLNVGTRQIFIRFALCDLRCHFCDSAHTWSVPSTCRVERSPGLRDFETHPNPVPLNTLLTWIERQNSPGLHDSISLTGGEPLLHAPFLVEFLPLVRRATGLPIYLETGGHRPQQLQLILPYLDSVGMDIKLPSVSGEDRWNEHAEFLQACHQADIEVFIKAIVSSQTDLGDLAKAAKLVASVNPEIPVFLQPATPLTPSQQFGGIPIQAPTPAQVLHWQAMMKRELKQVRVIPQTHKMLNQL

SEQ ID NO: 29158 - protein, 265 aa, unidentified
  source 1..265: note = Chroogloeocystis siderophila
  REGION 1..265: note = tr|A0A1U7HM24|A0A1U7HM24_9CHRO 7-carboxy-7-deazaguanine synthase OS=Chroogloeocystis siderophila 5.2 s.c.1 OX=247279 GN=queE PE=3 SV=1
MSVTTTETTTARLVEVFSAIQGEGLNVGTRQIFIRFALCDLRCHFCDSAHTWSVPRTYRVERSPGLRDFETYDNPVSLDLLLKWVQQLNVPGLHDSISLTGGEPLLHSAFLLQFLPQVQKRTGLPIYLETGGHHPQRLALVLPHLNSVGMDLKLPSVSGESYWQEHATFLQRCYKSGVEVFVKVIVSAETDSTELHQAAELVADVNPEIVLFLQPVTPLESVQRHSKINFSAPTPAQVLTWQAEMKRSLKHVRVVPQTHKLLNQL

SEQ ID NO: 29159 - protein, 209 aa, unidentified
  source 1..209: note = Chryseobacterium angstadtii
  REGION 1..209: note = tr|A0A0J7ILP5|A0A0J7ILP5_9FLAO 7-carboxy-7-deazaguanine synthase OS=Chryseobacterium angstadtii OX=558151 GN=queE PE=3 SV=1
MNKEEDILLKEGKMLPVMEHFYTLQGEGAHTGKASYFIRLGGCDVGCHWCDVKESWDPNLHPLMNAEEIAETAAKHCKTIVLTGGEPLMWNLDILTSKLKELGCTIHIETSGAYPMSGHIDWITLSPKKTGLPKEEIYEKASELKVIIFNQHDFTFAQEQAAKVSANCKLYMQSEWSKRDEMYPKITDFILAHPEWQASVQTHKYLNIP

SEQ ID NO: 29160 - protein, 210 aa, Chryseobacterium antarcticum
  REGION 1..210: note = tr|A0A448NTM0|A0A448NTM0_9FLAO 7-carboxy-7-deazaguanine synthase OS=Chryseobacterium antarcticum OX=266748 GN=queE PE=3 SV=1
MTKEEEDILLKEGKMLPVMEHFYTIQGEGAHTGKAAYFIRLGGCDVGCHWCDVKESWDPTLHPLMNTEEIAETAARFCKTIVLTGGEPLMWNLEILTNRLKELGCVIHIETSGAYEMSGTLDWITLSPKKTGLPKPAIYAKANELKMIVFNNNDLKFAEEQAAKVSENCVLYLQSEWSKRDEIYPKITDFVLANPKWQTSVQTHKYLNIP

SEQ ID NO: 29161 - protein, 209 aa, Chryseobacterium aquaticum
  REGION 1..209: note = tr|A0A0Q3HVL7|A0A0Q3HVL7_9FLAO 7-carboxy-7-deazaguanine synthase OS=Chryseobacterium aquaticum OX=452084 GN=queE PE=3 SV=1
MNKEQDILLNEGKMLPVMEHFYTIQGEGAHTGKAAYFIRLGGCDVGCHWCDVKESWNPDLHPLMNAEEIAETAAKHCKIVVLTGGEPLMWNLNILTSKLKELGCTIHIETSGAYPMSGQLDWITLSPKKTGLPKEEIYAKAHELKMIIFNNNDFKFAEEQAAKVSENCRLYLQSEWSKRDEMYPKITDFILANPRWQASVQTHKYLNIP

SEQ ID NO: 29162 - protein, 209 aa, Chryseobacterium aquifrigidense
  REGION 1..209: note = tr|A0A543E4M4|A0A543E4M4_9FLAO 7-carboxy-7-deazaguanine synthase OS=Chryseobacterium aquifrigidense OX=558021 GN=queE PE=3 SV=1
MNKEEDILLKEGKMLPVMEHFYTLQGEGAHTGKAAYFIRLGGCDVGCHWCDVKESWNPDLHPLMNAEEIAETAAKHCKTIVLTGGEPLMWNLDILTSKLKELGCTVHIETSGAYPMSGQLDWITLSPKKTGLPKEEIYQKAHELKVIIFNQHDFTFAQEQASKVSENCKLYLQSEWSKRDDMYPKITDFILEHPEWQASVQTHKYLNIP

SEQ ID NO: 29163 - protein, 210 aa, unidentified
  source 1..210: note = Chryseobacterium arachidiradicis
  REGION 1..210: note = tr|A0A420DDU7|A0A420DDU7_9FLAO 7-carboxy-7-deazaguanine synthase OS=Chryseobacterium arachidiradicis OX=1617282 GN=queE PE=3 SV=1
MTKEEEDILLKEGKMLPVMEHFYTIQGEGFHAGKAAYFIRLGGCDVGCHWCDVKESWDPKLHPLMNTEEIAETAAKYCKTIVLTGGEPLMWNLEILTSKLKELGCTIHIETSGAYPISGHLDWITLSPKKTGLPLADIYQKASELKMIIFNQNDFKFAQEQGEKVNENCVLYLQSEWSKRDAMYPKITDFILEHPKWRSSIQTHKYLNIP

SEQ ID NO: 29164 - protein, 209 aa, unidentified
  source 1..209: note = Chryseobacterium arachidis
  REGION 1..209: note = tr|A0A1M5E9G4|A0A1M5E9G4_9FLAO 7-carboxy-7-deazaguanine synthase OS=Chryseobacterium arachidis OX=1416778 GN=queE PE=3 SV=1
MNLTEEILLKEGKMLPVMEHFYTLQGEGAYTGKAAYFIRLGGCDVGCHWCDVKESWDPNLHPLMNAEEIAETAAKHCKTIVLTGGEPLMWNLDILTSKLKELGCTIHIETSGAYPMSGQIDWITLSPKKTGLPKEEIYAKAHELKVIVFNNNDFKFAQEQAAKVSENCTLYLQSEWSKRDEMYPKITDFILENPEWRASVQTHKYLNIP

SEQ ID NO: 29165 - protein, 209 aa, Chryseobacterium arthrosphaerae
  REGION 1..209: note = tr|A0A1B8ZAV5|A0A1B8ZAV5_9FLAO 7-carboxy-7-deazaguanine synthase OS=Chryseobacterium arthrosphaerae OX=651561 GN=queE PE=3 SV=1
MNKEQDILLKEGKMLPVMEHFYTLQGEGAHTGKAAYFIRLGGCDVGCHWCDVKESWDPELHPLMDAAEIAETAASHCKTIVLTGGEPLMWNLDILTSRLKELGCTIHIETSGAYPMSGHLDWITLSPKKTGLPKEEIYQQANELKVIIFNQHDFTFAQEQAAKVSDHCRLYLQSEWSKRNDMYPKITDFILEHPEWQASVQTHKYLNIP

SEQ ID NO: 29166 - protein, 209 aa, Chryseobacterium arthrosphaerae
  REGION 1..209: note = tr|A0A3S0Q8A8|A0A3S0Q8A8_9FLAO 7-carboxy-7-deazaguanine synthase OS=Chryseobacterium arthrosphaerae OX=651561 GN=queE PE=3 SV=1
MNKEQDILLKEGKMLPVMEHFYTLQGEGAHTGKAAYFIRLGGCDVGCHWCDVKESWDPELHPLMNAAEIAETAASHCKTIVLTGGEPLMWNLDILTSRLKELECTIHIETSGAYPMSGHLDWITLSPKKTGLPKEEIYQQANELKVIIFNQHDFTFAQEQAAKVSDHCRLYLQSEWSKRNDMYPKITDFILEHPEWQASVQTHKYLNIP

SEQ ID NO: 29167 - protein, 209 aa, unidentified
  source 1..209: note = Chryseobacterium artocarpi
  REGION 1..209: note = tr|A0A1B8ZA76|A0A1B8ZA76_9FLAO 7-carboxy-7-deazaguanine synthase OS=Chryseobacterium artocarpi OX=1414727 GN=queE PE=3 SV=1
MNKEQDILLKEGKMLPVMEHFYTLQGEGAHTGKAAYFIRLGGCDVGCHWCDVKESWDPELHPLMDAVEIAETAAKHCKTIVLTGGEPLTWNLEILTSKLKELGCTIHIETSGAYPMSGHLDWITLSPKKTGLPKEEIYQKAHELKVIVFNNHDFEFAQEQALKVSENCKLYLQSEWSKRNDMYPKITDFILEHPEWQASVQTHKYLNIP

SEQ ID NO: 29168 - protein, 209 aa, Chryseobacterium balustinum
  REGION 1..209: note = tr|A0A3G6TUT8|A0A3G6TUT8_9FLAO 7-carboxy-7-deazaguanine synthase OS=Chryseobacterium balustinum OX=246 GN=queE PE=3 SV=1
MNKEEDILLKEGKMLPVMEHFYTIQGEGAHTGKAAYFIRLGGCDVGCHWCDVKESWDPTLHPLMNAEEIAETAAKHCKTIVLTGGEPLMWNLDILTSKLKELGCTIHIETSGAYPLSGQIDWITLSPKKTGLPKEEIYAKAHELKMIVFNNNDFKFAEEQATKVSESCKLYLQSEWSKRDEMYPKMTDFILAKPRWQASVQTHKYLNIP

SEQ ID NO: 29169 - protein, 209 aa, unidentified
  source 1..209: note = Chryseobacterium bernardetii
  REGION 1..209: note = tr|A0A3G6U751|A0A3G6U751_9FLAO 7-carboxy-7-deazaguanine synthase OS=Chryseobacterium bernardetii OX=1241978 GN=queE PE=3 SV=1
MNKEQDILLKEGKMLPVMEHFYTLQGEGAHTGKAAYFIRLGGCDVGCHWCDVKESWDPELHPLMDAVEIAETAAKHCKTIVLTGGEPLTWNLEILTSRLKELGCTIHIETSGAYPMSGHLDWITLSPKKTGLPKEEIYQKAHELKVIVFNNHDFAFAQEQAAKVSENCKLYLQSEWSKRNDMYPKITDFILEHPEWQASVQTHKYLNIP

SEQ ID NO: 29170 - protein, 210 aa, Chryseobacterium bovis
  REGION 1..210: note = tr|A0A1U7PV21|A0A1U7PV21_9FLAO 7-carboxy-7-deazaguanine synthase OS=Chryseobacterium bovis DSM 19482 OX=1121284 GN=queE PE=3 SV=1
MTKEQEDLLLKEGKMLPVMEHFYTIQGEGFHAGKAAYFIRLGGCDVGCHWCDVKESWDPTLHPLMDAVEIAETAAKYCKTIVLTGGEPLMWNLEILTSKLKELGCTIHIETSGAYPMSGQLDWITLSPKKTGLPLQDIYQKASELKVIIFNNNDFKFAQEQAEKVSETCELYLQSEWSKRDANYPKITDFILEHPRWRSSIQTHKYLNIP

SEQ ID NO: 29171 - protein, 209 aa, unidentified
  source 1..209: note = Chryseobacterium carnipullorum
  REGION 1..209: note = tr|A0A3G6NHQ8|A0A3G6NHQ8_9FLAO 7-carboxy-7-deazaguanine synthase OS=Chryseobacterium carnipullorum OX=1124835 GN=queE PE=3 SV=1
MNKEEDILLKEGKMLPVMEHFYTLQGEGAHTGKASYFIRLGGCDVGCHWCDVKESWDPNLHPLMNAEEIAETAAKHCKTIVLTGGEPLMWNLDILTSKLKELGCTIHIETSGAYPLSGQIDWITLSPKKTGLPKEEIYEKASELKVIIFNQHDFTFAQEQAAKVSEQCKLYMQSEWSKRDEMYPKITDFILAHPEWQASVQTHKYLNIP

SEQ ID NO: 29172 - protein, 209 aa, unidentified
  source 1..209: note = Chryseobacterium carnipullorum
  REGION 1..209: note = tr|A0A1M7ABD5|A0A1M7ABD5_9FLAO 7-carboxy-7-deazaguanine synthase OS=Chryseobacterium carnipullorum OX=1124835 GN=queE PE=3 SV=1
MNKEEDILLKEGKMLPVMEHFYTLQGEGAHTGKASYFIRLGGCDVGCHWCDVKESWDPNLHPLMNAEEIAETAAKHCKTIVLTGGEPLMWNLDILTSKLKELGCTIHIETSGAYPLSGQIDWITLSPKKTGLPKEEIYEKASELKVIIFNQHDFTFAQEQAAKVSENCKLYMQSEWSKRDEMYPKITDFILAHPEWQASVQTHKYLNIP

SEQ ID NO: 29173 - protein, 210 aa, unidentified
  source 1..210: note = Chryseobacterium carnis
  REGION 1..210: note = tr|A0A3G8XLL9|A0A3G8XLL9_9FLAO 7-carboxy-7-deazaguanine synthase OS=Chryseobacterium carnis OX=1241979 GN=queE PE=3 SV=1
MTKEEENILLEQGKMLPVMEHFYTLQGEGAHTGKAAYFIRLGGCDVGCHWCDVKESWDPNLHPLMSTEEIAETAARHCKTIVLTGGEPLMWNLEILTNRLKELGCEIHIETSGAYEMSGTLDWITLSPKKTGLPKPAIYEKASELKMIIFNQNDFKFAEEQAAKVSENCVLYLQSEWSKRDQMYPKITDFILANPKWHASVQTHKYLNIP

SEQ ID NO: 29174 - protein, 210 aa, Chryseobacterium chaponense
  REGION 1..210: note = tr|A0A1N7L0B2|A0A1N7L0B2_9FLAO 7-carboxy-7-deazaguanine synthase OS=Chryseobacterium chaponense OX=713588 GN=queE PE=3 SV=1
MTKEEENILLKEGKMLPVMEHFYTIQGEGAHTGKAAYFIRLGGCDVGCHWCDVKESWDPNLHPLLSTQEIAETAAKHCKTIVLTGGEPLMWNLDFLTSKLKELGCEIHIETSGAYEMSGTLDWITLSPKKTGLPKPSIYSKASELKMIIFNNNDFKFAEEQAAKVSENCKLYLQSEWSKREEIYPKITDFILANPKWQASVQTHKYLNIP

SEQ ID NO: 29175 - protein, 209 aa, unidentified
  source 1..209: note = Chryseobacterium contaminans
  REGION 1..209: note = tr|A0A1M7HK98|A0A1M7HK98_9FLAO 7-carboxy-7-deazaguanine synthase OS=Chryseobacterium contaminans OX=1423959 GN=queE PE=3 SV=1
MNKEQDILLKEGKMLPVMEHFYTLQGEGAHTGKAAYFIRLGGCDVGCHWCDVKESWDPELHPLMDAVEIAETAAKHCKTIVLTGGEPLTWNLEILTSKLKELGCTIHIETSGAYPMSGHLDWITLSPKKTGLPKEEIYQKAHELKVIIFNNHDFAFAQEQAAKVSENCKLYLQSEWSKRNDMYPKITDFILEHPEWQASVQTHKYLNIP

SEQ ID NO: 29176 - protein, 209 aa, Chryseobacterium culicis
  REGION 1..209: note = tr|A0A2S9CKX0|A0A2S9CKX0_9FLAO 7-carboxy-7-deazaguanine synthase OS=Chryseobacterium culicis OX=680127 GN=queE PE=3 SV=1
MNKEEDILLKEGKMLPVMEHFYTLQGEGAHTGKAAYFIRLGGCDVGCHWCDVKESWDPELHPLMNAEEIAETAAKHCKTIVLTGGEPLMWNLDILTSKLKELGCTVHIETSGAYPMSGHLDWITLSPKKTGLPKEEIYQKANELKVIIFNQHDFTFAQEQASKVSENCKLYLQSEWSKRDDMYPKITDFILENPEWQASVQTHKYLNIP

SEQ ID NO: 29177 - protein, 209 aa, Chryseobacterium culicis
  REGION 1..209: note = tr|A0A1H6I2J0|A0A1H6I2J0_9FLAO 7-carboxy-7-deazaguanine synthase OS=Chryseobacterium culicis OX=680127 GN=queE PE=3 SV=1
MNKEEDILLKEGKMLPVMEHFYTLQGEGAHTGKAAYFIRLGGCDVGCHWCDVKESWNPELHPLMNAVEIAEMAAKHSKTIVLTGGEPLMWNLDLLTSRLKELGCTVHIETSGAYPMSGQLDWITLSPKKTGLPKEEIYQKAHELKVIIFNQHDFTFAQEQAAKVSENCRLYLQSEWSKRDDMYPKITDFILEHPEWQASVQTHKYLNIP

SEQ ID NO: 29178 - protein, 209 aa, Chryseobacterium daecheongense
  REGION 1..209: note = tr|A0A3N0VTT4|A0A3N0VTT4_9FLAO 7-carboxy-7-deazaguanine synthase OS=Chryseobacterium daecheongense OX=192389 GN=queE PE=3 SV=1
MNKEEDILLKEGKMLPVMEHFYTLQGEGAHTGKAAYFIRLGGCDVGCHWCDVKESWNPDLHPLMNTEEIAEIAAKHCKTIVLTGGEPLMWNLDILTSKLKELGCTIHIETSGAYPMSGQLDWITLSPKKTGLPKEEIYAKANELKVIIFNNHDFTFAEEQAAKVSDSCKLYLQSEWSKRDEMYPKITDFILAHPEWQASVQTHKYLNIP

SEQ ID NO: 29179 - protein, 209 aa, Chryseobacterium defluvii
  REGION 1..209: note = tr|A0A495SB93|A0A495SB93_9FLAO 7-carboxy-7-deazaguanine synthase OS=Chryseobacterium defluvii OX=160396 GN=queE PE=3 SV=1
MNKEEDILLKEGKMLPVMEHFYTLQGEGAHTGKAAYFIRLGGCDVGCHWCDVKESWNPDLHPLMNAEEIAETAAKHCKTIVLTGGEPLMWNLDILTSRLKELGCSIHIETSGAYPMSGHLDWITLSPKKTGLPKEEIYQRANELKVIIFNNHDFTFAEEQAAKVSENCKLYLQSEWSKRDEMYPKITDFILAHPEWQASVQTHKYLNIP

SEQ ID NO: 29180 - protein, 209 aa, Chryseobacterium elymi
  REGION 1..209: note = tr|A0A3D9D338|A0A3D9D338_9FLAO 7-carboxy-7-deazaguanine synthase OS=Chryseobacterium elymi OX=395936 GN=queE PE=3 SV=1
MNKEEDILLKEGKMLPVMEHFYTLQGEGAHTGKASYFIRLGGCDVGCHWCDVKESWDPNLHPLMNAEEIAETAAKHSKTIVLTGGEPLMWNLDILTSKLKELGCTIHIETSGAYPLSGQIDWITLSPKKTGLPKEEIYEKASELKVIIFNQHDFTFAQEQASKVSENCRLYMQSEWSKRDEMYPKITDFILAHPEWQASVQTHKYLNIP

SEQ ID NO: 29181 - protein, 209 aa, Chryseobacterium flavum
  REGION 1..209: note = tr|A0A3D9CRA6|A0A3D9CRA6_9FLAO 7-carboxy-7-deazaguanine synthase OS=Chryseobacterium flavum OX=415851 GN=queE PE=3 SV=1
MNKEEDILLKEGKMLPVMEHFYTLQGEGAHTGKAAYFIRLGGCDVGCHWCDVKESWDPDLHPLMDAAEIAETAAKHCKTIVLTGGEPLMWNLEILTSKLKELGCTIHIETSGAYPMSGHLDWITLSPKKTGLPKEEIYQKANELKVIVFNNHDFTFAEEQAAKVSESCRLYLQSEWSKRNDMYPKITDFILEHPEWQASVQTHKYLNIP

SEQ ID NO: 29182 - protein, 209 aa, Chryseobacterium formosense
  REGION 1..209: note = tr|A0A085Z1Y3|A0A085Z1Y3_9FLAO 7-carboxy-7-deazaguanine synthase OS=Chryseobacterium formosense OX=236814 GN=queE PE=3 SV=1
MNKEEDILLKEGKMLPVMEHFYTIQGEGAHTGKAAYFIRLGGCDVGCHWCDVKESWDPTLHPLMNAEEIAETAAKHCKTIVLTGGEPLMWNLDILTSKLKELGCTIHIETSGAYPMSGQLDWITLSPKKTGLPKEEIYAKAHELKVIIFNNNDFIFAQEQAEKVSENCRLYLQSEWSKRDAMYPKMTDFILENPRWQASVQTHKYLNIP

SEQ ID NO: 29183 - protein, 209 aa, unidentified
  source 1..209: note = Chryseobacterium frigidisoli
  REGION 1..209: note = tr|A0A1I3I1G6|A0A1I3I1G6_9FLAO 7-carboxy-7-deazaguanine synthase OS=Chryseobacterium frigidisoli OX=1125876 GN=queE PE=3 SV=1
MTDLEKIRLESGELLPVMEHFYTIQGEGAYTGKAAYFIRLGGCDVGCHWCDVKESWDPAKHPLMETSQIAEIAASNCKTIVLTGGEPLMWNLNPLTQQLKNLGCTIHIETSGAYEMSGILDWITLSPKKTGLPKNDIYEVAHELKVIIFNNNDFIFAAEQAEKVNDNCKLYLQSEWSKRDEMYPKMTDFVMKNPKWQVSVQTHKYLNIP

SEQ ID NO: 29184 - protein, 209 aa, unidentified
  source 1..209: note = Chryseobacterium gallinarum
  REGION 1..209: note = tr|A0A0G3M5P6|A0A0G3M5P6_9FLAO 7-carboxy-7-deazaguanine synthase OS=Chryseobacterium gallinarum OX=1324352 GN=queE PE=3 SV=1
MNKEQDILLKEGKMLPVMEHFYTLQGEGAHTGKAAYFIRLGGCDVGCHWCDVKESWDPDLHPLMDATAIAETAAKHCKTIVLTGGEPLMWNLDILTSRLKELGCSIHIETSGAYPMSGQLDWITLSPKKTGLPKEEIYQKANELKVIIFNNHDFTFAQEQAARVSENCKLYLQSEWSKRNDMYPKITDFILEHPEWQASVQTHKYLNIP

SEQ ID NO: 29185 - protein, 209 aa, Chryseobacterium gambrini
  REGION 1..209: note = tr|A0A1N7PP61|A0A1N7PP61_9FLAO 7-carboxy-7-deazaguanine synthase OS=Chryseobacterium gambrini OX=373672 GN=queE PE=3 SV=1
MNLTEEILLKEGKMLPVMEHFYTLQGEGAHTGKAAYFIRLGGCDVGCHWCDVKESWDPNLHPLMNAEAIAETAAKHCKTIVLTGGEPLMWNLDILTGKLKELGCSIHIETSGAYPMSGQIDWITLSPKKTGLPKEEIYAKAHELKVIVFNNNDFKFAEEQAAKVSENCTLYLQSEWSKRDEMYPKITDFILEHPEWRASVQTHKYLNIP

SEQ ID NO: 29186 - protein, 209 aa, unidentified
  source 1..209: note = Chryseobacterium geocarposphaerae
  REGION 1..209: note = tr|A0A2M9C2Z4|A0A2M9C2Z4_9FLAO 7-carboxy-7-deazaguanine synthase OS=Chryseobacterium geocarposphaerae OX=1416776 GN=queE PE=3 SV=1
MNKEEDILLKEGKMLPVMEHFYTLQGEGAHTGKAAYFIRLGGCDVGCHWCDVKESWDPNLHPLMNAKEIAETAAKHCKTIVLTGGEPLMWNLDILTSKLKELGCTIHIETSGAYPMSGHIDWITLSPKKTGLPKEEIYAKAHELKVIVFNNNDFKFAQEQAAKVTENCTLYLQSEWSKRDEMYPKITDFILENPQWRASVQTHKYLNIP

SEQ ID NO: 29187 - protein, 209 aa, unidentified
  source 1..209: note = Chryseobacterium glaciei
  REGION 1..209: note = tr|A0A172XVF6|A0A172XVF6_9FLAO 7-carboxy-7-deazaguanine synthase OS=Chryseobacterium glaciei OX=1685010 GN=queE PE=3 SV=1
MNKEEDILLKEGKMLPVMEHFYTLQGEGAHTGKASYFIRLGGCDVGCHWCDVKESWDPTLHPLMNAEEIAETAAKHCKTVVLTGGEPLMWNLDILTSKLKELGCTIHIETSGAYPMSGHIDWITLSPKKTGLPKEEIYEKASELKVIVFNNNDLKFAEEQAAKVSANCRLYLQSEWSKRDEMYPKITDFILEHPEWQASVQTHKYLNIP

SEQ ID NO: 29188 - protein, 209 aa, Chryseobacterium gleum
  REGION 1..209: note = tr|A0A4U8WFN5|A0A4U8WFN5_9FLAO 7-carboxy-7-deazaguanine synthase OS=Chryseobacterium gleum OX=250 GN=queE PE=3 SV=1
MNLTEEILLKEGKMLPVMEHFYTLQGEGAHTGKAAYFIRLGGCDVGCHWCDVKESWDPNLHPLMNAEDIAETAAKHCKTIVLTGGEPLMWNLDILTGKLKELGCSIHIETSGAYPMSGQIDWITLSPKKTGLPKEEIYAKAHELKVIVFNNNDFKFAQEQAAKVSENCMLYLQSEWSKRDEMYPKITDFILEHPEWRASVQTHKYLNIP

SEQ ID NO: 29189 - protein, 209 aa, Chryseobacterium gleum
  REGION 1..209: note = tr|A0A3S4N4T2|A0A3S4N4T2_9FLAO 7-carboxy-7-deazaguanine synthase OS=Chryseobacterium gleum OX=250 GN=queE PE=3 SV=1
MNKEEDILLKEGKMLPVMEHFYTLQGEGAHTGKAAYFIRLGGCDVGCHWCDVKESWDPELHPLMNAEEIAETAARHCKTIVLTGGEPLMWNLDILTSKLKELGCTIHIETSGAYPMSGHLDWITLSPKKTGLPKEEIYQKANELKVIIFNHHDFTFAQEQAAKVSENCKLYLQSEWSKRNDMYPKITDFILEHPEWQASVQTHKYLNIP

SEQ ID NO: 29190 - protein, 209 aa, Chryseobacterium greenlandense; identical to SEQ ID NO: 29161
  REGION 1..209: note = tr|A0A101CJN5|A0A101CJN5_9FLAO 7-carboxy-7-deazaguanine synthase OS=Chryseobacterium greenlandense OX=345663 GN=queE PE=3 SV=1

SEQ ID NO: 29191 - protein, 209 aa, Chryseobacterium hagamense
  REGION 1..209: note = tr|A0A511YKQ1|A0A511YKQ1_9FLAO 7-carboxy-7-deazaguanine synthase OS=Chryseobacterium hagamense OX=395935 GN=queE PE=3 SV=1
MKTEEDILLKEGKMLPVMEHFYTLQGEGAHTGKAAYFIRLGGCDVGCHWCDVKESWDPNLHPLMNAEEIAETAARHCKTIVLTGGEPLMWNLDILTSRLKALGCTVHIETSGAYPMSGQIDWITLSPKKTGLPKEEIYARAHELKVIVFNNNDFKFAQEQAAKVSANCTLYLQSEWSKRDEMYPKITDFILEHPEWRASVQTHKYLNIP

SEQ ID NO: 29192 - protein, 209 aa, Chryseobacterium haifense
  REGION 1..209: note = tr|A0A246B9H2|A0A246B9H2_9FLAO 7-carboxy-7-deazaguanine synthase OS=Chryseobacterium haifense DSM 19056 OX=1450526 GN=queE PE=3 SV=1
MKEEENILLNEGKMLPVMEHFYTLQGEGSHTGKAAYFIRLGGCDVGCHWCDVKESWDPNLHPLMNTEEIAQTAAKYCKTIVLTGGEPLMWNLVPLTTRLKELGCTIHIETSGAYDMSGILDWITLSPKKNGLPKEEIYAKASELKVIVFNNNDFKFAEEQAAKVSENCKLYLQSEWSKRNEMYPKITDFILANPKWQASVQTHKYLNIP

SEQ ID NO: 29193 - protein, 209 aa, Chryseobacterium haifense
  REGION 1..209: note = tr|A0A3G6T0N0|A0A3G6T0N0_9FLAO 7-carboxy-7-deazaguanine synthase OS=Chryseobacterium haifense OX=421525 GN=queE PE=3 SV=1
MKEEENILLNEGKMLPVMEHFYTLQGEGSHTGKAAYFIRLGGCDVGCHWCDVKESWDPNLHPLMNTEEIAKTAAKYCKTIVLTGGEPLMWNLVPLTTRLKELGCTIHIETSGAYDMSGILDWITLSPKKTGLPKEEIYAKASELKVIVFNNNDFKFAEEQAAKVSENCKLYLQSEWSKRNEMYPKITDFILANPKWQASVQTHKYLNIP

SEQ ID NO: 29194 - protein, 210 aa, unidentified
  source 1..210: note = Chryseobacterium halperniae
  REGION 1..210: note = tr|A0A085BME5|A0A085BME5_9FLAO 7-carboxy-7-deazaguanine synthase OS=Chryseobacterium halperniae OX=421072 GN=queE PE=3 SV=1
MTKEQEDILLKEGRMLPVMEHFYTIQGEGFHAGKAAYFIRLGGCDVGCHWCDVKESWDPTLHPLMNTEEIAETAAKLCKTIVLTGGEPLMWNLDILTSKLKELGCTIHIETSGAYPMSGHLDWITLSPKKTGLPLADIYNVASELKMIIFNQNDFKFAEEQGNKVNANCELYLQSEWSKRDAMYPKITDFILENPRWRSSIQTHKYLNIP

SEQ ID NO: 29195 - protein, 210 aa, Chryseobacterium hispanicum
  REGION 1..210: note = tr|A0A3D9D2P2|A0A3D9D2P2_9FLAO 7-carboxy-7-deazaguanine synthase OS=Chryseobacterium hispanicum OX=358687 GN=queE PE=3 SV=1
MTKEEENILLKEGKMLPVMEHFYTIQGEGFHAGKAAYFIRLGGCDVGCHWCDVKESWDPTLHPLMDTVEIAETVAKYCKTIVLTGGEPLMWNLDILTSKLKELGCTIHIETSGAYPMSGHLDWITLSPKKTGLPLADIYKEASELKMIIFNQNDFKFAEEQASKVSDSCELYLQSEWSKRDANYPKITDFILENPRWRSSIQTHKYLNIP

SEQ ID NO: 29196 - protein, 210 aa, Chryseobacterium hominis
  REGION 1..210: note = tr|A0A1H6JZK3|A0A1H6JZK3_9FLAO 7-carboxy-7-deazaguanine synthase OS=Chryseobacterium hominis OX=420404 GN=queE PE=3 SV=1
MTKEQEELLLKQGKMLPVMEHFYTIQGEGFHAGKAAYFIRLGGCDVGCHWCDVKESWDPKLHPLMDATEIAETAAKHCTTIVLTGGEPLMWNLEILTSRLKELGCTIHIETSGAYPMSGHLDWITLSPKKTGLPLEDIYKVASELKMIIFNNNDFKFAQEQQAKTNDSCVLYLQSEWSKRDVMYPKITDFILENPEWRSSIQTHKYLNIP

SEQ ID NO: 29197 - protein, 210 aa, Chryseobacterium hominis
  REGION 1..210: note = tr|A0A3N0X515|A0A3N0X515_9FLAO 7-carboxy-7-deazaguanine synthase OS=Chryseobacterium hominis OX=420404 GN=queE PE=3 SV=1
MTKEQEELLLKQGKMLPVMEHFYTIQGEGFHAGKAAYFIRLGGCDVGCHWCDVKESWNPKLHPLMDATEIAETAAKYCKTIVLTGGEPLMWNLEILTSRLKELGCTIHIETSGAYPMSGHLDWITLSPKKTGLPLEDIYKVASELKMIIFNNNDFKFAQEQQAKTNDNCVLYLQSEWSKRDAMYPKITDFILENPEWRSSIQTHKYLNIP

SEQ ID NO: 29198 - protein, 209 aa, Chryseobacterium humi
  REGION 1..209: note = tr|A0A1H5ULY4|A0A1H5ULY4_9FLAO 7-carboxy-7-deazaguanine synthase OS=Chryseobacterium humi; OX = 493375 GN=queE PE=3 SV=1
MTDSEKIELEKGISLPVMEHFYTIQGEGAHTGKAAYFIRLGGCDVGCHWCDVKESWDPNLHPLMKTEKIAEIAASNCKTIVLTGGEPLMWNLDPLTKKLKDLGCTIHIETSGAYKMSGILDWITLSPKKTGLPKPEIYKKAQELKVIIFNNNDFKFAEEQAEKVEDGCKLYLQSEWSKRAEMYPKMTDFVMKNPKWQVSVQTHKYLNIP

SEQ ID NO: 29199 - protein, 210 aa, Chryseobacterium hungaricum
  REGION 1..210: note = tr|A0A1G7FAL0|A0A1G7FAL0_9FLAO 7-carboxy-7-deazaguanine synthase OS=Chryseobacterium hungaricum OX=454006 GN=queE PE=3 SV=1
MTKEEENILLNEGKMLPVMEHFYTIQGEGYHAGKAAYFIRLGGCDVGCHWCDVKESWDPKLHPLMNTVEIAETAAKYCKTIVLTGGEPLMWNLEILTSKLKELGCTIHIETSGAYPMSGHLDWITLSPKKTGLPLEEIYSKASELKMIIFNNNDFKFAQEQGEKVNGDCELYLQSEWSKRDAMYPKITDFILENPKWRSSIQTHKYLNIP

SEQ ID NO: 29200 - protein, 209 aa, Chryseobacterium indologenes
  REGION 1..209: note = tr|A0A0N0IWI1|A0A0N0IWI1_9FLAO 7-carboxy-7-deazaguanine synthase OS=Chryseobacterium indologenes OX=253 GN=queE PE=3 SV=1
MNKEQDILLKEGKMLPVMEHFYTLQGEGAHTGKAAYFIRLGGCDVGCHWCDVKESWNPDLHPLMNAEEIAETAAKHCKTIVLTGGEPLMWNLDILTSKLKELGCSIHIETSGAYPMSGQLDWITLSPKKTGLPKEEIYQKANELKVIIFNNHDFTFAQEQAAKVSENCRLYMQSEWSRRDEMYPKITDFILAHPEWQASVQTHKYLNIP

SEQ ID NO: 29201 - protein, 209 aa, Chryseobacterium indologenes
  REGION 1..209: note = tr|A0A1Z3W5P9|A0A1Z3W5P9_9FLAO 7-carboxy-7-deazaguanine synthase OS=Chryseobacterium indologenes OX=253 GN=queE PE=3 SV=1
MNKDQDILLKEGKMLPVMEHFYTLQGEGAHTGKAAYFIRLGGCDVGCHWCDVKESWDPDLHPLMNAEDIAETAAKHCKTIVLTGGEPLMWNLDLLTSKLKELGCTIHIETSGAYPMSGQLDWITLSPKKTGLPKEEIYQKANELKVIVFNNHDLTFAQEQAAKVSENCKLYLQSEWSKRNEMYPKITDFILEHPEWQASVQTHKYLNIP

SEQ ID NO: 29202 - protein, 209 aa, Chryseobacterium indoltheticum
  REGION 1..209: note = tr|A0A381F5P9|A0A381F5P9_9FLAO 7-carboxy-7-deazaguanine synthase OS=Chryseobacterium indoltheticum OX=254 GN=queE PE=3 SV=1
MNKEEDILLKEGKMLPVMEHFYTIQGEGAHTGKAAYFIRLGGCDVGCHWCDVKESWNPTLHPLINAEEIAETAAKHCKIVVLTGGEPLMWNLDILTSKLKELGCTIHIETSGAYPLSGQIDWITLSPKKTGLPKEEIYAKAHELKMIVFNNNDFKFADEQASKVSENCRLYLQSEWSKRDEMYPKITDFILANPRWQASVQTHKYLNIP

SEQ ID NO: 29203 - protein, 209 aa, Chryseobacterium indoltheticum
  REGION 1..209: note = tr|A0A3G6N1V1|A0A3G6N1V1_9FLAO 7-carboxy-7-deazaguanine synthase OS=Chryseobacterium indoltheticum OX=254 GN=queE PE=3 SV=1
MNKEEGILLKEGKMLPVMEHFYTIQGEGAHTGKAAYFIRLGGCDVGCHWCDVKESWDPTLHPLMNAEEIAETAAKHCKIVVLTGGEPLMWNLDILTSKLKELGCTIHIETSGAYPLSGQIDWITLSPKKTGLPKEEIYDKAHELKMIVFNNNDFKFADEQASKVSENCRLYLQSEWSKRDEMYPKITDFILANPRWQASVQTHKYLNIP

SEQ ID NO: 29204 - protein, 209 aa, Chryseobacterium jejuense
  REGION 1..209: note = tr|A0A2X2V6T0|A0A2X2V6T0_9FLAO 7-carboxy-7-deazaguanine synthase OS=Chryseobacterium jejuense OX=445960 GN=queE PE=3 SV=1
MNKEQDILLKEGKMLPVMEHFYTLQGEGAHTGKAAYFIRLGGCDVGCHWCDVKESWNPELHPLMDAVEIAETAAKHCKTIVLTGGEPLTWNLEILTSKLKELGCTIHIETSGAYPMSGHLDWITLSPKKTGLPKEEIYQNAHELKVIIFNNHDFEFAQEQAAKVSENCKLYLQSEWSKRDDMYPKITDFILEHPEWQASVQTHKYLNIP

SEQ ID NO: 29205 - protein, 210 aa, Chryseobacterium jeonii
  REGION 1..210: note = tr|A0A0C1D678|A0A0C1D678_9FLAO 7-carboxy-7-deazaguanine synthase OS=Chryseobacterium jeonii OX=266749 GN=queE PE=3 SV=1
MTKEEENILLKEGKMLPVMEYFYTIQGEGAHTGKAAYFIRLGGCDVGCHWCDVKESWDPNLHPLLSTDEIAQTAAKHCKTIVLTGGEPLMWNLDFLTARLKELGCEIHIETSGAYEMSGTLDWITLSPKKTGLPKPAIYAEASELKMIIFNNNDFKFAEEQAAKVSENCKLYLQSEWSKREEIYPKITDFILANPKWQASVQTHKYLNIP

SEQ ID NO: 29206 - protein, 209 aa, Chryseobacterium joostei
  REGION 1..209: note = tr|A0A1N7JTU6|A0A1N7JTU6_9FLAO 7-carboxy-7-deazaguanine synthase OS=Chryseobacterium joostei OX=112234 GN=queE PE=3 SV=1
MNKEQDILLKEGKMLPVMEHFYTLQGEGAHTGKAAYFIRLGGCDVGCHWCDVKESWNPELHPLMDAAEIAETAAKHCKTIVLTGGEPLTWNLEILTSKLKELGCTIHIETSGAYPMSGHLDWITLSPKKTGLPKEEIYHNANELKVIVFNNHDFEFAQEQAAKVSENCKLYLQSEWSKRDEMYPKITDFILEHPEWQASVQTHKYLNIP

SEQ ID NO: 29207 - protein, 209 aa, Chryseobacterium koreense
  REGION 1..209: note = tr|A0A0J7J1Q6|A0A0J7J1Q6_9FLAO 7-carboxy-7-deazaguanine synthase OS=Chryseobacterium koreense CCUG 49689 OX=1304281 GN=queE PE=3 SV=1
MTNEEEILLNQGRMLPVMEHFYTLQGEGAHTGKAAYFIRLGGCDVGCHWCDVKESWNPELHPLMDAEEVAKTAAKYCKTIVLTGGEPLMYNLDVLTQKLKELGCEIHIETSGAYEMSGILDWITLSPKKTKLPTEEIYAEANELKMIVYNQSDFKFAEEQAAKVSEDCVLYLQSEWSKRNEMYPKITDFILAHPKWKASVQTHKYLNIP

SEQ ID NO: 29208 - protein, 209 aa, unidentified
  source 1..209: note = Chryseobacterium kwangjuense
  REGION 1..209: note = tr|A0A135WF95|A0A135WF95_9FLAO 7-carboxy-7-deazaguanine synthase OS=Chryseobacterium kwangjuense OX=267125 GN=queE PE=3 SV=1
MNKEEDILLKEGKMLPVMEHFYTLQGEGAHTGKASYFIRLGGCDVGCHWCDVKESWDPNLHPLMNAEEIAETAAKHCKTIVLTGGEPLMWNLDILTGKLKELGCTIHIETSGAYPMSGQIDWITLSPKKTGLPKEEIYEKASELKVIIFNQHDFTFAQEQAAKVSKNCKLYMQSEWSKRDEMYPKITDFILAHPEWQASVQTHKYLNIP

SEQ ID NO: 29209 - protein, 209 aa, unidentified
  source 1..209: note = Chryseobacterium lactis
  REGION 1..209: note = tr|A0A3G6RX32|A0A3G6RX32_9FLAO 7-carboxy-7-deazaguanine synthase OS=Chryseobacterium lactis OX=1241981 GN=queE PE=3 SV=1
MNKEQDILLKEGKMLPVMEHFYTLQGEGAHTGKAAYFIRLGGCDVGCHWCDVKESWDPELHPLMNTTEIAETAAKHCKTIVLTGGEPLMWNLDILTSKLKELGCTVHIETSGAYPMSGQLDWITLSPKKTGLPKEEIYQKANELKVIIFNNHDFAFAEEQAAKVSENCKLYLQSEWSKRNDMYPKITDFILEHPEWQASVQTHKYLNIP

SEQ ID NO: 29210 - protein, 209 aa, Chryseobacterium lathyri
  REGION 1..209: note = tr|A0A511YDA0|A0A511YDA0_9FLAO 7-carboxy-7-deazaguanine synthase OS=Chryseobacterium lathyri OX=395933 GN=queE PE=3 SV=1
MNKEEDILLKEGKMLPVMEHFYTLQGEGAHTGKASYFIRLGGCDVGCHWCDVKESWDPNLHPLMNAEEIAETAAKHSKTIVLTGGEPLMWNLDILTSKLKELGCTIHIETSGAYPLSGQIDWITLSPKKTGLPKEEIYKKASELKVIIFNQHDFTFAQEQAAKVSENCKLYMQSEWSKRDEMYPKITDFILAHPEWQASVQTHKYLNIP

SEQ ID NO: 29211 - protein, 209 aa, unidentified
  source 1..209: note = Chryseobacterium limigenitum
  REGION 1..209: note = tr|A0A1K2IM23|A0A1K2IM23_9FLAO 7-carboxy-7-deazaguanine synthase OS=Chryseobacterium limigenitum OX=1612149 GN=queE PE=3 SV=1
MNKEEDILLKEGKMLPVMEHFYTLQGEGAHTGKASYFIRLGGCDVGCHWCDVKESWDPTLHPLMNAEEIAETAAKHCKTIVLTGGEPLMWNLDILTSKLKELGCTIHIETSGAYPMSGHIDWITLSPKKTGLPKEEIYEKASELKVIVFNNNDLKFAQEQAAKVSANCRLYLQSEWSKRDEMYPKITDFILEHPEWQASVQTHKYLNIP

SEQ ID NO: 29212 - protein, 209 aa, Chryseobacterium luteum
  REGION 1..209: note = tr|A0A085ZYF1|A0A085ZYF1_9FLAO 7-carboxy-7-deazaguanine synthase OS=Chryseobacterium luteum OX=421531 GN=queE PE=3 SV=1
MNKEEDILLKEGKMLPVMEHFYTLQGEGAHTGKASYFIRLGGCDVGCHWCDVKESWDPNLHPLMNAEEIAETAAKHCKTIVLTGGEPLMWNLDILTSKLKELGCTIHIETSGAYPMSGQIDWITLSPKKTGLPKEEIYEKASELKVIIFNQHDFTFAQEQAAKVSENCKLYMQSEWSKRDEMYPKITDFILAHPEWQASVQTHKYLNIP

SEQ ID NO: 29213 - protein, 210 aa, Chryseobacterium molle
  REGION 1..210: note = tr|A0A1M6Q555|A0A1M6Q555_9FLAO 7-carboxy-7-deazaguanine synthase OS=Chryseobacterium molle OX=216903 GN=queE PE=3 SV=1
MTKEEEDILLQEGKMLPVMEHFYTIQGEGFHAGKAAYFIRLGGCDVGCHWCDVKESWDPKLHPLMNTEEIAETAARYCKTIVLTGGEPLMWNLEILTSKLKELGCTIHIETSGAYPMSGHLDWITLSPKKTGLPLADIYKEASELKMIIFNQNDFKFAQEQGGKVNDKCELYLQSEWSKRDVMYPKITDFILEHPKWRSSIQTHKYLNIP

SEQ ID NO: 29214 - protein, 209 aa, unidentified
  source 1..209: note = Chryseobacterium mucoviscidosis
  REGION 1..209: note = tr|A0A202C443|A0A202C443_9FLAO 7-carboxy-7-deazaguanine synthase OS=Chryseobacterium mucoviscidosis OX=1945581 GN=queE PE=3 SV=1
MNLTEEILLKEGKMLPVMEHFYTLQGEGAHTGKAAYFIRLGGCDVGCHWCDVKESWDPNLHPLMNAEEIAETAAKHCKTIVLTGGEPLMWNLDILTGKLKELGCSIHIETSGAYPISGQIDWITLSPKKTGLPKEEIYAKAHELKVIVFNNNDFKFAEEQAAKVSENCTLYLQSEWSKRDEMYPKITDFILENPEWRASVQTHKYLNIP

SEQ ID NO: 29215 - protein, 209 aa, unidentified
  source 1..209: note = Chryseobacterium nakagawai
  REGION 1..209: note = tr|A0A448LP88|A0A448LP88_9FLAO 7-carboxy-7-deazaguanine synthase OS=Chryseobacterium nakagawai OX=1241982 GN=queE PE=3 SV=1
MNKEQDILLKEGKMLPVMEHFYTLQGEGAHTGKAAYFIRLAGCDVGCHWCDVKESWDPELHPLMNAEEIAETAAKHCKTVVLTGGEPLTWNLEVLTSKLKELGCTIHIETSGAYPMSGHLDWITLSPKKTGLPKDEIYQKAHELKVIVFNNHDFAFAQEQAAKVSESCKLYLQSEWSKRDDMYPKITDFILEHPEWQASVQTHKYLNIP

SEQ ID NO: 29216 - protein, 209 aa, unidentified
  source 1..209: note = Chryseobacterium nakagawai
  REGION 1..209: note = tr|A0A3N2EE13|A0A3N2EE13_9FLAO 7-carboxy-7-deazaguanine synthase OS=Chryseobacterium nakagawai OX=1241982 GN=queE PE=3 SV=1
MNKEQDILLKEGKMLPVMEHFYTLQGEGAHTGKAAYFIRLGGCDVGCHWCDVKESWDPKLHPLMDAVEIAETAAKHCKTIVLTGGEPLTWNLEILTSKLKELGCTIHIETSGAYPMSGQLDWITLSPKKTGLPKEEIYQKAHELKVIVFNHHDFTFAQEQAAKVSENCKLYLQSEWSKRDDIYPKITDFILEHPEWQASVQTHKYLNIP

SEQ ID NO: 29217 - protein, 209 aa, unidentified
  source 1..209: note = Chryseobacterium nematophagum
  REGION 1..209: note = tr|A0A3M7LGA7|A0A3M7LGA7_9FLAO 7-carboxy-7-deazaguanine synthase OS=Chryseobacterium nematophagum OX=2305228 GN=queE PE=3 SV=1
MNKEEDILLKEGKMLPVMEHFYTLQGEGAHTGKAAYFIRLGGCDVGCHWCDVKESWNPDLHPLMSTEDIAETAAKHCKTIVLTGGEPLMWNLEILTSKLKELGCTIHIETSGAYPMSGHLDWITLSPKKTGLPKEEIYKKAHELKVIVFNNNDFIFAEEQAAKVSDSCRLYLQSEWSKRDEMYPKITDFILENPEWQASVQTHKYLNIP

SEQ ID NO: 29218 - protein, 209 aa, unidentified
  source 1..209: note = Chryseobacterium nematophagum
  REGION 1..209: note = tr|A0A3M7TCL0|A0A3M7TCL0_9FLAO 7-carboxy-7-deazaguanine synthase OS=Chryseobacterium nematophagum OX=2305228 GN=queE PE=3 SV=1
MNKEEDILLKEGKMLPVMEHFYTLQGEGAHTGKAAYFIRLGGCDVGCHWCDVKESWNPDLHPLMSTEDIAETAAKHCKTIVLTGGEPLMWNLEILTSKLKELGCTIHIETSGAYPMSGHLDWITLSPKKTGLPKEEIYKKAHELKVIVFNNNDFIFAEEQAAKVSDSCKLYLQSEWSKRDEMYPKITNFILEHPEWQASVQTHKYLNIP

SEQ ID NO: 29219 - protein, 209 aa, unidentified
  source 1..209: note = Chryseobacterium oleae
  REGION 1..209: note = tr|A0A1I5BDE5|A0A1I5BDE5_9FLAO 7-carboxy-7-deazaguanine synthase OS=Chryseobacterium oleae OX=491207 GN=queE PE=3 SV=1
MNKEEDILLKEGKMLPVMEHFYTIQGEGAHTGKAAYFIRLGGCDVGCHWCDVKESWDPTLHPLMNAEEIAETAAKHCKIIVLTGGEPLMWNLDILTSKLKELGCTIHIETSGAYPLSGQIDWITLSPKKTGLPKEEIYAKAHELKMIIFNNNDFKFADEQAAKVSENCRLYLQSEWSKRDEMYPKITDFILAHPEWQASVQTHKYLNIP

SEQ ID NO: 29220 - protein, 209 aa, Chryseobacterium oncorhynchi
  REGION 1..209: note = tr|A0A316WIX4|A0A316WIX4_9FLAO 7-carboxy-7-deazaguanine synthase OS=Chryseobacterium oncorhynchi OX=741074 GN=queE PE=3 SV=1
MNKEQDILLKEGKMLPVMEHFYTLQGEGAHTGKAAYFIRLGGCDVGCHWCDVKESWDPELHPLMDAAEIAETAAKHCKTIVLTGGEPLTWNLEILTSKLKELGCTIHIETSGAYPMSGHLDWITLSPKKTGLPKEEIYQKANELKMIVFNNHDFEFAKEQAAKVSENCKLYLQSEWSKRDDMYPKITDFILEHPEWQASVQTHKYLNIP

SEQ ID NO: 29221 - protein, 209 aa, Chryseobacterium oranimense
  REGION 1..209: note = tr|A0A1M5W081|A0A1M5W081_9FLAO 7-carboxy-7-deazaguanine synthase OS=Chryseobacterium oranimense OX=421058 GN=queE PE=3 SV=1
MNKEEDILLKEGKMLPVMEHFYTLQGEGAHTGKASYFIRLGGCDVGCHWCDVKESWDPNLHPLMNAEEIAETAAKHCKTIVLTGGEPLMWNLDILTGKLKELGCTIHIETSGAYPMSGQIDWITLSPKKTGLPKEEIYQKASELKVIIFNQHDFTFAQEQAAKVSADCKLYMQSEWSKRDEMYPKITDFILAHPEWQASVQTHKYLNIP

SEQ ID NO: 29222 - protein, 209 aa, Chryseobacterium piperi
  REGION 1..209: note = tr|A0A086ARI9|A0A086ARI9_9FLAO 7-carboxy-7-deazaguanine synthase OS=Chryseobacterium piperi OX=558152 GN=queE PE=3 SV=1
MNKEEDILLKEGKMLPVMEHFYTLQGEGAHTGKAAYFIRLGGCDVGCHWCDVKESWNPDLHPLMNAEEIAETAAKHCKTIVLTGGEPLMWNLDILTSRLKDLGCTIHIETSGAYPVSGQLDWITLSPKKTGLPKEEVYEKASELKVIIFNNHDFSFAQEQAAKVSKDCKLYLQSEWSKRDEMYPKITDFILENPEWQASVQTHKYLNIP

SEQ ID NO: 29223 - protein, 209 aa, Chryseobacterium piscicola
  REGION 1..209: note = tr|A0A1N7K4L8|A0A1N7K4L8_9FLAO 7-carboxy-7-deazaguanine synthase OS=Chryseobacterium piscicola OX=551459 GN=queE PE=3 SV=1
MDLVEDILLKEGKMLPVMEHFYTIQGEGAHTGKAAYFIRLGGCDVGCHWCDVKESWDPKLHPLMNAEEIAETAAKHCKIVVLTGGEPLMWNLEVLTGKLKELGCTVHIETSGAYPMSGQLDWITLSPKKTGLPKEEIYHKAHELKVIVFNNNDLKFAEEQAAKVSENCKLYLQSEWSKREEIYPKITDFILGNPRWQASVQTHKYLNIP

SEQ ID NO: 29224 - protein, 209 aa, Chryseobacterium piscium
  REGION 1..209: note = tr|A0A3D9BR57|A0A3D9BR57_9FLAO 7-carboxy-7-deazaguanine synthase OS=Chryseobacterium piscium OX=333702 GN=queE PE=3 SV=1
MNKEEDILLKEGKMLPVMEHFYTIQGEGAHTGKAAYFIRLGGCDVGCHWCDVKESWDPTLHPLMNAEEIAETAAKHCKIVVLTGGEPLMWNLDILTSKLKELGCTIHIETSGAYPLSGQIDWITLSPKKTGLPKEEIYAKAHELKMIVFNNNDFKFAEEQAAKVSENCRLYLQSEWSKRDEMYPKITDFILANPRWQASVQTHKYLNIP

SEQ ID NO: 29225 - protein, 209 aa, unidentified
  source 1..209: note = Chryseobacterium polytrichastri
  REGION 1..209: note = tr|A0A1M6YLA6|A0A1M6YLA6_9FLAO 7-carboxy-7-deazaguanine synthase OS=Chryseobacterium polytrichastri OX=1302687 GN=queE PE=3 SV=1
MNKEEDILLKEGKMLPVMEHFYTLQGEGAHTGKASYFIRLGGCDVGCHWCDVKESWDPTLHPLMNAEEIAETAAKHCKTVVLTGGEPLMWNLDILTSKLKELGCTIHIETSGAYPMSGHIDWITLSPKKTGLPKEEIYEKASELKVIVFNNNDLKFAEEQAAKVSANCKLYLQSEWSKRDEMYPKITDFILAHPEWQASVQTHKYLNIP

SEQ ID NO: 29226 - protein, 209 aa, unidentified
  source 1..209: note = Chryseobacterium rhizoplanae
  REGION 1..209: note = tr|A0A521E952|A0A521E952_9FLAO 7-carboxy-7-deazaguanine synthase OS=Chryseobacterium rhizoplanae OX=1609531 GN=queE PE=3 SV=1
MNKEEDILLKEGKMLPVMEHFYTLQGEGAHTGKAAYFIRLGGCDVGCHWCDVKESWNPELHPLMNTVEIAETAAKHCKTIVLTGGEPLMWNLDILTSRLKELGCTVHIETSGAYPMSGQLDWITLSPKKTGLPKEEIYQKAHELKVIIFNQHDFTFAQEQASKVSENCKLYLQSEWSKRDEMYPKITDFILEHPEWQASVQTHKYLNIP

SEQ ID NO: 29227 - protein, 209 aa, Chryseobacterium rhizosphaerae
  REGION 1..209: note = tr|A0A3D9DIM0|A0A3D9DIM0_9FLAO 7-carboxy-7-deazaguanine synthase OS=Chryseobacterium rhizosphaerae OX=395937 GN=queE PE=3 SV=1
MNKEEDILLKEGKMLPVMEHFYTLQGEGAHTGKAAYFIRLGGCDVGCHWCDVKESWDPELHPLMNATEIAETAAKHCKTVVLTGGEPLMWNLEILTSKLKELGCTIHIETSGAYPMSGHLDWITLSPKKTGLPKEEIYQKAHELKVIIFNNNDFKFAEEQAAKVSDKCRLYLQSEWSKRNDMYPKITDFILEHPEWQASVQTHKYLNIP

SEQ ID NO: 29228 - protein, 209 aa, Chryseobacterium scophthalmum
  REGION 1..209: note = tr|A0A1N6H5T8|A0A1N6H5T8_9FLAO 7-carboxy-7-deazaguanine synthase OS=Chryseobacterium scophthalmum OX=59733 GN=queE PE=3 SV=1
MNKEEDILLKEGKMLPVMEHFYTIQGEGAHTGKAAYFIRLGGCDVGCHWCDVKESWDPTLHPLMNAEEIAETAAKHCKIVVLTGGEPLMWNLDILTSKLKELGCTIHIETSGAYPLSGQIDWITLSPKKTGLPKEEIYAKAHELKMIVFNNNDFKFADEQAAKVSENCRLYLQSEWSKRDEMYPKITDFILANPRWQASVQTHKYLNIP

SEQ ID NO: 29229 - protein, 209 aa, unidentified
  source 1..209: note = Chryseobacterium sediminis
  REGION 1..209: note = tr|A0A5B2TNL0|A0A5B2TNL0_9FLAO 7-carboxy-7-deazaguanine synthase OS=Chryseobacterium sediminis OX=1679494 GN=queE PE=3 SV=1
MNKEEDILLKEGKMLPVMEHFYTLQGEGAHTGKAAYFIRLGGCDVGCHWCDVKESWDPELHPLMNAAEIAETAAKHCKTVVLTGGEPLMWNLDILTSKLKELGCTVHIETSGAYPMSGHLDWITLSPKKTGLPKEEIYQKAHELKVIIFNQHDFTFAQEQASKVSENCKLYLQSEWSKRDDMYPKITDFILKHPEWQASVQTHKYLNIP

SEQ ID NO: 29230 - protein, 209 aa, unidentified
  source 1..209: note = Chryseobacterium shandongense
  REGION 1..209: note = tr|A0A3G6MSZ1|A0A3G6MSZ1_9FLAO 7-carboxy-7-deazaguanine synthase OS=Chryseobacterium shandongense OX=1493872 GN=queE PE=3 SV=1
MDLVEDILLKEGKMLPVMEHFYTLQGEGAHTGKAAYFIRLGGCDVGCHWCDVKESWDPNLHPLMNAEEIAETAARHCKTIVLTGGEPLMWNLDILTSKLKELGCSIHIETSGAYPMSGHIDWITLSPKKTGLPKEEIYQKAHELKVIVFNNNDFKFAQEQARKVSENCTLYLQSEWSKRDEMYPKITDFILQHPKWRASVQTHKYLNIP

SEQ ID NO: 29231 - protein, 209 aa, unidentified
  source 1..209: note = Chryseobacterium shandongense
  REGION 1..209: note = tr|A0A3G6QBC3|A0A3G6QBC3_9FLAO 7-carboxy-7-deazaguanine synthase OS=Chryseobacterium shandongense OX=1493872 GN=queE PE=3 SV=1
MDLVEDILLKEGKMLPVMEHFYTLQGEGAHTGKAAYFIRLGGCDVGCHWCDVKESWDPNLHPLMNAEEIAETAARHCKTIVLTGGEPLMWNLDILTSKLKELGCSIHIETSGAYPMSGHIDWITLSPKKTGLPKEEIYQKAHELKVIVFNNNDFKFAQEQATKVSENCTLYLQSEWSKRDEMYPKITDFILQHPKWRASVQTHKYLNIP

SEQ ID NO: 29232 - protein, 209 aa, Chryseobacterium shigense; identical to SEQ ID NO: 29171
  REGION 1..209: note = tr|A0A376EUY3|A0A376EUY3_9FLAO 7-carboxy-7-deazaguanine synthase OS=Chryseobacterium shigense OX=297244 GN=queE PE=3 SV=1

SEQ ID NO: 29233 - protein, 209 aa, Chryseobacterium shigense
  REGION 1..209: note = tr|A0A1N7J5W4|A0A1N7J5W4_9FLAO 7-carboxy-7-deazaguanine synthase OS=Chryseobacterium shigense OX=297244 GN=queE PE=3 SV=1
MNKEEDILLKEGKMLPVMEHFYTLQGEGAHTGKASYFIRLGGCDVGCHWCDVKESWDPNLHPLMNAEEIAETAAKHCKTIVLTGGEPLMWNLDILTSKLKELGCTIHIETSGAYPLSGQIDWITLSPKKTGLPKEEIYQQASELKVIIFNQHDFTFAQEQAAKVSEKCRLYMQSEWSKRDEMYPKITDFILAHPEWQASVQTHKYLNIP

SEQ ID NO: 29234 - protein, 209 aa, Chryseobacterium soldanellicola
  REGION 1..209: note = tr|A0A1H1BCP7|A0A1H1BCP7_9FLAO 7-carboxy-7-deazaguanine synthase OS=Chryseobacterium soldanellicola OX=311333 GN=queE PE=3 SV=1
MDLIEDILLKEGKMLPVMEHFYTLQGEGAHTGKASYFIRLGGCDVGCHWCDVKESWDPNLHPLMNAEEIAETAAKHCKTIVLTGGEPLMWNLDILTSKLKELGCTVHIETSGAYPMSGQIDWITLSPKKTGLPKEEIYAKASELKVIVFNNNDFKFAEEQAAKVSENCTLYLQSEWSKRDEMYPKITDFILEHPKWRASVQTHKYLNIP

SEQ ID NO: 29235 - protein, 209 aa, Chryseobacterium soli
  REGION 1..209: note = tr|A0A086ACV2|A0A086ACV2_9FLAO 7-carboxy-7-deazaguanine synthase OS=Chryseobacterium soli; OX = 445961 GN=queE PE=3 SV=1
MNKEEDILLKEGKMLPVMEHFYTLQGEGAHTGKAAYFIRLGGCDVGCHWCDVKESWNPDLHPLMHAEEIAETAAKHCKTIVLTGGEPLMWNLDVLTSKLKELGCTIHIETSGAYPMSGQLDWITLSPKKTGLPKEEIYQKANELKVIAFNNNDFAFAQEQASKVSEHCRLYLQSEWSKRDEMYPKITDFILAHPEWQASVQTHKYLNIP

SEQ ID NO: 29236 - protein, 210 aa, Chryseobacterium solincola
  REGION 1..210: note = tr|A0A0C1EU12|A0A0C1EU12_9FLAO 7-carboxy-7-deazaguanine synthase OS=Chryseobacterium solincola OX=510955 GN=queE PE=3 SV=1
MTKEEENILLKEGKMLPVMEHFYTIQGEGAHTGKAAYFIRLGGCDVGCHWCDVKESWNPDLHPLLNAEEIAQTAAKNCKTIVLTGGEPLMWNLQFLTARLKELGCTIHIETSGAYEMSGHLDWITLSPKKTGLPKPAIYERASELKMIIFNNNDFKFAEEQAAKVSENCVLYLQSEWSKRNEMYPKITDYILANPKWQASVQTHKYLNIP

SEQ ID NO: 29237 - protein, 209 aa, Chryseobacterium sp.
  REGION 1..209: note = tr|A0A3G6PJN6|A0A3G6PJN6_9FLAO 7-carboxy-7-deazaguanine synthase OS=Chryseobacterium sp. G0186 OX=2487064 GN=queE PE=3 SV=1
MNKEQDILLKEGKMLPVMEHFYTLQGEGAHTGKAAYFIRLGGCDVGCHWCDVKESWDPELHPLMDAMEIAETAAKHCKTIVLTGGEPLTWNLEILTSKLKELGCTIHIETSGAYPMSGHLDWITLSPKKTGLPKEEIYQKAHELKVIVFNNHDFEFAQEQAAKVSENCKLYLQSEWSKRDDMYPKITDFILAHPEWQASVQTHKYLNIP

SEQ ID NO: 29238 - protein, 209 aa, Chryseobacterium sp.
  REGION 1..209: note = tr|A0A316X045|A0A316X045_9FLAO 7-carboxy-7-deazaguanine synthase OS=Chryseobacterium sp. ISE14 OX=475075 GN=queE PE=3 SV=1
MNKDQDILLKEGKMLPVMEHFYTLQGEGAHTGKAAYFIRLGGCDVGCHWCDVKESWDPDLHPLMNATEIAETAAKHCKTIVLTGGEPLMWNLETLTSKLKELGCTIHIETSGAYPMSGQLDWITLSPKKTGLPKEEIYLKANELKVIVFNHHDFTFAEEQAAKVSENCKLYLQSEWSKRNDMYPKITDFILEHPEWQASVQTHKYLNIP

SEQ ID NO: 29239 - protein, 209 aa, Chryseobacterium taeanense
  REGION 1..209: note = tr|A0A1G8HC51|A0A1G8HC51_9FLAO 7-carboxy-7-deazaguanine synthase OS=Chryseobacterium taeanense OX=311334 GN=queE PE=3 SV=1
MDLIEDILLKEGKMLPVMEHFYTLQGEGAHTGKAAYFIRLGGCDVGCHWCDVKESWDPNLHPLMNAEEIAETAAKHCKTIVLTGGEPLMWNLDVLTSRLKELGCTIHIETSGAYPMSGHIDWITLSPKKTGLPKEEIYQKAHELKVIVFNNNDFKFAEEQAAKVSDNCTLYLQSEWSKRDEMYPKITDFILEHPEWRASVQTHKYLNIP

SEQ ID NO: 29240 - protein, 209 aa, Chryseobacterium taichungense
  REGION 1..209: note = tr|A0A1H8AZA9|A0A1H8AZA9_9FLAO 7-carboxy-7-deazaguanine synthase OS=Chryseobacterium taichungense OX=295069 GN=queE PE=3 SV=1
MNLVEDILLKEGKMLPVMEHFYTLQGEGAHTGKAAYFIRLGGCDVGCHWCDVKESWDPNLHPLMNAEEIAETAARHCKTIVLTGGEPLMWNLDILTSKLKELGCTVHIETSGAYPMSGQIDWITLSPKKTGLPKEEIYQKAHELKVIIFNNNDFKFAQEQASKVSKNCTLYLQSEWSKRDEMYPKITDFILEHPKWRASVQTHKYLNIP

SEQ ID NO: 29241 - protein, 209 aa, unidentified
  source 1..209: note = Chryseobacterium taihuense
  REGION 1..209: note = tr|A0A1G9NDR5|A0A1G9NDR5_9FLAO 7-carboxy-7-deazaguanine synthase OS=Chryseobacterium taihuense OX=1141221 GN=queE PE=3 SV=1
MNLTEEILLKEGKMLPVMEHFYTLQGEGAHTGKAAYFIRLGGCDVGCHWCDVKESWDPNLHPLMNAEEIAETAAKHCKTIVLTGGEPLMWNLDILTGKLKELGCSIHIETSGAYPMSGQIDWITLSPKKTGLPKEEIYAKAHELKVIVFNNNDFKFAQEQAAKVSENCTLYLQSEWSKRDEMYPKITDFILEHPEWRASVQTHKYLNIP

SEQ ID NO: 29242 - protein, 209 aa, Chryseobacterium taiwanense
  REGION 1..209: note = tr|A0A0B4CMC7|A0A0B4CMC7_9FLAO 7-carboxy-7-deazaguanine synthase OS=Chryseobacterium taiwanense OX=363331 GN=queE PE=3 SV=1
MKIEEDILLKEGKMLPVMEHFYTLQGEGAHTGKAAYFIRLGGCDVGCHWCDVKESWDPNLHPLMNAEEIAETAAKHCKTIVLTGGEPLMWNLDILTSKLKELGCTVHIETSGAYPMSGHIDWITLSPKKTGLPKEEIYANAHELKVIVFNNNDFKFAQEQAAKVSENCTLYLQSEWSKRDEMYPKITDFILENPEWRASVQTHKYLNIP

SEQ ID NO: 29243 - protein, 209 aa, unidentified
  source 1..209: note = Chryseobacterium takakiae
  REGION 1..209: note = tr|A0A1M4X1L5|A0A1M4X1L5_9FLAO 7-carboxy-7-deazaguanine synthase OS=Chryseobacterium takakiae OX=1302685 GN=queE PE=3 SV=1
MNLIEDILLKEGKMLPVMEHFYTLQGEGAYTGKAAYFIRLGGCDVGCHWCDVKESWDPNLHPLMNAEEIAETAAKHCKTIVLTGGEPLMWNLDILTSKLKELGCSIHIETSGAYPLSGHIDWITLSPKKTGLPKEEIYQKAHELKVIVFNNNDFKFAQEQGSKVSENCTLYLQSEWSKRDEMYPKITDFILEHPEWRASVQTHKYLNIP

SEQ ID NO: 29244 - protein, 210 aa, unidentified
  source 1..210: note = Chryseobacterium taklimakanense
  REGION 1..210: note = tr|A0A3G8WG38|A0A3G8WG38_9FLAO 7-carboxy-7-deazaguanine synthase OS=Chryseobacterium taklimakanense OX=536441 GN=queE PE=3 SV=1
MTKEEQDILLKEGKMLPVMEHFYTIQGEGAHTGKAAYFIRLGGCDVGCHWCDVKESWDPDVHPLMDVEGVAETAASYCKTIVLTGGEPLMWNLDVLTSKLKELGCQIHIETSGAYPMSGQLDWITLSPKKTGLPLDEIYSQAQELKVIIFNNHDFQFAEEQAAKVSENCKLYLQSEWSKRDAMYPKITDFILANPKWQASVQTHKYLNIP

SEQ ID NO: 29245 - protein, 210 aa, unidentified
  source 1..210: note = Chryseobacterium taklimakanense
  REGION 1..210: note = tr|A0A239XEI9|A0A239XEI9_9FLAO 7-carboxy-7-deazaguanine synthase OS=Chryseobacterium taklimakanense OX=536441 GN=queE PE=3 SV=1
MTKEEQDILLKEGKILPVMEHFYTIQGEGAHTGKAAYFIRLGGCDVGCHWCDVKESWNPDLHPLMDVEEVAETAASYCKTIVLTGGEPLMWNLDVLTSKLKELGCQIHIETSGAYPMSGQLDWITLSPKKTGLPLDEIYSKAQELKVIIFNNHDFQFAEEQAAKVSENCKLYLQSEWSKRDAMYPKITDFILANPKWQASVQTHKYLNIP

SEQ ID NO: 29246 - protein, 210 aa, Chryseobacterium treverense
  REGION 1..210: note = tr|A0A1I3LNT3|A0A1I3LNT3_9FLAO 7-carboxy-7-deazaguanine synthase OS=Chryseobacterium treverense OX=631455 GN=queE PE=3 SV=1
MTKEEENILLKEGKMLPVMEHFYTIQGEGAHTGKAAYFIRLGGCDVGCHWCDVKESWDPNLHPLLNTEEIAQTAARNCKTIVLTGGEPLMYNLEYLTRRLKELGCDIHIETSGAYEMSGHLDWITLSPKKTGLPKPAIYEKASELKMIIFNNNDFKFAEEQAAKVSESCELYLQSEWSKRNEMYPKITDYILANPKWRASVQTHKYLNIP

SEQ ID NO: 29247 - protein, 209 aa, Chryseobacterium ureilyticum
  REGION 1..209: note = tr|A0A1N7Q2D4|A0A1N7Q2D4_9FLAO 7-carboxy-7-deazaguanine synthase OS=Chryseobacterium ureilyticum OX=373668 GN=queE PE=3 SV=1
MNKEQDILLKEGKMLPVMEHFYTLQGEGAHTGKAAYFIRLGGCDVGCHWCDVKESWDPELHPLMDAVEIAETAAKHCKTIVLTGGEPLTWNLEILTSKLKELGCTIHIETSGAYPMSGHLDWITLSPKKTGLPKQEIYQKAHELKVIVFNNHDFEFAQEQASKVSENCKLYLQSEWSKRDDMYPKITDFILEHPEWQASVQTHKYLNIP

SEQ ID NO: 29248 - protein, 209 aa, unidentified
  source 1..209: note = Chryseobacterium viscerum
  REGION 1..209: note = tr|A0A316WEW9|A0A316WEW9_9FLAO 7-carboxy-7-deazaguanine synthase OS=Chryseobacterium viscerum OX=1037377 GN=queE PE=3 SV=1
MNKEEDILLKEGKMLPVMEHFYTLQGEGAHTGKASYFIRLGGCDVGCHWCDVKESWDPKLHPLMNAVEIAEMAAKHCKTIVLTGGEPLMWNLEILTSRLKELGCTVHIETSGAYPMSGHLDWITLSPKKTGLPKEEIYQKANELKMIIFNQHDFTFAQEQASKVSENCRLYLQSEWSKRDDMYPKITDFILEHPEWQASVQTHKYLNIP

SEQ ID NO: 29249 - protein, 209 aa, Chryseobacterium wanjuense
  REGION 1..209: note = tr|A0A1I0RUE4|A0A1I0RUE4_9FLAO 7-carboxy-7-deazaguanine synthase OS=Chryseobacterium wanjuense OX=356305 GN=queE PE=3 SV=1
MNLTEEILLKEGKMLPVMEHFYTLQGEGAHTGKAAYFIRLGGCDVGCHWCDVKESWDPNLHPLMNAEEIAETAAKHCKTIVLTGGEPLMWNLDILTSKLKELGCTIHIETSGAYPMSGQIDWITLSPKKTGLPKEEIYAKAHELKVIVFNNNDFKFAQEQAAKVSGNCTLYLQSEWSKRDEMYPKITDFILEHPEWRASVQTHKYLNIP

SEQ ID NO: 29250 - protein, 210 aa, unidentified
  source 1..210: note = Chryseobacterium xixisoli
  REGION 1..210: note = tr|A0A4R8I6T0|A0A4R8I6T0_9FLAO 7-carboxy-7-deazaguanine synthase OS=Chryseobacterium xixisoli OX=1476462 GN=queE PE=3 SV=1
MTKEEEDILLKEGKMLPVMEHFYTIQGEGFHAGKAAYFIRLGGCDVGCHWCDVKESWDPTLHPLMNTEEIAETAAKYCKTIVLTGGEPLMWNLEILTSKLKELGCTIHIETSGAYPMSGHLDWITLSPKKTGLPLADIYNEASELKMIIFNQNDFKFAQEQGEKVNENCELYLQSEWSKRDAMYPKITDFILENPKWRSSIQTHKYLNIP

SEQ ID NO: 29251 - protein, 210 aa, unidentified
  source 1..210: note = Chryseobacterium zeae
  REGION 1..210: note = tr|A0A1N6INT5|A0A1N6INT5_9FLAO 7-carboxy-7-deazaguanine synthase OS=Chryseobacterium zeae; OX = 1416779 GN=queE PE=3 SV=1
MTKEEEDILLKEGKMLPVMEHFYTIQGEGFHAGKAAYFIRLGGCDVGCHWCDVKESWDPTLHPLMNTEEIAETAAKYCKTIVLTGGEPLMWNLEILTSKLKELGCTIHIETSGAYPMSGHLDWITLSPKKTGLPLADIYKEASELKMIIFNQNDFKFAQEQGEKVNDDCVLYLQSEWSKRDAMYPKITDFILENPTWRSSIQTHKYLNIP

SEQ ID NO: 29252 - protein, 193 aa, unidentified
  source 1..193: note = Chryseolinea flava
  REGION 1..193: note = tr|A0A364Y1I0|A0A364Y1I0_9BACT 7-carboxy-7-deazaguanine synthase OS=Chryseolinea flava; OX = 2059302 GN=queE PE=3 SV=1
MEDFYTIQGEGFYQGHAAYFVRLGGCDVGCVWCDVKESWDASLHPMLSIAEIVSRVKTGKGKIVVITGGEPVMYNLEKLTHALKDSGLRTHIETSGVYPLTGTWDWVCFSPKKFKKPDTSIFEKADELKVIINHKSDIAWAEEFTSKLKPSCQLFLQPEWSKEKEMLPLIIEYVKDNPKWQVSLQVHKYMNIP

SEQ ID NO: 29253 - protein, 207 aa, unidentified
  source 1..207: note = Chryseolinea serpens
  REGION 1..207: note = tr|A0A1M5X213|A0A1M5X213_9BACT 7-carboxy-7-deazaguanine synthase OS=Chryseolinea serpens; OX = 947013 GN=queE PE=3 SV=1
MEIKEKHLVTTLPLMEDFYTIQGEGFYQGSAAYFIRLGGCDVGCVWCDVKESWDVNAHPSVSVDVMMERAKTSGTEIVVITGGEPAMHDLTALTQTLKANGMRTHIETSGVYPLTGQWDWVCFSPKKFKEPHPSVFVQADELKVIVYNKSDFAWAAEFAAVVRPDCQLYLQPEWSKEKEMLPLIIDYVKANPQWQVSLQVHKYMNIP

SEQ ID NO: 29254 - protein, 209 aa, unidentified
  source 1..209: note = Chryseolinea sp.
  REGION 1..209: note = tr|A0A385SIL1|A0A385SIL1_9BACT 7-carboxy-7-deazaguanine synthase OS=Chryseolinea sp. KIS68-18 OX=2321403 GN=queE PE=3 SV=1
MAVEIKEKNQVTTLPLMEDFYTIQGEGFYQGSAAYFIRLGGCDVGCVWCDVKESWDVNAHPSVSVDTMMERAKASGTEIVVVTGGEPAMHDLTALTQALNANGMRTHIETSGVYPLTGQWDWVCFSPKKFKEPHPSVFGQADELKVIVYNKSDFAWAAEFAAVVRPDCQLYLQPEWSKEKEMLPLIIDYVKANPQWQVSLQVHKYMNIP

SEQ ID NO: 29255 - protein, 208 aa, unidentified
  source 1..208: note = Chrysiogenales bacterium
  REGION 1..208: note = tr|A0A524JUK2|A0A524JUK2_9BACT 7-carboxy-7-deazaguanine synthase OS=Chrysiogenales bacterium OX=2528039 GN=queE PE=3 SV=1
MPGPLMPKINEIFWSAQGEGLNSGVSAIFIRMAGCSLRCPYCDTRGAWQGGRDMSPAEIEAAVDLLQVAYPGARLVISGGEPLEQDLKELAKVLRRKHYFVAVETNGLHFQDLPFDWWTVSPKDAAAYRVHPRLWARISEIKLLVTPALDMTVLKKIRGRSPAPIILQPERHDRDRFRRTFAFFRACSLQGIADVRLGLQLHRVYRIS

SEQ ID NO: 29256 - protein, 231 aa, unidentified
  source 1..231: note = Chthoniobacter flavus
  REGION 1..231: note = tr|B4D1V4|B4D1V4_9BACT 7-carboxy-7-deazaguanine synthase OS=Chthoniobacter flavus Ellin428 OX=497964; GN = queE PE=3 SV=1
MLISEIFYSIQGEGELTGVPSVFVRTSGCNLRCRWCDTKYASWNPQGDEMSIAEIFARVDAFPATHVVLTGGEPMVAKGIHELAQRFREAGKHITIETAGTIAPEGIACDLASLSPKLGNSTPLEGEIAEGWRERHEKARLQPEVLRAWIERHPFQLKFVVEQSSDVEEIEALLDRIGAPIPPHKVQLMPQGTDLQTIHGREESLIDLCKRRGYRYCHRLHIALFGNTRGT

SEQ ID NO: 29257 - protein, 217 aa, unidentified
  source 1..217: note = Chthoniobacterales bacterium
  REGION 1..217: note = tr|A0A2W5YN86|A0A2W5YN86_9BACT 7-carboxy-7-deazaguanine synthase OS=Chthoniobacterales bacterium OX=2201154 GN=queE PE=3 SV=1
MREPTLTIHEIYRSIQGESTWAGLPCVFVRLTFCDLRCTYCDTTQAFYQGEKKTLPEILATVTAFDCPLVEITGGEPLLQKNVLPLMSALADSSKTVLVETSGAHDISSVDPRVHRIMDLKTPSSGESHRNLWANIAHLTMRDEVKFVIGSREDYEWSRDSLREHNLSARCRAILFSPIFGRIEPREIAEWILADKLPVRFQLQLHKFIWPPEARGV

SEQ ID NO: 29258 - protein, 220 aa, unidentified
  source 1..220: note = Chthoniobacterales bacterium
  REGION 1..220: note = tr|A0A2W5YWU4|A0A2W5YWU4_9BACT 7-carboxy-7-deazaguanine synthase OS=Chthoniobacterales bacterium OX=2201154 GN=queE PE=3 SV=1
MKEPGEKTLTINEIYHSIQGESTWAGEPCVFVRLTFCDLRCTYCDTEYAFYEGKKQTLDEIAAAVAAFQCPVVEITGGEPLLQKNVLPLMTMLADAGHTVLLETSGAHDISAVDPRVHRIMDLKTPGSGESERNLFSNIEHLTPRDEVKFVIGSREDYEWSREQVEQHALVSRCRAVLFSPIFGRIDPREIVEWILADRLPVRFQLQMHKFIWTPTKRGV

SEQ ID NO: 29259 - protein, 271 aa, Chthonomonas calidirosea
  REGION 1..271: note = tr|S0EVQ6|S0EVQ6_CHTCT 7-carboxy-7-deazaguanine synthase OS=Chthonomonas calidirosea (strain DSM 23976 / ICMP 18418 / T49) OX=1303518 GN=queE PE=3 SV=1
MSYLLKTFSTTRPEAEARLPKARLVEVFSSVQGEGLLVGYRQVFVRTYGCNLRCTYCDSPETLKESPMPTVCRIEWPVGTGRFETLPNPVEVEQLTQVLQRFLKMPHHSVAITGGEPLLQARFLKAWLPAVRSLRLKTFLETNGLLPEHLRQIVALLDYVSMDIKAPSATGLEPEKTWPMHRQFLEVARSTNVYTKMVITPRTTDDELDRAIDLIESVDASIPFILQPVTPFGQEPVGVSPARLLELQSRAAARLSEVRVIPQTHKLVSLL

SEQ ID NO: 29260 - protein, 244 aa, unidentified
  source 1..244: note = Ciceribacter sp.
  REGION 1..244: note = tr|A0A4Q2TH48|A0A4Q2TH48_9RHIZ 7-carboxy-7-deazaguanine synthase OS=Ciceribacter sp. F8825 OX=2509717 GN=queE PE=3 SV=1
MTETSSLTVLVSEIFGPTIQGEGVLIGLPTVFVRTGGCDYRCSWCDSLHAVESRFRHDWKPMSTGDIWSEVTRLSGGEPLTVSLSGGNPAIQPLGDLIDLGHSEGYRFALETQGSLARPWFARLDTLVLSPKPPSSGMACDRTILTDCVEAAGDGPQTVLKFVVFDVEDFAFAREVSAHFPALPVYLQPGNHTPPPADGEGNVDLDGLTERMRWLVDAVAGERWFAAHVLPQLHVMLWGNRRGV

SEQ ID NO: 29261 - protein, 235 aa, Citreicella sp.
  REGION 1..235: note = tr|D0DDU2|D0DDU2_9RHOB 7-carboxy-7-deazaguanine synthase OS=Citreicella sp. SE45 OX=501479 GN=queE PE=3; SV = 1
MSLRIAEIFGPTIQGEGALIGEPTVFVRTGGCDYRCSWCDSLHAVESRYRDTWAAMSDSAVWDEVLRLSGGQPLTVSLSGGNPAIQDFAPVIARGRAAGYRFACETQGSVARPWFAELDTLVLSPKPPSSGETVDWDAFAACVRAGSAARQMVMKIVIFDDTDYAWARDAHARHPELPLYLQPGNPEVDPETPVDPQALADRLGWLVERTMADAWFTPRILPQLHVLIWGNKRGV

SEQ ID NO: 29262 - protein, 223 aa, Citrobacter amalonaticus
  REGION 1..223: note = tr|A0A2S4RVZ1|A0A2S4RVZ1_CITAM 7-carboxy-7-deazaguanine synthase OS=Citrobacter amalonaticus OX=35703 GN=queE PE=3 SV=1
MQYPINEMFQTLQGEGYFTGVPAIFIRLQGCPVGCAWCDTKHTWDKLADREVSLFSILAKTKESDKWGAGSAEDLLAIIGRQGWTARHVVITGGEPCIHDLTPLTGLLEKNGYSCQIETSGTHEVRCSHATWVTVSPKVNMRGGYDVLSQALERADEIKHPVGRVRDIEALDELLATLTDEKQRVIALQPVSQKEDATRLCIETCIARNWRLSMQTHKYLNIA

SEQ ID NO: 29263 - protein, 223 aa, Citrobacter amalonaticus
  REGION 1..223: note = tr|A0A0X8S1Z4|A0A0X8S1Z4_CITAM 7-carboxy-7-deazaguanine synthase OS=Citrobacter amalonaticus OX=35703 GN=queE PE=3 SV=1
MQYPINEMFQTLQGEGYFTGVPAIFIRLQGCPVGCAWCDTKHTWDKLEDREVSLYSILAKTKESDKWGAASSEDLLAVIGRQGYTARHVVITGGEPCIHDLMPLTDLLEKNGFSCQIETSGTHEVRCTPNTWVTVSPKVNMRGGYDVLSQALERANEIKHPVGRVRDIEALDELLATLSDDKPRVIALQPISQKEDATRLCIDTCIARNWRLSMQTHKYLNIA

SEQ ID NO: 29264 - protein, 223 aa, Citrobacter braakii
  REGION 1..223: note = tr|A0A1R0FZ00|A0A1R0FZ00_CITBR 7-carboxy-7-deazaguanine synthase OS=Citrobacter braakii; OX = 57706 GN=queE PE=3 SV=1
MQYPINEMFQTLQGEGYFTGVPAIFIRLQGCPVGCAWCDTKHTWDKLEDREVSLYSILAKTKESDKWGAASSEDLLAVIVRQGYTARHVVITGGEPCIHDLMPLTDLLEKNGFSCQIETSGTHEVRCTPNTWVTVSPKVNMRGGYDVLSQALERANEIKHPVGRVRDIEALDELLATLSDDKPRIIALQPISQKEDATRLCIDTCIARNWRLSMQTHKYLNIA

SEQ ID NO: 29265 - protein, 223 aa, Citrobacter braakii
  REGION 1..223: note = tr|A0A4R0MBV5|A0A4R0MBV5_CITBR 7-carboxy-7-deazaguanine synthase OS=Citrobacter braakii; OX = 57706 GN=queE PE=3 SV=1
MQYPINEMFQTLQGEGYFTGVPAIFIRLQGCPVGCAWCDTKHTWDKLEDREVSLYSILAKTKESDKWGAASSEDLLAVILHQGYTARHVVITGGEPCIHDLMPLTDLLEKNGFSCQIETSGTHEVRCTPNTWVTVSPKVNMRGGYDVLSQALERANEIKHPVGRVRDIEALDELLATLSDDKPRIIALQPISQKEDATRLCIDTCIARNWRLSMQTHKYLNIA

SEQ ID NO: 29266 - protein, 223 aa, Citrobacter farmeri
  REGION 1..223: note = tr|A0A223JVE0|A0A223JVE0_9ENTR 7-carboxy-7-deazaguanine synthase OS=Citrobacter farmeri; OX = 67824 GN=queE PE=3 SV=1
MQYPINEMFQTLQGEGYFTGVPAIFIRLQGCPVGCAWCDTKHTWDKLEDREVSLYSILAKTKESDKWGAASSEDLLAVIGRQGYTARHVVITGGEPCIHDLMPLTDLLEKNGFSCQIETSGTHEVRCTPNTWVTVSPKVNMRGGYDVLSQALERANEIKHPVGRVRDIEALDELLATLSDDKPRVIALQPISQKEDATRLCIETCIARNWRLSMQTHKYLNIA

SEQ ID NO: 29267 - protein, 223 aa, Citrobacter freundii
  REGION 1..223: note = tr|A0A336P252|A0A336P252_CITFR 7-carboxy-7-deazaguanine synthase OS=Citrobacter freundii; OX = 546 GN=queE_1 PE=3 SV=1
MQYPINEMFQTLQGEGYFTGVPAIFIRLQGCPVGCAWCDTKHTWDKLEDREVSLYSILAKTKESDKWGAANSEDLLAVILRQGYTARHVVITGGEPCIHDLMPLTDLLEKNGFSCQIETSGTHEVRCTPNTWVTVSPKVNMRGGYDVLSQALERANEIKHPVGRVRDIEALDELLATLSDDKPRIIALQPISQKDDATRLCIETCIARNWRLSMQTHKYLNIA

SEQ ID NO: 29268 - protein, 223 aa, Citrobacter freundii
  REGION 1..223: note = tr|A0A0D7M2N8|A0A0D7M2N8_CITFR 7-carboxy-7-deazaguanine synthase OS=Citrobacter freundii; OX = 546 GN=queE PE=3 SV=1
MQYPINEMFQTLQGEGYFTGVPAIFIRLQGCPVGCAWCDTKHTWDKLEDREVSLYSILAKTKESDKWGAASSEDLLAVISRQGYTARHVVITGGEPCIHDLMPLTDLLEKNGFSCQIETSGTHEVRCTPNTWVTVSPKVNMRGGYDVLSQALERANEIKHPVGRVRDIEALDELLATLSDDKPRIIALQPISQKEDATRLCIDTCIARNWRLSMQTHKYLNIA

SEQ ID NO: 29269 - protein, 223 aa, Citrobacter gillenii
  REGION 1..223: note = tr|A0A3E2KP47|A0A3E2KP47_9ENTR 7-carboxy-7-deazaguanine synthase OS=Citrobacter gillenii; OX = 67828 GN=queE PE=3 SV=1
MQYPINEMFQTLQGEGYFTGVPAIFIRLQGCPVGCAWCDTKHTWDKLEDREVSLYSILAKTKESDKWGAASGEDLLAVIQRQGYTARHVVITGGEPCIHDLMPLTDLLEKNGFSCQIETSGTHEVRCTPNTWVTVSPKVNMRGGYDVLSQALERANEIKHPVGRVRDIEALDELLATLTDDKPRIIALQPISQKDDATRLCIDTCIARNWRLSMQTHKYLNIA

SEQ ID NO: 29270 - protein, 223 aa, Citrobacter koseri
  REGION 1..223: note = tr|A0A381GYL6|A0A381GYL6_CITKO 7-carboxy-7-deazaguanine synthase OS=Citrobacter koseri; OX = 545 GN=queE PE=3 SV=1
MQYPINEIFQTLQGEGYFTGVPAIFIRLQGCPVGCAWCDTKHTWDKLEDREVSLYSILAKTKESDKWGAASSEDLLAVINRQGYTARHAVITGGEPCIHDLMPLTDLLEKNGFSCQIETSGTHEVRCTPNTWVTVSPKVNMRGGYDVLSQALERANEIKHPVGRVRDIEALDELLATLSDDKPRIIALQPISQKEDATRLCIETCIARNWRLSMQTHKYLNIA

SEQ ID NO: 29271 - protein, 223 aa, Citrobacter koseri
  REGION 1..223: note = tr|A8ANY6|A8ANY6_CITK8 7-carboxy-7-deazaguanine synthase OS=Citrobacter koseri (strain ATCC BAA-895 / CDC 4225-83 / SGSC4696) OX=290338 GN=queE PE=3 SV=1
MQYPINEMFQTLQGEGYFTGVPAIFIRLQGCPVGCAWCDTKHTWDKLEDREVSLYSILAKTKESDKWGAASSEDLLAVISRQGYTARHVVITGGEPCIHDLMPLTDLLEKNGFSCQIETSGTHEVRCTPNTWVTVSPKVNMRGGYDVLSQALERANEIKHPVGRVRDIEALDELLATLSDDKPRIIALQPISQKEDATRLCIETCIVRNWRLSMQTHKYLNIA

SEQ ID NO: 29272 - protein, 223 aa, Citrobacter murliniae
  REGION 1..223: note = tr|A0A4S3RZK6|A0A4S3RZK6_9ENTR 7-carboxy-7-deazaguanine synthase OS=Citrobacter murliniae; OX = 67829 GN=queE PE=3 SV=1
MQYPINEMFQTLQGEGYFTGVPAIFIRLQGCPVGCAWCDTKHTWDKLEDREVSLYSILAKTKESDKWGAASSEDLLTVIQRQGYTARHVVITGGEPCIHDLMPLTDLLEKNGFSCQIETSGTHEVRCTPNTWVTVSPKVNMRGGYDVLSQALERANEIKHPVGRVRDIEALDELLATLTDDKPRIIALQPISQKEDATRLCIDTCIARNWRLSMQTHKYLNIA

SEQ ID NO: 29273 - protein, 223 aa, unidentified
  source 1..223: note = Citrobacter pasteurii
  REGION 1..223: note = tr|A0A0A1RWS7|A0A0A1RWS7_9ENTR 7-carboxy-7-deazaguanine synthase OS=Citrobacter pasteurii; OX = 1563222 GN=queE PE=3 SV=1
MQYPINEMFQTLQGEGYFTGVPAIFIRLQGCPVGCAWCDTKHTWDKLEDREVSLYSILAKTKESDKWGAASSEDLLAVIQRQGYTARHVVITGGEPCIHDLMPLTDLLEKNGFSCQIETSGTHEVRCTPNTWVTVSPKVNMRGGYDVLSQALERANEIKHPVGRVRDIEALDELLATLSDDKPRIIALQPISQKEDATRLCIDTCIARNWRLSMQTHKYLNIA

SEQ ID NO: 29274 - protein, 223 aa, unidentified; identical to SEQ ID NO: 29268
  source 1..223: note = Citrobacter portucalensis
  REGION 1..223: note = tr|A0A4P7UZT6|A0A4P7UZT6_9ENTR 7-carboxy-7-deazaguanine synthase OS=Citrobacter portucalensis OX=1639133 GN=queE PE=3 SV=1

SEQ ID NO: 29275 - protein, 223 aa, Citrobacter rodentium
  REGION 1..223: note = tr|A0A482PG06|A0A482PG06_CITRO 7-carboxy-7-deazaguanine synthase OS=Citrobacter rodentium; OX = 67825 GN=queE PE=3 SV=1
MQYPINEMFQTLQGEGYFTGVPAIFIRLQGCPVGCAWCDTKHTWDKLEDREVSLFSILAKTKESDKWGAASSEDLLAVINRQGYTARHVVITGGEPCIHDLMPLTALLEKNGFSCQIETSGTHEVRCTPNTWVTVSPKVNMRGGYDILSQALERANEIKHPVGRVRDIEALDELLATLSDDKPRVIALQPISQKEDATRLCIETCIARNWRLSMQTHKYLNIA

SEQ ID NO: 29276 - protein, 223 aa, Citrobacter sp.; identical to SEQ ID NO: 29263
  REGION 1..223: note = tr|A0A3Q8D786|A0A3Q8D786_9ENTR 7-carboxy-7-deazaguanine synthase OS=Citrobacter sp. CFNIH10 OX=1920110 GN=queE PE=3 SV=1

SEQ ID NO: 29277 - protein, 223 aa, Citrobacter sp.
  REGION 1..223: note = tr|A0A4P6WP34|A0A4P6WP34_9ENTR 7-carboxy-7-deazaguanine synthase OS=Citrobacter sp. LY-1; OX = 2546350 GN=queE PE=3 SV=1
MQYPINEMFQTLQGEGYFTGVPAIFIRLQGCPVGCAWCDTKHTWDKLEDREVSLYSILAKTKESDKWGAASSEDLLAVILRQGYTARHVVITGGEPCIHDLMPLTDLLEKNGFSCQIETSGTHEVRCTPNTWVTVSPKVNMRGGYDVLSQALERANEIKHPVGRVRDIEALDELLATLSDDKPRIIALQPISQKEDATRLCIDTCIARNWRLSMQTHKYLNIA

SEQ ID NO: 29278 - protein, 223 aa, Citrobacter werkmanii
  REGION 1..223: note = tr|A0A422V9D2|A0A422V9D2_9ENTR 7-carboxy-7-deazaguanine synthase OS=Citrobacter werkmanii; OX = 67827 GN=queE PE=3 SV=1
MQYPINEMFQTLQGEGYFTGVPAIFIRLQGCPVGCAWCDTKHTWDKLEDREVSLYSILAKTKESDKWGAASSEDLLAVIQRQSYTARHVVITGGEPCIHDLMPLTDLLEKNGFSCQIETSGTHEVRCTPNTWVTVSPKVNMRGGYDVLSQALERANEIKHPVGRVRDIEALDELLATLSDDKPRIIALQPISQKEDATRLCIDTCIARNWRLSMQTHKYLNIA

SEQ ID NO: 29279 - protein, 223 aa, Citrobacter werkmanii; identical to SEQ ID NO: 29278
  REGION 1..223: note = tr|A0A090U3E0|A0A090U3E0_9ENTR 7-carboxy-7-deazaguanine synthase OS=Citrobacter werkmanii NBRC 105721 OX=1114921 GN=queE PE=3 SV=1

SEQ ID NO: 29280 - protein, 242 aa, Citrobacter youngae
  REGION 1..242: note = tr|D4BGZ6|D4BGZ6_9ENTR 7-carboxy-7-deazaguanine synthase OS=Citrobacter youngae ATCC 29220 OX=500640; GN = queE PE=3 SV=1
MILWWGSAIIIVYPHIENAMQYPINEMFQTLQGEGYFTGVPAIFIRLQGCPVGCAWCDTKHTWDKLEDREVSLYSILAKTKESDKWGAASSEDLLAVIQRQGYTARHVVITGGEPCIHDLMPLTDLLEKNGFSCQIETSGTHEVRCTPNTWVTVSPKVNMRGGYDVLSQALERANEIKHPVGRVRDIEALDELLATLSDDKPRIIALQPISQKEDATRLCIDTCIACNWRLSMQTHKYLNIA

SEQ ID NO: 29281 - protein, 223 aa, Citrobacter youngae
  REGION 1..223: note = tr|A0A549VC30|A0A549VC30_9ENTR 7-carboxy-7-deazaguanine synthase OS=Citrobacter youngae; OX = 133448 GN=queE PE=3 SV=1
MQYPINEMFQTLQGEGYFTGVPAIFIRLQGCPVGCAWCDTKHTWDKLEDREVSLYSILAKTKESDKWGAASSEDLLAVIQRQGYTARHVVITGGEPCIHDLMPLTDLLEKNGFSCQIETSGTHEVRCTPNTWVTVSPKVNMRGGYDVLSQALERANEIKHPVGRVRDIEALDELLATLSDEKPRIIALQPISQKEDATRLCIDTCIARNWRLSMQTHKYLNIA

SEQ ID NO: 29282 - protein, 244 aa, unidentified
  source 1..244: note = Citromicrobium sp.
  REGION 1..244: note = tr|A0A2P0B0M0|A0A2P0B0M0_9SPHN 7-carboxy-7-deazaguanine synthase OS=Citromicrobium sp. RCC1897 OX=1812182 GN=queE PE=3 SV=1
MSLVLATDDAGGPEIFASVQGEGPSAGEPTAFVRLSRCNLACVWCDTAYTWHFAGDDRPHRSGQTFDRNANQVTLEVEDVAARIAALGQRRLVVTGGEPMLQAPALAQLLALLPDVTVEIETNGTAFPPPKLEVWVDQFNISPKLTHSGNARELAIVPAVLRRYASDGRAFFKFVVAEPADVEEVREVVRANALPRGRVFVMAEGTDGATLRARQDWLVPLCLEHGYRLSDRLHIHLFGDTRGT

SEQ ID NO: 29283 - protein, 234 aa, unidentified
  source 1..234: note = Citromicrobium sp.
  REGION 1..234: note = tr|A0A326GCA0|A0A326GCA0_9SPHN 7-carboxy-7-deazaguanine synthase OS=Citromicrobium sp.; OX = 2024827 GN=queE PE=3 SV=1
MPRTIFASVQGEGPSAGMPVAFMRLSRCNLACVWCDTAYTWHFQGDERPHRDGIEYDRKANQVSLPVDEVAARVLALGQSRLVITGGEPLLQAPALARMLDLLPDIGVEIETNGTTTAPPALDIRIDQFNVSPKLAHSGNAAELALLPERLDAYATDPRAWFKFVIAEPSDVDEVLALRDRYRFKPGHVFLMPEGTDSATLRTREKWLADLCLQHGFRMSDRLHIHLFGDTRGT

SEQ ID NO: 29284 - protein, 209 aa, Cloacibacterium normanense
  REGION 1..209: note = tr|A0A1E5UCB6|A0A1E5UCB6_9FLAO 7-carboxy-7-deazaguanine synthase OS=Cloacibacterium normanense OX=237258 GN=queE PE=3 SV=1
MDLTEEILLKEGKMLPVMEHFYTLQGEGHHTGKAAYFIRLGGCDVGCHWCDVKESWDPELHPLMDTVEIAEIAASYCKTIVLTGGEPLMWNLEILTKRLKELGCQIHIETSGAYDMSGTLDWITLSPKKTGLPKEGIYKVANELKIIVFNNHDFTFAEEQAAKVSENCKLYLQSEWSKRNEMYPKITDFILANPKWQASVQTHKYLNIP

SEQ ID NO: 29285 - protein, 209 aa, Cloacibacterium normanense
  REGION 1..209: note = tr|A0A2S7I627|A0A2S7I627_9FLAO 7-carboxy-7-deazaguanine synthase OS=Cloacibacterium normanense OX=237258 GN=queE PE=3 SV=1
MDLTKEILLKEGKMLPVMEHFYTLQGEGHHTGKAAYFIRLGGCDVGCHWCDVKESWDPELHPLMDTVEIAEIAASYCKTIVLTGGEPLMWNLEILTKRLKELGCQIHIETSGAYEMSGTLDWITLSPKKTGLPKEEIYKVANELKIIVFNNHDLFFAEEQAAKVSENCKLYLQSEWSKRNEMYPKITDFILANPKWQASVQTHKYLNIP

SEQ ID NO: 29286 - protein, 209 aa, unidentified
  source 1..209: note = Cloacimonas acidaminovorans
  REGION 1..209: note = tr|B0VFJ6|B0VFJ6_CLOAI 7-carboxy-7-deazaguanine synthase OS=Cloacimonas acidaminovorans (strain Evry); OX = 459349 GN=queE PE=3 SV=1
MEKHLNVTEIFYSLQGESAYSGYPCIFIRLSECNLRCVYCDTQYAFGKGKSMAISSIMEEVKKYPCSLTEITGGEPLLQEDVDALFEELHKSSYKILLETNGAISLEKVPDYVIKIVDVKTPGSGMVDAFLKDNLDYLNDKDELKFVLTDKNDYQFALSFLAQYKPKVNIIHFSPLTEVLEPKELAKWMLKDGIKAKLTLQLHKIIGIE

SEQ ID NO: 29287 - protein, 244 aa, unidentified
  source 1..244: note = Clostridia bacterium
  REGION 1..244: note = tr|A0A523C2E0|A0A523C2E0_9FIRM 7-carboxy-7-deazaguanine synthase OS=Clostridia bacterium; OX = 2044939 GN=queE PE=3 SV=1
MAGYLAEVFSSVQGEGLWVGARHLFLRLSGCNLSCGYCDTPAALRPSPDWRLEKMPGRREFVSMANPVGGEDLATILLALLGSPHRALAVTGGEPLLQADFLAELLAYVSRKIPVYLETNGTLPDRLGKLLPMVDIISMDIKLPGACGRELWEEHREFLRLAGKKRLFVKIVVTSDTLDEEIEQAMALVAGEDGRIPVVLQPVTPGSRAQPPAAARLRAWQERALSALEDVRVIPQVHPILREL

SEQ ID NO: 29288 - protein, 220 aa, unidentified
  source 1..220: note = Clostridiaceae bacterium
  REGION 1..220: note = tr|A0A316N2D3|A0A316N2D3_9CLOT 7-carboxy-7-deazaguanine synthase OS=Clostridiaceae bacterium OX=1898204 GN=queE PE=3 SV=1
MNTYKVVEIFESINGEGMKAGELSVFVRLCGCNLHCSYCDTSWANEKDAPYQEMTARQIVQKAEAYGTKNVTLTGGEPLLAEHVLELLEALSEKFCVEIETNGSIALDPFCKKDRKVIFTMDYKLKGSGMEEQMCLSNFALLQRDDTVKFVVSDQTDLERAYEIEQKYALGQKCHVLISPVFGKIIPADMVAFMMEKKWVTARMQIQMHKVIWDPQARGV

SEQ ID NO: 29289 - protein, 221 aa, unidentified
  source 1..221: note = Clostridiales bacterium
  REGION 1..221: note = tr|A0A1F8U0K5|A0A1F8U0K5_9FIRM 7-carboxy-7-deazaguanine synthase OS=Clostridiales bacterium GWB2_37_7 OX=1797677 GN=queE PE=3 SV=1
MDFKVVEKFVSINGEGRLCGQLAIFIRFAGCNLSCSYCDTAWANEKNIPYERMSSRDIYEYVKSTGVRNITLTGGEPLWQEGIIELLEVLSKDKELHVEIETNGSVLLDKFLNIENPPSFTMDYKLPSSNMENKMALDNFKYLTSKDTVKFVAGRIEDLEKTKEIINRYNLADKTSVYISPVFGEIHLDSIVEFMKDNKMNGIHLQVQLHKIIWEPSKRGV

SEQ ID NO: 29290 - protein, 317 aa, unidentified
  source 1..317: note = Clostridiales bacterium
  REGION 1..317: note = tr|A0A354IDB7|A0A354IDB7_9FIRM 7-carboxy-7-deazaguanine synthase OS=Clostridiales bacterium OX=1898207 GN=queE PE=3 SV=1
MAEEFARLAHAAQRKTLEMAVDAALKARKKDREKTYLQILNVAKTFYGKNIKPESFENVRKAIQDPDNKWIRFINRVLDETDPNVAKTTLLNLGYEAFFRGTSMIRKNREKYDCNIPWLILFDPTSACNMHCTGCWAAEYGHKQSLSYEVMDKVLTEGKPLGLHACLFTGGEPLLRKGMGALLRRLSKQPELRIEIETNGSVDLTPFAGLSPAITFTMDYKLPGSGMEAEMCTNNLRLLSPDDTVKFVAGSREDLLRALEIIRQYDLTHRCHVYLSPVFGRIEPAEMVAFMQEHVLNDVTLQLQMHKIIWDPNMRGV

SEQ ID NO: 29291 - protein, 210 aa, Clostridium aceticum
  REGION 1..210: note = tr|A0A0G3WEL0|A0A0G3WEL0_9CLOT 7-carboxy-7-deazaguanine synthase OS=Clostridium aceticum; OX = 84022 GN=queE PE=3 SV=1
MLKVNEIFLSIQGEGISTGYPTVFLRLSGCNLRCLYCDTSYSYEDGEEMTMEEVLEKVTSYGYKRVCLTGGEPLLQQEIKTLLTALKEYEINIETNGSVDIRLFPLGEKHRFTMDIKTPSSGEAENNCLSNFKYLRENDEIKIVIGDHQDYLWAKDLLRQHYEQGIITFSPIYNRVDPKKIVQWMLEDGIDARFQLQLHKILWDPEERGV

SEQ ID NO: 29292 - protein, 221 aa, Clostridium acetireducens
  REGION 1..221: note = tr|A0A1E8EZ74|A0A1E8EZ74_9CLOT 7-carboxy-7-deazaguanine synthase OS=Clostridium acetireducens DSM 10703 OX=1121290 GN=queE_2 PE=3 SV=1
MNFKVVEKFVSINGEGTLAGQLAVFIRFAGCNLNCSYCDTTWANEKDVCYELNTAEDIYNYIKSTGVRNVTLTGGEPLLQKGIIDLLKLLSKHKEIHVEIETNGSVLLDEFLAIENPHSFTMDYKLPSSNMESKMLLDNFKYLTKKDTVKFVSGSIEDLEKAKYIIDTYKLTERTNVYISPVFGQISLDSIVEFMKCNNMNGVNMQIQLHKIIWNPNKRGV

SEQ ID NO: 29293 - protein, 171 aa, Clostridium acetireducens
  REGION 1..171: note = tr|A0A1E8EZL0|A0A1E8EZL0_9CLOT Anaerobic ribonucleoside-triphosphate reductase-activating protein; OS = Clostridium acetireducens DSM 10703 OX=1121290; GN = queE_1 PE=3 SV =1
MIILNIQVAGFLDNSLVNGQGLRSVLFVSGCRHNCLGCHNKEMQSFNYGDALDIDIVLDRIKRNIPIIRGVTFSGGEPFEQSEALWILAKKIKELKLSIWCYTGYTYEYIISHVSENKYWNNMLKYIDVLIDGKFEEDKKDLNIKYRGSKNQRIIDVKKSLDLGKIVTIDL

SEQ ID NO: 29294 - protein, 221 aa, Clostridium acetobutylicum
  REGION 1..221: note = sp|Q97D55|QUEE_CLOAB 7-carboxy-7-deazaguanine synthase OS=Clostridium acetobutylicum (strain ATCC 824 / DSM 792 / JCM 1419 / LMG 5710 / VKM B-1787) OX=272562; GN = queEPE=3 SV=1
MNYKVVEKFVSINGEGLKSGQLSVFIRFAGCNLNCNYCDTKWANEKDVKYTLMTEKEILSYIKETGVKNVTLTGGEPLLQDGIVELLNLLSLDSTLRVEIETNGSVSLENFLNFKNAPSFTMDYKLPDSSMENFMKTSNFKFLNKKDVIKFVVSSLKDLKKAMDIITEFNLSKKTNIYISPVFGRISPETIVDFMKDNKLNDVTLQIQIHKIIWNPNKRGV

SEQ ID NO: 29295 - protein, 223 aa, Clostridium acidisoli
  REGION 1..223: note = tr|A0A1W1XKC8|A0A1W1XKC8_9CLOT 7-carboxy-7-deazaguanine synthase OS=Clostridium acidisoli DSM 12555 OX=1121291 GN=queE PE=3 SV=1
MNYNVIEKFLSIDGEGPTAGEIATFIRFGGCNLKCDWCDTAYSISRSAIGDSLTKEEIYIIIKDNGTKNVTLTGGEPLIQEGIEDLIYFLAKDSKLLIHIETNGSVPFYKFERINHLNNVSFIVDYKLPSSKMESNMHLKNFEMLSSKDVCKFVIGTEEDLKKAKIVLEKYKLLRKCLVYFSPITTSIKLVKIVEFMKSNKLNGVRLQIQLHKIIWNPETRGV

SEQ ID NO: 29296 - protein, 222 aa, unidentified
  source 1..222: note = [Clostridium] algidixylanolyticum
  REGION 1..222: note = tr|A0A419T7V9|A0A419T7V9_9FIRM 7-carboxy-7-deazaguanine synthase OS=[Clostridium] algidixylanolyticum OX=94868 GN=queE PE=3 SV=1
MAQYKVVEKFVSINGEGILAGQLAVFIRFQGCNLSCSFCDTAWANKDDAEFTFMTEQQIKDYIKETGVKNVTLTGGEPLLVPDILQLLQLLATDQFLHIEIETNGSIELNTFADISNPPAFTMDYKLPGSLMEDKMLVSNLTLLTKKDTVKFVVGNKEDLNRAKEVIIAYDLTTRCHIYISPVFGKINLEEIVDYLIQNCLNGVTMQLQMHKVIWNPNKRGV

SEQ ID NO: 29297 - protein, 221 aa, Clostridium argentinense
  REGION 1..221: note = tr|A0A0C1U3W1|A0A0C1U3W1_9CLOT 7-carboxy-7-deazaguanine synthase OS=Clostridium argentinense CDC 2741 OX=1418104 GN=queE PE=3 SV=1
MKLKVVEKFVSINGEGLLCGQLAVFIRFPGCNLNCSYCDTSWANEKNVAYEYMSIEDIYSYIKSTKVKNVTLTGGEPLLQQGTIELIERLSKDSELHVEIETNGSVLLQEFLKTEKPPSFTMDYKLPSSNMERNMELNNFKYLTKKDTVKFVSGSVDDLEKAKYIIDKFKLIDKTNVYVSPVFGGISLDSIVEFMKENNMNGVTLQVQLHKVIWDANKRGV

SEQ ID NO: 29298 - protein, 220 aa, Clostridium bartlettii
  REGION 1..220: note = tr|R5XRW5|R5XRW5_9CLOT 7-carboxy-7-deazaguanine synthase OS=Clostridium bartlettii CAG:1329 OX=1263063; GN = queE PE=3 SV=1
MFNIIEKFVSIDGEGPTAGELATFIRFQGCNLRCSWCDTTYSFDKSEITEVLSAHEIYDYIKSTGVSNVTLTGGEPLFQENIDEVLSLLNDDKNLVVHIETNGAIDILPFKEKYPNIIFILDYKLASSNMTHLMKLDNLNYVTNKDVYKFVLGSDEDLQEAYELITKFNLTNKCLVYFSPVFGAIKLEDIVEFMKEKNLNKVRLQVQLHKVIWDPNMKGV

SEQ ID NO: 29299 - protein, 222 aa, Clostridium beijerinckii
  REGION 1..222: note = tr|A0A2S2B0W1|A0A2S2B0W1_CLOBE 7-carboxy-7-deazaguanine synthase OS=Clostridium beijerinckii OX=1520 GN=queE PE=3 SV=1
MFNIVEKFLSIDGEGPSSGELATFIRFQGCNLRCSWCDTTYSWEKESTCEVLNAKEIYSYIKENKATNVTLTGGEPLIQENIDELLELLDSDDNLQIHIETNGSVDIEPFKKKYTHSNLHYIVDFKLPSSNMTNKMNLSNLNIVEPNDVYKFVLGSNEDLQIAYDVIKKYNLTSKCLVYLSPVSGTINMEEIVEFMKDKNLNKVRLQIQLHKVIWDKNARGV

SEQ ID NO: 29300 - protein, 222 aa, Clostridium beijerinckii
  REGION 1..222: note = tr|A0A0K2MDX6|A0A0K2MDX6_CLOBE 7-carboxy-7-deazaguanine synthase OS=Clostridium beijerinckii NRRL B-598 OX=1428454 GN=queE PE=3 SV=1
MFNIIEKFLSIDGEGPTSGELATFIRFQGCNLRCSWCDTTYSWDKENTSEVLTAEEIYKYIKENKVTNVTLTGGEPLIQKNIHELLGLLNSDDNLKVHIETNGAVNIGTFKNKFINNNISYIVDFKLPSSNMMDRMDFNNLSIVESNDVYKFVIGSKEDLQIAYEIICKHNLTSKCFVYLSPVSGNIEMQEIVEFMKDKNLNKVRLQVQLHKIIWDKNARGV

SEQ ID NO: 29301 - protein, 222 aa, unidentified
  source 1..222: note = Clostridium bornimense
  REGION 1..222: note = tr|W6RT34|W6RT34_9CLOT 7-carboxy-7-deazaguanine synthase OS=Clostridium bornimense OX=1216932 GN=queE PE=3; SV = 1
MFNIIEKFLSIDGEGPTSGQLATFIRFQHCNLRCTWCDTTYSWDKENTTEVLSAKEIYDYIKANGAKNVTLTGGEPLIQEGIDELLELLDNDKDLSVHIETNGSVDIASFKARHRGGNISYIVDFKLPKSGMTKKMNLENLKNIESTDVYKFVVGSNEDLEMAYNIIKDYDLTSKCLIYFSPVLGEIEMDEIVEFMKDKKLNNVRLQVQLHKIIWHKDARGV

SEQ ID NO: 29302 - protein, 221 aa, Clostridium botulinum
  REGION 1..221: note = tr|A5I230|A5I230_CLOBH 7-carboxy-7-deazaguanine synthase OS=Clostridium botulinum (strain Hall / ATCC 3502 / NCTC 13319 / Type A) OX=441771 GN=queE PE=3 SV=1
MDFKVVERFVSINGEGRRCGQLAIFIRFAGCNLNCSYCDTLWANEKDVPYEVLSSKDIYEYIKSKEVKNVTLTGGEPLLQKGIMELLKLLSKDKELYVEIETNGSILLDEFLNIENSPSFTMDYKLPLSNMENKMALDNFKYLTKKDTVKFVSGSIEDLEKAREIINKYNLVDKTNVYISPVFGKINLDTIVEFMKNNRMNGVNLQLQLHKIIWEPSKRGV

SEQ ID NO: 29303 - protein, 221 aa, Clostridium botulinum; identical to SEQ ID NO: 29302
  REGION 1..221: note = tr|C1FN25|C1FN25_CLOBJ 7-carboxy-7-deazaguanine synthase OS=Clostridium botulinum (strain Kyoto / Type A2); OX = 536232 GN=queE PE=3 SV=1

SEQ ID NO: 29304 - protein, 222 aa, Clostridium butyricum
  REGION 1..222: note = tr|C4IIS5|C4IIS5_CLOBU 7-carboxy-7-deazaguanine synthase OS=Clostridium butyricum E4 str. BoNT E BL5262; OX = 632245 GN=queE PE=3 SV=1
MFNIIEKFLSVDGEGPSSGELATFIRFQGCNLRCSWCDTVYSWQKENINERLNAKEIYDYIKSNKVNNVTLTGGEPLIQKNIDELLRLLDDDSNLNIHIETNGSIDIEPFKKKYTRGNISYIVDFKLPSSKMSSHMNYNNINMISKNDVYKFVIGNMDDLKKAYEIIHVYDLANKCKVYLSPVTGNIEMSDIVEFMKDKNMNKVRLQVQLHKIIWDKDARGV

SEQ ID NO: 29305 - protein, 222 aa, Clostridium butyricum
  REGION 1..222: note = tr|A0A0Q0TZC7|A0A0Q0TZC7_CLOBU 7-carboxy-7-deazaguanine synthase OS=Clostridium butyricum; OX = 1492 GN=queE PE=3 SV=1
MFNIIEKFLSVDGEGPSSGELATFIRFQGCNLRCSWCDTVYSWQKENINERLNAQEIYDYIKSNKVNNVTLTGGEPLIQKNIDELLRLLDDDSNLNIHIETNGSIDIEPFKKKYTRGNISYIVDFKLPSSKMSSHMNYNNINMISKNDVYKFVIGNMDDLKKAYEIIHVYDLANKCKVYLSPVTGNIEMSDIVEFMKDKNMNKVKLQVQLHKIIWDKDARGV

SEQ ID NO: 29306 - protein, 221 aa, Clostridium carboxidivorans
  REGION 1..221: note = tr|C6PUT3|C6PUT3_9CLOT 7-carboxy-7-deazaguanine synthase OS=Clostridium carboxidivorans P7 OX=536227; GN = queE PE=3 SV=1
MGFKVVEKFISINGEGPMSGQLAVFIRFAGCNLRCSYCDTLWANEKDVPYETFNAKEIYEYIKSTSIKNVTLTGGEPLMQQDIMELLKLLCEDKNLYVEVETNGSIAVDKFLKVENPPSLTMDYKLPSSNMENNMNMDNLKYLTKNDTVKFVAGSIEDLEKAKNIIYIHKLVEKTRVYISPVFGKIAMDEIVQFMLDNKMNGVNLQVQLHKIIWDPDKRGV

SEQ ID NO: 29307 - protein, 220 aa, Clostridium cellulovorans
  REGION 1..220: note = tr|D9SMJ4|D9SMJ4_CLOC7 7-carboxy-7-deazaguanine synthase OS=Clostridium cellulovorans (strain ATCC 35296 / DSM 3052 / OCM 3 / 743B) OX=573061 GN=queE PE=3 SV=1
MYKVVEKFVSINGEGLRAGELAVFIRFLGCNLKCSYCDTKWANEPECPYELMSGEEIYAYIKETGVRNVTLTGGEPLIQKEMKELIDLLLKDGLLRIEIETNGSVDVQQINYSSERVSITLDYKGKSSLMEGYMKRDSFKLLTKKDSVKFVVGDNEDLERALSFIKECELLEKTNVLFSCIFDKIQPAEVVEFMKNNKLIEARIQLQLHKYIWGPTVKGV

SEQ ID NO: 29308 - protein, 222 aa, Clostridium chromiireducens
  REGION 1..222: note = tr|A0A1V4IC14|A0A1V4IC14_9CLOT 7-carboxy-7-deazaguanine synthase OS=Clostridium chromiireducens OX=225345 GN=queE PE=3 SV=1
MFNVIEKFLSIDGEGPTSGELATFVRFQGCNLRCSWCDTTYSWDKENIYERLNSKDIYNYIKENKAKNVTLTGGEPLVQDNIDELLELLNSDNNLKVHIETNGSVDIEPFKKRYIENNISYIVDFKLPSSHMTEKMNLNNLEVVGLDDVYKFVVGSREDLQMAYDIIRRYDLTSKCLVYLSPVSGNIDMQEIVEFMKDKNLNNVKLQIQLHKIIWDKNARGV

SEQ ID NO: 29309 - protein, 220 aa, unidentified
  source 1..220: note = [Clostridium] cocleatum
  REGION 1..220: note = tr|A0A1I0EYN7|A0A1I0EYN7_9FIRM 7-carboxy-7-deazaguanine synthase OS=[Clostridium] cocleatum OX=69824 GN=queE PE=3 SV=1
MNKYKVIEKFISINGEGSRAGQLSAFIRFNYCNLNCSYCDTKYANTVDASYELLTEQDILDYLNDNNVINVTLTGGEPLIQDNIDILINLLLENNYSVEIETNGSIDIKPFINKKRPIFTLDYKTPSSNMENKMYLNNYQYLTKNDVVKFVVGNYDDLNKTKEIINTYDLTNHAKVYLSPVFGMIEPSTIVDYMIKHQMNDVYMQLQMHKFIWDVNQRGV

SEQ ID NO: 29310 - protein, 222 aa, Clostridium colicanis
  REGION 1..222: note = tr|A0A151AR20|A0A151AR20_9CLOT 7-carboxy-7-deazaguanine synthase OS=Clostridium colicanis DSM 13634 OX=1121305 GN=queE PE=3 SV=1
MTHYKVAEKFISLNGEGVLVGQPAVFIRFHGCNLSCSFCDTTWANEKDAAYSLMTEHQIYEYIKGTGIKNVTLTGGEPLLVPAIEELLCLLSSDQCLHVEIETNGSIDLSPFANIQNPPSFTMDYKLPSSLMEDKMLVSNFKILSKKDTVKFVVGNMEDLNRAREVIHEYDLANKCHVLISPVYGRIKLDKIADYLIKHRMNNVAMQLQMHKIIWEPNRRGV

SEQ ID NO: 29311 - protein, 221 aa, unidentified
  source 1..221: note = Clostridium combesii
  REGION 1..221: note = tr|A0A2G7HEE3|A0A2G7HEE3_9CLOT 7-carboxy-7-deazaguanine synthase OS=Clostridium combesii; OX = 39481 GN=queE PE=3 SV=1
MDFKVVERFVSINGEGRRCGQLAIFIRFAGCNLNCSYCDTLWANEKDVPYEVLSSKDIYEYIKSKEVKNVTLTGGEPLLQKGIMELLKLLSKDKELYVEIETNGSILLDEFLNIENSPSFTMDYKLPLSNMENKMALDNFKYLTKKDTVKFVSGSIEDLEKAREIINKYNLVDKTNVYISPVFGKINLDTIVEFIKNNRMNGVNLQLQLHKIIWEPSKRGV

SEQ ID NO: 29312 - protein, 169 aa, unidentified
  source 1..169: note = Clostridium coskatii
  REGION 1..169: note = tr|A0A166S605|A0A166S605_9CLOT Anaerobic ribonucleoside-triphosphate reductase-activating protein; OS = Clostridium coskatii OX=1705578 GN=queE PE=3 SV=1
MGCKKIRLAGIAYESLVNGPGMRRVFFAQGCRHNCKGCFNPSTHDFKGGQLKDIDKLVCDIKDNPMVSGVTFSGGDPFEQPEEFAYMADKIKELNLNIWCYTGYTFESIVNGSDMAKKCLLNNVDVLVDGKFEENKKDTKLKFKGSSNQRIIDVKKSLDSNDVVVLTFS

SEQ ID NO: 29313 - protein, 220 aa, Clostridium cylindrosporum
  REGION 1..220: note = tr|A0A0J8D839|A0A0J8D839_CLOCY 7-carboxy-7-deazaguanine synthase OS=Clostridium cylindrosporum DSM 605 OX=1121307 GN=queE PE=3 SV=1
MFNIIEKFLSVDGEGPTSGELATFIRFFNCNLRCSWCDTTYSWDRYNISEVLSARDIYDYIKGNGARNVTLTGGEPLIQDGIENLLDMLNKDSDLVVHIETNGSIDILPFKERFQNISFIVDYKLPKSGMTNRMNTGNLKSVEIDDVYKFVVGSREDLDVAYSIIKEHELTSKCLVYFSPVLGEIEMETIVDFMKEKKLNEVRLQVQLHKVIWDKDARGV

SEQ ID NO: 29314 - protein, 222 aa, Clostridium diolis
  REGION 1..222: note = tr|A0A2P8RLY3|A0A2P8RLY3_9CLOT 7-carboxy-7-deazaguanine synthase OS=Clostridium diolis; OX = 223919 GN=queE PE=3 SV=1
MFNIIEKFLSIDGEGPTSGELATFIRFQGCNLRCSWCDTTYSWDKENTSEVLTAEEIYKYIKENKVTNVTLTGGEPLIQKNIHELLELLNSDDNLKVHIETNGAVNIGTFKNKFINNNISYIIDFKLPSSNMMDRMDFNNLSIIESGDVYKFVIGSKEDLQIAYEIICKYNLTSKCFVYLSPVSGNIEMQEIVEFMKDKNLNKVRLQVQLHKIIWDKNARGV

SEQ ID NO: 29315 - protein, 222 aa, Clostridium diolis; identical to SEQ ID NO: 29300
  REGION 1..222: note = tr|A0A5A5ULG4|A0A5A5ULG4_9CLOT 7-carboxy-7-deazaguanine synthase OS=Clostridium diolis; OX = 223919 GN=queE PE=3 SV=1

SEQ ID NO: 29316 - protein, 222 aa, Clostridium disporicum
  REGION 1..222: note = tr|A0A174ELU8|A0A174ELU8_9CLOT 7-carboxy-7-deazaguanine synthase OS=Clostridium disporicum OX=84024 GN=queE PE=3 SV=1
MVKYKVVEKFVSINGEGKKAGQLAVFIRFQGCNLRCSYCDTMWANEKDVEYEYMSCEDIYNYVKENNVTNITLTGGEPLLQKGISSLIKMLMEDGNYQVEIETNGSISIEEFMKLDKPPAFTIDYKLPASGMEEAMDKSNFELLQKKDTVKFVISDMNDLIVTKNIIKKYNLIEKCSVYLSPVFNKIDSKEIVNFMIDNNLNKVNVQIQMHKIIWDSNSRGV

SEQ ID NO: 29317 - protein, 221 aa, Clostridium estertheticum
  REGION 1..221: note = tr|A0A1J0GE58|A0A1J0GE58_9CLOT 7-carboxy-7-deazaguanine synthase OS=Clostridium estertheticum subsp. estertheticum OX=1552 GN=queE PE=3; SV = 1
MEYKVVEKFISVNGEGPLSGQLVVFIRFAGCNLNCSYCDTTWANEKDASYNLMTPDDIYEYIKSTQIRNVTLTGGEPLLQEGIIELLNVLSIDNSIHIEIETNGSINLSKFANIENPPSFNMDYKLPSSNMEGPMDLNNFAYLTYKDTVKFVASSMEDLQKSKRIIDKYALTNKTNVYISPVFGQIDLEKIVEFMKSNKMNGVNLQVQLHKIIWDPNKRGV

SEQ ID NO: 29318 - protein, 221 aa, Clostridium felsineum
  REGION 1..221: note = tr|A0A1S8L3U1|A0A1S8L3U1_9CLOT 7-carboxy-7-deazaguanine synthase OS=Clostridium felsineum DSM 794 OX=1121310 GN=queE_2 PE=3 SV=1
MNYKVVEKFISINGEGLKAGKLSTFIRFAGCNLNCVYCDTKWANEENVKYTLMTENEIYSYIKETGVKNVTLTGGEPLLQNNIKELLSLLSSNNDLNVEIETNGSINLEAFLDYKNMPSFTMDYKLPDSGMETFMKTSNFKFLTMKDVIKFVVSSLKDLEKVTELIKEFKLTHKTNVYISPVFGKISPETIVEFMKNNKLNDVTLQIQIHKIIWNPNKRGV

SEQ ID NO: 29319 - protein, 498 aa, Clostridium felsineum
  REGION 1..498: note = tr|A0A1S8LIQ6|A0A1S8LIQ6_9CLOT 7-carboxy-7-deazaguanine synthase OS=Clostridium felsineum DSM 794 OX=1121310 GN=queE_1 PE=4 SV=1
MINYNNTFYEVNDGIVFNKIDERILVYKNKFYELKGDNLEIFKLLISRGKFNLEDRFKRKFLILYKIGLIKECTYGIKELIISKDTNIFKYENKFYIVNFKYGNINELSENDYKKLKAKDLSLSESSITDLLIKNYLQYKTNKESINNKEIKDKRVYIIFSYNCNMQCVYCFESHVNKNHISQDTFNKILNLVKDIDSRYNQTIVLYGGEPLLDENYNCIQALFNNELKRTKFDIITNGTNIDRYKELFLEFREKINDFIITLDGTEDIHNKRRRFGSNSFTIIIKNIETLIKNNFTVKIRINLDDKNISCQADLIKYLNEIFRENTQKLVIEYHRVEEKKNPLYEPISFKKLYELAKNNKSSNILVLYNDEIINRFINPSFYCKNEYYSDNYCDYYNNIVIDFNGSIYHCNEAMGNKDMIIEHIDRFKLDSLYENKTNDLTEKCKWCRYFVICKGNCFMENKIKKDLINRPVCRRKQYDDLINFIIENNSVKGIGNI

SEQ ID NO: 29320 - protein, 222 aa, unidentified
  source 1..222: note = [Clostridium] fimetarium
  REGION 1..222: note = tr|A0A1I0RJ12|A0A1I0RJ12_9FIRM 7-carboxy-7-deazaguanine synthase OS=[Clostridium] fimetarium OX=99656 GN=queE PE=3 SV=1
MSQYKVVEKFVSINGEGVFAGQLAVFIRFQGCNLSCSFCDTLWANAKNAPYTLMSEHQIYDYIKETGIKNVTLTGGEPLLVPDILTLLQLLATDQFLRVEIETNGSIALDSFVGISNSPTFTMDYKLPGSLMEANMLVSNFNILSKQDTVKFVVGSTEDLNRAKDIITIYGLTTKCHVYISPVFGKIQLQEIVDFLIANCLNDVTMQIQMHKVIWDPNKRGV

SEQ ID NO: 29321 - protein, 209 aa, Clostridium formicaceticum
  REGION 1..209: note = tr|A0A1D9FS23|A0A1D9FS23_9CLOT 7-carboxy-7-deazaguanine synthase OS=Clostridium formicaceticum OX=1497 GN=queE PE=3 SV=1
MKVNEIFLSIQGEGISTGYPTVFLRLAGCNLRCRYCDTSYSYAEGEEMTVEEVFKKVTSYGYKRVCLTGGEPLLQQEIKILLAALKEYEINIETNGSVDICLFPLGENHRFTMDIKTPSSGEADSNCLSNFKYLREKDEIKIVLGDYQDYLWARDLLKQHYKKGIITFSPIYNRIDPKKIVQWMLEDRIDARFQLQLHKILWHPEARGV

SEQ ID NO: 29322 - protein, 221 aa, Clostridium gasigenes
  REGION 1..221: note = tr|A0A1H0NUM2|A0A1H0NUM2_9CLOT 7-carboxy-7-deazaguanine synthase OS=Clostridium gasigenes; OX = 94869 GN=queE PE=3 SV=1
MNFKVVEKFVSINGEGRLCGQLAIFIRFAGCNLNCSYCDTTWANEKNVSYDLMSSMDIYEYIKSTKVKNITLTGGEPLLQNGILELLEVLSKDTELSVEIETNGSVLINKFCNIKNPPSFTMDYKLPSSNMEDKMDLANFEYLTKNDTVKFVCGSLDDLSKSKYIIDKYNLIDKASVYISPVFGKINISDMVDFMKDNNMNNVNLQIQIHKIIWDKNKRGV

SEQ ID NO: 29323 - protein, 199 aa, unidentified
  source 1..199: note = [Clostridium] hiranonis
  REGION 1..199: note = tr|A0A5C0T3B0|A0A5C0T3B0_9FIRM 7-carboxy-7-deazaguanine synthase OS=[Clostridium] hiranonis OX=89152 GN=queE PE=4 SV=1
MMTIFYPIGDSLYVNLTNKCPCRCVFCVREEHETVGNNNSLWLDHDPSMEEIKADLERFNLDDYKEIVFCGFGEPMMRMDDLIETAKYIKSKADIKTRINTNGLGDLIHEKNTAECIKDCIDSVSISLNAPDKESYCRVTRPKFGEQSFEAMLKFAEECRDCGINIAFSVVDEITPEEIEKSKELAESLGVKLRVRHKR

SEQ ID NO: 29324 - protein, 221 aa, Clostridium homopropionicum
  REGION 1..221: note = tr|A0A0L6Z6T3|A0A0L6Z6T3_9CLOT 7-carboxy-7-deazaguanine synthase OS=Clostridium homopropionicum DSM 5847 OX=1121318 GN=queE_2 PE=3 SV=1
MNFKIVEKFVSVNGEGPLCGQLAVFIRFSGCNLNCSYCDTAWANKIDIPYELMTDKDIYDYIKSTGIKNITLTGGEPLIQEGIIELLKRLSKDRELHVEIETNGSVIFDKFSHIENPPSFTMDYKLPSSNMENKMALDNFKYLSKKDTVKFVSGSIEDLERAKNLIDTYSLVDRTRLYISPVFGKISMDKIVEFMKYNKMNGVNLQLQLHKVIWDPKKRGV

SEQ ID NO: 29325 - protein, 158 aa, Clostridium homopropionicum
  REGION 1..158: note = tr|A0A0L6Z7F0|A0A0L6Z7F0_9CLOT Anaerobic ribonucleoside-triphosphate reductase-activating protein; OS = Clostridium homopropionicum DSM 5847 OX=1121318; GN = queE_1 PE=3 S V=1
MKLRVAGFLDNTMVNGKGLRSTLFLSGCNHNCEGCQNKEMQSFQYGDDVELEKINERIKRNIPLISGVTFSGGEPFEQAKELTELAKKIKEENLDIWCYTGYTIEEILKSNDEYKLNLLKQLDVLVDGKFNKHLVEGALKYTGSRNQRIINLKEVNIF

SEQ ID NO: 29326 - protein, 275 aa, unidentified
  source 1..275: note = [Clostridium] hylemonae
  REGION 1..275: note = tr|A0A5C0STE7|A0A5C0STE7_9FIRM 7-carboxy-7-deazaguanine synthase OS=[Clostridium] hylemonae DSM 15053 OX=553973 GN=queE_2 PE=4 SV=1
MKKECRVCMHRCVLDEGQTGRCRARMNRGGEIICGNYGHITALALDPIEKKPLRRFFPGTKVLSVGSYGCNLNCPFCQNHDISMRGEDRRRNVFLTPEELAERAAELGEKGNIGIAFTYNEPMISYEYIRDTALLVRKAKMKSVVVTNGSVTEETLRRVLPYIDAMNIDLKGFTEEYYHMLGGDLETVKHFIQCAAQECHVELTTLIVPGKNDSAGEMRELARWAAGIDRKLPLHVTRFFPAFRMEDGCPTDIQTVYRLAGEAAKYLDHVYTGNC

SEQ ID NO: 29327 - protein, 198 aa, unidentified
  source 1..198: note = [Clostridium] hylemonae
  REGION 1..198: note = tr|C0C518|C0C518_9FIRM 7-carboxy-7-deazaguanine synthase OS=[Clostridium] hylemonae DSM 15053 OX=553973; GN = queE_1 PE=4 SV=1
MADILYTYKNQVYANITNKCDCRCTFCIRSHEDSVGDAKTLWHKTDPSLEEVIAAMDAFDFTGYDELVYCGYGEPTCALETLTASAKYAKEKYGVRIRVNTNGLANLYYGRDIIPALAGIVDSVSISLNAPTSEEYDKVTRPRFTGAFDALLQFASECKDYIPDVRLTIVDVLPQDKIEASQALADSLGITLRIRKYA

SEQ ID NO: 29328 - protein, 258 aa, unidentified
  source 1..258: note = [Clostridium] indolis
  REGION 1..258: note = tr|A0A3P6KCQ0|A0A3P6KCQ0_9FIRM Putative 7-cyano-7-deazaguanosine (PreQ0) biosynthesis protein QueE; OS = [Clostridium] indolis OX=69825 GN=NCTC11811_01034 PE=4; SV = 1
MTSSNSALPHFKKPISISHGPWEAYNDFSEHNQLTLSNIEFTTTNLFNMRCSHCAVGYTLQTSDPTPLPMDLIYRRLDEVPNLKTISITGGEPMFSKKSIKNVVKPLLKYAFDRGIYVQMNSNLILSLDRYLEIAEYIDVMHISHNWGTIDTFTEVGFGAMQKQPPLKAKLKLYDQMLLNTRTLSEQGMFISAETMLNKSTQPHLNKIHNEIVYDMKCQRHEIHPMYPADFASQLEVLSLREIKETIHYLLDHRHPGT

SEQ ID NO: 29329 - protein, 238 aa, unidentified
  source 1..238: note = [Clostridium] indolis
  REGION 1..238: note = tr|A0A3P6JDR5|A0A3P6JDR5_9FIRM 7-carboxy-7-deazaguanine synthase OS=[Clostridium] indolis; OX = 69825 GN=queE PE=3 SV=1
MSKIPVLEIFGPTIQGEGRVIGRKTMFVRTAGCDYRCSWCDSSFTWDGSAKEDIRMMNAEEIYAALYDLAGESFNHVTISGGNPALIRGIQGLVDLFEEKGIQSALETQGSKFQPWMTQIDDLTISPKPPSSMMKPNLPILDDVIAKCVPETLNLKVVIFDDDDYEFAKMIHHRYPDTPFYLQVGNPYLDGDYVEAHTEKLLSLYETLVDRVMVSNDMNNVYVLPQLHTLLWSNKKGV

SEQ ID NO: 29330 - protein, 221 aa, Clostridium magnum
  REGION 1..221: note = tr|A0A161YNA9|A0A161YNA9_9CLOT 7-carboxy-7-deazaguanine synthase OS=Clostridium magnum DSM 2767 OX=1121326 GN=queE PE=3 SV=1
MNFKVIEKFVSINGEGLSCGQLAVFIRFAGCNLNCSYCDTTWANEKDVSYELMSSEDIYEYIKSTEVKNITLTGGEPLLQEGILDLLKKLSKDKGLSVEIETNGSILLSNFSDIDNPPSFTMDYKLPSSNMEDKMSLGNFKHLTKRDTIKFVAGSMEDLEKVKYLIDKFKLTETTNVYISPVFGKINMDKIVEFMKDNKMNGVNLQIQLHKVIWNPNKRGV

SEQ ID NO: 29331 - protein, 222 aa, Clostridium novyi
  REGION 1..222: note = tr|A0Q1F6|A0Q1F6_CLONN 7-carboxy-7-deazaguanine synthase OS=Clostridium novyi (strain NT) OX=386415; GN = queE PE=3 SV=1
MNYKVVEKFISINGEGKSSGQLSVFIRFAGCNLNCSYCDTKWANEEKAPYSIMTEKEIYEYIKLTEIKNVTLTGGEPLLQEGILTLLKLLCSDENLNIEIETNGSIPLKDFTSIKNNPPKFTMDYKLPYSNMENHMITDNFNYLTKKDVIKFVVANKNDLQKLKSIIYKYNLIDKTNIYISPVYGEIEMNSIVEFMKENKLNGVTLQMQLHKIIWDPNKRGV

SEQ ID NO: 29332 - protein, 222 aa, Clostridium novyi
  REGION 1..222: note = tr|A0A0A0IBW8|A0A0A0IBW8_CLONO 7-carboxy-7-deazaguanine synthase OS=Clostridium novyi A str. 4552 OX=1444289 GN=queE PE=3 SV=1
MDYKVVEKFISINGEGKSSGQLSVFIRFAGCNLHCSYCDTKWANEKKVPFCIMTEEEIYKYIQSTKIKNVTLTGGEPLLQEGILTLLKLLCSDKNLSIEIETNGSIPLKDFITIKNNSPNFTMDYKLPCSNMENHMITDNFNYLTKKDVIKFVVANKNDLQKLKSIMYKYNLIDKTNIYISPVYGEIEMNLIVEFMKENKLNGVTLQMQLHKIIWDPNKRGV

SEQ ID NO: 29333 - protein, 250 aa, Clostridium pasteurianum
  REGION 1..250: note = tr|A0A0H3J6Q1|A0A0H3J6Q1_CLOPA 7-carboxy-7-deazaguanine synthase OS=Clostridium pasteurianum DSM 525 = ATCC 6013 OX=1262449 GN=queE PE=3; SV = 1
MPQRAYIKEIFKSIQGEAEYVGYEQIFVRFIGCNIKCNYCDTDINKSEHLKFYKNWDLNNYESVKNPVSPEELIKLIEKLDPENSVHSISLTGGEPLINIDFLKEFLPKFKRARDTKIFLETNGTLAEELSGIAEYVDIVSMDLKLASYLEDKKNLMNEHRLFLKQCVENNIATYVKVVIDNNFNQEELNNYLALVEPYRNNIKVYIQPMMQGDKMLVNSEKLRAAFELCKSKGLVPRIIPQIHKMLSLN

SEQ ID NO: 29334 - protein, 250 aa, Clostridium pasteurianum
  REGION 1..250: note = tr|R4K1R4|R4K1R4_CLOPA 7-carboxy-7-deazaguanine synthase OS=Clostridium pasteurianum BC1 OX=86416 GN=queE; PE = 3 SV=1
MPQRTYIKEIFKSIQGEAEYVGYEQIFVRFIGCNIKCNYCDTDIDRCEEVTVYKNWDSKDYKTLRNPLDSAGLIKIIKELDAEERVHSISLTGGEPLINIDFLKEFLPEFKKVCSTKVFLETNGILHEELHSIAKYVDIVSMDLKLASYLRNRENFIPQHSEFLNECIENNIATYVKIVLDDNFSLEELNNYLDVVEPYKHKVNVYIQPMMDGDKMLISSQKLKLAFDCCREININVRIIPQIHKMLCLN

SEQ ID NO: 29335 - protein, 222 aa, unidentified
  source 1..222: note = [Clostridium] polysaccharolyticum
  REGION 1..222: note = tr|A0A1I0BGA6|A0A1I0BGA6_9FIRM 7-carboxy-7-deazaguanine synthase OS=[Clostridium] polysaccharolyticum OX=29364 GN=queE PE=3 SV=1
MATYQVAEKFVSINGEGTKAGQLAVFIRFKGCNLSCSYCDTGWANHKDTFYESMTEQDILNYILETGVQNVTLTGGEPLLQKNIEILLKLLEKEKTLQVEIETNGSISIEKYRVSDNFPSFTMDYKLPDSKMEQKMCLGNMAKLRRKDTVKFVTGSEKDLERAAELIKQYDLINRCPVYLSPVFGQIEPEKMVAFMKEKNLNGVSLQLQMHKFIWNPEKRGV

SEQ ID NO: 29336 - protein, 237 aa, unidentified
  source 1..237: note = [Clostridium] populeti
  REGION 1..237: note = tr|A0A1I6I5Y9|A0A1I6I5Y9_9FIRM 7-carboxy-7-deazaguanine synthase OS=[Clostridium] populeti OX=37658 GN=queE PE=3 SV=1
MDNLTDVKNNQIAMVEIFQSIEGEGTKAGTPTTFIRLFGCNLRCSWCDTKYSYEPDKPRFYASVEQILEQATTYGSSSVCLTGGEPLLSFKNAYALLLGLGELDFIKDIHIETNGSIDLTPYCKLRNDNANLNQKVRFVVDYKPISSGQNEKMNLNNFSLLSNRDEIKFVIGSEEDFLLARTVIEQYYQSGQILFSPLWGKIEPARLVSLMLDSKLLHARLSLQLHKMIWGQDKEGV

SEQ ID NO: 29337 - protein, 222 aa, Clostridium puniceum
  REGION 1..222: note = tr|A0A1S8THW1|A0A1S8THW1_9CLOT 7-carboxy-7-deazaguanine synthase OS=Clostridium puniceum; OX = 29367 GN=queE_1 PE=3 SV=1
MFNIVEKFLSIDGEGPSSGELAAFIRFQGCNLRCSWCDTTYSWDKESICEVLNAKEIYDYIKETGVINVTLTGGEPLIQENIDELLTLLNSDDTLKIHIETNGAVDIEPFKNRHKKNNISYIIDFKLPSSKMSDKMNLNNLKIVKKNDVYKFVVGSNEDLQMAYDLIIKYELASNCLVYLSPVSGNIDMEEIVEFMKEKKINKVRLQIQLHKIIWDKNARGV

SEQ ID NO: 29338 - protein, 203 aa, Clostridium puniceum
  REGION 1..203: note = tr|A0A1S8SZN1|A0A1S8SZN1_9CLOT 7-carboxy-7-deazaguanine synthase OS=Clostridium puniceum; OX = 29367 GN=queE_2 PE=4 SV=1
MDIKIPFYEKYKEKIRCRVCPRNCILDEGKLGICRVRTLKSSVPTAINYGEATSAGVDSIEKKPLYHFKPSKNILSLGSFGCNMTCTFCQNCEISQRKPKAEYINIKKLINIIPTIENNARIAFTCNEPFMWYECVYEAAKKIKKNNSGTSVVIVTNGYINEEPLLKLLPYVDAMNIDLKGYTNRYYNKIYLYREFLLARKNS

SEQ ID NO: 29339 - protein, 221 aa, Clostridium roseum
  REGION 1..221: note = tr|A0A1S8LZJ2|A0A1S8LZJ2_9CLOT 7-carboxy-7-deazaguanine synthase OS=Clostridium roseum; OX = 84029 GN=queE PE=3 SV=1
MNYKVVEKFISINGEGLKAGKLSTFIRFAGCNLNCVYCDTKWANEENVKYTLMTENEIYSYIKETGVKNVTLTGGEPLLQNNIKELLSLLSSNNDLNVEIETNGSINLEAFLDYKNMPSFTMDYKLPDSGMETFMKTSNFKFLTRKDVIKFVVSSLKDLEKVTELIKEFKLTHKTNVYISPVFGKISPETIVEFMKNNKLNDVTLQIQIHKIIWNPNKRGV

SEQ ID NO: 29340 - protein, 222 aa, Clostridium saccharobutylicum
  REGION 1..222: note = tr|A0A1S8NBM5|A0A1S8NBM5_CLOSA 7-carboxy-7-deazaguanine synthase OS=Clostridium saccharobutylicum OX=169679 GN=queE_1 PE=3 SV=1
MFNIVEKFLSIDGEGPTSGEIATFIRFQGCNLRCSWCDTVYSWGKESTNEKLSANEIYQYIKENGATNVTLTGGEPLIQENIDELLNILNKDENLMVHIETNGAVNIGTFKEKHKGGNISYIVDFKLPSSNMTNSMDMNNLKIVESSDVYKFVVGSSEDLNMAYDIIKKYDLTSKCLVYLSPVCGNIEMKDIVEFMKEKKLNKVRLQVQLHKVIWDKSERGV

SEQ ID NO: 29341 - protein, 216 aa, Clostridium saccharobutylicum
  REGION 1..216: note = tr|A0A1S8MYZ3|A0A1S8MYZ3_CLOSA 7-carboxy-7-deazaguanine synthase OS=Clostridium saccharobutylicum OX=169679 GN=queE_2 PE=4 SV=1
MTILYTAKNGIYTNLNDILKEEKNIKHNVYVNLTNKCSCACTFCLRNTKEMDKSNSLWLDREPTSDEVISEFEKYDLNNFNEIIFCGFGEPTMALDTLLKIATYLKNKNSNLPIRINTNGLCDLVYKKEIAPLFKELVDTISISLNASNAKDYLNLTRNNFGLESFDAMLKFAVNCKTYIPNVVMTVVDCIGQEEINACQAICDKIGVTLRVRPFE

SEQ ID NO: 29342 - protein, 222 aa, Clostridium saccharoperbutylacetonicum
  REGION 1..222: note = tr|M1MGL2|M1MGL2_9CLOT 7-carboxy-7-deazaguanine synthase OS=Clostridium saccharoperbutylacetonicum N1-4(HMT) OX=931276 GN=queE PE=3 SV=1
MFNIVEKFISVDGEGPSSGELATFIRFQGCNLRCTWCDTTYSWDKSSICEILSADEIYNYIKENNVINVTLTGGEPLIQKNIDELLKLLNDDENLKVHIETNGAVDIEPFKKIYNSKNICYIVDYKLPSSQMTNKMSNNNLKVIGKSDVYKFVIGSIEDLEHAYDIIIRNDLTSKCIVYFSPVSGKIDLKEIVEFMKNKRLNKVRLQTQLHKIIWDNNARGV

SEQ ID NO: 29343 - protein, 198 aa, Clostridium scindens
  REGION 1..198: note = tr|B0N9A4|B0N9A4_CLOS5 7-carboxy-7-deazaguanine synthase OS=Clostridium scindens (strain ATCC 35704 / DSM 5676 / VPI 13733 / 19) OX=411468 GN=queE_1 PE=4 SV=1
MADILYTYKDQVYANITNKCNCRCRFCIRSHEDGVGDADTLWHKTDPTLEQIKEAMDAFDFAGYKELVFCGYGEPTCAIDNLVASAKYAKEKYGLSIRVNTNGLANLYYGKDVIPLLAQAVDSVSISLNAPTSEQYNEVSRPQLDNAFEGLLQFATECKGQIPSVKLTIVDVLPKEEIEACKKLAASLDIPLRIRRYA

SEQ ID NO: 29344 - protein, 222 aa, Clostridium sp.
  REGION 1..222: note = tr|A0A1M4NEB2|A0A1M4NEB2_9CLOT 7-carboxy-7-deazaguanine synthase OS=Clostridium sp. N3C; OX = 1776758 GN=queE_1 PE=3 SV=1
MANYKVVEKFISLNGEGILAGQPAVFIRFHGCNLSCSYCDTTWANEKDAPFSLMTEEEIYEYIKESGIKNVTLTGGEPLLVPDIGQLLKLLSTNQDIHVEIETNGSIDLSPFANIPNAPSFTMDYKLPSSFMEDKMLASNFQILRKKDAVKFVVGNREDLNRTREVIYEYDLTSRCHVLISPVYGKIQLAEIADYLIEYGMNNVAMQLQTHKIIWGPNERGV

SEQ ID NO: 29345 - protein, 221 aa, Clostridium sp.
  REGION 1..221: note = tr|R5K9I0|R5K9I0_9CLOT 7-carboxy-7-deazaguanine synthase OS=Clostridium sp. CAG:632 OX=1262830 GN=queE; PE = 3 SV=1
MIYKVVETFISINGEGQHAGELALFIRFAGCNLNCNYCDTRWANQPDVVYQEMTETEIKALVTDSGVRNVTLTGGEPLLQPGMYQLLETMGSLPDIRIEIETNGSVDIGPYMTLIRRPAFTLDYKLPGSGMEAGMNTENYRYLTKEDTVKFVISDKADLTRAREIIEQYQLEGRCGIYYSPVFGRIRPAEIVDDMIEHRLNGVHMQLQMHKFIWDPEQRGV

SEQ ID NO: 29346 - protein, 221 aa, unidentified
  source 1..221: note = [Clostridium] spiroforme
  REGION 1..221: note = tr|A0A1Y4QH40|A0A1Y4QH40_9FIRM 7-carboxy-7-deazaguanine synthase OS=[Clostridium] spiroforme OX=29348 GN=queE PE=3 SV=1
MNRYKVVEKFISINGEGSRVGQLAAFIRFHYCNLNCSYCDSKYANGDNAKYDLLTSTDILNYLNENKVINVTLTGGEPLLQDNINDLINILIDHGYSVEIETNGSVDIAPFINGMNRPIFTLDYKLPGSNMENKMNLNNYQYLTKVDVVKFVIGDLEDLNRTKQIIDKYDLSNNVKVYFSPVFDKIEPSVIVDYMIKHHLNNITLQLQLHKFIWDVNKRGV

SEQ ID NO: 29347 - protein, 217 aa, Clostridium sporogenes
  REGION 1..217: note = tr|A0A1V9IV41|A0A1V9IV41_CLOSG 7-carboxy-7-deazaguanine synthase OS=Clostridium sporogenes OX=1509 GN=queE PE=3 SV=1
MVESFVSINGEGRRCGQLAIFIRFAGCNLNCSYCDTLWANEKDVPYEVLSSKDIYEYIKSKEVKNVTLTGGEPLLQKGIMELLKLLSKDKELYVEIETNGSILLDEFLNIENSPSFTMDYKLPLSNMENKMALDNFKYLTKKDTVKFVSGSIEDLEKAREIINKYNLVDKTNVYISPVFGKINLDTIVEFMKNNRMNGVNLQLQLHKIIWEPSKRGV

SEQ ID NO: 29348 - protein, 217 aa, Clostridium sporogenes
  REGION 1..217: note = tr|A0A1V9IWJ0|A0A1V9IWJ0_CLOSG 7-carboxy-7-deazaguanine synthase OS=Clostridium sporogenes OX=1509 GN=queE PE=3 SV=1
MVEKFVSINGEGRRAGQLAIFIRFAGCNLNCSYCDTLWANEKDVSYELMTSEDIYEYIKSQEIKNITLTGGEPLLQKGIIELLKLLSKDKELYVEIETNGSVLLDKFLGIENPPSFTMDYKLPSSNMENRMVLDNFKYLTDKDTVKFVSGSIEDLKKAKEIIDKYSLIDKTNVYISPVFGKIHLDNIVKFMKYNRMNGVNLQVQLHKIIWDPNKKGV

SEQ ID NO: 29349 - protein, 221 aa, unidentified
  source 1..221: note = Clostridium taeniosporum
  REGION 1..221: note = tr|A0A1D7XKS0|A0A1D7XKS0_9CLOT 7-carboxy-7-deazaguanine synthase OS=Clostridium taeniosporum OX=394958 GN=queE PE=3 SV=1
MNFKVVEKFISINGEGPLCGQLAVFIRFAGCNLDCSYCDTTWANEKNVSYEWMASKDIYEYIKSTKVRNITLTGGEPLLQNGIIELLELLSKDKKIHVEIETNGSVLINKFLTIENPPSFTMDYKLPSSNMEDKMELENFKYLTEKDTVKFVSGSIEDLKKAKYIIDKYNLIDKTSVYISPVFGKINMNDIVEFMKENNMNKVNLQIQLHKVIWEPSKRGV

SEQ ID NO: 29350 - protein, 221 aa, Clostridium tagluense
  REGION 1..221: note = tr|A0A401UUJ5|A0A401UUJ5_9CLOT 7-carboxy-7-deazaguanine synthase OS=Clostridium tagluense; OX = 360422 GN=queE PE=3 SV=1
MKFKVVEKFTSVNGEGPLSGQLVVFIRFAGCNLNCSYCDTTWANTPDVCYDLMTATDIYKYIKSTEIRNVTLTGGEPLLQEGIIELLEMLSKDSLLHIEIETNGSVALNEFSIIENPPSFNMDYKLPWSNMEDKMNLDNFASLSYKDTVKFVCGSNEDLQKTKFIIDKYELSNKTNVYISPVFGQIDLEMIVDFMKDNKMNGVNLQIQLHKIIWDPNKRGV

SEQ ID NO: 29351 - protein, 222 aa, Clostridium tepidiprofundi
  REGION 1..222: note = tr|A0A151B428|A0A151B428_9CLOT 7-carboxy-7-deazaguanine synthase OS=Clostridium tepidiprofundi DSM 19306 OX=1121338 GN=queE PE=3 SV=1
MKYRVVEKFTSINGEGKLSGQLSVFIRFAGCNLNCSYCDTQWANKKDVKYELMTAKEIYEYIKSTNIKNVTLTGGEPLIQDGILELLSVLSKDCELSVEIETNGSVDISLFSGIKFNPPKFTMDYKLASSNMEQYMLVNNFNFLGKKDIVKFVVGNIEDLKRAKYIIEEYDLANKTNVYISPVFGKIYMKDIVEFMKINTMNDVTLQMQLHKIIWDPQKRGV

SEQ ID NO: 29352 - protein, 221 aa, unidentified
  source 1..221: note = Clostridium tepidum
  REGION 1..221: note = tr|A0A1S9I1E9|A0A1S9I1E9_9CLOT 7-carboxy-7-deazaguanine synthase OS=Clostridium tepidum; OX = 1962263 GN=queE PE=3 SV=1
MDFKVVEKFVSINGEGRRAGQLAIFIRFAGCNLNCSYCDTSWANEKEVYYELMTSEDIYKYIKSQDIKNITLTGGEPLLQKGIVELLKLLSQDKELNIEIETNGSILLDKFLGIENPPSFTMDYKLPSSNMENRMALDNFKYLTNKDTVKFVSGSIEDLKKATEIIDKYSLINKTNIYISPVFGKIDLENIVKFMKDNKMNGVNLQVQLHKIIWDPSKKGV

SEQ ID NO: 29353 - protein, 221 aa, Clostridium tetanomorphum
  REGION 1..221: note = tr|A0A037Z8R4|A0A037Z8R4_CLOTT 7-carboxy-7-deazaguanine synthase OS=Clostridium tetanomorphum DSM 665 OX=1230342 GN=queE PE=3 SV=1
MQFKVVEKFTSINGEGSLSGQLAVFIRFAGCNLSCSYCDTTWANKEDVSYELMTCEKIYNYIKSTRVRNVTLTGGEPLLQEGILELLEVLSKDKELHTEIETNGSVLLDKFSNIENPPSFTMDYKLPSSNMEDKMELNNFKYLTKKDTVKFVSGTMGDLEKAKHIIDKYNLIYKTNIYISPIFEKINMDTIVEFMKNNKMNGVNLQLQLHKVIWDPNKRGV

SEQ ID NO: 29354 - protein, 222 aa, unidentified
  source 1..222: note = [Clostridium] thermoalcaliphilum
  REGION 1..222: note = tr|A0A1V4IB15|A0A1V4IB15_9FIRM 7-carboxy-7-deazaguanine synthase OS=[Clostridium] thermoalcaliphilum OX=29349 GN=queE PE=3 SV=1
MNYKIVEKFVSINGEGDLSGQLSVFIRFAMCNLECSYCDTLWANDKNVKYELMNGKDIYEYIKSTKIKNITLTGGEPLIQEGILELVDFISQDSELNIEIETNGSVDISKVASLNKNNIKFTMDYKLDSSNMRNKMNIDNFKYIRNCDTVKFVVGDCDDLSVTKSIIEEYGLVNKCKVYISPVFGKIEPSEIVEFMKGNKMNGVTLQIQLHKIIWEPHKRGV

SEQ ID NO: 29355 - protein, 218 aa, Clostridium thermobutyricum
  REGION 1..218: note = tr|A0A1V4SXZ4|A0A1V4SXZ4_9CLOT 7-carboxy-7-deazaguanine synthase OS=Clostridium thermobutyricum DSM 4928 OX=1121339 GN=queE PE=3 SV=1
MNVVEIFQSIDGEANRAGNLTNFIRLAGCNLRCNYCDTDYALNKADGKEMSINEIISKLDKDIKNVTLTGGEPLWNKENAIPLLKELVSKGFNVSVETNGSINLKNYIKEFPSVSFIVDYKSPSSNMEKFMDMENFNILRDIDCVKFVVGSLEDLEKMEEVIKNTNLHKTEAEIFVSPIFEKIEPKEIVEFLLQRKLVKVRVQIQMHKVIWDPMMKGV

SEQ ID NO: 29356 - protein, 218 aa, Clostridium thermobutyricum
  REGION 1..218: note = tr|N9XJV3|N9XJV3_9CLOT 7-carboxy-7-deazaguanine synthase OS=Clostridium thermobutyricum OX=29372 GN=queE; PE = 3 SV=1
MNVVEIFQSIDGEANRAGNLTNFIRLAGCNLRCNYCDTDYALNKTDGKEMSINEIISKLDKDIKNITLTGGEPLWNEDNAKPLLKELVSNGFNVSVETNGSINLKNYIKEFPSVSFIVDYKSPSSNMEKFMDMENFNILRDIDCVKFVVGSLEDLKKMEEVIKNTNLHKAEAEIFVSPVFGEIEPKEIVEFLLKRKLVKVRVQIQMHKVIWDPMMKGV

SEQ ID NO: 29357 - protein, 222 aa, Clostridium thermopalmarium
  REGION 1..222: note = tr|A0A2T0AQG4|A0A2T0AQG4_9CLOT 7-carboxy-7-deazaguanine synthase OS=Clostridium thermopalmarium DSM 5974 OX=1121340 GN=queE PE=3 SV=1
MTHYKVAEKFISLNGEGVLVGQPAVFIRFHGCNLSCSFCDTTWANEKDAAYSLMTEHQIYEYIKGTGIKNVTLTGGEPLLVPAIEELLCLLSSDQCLHVEIETNGSIDLSPFANIQNPPSFTMDYKLPSSLMEDKMLVSNFKILSKKDTVKFVVGNMEDLNRAREVIHEYDLANKCHVLISPVYGRIKLDKIADYLIKHRMNNVAMQLQMHKIIWEPNRREV

SEQ ID NO: 29358 - protein, 221 aa, Clostridium uliginosum
  REGION 1..221: note = tr|A0A1I1GQX9|A0A1I1GQX9_9CLOT 7-carboxy-7-deazaguanine synthase OS=Clostridium uliginosum OX=119641 GN=queE PE=3 SV=1
MNFKVVEKFVSINGEGRLCGQLAVFIRFAGCNLNCSYCDTTWANEKNVSYDLMSCHDIYEYIKSTKVRNITLTGGEPLLQEGIIGLLELLSQDNKLDVEIETNGSVLIDKFSTIENPPSFTMDYKLPSSNMEDKMSLQNFKYLTKRDTVKFVSGSIEDLQKAKYIIDKYSLVDKTNVYISPVFGKINMDDIVEFMKKNNMNKVNLQIQLHKVIWEVNKRGV

SEQ ID NO: 29359 - protein, 218 aa, unidentified
  source 1..218: note = Clostridium ventriculi
  REGION 1..218: note = tr|A0A173WU06|A0A173WU06_CLOVE 7-carboxy-7-deazaguanine synthase OS=Clostridium ventriculi OX=1267 GN=queE PE=3 SV=1
MKVVEIFQSIDGEAFNAGKITNFIRLSGCNLRCNYCDTIYGQNLSDGEEMSIDDILKKLDKGIKNITLTGGEPLLNKENAYSLLNALVKEKYNVSVETNGSIDMKDFVKDFPTVAFIVDYKSPSSEMQEKMLINNFNILRPIDCVKFVVGDILDLKTMEKVYKETELVKGKTPIFVSPVFGKIELVEIVEFLKTRKLNDIRMQIQMHKIIWSPETKGV

SEQ ID NO: 29360 - protein, 223 aa, Clostridium vincentii
  REGION 1..223: note = tr|A0A2T0BDX9|A0A2T0BDX9_9CLOT 7-carboxy-7-deazaguanine synthase OS=Clostridium vincentii; OX = 52704 GN=queE PE=3 SV=1
MEYNVIEKFLSIDGEGPTAGEIATFIRFGGCNLCCKWCDTAYSIDGKIKGQTLNKEDIYRYIKDNGTKNVTLTGGEPLIQEDIEELIYFLAKDSELLIHIETNGSIPFYNFKKIENLDNVSFILDYKLPSSGMENKMDMKNYKVVSKKDVCKFVIETMEDLIKAKEIVEKFSLTEKCLVYFSPITTSIEPALIVDFMKRNKMNNIRLQIQLHKIIWSPETREV

SEQ ID NO: 29361 - protein, 222 aa, unidentified
  source 1..222: note = Cnuella takakiae
  REGION 1..222: note = tr|A0A1M5C1S8|A0A1M5C1S8_9BACT 7-carboxy-7-deazaguanine synthase OS=Cnuella takakiae; OX = 1302690 GN=queE PE=3 SV=1
MAAFVQIQLSTCEQSDMTELATKTTTLPVMEHFYTLQGEGAYMGKAAYFIRLGGCDVGCVWCDVKESWDAAKHPQWAIADLVATVKATPTEIVVITGGEPLMHDLTELTGQLKAAGLRTHIETSGSSPLSGTLDWITLSPKKFKQPLRGVLPHAHELKIVVFNKSDFDWARQWAAQVGPHCRLYIQPEWSKAAQITPLIIEFIKENPQWQLSLQVHKYINVP

SEQ ID NO: 29362 - protein, 230 aa, Cobetia crustatorum
  REGION 1..230: note = tr|A0A558HN94|A0A558HN94_9GAMM 7-carboxy-7-deazaguanine synthase OS=Cobetia crustatorum; OX = 553385 GN=queE PE=3 SV=1
MYTVKEAFYTLQGEGARAGRASVFCRFAGCNLWSGRERDRDTSVCRFCDTDFIGTDGQNGGKFREAQSLADFLASLWPEHSGIATPYVVFTGGEPLLQLDSVLIDAMHAHGFEIAVETNGTVIPPAGIDWLCVSPKGASTLIVSAGDELKLVYPQPEALPERFASLDFTHFYLQPLDTSALEALPAPAAALAHYHEVLARETPMTQCVNYCMANPQWQLSLQTHKISGID

SEQ ID NO: 29363 - protein, 230 aa, Cobetia marina
  REGION 1..230: note = tr|A0A4V5PZP6|A0A4V5PZP6_COBMA 7-carboxy-7-deazaguanine synthase OS=Cobetia marina; OX = 28258 GN=queE PE=3 SV=1
MYTVKEAFYTLQGEGARAGRASVFCRFAGCNLWSGREQDRDTSVCRFCDTDFVGTNGQNGGKFRTASELADFLASLWPEHSGIATPYVVFTGGEPLLQLDRELVDAMHARGFEIAVETNGTVTPPAGIDWLCVSPKGASELVLTGGDELKLVYPQPEALPERFVSLDFAHFYLQPLDTAALDALPAPAAAREHYREVLATDTPMNQCVSYCMANPQWQLSLQTHKISGID

SEQ ID NO: 29364 - protein, 230 aa, Cobetia marina
  REGION 1..230: note = tr|A0A4Y4GPK3|A0A4Y4GPK3_COBMA 7-carboxy-7-deazaguanine synthase OS=Cobetia marina; OX = 28258 GN=queE PE=3 SV=1
MYTVKEAFYTLQGEGARAGRASVFCRFAGCNLWSGREQDRDTSVCRFCDTDFVGTNGQNGGKFRTASELADFLASLWPEHTGIATPYVVFTGGEPLLQLDRELVDAMHARGFEIAVETNGTVAPPAGIDWLCVSPKGASELVLTGGDELKLVYPQPEALPERFVSLDFAHFYLQPLDTAALDALPAPAAAREHYREVLATDTPMNQCVSYCMANPQWQLSLQTHKISGID

SEQ ID NO: 29365 - protein, 230 aa, Cobetia sp.; identical to SEQ ID NO: 29363
  REGION 1..230: note = tr|A0A2S4K6B1|A0A2S4K6B1_9GAMM 7-carboxy-7-deazaguanine synthase OS=Cobetia sp. MM1IDA2H-1 OX=1268241 GN=queE PE=3 SV=1

SEQ ID NO: 29366 - protein, 230 aa, Cobetia sp.
  REGION 1..230: note = tr|A0A2E4Q1B7|A0A2E4Q1B7_9GAMM 7-carboxy-7-deazaguanine synthase OS=Cobetia sp.; OX = 1873876 GN=queE PE=3 SV=1
MYTVKEAFYTLQGEGARAGRASVFCRFAGCNLWSGREQDRDTSVCRFCDTDFVGTNGQNGGKFRTANALADFLASLWPEHTGIATPYVVFTGGEPLLQLDSELVDAMHARGFEIAVETNGTVEPPAGIDWLCVSPKGASELVLTGGDELKLVYPQPEALPERFVSLDFAHFYLQPLDTAALDALPAPAAAREHYREVLASDTPMNQCVSYCMRNPQWQLSLQTHKISGID

SEQ ID NO: 29367 - protein, 277 aa, Cocleimonas flava
  REGION 1..277: note = tr|A0A4R1EVA2|A0A4R1EVA2_9GAMM 7-carboxy-7-deazaguanine synthase OS=Cocleimonas flava; OX = 634765 GN=queE PE=3 SV=1
MSIPSIVTPPLSGTFSTESVSNDSTDLISISEIFGPTIQGEGALIGTQTIFVRTAGCDYRCSWCDTGYAVLPEFDNDWKNMDAESVFNKIESLSNKQAMWITLSGGNPAMQNLEPLIKLGQAKGYKFSMETQGSIAKPWFALLDQLTFSPKPPSSGMRFKHKGLQRCLDACETLEIINSQTHPDVSLKFVVADQDDLLWAKEIAEQYPQLPCYVQPCNNNADINVDNRSTADDLENKEENSPYDQKQKMLWLIDAVQSLNWTDVRVLPQLHVWLNVE

SEQ ID NO: 29368 - protein, 239 aa, unidentified
  source 1..239: note = Cognatishimia maritima
  REGION 1..239: note = tr|A0A1M5L5T8|A0A1M5L5T8_9RHOB 7-carboxy-7-deazaguanine synthase OS=Cognatishimia maritima OX=870908 GN=queE PE=3 SV=1
MTILRIAEIFGPTIQGEGAVIGAPTVFVRAGGCDYRCSWCDSLHAVDSEYRHTWAKMTTEDIWDEVERLSGGVPLTVSLSGGNPAIQDFGPLIAHGKSKGFDFALETQGSVARDWFSELSPLILSPKPPSSGEEVDWDTFDACVKAAGNAETVLKIVIFDEADYLWAKEAAARYPELPLYIQPGNHTPPPPDAEDAKIDMDGIMHRYEWLIDRTLADRWFAPKILPQLHVLIWGNKRGV

SEQ ID NO: 29369 - protein, 239 aa, Cohaesibacter gelatinilyticus
  REGION 1..239: note = tr|A0A285N6P1|A0A285N6P1_9RHIZ 7-carboxy-7-deazaguanine synthase OS=Cohaesibacter gelatinilyticus OX=372072 GN=queE PE=3 SV=1
MSKIRVSEIFGPTIQGEGALIGEPTVFVRTGGCDYRCSWCDSLHAVDSDYRADWLPMDAYEIFEKIIKLSKGKPLTVSLSGGNPAIQDFGPLIEMGKKQGYRFALETQGSITQDWFKDLDLLILSPKPPSSDQVVDWDAFEACVRAAQQARTAMKIVIFDDEDYRWAKGVADRYSSLPLYIQPGNHTPPPPDEPDARIDMQGILDRMEWLVDKTLNDGWFAPRILPQLHVLLWGNKRGV

SEQ ID NO: 29370 - protein, 242 aa, Cohnella luojiensis
  REGION 1..242: note = tr|A0A4Y8LUH2|A0A4Y8LUH2_9BACL 7-carboxy-7-deazaguanine synthase OS=Cohnella luojiensis; OX = 652876 GN=queE PE=3 SV=1
MAASKFPVIEIFGPTVQGEGMVIGQKTMFVRTAGCDYSCVWCDSAFTWDGSGKKETRLLTAEEIVEGLRAVGGNTFSHVTISGGNPALLPHLEELIELLHEDGIQVALETQGSRWQDWFLLIDELTLSPKPPSSTMSTDWNVLDAIVGKLISNRRNFSLKVVVFDELDLRYAATVHHRYKNVPFFLQAGNDDVKEPDSSLLLNRLMQKYVWLVETVMDSDELKNVRVLPQLHAWLWGNKRGY

SEQ ID NO: 29371 - protein, 243 aa, unidentified
  source 1..243: note = Cohnella lupini
  REGION 1..243: note = tr|A0A3D9I8F3|A0A3D9I8F3_9BACL 7-carboxy-7-deazaguanine synthase OS=Cohnella lupini; OX = 1294267 GN=queE PE=3 SV=1
MTVVSRFPVIEIFGPTVQGEGMVIGQKTMFIRTAGCDYSCVWCDSAFTWDGSGKKETRMLTAEEIVDELRAVGGNAYSHVTISGGNPALLPRLEQLIERLHDDGIRVALETQGSKWQDWFLLVDELTLSPKPPSSTMTTDWVALDAIVSKLTAGERDFSLKVVVFDEADLRYAISVHRRYGNVAFFLQAGNDDVKESDTTTLLHRLMRKYVWLVETVMASEELTNVRVLPQLHAWLWGNKRGY

SEQ ID NO: 29372 - protein, 255 aa, Cohnella sp.
  REGION 1..255: note = tr|A0A1I0ZM63|A0A1I0ZM63_9BACL 7-carboxy-7-deazaguanine synthase OS=Cohnella sp. OV330; OX = 1855288 GN=queE PE=3 SV=1
MTPVLKQAPNEQESRAARIPVMEVFGPTVQGEGMVIGRKTKFVRTAGCDYRCSWCDSAFTWDGTGKDDIRLMNPDDILRELTALDGSAPDHVTLSGGNPALLPQLGALIAALRAAGAVVALETQGSKWQDWFLDIDELTISPKPPSSGMTTDWAALERIVARLAQGGRHFSLKVVIFDETDLAYAADVHLRFPGIPFYLQAGNGRLGEQDRAQLLPYLLARYEWLVDRVVADAGWRDVHVLPQLHAWIWGNKKGV

SEQ ID NO: 29373 - protein, 242 aa, Cohnella sp.
  REGION 1..242: note = tr|A0A3G3JYS5|A0A3G3JYS5_9BACL 7-carboxy-7-deazaguanine synthase OS=Cohnella sp. 18JY8-7; OX = 2480923 GN=queE PE=3 SV=1
MASNRFPIMEIFGPTIQGEGMVIGQKTMFVRTAGCDYSCSWCDSAFTWDGTGKQDIRMLMASEIFQELSRIGGESFSHVTLSGGNPALLPQLNELIDLLHENGIAVALETQGSLWRDWFLQIDELTLSPKPPSSGMQTDWDILDELVSRLSDHNRCFCLKVVVFDDADIRFAEEVHRRYPEVSMFLQAGNNDIMETDSTVLLKRLMKCYEWLVQSVMASTVLRSVRVLPQLHTWLWGNKRGV

SEQ ID NO: 29374 - protein, 269 aa, unidentified
  source 1..269: note = Coleofasciculus chthonoplastes
  REGION 1..269: note = tr|B4VPZ5|B4VPZ5_9CYAN 7-carboxy-7-deazaguanine synthase OS=Coleofasciculus chthonoplastes PCC 7420; OX = 118168 GN=queE PE=3 SV=1
MNLPIQCQKMSAKTGLTARLIELFSAIQGEGRNVGTRQLFIRLALCDLRCHFCDSQNTWAVPNLASVEQTPGHRDFETHPNPVTVDQLLAWVERQNYPGLHESISITGGEPLLQAPFLREFLPVVQHRTGLPIYLETGGHRPEQLAQILPYLNSIGMDMKLPSVSGEECWHAHRQFLQVCGDADVEVFVKLIIAQTTNTAELELAAELVAACNPSIPVFLQPVTPLAQPHHAPMIPPTPTQVLEWQALMKRHLKSVRVIPQTHKMIGQL

SEQ ID NO: 29375 - protein, 200 aa, Collimonas arenae
  REGION 1..200: note = tr|A0A127QLC9|A0A127QLC9_9BURK 7-carboxy-7-deazaguanine synthase OS=Collimonas arenae; OX = 279058 GN=queE PE=3 SV=1
MQGEGTHAGRPAVFCRFSGCNLWTGREEDRSSAVCQFCDTDFVGTDGEGGGKFKDGESLAQTINALWPATYAASKFVVFTGGEPLLQLDAALIDSMHAAGFEIAIETNGTLEPPSGIDWICVSPKMGSVLKLRKGNELKVVIPQIGQSLAAYESLDFEHFYVQAMDGPQLAHNLELAIETCKRNPKWKLSLQTHKLLQIP

SEQ ID NO: 29376 - protein, 220 aa, Collimonas arenae
  REGION 1..220: note = tr|A0A0A1FDE2|A0A0A1FDE2_9BURK 7-carboxy-7-deazaguanine synthase OS=Collimonas arenae; OX = 279058 GN=queE PE=3 SV=1
MANRKYEYKVTYSIKEIFYTLQGEGTHAGRPAVFCRFSGCNLWSGREEDRSTAVCQFCDTDFVGTDGEGGGKFKTSELLADTINALWPTTYTGSKFVVFTGGEPLLQLDTALVESMHAAGFEIAIETNGTLEPPAGIDWICVSPKMGSVLKLRKGNELKVVIPQIGQSLAAYESLDFDHFYVQAMDGPQQAHNIQLAIETCKRNPKWKLSLQTHKLLQIP

SEQ ID NO: 29377 - protein, 211 aa, Collimonas fungivorans
  REGION 1..211: note = tr|G0AB80|G0AB80_COLFT 7-carboxy-7-deazaguanine synthase OS=Collimonas fungivorans (strain Ter331); OX = 1005048 GN=queE PE=3 SV=1
MTYSIKEIFYTLQGEGTHAGRPAVFCRFSGCNLWSGREEDRSTAVCQFCDTDFVGTDGEGGGKFKDSAALADTINALWPETYAASKFVVFTGGEPLLQLDAALIDSMHAAGFEIAIETNGTLLPPPGIDWICVSPKMGSVLKLRKGNELKVVIPQVGQSLAAYESLDFEHFYVQAMDGPQLAHNLELAIETCKRNPKWKLSLQTHKLLQIP

SEQ ID NO: 29378 - protein, 211 aa, Collimonas fungivorans
  REGION 1..211: note = tr|A0A127P9C8|A0A127P9C8_9BURK 7-carboxy-7-deazaguanine synthase OS=Collimonas fungivorans OX=158899 GN=queE PE=3 SV=1
MTYSIKEIFYTLQGEGTHAGRPAVFCRFSGCNLWTGREEDRSSAVCQFCDTDFVGTDGEGGGKFKDSAALADTINALWPETYAASKFVVFTGGEPLLQLDAALIDSMHAAGFEIAIETNGTLLPPPGIDWICVSPKMGSVLKLRKGNELKVVIPQLGQSLAAYESLDFEHFYVQAMDGPQLAHNLELAIETCKRNPKWKLSLQTHKLLQIP

SEQ ID NO: 29379 - protein, 211 aa, Collimonas pratensis
  REGION 1..211: note = tr|A0A127Q7G4|A0A127Q7G4_9BURK 7-carboxy-7-deazaguanine synthase OS=Collimonas pratensis; OX = 279113 GN=queE PE=3 SV=1
MTYSIKEIFYTLQGEGTHAGRPAVFCRFSGCNLWSGREEDRSTAVCQFCDTDFVGTDGEGGGKFKTSAALADTINALWPSTYTGSKFVVFTGGEPLLQLDAALVDSMHAAGFEIAIETNGTLEPPAGIDWICVSPKMGSVLKLRKGNELKVVIPQLGQSLATYESLDFDHFYVQAMDGPQQAQNIQLAIETCKRNPKWKLSLQTHKLLQIP

SEQ ID NO: 29380 - protein, 211 aa, Collimonas sp.
  REGION 1..211: note = tr|A0A1H3B4T5|A0A1H3B4T5_9BURK 7-carboxy-7-deazaguanine synthase OS=Collimonas sp. OK242; OX = 1798195 GN=queE PE=3 SV=1
MTYSIKEIFYTLQGEGTHAGRPAVFCRFSGCNLWTGREEDRSTAVCQFCDTDFVGTDGEGGGKFKDSASLASAINALWPETYAASKFVVFTGGEPLLQLDAALIDSMHAAGFEIAIETNGTLLPPPGIDWICVSPKMGSVLKLRKGNELKVVIPQIGQSLAAYESLDFEHFYVQAMDGPQLAHNLALAIETCKRNPKWKLSLQTHKLLQIP

SEQ ID NO: 29381 - protein, 211 aa, Collimonas sp.
  REGION 1..211: note = tr|A0A1I3G335|A0A1I3G335_9BURK 7-carboxy-7-deazaguanine synthase OS=Collimonas sp. OK307; OX = 1801620 GN=queE PE=3 SV=1
MTYSIKEIFYTLQGEGTHAGRPAVFCRFSGCNLWTGREEDRSTAVCQFCDTDFVGTDGEGGGKFKDSESLAGTINALWPETYAASKFVVFTGGEPLLQLDAALIDSMHAAGFEIAIETNGTLLPPPGIDWICVSPKMGSVLKLRKGNELKVVIPQIGQSLAAYESLDFEHFYVQAMDGPQLAHNLELAIETCKRNPKWKLSLQTHKLLQIP

SEQ ID NO: 29382 - protein, 224 aa, unidentified
  source 1..224: note = Colwellia beringensis
  REGION 1..224: note = tr|A0A222GCH1|A0A222GCH1_9GAMM 7-carboxy-7-deazaguanine synthase OS=Colwellia beringensis; OX = 1967665 GN=queE PE=3 SV=1
MTTRYKINELFETLQGEGSFTGQPSIFLRLQGCPVGCSWCDTKHTWDIHPELEIPSKTLLDKSEETEQWSNLSLDDMAAIFSQQGYKAKHIVITGGEPCMVDLTELCLYFEAQGYSCQVETSGTFEIRVSEQCWVTVSPKVNMRGGYKILASAMQRANEIKHPVATEQHVDDLKALLAEHKVENKQIYLQPISQKQRATELAIATCIENNWRLSVQVHKYIGIE

SEQ ID NO: 29383 - protein, 224 aa, Colwellia chukchiensis
  REGION 1..224: note = tr|A0A1H7MBA5|A0A1H7MBA5_9GAMM 7-carboxy-7-deazaguanine synthase OS=Colwellia chukchiensis OX=641665 GN=queE PE=3 SV=1
MTTRYKINELFETLQGEGSFTGQPSIFLRLQGCPVGCSWCDTKHTWEIHPELEVNSKQLLSKSEETEQWSNLTLDEMAAIFSQQGFQAKHIVITGGEPCMVDLTELCHYFEAQGYSCQVETSGTFEIRVSKQCWVTVSPKVNMRGGYKILASAMQRANEIKHPVATEQHIDDLKALLAEHKVEHKQIYLQPISQKQRATELAIASCIANNWRLSVQVHKYIGIE

SEQ ID NO: 29384 - protein, 222 aa, Colwellia demingiae
  REGION 1..222: note = tr|A0A5C6QBB2|A0A5C6QBB2_9GAMM 7-carboxy-7-deazaguanine synthase OS=Colwellia demingiae; OX = 89401 GN=queE PE=3 SV=1
MNYKINELFETIQGEGSFTGQPSIFIRLQGCPVGCSWCDTKHTWDIELTDQVSPEIMLAKKAETAQWANFSAEDILALVKEKHFNAKHIVITGGEPCMVDLTPLCETFENLGYSTQIETSGTFEILTTAKCWVTVSPKIKMRGGYDILASAMSRANEIKHPVATEQNVDDLKALLAMHQVENTPVYLQPISQKKRATELAIATCIANNWRLSVQVHKYIGIE

SEQ ID NO: 29385 - protein, 224 aa, Colwellia hornerae
  REGION 1..224: note = tr|A0A5C6QM95|A0A5C6QM95_9GAMM 7-carboxy-7-deazaguanine synthase OS=Colwellia hornerae; OX = 89402 GN=queE PE=3 SV=1
MTVKYKINELFETIQGEGAFTGQPSIFIRLQGCPVACSWCDTKHTWAINLEDEVTPNAMLTKEAESQTWSALTVKDILAMITAEGYQAKHIVITGGEPAMVDLLPLCQALETHGFSCQLETSGTFELQVSAKCWVTVSPKVNMKGGYKILNSAMLRANEIKHPVATEQHIDDLKALLAEHNIVNTQVYLQPISQKERATALAIKSCIENNWRLSVQVHKYLGIE

SEQ ID NO: 29386 - protein, 238 aa, unidentified
  source 1..238: note = Colwellia marinimaniae
  REGION 1..238: note = tr|A0A1Z5I5R1|A0A1Z5I5R1_9GAMM 7-carboxy-7-deazaguanine synthase OS=Colwellia marinimaniae OX=1513592 GN=ygcF PE=3 SV=1
MPNKTHHHVAEKTIIPMNYKINELFETIQGEGSFTGQPSIFIRLQGCPVGCSWCDTKHTWQIELDDQVSPDIMLAKKAETSQWSSFTVAEIFALVQDKNFQAKHIVITGGEPCMVDLTPLCQLFEQQGYSTQIETSGTFEIITTEKCWVTVSPKINMRGGYKILASAMSRANEIKHPIATEQHVDDLKALLALHKVENTAIYLQPISQKKRATELAIATCIANNWRLSIQVHKYIGIE

SEQ ID NO: 29387 - protein, 226 aa, Colwellia psychrerythraea
  REGION 1..226: note = tr|Q47ZX2|Q47ZX2_COLP3 7-carboxy-7-deazaguanine synthase OS=Colwellia psychrerythraea (strain 34H / ATCC BAA-681) OX=167879 GN=queE PE=3 SV=1
MNLETTYKINEIFETLQGEGSFTGQPSIFIRLQGCPVGCSWCDTKHTWEVSLEQEVAQNNIVSKKSENDSWGIFTIVQLKELFLSEGYQAKHIVITGGEPCMYDLKPLCQNFEALGYSCQVETSGTFEIQVSKKCWVTVSPKVNMKGGFKVLKSALLRADEIKHPVATEQHIDDLKALLNEHEIENKQIYIQPISQKKRATELAIRSCIENNWRLSVQVHKYIGIE

SEQ ID NO: 29388 - protein, 222 aa, Colwellia psychrerythraea
  REGION 1..222: note = tr|A0A1Y5EDG0|A0A1Y5EDG0_COLPS 7-carboxy-7-deazaguanine synthase OS=Colwellia psychrerythraea OX=28229 GN=queE PE=3 SV=1
MKYKINELFETIQGEGSFTGQPSIFIRLQGCPVGCSWCDTKHTWDIELDDQVSPEVMLTKTAETSQWSNFTPEDIITLVKDKNFQAKHIVITGGEPCMVDLTPLCELFEQQGYSTQIETSGTFEIITTAECWVTVSPKINMRGGYEVLASAMSRANEIKHPIATEQHVDDLKALLAKHQVDNTPIYLQPISQKKRATELAIETCIANNWRLSVQVHKYIGIE

SEQ ID NO: 29389 - protein, 224 aa, Colwellia sp.
  REGION 1..224: note = tr|A0A136HMR7|A0A136HMR7_9GAMM 7-carboxy-7-deazaguanine synthase OS=Colwellia sp. Phe_37; OX = 1795872 GN=queE PE=3 SV=1
MTTRYKINELFETLQGEGSYTGQPSIFLRLQGCPVACSWCDTKHTWDIHPELEINSEQLLSKSQETEQWTNLSLDDIAAIFAQQGYNAKHIVITGGEPCMVDLTELCLYFEARGYSCQVETSGTFEIKVSPQCWVTVSPKVNMRGGYKILASAMQRANEIKHPVGTEQHIDDLKALLAKHQVENKQIYLQPISQKQRATELAIATCIENNWRLSVQVHKYIGIE

SEQ ID NO: 29390 - protein, 221 aa, Colwellia sp.
  REGION 1..221: note = tr|A0A2G2FHC7|A0A2G2FHC7_COLSX 7-carboxy-7-deazaguanine synthase OS=Colwellia sp.; OX = 56799 GN=queE PE=3 SV=1
MYKINEVFETIQGEASFTGTPSIFLRLQGCPVGCSWCDTKQTWDVDNVYKVSLDETVEKKADSDHWADASAEQVLELFKSRGYTAKHVVITGGEPCMYDLNPVCKLLHDNGFTTQIETSGTFEILAPEQTWVTVSPKINMRGGYEVLTSAMKRANEIKHPVAMQKHVEELEELFAKTGVNPKLVYLQPISQKVSATKLAIDTCIAKNWRLSIQVHKYLGIS

SEQ ID NO: 29391 - protein, 250 aa, unidentified
  source 1..250: note = Colwelliaceae bacterium
  REGION 1..250: note = tr|A0A2D6RD26|A0A2D6RD26_9GAMM 7-carboxy-7-deazaguanine synthase OS=Colwelliaceae bacterium OX=2026726 GN=queE PE=3 SV=1
MKMKISEDFYSVQGEGISQGVPSYFVRLQGCNLICGGPCGRLKDEGKATWYCDTEPVWRQGMEVSNEELVGKIQDTGQFENVLSGDTHIVWTGGEPTLPKHQKDIVGFLDHLHQKDWKIKPYSEIETNGTQILDSDLLKSVQQLNVSPKLANSGMKGSLRIVPEAINSALQHENSWFKFVVTDESDIEEFERYFTIPYEIPRNRVIIMPGCDNLDGLPVATRKCYELSMKHGYRTISRGHILAWNKKTGI

SEQ ID NO: 29392 - protein, 211 aa, unidentified
  source 1..211: note = Comamonadaceae bacterium
  REGION 1..211: note = tr|A0A2M8E3U0|A0A2M8E3U0_9BURK 7-carboxy-7-deazaguanine synthase OS=Comamonadaceae bacterium CG_4_9_14_0_8_um_filter_60_18 OX=1973950 GN=queE; PE = 3 SV=1
MTYSVKEIFYTLQGEGHHAGRPAVFCRFAGCNLWNGAEASRASALCQFCDTDFVGTDGPGGGKFRQPHTLAERINALWPKAYPAHKYVVFTGGEPLLQLDVPLIEALHAVGFEVAIETNGTLPVPEGVDWVCVSPKMGAALALRQGHELKVVIPQPGQPMDVYAALRFDHHFVQAMDGPAQLNNLQLAVDYCKAHPQWKLSLQTHKLLQIP

SEQ ID NO: 29393 - protein, 202 aa, unidentified
  source 1..202: note = Comamonadaceae bacterium
  REGION 1..202: note = tr|A0A5C9CG39|A0A5C9CG39_9BURK 7-carboxy-7-deazaguanine synthase OS=Comamonadaceae bacterium OX=1871071 GN=queE PE=3 SV=1
MTYSVKEIFYTLQGEGQQAGRPAVFCRFAGCNLWTGTENRRASAVCQFCDTDFVGVDGEGGAERIYALWPAAYPAHKYVVFTGGEPLLQLDTPLIEAIHAAGFEVAIETNGTLPVPEGVDWVCVSPKMGAKLVVHEGDEIKVVIPQPGQPLDVYAALDFDHYFVQAMDGPLQADNQRLAVEYCKAHPQWKLSLQTHKLLQIP

SEQ ID NO: 29394 - protein, 218 aa, unidentified
  source 1..218: note = Comamonas serinivorans
  REGION 1..218: note = tr|A0A1Y0EQ03|A0A1Y0EQ03_9BURK 7-carboxy-7-deazaguanine synthase OS=Comamonas serinivorans OX=1082851 GN=queE PE=3 SV=1
MLPINEVFETIQGEACMTGTPSVFLRLQACPVGCPWCDTKHTWALDPARQVAVADMLAKTDDADTWAAMEVDELLATVQAFRARHVVITGGEPALYDLVPLTTLLIAHSYSVQIETSGTHPIRVHPDTWVTVSPKLDMPGGLPVLPEALARANEVKHPVGKPADVERLLGLDLGRVPRSLIWLQPISQSPKATALCVDEATRHGWRVSIQTHKFLGVR

SEQ ID NO: 29395 - protein, 212 aa, Comamonas sp.
  REGION 1..212: note = tr|A0A0M2DPI3|A0A0M2DPI3_9BURK 7-carboxy-7-deazaguanine synthase OS=Comamonas sp. E6; OX = 364029 GN=queE PE=3 SV=1
MTYSVKEIFYTLQGEGGQAGTPAVFCRFAGCNLWTGREQDRPNAICQFCDTDFVGTDGTLGGKFATADELAERILSQWPADDSRHRMVVLTGGEPLLQVDPALIAALHARGFRISVESNGTVAAPEGIDWLCISPKAGADWIQRSGQELKLVWPQPTFDLAAIEASTEFQHYFLQPMDNAQQGSNIAACIAQCMQRPGWRLSLQTHKLTGIR

SEQ ID NO: 29396 - protein, 212 aa, Comamonas sp.
  REGION 1..212: note = tr|A0A5D3H3U4|A0A5D3H3U4_9BURK 7-carboxy-7-deazaguanine synthase OS=Comamonas sp. Z3; OX = 2601247 GN=queE PE=3 SV=1
MTYSVKEIFYTLQGEGGQAGTPAVFCRFAGCNLWTGREQDRPNAICQFCDTDFVGTDGTLGGKFATADALAERILSQWPADDSQHRMVVLTGGEPLLQVDEALIAALHARGFRISVESNGTVAAPEGIDWLCISPKAGADWIQRSGQELKLVWPQPTFDLAAIEASTDFQHYFLQPMDNAQQSGNITACIEQCMQRPGWRLSLQTHKLTGIR

SEQ ID NO: 29397 - protein, 212 aa, Comamonas testosteroni
  REGION 1..212: note = tr|A0A076PPI5|A0A076PPI5_COMTE 7-carboxy-7-deazaguanine synthase OS=Comamonas testosteroni TK102 OX=1392005 GN=queE PE=3 SV=1
MTYSVKEIFYTLQGEGGQAGTPAVFCRFAGCNLWTGREQDRPNAICQFCDTDFVGTDGTLGGKFATADALAERILSQWPADDSLHRMVVLTGGEPLLQVDEALIAALHARGFRISVESNGTVAAPEGIDWLCISPKAGADWIQRSGQELKLVWPQPTFDLAAIEASTDFQHYFLQPMDNAQQSGNITACIEQCMQRPGWRLSLQTHKLTGIR

SEQ ID NO: 29398 - protein, 212 aa, Comamonas testosteroni
  REGION 1..212: note = tr|A0A096FKU0|A0A096FKU0_COMTE 7-carboxy-7-deazaguanine synthase OS=Comamonas testosteroni OX=285 GN=queE PE=3 SV=1
MTYSVKEIFYTLQGEGGQAGTPAVFCRFAGCNLWTGREQDRPNAICQFCDTDFVGTDGTLGGKFATADALAERILSQWPADDSRHRMVVLTGGEPLLQVDEALIAALHSRGFRISVESNGTVAAPEGIDWLCISPKAGADWIQRSGQELKLVWPQPTFDLAAIEASTEFQHYFLQPMDNAMQSSNIAACIEQCMQRPAWRLSLQTHKLTGIR

SEQ ID NO: 29399 - protein, 212 aa, Comamonas thiooxydans
  REGION 1..212: note = tr|A0A0E3BPQ5|A0A0E3BPQ5_9BURK 7-carboxy-7-deazaguanine synthase OS=Comamonas thiooxydans; OX = 363952 GN=queE PE=3 SV=1
MTYSVKEIFYTLQGEGGQAGMPAVFCRFAGCNLWTGREQDRPKAICQFCDTDFVGTDGTLGGKFATADELAERILGQWPADDSRHRMVVLTGGEPLLQVDQALIAALHVRGFRISVESNGTVAAPEGIDWLCISPKAGADWIQRSGQELKLVWPQPTFDLAAIEASTEFQHYFLQPMDNARQGSNIAACIAQCMQRPGWRLSLQTHKLTGIR

SEQ ID NO: 29400 - protein, 212 aa, Comamonas thiooxydans; identical to SEQ ID NO: 29395
  REGION 1..212: note = tr|A0A096EHS2|A0A096EHS2_9BURK 7-carboxy-7-deazaguanine synthase OS=Comamonas thiooxydans; OX = 363952 GN=queE PE=3 SV=1

SEQ ID NO: 29401 - protein, 211 aa, unidentified
  source 1..211: note = Commensalibacter intestini
  REGION 1..211: note = tr|G6F1Y3|G6F1Y3_9PROT 7-carboxy-7-deazaguanine synthase OS=Commensalibacter intestini A911 OX=1088868; GN = queE PE=3 SV=1
MSYAVKEIFLTLQGEGGQIGRTAVFCRFTGCNLWSGKEEDRHQAVCQFCDTDFVGMDGEGGGRFTDAAALANAIETTWGARDAQQRFVVFTGGEPLLQLDSELVHLLKQKGFYIAVETNGTLPVPDAVDWICVSPKAGAELVQTCGDELKLIYPQEGLNPQDFIGLKFTTFRLQPKDDAHKQEHLQKAIEFCQNHPIWHLSLQTHKLIGIP

SEQ ID NO: 29402 - protein, 211 aa, unidentified
  source 1..211: note = Commensalibacter intestini
  REGION 1..211: note = tr|A0A251ZVP7|A0A251ZVP7_9PROT 7-carboxy-7-deazaguanine synthase OS=Commensalibacter intestini OX=479936 GN=queE PE=3 SV=1
MSYAVKEIFLTLQGEGGQIGRTAVFCRFTGCNLWSGKEEDRHQAVCQFCDTDFVGMDGEGGGRFTDAAALANAIETTWGTRDAQQRFVVFTGGEPLLQLDSELVHLLKQKGFYIAVETNGTLPVPDAVDWICVSPKAGAELVQTCGDELKLIYPQEGLNPQDFIGLKFTTFRLQPKDDAHKQEHLQKAIEFCQNHPIWHLSLQTHKLIGIP

SEQ ID NO: 29403 - protein, 212 aa, unidentified
  source 1..212: note = Commensalibacter sp.
  REGION 1..212: note = tr|W7DKS1|W7DKS1_9PROT 7-carboxy-7-deazaguanine synthase OS=Commensalibacter sp. MX01 OX=1208583 GN=queE; PE = 3 SV=1
MSYAVKEIFLTLQGEGGQIGRTSVFCRFTGCNLWSGQEADRKDAVCQFCDTNFVGMDGENGGRFPDAQSLANAIEACWGTIRDPKQRFVVFTGGEPLLQLDKVLIEAIKQKGFYIAVETNGTLPVPQGVDWICVSPKAGAELIQISGDELKLIYPQEGLDPHRFTSLDFTTFRLQPKDDMNKTEHIKKAIKYCQEHPLWHLSLQTHKLIGIP

SEQ ID NO: 29404 - protein, 211 aa, unidentified
  source 1..211: note = Commensalibacter sp.
  REGION 1..211: note = tr|A0A318N1M8|A0A318N1M8_9PROT 7-carboxy-7-deazaguanine synthase OS=Commensalibacter sp. ESL0284 OX=2070537 GN=queE PE=3 SV=1
MSYAVKEIFLTLQGEGYFAGRTAVFCRFSGCNLWSGQEKDRATAICQFCDTDFVGMDGSGGGRFEDANSLAIAIEKHWGERDTSYRFVVFTGGEPLLQLDKSLIDVLKKKGFFIAVETNGTMLVPKGVDWICVSPKQGAALMQMHGDELKLVYPQEAMNPQKFESLSFKSFRLQPRDDEQRDKHLRQAIQYCQDHPKWYLSLQTHKLIGIP

SEQ ID NO: 29405 - protein, 209 aa, unidentified
  source 1..209: note = Confluentibacter sp.
  REGION 1..209: note = tr|A0A2N3HKD1|A0A2N3HKD1_9FLAO 7-carboxy-7-deazaguanine synthase OS=Confluentibacter sp. 3B OX=1909700 GN=queE PE=3 SV=1
MNKDLQILVDKGEMLPLMEEFYTIQGEGFHKGTAAYFIRIGGCDVGCHWCDVKESWNADLHPPTEVYKIVENAKKHSDTIVVTGGEPLTWDMSILTNALKAEGLQIHIETSGAYKLTGIWDWICLSPKKMKLPTLEVYEKANELKMIIYNKDDFRFAEDQAAMVNKDCILYMQPEWSKRDKVIPEIVDYVMKNPKWKVSLQTHKYLNIP

SEQ ID NO: 29406 - protein, 239 aa, unidentified
  source 1..239: note = Confluentimicrobium lipolyticum
  REGION 1..239: note = tr|A0A238KR56|A0A238KR56_9RHOB 7-carboxy-7-deazaguanine synthase OS=Confluentimicrobium lipolyticum OX=1524263 GN=queE PE=3 SV=1
MTTLRIAEIFGPTIQGEGALIGAPTVFVRAGGCDYRCSWCDSLHAVDSEYRHEWAPMQPEDVWQKVRDLSGDKPLTVTVSGGNPAIQDFGPLIALGKAQGYGFALETQGSVARDWFAELEMLVLSPKPPSSGETVDWAVFDTCLAKAGDAPTVLKIVIFDDADYAWARDVAARYPALPLYLQPGNHTPPPPDAEDAVIDMDGIMDRMTWLVDKTLADGWYSPRILPQLHVLLWGNKRGV

SEQ ID NO: 29407 - protein, 226 aa, Congregibacter litoralis
  REGION 1..226: note = tr|A4A9R9|A4A9R9_9GAMM 7-carboxy-7-deazaguanine synthase OS=Congregibacter litoralis KT71 OX=314285; GN = queE PE=3 SV=1
MGAVATADGVVAADTLRITEIFYSLQGEARTVGLPTVFVRLTGCPLRCLYCDTEYAFHGGEIMSLEHIADQVAAHKPAYVTVTGGEPLAQPNCLPLLSRLCDQGYEVSLETSGAMSVAGVDPRVVKVLDLKTPASGEVARNDYGNVQYLTPNDQVKFVICDRGDYEWARFKLDEYTLGDRVSDVLFSPSHEQLAPRELAEWILGDGLQVRLQLQLHKYLWDDAPGH

SEQ ID NO: 29408 - protein, 220 aa, Coprobacillus sp.
  REGION 1..220: note = tr|H1AM47|H1AM47_9FIRM 7-carboxy-7-deazaguanine synthase OS=Coprobacillus sp. 8_2_54BFAA OX=469597 GN=queE; PE = 3 SV=1
MNNYKVVEKFISINGEGSRAGQLAAFIRFHYCNLNCSYCDTRYANDSNSNYELLSAQNILDYLKANKVVNVTLTGGEPLLQQNIDYLIDLLLKNGFSVEIETNGSIDIKPFIKETRPIFTLDYKVPSSTMENEMCLNNYQYLTKNDVVKFVVSNLSDLNKAKEIIDTYDLVNRTKVYFSPVFGKIEPRMIIDYMVKHHLNGINMQLQMHKFIWDINQRGV

SEQ ID NO: 29409 - protein, 220 aa, Coprobacillus sp.
  REGION 1..220: note = tr|G9QXV7|G9QXV7_9FIRM 7-carboxy-7-deazaguanine synthase OS=Coprobacillus sp. 3_3_56FAA OX=665941 GN=queE; PE = 3 SV=1
MNNYKVVEKFISINGEGSRAGQLAAFIRFHYCNLNCSYCDTRYANDSNSNYELLSAQNILDYLKANKVVNVTLTGGEPLLQQNIDYLIDLLLKNGFSVEIETNGSIDIKPFIKETRPIFTLDYKVPSSTMENEMCLNNYQYLTKNDVVKFVVSNLSDLNKAKEIIDTYDLVNRTKVYFSPVFGKIEPRRIVDYMVKHHLNGINMQLQMHKFIWDINQRGV

SEQ ID NO: 29410 - protein, 184 aa, unidentified
  source 1..184: note = Coprobacter fastidiosus
  REGION 1..184: note = tr|A0A495WNK4|A0A495WNK4_9BACT 7-carboxy-7-deazaguanine synthase OS=Coprobacter fastidiosus NSB1 OX=1349822 GN=queE PE=3 SV=1
MKKINEIFYSIQGEGYYTGVPAIFIRFSGCNLNCEFCDTDHSLGKIMSDEEILDIIRKFPAKHVVLTGGEPSMQLDDCFLSLLKAQGFYLQIETNGTLTKGFDAVTRWCDWITCSPKKDCVRKQMDELKVVYLSQDMSVYKQYSCKHKMLQPCSMQNTKEVIEFIKKNPEWRLSLQTHKYLHIR

SEQ ID NO: 29411 - protein, 184 aa, unidentified
  source 1..184: note = Coprobacter secundus
  REGION 1..184: note = tr|A0A0B2JAI8|A0A0B2JAI8_9BACT 7-carboxy-7-deazaguanine synthase OS=Coprobacter secundus; OX = 1501392 GN=queE PE=3 SV=1
MKKINEIFYSLQGEGYYTGTPAVFVRFSGCNLNCDFCDTEHLSGVFMSDNEILTEITQYPTRHIVLTGGEPTLQIDVPFMQMLKEDNWYIQIETNGTLTSGLSIADRWADWVTCSPKKDCIREKANELKVVYTGQDMSQYDSFICDIRSLQPCSMLNTQEVIDYIKKHPQWRLSLQTHKMLDIR

SEQ ID NO: 29412 - protein, 187 aa, unidentified
  source 1..187: note = Coprobacter sp.
  REGION 1..187: note = tr|A0A316SM52|A0A316SM52_9BACT 7-carboxy-7-deazaguanine synthase OS=Coprobacter sp.; OX = 1941478 GN=queE PE=3 SV=1
MKKINEIFYSLQGEGFHTGTPAVFVRFSGCNLSCAFCDTDHKNGTLLSNEAIIEQISRFPARIVILTGGEPSLFIDKEFIDQLHEAGFRVHIETNGTHTIPGNIDWITCSPKIDCQEEKNVPLLLQEADELKVVYRKQNLDILSNFRCKVRFLQPCSGKNIPETVSYILSHPEWRLSLQTHKILDIR

SEQ ID NO: 29413 - protein, 223 aa, Coprococcus catus
  REGION 1..223: note = tr|D4J8R0|D4J8R0_9FIRM 7-carboxy-7-deazaguanine synthase OS=Coprococcus catus GD/7 OX=717962 GN=queE PE=3; SV = 1
MERTYEVVEHFVSINGEGPLAGQLAVFVRFKGCNLSCLYCDTKWANEPDVPARVMTAEEIHQAIMETGVRNVTLTGGEPLDRPHISELLEKLAADHSLHVEIETNGSVSLAPFVNIPNRPSFTMDYKLSCSGMETAMDTDNFSLLTEKDTVKFVTGSLADCERAVEIMKQFRLIGRCHLYFSPVFGSIDPADIVEFMKEQQLNGVNLQIQMHKVIWDPDRRGV

SEQ ID NO: 29414 - protein, 223 aa, Coprococcus catus
  REGION 1..223: note = tr|A0A3E2TS81|A0A3E2TS81_9FIRM 7-carboxy-7-deazaguanine synthase OS=Coprococcus catus; OX = 116085 GN=queE PE=3 SV=1
MERTYEVVEHFVSINGEGPLAGQLAVFVRFKGCNLSCLYCDTKWANEPDVPARVMTAEEIHQAIMETGVRNVTLTGGEPLDRPYISELLEKLAADHLLHVEIETNGSVSLAPFVNIPNRPSFTMDYKLSCSGMETAMDTDNFSLLTEKDTVKFVTGSLADCERAVEIMKQFRLIGRCHLYFSPVFGSIDPADIVEFMKEQQLNGVNLQIQMHKVIWDPDRRGV

SEQ ID NO: 29415 - protein, 216 aa, Coprococcus comes
  REGION 1..216: note = tr|A0A412QBE2|A0A412QBE2_9FIRM 7-carboxy-7-deazaguanine synthase OS=Coprococcus comes; OX = 410072 GN=queE PE=3 SV=1
MKVVEKFTSINGEGTRAGELAVFIRFKGCNLKCSYCDTMWANELACPYQEETPADIVNYVLATGIRNVTLTGGEPLLQKEIKELIHHLLKAGVRVEIETNGSVSLTDFCEERPVFTMDYKLPSSGCESQMILENMELLVSDDTVKFVTGSQEDLQKAMEVIRTYDLTNRCHVYFSPVFGSIEPVQIVNFMLEHQLNDVRLQIQMHKIIWDPNERGV

SEQ ID NO: 29416 - protein, 222 aa, Coprococcus comes; identical to SEQ ID NO: 28429
  REGION 1..222: note = tr|A0A412QAY7|A0A412QAY7_9FIRM 7-carboxy-7-deazaguanine synthase OS=Coprococcus comes; OX = 410072 GN=queE PE=3 SV=1

SEQ ID NO: 29417 - protein, 222 aa, Coprococcus eutactus
  REGION 1..222: note = tr|R5WBH2|R5WBH2_9FIRM 7-carboxy-7-deazaguanine synthase OS=Coprococcus eutactus CAG:665 OX=1263071; GN = queE PE=3 SV=1
MSTYRVVERFISINGEAARAGELAVFIRFAGCNLDCGYCDTKWANEPGVDYQELTEDELVDYVRRTEVKNVTLTGGEPLIQKDIDKLLLAFALEDDIRVEIETNGSVDIAEFKALGGNVSYTLDYKCPSSGMESDMCLANYNYIDKNDSVKFVVGSQEDLEKCLEIIREYALDERTRVFISPVYGSIDPADIVDFMIENGMNDVKLQLQLHKFIWDPEERGV

SEQ ID NO: 29418 - protein, 222 aa, Coprococcus eutactus
  REGION 1..222: note = tr|A8STP3|A8STP3_9FIRM 7-carboxy-7-deazaguanine synthase OS=Coprococcus eutactus ATCC 27759 OX=411474; GN = queE PE=3 SV=1
MSTYRVVERFISINGEAARAGELAVFIRFAGCNLNCGYCDTKWANEPGVDYQELTEDELVDYVRRTEVKNVTLTGGEPLIQKDIDKLLLAFALEDDIRVEIETNGSVDIAEFKALGGNVSYTLDYKCPSSGMESDMCLANYNYIDKNDSVKFVVGSQEDLEKCLEIIREYALDERTRVFISPVYGSIDPADIVDFMIENGMNDVKLQLQLHKFIWDPEERGV

SEQ ID NO: 29419 - protein, 222 aa, Coprococcus sp.
  REGION 1..222: note = tr|A0A417SZW9|A0A417SZW9_9FIRM 7-carboxy-7-deazaguanine synthase OS=Coprococcus sp. OM04-5BH OX=2293093 GN=queE PE=3 SV=1
MAQFKVAERFVSINGESARAGELAVFIRFAGCNLNCGYCDTKWANEKDTEYELLSDEELISYIKRTEIKNVTLTGGEPLIQEDIDELLLKLSLEGDIRVEVETNGSIDIAEFKAVADGISYTLDYKLPGSGCEDKMCISNYNYVDKNDAVKFVVGSIKDLDRAREVIYTYGLDVKTRVYISPVFGSIELEDIVDYMIENNMNDVKLQLQMHKIIWDPETRGV

SEQ ID NO: 29420 - protein, 222 aa, Coprococcus sp.
  REGION 1..222: note = tr|A0A355XB58|A0A355XB58_9FIRM 7-carboxy-7-deazaguanine synthase OS=Coprococcus sp.; OX = 2049024 GN=queE PE=3 SV=1
MSTYRVVERFISINGEAARAGELAVFIRFAGCNLDCGYCDTKWANEAGVPYEELTEDEIIDYVRRTKVKNVTLTGGEPLIQKDIDKLLLAFELEDDVRVEIETNGSVDIAEFKALGGNVSYTLDYKCPSSGMESEMCLANYNYIDKNDSVKFVVGSQEDLEKCFEIVREYALDEKTRVFISPVYGSIDPADIVDFMIENDMNDVKLQLQLHKFIWDPEERGV

SEQ ID NO: 29421 - protein, 226 aa, Coraliomargarita akajimensis
  REGION 1..226: note = tr|D5EK67|D5EK67_CORAD 7-carboxy-7-deazaguanine synthase OS=Coraliomargarita akajimensis (strain DSM 45221 / IAM 15411 / JCM 23193 / KCTC 12865 / 04OKA010-24) OX=583 355 GN=queE PE=3 SV=1
MAKQLPVHEQFYSFQGEGCHAGRAAYFIRLFGCPVHCPWCDSAGTWHPDYVPESIDRVLANDLLASVQKTAAEFVVITGGEPAIHDLSELTAVLRRAGYPVHLETSGAFELKGVFDWVTLSPKRWKLPLPENLKRADEFKLIVDELGAIEEYARLPGVLRSVPVWLHPEWSQQRNQAILSAITEWVKAHGAPFRAGWQMHKQYAADLDDPRSAPAAPLGGDPERGY

SEQ ID NO: 29422 - protein, 216 aa, Coraliomargarita sp.
  REGION 1..216: note = tr|A0A424QUY2|A0A424QUY2_9BACT 7-carboxy-7-deazaguanine synthase OS=Coraliomargarita sp. TMED73 OX=1986604 GN=queE PE=3 SV=1
MPRQLPIHERFHSFQGECCHAGRAAFFIRTYGCPVHCPWCDSAGTWHPDHKPQAINRIEALALAEEAAAARPAFVVITGGEPTIHDLTPLTEALHAIDLPVHLETSGAFPIRGQFDWITLSPKRWKLPLEQNLSRADEFKIIVDAPDAIDEYLAACPTPPGIPIWLHPEWNISTDPAILDAITARVKTSGDPFRAGWQLHKPYAADALDPRSVPEK

SEQ ID NO: 29423 - protein, 225 aa, Coraliomargarita sp.
  REGION 1..225: note = tr|A0A2E0NIB5|A0A2E0NIB5_9BACT 7-carboxy-7-deazaguanine synthase OS=Coraliomargarita sp.; OX = 2024828 GN=queE PE=3 SV=1
MARKLPVHEQFYSFQGEGFYVGRAAYFIRLFGCPVHCPWCDSAGTWHPEHIPKKIPRLDVDTLAAAAASTQAEFTVITGGEPAIHDLSELCEALKKAGQAVHLETSGSFPLKGDFDWITLSPKRWKLPLEENILIANEFKCIIDTPSAIEEYNSIIGHKNVPIWLHPEWSRHEDPTILNTITEWIKQHGAPYRGGWQLHKNYGADLLDPGSAPLAPLGGDTLRGY

SEQ ID NO: 29424 - protein, 226 aa, unidentified
  source 1..226: note = Corallincola sp.
  REGION 1..226: note = tr|A0A368NQW3|A0A368NQW3_9GAMM 7-carboxy-7-deazaguanine synthase OS=Corallincola sp. C4; OX = 2282215 GN=queE PE=3 SV=1
MAYPVNEVFETIQGEGVYTGVPAIFVRLQGCPVGCSWCDTKHTWPLDDDAKIDVVDLLAEQGETECWSEMTSKQLLNLFAEQGYTAKHVVITGGEPCVYNLSDLTSTLFSRGYHCQIETSGTFEVLVDDKTWVTVSPKVAMKGGYDVLASALLRANEIKHPVAKQSHIDELDALLAPISASGQLSGKTICLQPISQKPRATELAVRTCIARNWRLSIQTHKYLGIE

SEQ ID NO: 29425 - protein, 230 aa, Corallococcus coralloides
  REGION 1..230: note = tr|A0A410RJH2|A0A410RJH2_CORCK 7-carboxy-7-deazaguanine synthase OS=Corallococcus coralloides OX=184914 GN=ygcF PE=3 SV=1
MPAARPHIEPRRVPTADSVVVKELYLSLQGESSHAGMLCGFIRLTGCHLRCTYCDSEFAFHGGSRMKISEVVEKALAWNTPTVEVTGGEPLLQPGVYPLMEALLDAGLKVLLETSGAIDVRLVPPAVHKIVDMKTPSSGECDRNDYRNLTSMNANDELKIVIGSRVDYEWARALVTEHKLGQKPYGVLFSTIFDKLHPRQLAEWIIEDRLPVRFQLQMHKYLWDPNERGV

SEQ ID NO: 29426 - protein, 238 aa, Corallococcus coralloides
  REGION 1..238: note = tr|H8N156|H8N156_CORCM 7-carboxy-7-deazaguanine synthase OS=Corallococcus coralloides (strain ATCC 25202 / DSM 2259 / NBRC 100086 / M2) OX=1144275 GN=ygcF PE=3 SV=1
MRPFAPHAMPAARPHIEPRRVPTADSVVVKELYLSLQGESSHAGMLCGFIRLTGCHLRCTYCDSEFAFHGGSRMKIPEVVEKALAWNTPTVEVTGGEPLLQPGVYPLMEALLDAGLKVLLETSGAIDVRLVPPAVHKIVDMKTPSSGECDRNDYRNLTSMNANDELKIVIGSRVDYEWARALVTEHQLGKKPYSVLFSTIFDKLHPRQLAEWIIEDRLPVRFQLQMHKYLWDPNERGV

SEQ ID NO: 29427 - protein, 230 aa, Corallococcus exiguus
  REGION 1..230: note = tr|A0A5C5DYP7|A0A5C5DYP7_9DELT 7-carboxy-7-deazaguanine synthase OS=Corallococcus exiguus; OX = 83462 GN=queE PE=3 SV=1
MPAARPHIEPRRVPTADSVVVKELYLSLQGESSHAGMLCGFIRLTGCHLRCTYCDSEFAFHGGSRMKVSEVVEKALAWNSPTVEVTGGEPLLQPGVYPLMEALLDAGLKVLLETSGAIDVRLVPPAVHKIVDMKTPSSGECDRNDYRNLTSMNANDELKIVIGSRVDYEWARALVQEHQLGKKPYGVLFSTIFDKLHPRQLAEWIIEDRLPVRFQLQMHKYLWDPNERGV

SEQ ID NO: 29428 - protein, 230 aa, Corallococcus sp.
  REGION 1..230: note = tr|A0A3A8M5Y0|A0A3A8M5Y0_9DELT 7-carboxy-7-deazaguanine synthase OS=Corallococcus sp. CA040B OX=2316726 GN=queE PE=3 SV=1
MPVARPHIEPRRLPSADSVVVKEIYLSLQGESSHAGLLCAFIRLTGCHLRCTYCDSEFAFHGGSRMKNADIVTQILALNTPAVEVTGGEPLLQPGVYPLMESLLGAGLKVLLETSGAIDVRLVPPAVHKIVDMKTPSSGECDRNDLRNLVSMNANDELKFVIGSREDYEWSRALITEHRLGTKPYSVLFSTIFDKLHPRELAEWIIEDRLPVRFQLQMHKYLWDPNARGV

SEQ ID NO: 29429 - protein, 230 aa, Corallococcus sp.
  REGION 1..230: note = tr|A0A3A8K9H0|A0A3A8K9H0_9DELT 7-carboxy-7-deazaguanine synthase OS=Corallococcus sp. CA053C OX=2316732 GN=queE PE=3 SV=1
MPVARPHIEPRRAPSADSVVVKEIYLSLQGESSHAGLLCAFIRLTGCHLRCTYCDSEFAFHGGNRMKNADIVTQILALNTPAVEVTGGEPLLQPGVYPLMESLLDAGLKVLLETSGAIDVRLVPPAVHKIVDMKTPSSGECDRNDYRNFVSMNANDELKFVIGSREDYEWSRALITEHRLGTKPYSVLFSTVFDKLHPRQLAEWIIEDRLPVRFQLQMHKYLWDPNARGV

SEQ ID NO: 29430 - protein, 256 aa, unidentified
  source 1..256: note = Coriobacteriia bacterium
  REGION 1..256: note = tr|A0A2V2E851|A0A2V2E851_9ACTN 7-carboxy-7-deazaguanine synthase OS=Coriobacteriia bacterium OX=2052159 GN=queE PE=3 SV=1
MSGRDAAHGSAAFASLEASADCTLPVAERFVSVNGEGRAAGKLAAFIRFTGCNLACSYCDTMWANAPAAAECAERVSVADLVAWARETRVECITLTGGEPALQPELPRLVRALLAEPGPLGRGLRVEIETNGAADLCELASLRDECASLPGSLTFTVDWKLPASGMEDRMLRENFALLDACDTVKFVCGGEGDLVRMLEVSRELGLPNRVPVYLSPVFGRLDPARIVDFMQDNNLTWATAQLQLHKIIWPGVEKGV

SEQ ID NO: 29431 - protein, 238 aa, Corynebacterium striatum
  REGION 1..238: note = tr|A0A2H1ADM8|A0A2H1ADM8_CORST 7-carboxy-7-deazaguanine synthase OS=Corynebacterium striatum OX=43770 GN=queE PE=3 SV=1
MSKIPVLEIFGPTIQGEGRVIGRKTMFVRTAGCDYRCSWCDSSFTWDGSAKEEIRMMDATEIYAQLYDIAGESFNHVTISGGNPALIKGIQTLVDLFEDKGIQSALETQGSKFQPWMTQIDDLTISPKPPSSMMKPNLPILDDVIAKCKPETLNLKVVIFNDEDFEFAKMIHHRYPNVPFYLQVGNPYLDGEYVESHTEKLLSLYETLVNRVMDSSDMNNVYVLPQLHTLLWSNKKGV

SEQ ID NO: 29432 - protein, 223 aa, Cosenzaea myxofaciens
  REGION 1..223: note = tr|A0A198GAZ0|A0A198GAZ0_9GAMM 7-carboxy-7-deazaguanine synthase OS=Cosenzaea myxofaciens ATCC 19692 OX=1354337 GN=queE PE=3 SV=1
MQYPINEVFQTLQGEGVFTGVPALFVRLQGCPVGCSWCDTKHTWEKKEEKKVPLGDIPIKTQESDNWGSAYVSDILSLFKQQNYTAKHVVITGGEPCLYDLRALTEGLEQAGYDCQIETSGTHEIMCSEKTWVTLSPKVGMKGGYHVLTAAINRANEIKHPVGREKDIEALDSLLSLRTQQPTPVVALQPISCKDRATQLCIKTCIERNWRFSMQTHKYLNIA

SEQ ID NO: 29433 - protein, 213 aa, Coxiella burnetii
  REGION 1..213: note = tr|A9KGT6|A9KGT6_COXBN 7-carboxy-7-deazaguanine synthase OS=Coxiella burnetii (strain Dugway 5J108-111); OX = 434922 GN=queE PE=3 SV=1
MDKLRITEIFYSLQGETKTVGLPTVFVRLTGCPLRCHYCDTPYAFYGGQSLLLEDVVHQVASYQTRYVTVTGGEPLAQPACLPLLQRLCDLNYRVSLETSGALDISNVDPRVIKIVDVKTPGSKEMARNRFGNFEYLLPHDQVKFVICDRRDYEWAKDIINRYDLISRAEVLFSPSHEQLDKQQLADWIVEDRLSVRFQLQLHKYVWGDVRGK

SEQ ID NO: 29434 - protein, 213 aa, Coxiella burnetii; identical to SEQ ID NO: 29433
  REGION 1..213: note = tr|Q83F56|Q83F56_COXBU 7-carboxy-7-deazaguanine synthase OS=Coxiella burnetii (strain RSA 493 / Nine Mile phase I) OX=227377 GN=queE PE=3 SV=1

SEQ ID NO: 29435 - protein, 214 aa, Coxiella sp.
  REGION 1..214: note = tr|A0A2G1ZWQ5|A0A2G1ZWQ5_9COXI 7-carboxy-7-deazaguanine synthase OS=Coxiella sp. (in: Bacteria) OX=59288 GN=queE PE=3 SV=1
MIDTLRITEIFYSLQGETRTVGLPTVFVRLTGCPLRCGYCDTAYAFKGGTLTPIDSILNTVADYNPRYVTVTGGEPLAQPMCHTLLTQLCDRGYAVSLETSGAIDVAAVDKRVTKVVDFKTPGSLEVERNLFQNVDYLLPHDQVKFVICDREDYDWAKKIMTEHQLAQRCEVLFSPSHQQLSNQQLADWIIADNLTVRFQLQLHKVIWGDVPGV

SEQ ID NO: 29436 - protein, 241 aa, Coxiella sp.
  REGION 1..241: note = tr|A0A0S7Y0A5|A0A0S7Y0A5_9COXI 7-carboxy-7-deazaguanine synthase OS=Coxiella sp. DG_40; OX = 1703354 GN=queE PE=3 SV=1
MQNSNSSLLISEDFYSIQGEGVCCGIPAVFLRLSKCNLDCKGFSEGCDTKQLWTKGDKYIFDQIIRRWQENGWFKKMQDGAHLVLTGGEPLLQMDSLFSFVERLEKILNMHPYIELETNATILIDDKFLNKIDQINASPKLSNSGNSREKAYKRKVLLQLSQLAKTKFKFVIQHKEDIFEILNRYVLPFNINPNNIWLMPEGSTRQVIQKNSAMVVELCKQYMMNFSPRLQIDIWNELSGV

SEQ ID NO: 29437 - protein, 273 aa, unidentified
  source 1..273: note = Coxiellaceae bacterium
  REGION 1..273: note = tr|A0A2E9Z7P9|A0A2E9Z7P9_9COXI 7-carboxy-7-deazaguanine synthase OS=Coxiellaceae bacterium OX=2026727 GN=queE PE=3 SV=1
MILETTIQPKKAPPRKSSKVDTLNISEDFYSIQGEGATTGVPAYFIRLKACNLMCGGRDGSLMEEGKATWWCDTEYVWRKGLEKPFEYLTDRWTDQGLMDWIKQGRVHLIWTGGEPTIPKNQRGISNFLDWFDVQYCSDVACTPYSEVETNGTIFIEDGFFNKLDQINCSVKLANSGMNAKRRIVPKALERIMSHKNYFFKFVISTEDCLKEIVEDFVDPFNIDPRRVLMMPGLDKRENYHERTLFCMDMAKKYGFVGLTRLHVSAWDQLTGV

SEQ ID NO: 29438 - protein, 220 aa, unidentified
  source 1..220: note = Coxiellaceae bacterium
  REGION 1..220: note = tr|A0A3B9W4G6|A0A3B9W4G6_9COXI 7-carboxy-7-deazaguanine synthase OS=Coxiellaceae bacterium OX=2026727 GN=queE PE=3 SV=1
MLYKVVDVTSLRITEIFYSLQGESSTVGYPTVFVRLTGCPLRCVYCDSAYAFKGGKRFTITEVLSEVAAYQPKYVTVTGGEPLAQPACIELLKQLCDAGYFVSIETSGALDISPIDQRVMTVMDWKTPESGEMHRNRQENVKYLKSMDQVKYVISSREDYEWSKSSMIEHGFVDRCDVLFSPVYEKLQPQHLADWIVDDRLPVRFQFQLHKLLWNDEPGR

SEQ ID NO: 29439 - protein, 221 aa, unidentified
  source 1..221: note = Crassaminicella sp.
  REGION 1..221: note = tr|A0A5C0SG37|A0A5C0SG37_9CLOT 7-carboxy-7-deazaguanine synthase OS=Crassaminicella sp. SY095 OX=2599308 GN=queE PE=3 SV=1
MMYKVVEKFVSINGEGRLSGQLAVFIRFLGCNLDCSYCDTKWANKENTSYTLMSEEEIYEYIKGTKVKNVTLTGGEPLLQENIIQLIEYLSKDNELSIEIETNGSVSLKEFTKIKNRPRFTMDYKLPSSGMEYKMLIDNFSYLKKEDTVKFVAGSMHDLERAKDIIDKYELKNRASVYVSPVFGKIDVKGMVEFMKEHKMNDVTLQLQLHKIIWDPEKKGV

SEQ ID NO: 29440 - protein, 210 aa, unidentified
  source 1..210: note = Crenobacter cavernae
  REGION 1..210: note = tr|A0A4Q2JD02|A0A4Q2JD02_9NEIS 7-carboxy-7-deazaguanine synthase OS=Crenobacter cavernae; OX = 2290923 GN=queE PE=3 SV=1
MTYTVKEIFYTLQGEGGQAGRAAVFCRFAGCNLWSGREQDRAAAVCRFCDTDFVGTGPDGGKFADAETLARRIAEEWQGAGGTPYVVCTGGEPLLQLDSALVDALHARGFEVAVETNGTIAAPAGIDWICVSPKGQAPLVQTSGHELKLVYPQEDAPSPEALAELDFKHFYLQPLDDARQRANTEAAIAYCMAHPQWKLSLQTHKLTGIR

SEQ ID NO: 29441 - protein, 210 aa, unidentified
  source 1..210: note = Crenobacter cavernae
  REGION 1..210: note = tr|A0A345Y7C8|A0A345Y7C8_9NEIS 7-carboxy-7-deazaguanine synthase OS=Crenobacter cavernae; OX = 2290923 GN=queE PE=3 SV=1
MTYTVKEIFYTLQGEGGQAGRAAVFCRFAGCNLWSGREQDRAAAVCRFCDTDFVGTGPDGGKFADAATLAERIAEEWKGAGGTPYVVCTGGEPLLQLDSALLDALHARGFEVAVETNGTITAPAGIDWICVSPKGQAPLVQTSGHELKLVYPQLDAPLPETLAGLDFSHFFLQPLDDPDQRANTEAAIAYCMAHPQWKLSLQTHKLTGIR

SEQ ID NO: 29442 - protein, 210 aa, unidentified
  source 1..210: note = Crenobacter luteus
  REGION 1..210: note = tr|A0A165FPU5|A0A165FPU5_9NEIS 7-carboxy-7-deazaguanine synthase OS=Crenobacter luteus; OX = 1452487 GN=queE PE=3 SV=1
MSYTVKEIFYTLQGEGGQAGRPAVFCRFAGCNLWSGREQDRAAAVCRFCDTDFVGTGPDGGKFTDAQTLAERIAAEWRGVGGKPYVVCTGGEPLLQLDAPLIDALHAKGFEVAVETNGTIAAPAGIDWICVSPKGTAPLAQTSGHELKLVYPQTDAPAPDALAELDFEHFYLQPLDDADQRANTEAAIAYCLAHPQWKLSLQTHKLTGIR

SEQ ID NO: 29443 - protein, 208 aa, unidentified
  source 1..208: note = Crenobacter sp.
  REGION 1..208: note = tr|A0A4T0V6J4|A0A4T0V6J4_9NEIS 7-carboxy-7-deazaguanine synthase OS=Crenobacter sp. GY 70310 OX=2563443 GN=queE PE=3 SV=1
MYTVRELFYTLQGEGAQVGRAAVFCRFAGCNLWSGREADRERAVCRFCDTDFVGVGPDGGRFADAASLARAIAGCWQGGDGARLVVFTGGEPLLQLDAALIGAVHAAGFKIAVETNGTLEAPDGIDWLCVSPKAGADWVQRCGDEIKLVYPQPGLIPAAVDASGFTHAWLQPMDGPDRAANTQAAIDYCLQHPRWRLSLQNHKLVGLR

SEQ ID NO: 29444 - protein, 238 aa, unidentified
  source 1..238: note = Crenotalea thermophila
  REGION 1..238: note = tr|A0A1I7NGS5|A0A1I7NGS5_9BACT 7-carboxy-7-deazaguanine synthase OS=Crenotalea thermophila OX=1393122 GN=queE PE=3 SV=1
MPNEPDRGFHPNFAEMHADTAHIKPLKVADTACPLNAADPDRLPVMETFYSLQGEGFHQGKAAFFIRLAGCDVGCVWCDVKESWMAEGYPVLSATEIAHQAALHPARMAIITGGEPTLYDLRALCQALHQQGFRVHLETSGAHELVGDFDWICLSPKKFKSPLKSVCQQAHELKVVIYHRSDFAWAETHARQVTPACKLYLQPEWSRRERMTPLIIDYIQQHPQWELSLQLHKYVQIP

SEQ ID NO: 29445 - protein, 215 aa, Crenothrix polyspora
  REGION 1..215: note = tr|A0A1R4HB60|A0A1R4HB60_9GAMM 7-carboxy-7-deazaguanine synthase OS=Crenothrix polyspora; OX = 360316 GN=queE PE=3 SV=1
MTESSLRITEIFYSLQGESNTVGLPTVFIRLTGCPLRCVYCDTAYAFSGGQRMAVTDIVADVAQYGTRYVTVTGGEPLAQSACHELMTALADAGYTVSLETSGAIDVSAVDARVIKVMDLKTPSSGELAKNLYQNIDFVTPDDQIKFVIGTDEDYDWSKALLTEYNLPERCQVLFSPVMGQQHPTELANKILQDRLPVRFQIQLHKLLWDDARGK

SEQ ID NO: 29446 - protein, 215 aa, Crenothrix polyspora
  REGION 1..215: note = tr|A0A1R4HG44|A0A1R4HG44_9GAMM 7-carboxy-7-deazaguanine synthase OS=Crenothrix polyspora; OX = 360316 GN=queE PE=3 SV=1
MTDSSLRITEIFYSLQGESNTVGLPTVFIRLTGCPLRCVYCDTAYAFTGGQRMSLAAILSAVAEYDTRYVTVTGGEPLAQPVCLELMTALADAGYKVSLETSGAIDVSGVDARVIKVMDLKTPSSGELAKNLYQNIDFIGSDDQIKFVIGTNEDYDWSKALLTEYNLTERCQVLFSPVMGQQHPTELADKILQDRLPVRFQIQLHKLLWNDAQGK

SEQ ID NO: 29447 - protein, 214 aa, Crenothrix sp.
  REGION 1..214: note = tr|A0A1Y2ZXD1|A0A1Y2ZXD1_9GAMM 7-carboxy-7-deazaguanine synthase OS=Crenothrix sp. D3; OX = 1880899 GN=queE PE=3 SV=1
MTHSLRITEIFYSLQGESNTVGLPTVFIRLTGCPLRCVYCDTAYAFTGGKKMTLADILADVEQYGGKYITVTGGEPLAQPACLELMTQLLDKGYTVSLETSGALDVSAVDLRAIKVMDIKTPSSGEMDKNRYANIEHLTTQDQIKFVIGNDDDYSWSKAILAEYDLLNRCEILFSPVMGQQNPTELADKILSDRLPVRFQIQLHKLLWDDAQGK

SEQ ID NO: 29448 - protein, 219 aa, unidentified
  source 1..219: note = Criblamydia sequanensis
  REGION 1..219: note = tr|A0A090E2T1|A0A090E2T1_9BACT 7-carboxy-7-deazaguanine synthase OS=Criblamydia sequanensis CRIB-18 OX=1437425 GN=queE PE=3 SV=1
METNTKTLRLIELFGSVQGETSFSGLPTTFIRLASCNLRCTWCDTPYSFGRGDAYSLEEILKQVKENHLKWVCITGGEPLLQENVYPLMQALIDLGYIVSLETSGSLCTQRVPEKVAIILDIKCPGSGMESKNLFSNLNHLKNNDEVKFVIKDEIDYRYSLDICRKFGLFEREKQPLFSPVHDELDSKLLIDWIKRDKIAVRLNLQIHKFIWSKDTKGV

SEQ ID NO: 29449 - protein, 202 aa, unidentified
  source 1..202: note = Cricetibacter osteomyelitidis
  REGION 1..202: note = tr|A0A4V2T1G2|A0A4V2T1G2_9PAST 7-carboxy-7-deazaguanine synthase OS=Cricetibacter osteomyelitidis OX=1521931 GN=queE PE=3 SV=1
MLTYNIVEIFESLQGEGFNTGMPSIFIRFGKCNLACPWCDTNYNQYESWSLERILTKVRSFSAKNVIITGGEPTVVPKLEILLESLKSENYFLAIETNGLKPIPLQIDYIATSPKRMYQHKYQRRCIPFAHEVRIVADGDVLAFCEQMENRIKAKHYYLSPCETDGEMNLLDTITQLGKLNQRTNKPKWQLSLQTHKLIGIE

SEQ ID NO: 29450 - protein, 264 aa, unidentified
  source 1..264: note = Crinalium epipsammum
  REGION 1..264: note = tr|K9W417|K9W417_9CYAN 7-carboxy-7-deazaguanine synthase OS=Crinalium epipsammum PCC 9333 OX=1173022; GN = queE PE=3 SV=1
MTPQTSDKQIARLIEIFSAIQGEGLNIGTRQIFIRFALCDLRCNYCDSAHTWEIPATCKIEKTPGERDFETYSNPVSIETLLEWVERQNQPGLHDSISLTGGEPLLHARFLKAFLPQVRALTNLPIYLETGGHRPEQLKMILPYLDSVGMDIKLPSVSGEEHWQAHREFLKCCYDSEVEVFAKLIISNNTEQAELEKAAELIASFSPSIPVYLQPVTPLEIPNVDETVLLPPLPEKVLNWQALMKRYLKQVRVVPQTHKMIGQL

SEQ ID NO: 29451 - protein, 210 aa, Croceibacter atlanticus
  REGION 1..210: note = tr|A3U882|A3U882_CROAH 7-carboxy-7-deazaguanine synthase OS=Croceibacter atlanticus (strain ATCC BAA-628 / HTCC2559 / KCTC 12090) OX=216432 GN=queE PE=3 SV=1
MTKEEISQLVEEGKMLPLMEEFYTIQGEGYHKGTAAYFIRIGGCDVGCHWCDVKESWDAEKHPPTATERIVSEAVKYSKTIVVTGGEPLTWDMTLLTQMLKAEGAQTHIETSGAYTLTGKWDWICLSPKKLKLPTKEVYEKANELKVIIFNKHDLKFAEEQAAKVNKDCILYLQPEWSVRDKVVPLIVDFVMANPQWKVSLQTHKYLNIP

SEQ ID NO: 29452 - protein, 248 aa, Croceicoccus marinus
  REGION 1..248: note = tr|A0A1Z1F931|A0A1Z1F931_9SPHN 7-carboxy-7-deazaguanine synthase OS=Croceicoccus marinus; OX = 450378 GN=queE PE=3 SV=1
MPIVLATTQPGEPEIFASLQGEGPSTGRPSVFVRLSRCNLACVWCDTAYTWRFSGDNRPHRGGESFARKANQVAIDEHDAAQKILALDPDRLVVTGGEPLLQAPALTRLITLLRDIRPRLHVEVETNGTVEAPHALDRLIDQYNVSPKLAHSGNDADLALVPERLQAYSEDPRAFFKFVIATPADLDEVLELKRTYGILPSRLQLMPEGTDSATLYDRMRWLAPLAMRHGLRLTDRLHIHLYGDTRGT

SEQ ID NO: 29453 - protein, 244 aa, unidentified
  source 1..244: note = Croceicoccus naphthovorans
  REGION 1..244: note = tr|A0A0G3XK98|A0A0G3XK98_9SPHN 7-carboxy-7-deazaguanine synthase OS=Croceicoccus naphthovorans OX=1348774 GN=queE PE=3 SV=1
MSLTLATDDTGGPEIFASLQGEGASIGRPVAFVRLSRCNLACTWCDTAYTWHFEGDNRPHRDGVTFDRKANQVVLDEADVAKRIAALGQNRLVITGGEPMLQAAALAKMLDHLPDIEVEIETNGTVKPPARLDVRVDQFNVSPKLAHSGNSATQALIPDMLDFWADDPRAFLKFVIAEPADLAEAMGLVDRHRHPKDRVYLMPEGTSGDVLSTRMRWLAPLAIRHGVRLTDRQHIHLFGDTRGT

SEQ ID NO: 29454 - protein, 248 aa, unidentified
  source 1..248: note = Croceicoccus ponticola
  REGION 1..248: note = tr|A0A437GWK0|A0A437GWK0_9SPHN 7-carboxy-7-deazaguanine synthase OS=Croceicoccus ponticola OX=2217664 GN=queE PE=3 SV=1
MTLTLATTVPGEPEIFASLQGEGPSIGRPVAFVRLSRCNLACTWCDTAYTWHFEGDNRPHRDGVAFDRSANQVVLDETEVAARIAALGQSRLVITGGEPLLQGPALAKMLEHLDTIAPGMQVEIETNGTVRPTARLDVRVDQYNVSPKLPHSGNPATLALIPEMLDFWADDPRAFLKFVVSEPADLDEVTALIEAHRHPKDRVFVMPEGTDSITLRERERWLADAALERGLRMTDRLHIHLYGDTRGT

SEQ ID NO: 29455 - protein, 248 aa, Croceicoccus sp.
  REGION 1..248: note = tr|A0A2D8D5D7|A0A2D8D5D7_9SPHN 7-carboxy-7-deazaguanine synthase OS=Croceicoccus sp.; OX = 1927144 GN=queE PE=3 SV=1
MPIVLATTQPGEPEIFASLQGEGPSTGRPSVFVRLSRCNLACVWCDTAYTWRFSGDNRPHRGGESFARKANQVAVDEGDAAQKILALDPDRLVVTGGEPLLQAPALTRLITLLREIRPRLHVEIETNGTVEAPRALDTLIDQYNVSPKLAHSGNDADLALIPERLQAYSEDPRAFFKFVIATPADLDEVLDLKRTYGILPSRLQLMPEGTDSATLYDRMRWLAPLAMQHGLRLTDRLHIHLYGDTRGT

SEQ ID NO: 29456 - protein, 204 aa, Croceitalea dokdonensis
  REGION 1..204: note = tr|A0A0P7B0Q1|A0A0P7B0Q1_9FLAO 7-carboxy-7-deazaguanine synthase OS=Croceitalea dokdonensis DOKDO 023 OX=1300341 GN=queE PE=3 SV=1
MDLVDKGAMLPLMEEFYTIQGEGFHKGTAAYFVRIGGCDVGCHWCDVKESWNAETHPPTAIEHILSNSKKYSDTIVITGGEPLTWDMGPLTQGLKAQGQHIHIETSGAYPLTGVWDWICLSPKKNKLPVGDIYQKAHELKMIVYNKHDFIFAEEQAAKVSKDCMLYLQPEWSVREKVTPLIVEYVMKHPKWKVSLQTHKYLNIP

SEQ ID NO: 29457 - protein, 210 aa, unidentified
  source 1..210: note = Croceivirga radicis
  REGION 1..210: note = tr|A0A1V6LPS6|A0A1V6LPS6_9FLAO 7-carboxy-7-deazaguanine synthase OS=Croceivirga radicis; OX = 1929488 GN=queE PE=3 SV=1
MVLQDVMDLVEKGQMLPLMEEFYTIQGEGYFKGTAAYFIRVGGCDVGCHWCDVKESWNAETHPPTAIEKIINNAASYSDTIVITGGEPLTWDMGPLTQGLKAKGLKTHIETSGAYTLTGVWDWICLSPKKMKLPVPEVYEKANELKVIVYNKHDLIFAEEQAKKVNKDCILYLQPEWSVRDKVVPMIVDYVMANPQWKVSLQTHKYLNIP

SEQ ID NO: 29458 - protein, 193 aa, unidentified
  source 1..193: note = Crocinitomicaceae bacterium
  REGION 1..193: note = tr|A0A358Y876|A0A358Y876_9FLAO 7-carboxy-7-deazaguanine synthase OS=Crocinitomicaceae bacterium OX=2026728 GN=queE PE=3 SV=1
MEYFHTIQGEGFHTGRSAFFIRLGGCDVGCVWCDVKESWNVAAHPKLSTEKLIDIVKNSQAEFVVITGGEPAMHDLTDLTNRLRNQQIYSAIETSGCYPLLGEIDWYCFSPKKFKAPCNEAYEKANELKVIINHKSDLEWAEMHAEKVSNDCLLYLQPEWSNLERNTEWIVSYVKSNPKWKISLQTHKYMNIP

SEQ ID NO: 29459 - protein, 193 aa, unidentified
  source 1..193: note = Crocinitomicaceae bacterium
  REGION 1..193: note = tr|A0A2E4TE58|A0A2E4TE58_9FLAO 7-carboxy-7-deazaguanine synthase OS=Crocinitomicaceae bacterium OX=2026728 GN=queE PE=3 SV=1
MERFPTLQGEGAWTGHAAWFIRLGGCDVGCSWCDVKESWPLEAHPRVDVATLVQEAVASGLPRVVVTGGEPTMHDLGPLTEALKAEGLATHLETSGTGAVSGQWDWVTLSPKKFKACQEAWYSQANELKVVVVNSHDLEWAEEHAAKIQTGTAMFLQPEWDRREEVMERVLNRIQEAPQWRLSLQTHRFIGLP

SEQ ID NO: 29460 - protein, 205 aa, Crocinitomix sp.
  REGION 1..205: note = tr|A0A2W1N614|A0A2W1N614_9FLAO 7-carboxy-7-deazaguanine synthase OS=Crocinitomix sp. SM1701 OX=2219161 GN=queE PE=3 SV=1
MIPYNESLEIPLMESFYSVQGEGFHTGRPAFFIRFSGCNVGCSWCDVKESWDATIHPLVQIDSILQEVLDSGTNFVVITGGEPTMYNLAPLTAALKKNNIEIAIETSGAYPINGQIDWICLSPKKFKMPLEENYAKANELKMIAVNNHDFKWALELDQKVSPQCKRFIQPEWDKQDGILPKVIDFVKENIHWKISLQTHKILNVR

SEQ ID NO: 29461 - protein, 213 aa, unidentified
  source 1..213: note = Crocosphaera chwakensis
  REGION 1..213: note = tr|A3IMF5|A3IMF5_9CHRO 7-carboxy-7-deazaguanine synthase OS=Crocosphaera chwakensis CCY0110 OX=391612; GN = queE PE=3 SV=1
MNSLASVGMKAIAPQLKTYPIVERFHSLQGEGTWTGMSAFFIRLAGCDVHCPWCDQKESWNSNLYPQQSIKTLTDAAKAANPAMVVITGGEPLIHDLFPLTKGLKQLGLRVHLETSGAYPLTGEFDWITLSPKPFKVPHETVYSQVNELKVIIANEADLNWAEKQEKKVPSQTIKYLQPEWNSPESKSLIFDYILSNPQWRMSLQIHKFLGVR

SEQ ID NO: 29462 - protein, 213 aa, unidentified
  source 1..213: note = Crocosphaera subtropica
  REGION 1..213: note = tr|B1WT29|B1WT29_CROS5 7-carboxy-7-deazaguanine synthase OS=Crocosphaera subtropica (strain ATCC 51142 / BH68) OX=43989 GN=queE PE=3 SV=1
MNSLASVDMKAIAPQLMTYPIVEIFHSLQGEGTWTGMSAFFIRLAGCDVHCPWCDQKESWTSKIYPQQSIKTLAEAAKAANPAMVVITGGEPLMYDLFPLTKALKKLGLRVHLETSGAYPFSGQFDWVTLSPKPFKVPHESIYPQVNELKVVITNQEDFHWAEEQEKKVPPQALKYLQPEWNYPESQSLIFDYIRKAPQWRMSLQIHKFLGVR

SEQ ID NO: 29463 - protein, 213 aa, unidentified
  source 1..213: note = Crocosphaera watsonii
  REGION 1..213: note = tr|T2J2L3|T2J2L3_CROWT 7-carboxy-7-deazaguanine synthase OS=Crocosphaera watsonii WH 0401 OX=555881; GN = queE PE=3 SV=1
MNSLASVSQKEISSQLITYPIVETFHSLQGEGTWTGVNAFFIRLAGCDVHCPWCDQKESWTSKKYPQQSIKILAEVSKMANPFMVVITGGEPLMYDLFPLTKALKKLGLRVHLETSGSHSFTGQFDWVTFSPKPFKLPHESIYSQVNELKIVIANQEDLHWAEEEAKKVPREAIKYLQPEWNTPESQSLIFDYILKHPQWRMSLQTHKFLGVR

SEQ ID NO: 29464 - protein, 213 aa, unidentified
  source 1..213: note = Crocosphaera watsonii
  REGION 1..213: note = tr|T2J2Q6|T2J2Q6_CROWT 7-carboxy-7-deazaguanine synthase OS=Crocosphaera watsonii WH 0005 OX=423472; GN = queE PE=3 SV=1
MNSLASVSQKAIASQLITYPIVETFHSLQGEGTWTGVNAFFIRLAGCDVHCPWCDQKESWTSKKYPQQSIKILAEVSKMANPFMVVITGGEPLMYDLFPLTKALKKLGLRVHLETSGSHSFTGQFDWVTFSPKPFKLPHESIYSQVNELKIVIANQEDLHWAEEEAKKVPREAIKYLQPEWNTPESQSLIFDYILKHPQWRMSLQTHKFLGVR

SEQ ID NO: 29465 - protein, 223 aa, Cronobacter condimenti
  REGION 1..223: note = tr|K7ZX58|K7ZX58_9ENTR 7-carboxy-7-deazaguanine synthase OS=Cronobacter condimenti 1330 OX=1073999 GN=queE; PE = 3 SV=1
MQYPINEMFQTLQGEGYFTGVPAIFIRLQGCPVGCAWCDTKHTWEKLADREVSLFSIIAKTKESDKWGAASPEDLLAAIERQGYTARHVVITGGEPCIHNLLPLTEMLEAQGFSCQIETSGTHDVRCTTGTWVTVSPKVNMRGGYDVLDQALMRADEIKHPVGRMRDIEALDELLARLHDERQRVIALQPISQKDDATRLCIETCIARNWRLSMQTHKYLNIA

SEQ ID NO: 29466 - protein, 223 aa, Cronobacter dublinensis
  REGION 1..223: note = tr|K8BBW1|K8BBW1_9ENTR 7-carboxy-7-deazaguanine synthase OS=Cronobacter dublinensis 1210 OX=1208656; GN = queE PE=3 SV=1
MQYPINEMFQTLQGEGYFTGVPAIFIRLQGCPVGCAWCDTKHTWETLADREVSLFSIIAKTKESDKWGAASPEDLLAAIERQAYTARHVVITGGEPCIHDLLPLTELLEAHGFSCQIETSGTHEVRCTTGTWVTVSPKVNMRGGYEVLDQALMRADEIKHPVGRVRDIEALDELLARLHDERQRVIALQPISQKEDATRLCIETCIARNWRLSMQTHKYLNIA

SEQ ID NO: 29467 - protein, 223 aa, Cronobacter dublinensis
  REGION 1..223: note = tr|K8BIN8|K8BIN8_9ENTR 7-carboxy-7-deazaguanine synthase OS=Cronobacter dublinensis 582 OX=1208661 GN=queE; PE = 3 SV=1
MQYPINEMFQTLQGEGYFTGVPAIFIRLQGCPVGCAWCDTKHTWETLADREVSLFSIIAKTKESDKWGAASPEDLLAAIERQAYTSRHVVITGGEPCIHDLLPLTELLEAHGFSCQIETSGTHEVRCTTGTWVTVSPKVNMRGGYEVLDQALMRADEIKHPVGRMRDIEALDELLARLHDERQRVIALQPISQKEDATRLCIETCIARNWRLSMQTHKYLNIA

SEQ ID NO: 29468 - protein, 223 aa, Cronobacter malonaticus
  REGION 1..223: note = tr|V5TVN0|V5TVN0_9ENTR 7-carboxy-7-deazaguanine synthase OS=Cronobacter malonaticus OX=413503 GN=queE PE=3; SV = 1
MQYPINEMFQTLQGEGYFTGVPAIFIRLQGCPVGCAWCDTKHTWDKLADREVSLFSIIAKTKESDKWGAASPEDLLAAIERQAYTARHVVITGGEPCIHDLLPLTELLEAHGFSCQIETSGTHEVRCTTGTWVTVSPKVNMRGGYEVLDQALMRADEIKHPVGRMRDIEALDELLARLHDERQRVIALQPISQKEDATRLCIETCIARNWRLSMQTHKYLNIA

SEQ ID NO: 29469 - protein, 223 aa, Cronobacter malonaticus
  REGION 1..223: note = tr|A0A423XYT9|A0A423XYT9_9ENTR 7-carboxy-7-deazaguanine synthase OS=Cronobacter malonaticus OX=413503 GN=queE PE=3 SV=1
MQYPINEMFQTLQGEGYFTGVPAIFIRLQGCPVGCAWCDTKHTWDKLADREVSLFSIIAKTKESDKWGAASPEELLAAIERQAYTARHVVITGGEPCIHDLLPLTELLEAHGFSCQIETSGTHEVRCTTGTWVTVSPKVNMRGGYEVLDQALMRADEIKHPVGRMRDIEALDELLARLHDERQRVIALQPISQKEDATRLCIETCIARNWRLSMQTHKYLNIA

SEQ ID NO: 29470 - protein, 223 aa, Cronobacter muytjensii
  REGION 1..223: note = tr|A0A2T7AS14|A0A2T7AS14_9ENTR 7-carboxy-7-deazaguanine synthase OS=Cronobacter muytjensii OX=413501 GN=queE PE=3 SV=1
MQYPINEMFQTLQGEGYFTGVPAIFIRLQGCPVGCAWCDTKHTWEKLADREVSLFSIIAKTKESDKWGAASPEELLAAIERQGYTARHVVITGGEPCIHDLLPLTELLEAHGFSCQIETSGTHEVRCTTGTWVTVSPKVNMRGGYDVLDQALMRADEIKHPVGRMRDIEALDELLACLHDERQRVIALQPISQKDDATRLCIEVCIARNWRLSMQTHKYLNIA

SEQ ID NO: 29471 - protein, 223 aa, Cronobacter sakazakii
  REGION 1..223: note = tr|A7MJ75|A7MJ75_CROS8 7-carboxy-7-deazaguanine synthase OS=Cronobacter sakazakii (strain ATCC BAA-894); OX = 290339 GN=queE PE=3 SV=1
MQYPINEMFQTLQGEGYFTGVPAIFIRLQGCPVGCAWCDTKHTWETLADREVSLFSIIAKTKESDKWGAASPEDLLAAIERQAYTARHVVITGGEPCIHDLLPLTELLEAHGYSCQIETSGTHEVRCTTGTWVTVSPKVNMRGGYEVLDQALMRADEIKHPVGRMRDIEALDELLARLHDERQRVIALQPISQKEDATRLCIETCIARNWRLSMQTHKYLNIA

SEQ ID NO: 29472 - protein, 223 aa, Cronobacter sakazakii; identical to SEQ ID NO: 29471
  REGION 1..223: note = tr|K8DC68|K8DC68_CROSK 7-carboxy-7-deazaguanine synthase OS=Cronobacter sakazakii 696 OX=1208664 GN=queE; PE = 3 SV=1

SEQ ID NO: 29473 - protein, 223 aa, Cronobacter sp.
  REGION 1..223: note = tr|A0A5J6X7X6|A0A5J6X7X6_9ENTR 7-carboxy-7-deazaguanine synthase QueE OS=Cronobacter sp. JZ38 OX=1906275 GN=BJP61_05335 PE=4 SV=1
MQYPINEMFQTLQGEGYFTGVPAIFIRLQGCPVGCAWCDTKHTWEKLADREVSLFSIIAKTKESDKWGAASPEDLLAAIERQAYTARHVVITGGEPCIHDLLPLTELLEAHGFSCQIETSGTHEVRCTTGTWVTVSPKVNMRGGYDVLDQALMRADEIKHPVGRVRDIEALDELLARLNDERQRVIALQPISQKEDATRLCIETCIARNWRLSMQTHKYLNIA

SEQ ID NO: 29474 - protein, 223 aa, Cronobacter turicensis
  REGION 1..223: note = tr|C9XZ32|C9XZ32_CROTZ 7-carboxy-7-deazaguanine synthase OS=Cronobacter turicensis (strain DSM 18703 / LMG 23827 / z3032) OX=693216 GN=ygcF PE=3 SV=1
MQYPINEMFQTLQGEGYFTGVPAIFIRLQGCPVGCAWCDTKHTWETLADREVSLFSIIAKTKESDKWGSASPEELLAAIERQAYTARHVVITGGEPCIHDLLPLTELLEAHGYSCQIETSGTHEVRCTTGTWVTVSPKVNMRGGYEVLDQALMRADEIKHPVGRMRDIEALDELLARLHDERQRVIALQPISQKDDATRLCIETCIARNWRLSMQTHKYLNIA

SEQ ID NO: 29475 - protein, 223 aa, Cronobacter turicensis
  REGION 1..223: note = tr|A0A2T7B6Q4|A0A2T7B6Q4_9ENTR 7-carboxy-7-deazaguanine synthase OS=Cronobacter turicensis OX=413502 GN=queE PE=3 SV=1
MQYPINEMFQTLQGEGYFTGVPAIFIRLQGCPVGCAWCDTKHTWETLADREVSLFSIIAKTKESDKWGSASPEELLAAIERQAYTARHVVITGGEPCIHDLLPLTELLEAHGYSCQIETSGTHEVRCTTGTWVTVSPKVNMRGGYEVLDQALMRADEIKHPVGRMRDIEALDELLARLHDERQRVIALQPISQKEDATRLCIETCIARNWRLSMQTHKYLNIA

SEQ ID NO: 29476 - protein, 223 aa, Cronobacter universalis
  REGION 1..223: note = tr|A0A376EUX3|A0A376EUX3_9ENTR 7-carboxy-7-deazaguanine synthase OS=Cronobacter universalis NCTC 9529 OX=1074000 GN=queE PE=3 SV=1
MQYPINEMFQTLQGEGYFTGVPAIFIRLQGCPVGCAWCDTKHTWETLADREVSLFSIIAKTKESDKWGAASPEELLAAIERQAYTARHVVITGGEPCIHDLLPLTELLEAHGYSCQIETSGTHEVRCTTGTWVTVSPKVNMRGGYEVLDQALMRADEIKHPVGRMRDIEALDELLARLHDERQRVIALQPISQKEDATRLCIETCIARNWRLSMQTHKYLNIA

SEQ ID NO: 29477 - protein, 207 aa, unidentified
  source 1..207: note = Cruoricaptor ignavus
  REGION 1..207: note = tr|A0A1M6G6C2|A0A1M6G6C2_9FLAO 7-carboxy-7-deazaguanine synthase OS=Cruoricaptor ignavus; OX = 1118202 GN=queE PE=3 SV=1
MFSDLPNQKLSISEVFYSLQGEGARAGTPTIFVRLQGCKAKHACASMGVKCDTEFESGSQWSVKTLLEKIHTIAPNCKEITWTGGEPTDQLDEEIIYYFKEQGFFQAIETSGLNPVPKGIDFICVSPKVAEHIVKKNFPNGVDELRYVRHSGQEIPQPSIEAKNYWISPHSDGFEINSENLKHCISLSLKNPKWKLSIQQHKIWNIL

SEQ ID NO: 29478 - protein, 207 aa, unidentified
  source 1..207: note = Cruoricaptor ignavus
  REGION 1..207: note = tr|A0A1M6ASJ6|A0A1M6ASJ6_9FLAO 7-carboxy-7-deazaguanine synthase OS=Cruoricaptor ignavus; OX = 1118202 GN=queE PE=3 SV=1
MTLNSDLESGLALPVMEHFYTLQGEGMHSGRAAYFIRLGGCDVGCHWCDVKESWDAELHPLMNAEELAKTAAAHCKTIVITGGEPLMWNLNPLTQHLKSLGCAIHIETSGAHPLSGRLDWVTLSPKKNSLPLEEIYQRADELKVIVYNQHDFQFAKAQAEKVSDSCHLLLQSEWGRREILYPEITKFILENPKWRASVQTHKYLNIP

SEQ ID NO: 29479 - protein, 202 aa, unidentified
  source 1..202: note = Cryomorphaceae bacterium
  REGION 1..202: note = tr|A0A368DDC1|A0A368DDC1_9FLAO 7-carboxy-7-deazaguanine synthase OS=Cryomorphaceae bacterium OX=1898111 GN=queE PE=3 SV=1
MKIDCNNLPVMEMFYSLQGEGYHSGSAAFFIRIAGCDVGCHWCDVKESWDHGNHDVLNIPKIIDSIDNKTRIVVISGGEPLMWDMTVITTKLKEKNFRRHLETSGAYDISGDWDWICLSPKKQQLPKNQLYQIADELKIIIYNKHDLNFAIEESRKVNDNCKLFLQPEWGKFDKMKDEIVKFIKTNSRWRLSLQTHKFLGVD

SEQ ID NO: 29480 - protein, 203 aa, unidentified
  source 1..203: note = Cryomorphaceae bacterium
  REGION 1..203: note = tr|A0A0R2SLW9|A0A0R2SLW9_9FLAO 7-carboxy-7-deazaguanine synthase OS=Cryomorphaceae bacterium BACL23 MAG-120924-bin60 OX=1655594 GN=queE PE=3; SV = 1
MAAADAQNLPLMEAFRTVQGEGAHTGRPSFFFRIGGCDVGCHWCDVKESWDAGKHPVTPLAAMLEQLRPEDQTVVVTGGEPLMWNMGPLTEALQAAEKRVHLETSGAYPLTGTWDWICLSPKKTKAPRPEWYAVAHELKVIVYNRDDIRWAQEHAAQCHPGCILYMQPEWSRRETALPMIIEFLEDHPEWRLSLQTHKYIGMP

SEQ ID NO: 29481 - protein, 264 aa, Cryptobacterium sp.
  REGION 1..264: note = tr|R7CDZ9|R7CDZ9_9ACTN 7-carboxy-7-deazaguanine synthase OS=Cryptobacterium sp. CAG:338 OX=1262868 GN=queE; PE = 3 SV=1
MSSEVTFPVVERFVSINGEGLRAGRLSTFIRMAGCNLACSWCDTSWANEKDCPYEELSVSDLVSWVEDTCVSCVTLTGGEPALQQGLDTLIEALALSNNWGQLEAFDRNGVSQSGKSRYVKLDEKQATRVIEIETNGSLDLSFLHDLRLSLEKRVSTPTVLAFTVDCKLPSSGMFAEMLDSNYALLTSQDVVKFVIAGTQDLETALAQIQKYELPSKCEVFFSPVFSCIDPADIVSFMKAHELSTVRLQLQLHKIIWPEKDKGV

SEQ ID NO: 29482 - protein, 242 aa, Cryptosporangium sp.
  REGION 1..242: note = tr|A0A545ANE6|A0A545ANE6_9ACTN 7-carboxy-7-deazaguanine synthase OS=Cryptosporangium sp. A-T 5661 OX=2593070 GN=queE PE=3 SV=1
MTAAAAAPAPTNAEVTLRVAELFGPTLQGEGPSAGQRAVFVRLSGCNLDCGWCDTPYTWDWARFDPAQESRTLPVQAVLDWILGRDTDLVVITGGEPLIQHARLTPLAQALAAAGRRIEIETNGTIAPPDRLIECVERFNVSPKLGGSGVPIGRRIRPAALEALRGTGKAVFKFVIGAPEDLAELADLQARFGLAPVWVMPQGTHPADVVEGLRALAEPTLAHGWNLSSRLHVLVWGDQRGR

SEQ ID NO: 29483 - protein, 276 aa, unidentified
  source 1..276: note = Culturomica sp.
  REGION 1..276: note = tr|A0A356DII1|A0A356DII1_9BACT 7-carboxy-7-deazaguanine synthase OS=Culturomica sp.; OX = 1926652 GN=queE PE=3 SV=1
MVEKDKIILARDGVFPITRNAEGEPVSSLPNSGLCCPGTIQGEGKLNGIPSLFIRLAGCNLHCIWTNPDGSLSPCDTAYASYHIRQARSCTLEEICRLIGYNTGVIDHLVITGGEPLLQYKELTELCIRLKKIKKFHITLETNATLYAEELATQIDFFSLSPKLAGSIPPPPQNILHDKQRLSPETIQKFISHTRTHNKDFQLKFVYSQETDITEIKTLLSCLTDWKKEDVLLMPQGGNSRDVEANIQQTLRHCIENGWRYCDRLHLALFSSKEGV

SEQ ID NO: 29484 - protein, 211 aa, unidentified
  source 1..211: note = Cupriavidus alkaliphilus
  REGION 1..211: note = tr|A0A2W7PUT7|A0A2W7PUT7_9BURK 7-carboxy-7-deazaguanine synthase OS=Cupriavidus alkaliphilus OX=942866 GN=queE PE=3 SV=1
MTYAVKEIFYTLQGEGANAGRAAVFCRFAGCNLWSGREQDRASAVCQFCDTDFVGTDGTRGGKYRSAGELAAVVASEWPQGAGGKPLVVCTGGEPLLQLDAPLIDALHAQGFEIAIETNGTIAVPPGIDWVCVSPKMGSELVVTHGDELKVVIPQEGQDFAAYEKLDFRHFLVQAMDGPLARENTAAAVAFCQRHPRWRLSLQTHKLLGIR

SEQ ID NO: 29485 - protein, 211 aa, unidentified
  source 1..211: note = Cupriavidus alkaliphilus
  REGION 1..211: note = tr|A0A329AYV2|A0A329AYV2_9BURK 7-carboxy-7-deazaguanine synthase OS=Cupriavidus alkaliphilus OX=942866 GN=queE PE=3 SV=1
MTYAVKEIFYTLQGEGANAGRAAVFCRFAGCNLWSGREQDRASAVCQFCDTDFVGTDGTRGGKYRSAEELAAVVASEWPQGAGGKPLVVCTGGEPLLQLDAPLIEALHAQGFEIAIETNGTIAVPPGIDWVCVSPKMGSELVVTRGDELKVVIPQEGQDFAAYEKLDFRHFLVQAMDGPLARENTAAAVAFCQRHPRWRLSLQTHKLLGIR

SEQ ID NO: 29486 - protein, 215 aa, Cupriavidus basilensis
  REGION 1..215: note = tr|A0A0C4YC09|A0A0C4YC09_9BURK 7-carboxy-7-deazaguanine synthase OS=Cupriavidus basilensis OX=68895 GN=queE PE=3 SV=1
MTYAVKEIFYTLQGEGANAGRAAVFCRFSGCNLWSGREEDRASAVCQFCDTDFVGTDGTEGGKYRTAEALADKIAAQWPQAVDGNAAGHALVVCTGGEPLLQLDAPLIDALHARGFEIAIETNGTLPVPEGIDWVCVSPKMGAELVVRRGDELKVVIPQDGQDFAAYEHLDFRYFLVQAMDGPLARQNTALAVEFCQRRPLWRLSLQTHKLLGIR

SEQ ID NO: 29487 - protein, 220 aa, Cupriavidus basilensis
  REGION 1..220: note = tr|H1S880|H1S880_9BURK 7-carboxy-7-deazaguanine synthase OS=Cupriavidus basilensis OR16 OX=1127483 GN=queE; PE = 3 SV=1
MTYAVKEIFYTLQGEGANAGRAAVFCRFSGCNLWSGREEDRASAVCQFCDTDFVGTDGTEGGKYRTAEALADKVAAQWPQAVDSAAAGRPLVVCTGGEPLLQLDAPLIDALHARGFEIAIETNGTLPVPHGIDWVCVSPKMGSELVVTRGDELKVVIPQDGQDFAAYERLDFRYFLVQAMDGPLARQNTALAVEFRSGAFRCRPTSCSASGRQIAQIAPV

SEQ ID NO: 29488 - protein, 214 aa, Cupriavidus campinensis
  REGION 1..214: note = tr|A0A556UVP9|A0A556UVP9_9BURK 7-carboxy-7-deazaguanine synthase OS=Cupriavidus campinensis OX=151783 GN=queE PE=3 SV=1
MTYAVKEIFYTLQGEGANAGRAAVFCRFSGCNLWTGREEDRARAVCQFCDTDFVGTDGTRGGKYKTAEELAAVVASEWPQGPGSAGGKPLVVCTGGEPLLQLDAPLIDALHAQGFEIAIETNGTLPVPDGIDWVCVSPKMGADLVVTRGDELKVVIPQDGQDFAAYEQLDFRYFMVQAMDGPLARQNTAAAVEFCQRHPRWRLSLQTHKLLGIR

SEQ ID NO: 29489 - protein, 211 aa, Cupriavidus gilardii
  REGION 1..211: note = tr|A0A0M5KLB6|A0A0M5KLB6_9BURK 7-carboxy-7-deazaguanine synthase OS=Cupriavidus gilardii CR3 OX=1267562 GN=nrdG PE=3 SV=1
MTYAVKEIFYTLQGEGANAGRAAVFCRFAGCNLWTGREQDREQAICRFCDTDFVGTDGTLGGKYRSAEELAAQVASQWPQGAGGRPLVVCTGGEPLLQLDAPLIDALHAQGFEIAIETNGTIAVPDGIDWVCVSPKMGAELVVTRGDELKVVIPQPGQDFAAYEALDFRYFLVQPMDGLLARENTALAVDFCQRHPRWRLSLQTHKLLGIR

SEQ ID NO: 29490 - protein, 211 aa, Cupriavidus gilardii
  REGION 1..211: note = tr|A0A5A8ERV3|A0A5A8ERV3_9BURK 7-carboxy-7-deazaguanine synthase OS=Cupriavidus gilardii; OX = 82541 GN=queE PE=3 SV=1
MTYAVKEIFYTLQGEGANAGRAAVFCRFAGCNLWTGREQDREQAICRFCDTDFVGTDGTLGGKYRSAEELAAQVSSQWPQGAGGRPLVVCTGGEPLLQLDAPLIDALHAQGFEIAIETNGTIAVPDGIDWVCVSPKMGAELVVTRGDELKVVIPQPGQDFAAYEALDFRYFLVQPMDGPLARENTALAVDFCQRHPRWRLSLQTHKLLGIR

SEQ ID NO: 29491 - protein, 211 aa, Cupriavidus metallidurans
  REGION 1..211: note = tr|A0A132HK53|A0A132HK53_9BURK 7-carboxy-7-deazaguanine synthase OS=Cupriavidus metallidurans OX=119219 GN=queE_1 PE=3 SV=1
MTYAVKEIFYTLQGEGANAGRAAVFCRFSGCNLWTGREEDRARAVCQFCDTDFVGTDGTLGGKYKTADELAAVVAAEWPQGAGGKPLVVCTGGEPLLQLDAPLIGALHARGFEIAIETNGTIEVPEGIDWVCVSPKMGSELVVKKGDELKVVIPQDGQDFAAYEQLDFQYFMVQAMDGPLARQNTAAAVEFCQRHPRWRLSLQTHKLLGIR

SEQ ID NO: 29492 - protein, 240 aa, Cupriavidus metallidurans
  REGION 1..240: note = tr|A0A132HAI7|A0A132HAI7_9BURK 7-carboxy-7-deazaguanine synthase OS=Cupriavidus metallidurans OX=119219 GN=queE_2 PE=4 SV=1
MPSARFSMRSAARPEPIVADLKVGGFTPLTSIDFPGRLAAVVFCQGCPWRCDYCHNPHLIPVASPSARVWEDVLAFLARRRGLLDGVVFSGGEPTLQAALPAAMRDVRQLGFEVALHTAGMYPDRLEAALPWVDWVGFDIKAPAHRYDHVTGTPGSATRVMDSLARLVASGVAYECRTTWDPELFDEADLMALLHTLAEKGVLRWSLQVCNRAGMPVPHPAGIADRIAAACPRIAVRMPA

SEQ ID NO: 29493 - protein, 211 aa, unidentified
  source 1..211: note = Cupriavidus nantongensis
  REGION 1..211: note = tr|A0A142JK49|A0A142JK49_9BURK 7-carboxy-7-deazaguanine synthase OS=Cupriavidus nantongensis OX=1796606 GN=queE PE=3 SV=1
MTYAVKEIFYTLQGEGANAGRAAVFCRFAGCNLWSGREQDRASAVCQFCDTDFVGTDGTRGGKYRSAEELAAVVASEWPQGAGGKPLVVCTGGEPLLQLDAPLIDALHAQGFEIAIETNGTIAVPPGIDWVCVSPKMGSELVVTRGDELKVVIPQQGQDFAAYEKLDFRHFLVQAMDGPLARENTAAAVAFCQRHPQWRLSLQTHKLLGIR

SEQ ID NO: 29494 - protein, 211 aa, Cupriavidus necator
  REGION 1..211: note = tr|A0A367PJW5|A0A367PJW5_CUPNE 7-carboxy-7-deazaguanine synthase OS=Cupriavidus necator; OX = 106590 GN=queE PE=3 SV=1
MTYAVKEIFYTLQGEGANAGRAAVFCRFAGCNLWSGREDDRASAVCQFCDTDFVGTDGTRGGKYRTAEELAAVVASEWPQGAGGQPLVVCTGGEPLLQLDAPLIDALHAQGFEIAIETNGTIAVPPGIDWVCVSPKMGSELVVTRGDELKVVIPQEGQDFATYEQLDFRHFLVQAMDGPLARENTAAAVAFCQRHPRWRLSLQTHKLLGIR

SEQ ID NO: 29495 - protein, 211 aa, Cupriavidus necator
  REGION 1..211: note = tr|Q0KAE5|Q0KAE5_CUPNH 7-carboxy-7-deazaguanine synthase OS=Cupriavidus necator (strain ATCC 17699 / H16 / DSM 428 / Stanier 337) OX=381666 GN=queE PE=3 SV=1
MTYAVKEIFYTLQGEGANAGRAAVFCRFAGCNLWSGREEDRASAVCQFCDTDFVGTDGTRGGKYRTAEELAAVVASEWPQGAGGQPLVVCTGGEPLLQLDAPLIDALHAQGFEIAIETNGTIAVPPGIDWVCVSPKMGSELVVTRGDELKVVIPQEGQDFAAYEQLDFRHFLVQAMDGPLARENTAAAVAFCQRHPRWRLSLQTHKLLGIR

SEQ ID NO: 29496 - protein, 215 aa, Cupriavidus oxalaticus
  REGION 1..215: note = tr|A0A4P7LFZ1|A0A4P7LFZ1_9BURK 7-carboxy-7-deazaguanine synthase OS=Cupriavidus oxalaticus OX=96344 GN=queE PE=3 SV=1
MTYAVKEIFYTLQGEGANAGRAAVFCRFAGCNLWSGREEDRASAVCQFCDTDFVGTDGTRGGKYRTAGELAAVVASEWPQGAGGKPLGKPLVVCTGGEPLLQLDAPLIDALHEQGFEIAIETNGTIAVPPGIDWVCVSPKMGSELVVRGGDELKVVIPQAGQDFAAYEQLDFEHFLVQPMDGPLQRENTAAAVDFCQRHPRWRLSLQTHKLLGIR

SEQ ID NO: 29497 - protein, 215 aa, Cupriavidus oxalaticus
  REGION 1..215: note = tr|A0A375FWA4|A0A375FWA4_9BURK 7-carboxy-7-deazaguanine synthase OS=Cupriavidus oxalaticus OX=96344 GN=queE PE=3 SV=1
MTYAVKEIFYTLQGEGANAGRAAVFCRFAGCNLWSGREEDRASAVCQFCDTDFVGTDGTRGGKYRTAGELAAVVASEWPQGAGGKPLGKPLVVCTGGEPLLQLDAPLIDALHAQGFEIAIETNGTIAVPPGIDWVCVSPKMGSELVVRRGDELKVVIPQAGQDFAAYEQLDFRHLLVQPMDGPLQRENTAAAVDFCQRHPRWRLSLQTHKLLGIR

SEQ ID NO: 29498 - protein, 211 aa, Cupriavidus pauculus
  REGION 1..211: note = tr|A0A3G8H1E8|A0A3G8H1E8_9BURK 7-carboxy-7-deazaguanine synthase OS=Cupriavidus pauculus; OX = 82633 GN=queE PE=3 SV=1
MTYTVKEIFYTLQGEGANAGRAAVFCRFSGCNLWTGREEDRARAVCQFCDTDFVGTDGTRGGKYRTAEELAAVVASEWPQGAGGQPLVVCTGGEPLLQLDAPLIDALHAHGFEIAIETNGTIPVPEGIDWVCVSPKMGSELVVTKGDELKVVMPQAGQDFAAYEQLDFRYFLVQAMDGPLARQNTAAAVDFCQRHPRWRLSLQTHKLLGIR

SEQ ID NO: 29499 - protein, 211 aa, Cupriavidus pauculus
  REGION 1..211: note = tr|A0A2N5C6K4|A0A2N5C6K4_9BURK 7-carboxy-7-deazaguanine synthase OS=Cupriavidus pauculus; OX = 82633 GN=queE PE=3 SV=1
MTYAVKEIFYTLQGEGANAGRAAVFCRFSGCNLWTGREEDRARAVCQFCDTDFVGTDGTRGGKYKTAQELAAVVASEWPQGAGGQPLVVCTGGEPLLQLDAPLIDALHAQGFEIAIETNGTIEVPEGIDWVCVSPKMGSELVVKKGDELKVVMPQAGQDFAAYEQLDFRYFLVQAMDGPLARQNTAAAVDFCQRHPRWRLSLQTHKLLGIR

SEQ ID NO: 29500 - protein, 211 aa, Cupriavidus pinatubonensis
  REGION 1..211: note = tr|Q470H0|Q470H0_CUPPJ 7-carboxy-7-deazaguanine synthase OS=Cupriavidus pinatubonensis (strain JMP 134 / LMG 1197) OX=264198 GN=queE PE=3 SV=1
MTYAVKEIFYTLQGEGANAGRAAVFCRFAGCNLWSGREEDRATAVCQFCDTDFVGTDGTRGGKYRTAEELAGAVASEWPQGAGGKPLVVCTGGEPLLQLDAPLIDALHAQGFEIAIETNGTIKVPPGIDWVCVSPKMGSELVVRKGDELKVVIPQVGQDFAAYEQLDFQYFLVQAMDGPLARENTAAAVAFCQRHPRWRLSLQTHKLLGIR

SEQ ID NO: 29501 - protein, 214 aa, unidentified
  source 1..214: note = Cupriavidus plantarum
  REGION 1..214: note = tr|A0A316EYY3|A0A316EYY3_9BURK 7-carboxy-7-deazaguanine synthase OS=Cupriavidus plantarum; OX = 942865 GN=queE PE=3 SV=1
MTYAVKEIFYTLQGEGANAGRAAVFCRFAGCNLWTGREEDRARAVCQFCDTDFVGTDGTRGGKYRTADELADIVASEWPQGADAAGGKPLVVCTGGEPLLQLDKPLIDALHARGFEIAIETNGTIAVPDGIDWICVSPKMGSELVVTKGDELKVVIPQQGQDFAAYEQLDFRYFMVQAMDGPLARQNTAAAVDFCQRHPRWRLSLQTHKLLGIR

SEQ ID NO: 29502 - protein, 211 aa, Cupriavidus sp.; identical to SEQ ID NO: 29495
  REGION 1..211: note = tr|R7XPK1|R7XPK1_9BURK 7-carboxy-7-deazaguanine synthase OS=Cupriavidus sp. GA3-3 OX=1229514 GN=queE PE=3; SV = 1

SEQ ID NO: 29503 - protein, 211 aa, Cupriavidus sp.
  REGION 1..211: note = tr|A0A439EZN0|A0A439EZN0_9BURK 7-carboxy-7-deazaguanine synthase OS=Cupriavidus sp. UYMSc13B OX=1774746 GN=queE PE=3 SV=1
MTYAVKEIFYTLQGEGANAGRAAVFCRFAGCNLWSGREDDRASAVCQFCDTDFVGTDGTRGGKYRTAEELAAVVASEWPQGAGGQPLVVCTGGEPLLQLDAPLIDALHAQGFEIAIETNGTIAVPPGIDWVCVSPKMGSELVVTRGDELKVVIPQEGQDFAAYEQLDFRHFLVQAMDGPLARENTAAAVAFCQRHPRWRLSLQTHKLLGIR

SEQ ID NO: 29504 - protein, 211 aa, Cupriavidus taiwanensis
  REGION 1..211: note = tr|A0A375F6W8|A0A375F6W8_9BURK 7-carboxy-7-deazaguanine synthase OS=Cupriavidus taiwanensis OX=164546 GN=queE PE=3 SV=1
MTYAVKEIFYTLQGEGANAGRAAVFCRFAGCNLWSGREQDRASAVCQFCDTDFVGTDGTRGGKYRSAGELAAVVASEWPQGAGGKPLVVCTGGEPLLQLDAPLIDALHAQGFEIAIETNGTIAVPPGIDWVCVSPKMGSELVVTRGDELKVVIPQEGQDFAAYEKLDFRHFLVQAMDGPLARENTAAAVAFCQRHPRWRLSLQTHKLLGIR

SEQ ID NO: 29505 - protein, 211 aa, Cupriavidus taiwanensis
  REGION 1..211: note = tr|A0A375IZT5|A0A375IZT5_9BURK 7-carboxy-7-deazaguanine synthase OS=Cupriavidus taiwanensis OX=164546 GN=queE PE=3 SV=1
MTYAVKEIFYTLQGEGANAGRAAVFCRFAGCNLWSGREQDRASAVCQFCDTDFVGTDGTRGGKYRSAEELAAVVASEWPQGAGGKPLVVCTGGEPLLQLDAPLIDALHAQGFEIAIETNGTIAVPPGIDWVCVSPKMGSELVVTRGDELKVVIPQEGQDFAAYEKLDFRHFLVQAMDGPLARENTAAAVAFCQRHPRWRLSLQTHKLLGIR

SEQ ID NO: 29506 - protein, 223 aa, unidentified
  source 1..223: note = [Curtobacterium] plantarum
  REGION 1..223: note = tr|A0A3M7UEL2|A0A3M7UEL2_9GAMM 7-carboxy-7-deazaguanine synthase OS=[Curtobacterium] plantarum OX=221276 GN=queE PE=3 SV=1
MQYPINEMFQTLQGEGYYTGVPAIFIRLQGCPVGCSWCDTKHTWEKRTDRETSLGDILIKTVESDAWGDADAATLVSAIAQQGWTARHVVITGGEPAIYDLRPLTTALEQHGFQCQIETSGTHEIHCSERTWVTVSPKVNMRGGYDVLPQALSRADEIKHPVARERDVEALDRLLAGIDDTKARIIALQPISRKDDATRLCIETCIARNWRLSMQTHKYLNIA

SEQ ID NO: 29507 - protein, 235 aa, Curtobacterium sp.
  REGION 1..235: note = tr|A0A4P8SUE5|A0A4P8SUE5_9MICO 7-carboxy-7-deazaguanine synthase OS=Curtobacterium sp. SGAir0471 OX=2070337 GN=queE PE=3 SV=1
MRDRLHVSEIFTSLQGEGPSLGEYAVFLRLGRCNLSCSWCDTAYSWDWTRFNEAEEITSMPISDVVAHVLAINPRPSLLVVSGGEPLLQQPALTRLLVTLNEAAPELRVEFETNGTIRPSRMLATRANRFVVSPKLSNSDVPLERRIRPETLRTFATADANAFKFVVSNVEDVSEVVALSREVGFSRNRVWLMPEGATERQQQRSMRLLADAAIKEGFNFTPRLQVILWGDERGT

SEQ ID NO: 29508 - protein, 225 aa, unidentified
  source 1..225: note = Curvibacter putative
  REGION 1..225: note = tr|C9YHA0|C9YHA0_9BURK 7-carboxy-7-deazaguanine synthase OS=Curvibacter putative symbiont of Hydra magnipapillata OX=667019 GN=queE PE=3 SV=1
MLFLPLIRCGCVTAMAYQVKEIFYTLQGEGSHAGRPAVFCRFAGCNLWSGREQDRATAVCKFCDTDFVGTDGTLGGKFSTAQALAERIAAQWPAGDTAHRFVVMTGGEPLLQVDTALIDALHALGFQIAVETNGTVLVPEGIDWICVSPKAGSQWIQRQGHELKLVWPQAGITLEECEAADFKHRYLQPMDSPQRAANIETCITQCMQRPAWRLSLQTHKITGIR

SEQ ID NO: 29509 - protein, 211 aa, Curvibacter sp.
  REGION 1..211: note = tr|A0A1F8VVC5|A0A1F8VVC5_9BURK 7-carboxy-7-deazaguanine synthase OS=Curvibacter sp. GWA2_64_110 OX=1797747 GN=queE PE=3 SV=1
MTYAVKEIFYTLQGEGAQSGRAAVFCRFAGCNLWSGREEDRATAVCRFCDTDFVGTDGTGGGKFTTAEALADAIERAWEPAGQAGRYVVLTGGEPLLQVDEALTAALHARGFTIAVETNGTLPAPPGLDWICVSPKDQAEVVQKTGSELKLVYPQPGVDPAQFAGLAFEHFFLQPMDGPQREQNTAQAIAYCQQHPQWRLGIQSHKMIGIR

SEQ ID NO: 29510 - protein, 210 aa, Curvibacter sp.
  REGION 1..210: note = tr|A0A433CAM8|A0A433CAM8_9BURK 7-carboxy-7-deazaguanine synthase OS=Curvibacter sp.; OX = 1888168 GN=queE PE=3 SV=1
MSYAVKEVFYTLQGEGLRAGRPAVFCRFAGCNLWSGREADRATAVCRFCDTDFVGTDGTLGGKFADAQALAALIAAQWPAGQGHRYVVLTGGEPLLQVDEALTQALHAQGFEVAVETNGSLPAPAGIDWICVSPKAGAPLVQRSGHELKLVYPQAGLDPAELQHLDFEHFLLQPMDNPEQLANTRACIAYCQAQPRWRLSVQTHKVLDIR

SEQ ID NO: 29511 - protein, 265 aa, unidentified
  source 1..265: note = Cuspidothrix issatschenkoi
  REGION 1..265: note = tr|A0A2S6CT29|A0A2S6CT29_9CYAN 7-carboxy-7-deazaguanine synthase OS=Cuspidothrix issatschenkoi CHARLIE-1 OX=2052836 GN=queE PE=3 SV=1
MTAKNQGNSTARLIEVFSAIQGEGLNVGTRQIFIRFAFCDLRCWFCDSANTWNAPPNCRIERYPGLRDFEVHSNPVPLPMLLGWVARQNIPSIHDSISLTGGEPLLHAQFLAEFLPAVRSLTNLPIYLETGGHRPEQLEIVLPYLDSVGMDLKLPSVSGESHWTEHTKFLQLCSNTKLEVFVKIIVSQSTVPEELEQAALLIAQINDQIPVFLQPVTPLTPAQQFSSVAMVAPTPEQVLAWQVLMKGFVKYVRVIPQTHKMLNQM

SEQ ID NO: 29512 - protein, 162 aa, unidentified
  source 1..162: note = Cyanobacteria bacterium
  REGION 1..162: note = tr|A0A3M1KQJ9|A0A3M1KQJ9_9CYAN 7-carboxy-7-deazaguanine synthase QueE (Fragment); OS = Cyanobacteria bacterium J083 OX=2420336 GN=D6756_13970; PE = 3 SV=1
MEVQDYQAVTYPVVETFHSVQGEGYWTGVNAFFIRLGGCDVHCPWCDQKETWSSKGYPLVKSVELAHIAEASNCAIVIITGGEPLLHDLLPLTTSLKNLGLRIHLETSGAHPLRGEFDWLTFSPKPYRAPQQSVISQADELKVVIQKPEDIIWAETQAKNIP

SEQ ID NO: 29513 - protein, 259 aa, unidentified
  source 1..259: note = Cyanobacteria bacterium
  REGION 1..259: note = tr|A0A3B8JE38|A0A3B8JE38_9CYAN 7-carboxy-7-deazaguanine synthase OS=Cyanobacteria bacterium UBA8553 OX=2055771 GN=queE PE=3 SV=1
MSSKTLLTARLSEIFSAIQGEGLNVGSRQLFIRFALCDLRCHFCDSAHTWSVPKEYRVEHTPGVRDFESYPNPVALPVLLQWVNRLNQPGLHDSITLTGGEPLLHAPFLVEFLPPLRQLTGLPIYLETGGHRPEQLAMVLPYLDSVGMDIKLPSVSGENRWQAHADFLQLCFESSVEVFVKLIVDGNTDSGELEQAAQLVADVSPQISVFLQPVTPLESSPLLMSTPSPEQVLSWQALMKRTLKLVRVVPQTHKMIGQL

SEQ ID NO: 29514 - protein, 213 aa, unidentified
  source 1..213: note = Cyanobacterium aponinum
  REGION 1..213: note = tr|K9Z795|K9Z795_CYAAP 7-carboxy-7-deazaguanine synthase OS=Cyanobacterium aponinum (strain PCC 10605); OX = 755178 GN=queE PE=3 SV=1
MLLFNKKEEDIKDYLKVEYPVVEIFHSLQGEGFWAGVNAFFIRLAGCDVYCPWCDQKETWSMKKHPLFTVENLLNEINTVETKHIIITGGEPLLHNLLPLTKILKYGGYQTHLETSGSNVFTGEFDWVTLSPKPYKKPHESIYAHVDELKVVIDNENDLKWAASEAEKLPKYTVKYLQPQWENPASQKLVIDYILSHSQWRMSLQTHKYLNIL

SEQ ID NO: 29515 - protein, 213 aa, unidentified; identical to SEQ ID NO: 29514
  source 1..213: note = Cyanobacterium aponinum
  REGION 1..213: note = tr|A0A2G3PCP0|A0A2G3PCP0_9CHRO 7-carboxy-7-deazaguanine synthase OS=Cyanobacterium aponinum IPPAS B-1201 OX=2047986 GN=queE PE=3 SV=1

SEQ ID NO: 29516 - protein, 205 aa, unidentified
  source 1..205: note = Unknown
  REGION 1..205: note = tr|A0A0R2TZS8|A0A0R2TZS8_9CYAN 7-carboxy-7-deazaguanine synthase OS=cyanobacterium BACL30 MAG-120619-bin27 OX=1655601 GN=queE PE=3 SV=1
MTDNLPVVETFHSLQGEGLHAGRSAFFIRLAGCSVGCSWCDTKHSWPAGVHPQQALAALAAEAKAAAEAGAAFVVLTGGEPLHHDLGPLCQALEPSGLPLHLETSGVDPLSGHFAWITLSPKRHRPPTAELLAGCQELKVVVHEVADLDFAQAMAAAAAAAGNQPALLLQPGWDSPAGQALAIDYVRCHRRWRLSLQSHKLLGLR

SEQ ID NO: 29517 - protein, 205 aa, Rhopalodia gibberula
  REGION 1..205: note = tr|A0A2Z5T8U5|A0A2Z5T8U5_9CYAN 7-carboxy-7-deazaguanine synthase OS=cyanobacterium endosymbiont of Rhopalodia gibberula OX=1763363 GN=queE; PE = 3 SV=1
MKVIVPTSITYPIVETFHSIQGEGSWMGVSAFFIRLAGCDVHCYWCDQKESWPVKPHPRRTIEELAKLAKQTNPMIVVITGGEPLIHNLYPLTDELRKLGLRIHLETSGTHPFSGSFDWVTFSPKPFSPPNESTYNRVNELKVVIASELDLQWGQQEAKKVPVDTVKYLQPEWGSPKSKQLIYDFVLQHPDWRIGVQMHKFLSFR

SEQ ID NO: 29518 - protein, 203 aa, Epithemia turgida
  REGION 1..203: note = tr|A0A077JJI1|A0A077JJI1_9CYAN 7-carboxy-7-deazaguanine synthase OS=cyanobacterium endosymbiont of Epithemia turgida isolate EtSB Lake Yunoko; OX = 1228987 GN=queE PE=3SV=1
MISSDLITYPIVETFHSIQGEGAWMGVSAFFIRLAGCDVHCSWCDQKESWTVKPYPLRTVEELAKLAKQSNPLIVVITGGEPLIHNLDPLTDKLRRLGLRVHLETSGTHPFSGSFDWVTFSPKPLSLPNESIYSQTNELKIVIASELDLQWGQQEAKKVSSGTIKYLQPEWNSHESKQLIYDFILQCSDWRISVQIHKFLDFR

SEQ ID NO: 29519 - protein, 252 aa, unidentified
  source 1..252: note = Unknown
  REGION 1..252: note = tr|A0A2T4D233|A0A2T4D233_9CYAN 7-carboxy-7-deazaguanine synthase OS=cyanobacterium G8-9; OX = 2137193 GN=queE PE=3 SV=1
MFYLTEQFFSIQGEGKYAGVPSYFLRTGGCNLNCPGFGAEYKVDGEIRLGCDTYFAVDSAFSKSWIKVDDASELISKLKKEFIEIGYLPHMVITGGEPLMYHSDSIFYEVVSWLVTEGIEITFETNGTVEIDFEKYPAYKSCIFALSLKLKNSGEPEGKRIIPQALVNVQTYAKEAFLKFTIDAALVETTAIDEINQIRDILPNLEVYCMPVGESRDTIWKNDRAVFEFCMKHNFRYSDRLHIRVFDTTQGV

SEQ ID NO: 29520 - protein, 216 aa, unidentified
  source 1..216: note = Cyanobacterium sp.
  REGION 1..216: note = tr|A0A2K8WPL0|A0A2K8WPL0_9CHRO 7-carboxy-7-deazaguanine synthase OS=Cyanobacterium sp. HL-69 OX=2054282 GN=queE PE=3 SV=1
MINTVNKKEVKKTLNNNLLYEYPIVETFHSVQGEGFFAGVNAFFIRLAGCDVFCPWCDQKETWSMKKYPLYTVEKIVREVKQINTNTIIVTGGEPLLHDLNPLTIELKKTGKNIHLETSGAHPFSGVFDWVTFSPKPYKKPHETIYNKASELKVVVAEEKDFIWALSEGEKVSSHTIKYLQPEWNSPHTQELIFNYIKDNPSWRLSLQTHKYLGVR

SEQ ID NO: 29521 - protein, 215 aa, unidentified
  source 1..215: note = Cyanobacterium sp.
  REGION 1..215: note = tr|A0A1E5QW49|A0A1E5QW49_9CHRO 7-carboxy-7-deazaguanine synthase OS=Cyanobacterium sp. IPPAS B-1200 OX=1562720 GN=queE PE=3 SV=1
MNTVNKKEVKKTLNNNLLYEYPIVETFHSVQGEGFFAGVNAFFIRLAGCDVFCPWCDQKETWSMKKYPLYTVEKIVREVEQINTNTIIITGGEPLLHDLNPLTIELKKTGKNIHLETSGAHPFSGVFDWVTFSPKPYKIPHETIYNNASELKVVVAEEKDFMWALSEGEKVSSHTIKYLQPEWNSPHTQELIFNYIKDNPSWRLSLQTHKYLGVR

SEQ ID NO: 29522 - protein, 213 aa, unidentified
  source 1..213: note = Cyanobacterium stanieri
  REGION 1..213: note = tr|K9YI54|K9YI54_CYASC 7-carboxy-7-deazaguanine synthase OS=Cyanobacterium stanieri (strain ATCC 29140 / PCC 7202) OX=292563 GN=queE PE=3 SV=1
MINIIEKNAPIKDNLSYQYPIVETFHSVQGEGFYAGVNAYFIRLAGCDVFCPWCDQKETWSTKKYPLHSVEKIVNQIKQINTNIIIITGGEPLLHDLKPLTLELKKTGKNIHLETSGAHPFSGIFDWVTFSPKPYKKPHESIYNHASELKVVISQEKDFIWALSEAKKVPSHTIKYLQPEWNSPDTQDLIFNYIKENPQWRLSLQTHKYLGVR

SEQ ID NO: 29523 - protein, 217 aa, Ornithocercus magnificus
  REGION 1..217: note = tr|A0A4Y3G365|A0A4Y3G365_9CYAN 7-carboxy-7-deazaguanine synthase OS=cyanobiont of Ornithocercus magnificus OX=2496102 GN=queE PE=3 SV=1
MSYLPVVETFHSLQGEGCHTGRSAFFIRLGGCRVGCSWCDTKHSWLSEPQTQRDVEDLAAEAITVRKAGAAFVVVTGGEPLHHDLDSLCRALRQHTSSTSESNSALPIHLETSGVDVLSGEPDWITLSPKRHAPPRKDILARCSELKVVIHTAADLEFAEVMAQEVQYSREKGSSTAELLLQPGWNCLEGQRLSIEHILRYPRWRLSLQCHKWLQIS

SEQ ID NO: 29524 - protein, 203 aa, unidentified
  source 1..203: note = Cyanobium gracile
  REGION 1..203: note = tr|K9P9I8|K9P9I8_CYAGP 7-carboxy-7-deazaguanine synthase OS=Cyanobium gracile (strain ATCC 27147 / PCC 6307) OX=292564 GN=queE PE=3 SV=1
MVETFHSLQGEGLHAGRSAFFIRLAGCDVGCPWCDTKHSWPQAAHPQRPLGELAAEASAAAAAGAAFVVITGGEPLQQPLDALCAALAAAGLPLHLETSGVGQPSGRFDWITLSPKPHRPPAAALLARCDELKVVVTSPADLAFAEAMAAEADRLRPPATPGPARLLQPVWDEPAARELAVAYVRAHPDWRLSLQSHKWLGVR

SEQ ID NO: 29525 - protein, 209 aa, unidentified
  source 1..209: note = Cyanobium sp.
  REGION 1..209: note = tr|A0A182ARX4|A0A182ARX4_9CYAN 7-carboxy-7-deazaguanine synthase OS=Cyanobium sp. NIES-981 OX=1851505 GN=queE PE=3 SV=1
MVSSPPAALPVVETFHSLQGEGLHAGRSACFIRLAGCGVGCPWCDTKHSWPEAGHSRRPVAALADTVRRAAAAGAAFVVVTGGEPLHHDLTDLCEGIAPVGLPLHLETSGVDRLSGRFDWITLSPKPHRPPLPSLLAACQELKVVVHGEADLHFAVAMAQQARAAGNHPALLLQPGWDSAEGQRLALDFVRGHPAWRLSLQNHKWLAIR

SEQ ID NO: 29526 - protein, 222 aa, unidentified
  source 1..222: note = Cyanobium sp.
  REGION 1..222: note = tr|A0A4P5VDZ2|A0A4P5VDZ2_9CYAN 7-carboxy-7-deazaguanine synthase OS=Cyanobium sp.; OX = 2164130 GN=queE PE=3 SV=1
MSALASLSLPIVETFHSLQGEGLHAGRSAFFIRLAGCTVGCPWCDTKHSWPEASHPRHSLFDLAAAARGAAAAGAGFVVVTGGEPLQHQLEALCDQLRAATASPEQPAGLPIHLETSGVDALSGRFDWITLSPKRHRPPQQQALAACHELKVVVGQKDDLAFAEAMALAAIEAGRPNSASPPILLLQPLWDSPVGQELAIAHVRRNSRWRLSLQSHKWLGVR

SEQ ID NO: 29527 - protein, 257 aa, unidentified
  source 1..257: note = Cyanobium usitatum
  REGION 1..257: note = tr|A0A2P7MWW3|A0A2P7MWW3_9CYAN 7-carboxy-7-deazaguanine synthase OS=Cyanobium usitatum str. Tous OX=2116684 GN=queE PE=3 SV=1
MQADANKTPLARACLHASTPNQTERQALDQSGNSIPLSPVSQPLAADSLPATALPVVETFHSLQGEGLQAGRSAFFIRLGGCAVACPWCDTKHSWPADLHPQRPLAELAGEAEAAAEAGAAFVVITGGEPLHHNLGLLCQALEPSGLPLHLETSGVDQLSGRFAWITLSPKRHRPPSTELLAACQELKVVVHEAADLAFAAAMAVQAREARGGSPGPELLLQPGWDSPAGQALAIDYVRRNPQWRLSLQSHKLLGLR

SEQ ID NO: 29528 - protein, 258 aa, unidentified
  source 1..258: note = Cyanosarcina cf.
  REGION 1..258: note = tr|A0A2T1FP63|A0A2T1FP63_9CHRO 7-carboxy-7-deazaguanine synthase OS=Cyanosarcina cf. burmensis CCALA 770 OX=2107697 GN=queE PE=3 SV=1
MTTARLIEIFSAIQGEGLNVGTRQIFIRFALCDLRCHFCDSAHTWSVPSTCRVERSPGLRDFETHPNPVPLNTLLTWIERQNSPGLHDSISLTGGEPLLHAPFLVEFLPLVRRATGLPIYLETGGHRPQQLQLILPYLDSVGMDIKLPSVSGEDRWNEHAEFLQACHQADIEVFIKAIVSSQTDLGDLAKAAKLVASVNPEIPVFLQPATPLTPSQQFGGTPIQAPTPAQVLHWQALMKQELKQVRVIPQTHKMLNQL

SEQ ID NO: 29529 - protein, 268 aa, unidentified
  source 1..268: note = Cyanothece sp.
  REGION 1..268: note = tr|B8HQA1|B8HQA1_CYAP4 7-carboxy-7-deazaguanine synthase OS=Cyanothece sp. (strain PCC 7425 / ATCC 29141); OX = 395961 GN=queE PE=3 SV=1
MVSSVPSSPAAEAQLNLTAPLVEVFSAIQGEGLNVGTRQIFIRFAQCDLRCHFCDSAHTWYSRPTCQIEQSPGQRDFQTYPNPVTIDQLLAWVKDLHGPHLHDSISLTGGEPLLQSQFLQRLLPQLRETIGLPLYLETGGHRPQELQQVLAWLDLVGMDIKLPSASGENYWTAHAEFLRCCHTAGVEVFCKLILSQQTEAEELEQTTELIASIDPAIPLILQPVTPLGNKPQILAPTPAQVLHWQALCKTRLKQVRVIPQTHKMIGQL

SEQ ID NO: 29530 - protein, 205 aa, unidentified
  source 1..205: note = Cyanothece sp.
  REGION 1..205: note = tr|A0A3B8Y7M5|A0A3B8Y7M5_9CYAN 7-carboxy-7-deazaguanine synthase OS=Cyanothece sp. UBA12306 OX=2055757 GN=queE PE=3 SV=1
MKAIASTTITYPIVETFHSIQGEGVSMGVSAFFIRLAGCDVHCPWCDQKESWTINPYPSQSVEVLGEAAKRANPALVIITGGEPLMHNLDPLTAQLRGLGLRVHLETSGSHPLTGQFDWVTFSPKPFQVPHDSIYPEVDELKVVIATEKDLQWAEEQATKVPPQTVKYLQPEWNTPESQQLIYDYVLGHQDWRISLQIHKFLGVR

SEQ ID NO: 29531 - protein, 208 aa, unidentified
  source 1..208: note = Cyclobacteriaceae bacterium
  REGION 1..208: note = tr|A0A3N4GZH0|A0A3N4GZH0_9BACT 7-carboxy-7-deazaguanine synthase OS=Cyclobacteriaceae bacterium YHN15 OX=2487897 GN=queE PE=3 SV=1
MDKAKKIKEGLMLPLMEAFYTIQGEGVHSGVPAYFIRLGGCDVGCVWCDVKESWEAEKWPVIPVEEIVDRACEFSGRMVVITGGEPLMYNLGPLTALLKKKGFATHIETSGAHPFSGSFDWVCFSPKKFKVPHPSIYEKANELKVVIFHKSDFEFAEKHASLVQGNCIKSLQPEWSKANIYTESIVDYVKSHPDWKISLQTHKFMDIP

SEQ ID NO: 29532 - protein, 193 aa, unidentified
  source 1..193: note = Cyclobacteriaceae bacterium
  REGION 1..193: note = tr|A0A5C7Z627|A0A5C7Z627_9BACT 7-carboxy-7-deazaguanine synthase OS=Cyclobacteriaceae bacterium OX=2099675 GN=queE PE=3 SV=1
MEDFYTIQGEGFHQGRAAYFIRLGGCEVRCVWCDVKDSWDLNAHPQQAVDAIADKAKASGTQISVVTGGEPTMHNLQALTRALQERGLRTHLETSGAYEITGTWDWICFSPKKFKPPHASVAAQADELKVVVFHKSDFAWAEDFAKQVRPECKLYLQPEWSKENDILPQLIEYVKKNPRWQISLQVHKYMNIP

SEQ ID NO: 29533 - protein, 209 aa, Cyclobacterium amurskyense
  REGION 1..209: note = tr|A0A0H4PD52|A0A0H4PD52_9BACT 7-carboxy-7-deazaguanine synthase OS=Cyclobacterium amurskyense OX=320787 GN=queE PE=3 SV=1
MQDKKNALLNGLSLPLMEAFYTIQGEGMFSGQPAYFIRLGGCDVGCVWCDVKDSWEAERWPIVPISEMVAEAESYPARLVVITGGEPLMHNLGPLTSLLKDKGFQINMETSGAHPFSGTIDWTCLSPKKFKQPLPQVYEHANELKVVVFNKSDFDFALKHAKLVNEKCHLLLQPEWSKAEIMTPLIIDFVKENPAWRVSLQTHKYMEIP

SEQ ID NO: 29534 - protein, 210 aa, unidentified
  source 1..210: note = Cyclobacterium halophilum
  REGION 1..210: note = tr|A0A1H7BFD9|A0A1H7BFD9_9BACT 7-carboxy-7-deazaguanine synthase OS=Cyclobacterium halophilum OX=1416801 GN=queE PE=3 SV=1
MNVEAASRVREGQALPLMEAFYTIQGEGTYSGQPAYFIRLGGCDVGCVWCDVKDSWEAGKWPLVEIDQIVAEADAYPARLAVITGGEPLMYALGPLTQGLKEKGFTTNLETSGAHPYSGDLDWICLSPKKFKSPVPEIYTIANELKVIVYNKSDFDFARSEARKVAPSCKLLLQPEWSKAEQMMPQIVDFVKENPRWRISLQTHKYMEIP

SEQ ID NO: 29535 - protein, 209 aa, Cyclobacterium lianum
  REGION 1..209: note = tr|A0A1M7Q8P7|A0A1M7Q8P7_9BACT 7-carboxy-7-deazaguanine synthase OS=Cyclobacterium lianum; OX = 388280 GN=queE PE=3 SV=1
MKEQQELVHTGRLLPLMEAFYTIQGEGIFSGQSAYFIRLGGCDVGCVWCDVKASWEAGHWPLVSVEKIVEEAAAYPSRLVVITGGEPLMYDLSLLTSLLKEKGFHINIETSGVYPLSGSLDWICFSPKKFKAPDRGIYEQADEMKVIVFHKSDFAFALKHAALVNEKCRLLLQPEWSRAAEMTPLIIDFVKENPAWRVSLQTHKYMEIP

SEQ ID NO: 29536 - protein, 209 aa, Cyclobacterium marinum
  REGION 1..209: note = tr|G0J1D5|G0J1D5_CYCMS 7-carboxy-7-deazaguanine synthase OS=Cyclobacterium marinum (strain ATCC 25205 / DSM 745) OX=880070 GN=queE PE=3 SV=1
MKDNKKTLSNGQYLPLMEAFYTIQGEGMFSGQPAYFIRLGGCDVGCVWCDVKDSWDKERWPKVAIEDIVAEAASYPARLVVITGGEPLMHDLAPLTHLLKEEGFQINMETSGAHPFSGTIDWTCLSPKKFKQPLPEVYAHADELKVVVYNKSDFEFALKHAKLVNEKCHLLLQPEWSKAGKMTNLIIDFVKENPAWRVSLQTHKYMEIP

SEQ ID NO: 29537 - protein, 209 aa, Cyclobacterium marinum
  REGION 1..209: note = tr|A0A5D9B0T9|A0A5D9B0T9_9BACT 7-carboxy-7-deazaguanine synthase OS=Cyclobacterium marinum OX=104 GN=queE PE=3 SV=1
MKDNKKTLSNGQYLPLMEAFYTIQGEGMFSGQPAYFIRLGGCDVGCVWCDVKDSWDKERWPKVAIEEIVAEAASYPARLVVITGGEPLMHDLAPLTHLLKEEGFQINMETSGAHPFSGTIDWTCLSPKKFKQPLPEVYAHADELKVVVYNKSDFEFALKHAKLVNEKCHLLLQPEWSKAGKMTNLIIDFVKENPAWRVSLQTHKYMEIP

SEQ ID NO: 29538 - protein, 209 aa, unidentified
  source 1..209: note = Cyclobacterium qasimii
  REGION 1..209: note = tr|A0A512CHK8|A0A512CHK8_9BACT 7-carboxy-7-deazaguanine synthase OS=Cyclobacterium qasimii OX=1350429 GN=queE PE=3 SV=1
MEENKNALLSGQSLPLMEAFYTIQGEGMFSGQPAYFIRLGGCDVGCVWCDVKDSWEAERWPIVPIQQMVAEAESFPARLVVITGGEPLMHNLGPLTSLLKEKGFQINMETSGAHPFSGQIDWTCLSPKKFKQPVPEVYAHADELKVVVFNKSDFDFALKHALLVNEKCHLLLQPEWSKAEIMTPLIIDFVKENPSWRVSLQTHKYMEIP

SEQ ID NO: 29539 - protein, 209 aa, unidentified; identical to SEQ ID NO: 29538
  source 1..209: note = Cyclobacterium qasimii
  REGION 1..209: note = tr|S7VNN8|S7VNN8_9BACT 7-carboxy-7-deazaguanine synthase OS=Cyclobacterium qasimii M12-11B OX=641524; GN = queE PE=3 SV=1

SEQ ID NO: 29540 - protein, 215 aa, Cycloclasticus sp.
  REGION 1..215: note = tr|K0C494|K0C494_CYCSP 7-carboxy-7-deazaguanine synthase OS=Cycloclasticus sp. (strain P1) OX=385025; GN = queE PE=3 SV=1
MPKDTLRITEIFYSLQGEGKTVGLPTTFIRLTGCPLRCGYCDTEYAFYGGETRSIDEIVQQVNELGAHYINVTGGEPLAQKRVHELMKTLCDAGYHVSLETSGALDVSGVDPRVIKVLDVKTPASGEMAKNRHENYDCLTKQDQVKYVICDRDDFQWSKQHLQEYALSDKCEVLFSPVQGELKASDLANWVLTDKLPVRFQIQLHKYLWGDEPGK

SEQ ID NO: 29541 - protein, 215 aa, Cycloclasticus sp.
  REGION 1..215: note = tr|A0A1X1QNV4|A0A1X1QNV4_9GAMM 7-carboxy-7-deazaguanine synthase OS=Cycloclasticus sp. symbiont of Bathymodiolus heckerae OX=1284675 GN=queE PE=3; SV = 1
MSKDSLRITEIFYSLQGEGKTVGLPTTFIRLTGCPLRCGYCDTEYAFHGGEVRSIDEILVEVDGLGARYINVTGGEPLAQKRVHELMERLCDAGYQVSLETSGALDVSEVDVRVTKVLDVKTPGSLEVDKNKHANYQYLTQNDQVKYVICDVEDFHWSKEHMREHALNDKCEVLFSPVQGKLAATDLANWVLEEKLPVRFQIQLHKYLWGDVPGK

SEQ ID NO: 29542 - protein, 215 aa, unidentified
  source 1..215: note = Cycloclasticus zancles
  REGION 1..215: note = tr|S5T9R8|S5T9R8_9GAMM 7-carboxy-7-deazaguanine synthase OS=Cycloclasticus zancles 78-ME OX=1198232; GN = queE PE=3 SV=1
MPKDTLRITEIFYSLQGEGKTVGLPTTFIRLTGCPLRCGYCDTEYAFYGGETRSIDEIVQQVKELGAHYINVTGGEPLAQKRVHELMKTLCDAGYHVSLETSGALDVSGVDPRVIKVLDVKTPASGEMAKNRHENYDCLTKQDQVKYAICDRDDFQWSKQHLQEYALSDKCEVLFSPVQGELKASDLANWVLTDKLPVRFQIQLHKYLWGDEPGK

SEQ ID NO: 29543 - protein, 208 aa, Cylindrospermopsis raciborskii
  REGION 1..208: note = tr|A0A1S2A0H6|A0A1S2A0H6_9CYAN 7-carboxy-7-deazaguanine synthase OS=Cylindrospermopsis raciborskii MVCC14 OX=940191 GN=queE PE=3 SV=1
MSILEIKLPIHETFQSTVQGEGYWTGSLVDFIRLSGCPLGCPWCDTGYADGGANLPRFERTIGELLAEIKSPRIVISGGEPFIHKHLPELVQALLGAGKQVSIETSGSFWKEVSLSAWITLSPKEHINPKYPVQNQFWSRANEAKIVIETGQEIDFYQEYLSARPDLYVYLQPEWNSSSKSLALILQLLQQKPDYKLSLQTHKYIGLQ

SEQ ID NO: 29544 - protein, 208 aa, Cylindrospermopsis raciborskii; identical to SEQ ID NO: 29543
  REGION 1..208: note = tr|A0A1X4G950|A0A1X4G950_9CYAN 7-carboxy-7-deazaguanine synthase OS=Cylindrospermopsis raciborskii CENA303 OX=1170769 GN=queE PE=3 SV=1

SEQ ID NO: 29545 - protein, 208 aa, Cylindrospermopsis sp.
  REGION 1..208: note = tr|A0A0R0MCZ4|A0A0R0MCZ4_9CYAN 7-carboxy-7-deazaguanine synthase OS=Cylindrospermopsis sp. CR12 OX=1747196 GN=queE PE=3 SV=1
MSILEIKLPIHETFQSTVQGEGYWTGSLVDFIRLSGCPLSCPWCDTGYADGGANLRRFERTIGELLAELKSPRIVISGGEPFIHKHLPELVEALLDAGKQVNIETSGSFWKEVPLSAWITLSPKEHINPKYPVQNQFWSRANEAKIVIETGQEIDFYQEHLSAHPDLCVYLQPEWNSSSKSLALILQLLQQKPDYKLSLQTHKYIGLQ

SEQ ID NO: 29546 - protein, 273 aa, Cylindrospermum sp.
  REGION 1..273: note = tr|A0A1Z4QQI7|A0A1Z4QQI7_9NOST 7-carboxy-7-deazaguanine synthase OS=Cylindrospermum sp. NIES-4074 OX=2005457 GN=queE PE=3 SV=1
MRSHCYHHMITKTTVKPMARLVEVFSAIQGEGLNVGTRQIFIRFALCDLRCHFCDSAHTWNAPNTCRIERSPGLRDFEIHSNPVPLPILIEWVERQNLPCLHDSISLTGGEPLLHAPFLEQFIPEVKAITGLPVYLETGGHRPEQLAMILPYLDSVGMDLKLPSVSGESHWQEHAKFLQLCFESDLEVFVKIVISQRTDPAELESSALLVAAVSQDIPIFLQPVTPLAASEQFSQVPVLGPTPDQVLVWQALMKKSVKQVRVIPQTHKMLNQL

SEQ ID NO: 29547 - protein, 265 aa, Cylindrospermum stagnale
  REGION 1..265: note = tr|K9WZC0|K9WZC0_9NOST 7-carboxy-7-deazaguanine synthase OS=Cylindrospermum stagnale PCC 7417 OX=56107; GN = queE PE=3 SV=1
MIAKTTVKPTARLVEVFSAIQGEGLNVGTRQIFIRFALCDLRCHFCDSAHTWNAPTTCRIERSPGLRDFEIHSNPVPLPILIEWVERQNLPCLHDSISLTGGEPLLHAPFLEQFLPEVRAITALPIYLETGGHRPEQLAVILPYLDSVGMDLKLPSVSGESYWPEHAKFLQLCFDSHLDVFVKIIVSQKTDPSELERSALLVAGISQDIPIFLQPVTPLVAAEQFSQIPVKAPTPDQVLVWQALMKRFVKQVRVIPQTHKMLNQM

SEQ ID NO: 29548 - protein, 230 aa, Cystobacter ferrugineus
  REGION 1..230: note = tr|A0A1L9B263|A0A1L9B263_9DELT 7-carboxy-7-deazaguanine synthase OS=Cystobacter ferrugineus OX=83449 GN=queE PE=3 SV=1
MPLARPHIEPRRVPTADSVVVKEIYLSVQGESSHAGLLCSFVRLTGCHLRCGYCDSEFAFHGGQRRKISEVVDEVKALGAPRVEVTGGEPLLQPGVYPLMEQLLASGLTVLLETSGAIDVRLVPPAVHKIVDMKTPSSGESDRNDYRNLESMNANDELKFVIGSREDYEWSKRLITEHRLLDKPYELLFSTVYGKITTKDLAEWVIADRLPVRFQLQMHKYIWDPNERGV

SEQ ID NO: 29549 - protein, 230 aa, Cystobacter fuscus
  REGION 1..230: note = tr|S9QLR2|S9QLR2_9DELT 7-carboxy-7-deazaguanine synthase OS=Cystobacter fuscus DSM 2262 OX=1242864 GN=queE; PE = 3 SV=1
MPLARPHIEPRRVPTADSLVVKEIYLSVQGESSHAGLLCSFVRLTGCHLRCSYCDSEFAFHGGQRRKISEVVDEVKALGSPRVEVTGGEPLLQPGVYPLMEQLLASGMTVLLETSGAIDVRLVPPAVHKIVDMKTPSSGESDRNDYRNLESMNANDELKFVIGSREDYEWSKRLITEHRLLDKPYELLFSTVHGKITTKDLAEWVIADRLPVRFQLQMHKYIWDPNERGV

SEQ ID NO: 29550 - protein, 230 aa, Cystobacter fuscus
  REGION 1..230: note = tr|A0A250IUF6|A0A250IUF6_9DELT 7-carboxy-7-deazaguanine synthase OS=Cystobacter fuscus; OX = 43 GN=queE PE=3 SV=1
MPLARPHIEPRRVPTADSVVVKEIYLSVQGESSHAGLLCSFVRLTGCHLRCSYCDSEFAFHGGQRRKISEVVDEVKALGSPRVEVTGGEPLLQPGVYPLMEQLLGAGLTVLLETSGAIDVRLVPPAVHKIVDMKTPSSGESDRNDYRNLESMNANDELKFVIGSREDYEWSKRLITEHRLLDRPYELLFSTVHGKITTKDLAEWVIADRLPVRFQLQMHKYIWDPNERGV

SEQ ID NO: 29551 - protein, 205 aa, Cytophaga hutchinsonii
  REGION 1..205: note = tr|Q11UD2|Q11UD2_CYTH3 7-carboxy-7-deazaguanine synthase OS=Cytophaga hutchinsonii (strain ATCC 33406 / NCIMB 9469) OX=269798 GN=queE PE=3 SV=1
MHISTSIQSLPVMESFYTIQGEGHYQGRAAYFIRLAGCDVGCHWCDVKESWDASQHPMQTIEHMVAEASAFTGRIAVITGGEPLMHDLTNLTAQLKQEGFRNHIETSGAHPLSGEWDWICLSPKKFKAPLPSVIEACDELKIIVFHSSDIEWAKTFLPKLKKGCKLFLQPEWSRQEEMLPQIISFVKENPEWEISLQIHKFMNIP

SEQ ID NO: 29552 - protein, 193 aa, Cytophaga sp.
  REGION 1..193: note = tr|A0A4R4KKB2|A0A4R4KKB2_9BACT 7-carboxy-7-deazaguanine synthase OS=Cytophaga sp. DMA-K-7a OX=2070510 GN=queE PE=3 SV=1
MEAFYTLQGEGAHAGKAAYFIRLGGCDVGCHWCDVKESWDATRFARQSIADIVAGAMQFPGRLAVITGGEPLMYNLSALTGALQAAGFQTNIETSGVYPITGSWDWICFSPKKFKAPDPGIYAQANELKVIIYNDSDFAFAEEHAALLTSPCKLLLQPEWGKREKMLPKIIEYIKYNPQWQISLQTHKYMNIP

SEQ ID NO: 29553 - protein, 300 aa, Cytophaga xylanolytica
  REGION 1..300: note = tr|A0A2W7P3R7|A0A2W7P3R7_9BACT 7-carboxy-7-deazaguanine synthase OS=Cytophaga xylanolytica OX=990 GN=queE PE=3 SV=1
MHQPLAQPATVTPKTTHHLTLVQEGVFPVTRNHRGDLLEQCPNTGWHHAGTIQGEGKLAGVPSLFIRLAGCNLRCMWQMPNGEVSLCDTAYASFHTGQTRRMTVDEVLNTVRHNIGSMRHVVITGGEPMLQSRSLTELCRILKTELHLHITMETNGTLFDKELAPLIDLVSLSPKLQNATPTPASAQKMNMDYKGTFAYHAEIRKNTEAIQQWMNNCRVFDNDFQLKFVVAHPDEVDEIKTDFLNELTGWQPSDILLMPLGGNRDQLAVNTPIAVQLAVINGWRFAPRLHIDLWGNRAGV

SEQ ID NO: 29554 - protein, 210 aa, unidentified
  source 1..210: note = Cytophagaceae bacterium
  REGION 1..210: note = tr|A0A2E4HFQ9|A0A2E4HFQ9_9BACT 7-carboxy-7-deazaguanine synthase OS=Cytophagaceae bacterium OX=2026729 GN=queE PE=3 SV=1
MTKAAVQTRVDLGELLPLMEEFYTIQGEGAHTGKSAYFIRIGGCDVGCHWCDVKESWDAAIHPPTEADLIAENAAKYSDTIVVTGGEPLMWDMAPLTRKLKAKNLTVHIETSGAYPLSGQWDWICLSPKKRMPPKAEVLEKADELKVIVYNKSDFEFAEKHAALVGKDCVLFLQPEWSVREKMIPLIVDYVMKHPKWKVSLQTHKYLNIP

SEQ ID NO: 29555 - protein, 194 aa, unidentified
  source 1..194: note = Cytophagaceae bacterium
  REGION 1..194: note = tr|A0A4Q9BA73|A0A4Q9BA73_9BACT 7-carboxy-7-deazaguanine synthase OS=Cytophagaceae bacterium 103A-SOEBACH OX=2516558 GN=queE PE=3 SV=1
MESFYTLQGEGKYQGHAAYFIRLGGCDVGCHWCDVKESWPVDTHPVKTVETLVAEALENPGRLVVITGGEPLMHDLGPLTEALQEAGFRTHIETSGVATAITGTWDWICFSPKKFKAPNEGILALTNELKVVVNHPSDIPWAQEWAEKLPKSAELYLQPEWSKQEQMNPLIVDFVKANPTWRISVQTHKFLQIP

SEQ ID NO: 29556 - protein, 203 aa, unidentified
  source 1..203: note = Cytophagales bacterium
  REGION 1..203: note = tr|A0A286IH46|A0A286IH46_9BACT 7-carboxy-7-deazaguanine synthase OS=Cytophagales bacterium TFI 002 OX=1945892 GN=queE PE=3 SV=1
MKNEEVQYPIMESFYTIQGEGVHSGKAAYFIRLGGCDVGCVWCDVKESWNAADHPFTTVGEMVLQAKENAAKLVVITGGEPLMYDMSPLTSALKSEGFVTNIETSGAYPMSGDWDWVCFSPKKFKKANESIYPVANELKVIVFNKSDFKFAEEYAALVGDDCALLLQPEWDKSDEMLPLVIDYVKANPKWKVSLQTHKFMGVD

SEQ ID NO: 29557 - protein, 193 aa, unidentified
  source 1..193: note = Cytophagales bacterium
  REGION 1..193: note = tr|A0A2M6GE91|A0A2M6GE91_9BACT 7-carboxy-7-deazaguanine synthase OS=Cytophagales bacterium CG18_big_fil_WC_8_21_14_2_50_42_9 OX=1973956; GN = queE PE=3 SV=1
MEAFYTIQGEGFYSGHAAYFIRLGGCDVGCHWCDVKESWDAALHPLTSLDDIVAGALAYPGRKVVITGGEPLIYNLDPLTQKLKAAGFQINIETSGAYPLSGNLDWVCVSPKKFKTPVPEILPLAHELKVIIFHKSDFAWAESYAAQVGSNTKLFLQPEWSRHAELLPLIVEYVKQHPQWQISLQTHKYMDIP

SEQ ID NO: 29558 - protein, 205 aa, unidentified
  source 1..205: note = Cytophagia bacterium
  REGION 1..205: note = tr|A0A2E0GZ44|A0A2E0GZ44_9BACT 7-carboxy-7-deazaguanine synthase OS=Cytophagia bacterium; OX = 2026730 GN=queE PE=3 SV=1
MKIERGSESLPVMESFYSIQGEGYHSGKPAYFIRLAGCDVKCKWCDVKDSWSISSDQYQDVNKIVNKIDKVSSEIIVITGGEPLHHNLSNLTSALRKIGKKIHLETSGTEPLTGEFDWICLSPKQNKKPLDDFFEIANELKIVIYRKNDFLWAERNASKINKKAELILQPEWSMEKRINPEIIKFIKLNPKWRISLQTHKYLDVD

SEQ ID NO: 29559 - protein, 256 aa, unidentified
  source 1..256: note = Dactylococcopsis salina
  REGION 1..256: note = tr|K9YW56|K9YW56_DACSA 7-carboxy-7-deazaguanine synthase OS=Dactylococcopsis salina PCC 8305 OX=13035; GN = queE PE=3 SV=1
MATVATATANLVEVFSAIQGEGLNVGTRQIFIRFGGCDLRCDFCDSANTWQANSTFRVEQTPGKRDFQVYDNPVEDTQLLRWIEQQNQFNLHDSISLTGGEPLLHAKFLRQFLPQLKQSTSLPIYLETGGHRPQQLSLILDFLDCIGMDMKLPSVSGEQHWESHAAFLRLCIPQKHIFVKLIVSDQTSDDDLNQATRIIAKVSPDIPVILQPVTPLVGKTITPPRAEQVLSWQSQMKQLLREVRVIPQTHKMIGQL

SEQ ID NO: 29560 - protein, 212 aa, unidentified
  source 1..212: note = Dechloromonas aromatica
  REGION 1..212: note = tr|Q478F5|Q478F5_DECAR 7-carboxy-7-deazaguanine synthase OS=Dechloromonas aromatica (strain RCB) OX=159087; GN = queE PE=3 SV=1
MALRITEIFYSLQGEASRVGLPTVFVRLTGCPLRCSWCDTTYSFTGGEAATVESVLAEVAKYPARQVCVTGGEPLSQKDCLPLLAALCNAGYDVSLETSGALDVSAVDPRVARIMDLKAPDSAESARNLWENLTVLTPRDEIKIVIASRGDYEWARDVLRQKKLDQICSVLFSPAQGVIEPQSLAEWILEDGLNVRFQLQLHKLLWGNMQGK

SEQ ID NO: 29561 - protein, 214 aa, Dechloromonas denitrificans
  REGION 1..214: note = tr|A0A133XG38|A0A133XG38_9RHOO 7-carboxy-7-deazaguanine synthase OS=Dechloromonas denitrificans OX=281362 GN=queE PE=3 SV=1
MAVALRLTEIFYSLQGEASRVGLPTVFVRLTGCPLRCVWCDTEYSFTGGEPATIESVLAEVGKYPARQVCVTGGEPLSQKECLPLLQALCDAGYEVSLETSGALDIAAVDPRVARIMDLKAPDSGESAKNRWENLALLNGRDEIKIVIASRDDYLWAREVLRERSLASICPVLFSPAQGRVEPAELAAWILEDGLEVRFQLQLHKLLWGNMKGK

SEQ ID NO: 29562 - protein, 212 aa, Dechloromonas sp.
  REGION 1..212: note = tr|A0A5C7ZFI7|A0A5C7ZFI7_9RHOO 7-carboxy-7-deazaguanine synthase OS=Dechloromonas sp.; OX = 1917218 GN=queE PE=3 SV=1
MALRLTEIFFSLQGEASRVGLPTVFVRLTGCPLRCTWCDTTYSFTGGEPATVESILAEVARYPARQVCVTGGEPLSQKECLPLLTALCDAGYDVSLETSGALDIADVDPRVSRIMDLKAPDSGECAKNRWENLAHLTPRDEIKIIIASDADYRWACEQIRSHRLDTLCPVLLSPAQGQFEARDLAERILGDGLNVRFQMQLHKLLWGNMKGK

SEQ ID NO: 29563 - protein, 212 aa, Dechloromonas sp.
  REGION 1..212: note = tr|A0A3B7A8M9|A0A3B7A8M9_9RHOO 7-carboxy-7-deazaguanine synthase OS=Dechloromonas sp. HYN0024 OX=2231055 GN=queE PE=3 SV=1
MPLRLTEIFYSLQGEASRAGLPTVFVRLTGCPLRCTWCDTTYSFTGGEPATIESVLAEVAKYPARQVCVTGGEPLAQKDCLGLLTALCDAGYDVSLETSGALDVAAIDQRVARIMDLKAPDSGESAKNLWSNLAVLNRRDEIKIVIASRRDYEWAREVLRDRQIDRLCPVLLSPAGGLIEPQLLAGWILEDGLNVRFQLQLHKILWGNMKGK

SEQ ID NO: 29564 - protein, 237 aa, Deferribacter autotrophicus
  REGION 1..237: note = tr|A0A5A8F7S8|A0A5A8F7S8_9BACT 7-carboxy-7-deazaguanine synthase OS=Deferribacter autotrophicus OX=500465 GN=queE PE=3 SV=1
MLQQNTLNKGFIKEIFKSYQGEGKFVGARQIFIRFADCPFSCEGCDTDFSLSENFLCDGVEYSNPVLPDELFQILRENYNFKLFHSVSITGGEPLIQKDFLSEFLPILKDNGVKVFLETSGYLVDEIIELSDYLDIISVDIKLKSVFGKKYPSNLIKDLKVINEKIYYKVVIGKNIDENEIKTVLIELAKNDVDVLYVQFKNNYFNLGLLDKLSDIGYSYGIEVFFVPQVHKLIGIL

SEQ ID NO: 29565 - protein, 231 aa, Deferribacter desulfuricans
  REGION 1..231: note = tr|D3PD05|D3PD05_DEFDS 7-carboxy-7-deazaguanine synthase OS=Deferribacter desulfuricans (strain DSM 14783 / JCM 11476 / NBRC 101012 / SSM1) OX=639282 GN=queE PE=3; SV = 1
MSKAFVKEIFKSVQGEGKYVGARQLFIRFAGCNINCVGCDTNYTVDRYFLCCDKKYENPVTPDNLFNLVVNNFDLNLFHSVSLTGGEPLIYCDFLKLFLQYLKNAGVRTFLETSGLIVDSILELEDYLDIISVDLKLKEVFGVEFNRDGIIKLKDINEKVYFKIVVGENLPLEKIENTIHLIKGIGVEELYIHFIDNKFNYSLLDKILDLCYYHNVMAYFIPQVHKLIGMK

SEQ ID NO: 29566 - protein, 239 aa, unidentified
  source 1..239: note = Defluviimonas sp.
  REGION 1..239: note = tr|A0A059IIX7|A0A059IIX7_9RHOB 7-carboxy-7-deazaguanine synthase OS=Defluviimonas sp. 20V17 OX=1417296 GN=queE PE=3 SV=1
MTAPRPLRIAEIFGPTIQGEGALIGEATVFIRAGGCDYRCVWCDSLHAVDSAWRETWAPMTPKAVWDEVLRLSGGRPLTVSISGGNPAIQDFAPVIARGKAEGYRFACETQGSVARPWFGDLDTLVLSPKPPSSKETVDWKAFADCVAAGAGAGRTVMKIVIFDAADLAWARAAHARHPELPLYLQPGNPEVDPERSVDPQALADRMLWLVEQTTGAGWFVPRILPQLHVLIWGNRRGV

SEQ ID NO: 29567 - protein, 222 aa, Dehalobacter sp.
  REGION 1..222: note = tr|T0JBC0|T0JBC0_9FIRM 7-carboxy-7-deazaguanine synthase OS=Dehalobacter sp. UNSWDHB OX=1339256 GN=queE; PE = 3 SV=1
MKYRVAEIFSSINGEGPRAGELAVFVRFAGCNLQCTYCDTRWANEADVSYREMTGADLYKQILATGIKNVTLTGGEPLIQPGIAALTDLLCQDPALSVEIETNGSVSLKPFCTEANRRPGFTMDYKLASSGMEEKMVLANFELLTCRDAVKFVVGDQSDLARAREIISTYGLIKKTAVFISPVFAHIAPSEIVKFMIEHKMEGVRLQLQLHKVIWDPEKRGV

SEQ ID NO: 29568 - protein, 222 aa, Dehalobacter sp.
  REGION 1..222: note = tr|A0A4R4D1S9|A0A4R4D1S9_9FIRM 7-carboxy-7-deazaguanine synthase OS=Dehalobacter sp. 12DCB1 OX=2070364 GN=queE PE=3 SV=1
MKYRVAEIFSSINGEGPRAGELAVFVRFAGCNLRCTYCDTRWANEADVSYQEMTGADLYKQVLTTGIKNVTLTGGEPLIQPGIAALTNLLCQDPALSVEIETNGSVSLKPFCTEVNHRPGFTMDYKLAWSGMEDKMILANFEVLTCRDAVKFVVGDQSDLKRAREIISTYGLIKKTAVFISPVFAHIAPSEIVKFMIVHKMNGVRLQLQLHKVIWDPEKRGV

SEQ ID NO: 29569 - protein, 213 aa, unidentified
  source 1..213: note = Dehalococcoidaceae bacterium
  REGION 1..213: note = tr|A0A2E8T894|A0A2E8T894_9CHLR 7-carboxy-7-deazaguanine synthase OS=Dehalococcoidaceae bacterium OX=2026731 GN=queE PE=3 SV=1
MEIKVNEIYKSVQGESTYSGLPCTFIRLTFCNLRCSYCDTEYAFYEGTDMRIPEIIKKVNNLKCNLVEVTGGEPLVQDGCIDLLKALISNGNKILIETGGALSIEKIPKEVVIILDIKCPSSNMSDKNLWSNIDLIKPSDEIKFVIGDKKDYNWSKKIIKKYNLTDKCTILFSPVYNKIEPKTMVEWIMKDNLNVRFQTQLHKSIWNHNTKGV

SEQ ID NO: 29570 - protein, 238 aa, unidentified
  source 1..238: note = Dehalococcoidia bacterium
  REGION 1..238: note = tr|A0A523UQ67|A0A523UQ67_9CHLR 7-carboxy-7-deazaguanine synthase OS=Dehalococcoidia bacterium OX=2026734 GN=queE PE=3 SV=1
MVRLLKVSRQPDGRPEIFHSVQGEGVNIGKPAVFLRLGLCNLACTWCDTKYTWDWKEYDPKEQIMEMPLEEVEREILGHNCQYLVVTGGEPMIQQRQLIPLLKSLKNKGFTIEIETNGTIVPTPELANLIDHWSVSPKLGNSGNPQSSREVPQSYRFFGDLPSSHFKYVIQNEDDFAEVQSLIQKYNLAPERTILMPEAQNRSVLLERSRWLVELCKSQGCLFSTRLQILLWGSRRGV

SEQ ID NO: 29571 - protein, 235 aa, unidentified
  source 1..235: note = Dehalococcoidia bacterium
  REGION 1..235: note = tr|A0A2E9LJ16|A0A2E9LJ16_9CHLR 7-carboxy-7-deazaguanine synthase OS=Dehalococcoidia bacterium OX=2026734 GN=queE PE=3 SV=1
MLKVSRRSGGEPEIFHSVQGEGVSLGVPSVFLRLATCNLACRWCDTKYTWDWENFDYQTEVSELDPASVQQKIQAFDCSHVVITGGEPMLQQSELLPLVESLAEEGYTFEVETNGTIVPMPEILRHIKQWNVSPKLSTSGNLLEEAQIPLALQTFAALPKAYFKFVVAVESDVDEVCALRDRYRIPPERVLLMPEGRTPEALARKSAWLPELCLKHGFRFTTRLHIILWGDERGR

SEQ ID NO: 29572 - protein, 230 aa, unidentified
  source 1..230: note = Deinococcus actinosclerus
  REGION 1..230: note = tr|A0A0U4APK6|A0A0U4APK6_9DEIO 7-carboxy-7-deazaguanine synthase OS=Deinococcus actinosclerus OX=1768108 GN=queE PE=3 SV=1
MKYPVYERFYTWQGEGVHLGRAAYFIRLYGCPQACPWCDSAGTWHRDYRPDGVTLMDADELAEVVRTESPDGAVVVVTGGEPILFDLAPLTDALHAQGRRVHIETSGIAPLRGALDWVTLSPKPFGQPPLPEVVARADEVKIIVHDPGDIQAGLDTLTGLPEKAVIWLHPEWSKARERDLTVLNAITQAVKDNPRLRAGYQMHKLYRADDLDAHSDKRLIPLGGNVELGY

SEQ ID NO: 29573 - protein, 230 aa, unidentified
  source 1..230: note = Deinococcus actinosclerus
  REGION 1..230: note = tr|A0A2Z3YYA0|A0A2Z3YYA0_9DEIO 7-carboxy-7-deazaguanine synthase OS=Deinococcus actinosclerus OX=1768108 GN=queE PE=3 SV=1
MKYPVYEQFYTWQGEGVHLGRAAYFIRLYGCPQACPWCDSAGTWHRDYRPEGVTLMDADELAEVVRHESPDGAVVVVTGGEPILFDLAPLTDALHALGRRVHIETSGIASLRGGLDWVTLSPKPFGQPPLPDVVARADEVKIIVHEPGDIQAGLDTLTGLPENAVIWLHPEWSKARERDLTVLNAITQAVKENPRLRAGYQMHKLYRADDLDAHSDKRLIPLGGNAALGY

SEQ ID NO: 29574 - protein, 230 aa, Deinococcus cellulosilyticus
  REGION 1..230: note = tr|A0A511N0N9|A0A511N0N9_9DEIO 7-carboxy-7-deazaguanine synthase OS=Deinococcus cellulosilyticus NBRC 106333 = KACC 11606 OX=1223518; GN = queE PE=3 SV=1
MKYPVYERFYTWQGEGVHLGRAAYFIRLYGCPQKCFWCDSAGTWHPEYRPPQVGLYSAQELADFVVQESPDGAVVVVTGGEPILFDLTELVERLHAAGRRVHLETSGIAPLKGGIDWVTLSPKPFGMPPLREVVELTDEVKIIVHDLSDIQAGLKVLEGLPDDAVIWLHPEWSKAREKDMTVLNAITQAVKENPRLRAGYQMHKAYRADDLDPHSDKRQIPLGGNPELGV

SEQ ID NO: 29575 - protein, 230 aa, Deinococcus deserti
  REGION 1..230: note = tr|C1CXM5|C1CXM5_DEIDV 7-carboxy-7-deazaguanine synthase OS=Deinococcus deserti (strain VCD115 / DSM 17065 / LMG 22923) OX=546414 GN=queE PE=3 SV=1
MKYPVFERFYTWQGEGVHLGRAAYFVRLYGCPQECPWCDSAGTWHKDYRPAGVQLMTPEAIAACVAQESPEGAVVVITGGEPILFDLTPLVEALHGLGRRVHLETSGIAPLRGAIDWVTLSPKPFGTLPLPSVVQQAHEVKIIVHDTSDIRDGLATLDGLKDDAVIWLHPEWSKARERDAAVLNAITEAVKANPRLRAGYQMHKLYRADDLDAGSDKRPIPLGGNPQLGY

SEQ ID NO: 29576 - protein, 230 aa, Deinococcus gobiensis
  REGION 1..230: note = tr|H8GTZ2|H8GTZ2_DEIGI 7-carboxy-7-deazaguanine synthase OS=Deinococcus gobiensis (strain DSM 21396 / JCM 16679 / CGMCC 1.7299 / I-0) OX=745776 GN=queE PE=3 SV=1
MKYPVYERFYTWQGEGVHLGRAAYFIRLYGCPQACPWCDSAGTWHRDYRPEGVTLMSAEELAQAVRAESPDGAFVVVTGGEPILFDLAPLTGALHALGRRVHIETSGIAPLRGDLDWVTLSPKPFGQWPLPEVVARADEVKLIVHEPGDIRAGLETLEGLRKDAVLWLHPEWSKARERDAGVLNAITEAVKDDPRLRAGYQMHKLYRADDLDVRSDKRLIPLGGNPGLGY

SEQ ID NO: 29577 - protein, 230 aa, Deinococcus grandis
  REGION 1..230: note = tr|A0A100HGC3|A0A100HGC3_9DEIO 7-carboxy-7-deazaguanine synthase OS=Deinococcus grandis; OX = 57498 GN=queE PE=3 SV=1
MKYPVYERFYTWQGEGVHLGRAAYFIRLYGCPQACPWCDSAGTWHRDYRPDGVTLMGADELAEVVRAESPDGAVVVVTGGEPILFDLNPLTDALHALGRRVHIETSGIAPLRGELDWVTLSPKPFGQPPLPEVVALADEVKIIVHDPGDIQAGLDTLTGLREDAVIWLHPEWSKARERDLSVLNAITQAVKENPRLRAGYQMHKLYRADDLDAHSDKRLIPLGGNAALGY

SEQ ID NO: 29578 - protein, 230 aa, Deinococcus indicus
  REGION 1..230: note = tr|A0A246BEU4|A0A246BEU4_9DEIO 7-carboxy-7-deazaguanine synthase OS=Deinococcus indicus; OX = 223556 GN=queE PE=3 SV=1
MKYPVYERFYTWQGEGVHLGRAAYFIRLYGCPQACPWCDSAGTWHRDYRPDGVTLMGADELAEVVRAESPDGAVVVVTGGEPILFDLNPLTDALHALGRRVHIETSGIAPLRGALDWVTLSPKPFGQPPLPEVVARADEVKIIVHEPGDIQAGLDTLSGLPQDAVIWLHPEWSRARERDLGVLNAITQAVKENPRLRAGYQMHKLYRADDLDAHSDKRLIPLGGNAALGY

SEQ ID NO: 29579 - protein, 230 aa, Deinococcus maricopensis
  REGION 1..230: note = tr|E8U3S4|E8U3S4_DEIML 7-carboxy-7-deazaguanine synthase OS=Deinococcus maricopensis (strain DSM 21211 / LMG 22137 / NRRL B-23946 / LB-34) OX=709986 GN=queE PE=3; SV = 1
MKYPVYERFYTWQGEGVHLGRAAYFVRLYGCPQACPWCDSAGTWHRDYRPDGVTLMTAHEIAQAVAAESPDGAVVVITGGEPILFDLTALVDALHALGRRVHLETSGIAPLRGHLDWVTLSPKPFGTPPLPEVVQRAHEVKIIVHDPSDIDAGLATLDGLPDDAVIWLHPEWSRARERDPAVLNAITETVKASPRLRAGYQMHKLYRADDLDARSVKTLIPLGGNPTLGY

SEQ ID NO: 29580 - protein, 230 aa, Deinococcus peraridilitoris
  REGION 1..230: note = tr|L0A1U6|L0A1U6_DEIPD 7-carboxy-7-deazaguanine synthase OS=Deinococcus peraridilitoris (strain DSM 19664 / LMG 22246 / CIP 109416 / KR-200) OX=937777 GN=queE PE=3 S V=1
MKYPVHERFYTWQGEGVHLGRAAYFVRLYGCPQACPWCDSAGTWHTEFRPERVSLMTPREIAAGVERESPSGAVVVVTGGEPILFDLAPLVGELHALGRAVHLETSGIAELRGEIDWVTLSPKPFGTWPLPSVVARTDEVKIIVHDVLDIDAGLRTLSGLRDDAVIWLHPEWSKARDRDRRVLNAITEAVKQNPRLRAGYQMHKLYRADDLDANSVKTLIPLGGNPELGY

SEQ ID NO: 29581 - protein, 285 aa, Deinococcus proteolyticus
  REGION 1..285: note = tr|F0RP02|F0RP02_DEIPM 7-carboxy-7-deazaguanine synthase OS=Deinococcus proteolyticus (strain ATCC 35074 / DSM 20540 / JCM 6276 / NBRC 101906 / NCIMB 13154 / VKM Ac- 1939 / CCM 2703 / MRP) OX=693977 GN=queE PE=3 SV
MSTGSESPLPAKRGVNEVAGHPAAEGESKGLSVEGSKGDAVLDSSTLRPLDAAKQPKYPVYERFYTWQGEGVHLGRAAYFIRLYGCPQHCPWCDSAGTWHPEYRPESVGLMDAQALADAVAAESPAGAVVIITGGEPILFDLAPLTDALHAIGRRVHIETSGIAPLRGELDWVTLSPKPTQKWPLPEVVAHADEVKIIVHEPQDIAAGLATLDGLRDDAVIWLHPEWSRAREREMRVLNAITEAVKADPRLRAGYQMHKLYRADDLDEHSDKRLIPLGGNERLGY

SEQ ID NO: 29582 - protein, 243 aa, Deinococcus radiophilus
  REGION 1..243: note = tr|A0A3S0JX72|A0A3S0JX72_9DEIO 7-carboxy-7-deazaguanine synthase OS=Deinococcus radiophilus OX=32062 GN=queE PE=3 SV=1
MSTGSKAEVRSSSTKYPVYERFYTWQGEGVHLGRAAYFIRLYGCPQHCPWCDSAGTWHPEYRPESVGLMDAAALAEAVAAESPDGAVVIITGGEPILFDLVPLTDALHALGRRVHIETSGIAPLRGDLDWMTLSPKPSQKWPLPAVVARADEVKIIVHDPEDIQAGLDTLGGLRQDAVIWLHPEWSRARERDMRVLNAITEAVKANPRLRAGYQMHKLYRADNLDQHSDKRLIPLGGDTALGY

SEQ ID NO: 29583 - protein, 230 aa, unidentified
  source 1..230: note = Deinococcus soli
  REGION 1..230: note = tr|A0A0F7JQV1|A0A0F7JQV1_9DEIO 7-carboxy-7-deazaguanine synthase OS=Deinococcus soli Cha et al. 2016 OX=1309411 GN=queE PE=3 SV=1
MKYPVYERFYTWQGEGVHLGRAAYFIRLYGCPQACPWCDSAGTWHRDYRPDGVTLMDTDELAEVVRNESPDGAVVVVTGGEPILFDLKPLTDALHALGRRVHLETSGIAPLRGDLDWVTLSPKPFGQPPLPEVVAVADEVKIIVHEPGDIQAGLDTLTGLPDEAVIWLHPEWSKARERDLKVLNAITQAVKENPRLRAGYQMHKLYRADDLDAHSDKRLIPLGGNAELGY

SEQ ID NO: 29584 - protein, 230 aa, Deinococcus sp.
  REGION 1..230: note = tr|A0A418RE86|A0A418RE86_9DEIO 7-carboxy-7-deazaguanine synthase OS=Deinococcus sp. RM; OX = 2316359 GN=queE PE=3 SV=1
MKYPVYERFYTWQGEGVHLGRAAYFIRLYGCPQSCPWCDSAGTWHRDYRPDSVTLMDADELAEVVRNESPDGAVVVVTGGEPILFDLAPLTDALHALGRRVHIETSGIAPLRGELDWVTLSPKPFGQLPLPEVVPLADEVKIIVHEPGDIQAGLDTLTGLPQDAVIWLHPEWSRARERDLGVLNAITQAVKENPRLRAGYQMHKLYRADDLDAHSDKRLIPLGGNAPLGY

SEQ ID NO: 29585 - protein, 230 aa, Deinococcus sp.
  REGION 1..230: note = tr|A0A1T1B6K4|A0A1T1B6K4_9DEIO 7-carboxy-7-deazaguanine synthase OS=Deinococcus sp. LM3; OX = 1938608 GN=queE PE=3 SV=1
MKYPVYERFYTWQGEGVHLGRAAYFIRLYGCPQACPWCDSAGTWHRDYRPDGVTLMSADELADVVRAESPEGAVVVVTGGEPILFDLAPLTDALHALGRRVHIETSGIAPLRGELDWVTLSPKPFGQPPLPEVVVLADEVKIIVHEPGDIQAGLDTLTGLPDGAVIWLHPEWSRARERDLTVLNGITQAVKENPRLRAGYQMHKLYRADDLDAHSDKRLIPLGGNAELGY

SEQ ID NO: 29586 - protein, 230 aa, Deinococcus yavapaiensis
  REGION 1..230: note = tr|A0A318SFL0|A0A318SFL0_9DEIO 7-carboxy-7-deazaguanine synthase OS=Deinococcus yavapaiensis KR-236 OX=694435 GN=queE PE=3 SV=1
MKLPVYERFYTWQGEGVHLGRAAYFVRLYGCPQACPWCDSAGTWHKDYRPQGVVLMAPREIAGCVEQDSPPGAVVVVTGGEPILFDLTELVRELHALGRRVHLETSGIAELRGDLDWVTLSPKPFGQLPVRSVVARADEVKIIVHDVSDIKAGLDTLEGLRDDAVIWLHPEWSKARERDAAVLNAITEAVKANPRLRAGYQMHKLYRADDLDAHSDKRLIPLGGNVELGY

SEQ ID NO: 29587 - protein, 212 aa, Delftia acidovorans
  REGION 1..212: note = tr|A0A2W5IZ56|A0A2W5IZ56_DELAC 7-carboxy-7-deazaguanine synthase OS=Delftia acidovorans; OX = 80866 GN=queE PE=3 SV=1
MTYSVKEIFYTLQGEGGQAGTPAIFCRFAGCNLWTGREQDRASAICQFCDTDFVGTDGTLGGKFATADALAERILSQWPAGDSRHRMVVLTGGEPLLQVDEPLIAALHARGFRISVESNGTVAAPEGIDWLCISPKAGADWVQRSGQELKLVWPQPGFDLQAIEAGTRFDHYFLQPMDNVLQADNTAACIAQCLQHPAWRLSLQTHKLTGIR

SEQ ID NO: 29588 - protein, 212 aa, Delftia acidovorans
  REGION 1..212: note = tr|S2WFA7|S2WFA7_DELAC 7-carboxy-7-deazaguanine synthase OS=Delftia acidovorans CCUG 15835 OX=883100; GN = queE PE=3 SV=1
MTYSVKEIFYTLQGEGGQAGTPAVFCRFAGCNLWTGREQDRASAICQFCDTDFVGTDGTLGGKFATADALAERILSQWPAGDSRHRMVVLTGGEPLLQVDAPLIAALHARGFRISVESNGTVAAPEGIDWLCISPKAGADWVQRSGQELKLVWPQPGFDLQAIEAGTRFDHYFLQPMDNVLQADNTAACIAQCLQHPAWRLSLQTHKLTGIR

SEQ ID NO: 29589 - protein, 212 aa, Delftia lacustris; identical to SEQ ID NO: 29588
  REGION 1..212: note = tr|A0A1H3RQU3|A0A1H3RQU3_9BURK 7-carboxy-7-deazaguanine synthase OS=Delftia lacustris; OX = 558537 GN=queE PE=3 SV=1

SEQ ID NO: 29590 - protein, 212 aa, Delftia sp.
  REGION 1..212: note = tr|A0A031HLQ0|A0A031HLQ0_9BURK 7-carboxy-7-deazaguanine synthase OS=Delftia sp. RIT313; OX = 1468410 GN=queE_2 PE=3 SV=1
MTYSVKEIFYTLQGEGGQAGTPAIFCRFAGCNLWTGREQDRASAICQFCDTDFVGTDGTLGGKFATADALAERILSQWPAGDSQHRMVVLTGGEPLLQVDEPLIAALHARGFRISVESNGTVAAPEGIDWLCISPKAGADWVQRSGQELKLVWPQPGFDLQAIEAGTRFDRYFLQPMDNVLQADNTAACIAQCLQRPAWRLSLQTHKLTGIR

SEQ ID NO: 29591 - protein, 212 aa, Delftia sp.
  REGION 1..212: note = tr|A0A081J7Q5|A0A081J7Q5_9BURK 7-carboxy-7-deazaguanine synthase OS=Delftia sp. 670; OX = 1537702 GN=queE PE=3 SV=1
MTYSVKEIFYTLQGEGGQAGTPAVFCRFAGCNLWTGREQDRASAICQFCDTDFVGTDGTLGGKFATADALAERILSQWPAGDSRHRMVVLTGGEPLLQVDEPLIAALHARGFRISVESNGTVAAPEGIDWLCISPKAGADWVQRSGQELKLVWPQPGFDLQAIEAGTRFDHYFLQPMDNVLQADNTAACIAQCLQHPAWRLSLQTHKLTGIR

SEQ ID NO: 29592 - protein, 212 aa, Delftia tsuruhatensis
  REGION 1..212: note = tr|A0A072T8K8|A0A072T8K8_9BURK 7-carboxy-7-deazaguanine synthase OS=Delftia tsuruhatensis; OX = 180282 GN=queE PE=3 SV=1
MTYSVKEIFYTLQGEGGQAGTPAVFCRFAGCNLWTGREQDRASAICQFCDTDFVGTDGTLGGKFATADALAERILSQWPAGDSRHRMVVLTGGEPLLQVDAPLIAALHARGFRISVESNGTVAAPEGIDWLCISPKAGADWVQLSGQELKLVWPQLGFDLQAIEADTRFDHYFLQPMDNILQADNTAACIAQCLQHPAWRLSLQTHKLTGIR

SEQ ID NO: 29593 - protein, 212 aa, Delftia tsuruhatensis; identical to SEQ ID NO: 29588
  REGION 1..212: note = tr|A0A1D8J1N8|A0A1D8J1N8_9BURK 7-carboxy-7-deazaguanine synthase OS=Delftia tsuruhatensis; OX = 180282 GN=queE PE=3 SV=1

SEQ ID NO: 29594 - protein, 228 aa, unidentified
  source 1..228: note = Unknown
  REGION 1..228: note = tr|A0A1V4ME53|A0A1V4ME53_9DELT 7-carboxy-7-deazaguanine synthase OS=delta proteobacterium ML8_D OX=1775672 GN=queE PE=3 SV=1
MRRINQQSTINNQRFSKSLSVSETFVSLQGEGVWTGWPCFFIRLAGCNLRCTYCDTQYAYNSGEKRDIESLLDEWRQAGVGLVQVTGGEPLLQSGTYVLLEALLNEGARVLLETNGSLGLKNVPREVIKIVDRKTPGSAMEEFFLEENLGWLKQGDQLKFVITARDDYEWAREEVVRLRLSCYTEVLFSPAWGGLAPFQLAEWIIADRLSVRFQIQLHKILWGEKRGI

SEQ ID NO: 29595 - protein, 224 aa, unidentified
  source 1..224: note = Unknown
  REGION 1..224: note = tr|Q1NNH0|Q1NNH0_9DELT 7-carboxy-7-deazaguanine synthase OS=delta proteobacterium MLMS-1 OX=262489 GN=queE; PE = 3 SV=1
MTQPASLLLSEIFYSIQGESTLAGYPCLFIRLAGCNLRCSYCDARYTYEEPGQSYSLEGVLKAMAEVGPGGRPVELVEITGGEPLLQEGVYPLLDVLLARGHQVLLETNGTRSLARLPAAVRCIMDIKCPASGMAAHLMPENLHRLTGDDEIKFVISDRADYDWAKALLNHHQLTGLGPTLSFSPVTDRLAAADLAAWLLADALPARLQLQLHTLLWPHQQRGC

SEQ ID NO: 29596 - protein, 215 aa, unidentified
  source 1..215: note = Deltaproteobacteria bacterium
  REGION 1..215: note = tr|A0A2D4RSF0|A0A2D4RSF0_9DELT 7-carboxy-7-deazaguanine synthase OS=Deltaproteobacteria bacterium OX=2026735 GN=queE PE=3 SV=1
MTVIKNIQEIIPLTIQGEGFHAGRSCSFIRLFGCPVGCWFCDTGYAPRDREDLNKLTRESIDYESLREQLQSRYVVISGGEPLYHQDFEELLERLVGDDFEVAVETSGAKAFPFEKFPQVWVTFSPKLHATEYPKDLLSPTFWSHSQEIKVVISRANDLEAYEQLLDQAAQHGIPIYLQPEWSKKGEATPLILKVLRHKPDWKISVQLHKYLQLP

SEQ ID NO: 29597 - protein, 182 aa, unidentified
  source 1..182: note = Deltaproteobacteria bacterium
  REGION 1..182: note = tr|A0A2N2HHH9|A0A2N2HHH9_9DELT 7-carboxy-7-deazaguanine synthase (Fragment); OS = Deltaproteobacteria bacterium HGW-Deltaproteobacteria-20 OX=2013748 GN=queE PE=4 SV=1
MTYQVKACFRSLQGEGAQAGRVTVFCRLSGCNLWSGRPQDRERASCRFCDTDFVGSDGPGGGSFGSADGLAGHIASVWGEGVERDERRYVVFTGGEPLLQLDEPLIRACHALGFEVGVETNGTLGCPPGLDWVCVSPKAEAPLVQTSGDELKLVYPQGQLDPRLFEAMGFRTFSLQPCDGPG

SEQ ID NO: 29598 - protein, 244 aa, Dendrosporobacter quercicolus
  REGION 1..244: note = tr|A0A1G9M0M2|A0A1G9M0M2_9FIRM 7-carboxy-7-deazaguanine synthase OS=Dendrosporobacter quercicolus OX=146817 GN=queE PE=3 SV=1
MKDVVDLVEVFSSIQGEGKYVGCRQLFVRLAGCNLQCDYCDTPHSYVAAEHCRIEQTAGKRDFSNSANPVKVTALALAVNQMLRQPHHSVSLTGGEPLCQAEALQQLAAQINGRVYLETNGTLPQALKQVLPYIDIISMDIKLPKTTGRVLWREHSEFLSLARAKDVFVKLVIEEGMDIRHFDQAVKLIADIGRDILLVLQPVSPLNGCKAIVPEKIIEVHNRALLRLENVRVIPQTHKFIGQL

SEQ ID NO: 29599 - protein, 240 aa, Denitratisoma sp.
  REGION 1..240: note = tr|A0A518UEA9|A0A518UEA9_9PROT 7-carboxy-7-deazaguanine synthase OS=Denitratisoma sp. DHT3 OX=1981880 GN=queE PE=3 SV=1
MPEQRSRQESQAATQEKVVAADLSAKLRITEVFHSIQGESTRVGLPTVFIRLSGCPLRCTWCDTEYAFTGGETMSVGEVLERVAALGGVAACPTVCVTGGEPLAQKGCPDLLSALCDAGYSVSLETSGALDIAAVDARVSRIMDLKAPGSGEAARNRWENLESLTPRDELKLVLASREDYDWAKRQLAEHRLATRCPVLFSPVQGRLAPAQLAQWILDDRLPVRFQLQLHKILWQDAKGR

SEQ ID NO: 29600 - protein, 219 aa, unidentified
  source 1..219: note = Denitromonas halophilus
  REGION 1..219: note = tr|A0A557QXS1|A0A557QXS1_9RHOO 7-carboxy-7-deazaguanine synthase OS=Denitromonas halophilus OX=1629404 GN=queE PE=3 SV=1
MSTRQTVTRLRVTEIFASVQGEASRAGLPTVFVRLTGCPLRCVWCDTEYAFNGGQTRDLSTILDEIASHGLHHICVTGGEPLAQKGCLDLLTALCDAGYDVSLETSGALDIATVDPRVSRIMDLKAPGSGEADKNRWDNLPQLTARDELKIVIANADDYAWACEQLTTHALAARCPVLFSPVAGELAPADLAEWIVRDRLPVRFQMQLHKVLWADARGK

SEQ ID NO: 29601 - protein, 219 aa, unidentified
  source 1..219: note = Denitromonas halophilus
  REGION 1..219: note = tr|A0A558C9A1|A0A558C9A1_9RHOO 7-carboxy-7-deazaguanine synthase OS=Denitromonas halophilus OX=1629404 GN=queE PE=3 SV=1
MSTRQTVTRLRVTEIFASVQGEASRAGLPTVFVRLTGCPLRCVWCDTEYAFNGGQTRDLSTILDEIASHGLHHICVTGGEPLAQKGCLDLLTALCDAGYDVSLETSGALDIATVDPRVSRIMDLKAPGSGEADKNRWDNLPQLTARDELKIVIANADDYAWACDQLKTHALATRCPVLFSPVAGELAPADLAEWIVRDRLPVRFQMQLHKVLWADARGK

SEQ ID NO: 29602 - protein, 205 aa, unidentified
  source 1..205: note = Desertifilum sp.
  REGION 1..205: note = tr|A0A1E5QL15|A0A1E5QL15_9CYAN 7-carboxy-7-deazaguanine synthase OS=Desertifilum sp. IPPAS B-1220 OX=1781255 GN=queE PE=3 SV=1
MPSIEQTIVTYPIVESFHSVQGEGYWTGTNAFFIRLAGCDVHCPWCDTKLSWKASRHPQQSVIELGKLAASVNPAIVVVTGGEPLMHDLTALTEALRAHSLQVNLETSGAHPLSGQFDWITLSPKTFLPPKPSIYPHVNELKVVIANPKDLEWATLQQSLVPESAFKYLQPEWNSRQSQKLVFDYVLQHPEWRISLQTHKFLGIQ

SEQ ID NO: 29603 - protein, 242 aa, Desmospora activa
  REGION 1..242: note = tr|A0A2T4Z6W2|A0A2T4Z6W2_9BACL 7-carboxy-7-deazaguanine synthase OS=Desmospora activa DSM 45169 OX=1121389 GN=queE PE=3 SV=1
MNKGWNLPEPSVYRQWKLPMVEVFETVEGEGTAAGWPTVFVRVFHCNLRCSWCDTPYSYAPAQPEYEATVGEIAAEAHRYASHRICFTGGEPLMHREKSAALLEALACPEKIEDVHIETNGAIDLTPFDALRRERPWGEKVRFIMDWKLPRSKEESRMLVDNFNCLTQRDEVKLVIADEQDFRAAVDVINRHYQRGQILFSPVFETLPPRTLVEWVLAEPLPHVRVNLQLHKFIWDPAERGV

SEQ ID NO: 29604 - protein, 242 aa, Desmospora sp.
  REGION 1..242: note = tr|F5SDQ9|F5SDQ9_9BACL 7-carboxy-7-deazaguanine synthase OS=Desmospora sp. 8437 OX=997346 GN=queE PE=3 SV=1
MNNWELPQPAEYRAWKLPMVEIFETVEGEGNGAGYPTVFIRVFHCNLRCTWCDTPYSYAPARPEFEATIEEILEWVRRYPSRRICLTGGEPLMHREKSAALLAALADLNQVEDVHVETNGAIDLAPFDRLRKEGGKQREKIRFIMDYKLPASGEEHRMVRDNFRVLTDRDEVKFVIGDQEDFRAAVRVVQECHREGQILFSPVFETLPPRKLVEWVLAEPLPQVKVSLQLHKWIWDPAERGV

SEQ ID NO: 29605 - protein, 219 aa, unidentified
  source 1..219: note = Desulfallas geothermicus
  REGION 1..219: note = tr|A0A1I6D587|A0A1I6D587_9FIRM 7-carboxy-7-deazaguanine synthase OS=Desulfallas geothermicus DSM 3669 OX=1121426 GN=queE PE=3 SV=1
MSRLPVCEIFGPTIQGEGLYSGHRTMFIRMAGCDYRCSWCDTQYAQSVSQAQQLLSEEEIVHLVNKRSCGGSRRVTVTGGNPCIHDLDKLIGLLHQENYVIHIETQGSIIPPWLYNADHVCLSPKPPSSGNVTPVSAFDKFMHSDTSKELKLVVGTEEDYIYAKQIYKQYPSYPFTLQACTKEDPLPVLKWLIEYATADPDWGDNVKVLPQLHVLIGIK

SEQ ID NO: 29606 - protein, 214 aa, unidentified
  source 1..214: note = Desulfamplus magnetovallimortis
  REGION 1..214: note = tr|A0A1W1H7W3|A0A1W1H7W3_9DELT 7-carboxy-7-deazaguanine synthase OS=Desulfamplus magnetovallimortis OX=1246637 GN=queE PE=3 SV=1
MADNILEASEIFHSLQGEGPLAGRPAVFLRLSGCIKPFCPWCDTLYSCHSGSGEKISVENICAKILSYRNDFVVITGGEPFLQWHNGLQILEKSLLDKGCRIQYETSGKVVIPESSKGIKVCSPKYINGSWHFVEDNIKRADFFKFVVSENFRQVKAFVEKHDISREKVWIMPLGACRQEQLALLPSLWEFCVENRFSFSPRLHTLTFDNQRGI

SEQ ID NO: 29607 - protein, 212 aa, Desulfarculus baarsii
  REGION 1..212: note = tr|E1QGK4|E1QGK4_DESB2 7-carboxy-7-deazaguanine synthase OS=Desulfarculus baarsii (strain ATCC 33931 / DSM 2075 / VKM B-1802 / 2st14) OX=644282 GN=queE PE=3 SV=1
MLEVCEIFQSIQGEGVDAGLPCAFVRLAGCPLRCAWCDTAYAWQGGAAMSLPEVLARALAFELELVELTGGEPLAQAETPALLGALCDAGRRVLVETSGALDIAVVDERVHLIMDVKCPGSGMSERMRWRNLDILPPGAQVKFVLADRADYEFARRVIDAHGLGHRARPLLSVVHGRLAPAKVVEWMLADRLPARFQLQLHKFIWPPEARGV

SEQ ID NO: 29608 - protein, 213 aa, Desulfarculus sp.
  REGION 1..213: note = tr|A0A3A6P3V8|A0A3A6P3V8_9DELT 7-carboxy-7-deazaguanine synthase OS=Desulfarculus sp.; OX = 2093367 GN=queE PE=3 SV=1
MRLEICEIFLSIQGESSFAGLPCAFVRTAGCPLDCRWCDTEYAKLPGRIMDLGAIVALVQEMGVNLVELTGGEPLVQEAAPQLMSLLLQRGHTVLLETSGAFDLSPVPRDVHVIMDIKCPSSGMAGRMLWPNLKLLLPHHQVKFVISDRADYEYARHLIREHRLIERVQVLLSVVAGRLDPRQAVQWMLEDRLPVRFQLQLHKYIWPPDMRGV

SEQ ID NO: 29609 - protein, 215 aa, Desulfatibacillum aliphaticivorans
  REGION 1..215: note = tr|B8FMW5|B8FMW5_DESAL 7-carboxy-7-deazaguanine synthase OS=Desulfatibacillum aliphaticivorans OX=218208; GN = queE PE=3 SV=1
MALDVCEIFYGIQGESTYQGMPCVFIRLSGCNLRCRWCDTGYAYDAGLTMSISEIMEKAGQFGCPIVEVTGGEPLLQKETPALVDAFLNIGLLVLLETNGSQDIAKVDSRCIRIVDVKCPSSGMEEHNDYSNLSRMTEKDELKFVIASREDYEFARKRVRLLDFDGCRMNAIHFSPVFGELDPKTLAEWILQDRLEVRLHLQMHKFIWGKDARGV

SEQ ID NO: 29610 - protein, 215 aa, Desulfatibacillum alkenivorans
  REGION 1..215: note = tr|A0A1M6MMN2|A0A1M6MMN2_9DELT 7-carboxy-7-deazaguanine synthase OS=Desulfatibacillum alkenivorans DSM 16219 OX=1121393 GN=queE PE=3 SV=1
MALDVCEIFYGIQGESTYQGMPCVFIRLSGCNLRCRWCDTGYAYDAGLTMSISEIMDKAGQFGCPIVEVTGGEPLLQKETPALVDAFLNIGLLVLLETNGSQDIAKVDSRCIRIVDVKCPSSGMEEYNDYSNLSRMTEKDELKFVIANREDYDFARKRVRLLDFDGCRMNAIHFSPVFGELDPKTLAEWILQDRLEVRLHLQMHKFIWGKDARGV

SEQ ID NO: 29611 - protein, 214 aa, unidentified
  source 1..214: note = Desulfatitalea sp.
  REGION 1..214: note = tr|A0A0F2QVH6|A0A0F2QVH6_9DELT 7-carboxy-7-deazaguanine synthase OS=Desulfatitalea sp. BRH_c12 OX=1629708 GN=queE PE=3 SV=1
MALIINEIFHSLQGESSWTGLPFTFVRLTGCNLRCRYCDTEYAYTEGAPWPVDAVVAHVKTFGCPRVTITGGEPLMQSQTPALISALIETGFLVTLETNGSLDIGHLDRRCIKIVDFKGPSSGMQDHNRWSNVDCLSAEDQVKFVIADKGDFDFARAAATDLLKKIPAGHILFSAAHPLLPVDKLARWILDAHVEARLQIQLHKYIWPTVPRGV

SEQ ID NO: 29612 - protein, 197 aa, Desulfitobacterium metallireducens
  REGION 1..197: note = tr|W0EG76|W0EG76_9FIRM 7-carboxy-7-deazaguanine synthase OS=Desulfitobacterium metallireducens DSM 15288; OX = 871968 GN=queE PE=3 SV=1
MSIQYPIIESFTSIQGEGMHMGKGATFIRVAGCNLRCRWCDTSYSFDPSKARLMSAQEIVDEIPMPHQHIVITGGEPTLYDLGPLVYELHKLGKYVAIETNGTNPIPVEWGIDWVTASPKPGSGFALACSADELKYVVDDEFSIEYITDHEMIEGRIFLQVESGRPESAQKAYDLIQRFPERRLRLGIQLHKFLNVR

SEQ ID NO: 29613 - protein, 213 aa, Desulfobacca acetoxidans
  REGION 1..213: note = tr|F2NDB6|F2NDB6_DESAR 7-carboxy-7-deazaguanine synthase OS=Desulfobacca acetoxidans (strain ATCC 700848 / DSM 11109 / ASRB2) OX=880072 GN=queE PE=3 SV=1
MALRVCETFISIMGEASFAGLPGFFIRLSGCNLRCRYCDTTYAYAEGVERSLASLLGEAGASGYRLVLVTGGEPLLQEECLVLLSALVERGFTVLLETNGSRPLEAVDPRVHRIIDLKCPGSGMAQHNYLKNLDYLTEKDELKFVVSNRRDFDWAMQVMAASRIWERCTVLFSPVFGLLPPSELAAWILATRLPLRLNLQLHKYIWGPDVKGM

SEQ ID NO: 29614 - protein, 213 aa, Desulfobacca sp.
  REGION 1..213: note = tr|A0A1F9P772|A0A1F9P772_9DELT 7-carboxy-7-deazaguanine synthase OS=Desulfobacca sp. RBG_16_60_12 OX=1797909 GN=queE PE=3 SV=1
MPLVICETFASLMGESTRAGAPAYFIRLTGCNLRCRYCDTAYAYEGGQPMTTAALVEMALAQPHRLVLVTGGEPLLQDETPALLTALLEAGFTTCLETNGSRPIGALDARVHRILDLKCPGSAMAQHNDWRNLDLLNPRDEVKFVVSHQSDFTWALEVIGRHGLAQRLPVLISPVFGQVELKEAAAWILESRLPLRLNPQLHKYIWGPGVRGI

SEQ ID NO: 29615 - protein, 214 aa, Desulfobacter hydrogenophilus
  REGION 1..214: note = tr|A0A328FGU2|A0A328FGU2_9DELT 7-carboxy-7-deazaguanine synthase OS=Desulfobacter hydrogenophilus OX=2291 GN=queE PE=3 SV=1
MPLNICEIFYSLQGESTRAGLACVFVRLSGCNLSCSWCDTTYAATQSVSMTLNQIVDQVSAFECPMVEITGGEPLIQSQTPALISALLEKGFQVLLETNGSLSIAPVDPACIRIMDVKCPLSGEAGSFLFDNFKHMTSRDEIKFVVGSRQDYEYAASIIKTRLVSHPIENIHICPVFGRIELSDLAAWILEDRLGARLSLQQHKIIWDPDLRGV

SEQ ID NO: 29616 - protein, 214 aa, Desulfobacter postgatei
  REGION 1..214: note = tr|I5AYH9|I5AYH9_9DELT 7-carboxy-7-deazaguanine synthase OS=Desulfobacter postgatei 2ac9 OX=879212 GN=queE; PE = 3 SV=1
MSLEICEIFYSLQGESTRAGLACVFVRLSGCNLSCSWCDTTYAAVQPVSMTIDQIVGRVAAFECPMVEITGGEPLIQTQTPALISALLEKGFQVLLETNGSLSIASVDRACIRIMDVKCPSSGEAGSFLLDNLNHMTARDEIKFVVGSRQDYEYAASFIKTHLVNHPREKVHICPVFEAIELSDLAAWILKERLGARLSLQQHKIIWDPDLRGV

SEQ ID NO: 29617 - protein, 214 aa, Desulfobacter sp.
  REGION 1..214: note = tr|A0A357YRR8|A0A357YRR8_9DELT 7-carboxy-7-deazaguanine synthase OS=Desulfobacter sp.; OX = 2294 GN=queE PE=3 SV=1
MSLEICEIFYSLQGESTRAGLTCVFVRLSGCNLSCSWCDTTYAAVQPVSMTIDQIVGRVAAFECPMVEITGGEPLIQTQTPALISALLEKGFQVLLETNGSLSIASVDPACIRIMDVKCPSSGEAGSFLLDNFNHMTARDEIKFVVGSRQDYEYAASFIKAHLVNHPREKVHICPVFETIELSDLAAWILKDRLGARLSLQQHKIIWDPDLRGV

SEQ ID NO: 29618 - protein, 214 aa, Desulfobacter sp.
  REGION 1..214: note = tr|A0A2D6ETG4|A0A2D6ETG4_9DELT 7-carboxy-7-deazaguanine synthase OS=Desulfobacter sp.; OX = 2294 GN=queE PE=3 SV=1
MTLRVNEIFYSIQGESLYAGCPCVFIRLSGCNLRCSYCDTRYAYHQGVEMGIVEILNRVDPYKSNLVEITGGEPLIQSGTPPLIEYLLVAGYKVMMETNGTLDIRLADDRCIKVMDIKCPSSGEVEKNDLKNLQRLKTEDQLKFVIGDRNDYEFAKEIKGLLNNEFPADHVLFSTIYEKMAPTRLAKWIIEDRLQVRLQVQLHKILWPERDRGV

SEQ ID NO: 29619 - protein, 259 aa, unidentified
  source 1..259: note = Desulfobacteraceae bacterium
  REGION 1..259: note = tr|A0A1W9UVS5|A0A1W9UVS5_9DELT 7-carboxy-7-deazaguanine synthase OS=Desulfobacteraceae bacterium 4572_35.2 OX=1971628 GN=queE PE=3 SV=1
MCGSQITLVRVTHVTKLPLIEMFSSVQGEGPLVGRRQVFLRFAGCNLACAYCDTPFVPTASCRVETAPGSETFTLWDNPIDVHQVVNCVHGWLADLPQAHHSFSITGGEPLLHVDALVQWLPQLSQLLPLQLETNGTLTESLRSVLPWLRWVVMDFKLESQTGEPTPWNEHRQFLQLAAQVNCCVKIVVGAETPIEELQRAADIVADVARHVPVILQPRTIAGRCSVAGAQLIAWQGVLSGAGLDVRVIPQTHCYLAVL

SEQ ID NO: 29620 - protein, 214 aa, unidentified
  source 1..214: note = Desulfobacteraceae bacterium
  REGION 1..214: note = tr|A0A1W9TXN0|A0A1W9TXN0_9DELT 7-carboxy-7-deazaguanine synthase OS=Desulfobacteraceae bacterium 4572_187 OX=1971620 GN=queE PE=3 SV=1
MTLLVNEIFYSIQGESTHSGRPCIFVRLTGCNLRCSYCDTRYAYEQGVKMDLTEIMTRIAAYMCPLVEITGGEPLLQSDTPILISKLLENGYEVLMETNGSLDISSIDGRCIKIVDIKCPTSDESEKNDMENLKRLGPKDQVKFVIENRIDYEYAKETIDFNCPDFPEEQILFSPVSEEIAPAQLAEWILEDNLNVRLNLQIHKIIWPSSERGV

SEQ ID NO: 29621 - protein, 215 aa, unidentified
  source 1..215: note = Desulfobacterales bacterium
  REGION 1..215: note = tr|A0A1V1WZC2|A0A1V1WZC2_9DELT 7-carboxy-7-deazaguanine synthase OS=Desulfobacterales bacterium S7086C20 OX=1869302 GN=queE PE=3 SV=1
MGLKVNEIFHSIQGESSYAGRRCVFIRLTGCNLRCSYCDTKYAYKGGKELAIEEIVGQVASHQCPLVEVTGGEPLIQEETPHLIHRLLDDGYEVLMETNGSQDISQADDRCVKIVDIKCPSSGEFEQNDMENLDRLIDHDEVKFVIGDRNDFSVAKEILDARTPDFCKKHPVHFSPVFGQIEPKILADWILKDRLNVRLQLQLHKVVWPSDQRGV

SEQ ID NO: 29622 - protein, 214 aa, unidentified
  source 1..214: note = Desulfobacterales bacterium
  REGION 1..214: note = tr|A0A2G9ZUN1|A0A2G9ZUN1_9DELT 7-carboxy-7-deazaguanine synthase OS=Desulfobacterales bacterium CG23_combo_of_CG06-09_8_20_14_all_52_9; OX = 1973984 GN=queE PE=3 SV=1
MTLWVNEIFFSIQGESTYAGLPCAFVRLSGCNLRCTYCDTTYAYDQGKHMTIPEILTELKKWDPLWVEVTGGEPLLQDRTPELIRSLIGEGYRVLLETNGSFDIGRVDPKCIRIVDLKCPSSGESNRIFWQNIDRLTPKDQIKFVIQDRRDYAFAKATLEKIGSRIPYGHRLFSPVQSVLPARDLAEWILQDEIRVRLHLQLHKILWPEDPRGR

SEQ ID NO: 29623 - protein, 214 aa, Desulfobacterium sp.
  REGION 1..214: note = tr|A0A1W9U237|A0A1W9U237_9DELT 7-carboxy-7-deazaguanine synthase OS=Desulfobacterium sp. 4572_20 OX=1971621 GN=queE PE=3 SV=1
MLKVNEIFYSIQGESTFAGFPCIFIRLTGCNLRCRYCDTKYAYEEGDDIPVGRILATVKKFDCGLIEVTGGEPLIQNETPDLISALIKNGYTVLLETNGSQDISSVDKRCTRIVDIKCPSSGMDNNNYWKNLDYITLNDQLKFVIANRQDYLYAKKVLDKLDIKRRKKLIINFSPVFNEIVLKDLAGWILADNLPVRLQIQLHKYIWGEHTKGV

SEQ ID NO: 29624 - protein, 209 aa, Desulfobacterium vacuolatum
  REGION 1..209: note = tr|A0A1W2A6W6|A0A1W2A6W6_9DELT 7-carboxy-7-deazaguanine synthase OS=Desulfobacterium vacuolatum DSM 3385 OX=1121400 GN=queE PE=3 SV=1
MMIEVSEIFTSIQGEGPFLGRPASFLRLSKCLPPLCPWCDTRHAWEPGEWISIKTVAAGIVALENKLCVITGGEPYLQWNAGLNFLEKYLIEQGLTVQYETSGKVLIPSDSRGFKVCSPKYLADTWHFIPENTSLAHCFKFVVKDDFTKVNAFIKEHHIPANKVWVMPMGALRHEQLEHSSRIWDFCVKNHYNFSPRLHTLFFNNQQGV

SEQ ID NO: 29625 - protein, 214 aa, Desulfobacula phenolica
  REGION 1..214: note = tr|A0A1H2IDN5|A0A1H2IDN5_9DELT 7-carboxy-7-deazaguanine synthase OS=Desulfobacula phenolica OX=90732 GN=queE PE=3 SV=1
MQLNICEIFYSLQGESSFTGLPCIFIRLSGCNLACSWCDTEYANTESHPMTIDQILKKTLSYNCNLVEITGGEPLLQDGTPFLISALLDKNYQVLLETNGSKTIKNISLDCIKIMDIKCPSSNESDSFLPENINFLTKQDEIKFVISSRKDYEFAKAIIDTKLRKISPKKIHLSPVFGQISPDAIAGWMIDDNLHARLSLQQHKIIWDPDKRGV

SEQ ID NO: 29626 - protein, 214 aa, Desulfobacula sp.
  REGION 1..214: note = tr|A0A1F9NAI5|A0A1F9NAI5_9DELT 7-carboxy-7-deazaguanine synthase OS=Desulfobacula sp. GWF2_41_7 OX=1797910 GN=queE PE=3 SV=1
MLLNICEIFYSLQGESTFSGLPCIFIRLSGCNLNCSWCDTPYAGEESSPMALDQILGKIRVYNCNLVEITGGEPLLQEATPALIAMLLERHYQVLLETNGSLGIQHIPKACIKIMDVKCPSSNESHQFLKENINYIGKEDEIKFVIGSMEDYEFAKEMIENELTGISQKKIHLSPVFGRILPETLAQRMIDDNLHARLSLQQHKIIWAPDKRGV

SEQ ID NO: 29627 - protein, 179 aa, Desulfobacula sp.
  REGION 1..179: note = tr|A0A1F9N826|A0A1F9N826_9DELT 7-carboxy-7-deazaguanine synthase (Fragment); OS = Desulfobacula sp. GWF2_41_7 OX=1797910 GN=A2097_12630; PE = 3 SV=1
SWCDTRYAEEECFSLSLEQILDRIGAYNCNLVEITGGEPLLQEATPALIALLLEKHYQVLLETNGSLSIEHVPGPCIKIVDVKCPSSNESHTFLPENLNYLGKEDEIKFVIGSLEDYDFARAMIENELGRISQKKIHLSPVFGLIEPEILAKRIIEDNLHARLSLQQHKIIWTPDARGV

SEQ ID NO: 29628 - protein, 214 aa, Desulfobacula toluolica
  REGION 1..214: note = tr|K0NML0|K0NML0_DESTT 7-carboxy-7-deazaguanine synthase OS=Desulfobacula toluolica (strain DSM 7467 / Tol2) OX=651182 GN=queE PE=3 SV=1
MQLNICEIFYSLQGESSFTGLPCIFIRLSGCNLACSWCDTEYANTESHPMTIDQILKKTLSYNCNLVEITGGEPLLQDGTPVLISALLDKNYQVLLETNGSKSIKNISLDCIKIMDIKCPSSNESDSFLPENINFLTQQDEIKFVISSRKDYEFAKAIIDTKLRKISPKKIHLSPVFGQISPDAIAGWMIDDNLHARLSLQQHKIIWDPDKRGV

SEQ ID NO: 29629 - protein, 205 aa, Desulfobotulus alkaliphilus
  REGION 1..205: note = tr|A0A562RX14|A0A562RX14_9DELT 7-carboxy-7-deazaguanine synthase OS=Desulfobotulus alkaliphilus OX=622671 GN=queE PE=3 SV=1
MLFVHELFHSIQGEGPFSGRPAVFLRLSGCVTPYCSFCDTKEALEKGKEVSEEKILEEILSYKTALVVITGGEPFLQWETGLQALESRLMDEGLEVQYESSGRAGIPENVLGKIVLSPKPGQWPPPEILKRAFALKPLMEKNPEPVLKAIQATGFPPEKVWLMALGASREEQLQHMPALWEICRKYGYHFCPRLHILVHDRKKGV

SEQ ID NO: 29630 - protein, 213 aa, unidentified
  source 1..213: note = Desulfobulbaceae bacterium
  REGION 1..213: note = tr|A0A2N6C1P3|A0A2N6C1P3_9DELT 7-carboxy-7-deazaguanine synthase OS=Desulfobulbaceae bacterium OX=2053307 GN=queE PE=3 SV=1
MLEICELFYSIQGESSFAGFPCFFIRVAGCNLRCTYCDTHYAYEGKQKSYSISQILAELQKYPGVLVEITGGEPLLQESVYPLFEQLLTTERSVLLETNGSLSLESVPEGVVKIMDMKCPDSGMHEKMNFDNFRFMAPKDEIKFVISSREDYNWATQLVSSYDLHKKTTVTFSPVIGSLPPEKLAAWILEDRLPVRLRLQLHTIIWPGKIKGY

SEQ ID NO: 29631 - protein, 241 aa, unidentified
  source 1..241: note = Desulfobulbaceae bacterium
  REGION 1..241: note = tr|A0A0F2N8X7|A0A0F2N8X7_9DELT 7-carboxy-7-deazaguanine synthase OS=Desulfobulbaceae bacterium BRH_c16a OX=1629713 GN=queE PE=3 SV=1
MSRTGTICISEILGPTIQGEGALIGRPTVFVRTGGCDFRCTWCDTLHAVESRFQSEWTAMTAQEILAEVKSLAGPKPLTISLSGGNPALQPLGQLIALGKSSGYTFALETQGSIAKEWFAGLDFLIISPKPPSSGMKADKQKLQECLAAAGKASSFLKFVVEDETDYLFARQAAAWFPRLPVSLQPCNPPPAEGTERDPADIEKNCDRLRWLVGRVIADAWYEVRVLPQLHVLLWGSKRGV

SEQ ID NO: 29632 - protein, 223 aa, unidentified
  source 1..223: note = Desulfobulbus oralis
  REGION 1..223: note = tr|A0A2L1GND9|A0A2L1GND9_9DELT 7-carboxy-7-deazaguanine synthase OS=Desulfobulbus oralis; OX = 1986146 GN=queE PE=3 SV=1
MQTSAELALCECFYSIQGESARAGLPCLFFRLAGCNLRCLWCDSTYSFTGGRPCTVAEAAAWALGHACPLVELTGGEPLLQEGAYPLIERLLAGGKEVLLETNGTLSLARVPLEVSVILDVKCPGSGMAAYFCPENLELLALRKKRGSTDEVKFVLADETDFFWALDFVRRHGLHALVPVLFSPVRPGLEPERLAELMLAHQAPARLQLQLHTLLWPGRKRGV

SEQ ID NO: 29633 - protein, 224 aa, Desulfobulbus propionicus
  REGION 1..224: note = tr|A0A2G6M9X9|A0A2G6M9X9_9DELT 7-carboxy-7-deazaguanine synthase OS=Desulfobulbus propionicus OX=894 GN=queE PE=3 SV=1
MTVTDTLLVNERFLSIQGESTYAGLPCLFIRLSGCNLRCGYCDAAYTWEEPGNIETVSQLMAWAARYPDTLIEITGGEPLLQENVYPLMQGFIDNGRQVLLETNGSVPLSRVPDEVAIIMDIKSPDSGMHLSLDLGNLELLRQRAHRQCPDEVKFVLCSPEDFHWAAGMVRRHKLSDHLPVLFSPVTQRISPKTVAELLLDAQLPVRLQLQLHTLLWPEKQRGA

SEQ ID NO: 29634 - protein, 225 aa, Desulfobulbus sp.
  REGION 1..225: note = tr|A0A0A2I4G5|A0A0A2I4G5_9DELT 7-carboxy-7-deazaguanine synthase OS=Desulfobulbus sp. Tol-SR OX=1536652 GN=queE PE=3 SV=1
MVREDRLLVSELFYSIQGESTFAGLPCVFIRLAGCNLRCSYCDAAYSYEETGREVSVDSLLDFVDGYPGTLVELTGGEPLLQPGSLLLLDRLVGRHRTVLLETNGSQPIADLPADVRVILDVKCPDSGMAASWLPDNLTAIRRRAARRPNGSEVKFVISSLRDYRFARDFVLEHDLTAHAPVLFSPVRGRISPAELAAAVLADRLPVRLQLQLHTLIWPEQTRGV

SEQ ID NO: 29635 - protein, 222 aa, Desulfocapsa sp.
  REGION 1..222: note = tr|A0A432R4A9|A0A432R4A9_9DELT 7-carboxy-7-deazaguanine synthase OS=Desulfocapsa sp.; OX = 2066021 GN=queE PE=3 SV=1
MQNKLQISEIFFSVQGESTFAGLPCIFVRLSGCNLRCNYCDAAYTWEMGDSSSVSEILTAIAKYPCRLVELTGGEPLMQQQCPELLRSLLQQGYSVLLETNGSVAINSVPPDVTSILDVKTPDSGSCDSFLMENIPEIRKRIAANPGSCEMKFVLSSKNDFLWACDFIRKHKLNASLPLLFSPVTGRVTAQELADWLMEIELSVRLQLQLHTILWPGKKRGV

SEQ ID NO: 29636 - protein, 224 aa, Desulfocapsa sp.
  REGION 1..224: note = tr|A0A432QN87|A0A432QN87_9DELT 7-carboxy-7-deazaguanine synthase OS=Desulfocapsa sp.; OX = 2066021 GN=queE PE=3 SV=1
MTVPEQLQVSELFYSIQGESTRAGLPCAFIRLSGCNLHCSYCDSSYTRDEPGKKMSIDQIITWLRDFPKTMVEITGGEPLLQDSVYPLMEKLLKADRSILLETSGSLSIQHVPTAVSIILDLKCPGSGMAEKNFWSNLDLLRYRKKLGSRDEIKFVLSSEEDFSWAQKIICKYQLTKDMPVLFSPVIPALPPERVAARILREQLPVRLQLQLHKQIWPGIHRGV

SEQ ID NO: 29637 - protein, 222 aa, Desulfocapsa sulfexigens
  REGION 1..222: note = tr|M1PDU7|M1PDU7_DESSD 7-carboxy-7-deazaguanine synthase OS=Desulfocapsa sulfexigens (strain DSM 10523 / SB164P1) OX=1167006 GN=queE PE=3 SV=1
MPANIKISEIFYSIQGESSYAGLPCIFIRLSGCNLRCNYCDAAYTWEEGDPWSIDSILAKVNSYPCDLVEVTGGEPLLQKNCPELLAGLSTQGKKTLLETNGSIAINAIPDETIAILDVKCPDSGSKDSFHPDNLLLIRNRLAATPGSAELKFVLSTQDDYIWAKNFISQHQLVGLLPILFSPVQPGVTAQDLADWILKDGLDVRLQIQLHTILWPTISRGV

SEQ ID NO: 29638 - protein, 214 aa, unidentified
  source 1..214: note = Desulfocarbo indianensis
  REGION 1..214: note = tr|A0A0K9I918|A0A0K9I918_9DELT 7-carboxy-7-deazaguanine synthase OS=Desulfocarbo indianensis OX=1348163 GN=queE PE=3 SV=1
MAILRICEIFKSIQGESSWAGLPCVFVRLAGCPLDCRWCDTAYAKQGGSDLSLESILAQVAAQGPGLVEVTGGEPMCQAGAPALIAALCRAGRTVLVETNGCEDISGLDQRAHIIMDIKCPSSGMSQRTRWENLAALKPQDEVKLVLADRGDYEYARDIIQTHGLAQRCGVLLSTVHGQLEPRLAVEWLLADQLPVRFQLQMHKYIWPPDTRGV

SEQ ID NO: 29639 - protein, 212 aa, Desulfococcus multivorans
  REGION 1..212: note = tr|S7TAG8|S7TAG8_DESML 7-carboxy-7-deazaguanine synthase OS=Desulfococcus multivorans DSM 2059 OX=1121405; GN = queE PE=3 SV=1
MTLTVNEIFFSIQGESSFAGRPCVFIRLTGCNLRCAYCDTRYAYYDGVALDIPDILQRVADYQCPLVEVTGGEPLIQAETPLLIGELIERDFTVLLETNGTQDISRIDDRCIRIVDVKCPTSGEADKNDLDNFDRLSSHDEIKFVIGNREDYEFARTIAGRLSGRPNPVHFSPVFGRLAPDQMAAWILEDRLNVRLQPQLHKIIWNPEQRGV

SEQ ID NO: 29640 - protein, 212 aa, unidentified
  source 1..212: note = Desulfococcus oleovorans
  REGION 1..212: note = tr|A8ZTP3|A8ZTP3_DESOH 7-carboxy-7-deazaguanine synthase OS=Desulfococcus oleovorans (strain DSM 6200 / Hxd3) OX=96561 GN=queE PE=3 SV=1
MSLHVSELFFSIQGESLDAGLACAFVRLAGCNLCCAYCDTAYARQGGTPMEIPEILDRVARFGCSLVEITGGEPLLQKETPLLIQRLLSVGYRVLLETNGTQNIGLVDKSCIRIVDVKCPSSGESEKNDARNLDRLAAHDQVKFVISDRTDYLFAKKTAGRITAVAPGHILFSTVHGVLDPAQLAHWMLADGLPVRLHLQLHKILWGEARGK

SEQ ID NO: 29641 - protein, 202 aa, Desulfofaba hansenii
  REGION 1..202: note = tr|A0A2M9DJX2|A0A2M9DJX2_9DELT 7-carboxy-7-deazaguanine synthase OS=Desulfofaba hansenii; OX = 157842 GN=queE PE=3 SV=1
MFHSLQGEGPFMGRPAVFLRLSGCVPPLCPWCDSRHAWGPGERMPVDAILEKILAYGCDFAVITGGEPFLQWAAGLRRLVERLAPKGWDIQYETSGKIPLPADLQGYAVCSPKFLDGRWHFDTANLRRAHAFKFVVDKEPDPILAFIEQHAIDKKKVWLMAMGKSRKAQLERAADLWRVCTENGFNFSPRLHTLIFNDLKGV

SEQ ID NO: 29642 - protein, 211 aa, unidentified
  source 1..211: note = Desulfofarcimen acetoxidans
  REGION 1..211: note = tr|C8VWI0|C8VWI0_DESAS 7-carboxy-7-deazaguanine synthase OS=Desulfofarcimen acetoxidans (strain ATCC 49208 / DSM 771 / VKM B-1644 / 5575) OX=485916 GN=queE PE=3 SV=1
MKVNEIFYSLQGEGITAGYPTVFIRLTGCNLRCLYCDTVYAYEEGQEMSVKDVADRVHEYGAHYVCITGGEPLQQKAELKLLLSLLNRYTVTIETNGSLSLEDLSFNYCHFAMDIKTPGSGMHLYNDFSNIEFLRSKDEIKFIIGSRTDYDFARGIIEKYKLAQKVIVTFSPVFGLEPRFLAQWVLEDKLFFVRVQLQIHKYIWEPGARGV

SEQ ID NO: 29643 - protein, 246 aa, unidentified
  source 1..246: note = Desulfofundulus australicus
  REGION 1..246: note = tr|A0A1M5C6W8|A0A1M5C6W8_9FIRM 7-carboxy-7-deazaguanine synthase OS=Desulfofundulus australicus DSM 11792 OX=1121425 GN=queE PE=3 SV=1
MSPLTAPIREIFSSIQGEGIFVGCRQIFLRFAGCNLTCSYCDTPRDIPEQCYWEKRPGTRKFFTSPNPMTAQDVALILRELEPSAHHSISLTGGEPLLHALFLRELIPLIKGTRQGIYLETNGTLPAFLKPLLPFIDIIAMDIKLPGTAKVKPLWDEHREFLELARTKNTFVKIIVDENSKMEEIEKALDLICDVGDFPVVFQPVTTPDAEIKLSAEKIITWQSLAMKRLTDVRVVPQTHKFLGYL

SEQ ID NO: 29644 - protein, 243 aa, unidentified
  source 1..243: note = Desulfofundulus kuznetsovii
  REGION 1..243: note = tr|A0A101HWS8|A0A101HWS8_9FIRM 7-carboxy-7-deazaguanine synthase OS=Desulfofundulus kuznetsovii OX=58135 GN=queE PE=3 SV=1
MDVFVSEIFSSVQGEGPLVGCRQIFLRFAGCNLDCAYCDTPGEMRPTHCRCENALDGKDLAFYKNPLNAGQVVSAVERLKPSIHHSISLTGGEPLLQNEFLLEILPLIKGTRLGVYLETNGTLTEQLESIIGMVDFIAMDIKLPGVSGLPPMWEEHKRFLAAAVQKKVFVKVVVGGKTREEEFIQAVQHVAEIADLPLIIQPVTGSRFLKPDPARLLCLQERALDCLSDVRVIPQVHKMLELV

SEQ ID NO: 29645 - protein, 246 aa, unidentified
  source 1..246: note = Desulfofundulus salinum
  REGION 1..246: note = tr|A0A494X231|A0A494X231_9FIRM 7-carboxy-7-deazaguanine synthase OS=Desulfofundulus salinum OX=2419843 GN=queE PE=3 SV=1
MSSPVAPLVEIFSSIQGEGIWVGCRQIFLRFAGCNLTCSYCDTPRDIPRHCRWEARPGSREFLLLPNPLTPQEVALKIRKLNPAIHHSISLTGGEPLLHTSFLLELIPLLKGTRQGIYLETNGTLPDNLERILPLVDIIAMDIKLPGTANINPCWQEHRAFLKLARGKHVFVKLVVDEDSKPEEIERALDLICSVGDIPLVIQPVTTPEGKTRLKPEIAITWQSRALERLTDVRVIPQTHKFLGHL

SEQ ID NO: 29646 - protein, 246 aa, unidentified
  source 1..246: note = Desulfofundulus thermosubterraneus
  REGION 1..246: note = tr|A0A1M6DGC1|A0A1M6DGC1_9FIRM 7-carboxy-7-deazaguanine synthase OS=Desulfofundulus thermosubterraneus DSM 16057 OX=1121432 GN=queE PE=3 SV=1
MSPPVAPLVEIFSSIQGEGIWVGCRQIFLRFAGCNLACSYCDTPRGIPQYCRWEARPGSREFLLLPNPLTAQEVALMIRKLEPAAHHSISLTGGEPLLHTSFLLELIPLLKGTRQGIYLETNGTLPDSLERILPLVDIIAMDIKLPGTANINPCWQEHRAFLKLARGKHVFVKLVVDEDSKPEEIERALDLICNVGDIPLVIQPVTTPEGKTRLNPEKAITWQSRALEKLTDVRVIPQTHKFLGHL

SEQ ID NO: 29647 - protein, 231 aa, Desulfofustis glycolicus
  REGION 1..231: note = tr|A0A1M5U8D4|A0A1M5U8D4_9DELT 7-carboxy-7-deazaguanine synthase OS=Desulfofustis glycolicus DSM 9705 OX=1121409 GN=queE PE=3 SV=1
MPVLPTTVPARMLEVAELFYSLQGESSLAGFPCVFVRLAGCNLRCCYCDARYTYEETSTIRSIDDIVAAVNGYRCPLVEITGGEPLVQEETAALCATLLGRGFQVLLETNGSQSLAQVPDQVRIIMDIKCPGSGMAESLHLPNLDLLLARRQRNGRKDEIKFVLCSAEDYRWARDFVSCHRLHEYAELLFSPVIQQFPATDCAELLLRDHLPVRLQLQLHSLLWPGESRGK

SEQ ID NO: 29648 - protein, 214 aa, Desulfoglaeba alkanexedens
  REGION 1..214: note = tr|A0A4P8L3H0|A0A4P8L3H0_9DELT 7-carboxy-7-deazaguanine synthase OS=Desulfoglaeba alkanexedens ALDC OX=980445 GN=queE PE=3 SV=1
MGLRVHEIFRSIQGESTRAGWPCVFVRLTGCNLRCTYCDTRYAYDRGEDMAVEDILERIAAWNCNLVEITGGEPLIQEETPVLAARLLERGKTVLLETNGSRNIGEVDERCVRIVDFKCPSSGESSANDYGNLERLSPRDEVKLVVADRSDYEFARDLYHRIRRRGVTSPVHFSPVFGILAPSRLAGWILSDGLQVRLNLQLHKFIWDPDARGV

SEQ ID NO: 29649 - protein, 209 aa, Desulfoluna butyratoxydans
  REGION 1..209: note = tr|A0A4U8YQI2|A0A4U8YQI2_9DELT 7-carboxy-7-deazaguanine synthase OS=Desulfoluna butyratoxydans OX=231438 GN=queE PE=3 SV=1
MLRLHEMFASLQGEGPHTGRPAFFIRLAGCVPPLCPWCDTKGAWDEGTEVSVSDLAAAAKESGLGFVVITGGEPLRQWEEGLWELDRVLSKLGFAVQYETSGKVPVPEDIRGEVILSPKYLEGSWHVDRTSVARARHLKFVASQGTLGLIDAFVADHALDKDRVWLMPLGMTRDEQVENMPLVWDHCVKMGYRMASRLHILAFDTKKGI

SEQ ID NO: 29650 - protein, 209 aa, Desulfoluna spongiiphila
  REGION 1..209: note = tr|A0A1G5FXN0|A0A1G5FXN0_9DELT 7-carboxy-7-deazaguanine synthase OS=Desulfoluna spongiiphila OX=419481 GN=queE PE=3 SV=1
MLNLHEMFASLQGEGPHTGRPAFFIRLAGCVAPLCPWCDTKGAWEDGTEVSVENLLDAVKDSGHRFVVITGGEPLRQWDAGLCELDTALAERGIAVQYETSGKVPVPEGIRGEVILSPKYLDGSWHVDRKSVARAGHLKFVASEETLPVIDAFVADHALEKERVWLMPLGMTRDDQIENMPVVWDHCVKMGYRMASRLHILAFDTKKGI

SEQ ID NO: 29651 - protein, 209 aa, Desulfoluna spongiiphila
  REGION 1..209: note = tr|A0A5E7XBB3|A0A5E7XBB3_9DELT 7-carboxy-7-deazaguanine synthase OS=Desulfoluna spongiiphila OX=419481 GN=queE PE=3 SV=1
MLNLHEMFASLQGEGPHTGRPAFFIRLAGCVAPLCPWCDTKGAWDDGIEVSVAGLLDAVKDSGHRFVVITGGEPLRQWDAGLCELDIALAEMGIAVQYETSGKVPVPEGIRGEVILSPKYLDGSWHVDPKSVARAGHLKFVASEETLPVIDAFVVDHALDKERVWLMPLGMTRDDQIENMPVVWDHCVKMGYRMASRLHILAFDTKKGI

SEQ ID NO: 29652 - protein, 207 aa, Desulfomicrobium apsheronum
  REGION 1..207: note = tr|A0A1I3UN35|A0A1I3UN35_9DELT 7-carboxy-7-deazaguanine synthase OS=Desulfomicrobium apsheronum OX=52560 GN=queE PE=3 SV=1
MLEVSEIFVSLQGEGPLAGRPAVFVRLAGCVPPFCEWCDTPQALGGGRRMSVEAIEDEIARHPRALVVITGGEPFLQWDTGLERLARALGASSRQVQYETSGKAGIPANSGGFVVCSPKPLHAPVLDPDSLSRADAFKFVVEEDISPVLDFVAAHGIDARKVWLMPLGATRQDQMRRMAPVWELCVRHGFNFSARLHVLTFNDKRGV

SEQ ID NO: 29653 - protein, 207 aa, Desulfomicrobium norvegicum
  REGION 1..207: note = tr|A0A1I4KYB8|A0A1I4KYB8_DESNO 7-carboxy-7-deazaguanine synthase OS=Desulfomicrobium norvegicum (strain DSM 1741 / NCIMB 8310) OX=52561 GN=queE; PE = 3 SV=1
MLEVSEIFVSLQGEGPFAGRPAVFVRLAGCVPPFCEWCDTPQALGSGRRMRVDDIEDEIARHPRALVVITGGEPFLQWDTGLARLVRALGDSSRQVQYETSGKAGIPADHGGFVVCSPKPLHAPVLDPDAVSRADAFKFVVEEDITPVLDFIAAHGIDARKVWLMPLGAVRQDQMRRMPPVWELCVRHGFNFSARLHVLTFNDKRGV

SEQ ID NO: 29654 - protein, 213 aa, Desulfomonile tiedjei
  REGION 1..213: note = tr|I4CAG4|I4CAG4_DESTA 7-carboxy-7-deazaguanine synthase OS=Desulfomonile tiedjei (strain ATCC 49306 / DSM 6799 / DCB-1) OX=706587 GN=queE PE=3 SV=1
MILNVSELFRSIQGESSFVGYPCAFVRLAGCNLRCRYCDTSYAQTAGENMSLESILERIQNYGTNLVEITGGEPLLQQETPILANALIERGHQVLVETNGTQDISVLPEKVVTIMDIKCPSSGESHNTRWENIWKLKPTDEVKFVISDRHDYEWARGIIRENFGNKKVKVLISTVFGEIPSRNVVAWLLEDKLPVRFQLQIHKYIWPHETRGV

SEQ ID NO: 29655 - protein, 214 aa, Desulfonema ishimotonii
  REGION 1..214: note = tr|A0A401FU04|A0A401FU04_9DELT 7-carboxy-7-deazaguanine synthase OS=Desulfonema ishimotonii OX=45657 GN=queE PE=3 SV=1
MTLRVNEIFYSIQGESTYVGRPCVFVRLTGCNLRCAYCDTRYAWDAGEEMSVDRILMRVAAYDCPLVEITGGEPLLQAETPALVSALLRKGYEVLMETNGSLDIRKADAACVKIVDIKCPGSGESRQNDFENLNRLGQRDQVKFVIGNRDDYEYAKDIVLNRCAGAEAGHLLFSPVSGKLPPDRLARWILDDRLRVRLQIQLHTILWPGTERGV

SEQ ID NO: 29656 - protein, 202 aa, Desulfopila sp.
  REGION 1..202: note = tr|A0A4U1AF08|A0A4U1AF08_9DELT 7-carboxy-7-deazaguanine synthase OS=Desulfopila sp. IMCC35006 OX=2569542 GN=queE PE=3 SV=1
MFSSLQGEGPFAGKPAVFVRLSRCLPPLCPWCDTAFAWQPGTMMEVDDLVEQIIGHGCNFVVITGGEPFLQWSTGLQCLEETLVDKGCFVQYETSGKVSLPEQSKGFIVCSPKYLDAMWHFAGTNCSVVDAFKFVVENDFQMVDDFVAAWKIPAEKVWIMPQGATREAQLKNFETIWRYCVERGFTFSPRLHILAFDNKNGV

SEQ ID NO: 29657 - protein, 209 aa, Desulforhopalus singaporensis
  REGION 1..209: note = tr|A0A1H0IZ63|A0A1H0IZ63_9DELT 7-carboxy-7-deazaguanine synthase OS=Desulforhopalus singaporensis OX=91360 GN=queE PE=3 SV=1
MLLCHEMFSSLQGEGPHTGRPAFFIRLSGCLEPFCPWCDTKDAWFGGSPASIEDIIQKVVRESHRFVVITGGEPFLQWDDGLSRLDRELAEMKIEVQYETSGKVAIPQQVRGEVICSPKYLSGKWHLARESMYRADAFKFVACRESIFFIDAFIAEHGIDRDRVWLMPKGKTRKEQTELLQFLWEHCVKKGYRLSARLHILCFDQKKGV

SEQ ID NO: 29658 - protein, 246 aa, unidentified; identical to SEQ ID NO: 28825
  source 1..246: note = Desulforudis audaxviator
  REGION 1..246: note = tr|B1I3W0|B1I3W0_DESAP 7-carboxy-7-deazaguanine synthase OS=Desulforudis audaxviator (strain MP104C); OX = 477974 GN=queE PE=3 SV=1

SEQ ID NO: 29659 - protein, 243 aa, unidentified
  source 1..243: note = Desulfosporosinus acididurans
  REGION 1..243: note = tr|A0A0J1FX22|A0A0J1FX22_9FIRM 7-carboxy-7-deazaguanine synthase OS=Desulfosporosinus acididurans OX=476652 GN=queE PE=3 SV=1
MIKLPVTEIFSSIQGEGPYVGTRQIFLRFPRCNLKCPYCDTETIVPKQFRIEINPGSRSFREFENPIDIFELVELLQSYDFSLHHSLSITGGEPLLWADELSSFLPLIKKKNLPIYLETNGTLPSQLLKILSLIDIISMDIKLPFGEEIFWDVHEDFLRKSLAKEVFIKIVVTEKSKLDDLQKARDLIAGINPSLLTILQPVTKVNGCESPKPGQLLDWQRFFLEKLMNVRVIPQTHVFMGQL

SEQ ID NO: 29660 - protein, 243 aa, Desulfosporosinus acidiphilus
  REGION 1..243: note = tr|I4D851|I4D851_DESAJ 7-carboxy-7-deazaguanine synthase OS=Desulfosporosinus acidiphilus (strain DSM 22704 / JCM 16185 / SJ4) OX=646529 GN=queE PE=3 SV=1
MLKIPVTELFSSIQGEGPYVGARQIFLRLPKCNLNCPYCDTETIIPEKCRMESIPGSKDFRMLKNPIELNELIELLRSYDFSLHHSISITGGEPLLWADELQLLLPLIREYNLPVYLETNGTLPKQLDKILPFVDIISMDIKLPFGEKVFWNVHEDFLRKSLSKNVFLKIVVDEKAKLQDLQNARDLIANVDPSLLTILQPVTKINGIESPKPRQILDWQRLFLEKLKNVRVIPQTHVFMGQL

SEQ ID NO: 29661 - protein, 243 aa, unidentified
  source 1..243: note = Desulfosporosinus fructosivorans
  REGION 1..243: note = tr|A0A4Z0R2W2|A0A4Z0R2W2_9FIRM 7-carboxy-7-deazaguanine synthase OS=Desulfosporosinus fructosivorans OX=2018669 GN=queE PE=3 SV=1
MFKLPVTEIFSSIQGEGPYVGVRQLFLRLPMCNLMCPYCDTETKVPGQLRVEKVPGTRIFSMLDNPVPIDKLLDLLQTFDFSMHHSLSVTGGEPLLWADELQVLLPFLKEKGLKIYLETNGTLPEQLLQILPMVDVISMDIKLPFASKNFWDVHESFLRYSTQKEVFVKLVVNQDTPLNDLQYACDLIARVDPSILTILQPVTPTQGILAPKPMQLLKWQSLLLEKLVNVRVIPQTHVFIGQL

SEQ ID NO: 29662 - protein, 198 aa, unidentified
  source 1..198: note = Desulfosporosinus fructosivorans
  REGION 1..198: note = tr|A0A4Z0R2Y7|A0A4Z0R2Y7_9FIRM 7-carboxy-7-deazaguanine synthase OS=Desulfosporosinus fructosivorans OX=2018669 GN=queE PE=3 SV=1
MNKALYPIVEIFSSIQGEGFHMGKGSTFIRVAGCNLRCSWCDTQHSFDVSKARWMSVEEIIEESEITHQHVVITGGEPTLYDLGPLVQELHKLGKYVAIETNGTNPIPADWALDWITASPKPGSDFALCCQADELKYVVDDEFTIDCITKQYLPEGRIFLQVESGRQESAQKGYELINSHPDRRLRMGIQLHKILDVR

SEQ ID NO: 29663 - protein, 243 aa, Desulfosporosinus hippei
  REGION 1..243: note = tr|A0A1G7XKG7|A0A1G7XKG7_9FIRM 7-carboxy-7-deazaguanine synthase OS=Desulfosporosinus hippei DSM 8344 OX=1121419 GN=queE PE=3 SV=1
MLKLPVTEVFSSIQGEGPYVGVRQVFLRLPGCNLRCPYCDTVTTTLQELRQERDPGSGEFSVIKNPISIDTLSQLLQKYNFSLHHSISVTGGEPLLWARELSELLPLLKEKGIKIYLETNGTLPEQLLQVMPWVDIISMDIKLPSNDDNLWDLHKSFLRLSLQKEVFVKIVVQEDTGLVDLEYARDLIAEVDPLIQTILQPVTATRGIVTPKPYQLLSWQSFFLQKLRNVRVIPQTHVFMGQL

SEQ ID NO: 29664 - protein, 243 aa, Desulfosporosinus lacus
  REGION 1..243: note = tr|A0A1M5WKF2|A0A1M5WKF2_9FIRM 7-carboxy-7-deazaguanine synthase OS=Desulfosporosinus lacus DSM 15449 OX=1121420 GN=queE PE=3 SV=1
MLKLPVTEIFSSIQGEGPYVGVRQIFLRLPNCNLRCPYCDTVTTAPQQLRMETEAGSGVFNMSENPVPIEKLIKLLQIYDFSLHHSLSITGGEPLLWVNELRAILPFLREKGIKIYLETNGTLPEQLHKILPWVDIISMDIKLPFDGQSFWDVHESFLRSSLQKEVFVKIVVHQETSLTELQYARDLIVAVDPLLPTILQPVTATNEINTPKPYQLLEWQSFFLKKLTNVRVIPQTHVFMGQL

SEQ ID NO: 29665 - protein, 243 aa, Desulfosporosinus meridiei
  REGION 1..243: note = tr|J7IZM0|J7IZM0_DESMD 7-carboxy-7-deazaguanine synthase OS=Desulfosporosinus meridiei (strain ATCC BAA-275 / DSM 13257 / NCIMB 13706 / S10) OX=768704 GN=queE; PE = 3 S V=1
MIMLPVTEVFSSIQGEGPYVGVRQIFLRLPGCNLRCPYCDTVTQTLQEFRLERDPGSGKFSVFKNPISVNTLSQLLQNYNFSLHHSISVTGGEPLLWASELRELLPFLKEKGIKIYLETNGTLPEQLLQVMPWVDIISMDIKLPSNDDNLWDIHKSFLRLSLQKEVFVKIVVQEDTKLVDLEYARDLIAEVDPLIQTILQPVTATRGIVTPKPYQLLSWQSFFLQKLRNVRVIPQTHVFMGQL

SEQ ID NO: 29666 - protein, 243 aa, Desulfosporosinus orientis
  REGION 1..243: note = tr|G7WDT0|G7WDT0_DESOD 7-carboxy-7-deazaguanine synthase OS=Desulfosporosinus orientis (strain ATCC 19365 / DSM 765 / NCIMB 8382 / VKM B-1628) OX=768706 GN=queE; PE = 3SV=1
MPQLPVTEIFSSIQGEGPYVGVRQIFLRLPKCNLRCPYCDTPTALSQYMRMETDPGSGAFERKKNPIPLDSLSEMLRSYDFSIHHSLSITGGEPLLWSKDLAYLLPLLKDKNIKIYLETNGTLPEQLLEILPWVDIISMDIKLPFANQTFWNVHETFLRHSLHKEVFVKIVVNEDTSIDQLQNVRDLILRVDPSIQTILQPVTPTGVIKAPKSLQLIQWQSFLLRELSMVRVIPQTHVFMGQL

SEQ ID NO: 29667 - protein, 243 aa, Desulfosporosinus sp.
  REGION 1..243: note = tr|A0A0F2JGT3|A0A0F2JGT3_9FIRM 7-carboxy-7-deazaguanine synthase OS=Desulfosporosinus sp. I2 OX=1617025 GN=queE PE=3 SV=1
MLELPVTEIFSSIQGEGPYVGVRQIFLRLPNCNLSCPYCDTLTSKQPQLRIELESGTQQFKQLDNPVALDKLLGLLETYDFALHHSLSLTGGEPLLWSNELKVLLPLLREKGITIYLETNGTLPEPLLQVLPWIDIISMDIKLPYDDQVFWNVHETFLRYSLQKDVFVKLVVQEDTSLLNLQIARDLIVGVRPLIPTILQPVTPTHGIKAPKPIQLLEWQRFFLEKLSNVRVIPQTHVFMGQL

SEQ ID NO: 29668 - protein, 243 aa, Desulfosporosinus sp.
  REGION 1..243: note = tr|A0A117SJX8|A0A117SJX8_9FIRM 7-carboxy-7-deazaguanine synthase OS=Desulfosporosinus sp. BRH_c37 OX=1734396 GN=queE PE=3 SV=1
MLDLPVTEIFSSIQGEGPYVGVRQIFLRLPKCNLSCPYCDTEIKVSEQFRVELVPGTRIFSMLKNPIPLDELLDLLQTYDFSKHHSLSVTGGEPLLWVDELQVLLPLLKEKGIDIYLETNGTLPVELLQILPMVDIISMDLKLPFDSRTFWDVHEAFLRYSTQKEIFVKIVVNQATTWKDLQNARDLIARVDPAILTILQPVTPMQGIQAPRPQQLLEWQSFLLERIINVRVIPQTHVLIGQL

SEQ ID NO: 29669 - protein, 243 aa, Desulfosporosinus youngiae
  REGION 1..243: note = tr|H5XVK7|H5XVK7_9FIRM 7-carboxy-7-deazaguanine synthase OS=Desulfosporosinus youngiae DSM 17734 OX=768710; GN = queE PE=3 SV=1
MPKLPVTEIFSSIQGEGPYVGVRQVFLRLPNCNLKCPYCDTGTSVPQQLRMETETGSGMFDTHENPVSFAKLIELLQSYDFSIHHSLSVTGGEPLLWSNQLRVLLPFLQEKGIKIYLETNGTMPEQLLQVLPWVDIISMDIKLPFDGQTFWAVHETFLRYSLQKEVFVKLVVHNQTDLNELRTARDLVAGVDPQIRTILQPVTAIHGIKAPEPYQLLNWQRFFLEKLADVRVIPQTHVFMGQL

SEQ ID NO: 29670 - protein, 212 aa, Desulfotalea psychrophila
  REGION 1..212: note = tr|Q6ARY0|Q6ARY0_DESPS 7-carboxy-7-deazaguanine synthase OS=Desulfotalea psychrophila (strain LSv54 / DSM 12343) OX=177439 GN=queE PE=3 SV=1
MPDIILDVHEIFTSIQGEGPLMGRPASFLRLSGCVEPLCPWCDTKQAWGPGKTISVEEVASRLIALGNRLCIITGGEPFLQWESGLNLLERLLLTEGIEIQYETSGKVLIPADCRGFKVCSPKYLANIWHYLPENSERADCFKFVAGDELKPVQEFITKHNLDQDRVWIMPMGTGRDEQLTRSPKIWEFCVKHHYNFSPRLHTLFFNNQQGV

SEQ ID NO: 29671 - protein, 202 aa, Desulfotignum phosphitoxidans
  REGION 1..202: note = tr|S0FRX2|S0FRX2_9DELT 7-carboxy-7-deazaguanine synthase OS=Desulfotignum phosphitoxidans DSM 13687; OX = 1286635 GN=queE PE=3 SV=1
MFSSIQGEGPFTGRPASFLRLSRCVPPLCPWCDTRHAWGPGTWISVSAAAEKILAHGNRLCVITGGEPFLQWESGLNLLEAYLIEKGITVQYETSGKVLIPSEAKGFKVCSPKYLSGTWQYRIENNTRADCFKFVVRDDPAHVAAFVKTHCLPETSVWIMPMGALRNEQMDRLAGVWRFCVDNRFNFSLRLHTLIFNNQKGV

SEQ ID NO: 29672 - protein, 247 aa, Desulfotomaculum aeronauticum
  REGION 1..247: note = tr|A0A1M6NEX9|A0A1M6NEX9_9FIRM 7-carboxy-7-deazaguanine synthase OS=Desulfotomaculum aeronauticum DSM 10349 OX=1121421 GN=queE PE=3 SV=1
MPQTYLQEIFSSVQGEGPYVGCRQIFIRFAGCNWSCAFCDTPSNEKPEVFTIENSPGQRDFTTHTNPMSAEALSAILKERYKITEHHSISFTGGEPLLQTEFLATLIPFIKGTRQGIYLETNGTLPEKLANIIDSIDIVSMDIKLQSSTGIVTPWDLHHRFLQVAAQRKVYVKIVITSETAVKEIQRAAELIGRVDSGIELVLQPVTPKGGCQIPAVDQILKLQQIALDHLANVRVIPQTHLMMGQL

SEQ ID NO: 29673 - protein, 219 aa, Desulfotomaculum arcticum
  REGION 1..219: note = tr|A0A1I2QIG1|A0A1I2QIG1_9FIRM 7-carboxy-7-deazaguanine synthase OS=Desulfotomaculum arcticum DSM 17038 OX=1121424 GN=queE PE=3 SV=1
MSNIPVNEIFGPTIQGEGMYCGYRTMFIRVAGCDYRCSWCDTKYAWSINQARQVLSEEEILDQLKERAKGITHRVTITGGNPCAHDLSRLISLLKMEKYLIHIETQGSIIPSWLHDVHHVCISPKPPSSGNITNYSSFNEFMNSEVSKELKVVVGTEEDYLYAKKVHQMYKLQPLTLQACTIGDPLPVLNWLISKVSSDPDFSDSVKVMPQVHVLIGIK

SEQ ID NO: 29674 - protein, 249 aa, unidentified
  source 1..249: note = Desulfotomaculum copahuensis
  REGION 1..249: note = tr|A0A1B7LE33|A0A1B7LE33_9FIRM 7-carboxy-7-deazaguanine synthase OS=Desulfotomaculum copahuensis OX=1838280 GN=queE PE=3 SV=1
MPADSTMVTEIFSSIQGEGIFTGCRQIFIRFWGCNLNCRYCDTRTGKAPVHCRIETEPGTGNFCLLPNPLTAAEVALRAGELNPSGHQTISLTGGEPLLHTSFLSRLIPLLPPARQGIYLETNGTLPEELARIIDGIDIIAMDIKLPGTAGITPCWREHEAFLALALAKKKKVMVKIIIADYSADREIEQAVELLSRYKDIPVVLQPVSSSRGIPQLAPGRALAIQARALEKLIDVRVIPQTHKYLHLL

SEQ ID NO: 29675 - protein, 247 aa, unidentified
  source 1..247: note = Desulfotomaculum ferrireducens
  REGION 1..247: note = tr|A0A1S6IWJ2|A0A1S6IWJ2_9FIRM 7-carboxy-7-deazaguanine synthase OS=Desulfotomaculum ferrireducens OX=1833852 GN=queE PE=3 SV=1
MTRCHLQEVFSSVQGEGPYVGCRQIFIRLAGCNWHCNFCDTPGNARPASFSIEKSPGQRDFMNLTNPVNAEKLASLIKGYYDLKTHHSISLTGGEPLLQTDYLIKLIPLLAGTRQGIYLETNGTLPDKLREIIDLVAMVSMDIKLESSTGTATPWELHHRFLQVAAQKKVYVKIVITSATSSAEIKKAAELISSVNPAIELVLQPVTPKGGCGLPTAEQVLHWQSVALDYLTNVRVIPQTHLMLGQL

SEQ ID NO: 29676 - protein, 248 aa, Desulfotomaculum hydrothermale
  REGION 1..248: note = tr|K8E6L1|K8E6L1_9FIRM 7-carboxy-7-deazaguanine synthase OS=Desulfotomaculum hydrothermale Lam5 = DSM 18033 OX=1121428 GN=queE PE=3 SV=1
MSGGVHLQEVFSSVQGEGPLVGCRHIFIRLAGCNLKCVYCDTPVEPFPPLWRLEKNPGRRDFITLNNPVEAASLAAVLSDHYQLNLHHAVSLTGGEPLLHTPFLKQLLPLIGGTRAGILLETNGTLPDQLASLLDSLDIISMDIKLASATGQPTPWAVHKKFLAVAAQKQVYVKVVISEHTTESEIEQTGRLIESINPQIELILQPVSAGGGVVAPAVDKVLRLQECALKILPGVRVIPQTHLMMGQL

SEQ ID NO: 29677 - protein, 247 aa, Desulfotomaculum nigrificans
  REGION 1..247: note = tr|F6B586|F6B586_DESCC 7-carboxy-7-deazaguanine synthase OS=Desulfotomaculum nigrificans (strain DSM 14880 / VKM B-2319 / CO-1-SRB) OX=868595 GN=queE PE=3 SV=1
MPVAYLQEIFSSVQGEGPYVGCRQVFIRFAGCNWCCAYCDTPTEPQPATCVVEKSPGYRDFVNLANPMTPGQVAEIIRQYYNLSWHHSVSLTGGEPLLHTEYIKDLIKHLPSTRRGIFLETNGTLPDRLTEVITGIDIISMDVKLSSATGTPTPWDLHRHFIKVARQRELYVKIVVTAETKVEELQKAGELLQELAPQAVLVLQPVTPNCGVIAPPVSRVLYLQEQALKIIKNVRIIPQTHLMMGQL

SEQ ID NO: 29678 - protein, 247 aa, Desulfotomaculum putei
  REGION 1..247: note = tr|A0A1M4T0V2|A0A1M4T0V2_9FIRM 7-carboxy-7-deazaguanine synthase OS=Desulfotomaculum putei DSM 12395 OX=1121429 GN=queE PE=3 SV=1
MSGAYLQEIFSSVQGEGPFVGCRQVFIRLAGCNWTCTYCDTPTDPAPKTWVMEKTPGCRNFMTLANPVEPVELAEMITSHYDLTLHHSVSLTGGEPLLHTQFLKKLIPGICGTRAGIFLETNGTLPDKLSSVIDWVDIVSMDVKLESSTGTKTPWDAHKRFLTVAARKKVYVKVVVSASTKEAEIEQTGKLIYSIDPEIELILQPVTARGGIVTPSVDRVLRLQERALKILQNVRVIPQTHLMMGQL

SEQ ID NO: 29679 - protein, 247 aa, unidentified
  source 1..247: note = Desulfotomaculum reducens
  REGION 1..247: note = tr|A4J5C9|A4J5C9_DESRM 7-carboxy-7-deazaguanine synthase OS=Desulfotomaculum reducens (strain MI-1); OX = 349161 GN=queE PE=3 SV=1
MLGAHFVEIFSSVQGEGPYVGLRQIFIRFAGCNWKCAFCDTPTNPRPEYFTMEKTPGQRDFIQVANPVKPERLSELIKQYYNLSHHHSISLTGGEPLIYHDYITRLVPALQGTRKGIYLETNGTLPEELASVINLCNMISMDIKLESATKEKTPWELHREFLKVASQRDVYVKIVVSNKTNSHELERAIEIIQSIDPNIELVFQPVTPKGGVLPPTNDSILRFQELALSAIKNVRVIPQTHLMMGQL

SEQ ID NO: 29680 - protein, 246 aa, Desulfotomaculum ruminis
  REGION 1..246: note = tr|F6DLB8|F6DLB8_DESRL 7-carboxy-7-deazaguanine synthase OS=Desulfotomaculum ruminis (strain ATCC 23193 / DSM 2154 / NCIMB 8452 / DL) OX=696281 GN=queE PE=3 SV=1
MDGYLQEIFSSVQGEGPYVGVRQVFVRFAGCNWDCAYCDTPKQATPPSCLVEPIPGQPELVHLANPLEPQQVAELIRQYFTLALHHSVSLTGGEPLLHADYIQSLAKELAGTQRGIFLETNGTLPEELLKVLNDIAIISMDIKLKSSTGTETPWEVQEKFLEIAARKEVYVKIVITGATSDEEVQKAGEMVSRRAPQGALILQPVTPRNGVLAPTAGRVLHLQELALKYVQNVRVIPQTHLMMGQR

SEQ ID NO: 29681 - protein, 246 aa, Desulfotomaculum sp.
  REGION 1..246: note = tr|A0A3C2C4N7|A0A3C2C4N7_9FIRM 7-carboxy-7-deazaguanine synthase OS=Desulfotomaculum sp.; OX = 41211 GN=queE PE=3 SV=1
MSAFLVEIFSSIQGEGPLVGCRQIFLRFAGCNLRCAYCDTPNDPHPPHCRSECMPGKRDFILLPNPLTVSRLISVVEKLNPFSHHSISLTGGEPLLYSEFLCKAIPLLKTACRGIYLETNGTLPDELSRVLHLVDFIAMDVKLPGVSGLPPLWREHEKFLSVASKKRVFVKIVVDRQTTIAEVTQTARLVAGIGDILLVIQPVTYENESGRPGVSAPQLLTLQEHALSYLSRVRVIPRVHKMLDLL

SEQ ID NO: 29682 - protein, 233 aa, Desulfotomaculum sp.
  REGION 1..233: note = tr|A0A356UI28|A0A356UI28_9FIRM 7-carboxy-7-deazaguanine synthase OS=Desulfotomaculum sp.; OX = 41211 GN=queE PE=3 SV=1
MQGEGLALGQRHIFLRFPACNLNCAYCDTPRDPCPTFCCWERTPGKRDFAFLPNPLTPDQIMATVNKWDLTLHHAFSLTGGEPLLYVDFLTRLIPLLTGTREGIYLETNGTLPEQLKRIISLVNIIAMDFKLPSSSCLPPFWEKHQQFLSVAQQKDVFVKIVVTENTTDAEIKQALKVIKAVKEVAVIIQPVTLPANRPGVSPARILAIQELALRELREVRIIPQVHKWLQQL

SEQ ID NO: 29683 - protein, 210 aa, Desulfovibrio carbinolicus
  REGION 1..210: note = tr|A0A4P6HIV8|A0A4P6HIV8_9DELT 7-carboxy-7-deazaguanine synthase OS=Desulfovibrio carbinolicus OX=296842 GN=queE PE=3 SV=1
MLKVHEIFASIQGESSYAGWPCGFLRLSGCNLACRWCDTLHAGDSYAEMTVADATAALAGLGLPLVEVTGGEPLLAPQTPELVKRLCDLDLTVLVETNGSLDIAVLDARATAVVDVKCPGSGMEHRNDYGNLERLRPHDEVKFVLADRTDYDFALDISSRVWRTHIVHFSPVAATLAPAELAAWMVADRVQARLGLQLHKHIWSPDARGV

SEQ ID NO: 29684 - protein, 211 aa, Desulfovibrio carbinoliphilus
  REGION 1..211: note = tr|G7QC34|G7QC34_9DELT 7-carboxy-7-deazaguanine synthase OS=Desulfovibrio carbinoliphilus subsp. oakridgensis OX=694327 GN=queE PE=3 SV=1
MSLRVHEIFASIQGESSFAGWPCAFLRLSGCNLDCVWCDTRYAAASFVEMTVPEAAAALLASGLPLVELTGGEPLLAPELPALARALLDAGATVLVETNGSRDIAVLDPRAIAILDIKCPGSGMEGRNDYRNLDRLRPRDEVKFVLAGRDDYRFALDVAKRVWDRHTVHLSPVTGSLDPAELAGWMVADRVRARLGLQLHKTIWSPEARGV

SEQ ID NO: 29685 - protein, 212 aa, Desulfovibrio desulfuricans
  REGION 1..212: note = tr|A0A1M6LAW2|A0A1M6LAW2_DESDE 7-carboxy-7-deazaguanine synthase OS=Desulfovibrio desulfuricans OX=876 GN=queE PE=3 SV=1
MSFKVTEIFYTLQGEGFHAGRAAVFCRFSGCNLWTGREEDRKHAACKFCDTNFVQLAESGGTFASASELASKIINTFPNIQHTKYTPYVVFTGGEPALQVTSELLNLLKERKVEIGIETNGTLPLPEGIDWITVSPKAGTQLSVTSGSELKLVWPQENVSLADFQNLDFEHFYLQPKDSLQRSAATQLAVEACRENPVWKLSLQTHKYIGIP

SEQ ID NO: 29686 - protein, 212 aa, Desulfovibrio desulfuricans
  REGION 1..212: note = tr|A0A4P7UHX1|A0A4P7UHX1_DESDE 7-carboxy-7-deazaguanine synthase OS=Desulfovibrio desulfuricans OX=876 GN=queE PE=3 SV=1
MSFAVKEIFYTLQGEGFHAGRPAVFCRFSGCNLWSGREEDRQFAKCRFCDTDFVGADASGGTFENASQLARVICSFFPSFTHAGYRPYVILTGGEPALQVTDELVRELTRHGAQVGMETNGTLALPDGLDWVTVSPKAGTKLVVASGNELKLVWPQEGIALQDFEQLDFDHFFLQPCDDAGQMQATQDAVRICLDRPMWKLSLQTHKFIGIR

SEQ ID NO: 29687 - protein, 210 aa, Desulfovibrio fructosivorans
  REGION 1..210: note = tr|E1JX67|E1JX67_DESFR 7-carboxy-7-deazaguanine synthase OS=Desulfovibrio fructosivorans JJ OX=596151; GN = queE PE=3 SV=1
MLRVHEIFASIQGESSYAGYPCAFLRLSGCNLDCSWCDTRYASASFTAMSLDEARQKLLALGLPLVELTGGEPLLEPLAPALAASLADAGATVLVETNGSLDIGVLDPRVIAVMDVKCPGSGMEGKNDYANLDRLRPRDEVKFVLAGREDYLFARDVVRRVPAGNAVHFSPVAGRLDPAELAAWMVADASRARLALQLHKYIWSPDARGV

SEQ ID NO: 29688 - protein, 210 aa, Desulfovibrio magneticus
  REGION 1..210: note = tr|K6GR00|K6GR00_9DELT 7-carboxy-7-deazaguanine synthase OS=Desulfovibrio magneticus str. Maddingley MBC34; OX = 1206767 GN=queE PE=3 SV=1
MLKVHEIFASIQGESSHAGWPCGFLRLSGCNLACRWCDTLHAGDSYAEMTVADATAALAGLGLPLVEVTGGEPLLAPQTPELVRRLCDLDLTVLVETNGSFDIAVLDPRATAVMDVKCPGSGMEHRNDYGNLERLRPRDEVKFVLADRADYDFALEIAAQVWRTHIVHFSPVAATLDPAELAAWMVADRVQARLGLQLHKHIWSPDARGV

SEQ ID NO: 29689 - protein, 210 aa, Desulfovibrio magneticus
  REGION 1..210: note = tr|C4XPJ4|C4XPJ4_DESMR 7-carboxy-7-deazaguanine synthase OS=Desulfovibrio magneticus (strain ATCC 700980 / DSM 13731 / RS-1) OX=573370 GN=queE PE=3 SV=1
MLKVHEIFASIQGESSYAGWPCGFLRLSGCNLACRWCDTLHAGDSYAEMTVADATAALAGLGLPLVEVTGGEPLLAPQTPELVKRLCDLDLTVLVETNGSFDIAVLDARATAVVDVKCPGSGMEHRNDYGNLERLRPHDEVKFVLADRTDYDFALDIASRIWRTHIVHFSPVAATLASAELAAWMVADRVQARLGLQLHKHIWSPDARGV

SEQ ID NO: 29690 - protein, 216 aa, Desulfovibrio mexicanus
  REGION 1..216: note = tr|A0A238Z5C9|A0A238Z5C9_9DELT 7-carboxy-7-deazaguanine synthase OS=Desulfovibrio mexicanus OX=147047 GN=queE PE=3 SV=1
MSLRICEIFKSIQGESTFAGRPCVFVRLVGCNLRCAWCDTAYSHEGGEDLSAEAVLARIDALGGGLPHMLVEFTGGEPLLQPEAVALANRLARDGRTVLVETNGSLDISALHPDVAAIVDMKGPSSGESAKMDTENLERLRARDEVKFVIADRLDWERMLCLLPRIDARRNPVNLSPVPGILAAADLARWMLDADLDARLNLQLHKHIWPAEARGV

SEQ ID NO: 29691 - protein, 225 aa, Desulfovibrio piger
  REGION 1..225: note = tr|B6WPV8|B6WPV8_9DELT 7-carboxy-7-deazaguanine synthase OS=Desulfovibrio piger ATCC 29098 OX=411464; GN = queE PE=3 SV=1
MRTLAVNEFFVTLQGEASFAGTPAVFVRFQGCPVACPWCDTQYAARLDGATLDFAAVRAKQGPGAGYADVEPEALLAAIREAGPRHVVLTGGEPCRHDLTELTSRLVTEGFRVQIETSGTMPIRCHADVWVTLSPKLDMPGGLEVRQDAWERAGEIKFPVDTAADLARFEQALAVARQAASRPLTELVWLQPVSQGKEATRLCVEAAFAHQWRVSVQVHKYLDLR

SEQ ID NO: 29692 - protein, 225 aa, Desulfovibrio piger
  REGION 1..225: note = tr|A0A1K1LE33|A0A1K1LE33_9DELT 7-carboxy-7-deazaguanine synthase OS=Desulfovibrio piger; OX = 901 GN=queE PE=3 SV=1
MRTLAVNEFFVTLQGEAAFAGTPAVFVRFQGCPVACPWCDTQYAARLDGATLDFAAVRAKQGPGAGYADVEPAALLAAIRQAGPRHVVLTGGEPCRHDLTELTSRLVAEGFRVQIETSGTMPIRCHAAVWVTLSPKLGMPGGLDVRQDAWERAGEIKFPVDTAEDLVRFEQALAAARRAAARPLTELVWLQPVSQGKEATRLCVEAAFARQWRVSVQVHKYLELR

SEQ ID NO: 29693 - protein, 228 aa, Desulfovibrio sp.
  REGION 1..228: note = tr|G2H6B6|G2H6B6_9DELT 7-carboxy-7-deazaguanine synthase OS=Desulfovibrio sp. A2 OX=298701 GN=nrdG PE=3; SV = 1
MALRVKEIFHTLQGEGVHAGRAAVFCRFSGCNLWTGREQDRADAACRFCDTDFTGTNGPGGGVFESERELAEAIVAAFPYPLAHPDPLDPLYGDGWRPYVVFTGGEPALQLTSRLLDALHARGCQCGVETNGTLPLPAGLDWVTVSPKAGARLAVTRGDELKLVWPQDGLDPADFAGLDFRHFILQPRDDSAGGDAGGADHVAACVRYCLAHPRWRLGLQTHKFLGIR

SEQ ID NO: 29694 - protein, 221 aa, Desulfovibrio sp.
  REGION 1..221: note = tr|S7V5G7|S7V5G7_9DELT 7-carboxy-7-deazaguanine synthase OS=Desulfovibrio sp. X2 OX=941449 GN=queE PE=3; SV = 1
MAYRVKEIFYTLQGEGARAGRAAVFCRFSGCNLWSGRAEDRATAACPFCDTDFTGTNGPGGGVFATADELAAAILAHFPAFAHPAYRPYVVFTGGEPALQLDEALIARLHAVGCELAVESNGTLPLPPGLDWVTISPKAGMQLATRAGQELKLVWPQQGLGPDDLAEFERLDFAHFFLQPCGSGGRGEDARAGASAEAVRACLARPVWRLSLQTHKYIGIP

SEQ ID NO: 29695 - protein, 216 aa, Desulfovibrio vulgaris
  REGION 1..216: note = sp|Q728E5|QUEE_DESVH 7-carboxy-7-deazaguanine synthase OS=Desulfovibrio vulgaris (strain Hildenborough / ATCC 29579 / DSM 644 / NCIMB 8303) OX=882 GN=queE PE=3 SV=1
MTYRVKEIFHTLQGEGMRAGRAAVFCRFSGCNLWTGWAQDRPAAVCPFCDTDFVGTDGPGGGVFEDAATLAAAILAAFPYKTGEGYRPYVVFTGGEPALQLDRPLIDILHAHGCEVAIETNGTVRLPEGIDWVTVSPKAGTRLAVTSGDELKLVWPQQGICPESYESLAFTYLLMQPRDGLGDAGRGDAESEAVRWCLAHPRWRLCLQTHKYLGIP

SEQ ID NO: 29696 - protein, 216 aa, Desulfovibrio vulgaris
  REGION 1..216: note = tr|A0A0H3A573|A0A0H3A573_DESVV 7-carboxy-7-deazaguanine synthase OS=Desulfovibrio vulgaris subsp. vulgaris (strain DP4) OX=391774 GN=queE; PE = 3 SV=1
MTYRVKEIFHTLQGEGMRAGRAAVFCRFSGCNLWTGRAQDRPAAVCPFCDTDFVGTDGPGGGVFEDAATLAAAILAAFPYKTGEGYRPYVVFTGGEPALQLDRPLIDILHAHGCEVAIETNGTVRLPEGIDWVTVSPKAGTRLAVTSGDELKLVWPQQGICPESYESLAFTYLLMQPRDGLGDAGRGDAESEAVRWCLAHPRWRLCLQTHKYLGIP

SEQ ID NO: 29697 - protein, 214 aa, unidentified
  source 1..214: note = Desulfovibrionaceae bacterium
  REGION 1..214: note = tr|A0A1J4SMF9|A0A1J4SMF9_9DELT 7-carboxy-7-deazaguanine synthase OS=Desulfovibrionaceae bacterium CG1_02_65_16 OX=1805130 GN=queE PE=3 SV=1
MGRAVNVCEIFRSIQGESTHAGRPCVFVRLSGCNLRCRYCDTTYAYEGGESLSAPAVRERIAALECGRIEFTGGEPLLQAKAIDLMNALAGEGRDVLVETNGSRDISVLDARIAAIVDMKGPSSGESAKMDLGNFTRLRGRDELKFVIGDQADYAHMRALLPRVDCRRNTVNVSPLYGALAPADLAAWILADGLDVRLNLQQHKYIWPPDARGV

SEQ ID NO: 29698 - protein, 212 aa, unidentified
  source 1..212: note = Desulfovibrionales bacterium
  REGION 1..212: note = tr|A0A1F9PYG8|A0A1F9PYG8_9DELT 7-carboxy-7-deazaguanine synthase OS=Desulfovibrionales bacterium GWA2_65_9 OX=1797915 GN=queE PE=3 SV=1
MSLLVCEIFKSIQGESSFAGWPCVFVRLTGCNLRCCWCDSSYAYEDGTARSVDSIVDEVRASGCQLVEITGGEPLLQPETPQLAVRLAGLGLTVLVETNGSLDISVLPPEAIAIVDMKGPSSGEAHRMDLHNLSRLRARDEVKFVVGHREDYAHMLSLLPRIDTARNTVNVSSLFGALAPAELAAWILADRLRVRLNLQQHKHIWPPDARGV

SEQ ID NO: 29699 - protein, 259 aa, Desulfurella acetivorans
  REGION 1..259: note = tr|W0JIT0|W0JIT0_DESAE 7-carboxy-7-deazaguanine synthase OS=Desulfurella acetivorans A63 OX=694431 GN=queE; PE = 3 SV=1
MIASGLVPKTNIVFIKLTFSIYCQKKQGIEELLVEKKYVNMILMKAKVCEIFYSLQLEGSMLGYPAVFVRFSGCNLNCEFCDTKYAFFEYDTLTQSEIENKISLYNCKRIIFTGGEPLLNAYFIESFINKLKSKYEFFLETNGTIWVDFASKFKHIVVSPKFDNLNFDVLKKYSLQNNVEFKVLVENPDSLKQIEDFLKSLNINSATLQPIYFPDEPLNQFLERTRNIIEAFKQSKLTNKDIRLIIQNHKIIYEKQRGV

SEQ ID NO: 29700 - protein, 216 aa, unidentified
  source 1..216: note = Desulfurella amilsii
  REGION 1..216: note = tr|A0A1X4XV41|A0A1X4XV41_9DELT 7-carboxy-7-deazaguanine synthase OS=Desulfurella amilsii; OX = 1562698 GN=queE PE=3 SV=1
MQDRICEIFYSLQLEGAMLGYPAVFVRFSGCNLNCDFCDTKYAFDEYKIMSLLEVEEVVSSYRCKRIIFTGGEPLLHASFIELFIKQFKKKYEFFLETNGTIWVDFASEFDHIVVSPKFDSLNYEVLENYKTLKNVEFKILVQNAQSLKDIETFFKNLNLISATIQPIYFSNEPLNKFIKRTQDIVEAFKKSNLANSNVRLIIQNHKIIYAEQRGV

SEQ ID NO: 29701 - protein, 216 aa, Desulfurella multipotens
  REGION 1..216: note = tr|A0A1G6MJC4|A0A1G6MJC4_9DELT 7-carboxy-7-deazaguanine synthase OS=Desulfurella multipotens OX=79269 GN=queE PE=3 SV=1
MKAKVCEIFYSLQLEGSMLGYPAVFVRFSGCNLNCKFCDTKYAFNDYEIMSLLQVSKAICNYNCKRIIFTGGEPLLNASFIKCLIDELGSKYDFFLETNGTIWVDFASKFKHIVVSPKFDNLNFDVLKKYSLQNNVEFKVLVENPDSLKQIEDFLKSLNINSATLQPIYFPDEPLNQFLERTRNIIEAFKQSKLTNKDVRLIIQNHKIIYEKQRGV

SEQ ID NO: 29702 - protein, 253 aa, Desulfurella sp.
  REGION 1..253: note = tr|A0A2N7PVZ0|A0A2N7PVZ0_9DELT 7-carboxy-7-deazaguanine synthase OS=Desulfurella sp.; OX = 1962857 GN=queE PE=3 SV=1
MPKTNIVFIKLTFSIYCQKKQGIEELLVEKKYVNMILMKAKVCEIFYSLQLEGSMLGYPAVFVRFSGCNLNCKFCDTKYAFNDYEIMSLLQVSKAICNYNCKRIIFTGGEPLLNASFIKCLIDELGSKYDFFLETNGTIWVDFASKFKHIVVSPKFDNLNFDVLKKYSLQNNVEFKVLVENPDSLKQIEDFLKSLNINSATLQPIYFPDEPLNQFLERTRNIIEAFKQSKLTNKDVRLIIQNHKIIYEKQRGV

SEQ ID NO: 29703 - protein, 228 aa, unidentified
  source 1..228: note = Desulfurellales bacterium
  REGION 1..228: note = tr|A0A5C7Q6V1|A0A5C7Q6V1_9DELT 7-carboxy-7-deazaguanine synthase OS=Desulfurellales bacterium OX=2482794 GN=queE PE=3 SV=1
MKLLELYTSVQGEGPHTSEPTQFVRFAGCNLRCPGWPCDTQHAIHPKLYKDVAENLTGAQIVRERLADWPKHICLTGGEPLIQKEIELEEFVQEARAAGYTIECFTNGTQLIPNWTLGRVRFMMDWKLSNSGEVMDRYRDARMANAVRLNKHDGIKFVVATPGCLAEAATGYAGLIQQGVEAQIWIGAVWNRGLSDAAIVDYIMTHKLPWNLNIQTHKYIWHPDKQGV

SEQ ID NO: 29704 - protein, 249 aa, unidentified
  source 1..249: note = Desulfurellales bacterium
  REGION 1..249: note = tr|A0A5C7P7J4|A0A5C7P7J4_9DELT 7-carboxy-7-deazaguanine synthase OS=Desulfurellales bacterium OX=2482794 GN=queE PE=3 SV=1
MMFGQNPVRKQDLTTTSLRVQEIFPTIQGEGPFAGTPAVFLRLAGCNLRCHFCDTDFESNYDNLLPPQKVVERVLQAAEHSSIRLLVITGGEPLLQDFVPALKLLFQADPTWKVQIETAGTVWLPSLEVLFLTMPRQISIVCSPKTGEVHRKVQEHCTAWKYIIREVEYQIPLIEREVDDGLPLRSTQIVGKAATLFRPAPITPRQIYLQPCDEGNDNATQHNITCAISLAMRHGYRLCLQIHKLIGLP

SEQ ID NO: 29705 - protein, 244 aa, unidentified
  source 1..244: note = Desulfuribacillus alkaliarsenatis
  REGION 1..244: note = tr|A0A1E5G5R4|A0A1E5G5R4_9BACL 7-carboxy-7-deazaguanine synthase OS=Desulfuribacillus alkaliarsenatis OX=766136 GN=queE PE=3 SV=1
MSHIVEVFSGIQGEGPIVGYRQIFVRFSNCQLACNYCDTNFTEKDHAMVEITPGHRDWSRWHNPISADKLVQHILSMYQHLRHHSVSLTGGEPLLHASYLKDLTNQLIEHNIKSYLETNGLLHRQLKSIISNLDLIGMDIKLESATGEATKWTEHETFLEIAKQKQVFVKIVVSNKTTIEEVEQVAKLILKQGKSIPLIMQPVTPTKEVQAPAPDMLLVLMNAAIGILTDVRVIPQTHVMLNQQ

SEQ ID NO: 29706 - protein, 247 aa, unidentified
  source 1..247: note = Desulfuribacillus stibiiarsenatis
  REGION 1..247: note = tr|A0A1E5L6I9|A0A1E5L6I9_9BACL 7-carboxy-7-deazaguanine synthase OS=Desulfuribacillus stibiiarsenatis OX=1390249 GN=queE PE=3 SV=1
MTKFTNVVEVFSGIQGEGPIVGYRQIFIRFTGCQLNCQYCDTNFAIQEQALIEESPGRRNFLKVSNPLSDFDLYTFVKVLNEQLEHHSISLTGGEPLLHADFLQSFLPMVQPIGVQVYLETNGLLTEELQKVLPWIDVIGMDIKLESATQEVTQWEVHKEFLELAKDKNVFVKVVCSEKSTKDEIQRVARLVQAVGVDIPLILQPVTAFQSCHSPTPQQVIDFMDTALLTHKLVRVIPQTHVMLQQL

SEQ ID NO: 29707 - protein, 240 aa, Desulfurispirillum indicum
  REGION 1..240: note = tr|E6W2D7|E6W2D7_DESIS 7-carboxy-7-deazaguanine synthase OS=Desulfurispirillum indicum (strain ATCC BAA-1389 / S5) OX=653733 GN=queE PE=3 SV=1
MNAMIQEMFWSVQGEGPRCGRPQLFVRLHGCNLTCSYCDTPASLIPRAPQSFPWHGRTVPNPVPLEFLQTLVAPELPFVESVSITGGEPLCQGDFVAAFGRWLCQDMAMEVLLETNGTFPGWLKENTDSFSLVSADLKFPWAQQHRDTAGELLDFLQSRQQSCQDSCKIICDDAFLACASHWLDHMVERGARFPVVLQPLTAADGSCRGVEESMKLVRTYTERGLRIWLIPQMHHLLGVQ

SEQ ID NO: 29708 - protein, 241 aa, Desulfurivibrio alkaliphilus
  REGION 1..241: note = tr|D6Z267|D6Z267_DESAT 7-carboxy-7-deazaguanine synthase OS=Desulfurivibrio alkaliphilus (strain DSM 19089 / UNIQEM U267 / AHT2) OX=589865 GN=queE PE=3 SV=1
MAKENKPGGMAAEPATPPDTLPGTLPGTLMVAEIFYSLQGESSHAGYPCIFVRLAGCNLRCVYCDARYTYEEAGTCRTIAEVMAAIAELPPVSRVEITGGEPLLQEEVYSLLNALLADQRQVLLETNGTISLARVPAAVHCIMDVKCPGSGMAEHLDRENFRRLTDRDEIKFVLSDRRDYDWARKIINEYQLADHPHLIFSPVTNRLQPSELAAWLLADALPARLQLQLHTQLWPGCLRGK

SEQ ID NO: 29709 - protein, 223 aa, Desulfurobacterium atlanticum
  REGION 1..223: note = tr|A0A238XJ36|A0A238XJ36_9BACT 7-carboxy-7-deazaguanine synthase OS=Desulfurobacterium atlanticum OX=240169 GN=queE PE=3 SV=1
MLKVSEIFTSIQGEGVDVGRVAAFVRFSGCPLGCRFCDTEYAKREGKEISIAELISKLKKFQIPDIVVTGGEPLVQENIASFLTTLSKELWVRKIFIETCGFVFKEEIFAGKVFLNLSPKPPSMIGTDYSRFLLQYIRFFPERVNVKFLIADKTDLSYALKIVKSEPEFFKIKGLVFQPVEIPGKPYPDAVKQVLSLIFKNRSILSQFEVKVIPQVHKLLGIK

SEQ ID NO: 29710 - protein, 222 aa, unidentified
  source 1..222: note = Desulfurobacterium indicum
  REGION 1..222: note = tr|A0A1R1MMD6|A0A1R1MMD6_9BACT 7-carboxy-7-deazaguanine synthase OS=Desulfurobacterium indicum OX=1914305 GN=queE PE=3 SV=1
MKVYEIFSSVQGEGVDVGLVASFVRFAGCPLKCRYCDTQEARIGGTEFSHEEIIGELKNLGLSYVVVTGGEPLSQDGLPDFLFKLSSETWVKRIFVETSGFFYKADIFVKKVFVNISPKPPSMGMDFPLESLENFIVNFPDRVQVKFLILSEEDLIWILKIVRKYENYFSKKGIIFQPIGIPEKPYSESVKRAIDLVMREKTILFRFNVRVIPQIHKLVGIK

SEQ ID NO: 29711 - protein, 223 aa, Desulfurobacterium sp.
  REGION 1..223: note = tr|A0A432QQG6|A0A432QQG6_9BACT 7-carboxy-7-deazaguanine synthase OS=Desulfurobacterium sp. OX=2004706 GN=queE PE=3 SV=1
MSVIHISELFISIQGEGIDAGAPSFFIRTSGCSIGCKYCDTKYSWSRGREWKIDDLIEEVLKSEIPEVVITGGEPVEEKNLPVLIRKLSCIDSIRKITLETCGHIFRDDLGAPKLKIVLSPKPPTMEVEFPERALQKFLTTYEDTYIKFAVYDKNDLEVIRQFTYRNAKLIRKPIVIQPLEVPFENYVETSKRVSELVIADREFINDFKIKIIPQLHKLIGLK

SEQ ID NO: 29712 - protein, 224 aa, Desulfurobacterium thermolithotrophum
  REGION 1..224: note = tr|F0S1V3|F0S1V3_DESTD 7-carboxy-7-deazaguanine synthase OS=Desulfurobacterium thermolithotrophum (strain DSM 11699 / BSA) OX=868864 GN=queE PE=3 SV=1
MRSSIAISELFTSLQGEGLDLGAPSFFIRISGCSIGCKYCDTKYSWKKGKLWDIDSLVKEVLKSKIPEVIVTGGEPVEEKNLSILIKRLSDLETVRKITLETCGHIFRDDLKYPKLKIVLSPKPPTMGVDFPTETLEKFLTTYEQVYIKFAAYDQKDLEVIKEFAYKNKNLIRAPIVIQPLEVPFEDYSYTSKRIFELVISDRKFINDFEIKIIPQIHKLIGLK

SEQ ID NO: 29713 - protein, 253 aa, unidentified
  source 1..253: note = Desulfuromonadaceae bacterium
  REGION 1..253: note = tr|A0A1G2WEF3|A0A1G2WEF3_9DELT 7-carboxy-7-deazaguanine synthase OS=Desulfuromonadaceae bacterium GWC2_58_13 OX=1801896 GN=queE PE=3 SV=1
MPAPATWKTDAQLIEVFSSIQGEGLLVGCRQVFVRMAGCNLACKFCDTAFAPTDSCRIEDAPGSGNFCGIPNPVPLDLLHDTLFRWLQAVPGAHHSISLTGGEPLLQAETLREWLPSLSKLLPIYLETNGTLAGSLEPLLPFLDFISMDIKLRSMTGTTTPWAAHRRFLDLARNKGCQVKAVVGEETPFEEIEQAARLVHETAPAVPLVLQAVTRAGGMAVSGRMLLDFQTRAARIHPLVRVIPQTHRFMGVL

SEQ ID NO: 29714 - protein, 230 aa, unidentified
  source 1..230: note = Desulfuromonadales bacterium
  REGION 1..230: note = tr|A0A1E7HVF2|A0A1E7HVF2_9DELT Radical_SAM domain-containing protein (Fragment) OS=Desulfuromonadales bacterium C00003094 OX=1869310 GN=BA870_04580 PE=3 SV=1
MNANIYEIFNSIQGEGIYAGVRQVFVRFCGCQLNCGYCDTQEAQSPVDRCRIHDRHINNPLNVNMVIDAINGLFTPSTRHISLTGGEPLLHPGFIKELAGCTSRPMYLETNAGIPDAARMVADVIDIAACDIKLPEHRSTDEYEHLLDYELETIRIFHSRGVETFAKIIVLRETTIESVKMAIFGIKSIDSEIPLILQPATPMDIDMGQLLDLMDFAGMHLSDIRIIPQM

SEQ ID NO: 29715 - protein, 248 aa, unidentified
  source 1..248: note = Desulfuromonadales bacterium
  REGION 1..248: note = tr|A0A1E7GXP1|A0A1E7GXP1_9DELT 7-carboxy-7-deazaguanine synthase OS=Desulfuromonadales bacterium C00003096 OX=1869311 GN=queE PE=3 SV=1
MLPTDGRLIEVFSSIQGEGLLIGWRQIFVRLALCNLACRYCDTPVDVPEACRAETAPGAGSFFALPNPVSLDVLSSLVADWVGRLPGGHHSISITGGEPLMQGEMLQSWLPVLRSLLPIHLETNGTLPEVFAPLVSHVDWVSMDIKLASQTGEATPWSLHEEFLALAADRGCCVKAVVGAETTVEEVQQAAELVHRRAPAAPLILQPITRAGQVATAADHLLNLQQQAARIHPLVRVIPQTHAFLGLL

SEQ ID NO: 29716 - protein, 253 aa, Desulfuromonas acetexigens
  REGION 1..253: note = tr|A0A550JL18|A0A550JL18_9DELT 7-carboxy-7-deazaguanine synthase OS=Desulfuromonas acetexigens OX=38815 GN=queE PE=3 SV=1
MPAPATSPTDGHLIEVFSSIQGEGLMVGCRQIFVRLAGCNLDCAYCDTPFAPTSDCLVEETPGSGTFRALPNPVSLPTLLTLLEDWLVRTPGVHHSLSLTGGEPLLHGKLLGNWLPELARLLPLHLETNGTLPEALAPLLPHLAFISMDLKLASVTGCPTPWDVHRRFLEVARNNPGQAKAVVGPDTAGEEIEAAARLLRETAPEWPLILQALTVDGKVAVSGRELLVLQETAARIHPPVRVIPQTHRLLGVL

SEQ ID NO: 29717 - protein, 251 aa, Desulfuromonas acetoxidans
  REGION 1..251: note = tr|Q1K0N5|Q1K0N5_DESA6 7-carboxy-7-deazaguanine synthase OS=Desulfuromonas acetoxidans (strain DSM 684 / 11070) OX=281689 GN=queE PE=3 SV=1
MPVTAVTDLPVVELFSSIQGEGPLVGCRQVFLRLAGCNLDCAYCDTDFQPSKCARIETQPGSEQFLYWENPLESTRLLAHLSTWKHQQPHLHHSLSLTGGEPLLHAEALKAWLPQLSTLFPIQLETNGTLPQALQLVIDQVEWVVMDIKLESQTGEPTPWAQHGEFLRVAVKRSCCVKLVVGPGTSESELVQAAQLVRDNAPDSEVFLQPCTVAGQCSLNGRILLQWQALIAEQGVRVRVVPQTHCFLAVL

SEQ ID NO: 29718 - protein, 228 aa, unidentified
  source 1..228: note = Desulfuromonas soudanensis
  REGION 1..228: note = tr|A0A0M4DHP4|A0A0M4DHP4_9DELT 7-carboxy-7-deazaguanine synthase OS=Desulfuromonas soudanensis OX=1603606 GN=queE PE=3 SV=1
MIGRRQVFVRMAGCNLDCAYCDTPFEPTISCRVEDAPGSGNFCDLPNPVALETLYNLLYAWQTVAPGVHHSISLTGGEPLIQGELLLEWLPVLRRIFPLHLETNGTLPALLEPLLPHLDWISMDLKLASLTGVPTPWEAHRDFLHLARRTNCCVKLVVGEEVSREELEEAAALVHEAGDDVLLILQPVTRDGRSGLRGADLLALQGLAARIHPQTLVIPQTHRFIDLL

SEQ ID NO: 29719 - protein, 213 aa, Desulfuromonas sp.
  REGION 1..213: note = tr|A0A0Q1FYG6|A0A0Q1FYG6_9DELT 7-carboxy-7-deazaguanine synthase OS=Desulfuromonas sp. SDB OX=1735325 GN=queE PE=3 SV=1
MFKINEIYPTILGESLYTGYPFIIVRFTGCPLRCSWCDTQYAYYEGNDYSLAGVMDEIAKFKYFNVLLTGGEPLAQNNLEKLIDQLLHKKYQIVVETSGALPVSGLAEKVHLVMDYKLPSSGMENKMMLKQNLNYLKTSDEIKFPVADKKDFNRAIEIIEESKLLDKVKIAVSPVMGKIDFSALAELILSSKMNIRLNLQIHKIIWPEISRGR

SEQ ID NO: 29720 - protein, 260 aa, Desulfuromonas sp.
  REGION 1..260: note = tr|A0A357YGG4|A0A357YGG4_9DELT 7-carboxy-7-deazaguanine synthase OS=Desulfuromonas sp.; OX = 892 GN=queE PE=3 SV=1
MSGNPTMPVPVIPATESANLIEIFSSLQGEGLLVGCRQIFLRLAGCNLDCAYCDTPFQPSESCRVETLPGSGTFEEWSNPVGLDLLLPLLERWRGDFPGAHHSLSLTGGEPLLQVGVLQQWAPALKQLFPLFLETNGTLPESLALVVDELSWVSMDIKLASLTGVPTPWGDHEKFLKLAARVNCQVKVVVGDATDLHEIETVARLLRDVAPAVPLILQPVTLPSATLLNPRRLLELQGCAARIHPLVRVIPQTHRFLQLL

SEQ ID NO: 29721 - protein, 241 aa, Desulfuromonas thiophila
  REGION 1..241: note = tr|A0A1G7AHY7|A0A1G7AHY7_9DELT 7-carboxy-7-deazaguanine synthase OS=Desulfuromonas thiophila OX=57664 GN=queE PE=3 SV=1
MLELFSSVQGEGLLIGCRQIFLRLAGCNLCCAYCDTDFAPSAHCRVEQQPGSGQFVLWPNPVALPMVLGQIRDWLQQAPGAHHSLALTGGEPLLHGALLRDWLPQLRGLLPVQLETNGTLPQALAELLPWLDFVAMDIKLASQTGVPTPWAAHDEFLRLAAQRCCWVKLVVGPGTATTELEQAAALVVQRAPAATLVLQPRTLDHRCSLSAAELLAMQTVVAGLGVEVRVIGQMHRYLGML

SEQ ID NO: 29722 - protein, 251 aa, Desulfuromusa kysingii
  REGION 1..251: note = tr|A0A1H4D1W2|A0A1H4D1W2_9DELT 7-carboxy-7-deazaguanine synthase OS=Desulfuromusa kysingii OX=37625 GN=queE PE=3 SV=1
MHMPLTPKADLIEIFSSIQGEGILVGCRQIFLRFCGCNLSCRYCDTNFEKTDKCLIESIPGSGELDTLNNPLSLAQVETLLDSWNSELPSAHHSISITGGEPLLQADLLLSWLPTLRKALPIHLETNGTLPAQLGKVIQHLDWVSMDIKLHSQTGERTEWDLHRQFLEIANQTDCYVKLVVGENTPDLEMQLAADLVATVSKYIPIVLQPVTMDGRIQVSTRRLLQMQAIIAEEIPSVRVIPQTHRFMGLL

SEQ ID NO: 29723 - protein, 214 aa, unidentified
  source 1..214: note = Dethiosulfatarculus sandiegensis
  REGION 1..214: note = tr|A0A0D2HX64|A0A0D2HX64_9DELT 7-carboxy-7-deazaguanine synthase OS=Dethiosulfatarculus sandiegensis OX=1429043 GN=queE PE=3 SV=1
MKQLKINECFLSIQGESTFAGLPCVFLRLSGCPLSCSWCDTEYAKDEGEYLSFDRIVKKLLSFDVDRIEVTGGEPLAQEPTLELLQSLCDRGLAVLLETSGALDISQVDPRVHVIMDIKCPGSGMTGRMHWSNLKSLLPHHEVKFVCQDRQDYEFARKIIKDNDLSNKVTVLFSTVTGRLAPKDLVAWVLEDRLRARFQLQMHKYIWPPDQRGV

SEQ ID NO: 29724 - protein, 221 aa, Dethiosulfatibacter aminovorans
  REGION 1..221: note = tr|A0A1M6ARU2|A0A1M6ARU2_9FIRM 7-carboxy-7-deazaguanine synthase OS=Dethiosulfatibacter aminovorans DSM 17477 OX=1121476 GN=queE PE=3 SV=1
MKYNVVERFTSINGEGMKAGQLAVFIRFAGCNLRCTYCDTMWANDKDVAYEPMTAEEIYDYIKGTGIVNVTITGGEPLIQAGVDKLLELLSGDESLYVEIETNGSVPLKDFMDLTNPPSFTMDYKLPSSEMENGMEKENFSYLTEKDTLKFVVGTMEDLERADELIREHRLTDTTNVYFSPVYGELPYEAIVDFMKERNLGGVTFQLQLHKFVWNPEERSV

SEQ ID NO: 29725 - protein, 245 aa, unidentified
  source 1..245: note = Devosia elaeis
  REGION 1..245: note = tr|A0A178I6X4|A0A178I6X4_9RHIZ 7-carboxy-7-deazaguanine synthase OS=Devosia elaeis; OX = 1770058 GN=queE PE=3 SV=1
MSAVEPPGIRISEIFGPTIQGEGVLIGQPTVFVRTGGCDYRCAWCDSLHAVDSRFREDWRPMSVEQIWSQVRALSGGEPLMVSLSGGNPAIQALGDLIVCGHQDGYRFALETQGSVARDWFSMLDVLVLSPKPPSSQMSVDWAQFEACLDAAQGKPLTVLKLVVFGDEDYDFARDVAARYPHLPTYLQPGNHTPPSPDAADGPIDIEGVMQRMEWLVDKVTQDRWFQARVLPQLHVLLWGNKRGV

SEQ ID NO: 29726 - protein, 242 aa, unidentified
  source 1..242: note = Devosia elaeis
  REGION 1..242: note = tr|A0A178HTK1|A0A178HTK1_9RHIZ 7-carboxy-7-deazaguanine synthase OS=Devosia elaeis; OX = 1770058 GN=queE PE=3 SV=1
MEPPTIRISEIFGPTIQGEGVLIGQPTVFVRTGGCDYRCAWCDSLHAVDSRFRDDWRPMSIEQIWAQVRVLSGGEPLTVSLSGGNPAIQPLGELIELGHREGYRFALETQGSVARDWFSTLDTLVLSPKPPSSQMSTDWARFEACLAAAQGRPLTVLKLVVFDDEDYAYAKDAAARYPSLPVYLQPGNHTPPSPDADDVIIDITGVMQRMEWLVDKVTQDRWFEARVLPQLHVLLWGNTRGV

SEQ ID NO: 29727 - protein, 245 aa, Devosia psychrophila
  REGION 1..245: note = tr|A0A0F5PZK8|A0A0F5PZK8_9RHIZ 7-carboxy-7-deazaguanine synthase OS=Devosia psychrophila; OX = 728005 GN=queE PE=3 SV=1
MKHMEPPSIRVSEIFGPTIQGEGVLIGLPTVFVRTGGCDYRCSWCDSLHAVDNRFRGDWQAMSVEQIWEQVSALSGGEPLTVSLSGGNPAIQPLGELIEFGHREGYRFALETQGSVARDWFSTLDTLVLSPKPPSSQMSTDWARFEACLAVAQGRPLTVLKLVVFDDEDYAYAKDAAARYPHLPVYLQPGNHTPPSPDRDDVIVDMTGVMRRMKWLIEKVTQDRWFDARVLPQLHMLLWGNTRGV

SEQ ID NO: 29728 - protein, 245 aa, Devosia riboflavina
  REGION 1..245: note = tr|A0A087LYJ6|A0A087LYJ6_9RHIZ 7-carboxy-7-deazaguanine synthase OS=Devosia riboflavina; OX = 46914 GN=queE PE=3 SV=1
MNQMEPPSIRVSEIFGPTIQGEGVLIGLPTVFVRTGGCDYRCSWCDSLHAVDNRFRSDWQAMTVEQIWDQVRALSGGEPLTVSLSGGNPAIQPLGELIEFGHREGYRFALETQGSVARDWFSTLDTLVLSPKPPSSQMSTDWARFEACLAAAQGRPLTVLKLAVFDDEDYAYAKDAAARYPHLPIYLQPGNHTPPSPDTDDVIIDITGVMRRMDWLVNKVTHDRWFEARVLPQLHVLLWGNTRGV

SEQ ID NO: 29729 - protein, 279 aa, Devosia sp.
  REGION 1..279: note = tr|A0A2L1S762|A0A2L1S762_9RHIZ 7-carboxy-7-deazaguanine synthase OS=Devosia sp. I507; OX = 2083786 GN=queE PE=3 SV=1
MPRPILLCLVQAATARSLCRTRQRDRQNLGGVQAVSAVEPPGIRISEIFGPTIQGEGVLIGQPTVFVRTGGCDYRCAWCDSLHAVDSRFREDWRPMSVEQIWSQVRALSGGEPLMVSLSGGNPAIQALGDLIVCGHQDGYRFALETQGSVARDWFSMLDVLVLSPKPPSSQMSVDWAQFEACLDAAQGKPLTVLKLVVFGDEDYDFARDVAARYPHLPTYLQPGNHTPPSPDAADGPIDIEGVMQRMEWLVDKVTQDRWFEARVLPQLHVLLWGNKRGV

SEQ ID NO: 29730 - protein, 219 aa, Dialister invisus
  REGION 1..219: note = tr|R5T8M2|R5T8M2_9FIRM 7-carboxy-7-deazaguanine synthase OS=Dialister invisus CAG:218 OX=1263072 GN=queE; PE = 3 SV=1
MKNKFPVAEIFDSIEGEGKRTGYMAVFVRFAGCNIRCTYCDTAYALKESDAEEFLTKEELLGRIRSYPWKRITFTGGEPLLQPLQEICDILGEEGYEINIETNGAVPLLARRPQNLFYTMDYKCTDSGMKSFMRLPNLKELTEDDVLKFVVSSKTDLEDMKEIIIKYFPRGGPKFYVSPVWGKIEPRELVEYVRKEKLAEVCVQVQLHKIIWEPDRRGV

SEQ ID NO: 29731 - protein, 219 aa, Dialister invisus
  REGION 1..219: note = tr|C9LPW9|C9LPW9_9FIRM 7-carboxy-7-deazaguanine synthase OS=Dialister invisus DSM 15470 OX=592028 GN=queE; PE = 3 SV=1
MKNKFPVAEIFDSIDGEGKRTGYMAVFVRFAGCNIRCTYCDTAYALKESDAEEFLTKEELLGRIRSYPWKRITFTGGEPLLHPLQEICDILGEEGYEINIETNGAVPLLARRSQNLFYTMDYKCTDSGMKSFMRLPNLKELTEEDVLKFVVSSKTDLEDMKEIIIKYFPRGGPKFYVSPVWGKIEPRELVEYVRKEKLAEVCVQVQLHKIIWEPDRRGV

SEQ ID NO: 29732 - protein, 226 aa, Dialister micraerophilus
  REGION 1..226: note = tr|F2BWC6|F2BWC6_9FIRM 7-carboxy-7-deazaguanine synthase OS=Dialister micraerophilus DSM 19965 OX=888062; GN = queE PE=3 SV=1
MKNNGTIKGGFHIVEIFDSIEGEGKRTGYMAIFVRLASCNLRCTYCDTSYALTLKDTKEILSEKELIEKIHSYPWKKITFTGGEPMLHPLQNICETLGKEGYEINIETSGSIPLFDKRPPNLFYTMDFKCTGSGMKQHMIEENFEKLNKDDVLKFVVGDLTDLGDMRKIIKIKYNNAEQPRFYVSPVWGKIKPVELVNYVKDHKMTNVCVQVQLHKIIWNPEARGV

SEQ ID NO: 29733 - protein, 226 aa, unidentified
  source 1..226: note = Dialister microaerophilus
  REGION 1..226: note = tr|E4L7B3|E4L7B3_9FIRM 7-carboxy-7-deazaguanine synthase OS=Dialister microaerophilus UPII 345-E OX=910314; GN = queE PE=3 SV=1
MKNNGTIKGGFHIVEIFDSIEGEGKRTGYMAIFVRLASCNLRCTYCDTSYALTLKDTKEILSEKELIEKIHSYPWKKITFTGGEPMLHPLQNICETLGKEGYEINIETSGSIPLFDKRPPNLFYTMDFKCTGSGMKQYMIEENFEKLNKDDVLKFVVGDLTDLGDMRKIIKTKYNNVEQPRFYVSPVWGKIKPVELVNYVKNHKMTNVCVQVQLHKIIWNPEARGV

SEQ ID NO: 29734 - protein, 219 aa, Dialister pneumosintes
  REGION 1..219: note = tr|A0A1B3WEV5|A0A1B3WEV5_9FIRM 7-carboxy-7-deazaguanine synthase OS=Dialister pneumosintes OX=39950 GN=queE PE=3 SV=1
MRHKFPVVEIFDSIDGEGKRTGYMAIFIRFAGCNLRCTYCDTSYALCSSDASIFLTKEELLTKIASYPWKRITFTGGEPLLQPLQELCEELDRAGYEMNVETNGAVPLLSQRPKNLFYTMDYKCSDSGVKSHMRLENFKELTSKDVLKFVVSSQRDLDDMQMIIKKYFTTEKPAFYVSPVWGKITPAALVDYVKEKELSEVCVQVQLHKIIWSPDKRGV

SEQ ID NO: 29735 - protein, 229 aa, Dialister sp.
  REGION 1..229: note = tr|A0A3C2EQG5|A0A3C2EQG5_9FIRM 7-carboxy-7-deazaguanine synthase OS=Dialister sp.; OX = 1955814 GN=queE PE=3 SV=1
MKKTEAYRYDDGLFHVTEIFDSIDGEGKRTGLMAIFVRLAGCNLRCSYCDTAYSLSLTDTAEALTEEELLSRIHAFPWKKITLTGGEPMLHPIRRLCEVLGKEGYEVNIETNGAVALFQERPQGTFYTMDFKCGGSGMKERMLEENFRLLGKEDVLKFVVSSKADMDEMKAIIAAHFHKGEDPAFYVSPVWGRIAPADLVEYVRRERLSDVRVQVQLHKIIWDPERRGV

SEQ ID NO: 29736 - protein, 233 aa, Dialister sp.
  REGION 1..233: note = tr|R6AE66|R6AE66_9FIRM 7-carboxy-7-deazaguanine synthase OS=Dialister sp. CAG:486 OX=1262870 GN=queE PE=3; SV = 1
MWQRMKKTEAYRYDDGLFHVTEIFDSIDGEGKRTGLMAIFVRLAGCNLRCSYCDTAYSLSLTDTAEALTEEELLSRIHAFPWKKITLTGGEPMLHPIRHLCEVLGKEGYEVNIETNGAVALFQERPQGTFYTMDFKCGGSGMKERMLEENFKLLGKEDVLKFVVSSKADMDEMKAIIAAHFHKGEDPAFYVSPVWGRIAPADLVEYVRRERLSDVRVQVQLHKIIWDPERRGV

SEQ ID NO: 29737 - protein, 227 aa, Dialister succinatiphilus
  REGION 1..227: note = tr|H1D0W5|H1D0W5_9FIRM 7-carboxy-7-deazaguanine synthase OS=Dialister succinatiphilus YIT 11850 OX=742743; GN = queE PE=3 SV=1
MKSNYAYDDGLFHITEIFDSIDGEGKRTGFMAVFLRLAGCNLRCNYCDTAYSLTLEDTAEALTEEEVIRRIHGYPWKRLTITGGEPMLHPLHHLCRTLGQEGYDINIETNGAVPLWRERPEGVFYTMDFKCSGSGMKSHMNLDNFKLLNGGDVLKFVVSSKEDLDEMKDVVEHHFTAARHPQFFVSPVWGRIQPDKLVDYVRNHQLQDVRVQVQLHKIIWDPDRRGV

SEQ ID NO: 29738 - protein, 212 aa, Diaphorobacter sp.
  REGION 1..212: note = tr|A0A0J0UP88|A0A0J0UP88_9BURK 7-carboxy-7-deazaguanine synthase OS=Diaphorobacter sp. J5-51 OX=680496 GN=queE PE=3 SV=1
MSYSVKEIFYTLQGEGGQAGMPAVFCRFAGCNLWSGREQDRASAICRFCDTDFVGTDGTLGGKFADASTLARTIAAQWPAQDRAHRLVVLTGGEPLLQVDAPLIDALHAEGFRIAVESNGTIAAPPGIDWLCISPKAGAEWVQREGQELKLVWPQRGLDLDALETAGHFSHRFLQPMDGPNQAAHIALCIDLCMQRPAWRLSLQTHKLTGIR

SEQ ID NO: 29739 - protein, 208 aa, Dichotomicrobium thermohalophilum
  REGION 1..208: note = tr|A0A397QE40|A0A397QE40_9RHIZ 7-carboxy-7-deazaguanine synthase OS=Dichotomicrobium thermohalophilum OX=933063 GN=queE PE=3 SV=1
MYSVKEIYFTLQGEGAQTGRAAVFLRFAGCNLWTGREEDRAKAICQFCDTDFVGTDGPGGGKFAEAPALAEAVAAQWPGGGKPLVVCTGGEPLLQFDSALINALHTAGFEIAIETNGTLPAPPGIDWICVSPKAGAPLVQRSGQELKLVYPQTAAPPEAFEALDFKHFFLQPMDGPHREANTQAAARYCLDHPRWRLSLQTHKFIGLA

SEQ ID NO: 29740 - protein, 223 aa, unidentified
  source 1..223: note = Dickeya aquatica
  REGION 1..223: note = tr|A0A375AE24|A0A375AE24_9GAMM 7-carboxy-7-deazaguanine synthase OS=Dickeya aquatica; OX = 1401087 GN=queE PE=3 SV=1
MLYPINEMFQTLQGEGFFTGVPAVFIRLQGCPVGCSWCDTKHTWEKLPARQISLDEVLAKRGESDAWCASDVDTLLQQIAQQGYRARHVVITGGEPCLYDLTPLTQALAEQGFSTQIETSGTHEVRCSPDCWVTVSPKVNMRGGLTVLDQALQRADEIKHPVARERDIDALDTLLARLTDDKARVVALQPVSQKDEATRLCIETCIARNWRLSMQTHKYLNIA

SEQ ID NO: 29741 - protein, 223 aa, Dickeya chrysanthemi
  REGION 1..223: note = tr|C6CLR4|C6CLR4_DICC1 7-carboxy-7-deazaguanine synthase OS=Dickeya chrysanthemi (strain Ech1591); OX = 561229 GN=queE PE=3 SV=1
MRYPINEMFQTLQGEGFFTGVPAVFIRLQGCPVGCSWCDTKHTWERLPDRQIPLADILVKSGESDAWSHSSSEELLQQMRLQGYSAKHIVITGGEPCIHDLTPLTQALEQQGFSTQIETSGTHEVRCSSACWVTVSPKVNMRGGLAVLDQALRRADEIKHPVARERDIEALDALLARLDDDKPRVVALQPISQKDDATRLCIETCIARNWRLSMQTHKYLNIA

SEQ ID NO: 29742 - protein, 223 aa, Dickeya dadantii
  REGION 1..223: note = tr|E0SDK8|E0SDK8_DICD3 7-carboxy-7-deazaguanine synthase OS=Dickeya dadantii (strain 3937) OX=198628; GN = ygcF PE=3 SV=1
MLYPINEMFQTLQGEGFFTGVPAVFIRLQGCPVGCSWCDTKHTWEKRPERQISLAEVLVKSGESDAWSGSSAGDLIQQIARQGYTARHVVITGGEPCIHDLTPLTQALEQQGFSTQIETSGTHEVRCSPNCWVTVSPKVNMRGGLAVLDQALQRANEIKHPVARERDIEALDALLARLDDDKARVVALQPISQKDDATRLCIETCIARNWRLSMQTHKYLNIA

SEQ ID NO: 29743 - protein, 223 aa, Dickeya dianthicola
  REGION 1..223: note = tr|A0A385Y1E8|A0A385Y1E8_9GAMM 7-carboxy-7-deazaguanine synthase OS=Dickeya dianthicola; OX = 204039 GN=queE PE=3 SV=1
MLYPINEMFQTLQGEGFFTGVPAVFIRLQGCPVGCSWCDTKHTWEKRPERQISLAEVVVKSGESDAWSGSSAEDLIQRMALQGYSARHVVITGGEPCLHDLIPLTQALEQQGFSTQIETSGTHEVRCSPACWVTVSPKVNMRGGLAVLDQALQRADEIKHPVARERDIAALDALLARLDDDKARVVALQPVSQKDDATRLCIETCIARNWRLSMQTHKYLNIA

SEQ ID NO: 29744 - protein, 223 aa, unidentified
  source 1..223: note = Dickeya fangzhongdai
  REGION 1..223: note = tr|A0A2K8QQI1|A0A2K8QQI1_9GAMM 7-carboxy-7-deazaguanine synthase OS=Dickeya fangzhongdai; OX = 1778540 GN=queE PE=3 SV=1
MLYPINEMFQTLQGEGFFTGVPAVFIRLQGCPVGCSWCDTKHTWEKLPERQIPLAEVLVKSGESDAWSGSSVEDLLQQMALQGYSARHVVITGGEPCIHDLTPLTQTLEQRGFSTQIETSGTHEVRCSPDCWVTVSPKVNMRGGLTVLDQALQRANEIKHPVARERDIEALDALLARLDDDKARVVALQPISQKDDATRLCIETCIARNWRLSMQTHKYLNIA

SEQ ID NO: 29745 - protein, 224 aa, Dickeya paradisiaca
  REGION 1..224: note = tr|C6CAW6|C6CAW6_DICP7 7-carboxy-7-deazaguanine synthase OS=Dickeya paradisiaca (strain Ech703) OX=579405; GN = queE PE=3 SV=1
MPQYPINEMFQTLQGEGYFTGVPAVFIRLQGCPVGCSWCDTKHTWEKLAERQSSLAEVLAKTAESDVWGAADATEILSSMRELGYTARHVVITGGEPCIHDLTPLTLALEQQGFSTQIETSGTHDVRCSPATWVTVSPKVNMRGGMAVLLSALQRADEIKHPVARERDVDALDALLARLDDDKSRVVALQPVSQKEEATRLCIATCIARNWRLSMQTHKYLNIA

SEQ ID NO: 29746 - protein, 223 aa, unidentified
  source 1..223: note = Dickeya solani
  REGION 1..223: note = tr|A0A2K8VXE6|A0A2K8VXE6_9GAMM 7-carboxy-7-deazaguanine synthase OS=Dickeya solani RNS 08.23.3.1.A OX=1240086 GN=queE PE=3 SV=1
MLYPINEMFQTLQGEGFFTGVPAVFIRLQGCPVGCSWCDTKHTWEKRPERRISLAEVLVKRGESDAWSGSSAEELLQQMTLQGYSARHIVITGGEPCIHDLTSLTQALEQQGFSTQIETSGTHEVRCSPNCWVTVSPKVNMRGGLAVLDQALQRADEIKHPVARERDIEALDALLARLDDDKARVVALQPISQKDDATRLCIETCIARNWRLSMQTHKYLNIA

SEQ ID NO: 29747 - protein, 223 aa, Dickeya sp.
  REGION 1..223: note = tr|A0A454UJY7|A0A454UJY7_9GAMM 7-carboxy-7-deazaguanine synthase OS=Dickeya sp. FVG10-MFV-A16 OX=2487135 GN=queE PE=3 SV=1
MLYPINEMFQTLQGEGFFTGVPAVFIRLQGCPVGCSWCDTKHTWEKLPERQIPLAEVLVKSGESDAWSGSSVEDLLQQMALQGYSARHVVITGGEPCIYDLTPLTQTLEQRGFSTQIETSGTHEVRCSPDCWVTVSPKVNMRGGLAVLEQALQRADEIKHPVARERDIEALDALLARLDDDKARVVALQPISQKDDATRLCIETCIARNWRLSMQTHKYLNIA

SEQ ID NO: 29748 - protein, 223 aa, Dickeya sp.; identical to SEQ ID NO: 29747
  REGION 1..223: note = tr|A0A3N0FWV0|A0A3N0FWV0_9GAMM 7-carboxy-7-deazaguanine synthase OS=Dickeya sp. FVG1-MFV-O17 OX=2487136 GN=queE PE=3 SV=1

SEQ ID NO: 29749 - protein, 223 aa, Dickeya zeae
  REGION 1..223: note = tr|A0A2K9QI11|A0A2K9QI11_9GAMM 7-carboxy-7-deazaguanine synthase OS=Dickeya zeae; OX = 204042 GN=queE PE=3 SV=1
MRYPINEMFQTLQGEGFFTGVPAVFIRLQGCPVGCSWCDTKHTWDTLPERQISLAEVLVKCGESDAWSSSSVEELLQQITQQGYSARHVVITGGEPCIHDLTPLTQALEQQGFSTQIETSGTHEVRCSSACWVTVSPKVNMRGGLAVLDQALQRADEIKHPVARERDIEALDGLLARLDDDKARVVALQPVSQKEDATRLCIETCIARNWRLSMQTHKYLNIA

SEQ ID NO: 29750 - protein, 223 aa, Dickeya zeae
  REGION 1..223: note = tr|A0A0A8FGB9|A0A0A8FGB9_9GAMM 7-carboxy-7-deazaguanine synthase OS=Dickeya zeae EC1; OX = 1427366 GN=queE PE=3 SV=1
MRYPINEMFQTLQGEGFFTGVPAVFIRLQGCPVGCSWCDTKHTWDTLPERQISLAEVLVKRGESDAWSSSSVEELLQQITQQGYSARHVVITGGEPCIHDLTPLTQVLEQQGFSTQIETSGTHEVRCSSACWVTVSPKVNMRGGLAVLDQALQRADEIKHPVARERDIEALEGLLARLDDDKARVVALQPVSQKEDATRLCIETCIARNWRLSMQTHKYLNIA

SEQ ID NO: 29751 - protein, 253 aa, unidentified
  source 1..253: note = Dictyobacter alpinus
  REGION 1..253: note = tr|A0A402BIA7|A0A402BIA7_9CHLR 7-carboxy-7-deazaguanine synthase OS=Dictyobacter alpinus; OX = 2014873 GN=exsE PE=3 SV=1
MTQTIENNRVRTKTIQVSEIFGPTIQGEGALIGKPTVFVRTGGCDYRCAWCDSLYAVLPEHKAEWASMDTRQVFAEIQRLSNNTPILVTLSGGNPAIQPLEELIDLGHQHGYTFAIETQGSVAQPWFSSLDYLTLSPKPPSSKQVTRWERLDRSILYATTNKYDREIQICLKIVIFNEEDYAYARSVAERYPALPMYLQAGNHTPPQQAQEIDISGILDRMDWLIQRTIADRWYEATVLPQLHTLLWGNKRGV

SEQ ID NO: 29752 - protein, 253 aa, unidentified
  source 1..253: note = Dictyobacter aurantiacus
  REGION 1..253: note = tr|A0A401ZQG7|A0A401ZQG7_9CHLR 7-carboxy-7-deazaguanine synthase OS=Dictyobacter aurantiacus OX=1936993 GN=exsE PE=3 SV=1
MTQTAQNISVGTKTIQVSEIFGPTIQGEGALIGKPTVFVRTGGCDYRCSWCDSLYAVLPEHKAEWHAMDTRQIFAEVERLSGHAPLLVTLSGGNPAIQPLEGLIDLGHEHGYTFAIETQGSVAQPWFAKLDYLTLSPKPPSSKQVTRWERLDRSILYATNARHTHEIQINLKIVIFDEDDYAYARYVAERYPAIPMYLQAGNHTPPQQAEEIDVSGILQRMDWLIQRTIADRWYGATVLPQLHTLLWGNKRGV

SEQ ID NO: 29753 - protein, 253 aa, unidentified
  source 1..253: note = Dictyobacter kobayashii
  REGION 1..253: note = tr|A0A402AWP8|A0A402AWP8_9CHLR 7-carboxy-7-deazaguanine synthase OS=Dictyobacter kobayashii OX=2014872 GN=exsE PE=3 SV=1
MTQTAQNIGVGTRTVQVSEIFGPTIQGEGALIGKPTVFVRTGGCDYRCAWCDSLYAVLPEHKAEWNPMETRQIFAEIARLSGDTPVLVTLSGGNPAIQPLEALIDLGHEHGYTFAIETQGSVAQPWFSKLDYLTLSPKPPSSKQVTRWERLDRSILCATNNKHGHEIQINLKIVIFDEEDYAYARYVAERYPTLPMYLQAGNHTPPQQAKEIDISGILNRMDWLIQRTIADRWYGVTVLPQLHTLLWGNKRGV

SEQ ID NO: 29754 - protein, 256 aa, unidentified
  source 1..256: note = Dictyobacter sp.
  REGION 1..256: note = tr|A0A5A5T7H4|A0A5A5T7H4_9CHLR 7-carboxy-7-deazaguanine synthase OS=Dictyobacter sp. Uno17 OX=2014874 GN=exsE PE=3 SV=1
MTQTIQPAQGTRAHTRTVMVSEIFGPTIQGEGALIGKPTVFVRTGGCDYRCSWCDSLYAVLPEHKGEWQAMDSAQIFAEVRRLSGDTPLLVTLSGGNPAIQPLEELIELGHQYGYTFAIETQGSVAQPWFAMLDYLTLSPKPPSSKQVTRWERLERCIVNATNTQPNHEIQICLKIVIFNEEDYAYARYVAEQYPAFPMYLQAGNHTPPQTADKIDISGILDRMDWLIQRTIADHWYGVTVLPQLHTLLWGNKRGV

SEQ ID NO: 29755 - protein, 206 aa, unidentified
  source 1..206: note = Dinghuibacter silviterrae
  REGION 1..206: note = tr|A0A4R8DDY3|A0A4R8DDY3_9BACT 7-carboxy-7-deazaguanine synthase OS=Dinghuibacter silviterrae OX=1539049 GN=queE PE=3 SV=1
MIATADTSVLLPVMESFYTLQGEGAYQGRAAWFIRLGGCDVGCVWCDVKDSWDAARHPLRSVGDLVHEAAAQPGRIAVVTGGEPLMHDCGPLTKALRQAGFRTHIETSGSSPLSGEWDWICLSPKKFKAPLPEVTGKADELKVVVYNRHDFEWATRYAALVSPECRLFLQPEWSRAEEMTPLIVDYIKANPQWTLSAQVHKFIHVP

SEQ ID NO: 29756 - protein, 218 aa, unidentified
  source 1..218: note = Dissulfuribacter thermophilus
  REGION 1..218: note = tr|A0A1B9F7C0|A0A1B9F7C0_9DELT 7-carboxy-7-deazaguanine synthase OS=Dissulfuribacter thermophilus OX=1156395 GN=queE PE=3 SV=1
MLNDMNNILEVTETFVSLQGEGLFTGVPCFFIRLSRCNLRCSYCDTEYAKAPGERKLIEDLVEEWRGSRVPFVQITGGEPLLQNGVYPLMTQLLKKGAVVLLETNGSIGLKDVPIGVYKCVDRKCPGSGEVGSWIPENLRFLGRMDSVKFVISNRNDYEWAREEVLRQGLSRFTNPIFSPVWGVLAPTELADWIVEDRTPVRLGLQMHKILWKEARGR

SEQ ID NO: 29757 - protein, 239 aa, Dokdonella fugitiva
  REGION 1..239: note = tr|A0A4R2IDC5|A0A4R2IDC5_9GAMM 7-carboxy-7-deazaguanine synthase OS=Dokdonella fugitiva; OX = 328517 GN=queE PE=3 SV=1
MTTVAARGAAAGDAVVSAGANAVASSPERLRITEIFHSLQGEADAVGWPTVFVRLTGCPLRCSWCDTTYSFHGGEWRTIDAVLDDVAKYGVRHVCVTGGEPLAQKRCLALLARLCDAGYEVSLETSGALDVGEVDARVRKVIDLKAPGSGEVARNLWSNVDRLLPHDQVKVVLADREDYDWAVARVREHRIDARCQVLFSPVHGRLAPRTLAEWVLADRLPVRMQLQLHKLLWGEEPGR

SEQ ID NO: 29758 - protein, 229 aa, unidentified
  source 1..229: note = Dokdonella immobilis
  REGION 1..229: note = tr|A0A1I4XF65|A0A1I4XF65_9GAMM 7-carboxy-7-deazaguanine synthase OS=Dokdonella immobilis; OX = 578942 GN=queE PE=3 SV=1
MVATALTPDPSSATTASRRLRVTEIFHSLQGESDSVGWPTVFVRLTGCPLRCVWCDTEYSFHGGEWRDIPSILDQVGGYATHHVCVTGGEPLAQKRCLPLLVALCDEGYEVSLETSGALDIGEVDPRVRRVVDFKPPGSGEVGRNLWTNVGHLGARDQVKFVLADRADYDWAVARIEEHALARRCPILFSPVHGQLEPRALAEWILADRLPVRFQMQLHKQLWGSEPGR

SEQ ID NO: 29759 - protein, 239 aa, Dokdonella koreensis
  REGION 1..239: note = tr|A0A160DXG5|A0A160DXG5_9GAMM 7-carboxy-7-deazaguanine synthase OS=Dokdonella koreensis DS-123 OX=1300342 GN=queE PE=3 SV=1
MPIRPLPREHGDIATSNAALIAGKPRPERLRITEIFHSIQGEADAAGWPTVFVRLTGCPLRCTWCDTAYAFHGGTWWTIDAILADVARHGARHICVTGGEPLAQKRCLMLLTRLCDAGYEVSLETSGAIDVGAVDARVRKVLDLKAPGSGEDARNRWDNLRFLSPSDQVKFVLAGRADYEWARDVVGRHRLGQRCMVLFSPVHGSLDPRDLAEWILADRLPVRFQLQLHKILWGEESGH

SEQ ID NO: 29760 - protein, 213 aa, Dokdonia donghaensis
  REGION 1..213: note = tr|A0A0A2GWH2|A0A0A2GWH2_9FLAO 7-carboxy-7-deazaguanine synthase OS=Dokdonia donghaensis DSW-1 OX=1300343 GN=queE PE=3 SV=1
MTKQALDSLQAQIDLGEMLPLMEEFYTIQGEGFHKGTAAYFIRVGGCDVGCHWCDVKESWDAAIHPPTNANTIAENAAKYSDTIVVTGGEPLMWDMNPLTKKLKSLGLTTHIETSGAYQLSGDWDWICLSPKKRMLPTQSVLEKANELKVIIFNKSDFDFAEKHAAQVGEDCILYLQPEWSVRDKMVPLIVDYVMKNPQWKVSLQTHKYLNIP

SEQ ID NO: 29761 - protein, 210 aa, unidentified
  source 1..210: note = Dokdonia pacifica
  REGION 1..210: note = tr|A0A239E0Z4|A0A239E0Z4_9FLAO 7-carboxy-7-deazaguanine synthase OS=Dokdonia pacifica; OX = 1627892 GN=queE PE=3 SV=1
MTKEAIQSRVDLGELLPLMEEFYTIQGEGYHKGTAAYFIRVGGCDVGCHWCDVKESWDAAIHPPTEAVTIADNAAKYSDTIVVTGGEPLMWDMKPLTTLLKERGLQVHIETSGAYDLSGDWDWICLSPKKRMLPKDEVSQKAHELKVIVYNKSDFAFAEEQAAKVSENCILYLQPEWSVRDKMVPLIVDYVMANPKWKISLQTHKYLNIP

SEQ ID NO: 29762 - protein, 213 aa, Dokdonia sp.
  REGION 1..213: note = tr|A0A559RPD3|A0A559RPD3_9FLAO 7-carboxy-7-deazaguanine synthase OS=Dokdonia sp. Hel1_53; OX = 1566287 GN=queE PE=3 SV=1
MTKQASEAIQAQVDLGEMLPLMEEFYTIQGEGFHKGTAAYFIRVGGCDVGCHWCDVKESWDAAIHPPTSADTIAQNAAKYSDTIVVTGGEPLMWDMNPLTEKLKSLGLTTHIETSGAYQLSGEWDWICLSPKKRMLPTPSVLEKANELKVIIFNKSDFTFAEKHAEQVGDDCILYLQPEWSVRDKIVPLIVDYVMANPKWKVSLQTHKYLNIP

SEQ ID NO: 29763 - protein, 213 aa, Dokdonia sp.
  REGION 1..213: note = tr|A0A2S1Q8Y1|A0A2S1Q8Y1_9FLAO 7-carboxy-7-deazaguanine synthase OS=Dokdonia sp. Dokd-P16; OX = 2173169 GN=queE PE=3 SV=1
MTKQALDSLQAQIDLGEMLPLMEEFYTIQGEGFHKGTAAYFIRVGGCDVGCHWCDVKESWDAAIHPPTNANTIAENAAKYSDTIVVTGGEPLMWDMNPLTQKLKSLGLTTHIETSGAYELSGEWDWICLSPKKRMLPKASVLEKANELKVIIFNKSDFDFAEKHAAQVGEDCILYLQPEWSVRDKMVPLIVDYVMKNPKWKVSLQTHKYLNIP

SEQ ID NO: 29764 - protein, 208 aa, unidentified
  source 1..208: note = Dolichospermum compactum
  REGION 1..208: note = tr|A0A1Z4UXZ5|A0A1Z4UXZ5_9CYAN 7-carboxy-7-deazaguanine synthase OS=Dolichospermum compactum NIES-806 OX=1973481 GN=queE PE=3 SV=1
MSFSEIKLPIHETFQSTVQGEGYWTGCLVDFIRLSGCPVACPWCDTGYADPRANLPRIERPIAELLGEIKSPRVVITGGEPFIHKHLPELVQALLVADKLVSIETSGSFWQEVSPPAWITLSPKEHLNAKYPVQSQFWSRANEVKIIIETGREIDFYEKYLSTHPNLLVYLQPEWNSSSKSLPLILQILQQKPDYRLSLQTHKYIGVQ

SEQ ID NO: 29765 - protein, 269 aa, unidentified
  source 1..269: note = Dolichospermum planctonicum
  REGION 1..269: note = tr|A0A480AJ34|A0A480AJ34_9CYAN 7-carboxy-7-deazaguanine synthase OS=Dolichospermum planctonicum OX=136072 GN=queE PE=3 SV=1
MTTKNKVNSTARLIEVFSAIQGEGLNVGTRQIFIRFAFCDLRCYFCDSAHTWNAPPSCQIESYPGLRDFEVHPNPVASSTLLAWIARQNLPFVHDSISLTGGEPLLHAQFLAEFLPALRSLTSLPIYLETGGHRPENLAIILPYLDSVGMDLKLPSVSGETYWPEHTKFLQLCSNSKLEVFVKIIVSQSTVVQELERAALLVAQVNEDIPVFLQPVTPLAVASLAAQEFSSVVMVAPTPDQVLEWQVLMKRFVKQVRVIPQTHKMLHQM

SEQ ID NO: 29766 - protein, 208 aa, unidentified
  source 1..208: note = Dolichospermum sp.
  REGION 1..208: note = tr|A0A5C0DYP3|A0A5C0DYP3_9CYAN 7-carboxy-7-deazaguanine synthase OS=Dolichospermum sp. UHCC 0315A OX=1914871 GN=queE PE=3 SV=1
MSLLEIKLPIHETFQSTVQGEGYWTGCLVDFIRLSGCPVGCPWCDTGYADPGANLPRVERPIAELLAEIKSPRVVISGGEPFIHKHLPDLVQALLAADKRVNIETSGSFWQAVSPAAWITLSPKEHINPKYSVKSQFWSRANEVKIVIETGGEIDFYQEHLSNHPNLLVYLQPEWNSSSKSIPLILQILQQKPDYKLSLQTHKYIGVQ

SEQ ID NO: 29767 - protein, 236 aa, unidentified
  source 1..236: note = Domibacillus aminovorans
  REGION 1..236: note = tr|A0A177KY74|A0A177KY74_9BACI 7-carboxy-7-deazaguanine synthase OS=Domibacillus aminovorans OX=29332 GN=queE PE=3 SV=1
MIPVLEIFGPTVQGEGAVIGRKTMFVRTAGCDYRCSWCDSAFTWDGSAKDDIRKMTPEDIYEELLAIGGDTFDHVTISGGNPALLPHIAALLDLFKEKEIVSALETQGSKFQSWFRDIDELTISPKPPSSGMDTDFDKLGDIIERTAGQQVSLKVVVFNEEDLAFAKKVHQFFPGVPFYIQVGNDRLEEVDDEKLLVYLAGRYEWLINLVMPDPEFKRVRVLPQLHTFVWGNKKGV

SEQ ID NO: 29768 - protein, 236 aa, unidentified
  source 1..236: note = Domibacillus aminovorans
  REGION 1..236: note = tr|A0A177L8L1|A0A177L8L1_9BACI 7-carboxy-7-deazaguanine synthase OS=Domibacillus aminovorans OX=29332 GN=queE PE=3 SV=1
MIPVLEIFGPTVQGEGAVIGRKTMFVRTAGCDYRCSWCDSAFTWDGSAKDDIRKMTPEDIYEELLAIGGDTFDHVTISGGNPALLPHIAALLDLFKEKGIVSALETQGSKFQSWFRDIDELTISPKPPSSGMDTDFDKLGDIIERTAGQQVSLKVVVFNEEDLAFAKKVHQFFPGIPFYIQVGNDRLEEVDDEKLLVYLAGRYEWLINLVMPDPEFKQVRVLPQLHTFVWGNKKGV

SEQ ID NO: 29769 - protein, 236 aa, unidentified
  source 1..236: note = Domibacillus antri
  REGION 1..236: note = tr|A0A1Q8Q8S4|A0A1Q8Q8S4_9BACI 7-carboxy-7-deazaguanine synthase OS=Domibacillus antri; OX = 1714264 GN=queE PE=3 SV=1
MIPVLEIFGPTVQGEGAVIGRKTMFVRTAGCDYRCSWCDSAFTWDGSAKEDIRKMTPEEIYAELLEAGGDTFDHVTISGGNPALLPQIAGLLDLFKEKGIVSALETQGSKFQPWFRDIDELTISPKPPSSGMITDFERLRHILQNVSGQNVSLKVVVFNEEDLAYAKKVHHLFPDVPFYLQVGNDRLEEVDDQKLLVHLAGRYEWLINLVMPDPDFKRVRVLPQLHTFVWGNKKGV

SEQ ID NO: 29770 - protein, 236 aa, unidentified
  source 1..236: note = Domibacillus enclensis
  REGION 1..236: note = tr|A0A1N6YHB1|A0A1N6YHB1_9BACI 7-carboxy-7-deazaguanine synthase OS=Domibacillus enclensis OX=1017273 GN=queE PE=3 SV=1
MIPVLEIFGPTVQGEGAVIGRKTMFVRTAGCDYRCSWCDSAFTWDGSAKEDIRKMTPEEIYQTLLEAGGDTFDHVTISGGNPALLAGIGELLALFKEKGIESALETQGSKYQPWFKFIDELTISPKPPSSGMDTDVDKLSFILNETKGQSVSLKVVIFNEEDLAYAKSIHQRFPDVPFYLQVGNDELDEKDDSRLLGHLARKYEWLIDRVMPDPEFKRVRVLPQLHTFVWGNKKGV

SEQ ID NO: 29771 - protein, 236 aa, unidentified
  source 1..236: note = Domibacillus epiphyticus
  REGION 1..236: note = tr|A0A1V2A9V7|A0A1V2A9V7_9BACI 7-carboxy-7-deazaguanine synthase OS=Domibacillus epiphyticus OX=1714355 GN=queE PE=3 SV=1
MIPVLEIFGPTVQGEGAVIGRKTMFVRTAGCDYRCSWCDSAFTWDGSAKDDIRKMTPEEIYEELLSVGGETFDHVTISGGNPALLPQLGGLIDLFKEKGISTALETQGSRFQPWFRDISELTLSPKPPSSGMETDIDKLHEILEGTAGQNVSLKVVVFNEQDLAYAKHIHQLFPEVPFFIQTGNDRLDEKDHAKLLVYLASRYEWLINLVMPDSDFKRVRVLPQLHTFVWGNKKGV

SEQ ID NO: 29772 - protein, 236 aa, unidentified
  source 1..236: note = Domibacillus iocasae
  REGION 1..236: note = tr|A0A1E7DTT5|A0A1E7DTT5_9BACI 7-carboxy-7-deazaguanine synthase OS=Domibacillus iocasae; OX = 1714016 GN=queE PE=3 SV=1
MIPVLEIFGPTVQGEGAVIGRKTMFVRTAGCDYRCSWCDSAFTWDGSAKEDIRKMTPEEIYKELKEIGGDTFDHVTISGGNPALLPHIDGLLQLFKEKGITSALETQGSKYQPWFHDIDELTISPKPPSSGMDSDFDKLAHILNEVKGQFVSLKVVVFNEEDLAYAKNVHQRFPEVPFYLQVGNDQLNETDDGKLLVHLASRYEWLINLVMPDPEFKRVRVLPQLHTFVWGNKKGV

SEQ ID NO: 29773 - protein, 236 aa, unidentified
  source 1..236: note = Domibacillus mangrovi
  REGION 1..236: note = tr|A0A1Q5NZX5|A0A1Q5NZX5_9BACI 7-carboxy-7-deazaguanine synthase OS=Domibacillus mangrovi; OX = 1714354 GN=queE PE=3 SV=1
MIPVLEIFGPTVQGEGAVIGRKTMFVRTAGCDYRCSWCDSAFTWDGSAKDDIRKMTPEDIYEELREVGGDTFDHVTISGGNPALLPSLAGLLDLFKEKGIVSALETQGSKFQSWFHDIDELTISPKPPSSGMDTDFDKLADIIERTAGQQVSLKVVVFNKEDLTYAKKVHQLFPGIPFYVQVGNDRLDEIDDEKLLVYLAGRYEWLINLVMPDPEFKSVRVLPQLHTFVWGNKKGV

SEQ ID NO: 29774 - protein, 235 aa, Donghicola sp.
  REGION 1..235: note = tr|A0A1M4N3X9|A0A1M4N3X9_9RHOB 7-carboxy-7-deazaguanine synthase OS=Donghicola sp. KarMa; OX = 1779855 GN=queE PE=3 SV=1
MTLRIVEIFGPTIQGEGALIGEPTVFVRAGGCDYRCSWCDSLHAVDSAYRDTWKPMSAEQVFAQVEELSGGQPLTISISGGNPAIQDFAAVIAMGKAKGYRFACETQGSISRPWFGDLDTLVLSPKPPSSGETVDWDAFDACVQAGQGAGQTVMKIVIFDDVDYAWAKDAHARHPDLPLYLQPGNPDVDPDLPVDPQALADRLLWLTETTMADRWFAPRILPQLHVLIWGNKRGV

SEQ ID NO: 29775 - protein, 235 aa, unidentified
  source 1..235: note = Donghicola tyrosinivorans
  REGION 1..235: note = tr|A0A2T0WFU3|A0A2T0WFU3_9RHOB 7-carboxy-7-deazaguanine synthase OS=Donghicola tyrosinivorans OX=1652492 GN=queE PE=3 SV=1
MTLRIAEIFGPTIQGEGALIGEPTVFVRAGGCDYRCSWCDSLHAVDSAYRDTWFPMQPAEVWERVDELSGGQPLTVSLSGGNPAIQDFGPLITIGKAMGYRFACETQGSIAKPWFAELDTLVLSPKPPSSGEVVDWDALDTCLEMAKGAGKIVMKVVIFDDQDYLWAKAAQATYPDLPFFLQPGNPEVDPDTPVDPQALADRLLWLTEKTMADRWFAPRILPQLHVLIWGNKRGV

SEQ ID NO: 29776 - protein, 369 aa, Dorea formicigenerans
  REGION 1..369: note = tr|A0A564T8U2|A0A564T8U2_9FIRM 7-carboxy-7-deazaguanine synthase OS=Dorea formicigenerans; OX = 39486 GN=queE PE=4 SV=1
MEIKRLLVINVPIKNCNLKCKYCYISALKENEKGAAKFLYTPEHVGKCLSKERLGGTCIINLTGGGETLIPKEMPQYIYQLLLQGHFLEVVTNGTLTSRFDEIAEFPRNLLEHLEFKFSFHYAELKKKGWLDRYFSNVKKMWEKGCSFTVELMPYDGLIDDIDEIINLCKSELGAACQITVGRNDLTEKKDLLTSMSRKEYESVWRKFDSTMFDFKLDIFQKKIDDFCYAGAWTLYVDLGTGAAKPCYGQLSNQNIFKNPEQPIIFNPVGKHCRQPYCYNGHAFLTLGVVPELETPTYADIRNRVCEDGREWLSKEVKDAFSQKLADNNEVWDEKKKNSYERKYPFIFFKTALYDWKEIYNKVIRKRKK

SEQ ID NO: 29777 - protein, 216 aa, Dorea longicatena
  REGION 1..216: note = tr|A0A564UEW1|A0A564UEW1_9FIRM 7-carboxy-7-deazaguanine synthase OS=Dorea longicatena; OX = 88431 GN=queE PE=3 SV=1
MKVAEKFTSINGEGTRAGEIAVFVRFKGCNLRCSYCDTLWANEPECPYNEETPEEILNYVLGTGIHNVTLTGGEPLLQKDIRNLIHLLLQAGLQVEVETNGAVALAAFCEERPVFTMDYKLPSSGCEEHMITENMKLLEKNDTVKFVSGSQEDLLKALELIRTYDLTNRCHVYFSPVFGAIEPMQIVEFMLKHRLNGVRLQIQMHKVIWDPDERGV

SEQ ID NO: 29778 - protein, 216 aa, Dorea longicatena
  REGION 1..216: note = tr|A0A414T0J5|A0A414T0J5_9FIRM 7-carboxy-7-deazaguanine synthase OS=Dorea longicatena; OX = 88431 GN=queE PE=3 SV=1
MKVAEKFTSINGEGTRAGEIAVFVRFKGCNLRCSYCDTLWANEPECPYNEETPEEILNYVLGTGIHNVTLTGGEPLLQKDIRNLIHLLLQAGLQVEVETNGAVALAAFCEERPVFTMDYKLPSSGCEEHMITENMKLLEKNDTVKFVSGSQEDLLKALELIRTYDLTNRCHVYLSPVFGAIEPMQIVEFMLKHRLNGVRLQIQMHKVIWDPDERGV

SEQ ID NO: 29779 - protein, 211 aa, unidentified
  source 1..211: note = Duganella phyllosphaerae
  REGION 1..211: note = tr|A0A1E7WP80|A0A1E7WP80_9BURK 7-carboxy-7-deazaguanine synthase OS=Duganella phyllosphaerae OX=762836 GN=queE PE=3 SV=1
MTYSIKEIFYTLQGEGAHAGRPAVFCRFSGCNLWTGRESDRASAVCQFCDTDFVGTDGEGGGKFKSPQELAATINALWPASHAASKYVVFTGGEPLLQLDAALIDAMHDQGFTIAIETNGTLPVPDGVDWICVSPKMGSTLVVAKGSELKVVIPQTGQDLAAYEHLDFEHFYVQAMDGPLAAFNTTLAIETCKRNPKWKLSLQTHKLLQIP

SEQ ID NO: 29780 - protein, 211 aa, unidentified
  source 1..211: note = Duganella sacchari
  REGION 1..211: note = tr|A0A1M7L2S6|A0A1M7L2S6_9BURK 7-carboxy-7-deazaguanine synthase OS=Duganella sacchari; OX = 551987 GN=queE PE=3 SV=1
MTYSIKEIFYTLQGEGAHAGRPAVFCRFSGCNLWTGRESDRASAICQFCDTDFVGTDGEGGGKFKTPEALAATINALWPESYPASKYVVFTGGEPLLQLDKPLIDAMHAAGFTIAIETNGTLPVPDGVDWICVSPKMGAELVVRKGSEIKVVIPQTNQDLSVYEQLDFENFYVQAMDGPLAEFNTRLAIETCKRNPKWKLSLQTHKLLQIP

SEQ ID NO: 29781 - protein, 211 aa, Duganella sp.
  REGION 1..211: note = tr|A0A3E1S4P1|A0A3E1S4P1_9BURK 7-carboxy-7-deazaguanine synthase OS=Duganella sp. BJB480; OX = 1871181 GN=queE PE=3 SV=1
MTYSIKEIFYTLQGEGAHAGRPAVFCRFSGCNLWTGRESDRASAVCQFCDTDFVGTDGEGGGKFTTPEALAATIDALWPETYTASKYVVFTGGEPLLQLDTALIDAMHAVGFTIAIETNGTLPVPDGVDWICVSPKMGSKLVVTKGSEIKVVIPQTGQDLSVYEQLDFENFFVQAMDGPLAEFNIKLAIDTCKRNPKWKLSLQTHKLLQIP

SEQ ID NO: 29782 - protein, 210 aa, Duganella sp.
  REGION 1..210: note = tr|A0A0Q8R3E4|A0A0Q8R3E4_9BURK 7-carboxy-7-deazaguanine synthase OS=Duganella sp. Root198D2 OX=1736489 GN=queE PE=3 SV=1
MTYSIKEIFYTLQGEGAHAGRPAVFCRFSGCNLWTGREQDRASAVCQFCDTDFVGTDGENGGKFAAPAALAQKIDSLWPAGHGHKYVVFTGGEPLLQLDAQLIDAMHAAGFTIAIETNGTMEVPAGVDWICVSPKMGAQLVVSKGNEIKVVIPQKDQDLAAYEGLDFENFFVQPMDGPLAAFNTTLAIETCKRNPKWKLSLQTHKLLNIP

SEQ ID NO: 29783 - protein, 193 aa, unidentified
  source 1..193: note = Duncaniella muris
  REGION 1..193: note = tr|A0A2V1IR30|A0A2V1IR30_9BACT 7-carboxy-7-deazaguanine synthase OS=Duncaniella muris; OX = 2094150 GN=queE PE=3 SV=1
MSYRINEIFYSLQGEGYFTGTPAVFLRMSGCNLKCGFCDTRHEEHTLMSPAQIVEAIGQYPTRHIIITGGEPSLQLDQMLVDLLHDEGWFIQIETNGTNPLPEGIDWVTCSPKQGPGGEIAVRLRNIDELKVVYEGQDVESIANSLPAMHYFLQPCSSPRYDGGSNTAATVSYILANPHWRLSLQTHKLIDIQ

SEQ ID NO: 29784 - protein, 181 aa, unidentified
  source 1..181: note = Duncaniella sp.
  REGION 1..181: note = tr|A0A4Z0V4W4|A0A4Z0V4W4_9BACT 7-carboxy-7-deazaguanine synthase OS=Duncaniella sp. TLL-A3 OX=2530391 GN=queE PE=3 SV=1
MKVNEIFYSLQGEGYHTGTPAVFLRLSGCNLKCDFCDTEHQSGTEMALGEILERVLPYPSRHIVITGGEPSLQLNDDLVEMLHNAGFYIQVETNGTNPLPEDIDWVTCSPKGESVVRLKRIDELKVVYLGQDVEEIANRYAAMHYFLQPCSGKNIAETVSYILDHTHWRLSLQTHKIIGIE

SEQ ID NO: 29785 - protein, 193 aa, unidentified
  source 1..193: note = Duncaniella sp.
  REGION 1..193: note = tr|A0A4P7VUP1|A0A4P7VUP1_9BACT 7-carboxy-7-deazaguanine synthase OS=Duncaniella sp. C9; OX = 2530392 GN=queE PE=3 SV=1
MSYRINEIFYSLQGEGYFTGTPAVFLRMSGCNLKCGFCDTRHEEHTLMSPAQIVEAIGQYPTRHIIITGGEPSLQLDQMLVDLLHDEGWFIQIETNGTNPLPEGIDWVTCSPKQGHGGEIAVRLRNIDELKVVYEGQDVESIANSLPAMHYFLQPCSSPRYDGGSNTAATVSYILAHPHWRLSLQTHKLIDIQ

SEQ ID NO: 29786 - protein, 193 aa, Dyadobacter fermentans
  REGION 1..193: note = tr|C6VVQ3|C6VVQ3_DYAFD 7-carboxy-7-deazaguanine synthase OS=Dyadobacter fermentans (strain ATCC 700827 / DSM 18053 / NS114) OX=471854 GN=queE PE=3 SV=1
MEAFYTLQGEGQHSGRAAYFIRLGGCDVGCHWCDVKESWDASIHPKFDINAIVDGALQYPGRLAVITGGEPLMYNLDALTGALQEAGFKTNIETSGVYPFTGHWDWVCFSPKKFKTPHPDIYKNADELKTIIYNKSDFDFAEEHAAKVSPECTLLMQPEWSKQDVMLPLIIDYIKDNPKWKMSLQTHKFMNIP

SEQ ID NO: 29787 - protein, 207 aa, unidentified
  source 1..207: note = Dyadobacter jejuensis
  REGION 1..207: note = tr|A0A316AF65|A0A316AF65_9BACT 7-carboxy-7-deazaguanine synthase OS=Dyadobacter jejuensis; OX = 1082580 GN=queE PE=3 SV=1
MELAEIETRTSLPVMEAFYTLQGEGQHSGKAAYFIRLGGCDVGCHWCDVKESWEADKHPYTSLETIVSGAKQYPGRLAVVTGGEPLMYNLDALTEKLQQAGFQTNIETSGVYPLTGHWDWICFSPKKFKEPHPDIYPAAHELKAIIYNKSDFAFAEEHAAKVGAHCSLLLQPEWSRQEMMLPLIIDYIKDNPKWKMSLQTHKYMNIP

SEQ ID NO: 29788 - protein, 193 aa, unidentified
  source 1..193: note = Dyadobacter jiangsuensis
  REGION 1..193: note = tr|A0A2P8G885|A0A2P8G885_9BACT 7-carboxy-7-deazaguanine synthase OS=Dyadobacter jiangsuensis OX=1591085 GN=queE PE=3 SV=1
MEAFYTLQGEGQHSGRAAYFIRLGGCDVGCHWCDVKESWDASIHPKFGIDSIVDGALQFPGRLAVITGGEPLMYNLDELTGALQAAGFKTNIETSGVYPFTGHWDWVCFSPKKFKTPHPDIYRNANELKAIIYNKSDFEFAEEHAAQVSPDCTLLLQPEWSKQDVMLPLIIDYIKDNPKWKMSLQTHKFMNIP

SEQ ID NO: 29789 - protein, 208 aa, Dyadobacter koreensis
  REGION 1..208: note = tr|A0A1H6YZ49|A0A1H6YZ49_9BACT 7-carboxy-7-deazaguanine synthase OS=Dyadobacter koreensis; OX = 408657 GN=queE PE=3 SV=1
MLTETLPIVTSQLPVMEAFYTLQGEGQHSGKAAYFIRLGGCEVGCHWCDVKESWDADAHPKLEINTIVEGALGYPGRLAVITGGEPLMYNLDALTDALQQAGFQTNIETSGVYPFTGHWDWVCFSPKKFKTPHSDIYINANELKSIIYNKSDFEFAEQHAALVNQECTLLLQPEWSKHEQMLPLIIDYIKDNPKWKMSLQTHKYMNIP

SEQ ID NO: 29790 - protein, 193 aa, Dyadobacter psychrophilus
  REGION 1..193: note = tr|A0A1T5DCC4|A0A1T5DCC4_9BACT 7-carboxy-7-deazaguanine synthase OS=Dyadobacter psychrophilus OX=651661 GN=queE PE=3 SV=1
MEAFYTLQGEGQHSGRAAYFIRLGGCEVGCHWCDVKESWNADLHPKFDINNIIEGALQYPGRLAVITGGEPLMYNLDELTGKLQDAGFKTNIETSGVYSFTGHWDWVCFSPKKFKDPHPDIYKNANELKAIIYNKSDFEFAESHAALVSDECTLLLQPEWSKHEVMLPLIIDYIKDNPKWKMSLQTHKYMNIP

SEQ ID NO: 29791 - protein, 234 aa, Dyadobacter soli
  REGION 1..234: note = tr|A0A1G6Y994|A0A1G6Y994_9BACT 7-carboxy-7-deazaguanine synthase OS=Dyadobacter soli; OX = 659014 GN=queE PE=3 SV=1
MNFVPLRDFSGAKACYTFFNIKIIKILLTETLPIVTSELPVMEAFYTLQGEGQHSGRAAYFIRLGGCDVGCHWCDVKESWDASIHPKFNIDAIVEGALQYAGRLAVITGGEPLMYNLDELTGALQEAGFKTNIETSGVYPFTGHWDWVCFSPKKFKTPHPDIYKNADELKAIIYNKSDFEFAEEHAAKVSPDCTLLLQPEWSKQDAMLPLIIDYIKDNPKWKMSLQTHKFMNIP

SEQ ID NO: 29792 - protein, 193 aa, Dyadobacter sp.
  REGION 1..193: note = tr|A0A4U6D5F0|A0A4U6D5F0_9BACT 7-carboxy-7-deazaguanine synthase OS=Dyadobacter sp. AR-3-8 OX=2576211 GN=queE PE=3 SV=1
MEAFYTLQGEGQHSGKAAYFIRLGGCEVGCHWCDVKESWDANAHPKQDINTIVEGALEYRGRLAVITGGEPLMYNLDALTGALQEAGFQTNIETSGVYPFTGHWNWVCFSPKKFKTPHPDIYQNANELKAIIYNKSDFEFAEEHAAKVNENCTLLLQPEWSKHQQMLPLIIDYIKDNPKWKMSLQTHKYMNIP

SEQ ID NO: 29793 - protein, 193 aa, Dyadobacter sp.
  REGION 1..193: note = tr|A0A5B0FS95|A0A5B0FS95_9BACT 7-carboxy-7-deazaguanine synthase OS=Dyadobacter sp. UC 10; OX = 2605428 GN=queE PE=3 SV=1
MEAFYTLQGEGQHSGRAAYFIRLGGCEVGCHWCDVKESWDANLHPKYTIDAIVDGALQHPGRLAVITGGEPLMYNLDNLTGALQQAGFKTNIETSGVYPFTGRWDWVCFSPKKFKTPHSDIYSQADELKVIIYNKSDFDFAEEHAALVSDQCSLLMQPEWSKHDIMLPLIIDYIKDNPKWKMSLQTHKFMNIP

SEQ ID NO: 29794 - protein, 223 aa, Dyella japonica
  REGION 1..223: note = tr|A0A075JYA2|A0A075JYA2_9GAMM 7-carboxy-7-deazaguanine synthase OS=Dyella japonica A8; OX = 1217721 GN=queE PE=3 SV=1
MASPTSTQAPAERLRITEIFHSIQGEADAIGWRTVFVRLTGCPLRCVWCDTEYSFYGGNWRAIDDIVAEVASHGARHVCVTGGEPLAQKRCLILLKRLCDAGHDVSLETSGALDVSLVDPRVRKVMDLKAPDSGEAARNLWSNLEQLLPHDQVKIVIASRADYEWAREVVAEHQITARCMVLFSPVHGAIQPRELAEWIIEDKLDVRFQLQLHKLLWNDAPGH

SEQ ID NO: 29795 - protein, 223 aa, Dyella japonica
  REGION 1..223: note = tr|A0A0G9H4I0|A0A0G9H4I0_9GAMM 7-carboxy-7-deazaguanine synthase OS=Dyella japonica DSM 16301 OX=1440762 GN=queE PE=3 SV=1
MASTTPTQAPAERLRITEIFHSIQGEADAIGWRTVFVRLTGCPLRCVWCDTEYSFYGGDWRDIDDIVAEVASHGAKHVCVTGGEPLAQKRCLILLKRLCDAGHDVSLETSGALDVAQVDPRVRKVMDLKAPDSGEAKRNLWSNLEHLLPHDQIKIVIASRADYEWARDVVAEHALIKRCMVLFSPVHGAIKPRDLAEWIIEDKLDVRFQLQLHKLLWNDEPGH

SEQ ID NO: 29796 - protein, 228 aa, unidentified
  source 1..228: note = Dyella jiangningensis
  REGION 1..228: note = tr|A0A328P061|A0A328P061_9GAMM 7-carboxy-7-deazaguanine synthase OS=Dyella jiangningensis; OX = 1379159 GN=queE PE=3 SV=1
MSSSSTSVAPTTPAQAERLRITEIFHSIQGEADAIGWRTVFVRLTGCPLRCVWCDTEYSFYGGNWRSIDDIVAEVASHGARHVCVTGGEPLAQKRCLILLTRLCDAGHDVSLETSGALDVSMVDPRVRKVMDLKAPDSGEAKRNLWSNIGHLLPHDQVKIVIASRADYEWAREAVAEHKLAERCMVLFSPVHGAIQPRELAEWIIEDKLDVRFQLQLHKLLWNDEPGH

SEQ ID NO: 29797 - protein, 228 aa, unidentified
  source 1..228: note = Dyella jiangningensis
  REGION 1..228: note = tr|A0A023NVV3|A0A023NVV3_9GAMM 7-carboxy-7-deazaguanine synthase OS=Dyella jiangningensis; OX = 1379159 GN=queE PE=3 SV=1
MSSSSTSVASTTPAQTERLRITEIFHSIQGEADAIGWRTVFVRLTGCPLRCVWCDTEYSFYGGNWRSIDDIVAEVASHGARHVCVTGGEPLAQKRCLILLTRLCDAGHDVSLETSGALDVSTVDPRVRKVMDLKAPDSGEAKRNLWSNIDHLLPHDQVKIVIASLADYEWARAVVAEHKLSERCMVLFSPVHGAVQPRQLAEWIIDDKLDVRFQLQLHKLLWNDEPGH

SEQ ID NO: 29798 - protein, 230 aa, Dyella marensis
  REGION 1..230: note = tr|A0A1I2FCK6|A0A1I2FCK6_9GAMM 7-carboxy-7-deazaguanine synthase OS=Dyella marensis; OX = 500610 GN=queE PE=3 SV=1
MSEGNATVASTTSAPATAERLRITEIFHSIQGEADAIGWRTVFVRLTGCPLRCVWCDTEYSFYGGGWRDIDDILAEVASHGARHVCVTGGEPLAQKRCLILLQRLCDAGYDVSLETSGALDVAAVDPRVRKVMDLKAPGSGESARNLWSNLQHLLPHDQVKFVLASRADYEWAREAVAGHAIDRRCMVLFSPVHGKVNPRELAEWIIEDKLPVRFQLQLHKLLWNDAPGH

SEQ ID NO: 29799 - protein, 270 aa, Dyella soli
  REGION 1..270: note = tr|A0A4R0YKB7|A0A4R0YKB7_9GAMM 7-carboxy-7-deazaguanine synthase OS=Dyella soli OX=522319; GN = queE PE=3 SV=1
MLARRRSSRLPPNIRVPRRQAWPRNACVACSRSPQAEVRSVSDSSTSVADTTPDAGVAERLRITEIFHSIQGEADAIGWRTVFVRLTGCPLRCVWCDTEYSFYGGNWRDIDDIVAEVASHGAKHVCVTGGEPLAQKRCQILLRKLCDAGFDVSLETSGALDVSEVDARVRKVMDLKAPDSGEARRNLWSNLDHLLPHDQVKVVIASRADYEWARDKVAEVGLDRRCMVLFSPVHGAVQPRELAEWIIEDKLPVRFQLQLHKLLWNDEPGH

SEQ ID NO: 29800 - protein, 230 aa, Dyella soli
  REGION 1..230: note = tr|A0A4R0YN06|A0A4R0YN06_9GAMM 7-carboxy-7-deazaguanine synthase OS=Dyella soli OX=522319; GN = queE PE=3 SV=1
MSGSKASVASGTSAPAQAERLRITEIFHSIQGEADAIGWRTVFVRLTGCPLRCVWCDTEYSFYGGDWRAIDDIVAEVASHGARHVCVTGGEPLAQKRCLILLKRLCDAGHDVSLETSGALDVSLVDPRVRKVMDLKAPDSGESARNLWSNLDHLLPHDQVKIVIASRADYEWARETVAAHGLISRCMVLFSPVHGAIQPRELAEWIIEDRLDVRFQLQLHKLLWNDEPGH

SEQ ID NO: 29801 - protein, 221 aa, Dyella sp.
  REGION 1..221: note = tr|A0A370XB72|A0A370XB72_9GAMM 7-carboxy-7-deazaguanine synthase OS=Dyella sp. 4MSK11; OX = 1927960 GN=queE PE=3 SV=1
MATETPTAVERLRITEIFHSIQGEADAIGWRTVFVRLTGCPLRCVWCDTEYSFYGGNWRDIDDILAEVASHGAKHVCVTGGEPLAQKRCLTLLQKLCDAGYEVSLETSGAIDVSTVDPRVRKVMDLKAPDSGESKRNLWSNLDHLLAHDQVKIVIASRADYEWARNAVAEHAIDQRCMVLFSPVHGAVEPRALAEWIIEDKLPVRFQLQLHKLLWNDAPGH

SEQ ID NO: 29802 - protein, 231 aa, Dyella sp.
  REGION 1..231: note = tr|A0A1I6KDB9|A0A1I6KDB9_9GAMM 7-carboxy-7-deazaguanine synthase OS=Dyella sp. OK004; OX = 1855292 GN=queE PE=3 SV=1
MVSGSNASVAPTTSTPAVAERLRITEIFHSIQGEADAIGWRTVFVRLTGCPLRCVWCDTEYSFYGGDWQAIDDILAEVATHGAKHVCVTGGEPLAQKRCLILLQRLCDAGYDVSLETSGALDVSVVDPRVRKVMDLKAPDSGESKRNLWSNLDHLLPHDQVKIVIASRADYEWARGVVAEHAIDRRCMVLFSPVHGKVQPRELAEWIIEDKLPVRFQLQLHKLLWNDAPGH

SEQ ID NO: 29803 - protein, 230 aa, Dyella thiooxydans
  REGION 1..230: note = tr|A0A160N2N1|A0A160N2N1_9GAMM 7-carboxy-7-deazaguanine synthase OS=Dyella thiooxydans; OX = 445710 GN=queE PE=3 SV=1
MSESDTGVAAVRPAGQAADRLRITEIFHSIQGEADAIGWRTVFVRLTGCPLRCVWCDTEYSFHGGDWHTVDDILAEVASHGARHVCVTGGEPLAQKRCIPLLARLCDAGYEVSLETSGALDVSAVDPRVRKVMDLKAPDSGESARNLWANLAHLLPHDQVKIVIASRADYEWARGVVAEHGIDRRCMVLFSPVHGAVQPRELAQWIIEDRVPVRFQLQLHKLLWNDAPGH

SEQ ID NO: 29804 - protein, 193 aa, unidentified
  source 1..193: note = Dysgonamonadaceae bacterium
  REGION 1..193: note = tr|A0A2N4S9L8|A0A2N4S9L8_9BACT 7-carboxy-7-deazaguanine synthase OS=Dysgonamonadaceae bacterium OX=2065189 GN=queE PE=3 SV=1
MNLKVNEIFYSLQGEGGRTGEASIFVRLSGCNLTCDFCDTDFAFGEIVSAEDILDRISIYPCKWIIWTGGEPTLQLTDEIVVFFKNHGYMQAIETNGTHRVPAGIDYITCSPKKNFEKIKKLIPEVDELRFPIKKGDVLPDIQILPKAKKYLLSPIFEGDHIIPENVKYCIRLIMDNPQWALSLQTHKLIGIR

SEQ ID NO: 29805 - protein, 193 aa, unidentified
  source 1..193: note = Dysgonomonas alginatilytica
  REGION 1..193: note = tr|A0A2V3PS93|A0A2V3PS93_9BACT 7-carboxy-7-deazaguanine synthase OS=Dysgonomonas alginatilytica OX=1605892 GN=queE PE=3 SV=1
MKLNVNEIFYSLQGEGGRVGEPSIFIRLTQCNLTCSFCDTDFAEGDDMTLDEIAEAIAVYPCKWIIWTGGEPTIQLKDEHVAFFRDKGYKQAIETNGTRRVPSLIDYITCSPKMKYEDIRKKIPVVNEIRIPIERGNILPDVSVFPKADKYFVSPIFDGDKINPDNVSYCVDLVKENPQWSLSLQVHKLIHIE

SEQ ID NO: 29806 - protein, 191 aa, Dysgonomonas capnocytophagoides
  REGION 1..191: note = tr|A0A4Y8KXY5|A0A4Y8KXY5_9BACT 7-carboxy-7-deazaguanine synthase OS=Dysgonomonas capnocytophagoides OX=45254 GN=queE PE=3 SV=1
MTVNEIFYSLQGEGGRVGEPSIFIRLTKCNLACSFCDTDFADGDDMSLDDILNVISKFPCKWIIWTGGEPTLQLKNDHLAFFKERGYKQAIETNGTKPVPSLIDYITCSPKVNYSRIKELIPRVNEIRIPLLNGDVLPDIDIFPVADKYFVSPVFDGDKPNTENINYCVEQVKADTRWTLSLQVHKLIHIE

SEQ ID NO: 29807 - protein, 193 aa, Dysgonomonas gadei
  REGION 1..193: note = tr|F5J0D7|F5J0D7_9BACT 7-carboxy-7-deazaguanine synthase OS=Dysgonomonas gadei ATCC BAA-286 OX=742766; GN = queE PE=3 SV=1
MKLIVNEIFYSLQGEGGRTGEASVFIRLTKCNLACSFCDTDFADGDEMSVDEILEAISVYPCKWIIWTGGEPTIQLRDAHLAVFREHGYRQAIETNGTRRVPSLIDYITCSPKQDYETIKNRIPFVHEIRMPIQAGDPVPDISVFPKADNYFLSPVFDADKINLENVAYCVELIKLHPQWRLSLQTHKLIHIE

SEQ ID NO: 29808 - protein, 193 aa, unidentified
  source 1..193: note = Dysgonomonas macrotermitis
  REGION 1..193: note = tr|A0A1M5D862|A0A1M5D862_9BACT 7-carboxy-7-deazaguanine synthase OS=Dysgonomonas macrotermitis OX=1346286 GN=queE PE=3 SV=1
MKLTVNEIFYSLQGEGGRVGEPSIFIRLTKCNLACSFCDTDFADGDDMSLDEILGIISRYPCKWIIWTGGEPTIQLKNEYLAFFKEHGYKQAIETNGTKRVPTLIDYITCSPKQNYSRIKDLIPKVDEIRIPLQTGDVLPDIAIFPKADKYFISPIFDGDVPNTENINYCVEQVKLDPRWTLSLQVHKLIHIE

SEQ ID NO: 29809 - protein, 193 aa, Dysgonomonas mossii
  REGION 1..193: note = tr|F8WVN8|F8WVN8_9BACT 7-carboxy-7-deazaguanine synthase OS=Dysgonomonas mossii DSM 22836 OX=742767; GN = queE PE=3 SV=1
MKLIVNEIFYSLQGEGGRSGEASIFIRLTKCNLACSFCDTDFADGDVMTIDEILEEIKQYPCKWIIWTGGEPTIQLKDEYLAVFRKHGYKQAIETNGTRLVPSLIDYITCSPKQDYETIKSRIPVVNEIRIPVKVGDTIPDASIFPKADNYFLSPIFDGDKINLENVDYCVEQIKLNSQWKLSLQIHKLIHIE

SEQ ID NO: 29810 - protein, 193 aa, Dysgonomonas mossii
  REGION 1..193: note = tr|A0A4Y9IN51|A0A4Y9IN51_9BACT 7-carboxy-7-deazaguanine synthase OS=Dysgonomonas mossii; OX = 163665 GN=queE PE=3 SV=1
MKLIVNEIFYSLQGEGGRSGEASIFIRLTKCNLACSFCDTDFADGDVMTIDEILEEIKQYPCKWIIWTGGEPTIQLKDEYLAVFRKHGYKQAIETNGTRLVPSLIDYITCSPKQDYETIKSRIPVVNEIRIPVKVGDTIPDASIFPKADNYFLSPIFDGDKINLENVDYCVEQIKLNSQWKLSLQVHKLIHIE

SEQ ID NO: 29811 - protein, 193 aa, Dysgonomonas sp.
  REGION 1..193: note = tr|A0A1M3LC14|A0A1M3LC14_9BACT 7-carboxy-7-deazaguanine synthase OS=Dysgonomonas sp. 37-18 OX=1895907 GN=queE PE=3 SV=1
MKLIVNEIFYSLQGEGGRSGEASIFIRLTKCNLACSFCDTDFADGDVMTIDEILEEIKQYPCKWIIWTGGEPTIQLKDEYLAVFRKHGYKQAIETNGTRLVPSLIDYITCSPKQDYETIKSRIPVVNEIRIPVKVGDTIPDTSIFPKADNYFLSPIFDADKINLENVDYCVEQIKLNSQWKLSLQVHKLIHIE

SEQ ID NO: 29812 - protein, 208 aa, Echinicola sp.
  REGION 1..208: note = tr|A0A514CNU9|A0A514CNU9_9BACT 7-carboxy-7-deazaguanine synthase OS=Echinicola sp. LN3S3; OX = 2591634 GN=queE PE=3 SV=1
MEIKQAVEKGLMLPLMEAFYTIQGEGTFTGHPAYFIRLGGCDVGCVWCDVKESWEAAKWPVLSVEEIVDGALQYPGRLVVITGGEPLMYELGPLTALLKEKGFTTNIETSGAHPFSGQFDWVCFSPKKFKEPHPSIFEKADEIKVIVFHKSDFDFAEKHAKKVQPSCKKLLQPEWSKSDKFTGEIIDYIKNHPDWNISLQTHKFMDIP

SEQ ID NO: 29813 - protein, 208 aa, unidentified
  source 1..208: note = Echinicola strongylocentroti
  REGION 1..208: note = tr|A0A2Z4IH21|A0A2Z4IH21_9BACT 7-carboxy-7-deazaguanine synthase OS=Echinicola strongylocentroti OX=1795355 GN=queE PE=3 SV=1
MEIKQAVEKGLKLPVMEAFYTIQGEGTFTGHPAYFIRLGGCDVGCVWCDVKESWEAAKWPVLSVEEIVDGALQYPGRLVVITGGEPLMYEMGPLTALLKEKGFTTNIETSGAHPFSGQFDWVCFSPKKFKEPHPSIFEKADELKVIVFHKSDFDFAEKHAKHVRSSCKKLLQPEWSKSEKFTGEIIEYIKNHPDWNISLQTHKFMDIP

SEQ ID NO: 29814 - protein, 208 aa, Echinicola vietnamensis
  REGION 1..208: note = tr|L0G7H9|L0G7H9_ECHVK 7-carboxy-7-deazaguanine synthase OS=Echinicola vietnamensis (strain DSM 17526 / LMG 23754 / KMM 6221) OX=926556 GN=queE PE=3 SV=1
MEIKQAVGKGIKLPVMEAFYTIQGEGTFTGHPAYFIRLGGCDVGCVWCDVKESWEAGKWPVQSVEEIVEGALQYPGKLVVITGGEPLMYDLGPLTALLKEKGFTINIETSGAHPFSGQFDWVCFSPKKFKEPHPSIFEKANELKVIVFHKSDFAFAEKHAAKVQPACRKLLQPEWSKAERYTGEIIDYIKKHPDWNISLQTHKFMDIP

SEQ ID NO: 29815 - protein, 219 aa, Ectothiorhodosinus mongolicus
  REGION 1..219: note = tr|A0A1R3W3Z5|A0A1R3W3Z5_9GAMM 7-carboxy-7-deazaguanine synthase OS=Ectothiorhodosinus mongolicus OX=233100 GN=queE PE=3 SV=1
MGEVAAAQELRITEIFLSIQGESASVGWPTVFVRLTGCPLRCVYCDTTYSFTGGELMTLEAILDQVEAHGVSHVCVTGGEPLAQPECLDLLTALCDQGYQVSLETSGALDISRVDPRVMTVMDLKTPSSGEAHRNLLSNLAHLKPTDQIKFVLAGREDYDWAVDQLRQHDLASKAQVLFSPVFKDQSPADLAEWILHDKLPVRMQLQLHKLLWGEARGR

SEQ ID NO: 29816 - protein, 212 aa, Ectothiorhodospira haloalkaliphila
  REGION 1..212: note = tr|W8KRX1|W8KRX1_9GAMM 7-carboxy-7-deazaguanine synthase OS=Ectothiorhodospira haloalkaliphila OX=421628; GN = queE PE=3 SV=1
MNLRITEIFLSLQGESRSVGWPTVFIRLTGCPLRCGYCDTAYAFTGGRVMPLEDILARVQGYGVHHVCVTGGEPLAQPACLPLLAALCDAGHEVSLETSGALDVSAVDPRAIKVMDLKTPGSGEVARNLWENLAHLSAHDQVKFVICGRADYDWAREVVSRYGLADRVEVLFSAAFGDLAPGTLADWIVADRLPVRFQLQLHKVLWNDARGR

SEQ ID NO: 29817 - protein, 214 aa, Ectothiorhodospira magna
  REGION 1..214: note = tr|A0A1H8ZBB0|A0A1H8ZBB0_9GAMM 7-carboxy-7-deazaguanine synthase OS=Ectothiorhodospira magna OX=867345 GN=queE PE=3 SV=1
MSDGLQISEIFLSLQGESRTVGCPTVFVRLTGCPLRCRYCDTAYAFTGGTPLTLDAIVDQVKAYGVPHVCVTGGEPLAQPNSLSLLTALCDGGHQVSLETSGALDIAPVDPRVVKVMDIKTPSSGEIHSNRWKNLDHLAPDDQVKFVLCNRDDYLWSSGIVRTHDLARRAEILFSPVHGRLPPRDLAEWILADRLPVRFQIQLHKWLWNDARGR

SEQ ID NO: 29818 - protein, 225 aa, Ectothiorhodospira marina
  REGION 1..225: note = tr|A0A1H7HKS7|A0A1H7HKS7_9GAMM 7-carboxy-7-deazaguanine synthase OS=Ectothiorhodospira marina OX=1396821 GN=queE PE=3 SV=1
MDTPTSPSANPALPGLRITEIFLSLQGESRSVGWPTVFVRLTGCPLRCDYCDTAYAFTGGEVLPLADILKKVQAYGVRHVCVTGGEPLAQPACLQLLSALCDAGHEVSLETSGALDVSAVDPRVIKVMDLKTPGSGEAARNRWDNLVHLSSKDQVKFVICDRADYDWACEVLARDGLTDRVEVLFSVAFGDLAPGTLADWIVQDRLPVRFQLQLHKVLWDDARGR

SEQ ID NO: 29819 - protein, 230 aa, Ectothiorhodospira mobilis
  REGION 1..230: note = tr|A0A1I4RDN1|A0A1I4RDN1_ECTMO 7-carboxy-7-deazaguanine synthase OS=Ectothiorhodospira mobilis OX=195064 GN=queE PE=3 SV=1
MSEITRAGGAVPPSPARGSGLRVTEIFTSLQGEAREMGRPTVFVRLTGCPLRCSYCDTAHAFSGGAVRSLEAVLAQVAAAGVGPVCVTGGEPLAQPACLPLLSALCDAGHEVSLETGGALDVSGVDPRVVKVLDLKTPGSGESHRNLWSNLEHLGPRDQVKFVLMDRADYDWARGVMGRYALPERVEVLLSPVAGRLSPVQLADWILADRLPVRFQLQLHKLLWGDAPGR

SEQ ID NO: 29820 - protein, 216 aa, Ectothiorhodospira sp.
  REGION 1..216: note = tr|H1G0Y7|H1G0Y7_9GAMM 7-carboxy-7-deazaguanine synthase OS=Ectothiorhodospira sp. PHS-1 OX=519989 GN=queE; PE = 3 SV=1
MTASGRLRITEIFLSLQGESRSVGWPTVFVRLTGCPLRCGYCDTAYAFTGGAWMTLTQILEQVACYGVRHVCVTGGEPLAQPDCLPLLTALCDAGYEVSLETSGALDLALVDPRVIKVMDLKTLASGESGRNRWENLQCLGPADQIKFVLCDRADYEWARDSLQAHDLAARAEILFSPVHGRLSPRDLAEWILADRLPVRFQIQLHKWLWDDARGR

SEQ ID NO: 29821 - protein, 225 aa, Ectothiorhodospira sp.
  REGION 1..225: note = tr|A0A166ZZ57|A0A166ZZ57_9GAMM 7-carboxy-7-deazaguanine synthase OS=Ectothiorhodospira sp. BSL-9 OX=1442136 GN=queE PE=3 SV=1
MNVPNPLSAHSAQPSLRITEVFLSLQGESRSVGWPTVFVRLTGCPLRCGYCDTAYAFTGGQNQSLPEIVAQVQAYGVHHVCVTGGEPLAQPACLPLLSALCDAGLEVSLETSGALDVSAVDPRVIKVMDLKTPGSGEASRNRWENLDHLSTHDQIKFVICDRADYDWAREVVARYGLAERVEVLFSAAFGDLPPGTLADWIVADRLSVRFQLQLHKVLWNDARGR

SEQ ID NO: 29822 - protein, 218 aa, unidentified
  source 1..218: note = Ectothiorhodospiraceae bacterium
  REGION 1..218: note = tr|A0A2E0UNF4|A0A2E0UNF4_9GAMM 7-carboxy-7-deazaguanine synthase; OS = Ectothiorhodospiraceae bacterium OX=2026737 GN=queE; PE = 3 SV=1
MEVLRISEIFHSIQGEGRRAGERCAFVRLHGCGLRCTWCDTPYALDHKEGGKFMDPQEIIDEVESMNCRFVEFTGGEPLEQEACFPLMTQFCDLGYIVAVETGGHVDIGTVDPRVSVIMDLKCPTSGMQKKNRLSNIGFLKPGDELKFVLQNRADYDWAKDFIAEHSNELSEQLLLFSPVYGALDNKQLAEWILQDRLPVRMQLQLHKYIWHPEARGV

SEQ ID NO: 29823 - protein, 235 aa, unidentified
  source 1..235: note = Ectothiorhodospiraceae bacterium
  REGION 1..235: note = tr|A0A2A4Y8E1|A0A2A4Y8E1_9GAMM 7-carboxy-7-deazaguanine synthase; OS = Ectothiorhodospiraceae bacterium OX=2026737 GN=queE; PE = 3 SV=1
MNTESRLPSQTDINVSEASAPHAGQIRITEIFLSLQGESRTVGYPTVFVRLTGCPLRCGYCDTRYAFQGGEWMTIESILEKVAAYNTHHITVTGGEPLAQRECGGLLTRLCDTGYEVSLETSGALDVSTVDVRVVKVMDLKTPGSLEEAKNCWDNLQHLTTQDQIKFVLCDRADYDWAKQKIEQHNLLGCCDVLFSPSFEQLQPVTLADWIIEDRLLVRFQVQLHKVLWGDEQGR

SEQ ID NO: 29824 - protein, 227 aa, Edaphobacter aggregans
  REGION 1..227: note = tr|A0A3R9NVY5|A0A3R9NVY5_9BACT 7-carboxy-7-deazaguanine synthase OS=Edaphobacter aggregans OX=570835 GN=queE PE=3 SV=1
MYLIELYKSVQGESSFAGLPCIFVRLAGCNLRCAWCDSEYTFTGGKPFTEDEIVAQIEALAPCRLIEFTGGEPMLQARELLPLMDRLLAQDYTLMIETSGERPLAEVPKAVHKIVDVKCPSAGSAANSFRLENLSALTKNDEVKFVLSDRADYEFARDFIRAHVLEEKAGQILLSPAFQKTPSPQRTADNMALDPRKLVDWMLADGLPARLSLQIHKFIWEPQKKGV

SEQ ID NO: 29825 - protein, 227 aa, unidentified
  source 1..227: note = Edaphobacter dinghuensis
  REGION 1..227: note = tr|A0A495BWE9|A0A495BWE9_9BACT 7-carboxy-7-deazaguanine synthase OS=Edaphobacter dinghuensis OX=1560005 GN=queE PE=3 SV=1
MHLIELYKSVQGESSFAGLPCIFVRLAGCNLRCAWCDSEYTFTGGKPFTEDEIVAQIEALAPCKLVEFTGGEPMLQATQLLPLMQHLLTQNYTLMIETSGERPLAEVPKAVHKIVDVKCPGAGPAANSFHLENLEALTKNDEVKFVISTREDYDFARDFIRQHNLNSKAGGILLSPAFRQTPSPQRTADNMALDPRKLVEWMLADGLDARLSLQIHKFIWEPMKKGV

SEQ ID NO: 29826 - protein, 227 aa, Edaphobacter modestus
  REGION 1..227: note = tr|A0A4Q7YUB7|A0A4Q7YUB7_9BACT 7-carboxy-7-deazaguanine synthase OS=Edaphobacter modestus; OX = 388466 GN=queE PE=3 SV=1
MHLIELYKSVQGESSFAGVPCIFVRLAGCNLRCAWCDSEYTFSGGKPFTQDQIVAEIESLAPCKLIEFTGGEPMLQARELLPLMERLLAEGYTLMIETSGERPLAEVPKAVHKIVDVKCPGAGAAANSFRMENLDALTEKDEVKFVLSDRADYEFAREFIRENALDRKAGQILLSPAFQKTPSPLRTADNMALDPRKLVDWMLEDGLPARLSLQIHKFIWEPQKKGV

SEQ ID NO: 29827 - protein, 223 aa, unidentified
  source 1..223: note = Edwardsiella anguillarum
  REGION 1..223: note = tr|A0A076LRX8|A0A076LRX8_9GAMM 7-carboxy-7-deazaguanine synthase OS=Edwardsiella anguillarum ET080813 OX=667120 GN=queE PE=3 SV=1
MQYPINEVFQSLQGEGFYTGVPAIFIRLQGCPVGCSWCDSQHTWHQRPECQADLAQIVEKTAESEAWASADAAALVALLRQRGYQARHVVITGGEPCMYDLLPLTTALEQGGYRCQIETSGTHPVRCSAQTWVTVSPKVGMRGGMEVLTDALRRANEIKHPVARARDIEALDALLARLDGELPPVVALQPISCKEEATRLCIETCLARNWRLSMQTHKYLNIV

SEQ ID NO: 29828 - protein, 223 aa, Edwardsiella hoshinae
  REGION 1..223: note = tr|A0A376DIQ6|A0A376DIQ6_9GAMM 7-carboxy-7-deazaguanine synthase OS=Edwardsiella hoshinae; OX = 93378 GN=queE PE=3 SV=1
MQYPINEIFHSLQGEGFYTGLPAIFIRLQGCPVGCSWCDSKHTWQQDAARQVDLAQVVEKAAESDAWANADVAALCALLQRRGYAARHVVITGGEPCLHDLLPLTLALEQAGYQCQIETSGTHPVRCSAQTWVTVSPKVAMRGGMTVLTSALRRANEIKHPVARERDIAALDALLASLEGALPPVVALQPISCKAGATRLCIDTCLARNWRLSMQTHKYLHIV

SEQ ID NO: 29829 - protein, 223 aa, Edwardsiella ictaluri
  REGION 1..223: note = tr|C5BHK9|C5BHK9_EDWI9 7-carboxy-7-deazaguanine synthase OS=Edwardsiella ictaluri (strain 93-146); OX = 634503 GN=queE PE=3 SV=1
MQYPINEVFQSLQGEGFYTGVPAIFIRLQGCPVGCSWCDSQHTWHQRPERQADLAQIVEKTAESEAWASADAAALVALLRQRGYQARRVVITGGEPCMYDLLPLTTALEQGGYRCQIETSGTHPVRCSAQTWVTVSPKVGMRGGMEVLTDALRRANEIKHPVARARDIEALDALLARLDGELPPVVALQPISCKEEATRLCIETCLARNWRLSMQTHKYLNIV

SEQ ID NO: 29830 - protein, 223 aa, unidentified; identical to SEQ ID NO: 29827
  source 1..223: note = Edwardsiella piscicida
  REGION 1..223: note = tr|A0A034SXJ5|A0A034SXJ5_9GAMM 7-carboxy-7-deazaguanine synthase OS=Edwardsiella piscicida OX=1263550 GN=queE PE=3 SV=1

SEQ ID NO: 29831 - protein, 223 aa, unidentified
  source 1..223: note = Edwardsiella piscicida
  REGION 1..223: note = tr|A0A411GZK5|A0A411GZK5_9GAMM 7-carboxy-7-deazaguanine synthase OS=Edwardsiella piscicida OX=1263550 GN=queE PE=3 SV=1
MQYPINEIFQSLQGEGFYTGVPAVFIRLQGCPVGCSWCDSQHTWHQRPECQADLAQIVEKTAESEAWASADAAALVALLRQRGYQARHVVITGGEPCMHDLLPLTTALEQGGYRCQIETSGTHPVRCSAQTWVTVSPKVGMRGGMTVLTDALRRANEIKHPVARARDIEALDALLARLDGELPPVVALQPISCKEEATRLCIETCLARNWRLSMQTHKYLNIV

SEQ ID NO: 29832 - protein, 223 aa, Edwardsiella tarda
  REGION 1..223: note = tr|A0A2X1JPG8|A0A2X1JPG8_EDWTA 7-carboxy-7-deazaguanine synthase OS=Edwardsiella tarda; OX = 636 GN=queE PE=3 SV=1
MQYPINEIFYSLQGEGFYTGLPAIFIRLQGCPVGCSWCDSKHTWQQDAVRQVALEQVVEKAAESDAWASADVATLCALLQQRGYAARHVVITGGEPCLHDLLPLTLALEQAGYQCQIETSGTHPVRCSEQTWVTVSPKVAMRGGMAVLTSALRRANEIKHPVARERDIAALDALLATLGEALPQVVALQPISCKEGATRLCIDTCLARNWRLSMQTHKYLHIV

SEQ ID NO: 29833 - protein, 223 aa, Edwardsiella tarda; identical to SEQ ID NO: 29831
  REGION 1..223: note = tr|D0ZET5|D0ZET5_EDWTE 7-carboxy-7-deazaguanine synthase OS=Edwardsiella tarda (strain EIB202) OX=498217; GN = queE PE=3 SV=1

SEQ ID NO: 29834 - protein, 218 aa, unidentified
  source 1..218: note = Effusibacillus lacus
  REGION 1..218: note = tr|A0A292YJ72|A0A292YJ72_9BACL 7-carboxy-7-deazaguanine synthase OS=Effusibacillus lacus; OX = 1348429 GN=queE PE=3 SV=1
MKVNEIFFSIQGESGSIGLPTIFVRFTGCNLRCTYCDTKYSYFEGEPDTPEGVMDKVRSYGIKRVCLTGGEPLIQPREEMQQLLDLLGEDGYEVSIETDGSIDISRFRLHDKQRFILDMKVPSSAMSDKMNFENLKRIVPERDEIKFVVGNREDYEWSKDLIRQYNLDPGLGYQLIFSPIYGELTYQQLVEWLLEDRIDARFQVQLHKIVWDPNQRGV

SEQ ID NO: 29835 - protein, 231 aa, Eggerthella sp.
  REGION 1..231: note = tr|A0A415XTB4|A0A415XTB4_9ACTN 7-carboxy-7-deazaguanine synthase OS=Eggerthella sp. AM16-19 OX=2292042 GN=queE PE=3 SV=1
MPVAERFVSINGEGACAGKLAAFIRFTGCNLRCGYCDTMWANVPDAAAKDEIPEQLAAWVRQAGVECVTLTGGEPVLQPLLPRLVELLLGEPGPSGRGLRVEIETNGAADLNELAELRARIGNAAPGVLSFTVDWKLPSSGMEQRMLPANFRLLDTRDTVKFVCGQGDLPRALEVARQLDLPGRVPVYLSPCFGDIEPARIVEFMQENQMTWATAQVQLHKVIWPDVERGV

SEQ ID NO: 29836 - protein, 270 aa, Eggerthella sp.
  REGION 1..270: note = tr|R6HLF1|R6HLF1_9ACTN 7-carboxy-7-deazaguanine synthase OS=Eggerthella sp. CAG:209 OX=1262875 GN=queE; PE = 3 SV=1
MSHCQAYFDEDSEEACLLPVVERFVSVNGEGPRAGRLAAFIRFAGCNLACSWCDTAWANVNKCDHEDMKPQSLVEWVSDAGVSCVTLTGGEPTLQPGLPALIIALLGSDAWGSGNGRVVEIETNGAVDLSALHKLRSGFGKKRATDHSAAIDGIDCGAMPLVPVTDVYFTVDCKMPSSGMTAEMLPSNYELLGCGDAVKFVVASIEDLECAKSVIDQYDLCSRCEVFFSPVFSCIEPSEIVSFMERHGLFGVRLQLQLHKIIWPDRDRGV

SEQ ID NO: 29837 - protein, 215 aa, unidentified
  source 1..215: note = Eilatimonas milleporae
  REGION 1..215: note = tr|A0A3M0CD51|A0A3M0CD51_9PROT 7-carboxy-7-deazaguanine synthase OS=Eilatimonas milleporae OX=911205 GN=queE PE=3 SV=1
MTYSVKELFYTLQGEGANAGRPAVFCRFSGCNLWTGREEDRASAVCRFCDTDFIGTDGPGGGKFKTPQALATAARSLWPETPGGPRQGRPFLVCTGGEPLLQLDKPLIDAFHDAGFEIAVETNGTIQPPAGIDWLCVSPKAGADLLVDHGQELKLVYPQHGGMPDRYEILDFSHFFLQPMDGPDLPANTASAVDYCKSHPKWRLSVQTHKVIGIP

SEQ ID NO: 29838 - protein, 231 aa, unidentified
  source 1..231: note = Eisenbergiella tayi
  REGION 1..231: note = tr|A0A1E3AKH0|A0A1E3AKH0_9FIRM 7-carboxy-7-deazaguanine synthase OS=Eisenbergiella tayi; OX = 1432052 GN=queE PE=4 SV=1
MQIFGFNKTTLLDFPEHVACTVFTGGCNFRCPFCQNGDLVLHGGSLPVLDEEEVFGVLRKRKGILTGVCVTGGEPTLQRDLDVFLSRVKELGYLVKLDSNGYRPEVLQSLCERGLVDYFAMDIKSSPENYARTAGVKELDMGLIRESVDFIRSCGLDYEFRTTVVRELHSSGDFLSIGEWLKGCKAYFLQSYVESEGVICKEFSSYSKEELEEFVMLLKPYIDNVSLRGVD

SEQ ID NO: 29839 - protein, 231 aa, unidentified
  source 1..231: note = Eisenbergiella tayi
  REGION 1..231: note = tr|A0A1E3A288|A0A1E3A288_9FIRM 7-carboxy-7-deazaguanine synthase OS=Eisenbergiella tayi; OX = 1432052 GN=queE PE=4 SV=1
MQIFGFNKTTLLDFPEHVACTVFTGGCNFRCPFCQNGDLVLHGGSLPVLDEEEVFRVLRKRKGILTGVCVTGGEPTLQRDLDVFLSRVKELGYLVKLDSNGYRPEVLQSLCERGLVDYFAMDIKSSPENYARTAGVKELDMGLIRESVDFIRSCGLDYEFRTTVVRELHSSGDFLSIGEWLKGCKAYFLQSYVESEGVICKEFSSYSKEELEEFVMLLKPYIDNVSLRGVD

SEQ ID NO: 29840 - protein, 205 aa, Ekhidna lutea
  REGION 1..205: note = tr|A0A239KAL0|A0A239KAL0_9BACT 7-carboxy-7-deazaguanine synthase OS=Ekhidna lutea; OX = 447679 GN=queE PE=3 SV=1
MSSITDPEYLPVMESFYTIQGEGFFSGTPAYFIRLGGCDVGCVWCDVKESWDASQFDWFSIDQIVSAAKESGAHLVVVTGGEPLMYDLTLLTESLEKAGLQTNIETSGAYPLSGRWDWICFSPKKFKAPLEEFYSKSHELKVVAFNKSDFKWAEGHGDKMHSDSQLFLQPEWSKEKEMTPLIVDFVKQNPKWKISLQTHKYMDIP

SEQ ID NO: 29841 - protein, 209 aa, Elizabethkingia anophelis
  REGION 1..209: note = tr|T0PXC1|T0PXC1_9FLAO 7-carboxy-7-deazaguanine synthase OS=Elizabethkingia anophelis 502 OX=1355388; GN = queE PE=3 SV=1
MNKEQDILLKEGKMLPVMEHFYTLQGEGAHTGKAAYFIRLGGCDVGCHWCDVKESWDPNLHPLMNAEEIAETAAKYCKTIVLTGGEPLMWNLEILTSKLKELGCTIHIETSGAYPMSGHLDWITLSPKKTGLPLEDIYKKASELKVIVFNNYDFKFAEEQSAKVSENCKRYLQSEWSKRNEMYPKITDYILEHPEWQASVQTHKYLNIP

SEQ ID NO: 29842 - protein, 211 aa, Elizabethkingia anophelis
  REGION 1..211: note = tr|A0A077EJN6|A0A077EJN6_9FLAO 7-carboxy-7-deazaguanine synthase OS=Elizabethkingia anophelis NUHP1 OX=1338011 GN=queE PE=3 SV=1
MKMNKEQDILLKEGKMLPVMEHFYTLQGEGAHTGKAAYFIRLGGCDVGCHWCDVKESWDPNLHPLMNAEEIGETAAKYCKTIVLTGGEPLMWNLEILTSKLKELGCTIHIETSGAYPMSGHLDWITLSPKKTGLPLEDIYKKASELKVIVFNNNDFKFAEEQSAKVSENCKRYLQSEWSKRNEMYPKITDYILEHPEWQASVQTHKYLNIP

SEQ ID NO: 29843 - protein, 209 aa, unidentified
  source 1..209: note = Elizabethkingia bruuniana
  REGION 1..209: note = tr|A0A5E8D5B5|A0A5E8D5B5_9FLAO 7-carboxy-7-deazaguanine synthase OS=Elizabethkingia bruuniana OX=1756149 GN=queE PE=3 SV=1
MNKEQDILLKEGKMLPVMEHFYTLQGEGAHTGKAAYFIRLGGCDVGCHWCDVKESWDPNLHPLMNAEEIAETAAKYCKTIVLTGGEPLMWNLEILTSKLKELGCTIHIETSGAYPMSGHLDWITLSPKKTGLPLEDIYKEASELKVIVFNNNDFKFAEEQSAKVSDNCKRYLQSEWSKRDEMYPKITDYILEHPEWQASVQTHKYLNIP

SEQ ID NO: 29844 - protein, 209 aa, Elizabethkingia meningoseptica
  REGION 1..209: note = tr|A0A1T3I6P6|A0A1T3I6P6_ELIME 7-carboxy-7-deazaguanine synthase OS=Elizabethkingia meningoseptica OX=238 GN=queE PE=3 SV=1
MNKEQDILLKEGKMLPVMEHFYTLQGEGAHTGKAAYFIRLGGCDVGCHWCDVKESWDPDLHPLMNTEEIAETAAKYCKTIVLTGGEPLMWNLEILTSKLKELDCTIHIETSGAYPMSGHLDWITLSPKKTGLPLEDIYQKASELKVIVFNNHDFTFAEEQSAKVSADCKRYLQSEWSKRNEMYPKITDYILEHPEWQASVQTHKYLNIP

SEQ ID NO: 29845 - protein, 209 aa, Elizabethkingia meningoseptica
  REGION 1..209: note = tr|A0A376E5V9|A0A376E5V9_ELIME 7-carboxy-7-deazaguanine synthase OS=Elizabethkingia meningoseptica OX=238 GN=queE PE=3 SV=1
MNKEQDILLKEGKMLPVMEHFYTLQGEGAHTGKAAYFIRLGGCDVGCHWCDVKESWDPNLHPLMNAEEIAETAAKYCKTIVLTGGEPLMWNLEILTSKLKELGCTIHIETSGAYPMSGHLDWITLSPKKTGLPLEDIYKKASELKVIVFNNNDFKFAEEQSAKVSENCKRYLQSEWSKRNEMYPKITDYILEHPEWQASVQTHKYLNIP

SEQ ID NO: 29846 - protein, 209 aa, Elizabethkingia miricola; identical to SEQ ID NO: 29843
  REGION 1..209: note = tr|A0A0A2H6V1|A0A0A2H6V1_ELIMR 7-carboxy-7-deazaguanine synthase OS=Elizabethkingia miricola OX=172045 GN=queE PE=3 SV=1

SEQ ID NO: 29847 - protein, 209 aa, unidentified
  source 1..209: note = Elizabethkingia occulta
  REGION 1..209: note = tr|A0A1T3MGY3|A0A1T3MGY3_9FLAO 7-carboxy-7-deazaguanine synthase OS=Elizabethkingia occulta OX=1867263 GN=queE PE=3 SV=1
MNKEQDILLKEGKMLPVMEHFYTLQGEGAHTGKAAYFIRLGGCDVGCHWCDVKESWDPNLHPLMNAEEIAETAAKYCKTIVLTGGEPLMWNLEILTSKLKELGCTIHIETSGAYPMSGHLDWITLSPKKTGLPLEDIYKEASELKVIVFNNNDFKFAEEQSAKVSDNCKRYLQSEWSKRNEMYPKITDYILEHPEWQASVQTHKYLNIP

SEQ ID NO: 29848 - protein, 209 aa, Elizabethkingia sp.; identical to SEQ ID NO: 29843
  REGION 1..209: note = tr|A0A2T5RY05|A0A2T5RY05_9FLAO 7-carboxy-7-deazaguanine synthase OS=Elizabethkingia sp. YR191 OX=2135666 GN=queE PE=3 SV=1

SEQ ID NO: 29849 - protein, 209 aa, Elizabethkingia sp.
  REGION 1..209: note = tr|A0A5B7UGK3|A0A5B7UGK3_9FLAO 7-carboxy-7-deazaguanine synthase OS=Elizabethkingia sp. JS20170427COW OX=2583851 GN=queE PE=3 SV=1
MNQEQEILLKEGKMLPIMEHFYTIQGEGAHTGLAAYFIRVGGCDVGCHWCDVKESWNPDLHPLMDAEQIAITAAQHCKTIVLTGGEPLMYNLDFITSKLKDLGCNIHIETSGAYPLSGHLDWITLSPKKTKLPLEEIYQKASELKMIIFNNHDFIFAEEQVAKVNANCKLYLQSEWSKRNENYPKITDYILAHPQWQASVQTHKYLNIP

SEQ ID NO: 29850 - protein, 209 aa, unidentified; identical to SEQ ID NO: 29843
  source 1..209: note = Elizabethkingia ursingii
  REGION 1..209: note = tr|A0A1T3FJ15|A0A1T3FJ15_9FLAO 7-carboxy-7-deazaguanine synthase OS=Elizabethkingia ursingii OX=1756150 GN=queE PE=3 SV=1

SEQ ID NO: 29851 - protein, 218 aa, unidentified
  source 1..218: note = Elstera cyanobacteriorum
  REGION 1..218: note = tr|A0A255XKF3|A0A255XKF3_9PROT 7-carboxy-7-deazaguanine synthase OS=Elstera cyanobacteriorum OX=2022747 GN=queE PE=3 SV=1
MSYSVKEAFKTLQGEGAQAGRAAVFCRFAGCNLWSGRETDRAEAVCRFCDTDFVGVDGDGGGKFARPEDLAAHLAALWGPDRAFRYAVFTGGEPLLQLDAALIAAMKVEGFEIAVETNGTLPAPAGIDWICVSPKAGAPFVQTWGHELKLVFPQPELLPDVFETLDADAFGHYWLQPMDGLSDGGVMRINSTAAAVDYCQAHPRWRLSLQTHKMIGIP

SEQ ID NO: 29852 - protein, 218 aa, unidentified
  source 1..218: note = Elstera litoralis
  REGION 1..218: note = tr|A0A0F3IUZ6|A0A0F3IUZ6_9PROT 7-carboxy-7-deazaguanine synthase OS=Elstera litoralis; OX = 552518 GN=queE PE=3 SV=1
MSYSVKEAFKTLQGEGAQAGRAAVFCRFTGCNLWSGREADRSEAVCQFCDTDFVGTDGSGGGKFARAENLVAHLAALWGPDRAYRYVVFTGGEPLLQLDAPLIAAMKAEGFTIAVETNGTLAAPEGIDWICVSPKAGAPFVQQRGHELKLIFPQAALLPETFDTLDAEAFTHYWLQPMDGLNDGGLARSHHTAAAVAYCQAHPRWRLSLQTHKMIGIP

SEQ ID NO: 29853 - protein, 231 aa, unidentified
  source 1..231: note = Elusimicrobia bacterium
  REGION 1..231: note = tr|A0A1F9XM57|A0A1F9XM57_9BACT 7-carboxy-7-deazaguanine synthase OS=Elusimicrobia bacterium RIFOXYA2_FULL_53_38 OX=1797961 GN=queE PE=3 SV=1
MSAIDTANIYEIFCSIQGEGLYAGQKQIFVRFAGCNLSCAYCDEPAARSGGERTALSAIKRIIKQLAFKERARAVSFTGGEPLLQHKALKELALYAGSLKLQTHLETNGVCHRELKEVLSAIDVVAADIKLPGSAGGALWKEHGKFLSLAPKKTFVKIVVTSDTAPAEFRKGVKLAASVCGRMPFYIQPVTPRGRLRPPSAEQLAGFYRFAVSKLEHVRIFPQLHKLWKVK

SEQ ID NO: 29854 - protein, 268 aa, unidentified
  source 1..268: note = Elusimicrobia bacterium
  REGION 1..268: note = tr|A0A3B9ZX11|A0A3B9ZX11_9BACT 7-carboxy-7-deazaguanine synthase OS=Elusimicrobia bacterium OX=2030800 GN=queE PE=3 SV=1
MITAEISEIFVSIQGEGLYCGQKQVFLRFAGCNLNCVYCDEPAAHVKRCQAPFYGHRSQVIGCKSQVTSHKSQEELRAERTNYREMSVASAAAEVIQLARKNRAKAVSLTGGEPLLNWGFIMKLAPALRKAGLAVHLETNGIFYRELSKVKNLVDVVAMDIKLPSSTGQKPFWREHSEFIKTAPEKTFVKVVLTSKTSLHDFTKAVKLTASVPGIVPFFLQPATRRTLPAGAVRPPTGVFLEKACCEASSRLPVVRLLPQQHPKWGVK

SEQ ID NO: 29855 - protein, 195 aa, Elusimicrobium minutum
  REGION 1..195: note = tr|B2KC63|B2KC63_ELUMP 7-carboxy-7-deazaguanine synthase OS=Elusimicrobium minutum (strain Pei191); OX = 445932 GN=queE PE=3 SV=1
MQAPSFKLTEIFYSLQGEGMYTGTAAVFVRLSGCLMGCSFCDTDFKENFVMTSEEIIKEVKKYPSKIVIITGGEPAEQDICALIKSLKQAGLKVHIETNGSIYFDAQGVDNLTVSPKTYVDPNMLKSAHVIKIVVGQDTDISDLKKYFNYASEGRLIYLQPESNKQENIDLCVKLIKENPFLRLSLQTHKFAKIP

SEQ ID NO: 29856 - protein, 197 aa, Elusimicrobium sp.
  REGION 1..197: note = tr|A0A1Y4DJJ0|A0A1Y4DJJ0_9BACT 7-carboxy-7-deazaguanine synthase OS=Elusimicrobium sp. An273 OX=1965617 GN=queE PE=3 SV=1
MPQPSWKVNEIFYSIQGEGKHTGMPAVFIRLAGCSMNCPFCDTKYAARDGQTLQAEAILKALASWPAKAVIITGGEPSEQDLPALIGVLKDAGYEVHLETNGANDTDVSRADFVCVSPKRYVSPQMLKKAHVIKLVVGQETDLEDLQKYYAYENAHTQIYLQPESNKQENIDLCVKLLKNHPSARLSLQTHKLANIR

SEQ ID NO: 29857 - protein, 212 aa, unidentified
  source 1..212: note = Emcibacter congregatus
  REGION 1..212: note = tr|A0A2G4YPL3|A0A2G4YPL3_9PROT 7-carboxy-7-deazaguanine synthase OS=Emcibacter congregatus OX=2043170 GN=queE PE=3 SV=1
MTYSVKEIFYTLQGEGAQSGRAAVFCRFAGCNFWSGREQDRANADCSFCDTDFIGTDGPGGGKFKTAAALAEAARVCWDGMADATGTPYIVCTGGEPLMQLDSPLITAFQKKGFEVAVETNGSLPCPPELDWICVSPKSLDKLVQLTGDELKLVYPQTPVKPEDVAHLKFDHFYLQPLDEADHNHVPATLDYCRRHPQWKLSLQTHKILGIA

SEQ ID NO: 29858 - protein, 219 aa, unidentified
  source 1..219: note = Emcibacter nanhaiensis
  REGION 1..219: note = tr|A0A501PQ73|A0A501PQ73_9PROT 7-carboxy-7-deazaguanine synthase OS=Emcibacter nanhaiensis OX=1505037 GN=queE PE=3 SV=1
MTYTVKELFYTLQGEGAQAGRAAVFCRFAGCNLWSGREEDRAAAECTFCDTDFVGTGGPGGGKFASAEKLALAARALWDNEADDSGIPYIVCTGGEPLLQLDAPLIQAFHAKGFEVAVETNGTLPAPADLDWICVSPKRLDKLEQTSGHELKLVYPQKDISPEDVAHLDFEYFFLQPMDGIGADAETTRLANTQKVVEYCRRHPKWRVSLQTHKILDIP

SEQ ID NO: 29859 - protein, 215 aa, Empedobacter brevis; identical to SEQ ID NO: 27560
  REGION 1..215: note = tr|A0A3P6N8G2|A0A3P6N8G2_9FLAO 7-carboxy-7-deazaguanine synthase OS=Empedobacter brevis; OX = 247 GN=queE PE=3 SV=1

SEQ ID NO: 29860 - protein, 215 aa, Empedobacter brevis
  REGION 1..215: note = tr|A0A511NHT4|A0A511NHT4_9FLAO 7-carboxy-7-deazaguanine synthase OS=Empedobacter brevis NBRC 14943 = ATCC 43319 OX=1218108 GN=queE PE=3 SV=1
MIHIASTTAEEQQLIKEGKLLPVMEHFYTIQGEGMYTGVASYFIRLGGCDVGCHWCDVKDSWDAEKHPLTNVDELVDLATSQAKTIIITGGEPLMWDLTYLTKKLHEKGARIHIETSGAYPLSGEIDWVCLSPKKTMLPLDEVCEAAHELKCIIFNNHDFQFAEEQAARVGEDCTLFLQTEWSKRDKNLPLIIEYVKENPKWRYSLQTHKYLDIP

SEQ ID NO: 29861 - protein, 215 aa, unidentified
  source 1..215: note = Empedobacter falsenii
  REGION 1..215: note = tr|A0A376G2Y7|A0A376G2Y7_9FLAO 7-carboxy-7-deazaguanine synthase OS=Empedobacter falsenii; OX = 343874 GN=queE PE=3 SV=1
MIHIASTTAEEQQLIQEGKLLPVMEHFYTIQGEGMYTGVASYFIRLGGCDVGCHWCDVKDSWDAEKHPLTNVDELVDLATSQAKTIIITGGEPLMWDLTYLTKKLHEKGARIHIETSGAYPLSGEIDWVCLSPKKLMLPLDEVCEAANELKCIVFNNHDFQFAEEQAARVGKDCTLFLQTEWSKRDKNLPLIVEYVKENPKWRYSLQTHKYLDIP

SEQ ID NO: 29862 - protein, 211 aa, unidentified
  source 1..211: note = Empedobacter haloabium
  REGION 1..211: note = tr|A0A5C7CHS4|A0A5C7CHS4_9FLAO 7-carboxy-7-deazaguanine synthase OS=Empedobacter haloabium OX=592317 GN=queE PE=3 SV=1
MTYSIKEIFYTLQGEGAHAGRPAVFCRFAGCNLWTGRESDRAGAICQFCDTDFVGTDGERGGKFATPGELAAVIDSLWPASHAASKYVVFTGGEPLLQLDGPLIDAMHAAGFTIAIETNGTIAVPPGVDWICVSPKVGSKLVVAKGNELKVVIPQKDQHLADYEHLEFDNFFVQPMDGPLAAFNTTLAIDTCKANPKWKLSLQTHKLLNIP

SEQ ID NO: 29863 - protein, 215 aa, Empedobacter sp.
  REGION 1..215: note = tr|A0A4Z1BGK5|A0A4Z1BGK5_9FLAO 7-carboxy-7-deazaguanine synthase OS=Empedobacter sp. MRS2; OX = 2491114 GN=queE PE=3 SV=1
MIHIASTTAEEQQLIQEGKLLPVMEHFYTIQGEGMYTGVASYFIRLGGCDVGCHWCDVKDSWDAEKHPLTNVDVLVDLATSQAKTIIITGGEPLMWDLTYLTKKLHEKGARIHIETSGAYPLSGEIDWVCLSPKKLMLPLDEVCEAANELKCIVFNNHDFQFAEEQAARVGKDCTLFLQTEWSKRDKNLPLIVEYVKENPKWRYSLQTHKYLDIP

SEQ ID NO: 29864 - protein, 193 aa, Emticicia sp.
  REGION 1..193: note = tr|A0A4Q5M515|A0A4Q5M515_9BACT 7-carboxy-7-deazaguanine synthase OS=Emticicia sp. 17J42-9; OX = 2492393 GN=queE PE=3 SV=1
MESFYTLQGEGYHAGKAAYFIRLGGCDVGCVWCDVKESWDASIHPKFSIEEIVREAEKYTGRMAVITGGEPLMYDLDALTIALKEVGFQTNIETSGVYPISGVWDWVCFSPKKFKEPHESIYGASHELKVIVYNKSDFAFAEKYADLVNKDCMLLLQPEWSKQSQMLPLIIDYVKENPEWKVSLQTHKFMDIP

SEQ ID NO: 29865 - protein, 193 aa, Emticicia sp.
  REGION 1..193: note = tr|A0A2N4XBS8|A0A2N4XBS8_9BACT 7-carboxy-7-deazaguanine synthase OS=Emticicia sp. TH156; OX = 2067454 GN=queE PE=3 SV=1
MESFYTLQGEGYHAGKAAYFIRLGGCDVGCVWCDVKESWDASIHPQFTVDEIVDGALAYTGRMAVITGGEPLMYNLDELTASLQKAGFKTNIETSGVYEMSGHWDWVCFSPKKFKTPHESIYKQANELKVIVYNKSDFAFAEKYAASVNENCILLLQPEWSRHQEMLPLIIDYVKANPKWRVSLQTHKYMDIP

SEQ ID NO: 29866 - protein, 253 aa, unidentified
  source 1..253: note = Endomicrobium proavitum
  REGION 1..253: note = tr|A0A0G3WHL1|A0A0G3WHL1_9BACT 7-carboxy-7-deazaguanine synthase OS=Endomicrobium proavitum OX=1408281 GN=queE PE=3 SV=1
MKSKVKKQKPITNIYAPVYEVFFSYQGEGPYTGTPQIFVRFAGCNIKCNYCDTAYSIKISDNAKYYSSQELLAEIEKILKKMDCRGASRFAMTGTSKPSIAITGGEPLIHADFLKVFLPALKKYGFQVYLETNGTLPKNLKKIISFCDIVSMDFKFQSECKKSFWKEHKEFLKIAKDKVFVKCVVTKNTSLNEIKRSGQIIRSASKKICLILQPSTGKDIPLAKNLSAFYTELKKTLPNVLIMPQLHKILRIR

SEQ ID NO: 29867 - protein, 221 aa, unidentified
  source 1..221: note = Galathealinum brachiosum
  REGION 1..221: note = tr|A0A370DJ34|A0A370DJ34_9GAMM 7-carboxy-7-deazaguanine synthase OS=endosymbiont of Galathealinum brachiosum OX=2200906 GN=queE PE=3 SV=1
MSSDTQAVESRLRITEIFYSLQGESSFVGLPTVFIRLTGCPLRCGYCDTAYAFSGGEWMQISEIVRQIKQYKTTTVCVTGGEPLAQRCSGDLLKQLCDEGYQVSIETSGSIDISSVDSRVVKVMDIKTPGSGEESKNRYENIQHLTQKDEVKFVLCDREDYEWSKEVINKYKLSEKAQILFSPVHDGVVPADLADWIISDQLNVRFQFQLHKFLWDNEPGR

SEQ ID NO: 29868 - protein, 213 aa, Ridgeia piscesae
  REGION 1..213: note = tr|A0A0T5Z6H4|A0A0T5Z6H4_9GAMM 7-carboxy-7-deazaguanine synthase OS=endosymbiont of Ridgeia piscesae OX=54398 GN=queE PE=3 SV=1
MARLRISEIFYSLQGESRTAGLSTLFIRLTGCPLRCSYCDTEYAFSGGEWMELAAVLDQVERSAARRICVTGGEPLAQTACIELLDSLLEQGCEVSLETSGALDISAVDPRVSRVVDLKTPGSGEETRNRYANLDQLTANDQLKFVICDRADYDWSRSMLERYGLIGRCELLFSPAFGRQDPAQLAEWILADRLDVRFQLQLHKQLWGEEAGR

SEQ ID NO: 29869 - protein, 218 aa, unidentified
  source 1..218: note = Endozoicomonadaceae bacterium
  REGION 1..218: note = tr|A0A444GPU0|A0A444GPU0_9GAMM 7-carboxy-7-deazaguanine synthase OS=Endozoicomonadaceae bacterium GTF-13 OX=2506149 GN=queE PE=3 SV=1
MYSIKEAFYSLQGEGAHSGRPAVFCRFSGCNLWSGRERDRAGAVCDFCDTAFVGSDGQNGGKFRDADQLARHLRSLWPTLNGPGIPYVILTGGEPALQLDPALVDALHTQGFEVAIETNGTRPLPQGIDWVCVSPKGNTELVVTEGDELKLVYPQPQALPGRFDKMKFSHFYLQPMASVAGLAGQPGDETALRSTIDYCLQHPQWRLSLQTHKMIGIE

SEQ ID NO: 29870 - protein, 212 aa, Endozoicomonas elysicola
  REGION 1..212: note = tr|A0A081KE31|A0A081KE31_9GAMM 7-carboxy-7-deazaguanine synthase OS=Endozoicomonas elysicola OX=305900 GN=queE PE=3 SV=1
MIRISEIFYSLQGETRTTGLPTVFVRLTGCPLRCTWCDTEYAFKGGDLLSSDAILGKVSEYSPKYVTVTGGEPLAQRECHQLLTLLADQGFEVSLETSGAITLSEVDPRVVKVMDLKPPASGESHRNLYENIQFLDKKDQLKFVIADRGDYDWSVSKLIEYDLANRVSDVLFSPVSGEMSAEILASWILDDRLPVRFQLQLHRMIWGDKPGV

SEQ ID NO: 29871 - protein, 216 aa, Endozoicomonas montiporae
  REGION 1..216: note = tr|A0A142BEA9|A0A142BEA9_9GAMM 7-carboxy-7-deazaguanine synthase OS=Endozoicomonas montiporae CL-33 OX=570277 GN=queE PE=3 SV=1
MASESLRITEIFYSLQGESNTSGLPTVFVRLTGCPLRCTWCDTEYSFSGGERMTIDAIVQQVADYGADYVCVTGGEPLAQPGCLPLLERLADAGYEVSLETSGALDVAAVDSRVVKVMDLKAPGSGEVGKNLYQNIHHLDHKDQVKFVIADRADYDWSASKLIEYNLTEKVSDVLFSPVSTGVEPAELAHWILADRLPVRFQIQLHRVIWGDKTGV

SEQ ID NO: 29872 - protein, 216 aa, Endozoicomonas montiporae; identical to SEQ ID NO: 29871
  REGION 1..216: note = tr|A0A081N9X6|A0A081N9X6_9GAMM 7-carboxy-7-deazaguanine synthase OS=Endozoicomonas montiporae OX=1027273 GN=queE PE=3 SV=1

SEQ ID NO: 29873 - protein, 216 aa, unidentified
  source 1..216: note = Endozoicomonas numazuensis
  REGION 1..216: note = tr|A0A081NE17|A0A081NE17_9GAMM 7-carboxy-7-deazaguanine synthase OS=Endozoicomonas numazuensis OX=1137799 GN=queE PE=3 SV=1
MTADTLRITEIFHSLQGESRTTGLPTVFVRLTGCPLRCTWCDTEYSFHGGTRMSLDEIVKEVEGYGAKYVCVTGGEPLGQPNCLPLLEQLSDKGYEVSLETSGAMDVSLVDDRVVKVMDLKPPASGESHRNLYENIQHLTANDQVKFVVANREDYDWSVSKMLQYNLANRVSDVLFSPVNDQLGPDQLADWIISDKLPVRFQVQLHRVIWGDKTGV

SEQ ID NO: 29874 - protein, 195 aa, Endozoicomonas sp.
  REGION 1..195: note = tr|A0A1D2X4Z9|A0A1D2X4Z9_9GAMM 7-carboxy-7-deazaguanine synthase OS=Endozoicomonas sp. (ex Bugula neritina AB1) OX=1868284 GN=queE PE=3 SV=1
MGLPTVFIRLTGCPLRCRWCDTEYAFQGGMSQTLKEIMAQVKSYNPLYVTVSGGEPLAQPNCLPLLSCLADQGYEVSLETSGALDISAVDPRVVKVMDLKPPASGEVGRNSYDNIGYLNPKDQVKFVMADRGDYEWSVSKLIEYNLSERVSDVLFSPVSGELMADQLAGWILEDGLPVRFQVQLHKVIWGNKAGV

SEQ ID NO: 29875 - protein, 218 aa, Endozoicomonas sp.; identical to SEQ ID NO: 29869
  REGION 1..218: note = tr|A0A3P3VMG5|A0A3P3VMG5_9GAMM 7-carboxy-7-deazaguanine synthase OS=Endozoicomonas sp. GTF13 OX=2528527 GN=queE PE=3 SV=1

SEQ ID NO: 29876 - protein, 210 aa, Enhydrobacter aerosaccus
  REGION 1..210: note = tr|A0A1T4LA96|A0A1T4LA96_9PROT 7-carboxy-7-deazaguanine synthase OS=Enhydrobacter aerosaccus OX=225324 GN=queE PE=3 SV=1
MSYAIKEIFKTLQGEGAQAGRAAVFCRFSGCNLWSGREEDRAEAQCRFCDTDFVGMDGTLGGRYATADALADAIEQAWGGERPHRFVVLTGGEPLLQVDAPLIEALHARGFEIAVETNGTVEPPDGIDWVCVSPKTTEALKVTSGHELKLVYPQAHLGPETFASLDFRRFSLQPMDGPEVAANTARAIAYCLAHPQWQLSTQTHKHLGIR

SEQ ID NO: 29877 - protein, 240 aa, Enhydrobacter sp.
  REGION 1..240: note = tr|A0A1V2GSP1|A0A1V2GSP1_9PROT 7-carboxy-7-deazaguanine synthase OS=Enhydrobacter sp. H5; OX = 1907940 GN=queE PE=3 SV=1
MPNSTLPIRNTAIPTTDPEAGLKITEIFYSLQGEALTAGLPTIFIRLTGCPLRCVYCDTEYAFVGGERMSLAGILAVCESFPCQRICLTGGEPLAQPNAIALMNLLLSHGYEISLETSGALSVAEVPTAVSKVMDIKTPSSQEADKNLWQNLPYLTAHDQIKFVIMNRDDYDWSKQILADYQLDKKVATVWFSPMFNVEERQANVPTLATDLAEWILADALPVRFQLQLHKIIWADAKGK

SEQ ID NO: 29878 - protein, 238 aa, Enhygromyxa salina
  REGION 1..238: note = tr|A0A2S9YSX8|A0A2S9YSX8_9DELT 7-carboxy-7-deazaguanine synthase OS=Enhygromyxa salina; OX = 215803 GN=queE PE=3 SV=1
MASLRIQERFVSVQGEGALVGVPSSFVRVSGCNLRCVWCDTPRSSWAPEGEATGLDELVEWCAAGPRHVVLTGGEPMLFSPAAELSQALRAAGHHLTIETAGTVWCEGLQADLMSISPKLSHSTPWRRDPKLATMHEAARLNLDVLARLISSYAWQLKFVVRTAALEQLEADLAEIDQLVAELDLPKDAREQILLMPEGVDDTSLRAGYLAAIDSCRARNYRLGLRLHIHLFGHTPGT

SEQ ID NO: 29879 - protein, 246 aa, Enhygromyxa salina
  REGION 1..246: note = tr|A0A0C2CY63|A0A0C2CY63_9DELT 7-carboxy-7-deazaguanine synthase OS=Enhygromyxa salina; OX = 215803 GN=queE PE=3 SV=1
MRAVVSLRIQERFVSVQGEGALVGVPSSFVRVSGCNLRCVWCDTPRSSWTPEGDAATLDEIVAWCAAGPRHVVLTGGEPMLFSPAAELSQALRAAGHHLTVETAGTVWCEGLQADLMSISPKLSHSTPWQRAEQLGRKQLAPMHEAARLNLDVLARLIANYTWQLKFVVRTSSPEQLAADLDEIDQLVDALELPTNAREQILLMPEGTDDASLRAGYLAALDTCQARNFRLGLRLHIHLFGHTPGT

SEQ ID NO: 29880 - protein, 242 aa, Ensifer adhaerens
  REGION 1..242: note = tr|A0A0L8BS50|A0A0L8BS50_ENSAD 7-carboxy-7-deazaguanine synthase OS=Ensifer adhaerens; OX = 106592 GN=queE PE=3 SV=1
MTGAAIRVSEIFGPTIQGEGVLIGQPTVFVRTGGCDYRCSWCDTLHAVDSDYREQWRPMSVEEIWEEVRRLSGGVPLTVSLSGGNPAIQPLGPLIDRGHGEGYRFALETQGSVARDWFADLDVLVLSPKPPSSGMETDFAKLDDCLTMATGTPMTVLKIVVFDDHDYAYARGIAQRYPGLPIYLQPGNHTPPPPEDDSATVDIDGIMNRMLWLVDKVTGDRWFDARVLPQLHVLLWGNRRGV

SEQ ID NO: 29881 - protein, 242 aa, Ensifer adhaerens
  REGION 1..242: note = tr|W8IBH5|W8IBH5_ENSAD 7-carboxy-7-deazaguanine synthase OS=Ensifer adhaerens OV14 OX=1416753 GN=exsE PE=3; SV = 1
MTGAAIRVSEIFGPTIQGEGVLIGQPTVFVRTGGCDYRCSWCDTLHAVDSKYREQWQPMSAEEIWGEVRRLSGGVPLTVSLSGGNPAIQPLGPLIDRGHGEGYRFALETQGSVARDWFADLDVLVLSPKPPSSGMETDFAKLDECLAMAAGRPMTVLKIVIFDDHDYGFAKDVAQRYPSLSVYLQPGNHTPPPPDDDSATVDIDGVMNRMLWLVDKVTGDKWFDARVLPQLHVLLWGNRRGV

SEQ ID NO: 29882 - protein, 245 aa, unidentified
  source 1..245: note = Ensifer alkalisoli
  REGION 1..245: note = tr|A0A1E3V7N0|A0A1E3V7N0_9RHIZ 7-carboxy-7-deazaguanine synthase OS=Ensifer alkalisoli; OX = 1752398 GN=queE PE=3 SV=1
MIGARPAEIRVSEIFGPTIQGEGALIGVPTVFVRTGGCDYRCSWCDSLHAVDSRYRDEWRPMSTEEVWQEVTALSGGTPVMVSLSGGNPAIQPLGDLITCGHAQGYRFALETQGSVARDWFADLDVLVLSPKPPSSGMETDWDAFGACLEASGGKPQTILKIVVFDEADYSYARNAAARYPQLPVYLQPGNHTPPPPEELDAPIDIEGVTERMRWLVERVTEDRWFEARVLPQLHVLLWGNKRGV

SEQ ID NO: 29883 - protein, 245 aa, unidentified
  source 1..245: note = Ensifer glycinis
  REGION 1..245: note = tr|A0A178XXB8|A0A178XXB8_9RHIZ 7-carboxy-7-deazaguanine synthase OS=Ensifer glycinis; OX = 1472378 GN=queE PE=3 SV=1
MTGTRPAEIRVSEIFGPTIQGEGALIGLPTVFVRTGGCDYRCSWCDSLHAVDSEYRDTWRAMTTEEVWSEVTRLSGGLPVMVSLSGGNPAIQPLGNLIARGHRKGYRFALETQGSVARDWFAELDMLVLSPKPPSSGMETDWEALDACLRMAGGRPQVLLKIVVFDEVDYAYARAAAARHPQLPIYLQPGNHTPPPPDDHDAPIDIEGVMERMRWLVDKVIEDRWFEAHVLPQLHVLIWGNRRGV

SEQ ID NO: 29884 - protein, 245 aa, Ensifer sojae
  REGION 1..245: note = tr|A0A249PIR3|A0A249PIR3_9RHIZ 7-carboxy-7-deazaguanine synthase OS=Ensifer sojae CCBAU 05684 OX=716928 GN=queE PE=3 SV=1
MTGSRPAEIRVSEIFGPTIQGEGALIGLPTVFVRTGGCDYRCSWCDSLHAVDSRYRDEWRPMSTEEVWQKVTSLSGGRPLMVSLSGGNPAIQPLGDLIACGHAQGYRFALETQGSVARDWFADLDVLVLSPKPPSSGMETDWDALGDCLQASAGKPQTILKIVVFDEADYSYARHAAARYPQLPVYLQPGNHTPPPPEEHDAPIDIEGVTERMRWLVERITEDRWFEARVLPQLHVLLWGNKRGV

SEQ ID NO: 29885 - protein, 245 aa, Ensifer sp.
  REGION 1..245: note = tr|A0A0Q9D152|A0A0Q9D152_9RHIZ 7-carboxy-7-deazaguanine synthase OS=Ensifer sp. Root278; OX = 1736509 GN=queE PE=3 SV=1
MTGPGETRIRVSEIFGPTIQGEGILIGLPTVFVRTGGCDYRCSWCDTLHAVDSEYRDQWLPMTVEEVWSEVSRLSGSKPLTVSLSGGNPAIQPLGPLIARGREEGYRFALETQGSIAKDWFADLDVLVLSPKPPSSGMKTDWNAFDDCLRMAAGRPEVALKIVVFDERDYAYARDAAGRYPHLPLYLQPGNHTPPPPDDDDATVDIDGIIDRMLWLVGKVTEDRWFEARVLPQLHVLLWGNRRGV

SEQ ID NO: 29886 - protein, 242 aa, Ensifer sp.
  REGION 1..242: note = tr|A0A1C0SSB9|A0A1C0SSB9_9RHIZ 7-carboxy-7-deazaguanine synthase OS=Ensifer sp. LC54; OX = 1873715 GN=queE PE=3 SV=1
MTGAAIRVSEIFGPTIQGEGVLIGQPTVFVRTGGCDYRCSWCDTLHAVDSDYREQWRPMSVEEIWEEVRRLSGGVPLTVSLSGGNPAIQPLGPLIDRGHAEGYRFALETQGSVARDWFADLDVLVLSPKPPSSGMETDFAKLNDCLSMAIGRPMTVLKIVVFDDRDYVYAKDVARRYPSLPVYLQPGNHTPPPPEDDSAAVDIDGVMNRMLWLIDKVTGDKWFDARVLPQLHVLLWGNRRGV

SEQ ID NO: 29887 - protein, 223 aa, unidentified
  source 1..223: note = Enterobacillus tribolii
  REGION 1..223: note = tr|A0A370QSA0|A0A370QSA0_9ENTR 7-carboxy-7-deazaguanine synthase OS=Enterobacillus tribolii OX=1487935 GN=queE PE=3 SV=1
MQYPINELFQTLQGEGYFTGVPAIFIRLQGCPVGCSWCDTKHTWERLAEKETGMEAILTKSAESDAWGAASPAELADIIRRQGYMARHVVITGGEPALYDLLALTLQLESQGFRCQIETSGTHEIRCSDGTWVTVSPKVNMRGGLKVLAQALERADEIKHPVARQRDIDDLDALLATLNDDKGRVIALQPVSQKESATRLCIETCIARNWRLSMQTHKYLNIA

SEQ ID NO: 29888 - protein, 223 aa, unidentified
  source 1..223: note = Enterobacter agglomerans
  REGION 1..223: note = tr|A0A2A7V988|A0A2A7V988_ENTAG 7-carboxy-7-deazaguanine synthase OS=Enterobacter agglomerans OX=549 GN=queE PE=3 SV=1
MFYPINEMFQTLQGEGYYTGVPAIFIRLQGCPVGCSWCDTKHTWEKRADRETSLGDILIKTVESDAWGDADAATLLRSIEQQGWTARHVVITGGEPAIYDLRPLTTILEQHGFQCQIETSGTHAIHCSEQTWVTVSPKVNMRGGYDVLPQALSRADEIKHPVARQRDVDALDLLLAGIDDTKARIIALQPISRKDDATRLCIETCIARNWRLSMQTHKYLNIA

SEQ ID NO: 29889 - protein, 223 aa, unidentified
  source 1..223: note = Enterobacter agglomerans
  REGION 1..223: note = tr|A0A379ABT5|A0A379ABT5_ENTAG 7-carboxy-7-deazaguanine synthase OS=Enterobacter agglomerans OX=549 GN=queE PE=3 SV=1
MQYPINEMFQTLQGEGYYTGVPAIFIRLQGCPVGCSWCDTKHTWEKRTDRETSLGDILIKTVESDAWGDADAATLVSAIAQQGWTARHVVITGGEPAIYDLRPLTTALEQHSFQCQIETSGTHEIHCSERTWVTVSPKVNMRGGYDVLPQALSRADEIKHPVARERDVEALDRLLAGIDDTKARIIALQPISRKDDATRLCIETCIARNWRLSMQTHKYLNIA

SEQ ID NO: 29890 - protein, 223 aa, Enterobacter asburiae
  REGION 1..223: note = tr|A0A0J0G0X2|A0A0J0G0X2_ENTAS 7-carboxy-7-deazaguanine synthase OS=Enterobacter asburiae; OX = 61645 GN=queE PE=3 SV=1
MQYPINEMFQTLQGEGYFTGVPAIFVRLQGCPVGCAWCDTKHTWDKLADREVSLFSILAKTKESDKWGAGSSEDLLAIIGRQGWTARHVVITGGEPCIHDLTPLTELLEKNGYSCQIETSGTHEVRCSHTTWVTVSPKVNMRGGYDVLSQALERADEIKHPVGRVRDIEALDELLATLTDEKQRVIALQPISQKDDATRLCIETCIARNWRLSMQTHKYLNIA

SEQ ID NO: 29891 - protein, 223 aa, Enterobacter asburiae
  REGION 1..223: note = tr|A0A0F3ZPX1|A0A0F3ZPX1_ENTAS 7-carboxy-7-deazaguanine synthase OS=Enterobacter asburiae; OX = 61645 GN=queE PE=3 SV=1
MQYPINEMFQTLQGEGYFTGVPAIFIRLQGCPVGCAWCDTKHTWDKLADREVSLFSILAKTKESDKWGAGSSEDLLAIIGRQGWTARHVVITGGEPCIHDLTPLTELLEKNGYSCQIETSGTHEVRCSHTTWVTVSPKVNMRGGYDVLSQALERADEIKHPVGRVRDIEALDELLATLTDEKQRVIALQPISQKDDATRLCIETCIARNWRLSMQTHKYLNIA

SEQ ID NO: 29892 - protein, 223 aa, unidentified
  source 1..223: note = Enterobacter bugandensis
  REGION 1..223: note = tr|A0A2J7SFZ8|A0A2J7SFZ8_9ENTR 7-carboxy-7-deazaguanine synthase OS=Enterobacter bugandensis OX=881260 GN=queE PE=3 SV=1
MQYPINEMFQTLQGEGYFTGVPAIFIRLQGCPVGCAWCDTKHTWDKLADREVSLFSILAKTKESDKWGAGSAEDLLAIIGRQGWTARHVVITGGEPCIHDLTPLTELLEKNGYSCQIETSGTHEVRCSHTTWVTVSPKVNMRGGYDVLSQALERADEIKHPVGRVRDIEALDELLATLTDEKQRVIALQPISQKEDATRLCIETCIARNWRLSMQTHKYLNIA

SEQ ID NO: 29893 - protein, 223 aa, Enterobacter cancerogenus
  REGION 1..223: note = tr|D2ZJN8|D2ZJN8_9ENTR 7-carboxy-7-deazaguanine synthase OS=Enterobacter cancerogenus ATCC 35316 OX=500639; GN = queE PE=3 SV=1
MQYPINEMFQTLQGEGYFTGVPAIFIRLQGCPVGCAWCDTKHTWDKLADREVSLFSILAKTKESDKWGAGNAEDLLAIIGRQGWTARHVVITGGEPCIHDLMPLTELLEKNGYSCQIETSGTHEVRCSHTTWVTVSPKVNMRGGYDVLSQALERADEIKHPVGRVRDIEALDELLATLTDEKQRIIALQPISQKEDATRLCIETCIARNWRLSMQTHKYLNIA

SEQ ID NO: 29894 - protein, 223 aa, Enterobacter cancerogenus; identical to SEQ ID NO: 29893
  REGION 1..223: note = tr|A0A2J7P024|A0A2J7P024_9ENTR 7-carboxy-7-deazaguanine synthase OS=Enterobacter cancerogenus OX=69218 GN=queE PE=3 SV=1

SEQ ID NO: 29895 - protein, 223 aa, unidentified
  source 1..223: note = Enterobacter chengduensis
  REGION 1..223: note = tr|A0A0F4BH33|A0A0F4BH33_9ENTR 7-carboxy-7-deazaguanine synthase OS=Enterobacter chengduensis OX=2494701 GN=queE PE=3 SV=1
MQYPINEMFQTLQGEGYFTGVPAIFIRLQGCPVGCAWCDTKHTWDKLADREVSLFSILAKTKESDKWGAGSSEDLLAIIGRQGWTARHVVITGGEPCIHDLTPLTELLEKNGYSCQIETSGTHEVRCSHATWVTVSPKVNMRGGYDVLSQALERADEIKHPVGRVRDIEALDELLATLTDEKQRVIALQPISQKEDATRLCIETCIARNWRLSMQTHKYLNIA

SEQ ID NO: 29896 - protein, 223 aa, unidentified
  source 1..223: note = Enterobacter chuandaensis
  REGION 1..223: note = tr|A0A3A3ZRE7|A0A3A3ZRE7_9ENTR 7-carboxy-7-deazaguanine synthase OS=Enterobacter chuandaensis OX=2497875 GN=queE PE=3 SV=1
MQYPINEMFQTLQGEGYFTGVPAIFIRLQGCPVGCAWCDTKHTWDKLADREVSLFSILAKTKESDKWGAGSAEDLLAIIGRQGWTARHVVITGGEPCIHDLTPLTELLEKNGYSCQIETSGTHEVRCSHTTWVTVSPKVNMRGGYDVLSQALERADEIKHPVGRVRDIEALDELLATLTDEKLRVIALQPISQKEDATRLCIETCIARNWRLSMQTHKYLNIA

SEQ ID NO: 29897 - protein, 223 aa, Enterobacter cloacae
  REGION 1..223: note = tr|A0A0A6H7C2|A0A0A6H7C2_ENTCL 7-carboxy-7-deazaguanine synthase OS=Enterobacter cloacae; OX = 550 GN=ygcF PE=3 SV=1
MQYPINEMFQTLQGEGYFTGVPAIFIRLQGCPVGCAWCDTKHTWDKLADREVSLFSILAKTKESDKWGAGSAEDLLAIIGRQGWTARHVVITGGEPCIHDLMPLTELLEKNGYSCQIETSGTHEVRCSHSTWVTVSPKVNMRGGYDVLSQALERADEIKHPVGRVRDIEALDELLATLTDEKQRVIALQPISQKDDATRLCIETCIARNWRLSMQTHKYLNIA

SEQ ID NO: 29898 - protein, 223 aa, Enterobacter cloacae
  REGION 1..223: note = tr|A0A5D9FHQ7|A0A5D9FHQ7_ENTCL 7-carboxy-7-deazaguanine synthase OS=Enterobacter cloacae; OX = 550 GN=ygcF PE=3 SV=1
MQYPINEMFQTLQGEGYFTGVPAIFIRLQGCPVGCAWCDTKHTWDKLADREVSLFSILAKTKESDKWGAGSAEDLLAIIGRQGWTARHVVITGGEPCIHDLMPLTELLEKNGYSCQIETSGTHEVRCSHSTWVTVSPKVNMRGGYDVLLQALERADEIKHPVGRVRDIEALDELLATLTDEKQRVIALQPISQKDDATRLCIETCIARNWRLSMQTHKYLNIA

SEQ ID NO: 29899 - protein, 223 aa, unidentified
  source 1..223: note = Enterobacter genomosp.
  REGION 1..223: note = tr|A0A0X4AY78|A0A0X4AY78_9ENTR 7-carboxy-7-deazaguanine synthase OS=Enterobacter genomosp. O OX=2364150 GN=queE PE=3 SV=1
MQYPINEMFQTLQGEGYFTGVPAIFIRLQGCPVGCAWCDTKHTWDKLADREVSLFSILAKTKESDKWGAGSSEDLLAIIGRQGWTARHVVITGGEPCIHDLTPLTELLEKNGYSCQIETSGTHEVRCSHTTWVTVSPKVNMRGGYDVLSQALERADEIKHPVGRVRDIEALDELLATLTDEKQRVIALQPISQKEDATRLCIETCIARNWRLSMQTHKYLNIA

SEQ ID NO: 29900 - protein, 223 aa, Enterobacter hormaechei; identical to SEQ ID NO: 29897
  REGION 1..223: note = tr|F5S188|F5S188_9ENTR 7-carboxy-7-deazaguanine synthase OS=Enterobacter hormaechei ATCC 49162 OX=888063; GN = nrdG2 PE=3 SV=1

SEQ ID NO: 29901 - protein, 223 aa, Enterobacter hormaechei
  REGION 1..223: note = tr|A0A5A9D884|A0A5A9D884_9ENTR 7-carboxy-7-deazaguanine synthase OS=Enterobacter hormaechei OX=158836 GN=queE PE=3 SV=1
MQYPINEMFQTLQGEGYFTGVPAIFIRLQGCPVGCAWCDTKHTWDKLADREVSLFSILAKTKESDKWGAGSAEDLLAIISRQGWTARHVVITGGEPCIHDLMPLTELLEKNGYSCQIETSGTHEVRCSHSTWVTVSPKVNMRGGYDVLSQALERADEIKHPVGRVRDIEALDELLATLTDEKQRVIALQPISQKDDATRLCIETCIARNWRLSMQTHKYLNIA

SEQ ID NO: 29902 - protein, 223 aa, unidentified
  source 1..223: note = Enterobacter huaxiensis
  REGION 1..223: note = tr|A0A428LPL1|A0A428LPL1_9ENTR 7-carboxy-7-deazaguanine synthase OS=Enterobacter huaxiensis OX=2494702 GN=queE PE=3 SV=1
MQYPINEMFQTLQGEGYFTGVPAIFIRLQGCPVGCAWCDTKHTWDKLADREVSLFSILAKTKESDKWGAGSAEDLLAIIGRQGWTARHVVITGGEPCIHDLTSLTELLEKNGFSCQIETSGTHEVRCSHATWVTVSPKVNMRGGYDVLSQALERADEIKHPVGRVRDIEALDELLGTLTDEKQRVIALQPISQKDDATRLCIETCIARNWRLSMQTHKYLNIA

SEQ ID NO: 29903 - protein, 223 aa, Enterobacter kobei
  REGION 1..223: note = tr|A0A5C1XHU5|A0A5C1XHU5_9ENTR 7-carboxy-7-deazaguanine synthase OS=Enterobacter kobei; OX = 208224 GN=queE PE=3 SV=1
MQYPINEMFQTLQGEGYFTGVPAIFIRLQGCPVGCAWCDTKHTWDMLADREVSLFSILAKTKESDKWGAGSSEDLLAIIGRQGWTARHVVITGGEPCIHDLTPLTELLEKNGYSCQIETSGTHEVRCSHSTWVTVSPKVNMRGGYDVLSQALERADEIKHPVGRVRDIEALDELLATLTDEKQRVIALQPISQKEDATRLCIETCIARNWRLSMQTHKYLNIA

SEQ ID NO: 29904 - protein, 223 aa, Enterobacter kobei
  REGION 1..223: note = tr|A0A2J0PGP1|A0A2J0PGP1_9ENTR 7-carboxy-7-deazaguanine synthase OS=Enterobacter kobei; OX = 208224 GN=queE PE=3 SV=1
MQYPINEMFQTLQGEGYFTGVPAIFIRLQGCPVGCAWCDTKHTWDKLADREVSLFSILAKTKESDKWGAGSSEDLLAIIGRQGWTARHVVITGGEPCIHDLTPLTELLEKNGYSCQIETSGTHEVRCSHSTWVTVSPKVNMRGGYDVLSQALERADEIKHPVGRVRDIEALDELLATLTDEKQRVIALQPISQKEDATRLCIETCIARNWRLSMQTHKYLNIA

SEQ ID NO: 29905 - protein, 223 aa, unidentified
  source 1..223: note = Enterobacter lignolyticus
  REGION 1..223: note = tr|E3G5S7|E3G5S7_ENTLS 7-carboxy-7-deazaguanine synthase OS=Enterobacter lignolyticus (strain SCF1); OX = 701347 GN=queE PE=3 SV=1
MQYPINEMFQTLQGEGYFTGVPAIFIRLQGCPVGCAWCDTKHTWDMLEDREVSLFSILAKTKESDKWGAATAEDLLTAITRQGWTARHVVITGGEPCIHDLTPLTALLEQNGYSCQIETSGTHEVRCSHSTWVTVSPKVNMRGGFEVLSQALHRADEIKHPVGRVRDIEALDELLETLSDDKQRVIALQPISQKDDATRLCIETCIARNWRLSMQTHKYLNIA

SEQ ID NO: 29906 - protein, 223 aa, Enterobacter ludwigii
  REGION 1..223: note = tr|W0BM46|W0BM46_9ENTR 7-carboxy-7-deazaguanine synthase OS=Enterobacter ludwigii OX=299767 GN=queE PE=3; SV = 1
MQYPINEMFQTLQGEGYFTGVPAIFIRLQGCPVGCAWCDTKHTWDKLADREVSLFSILAKTKESDKWGAGSAEDLLAIIGRQGWTARHVVITGGEPCIHDLTPLTELLEKNGYSCQIETSGTHEVRCSHTTWVTVSPKVNMRGGYDVLSQALERADEIKHPVGRVRDIEALDELLATLTDEKQRIIALQPISQKEDATRLCIETCIARNWRLSMQTHKYLNIA

SEQ ID NO: 29907 - protein, 223 aa, Enterobacter ludwigii
  REGION 1..223: note = tr|A0A5A9AV58|A0A5A9AV58_9ENTR 7-carboxy-7-deazaguanine synthase OS=Enterobacter ludwigii; OX = 299767 GN=queE PE=3 SV=1
MQYPINEMFQTLQGEGYFTGVPAIFIRLQGCPVGCAWCDTKHTWDKLADREVSLFSILAKTKESDKWGAGSAEDLLAIIGRQGWTARHVVITGGEPCIHDLTPLTELLEKNGYSCQIETSGTHEVRCSHTTWVTVSPKVNMRGGYDVLSQALERADEIKHPVGRVRDIEALDELLATLTDEKQRIIALQPISQKEDATRLCIGTCIARNWRLSMQTHKYLNIA

SEQ ID NO: 29908 - protein, 223 aa, Enterobacter mori
  REGION 1..223: note = tr|A0A2J0NF63|A0A2J0NF63_9ENTR 7-carboxy-7-deazaguanine synthase OS=Enterobacter mori; OX = 539813 GN=queE PE=3 SV=1
MQYPINEMFQTLQGEGYFTGVPAIFIRLQGCPVGCAWCDTKHTWDKLADREVSLFSILAKTKESDKWGAGSPEDLLAIIGRQGWTARHVVITGGEPCIHDLTPLTELLEKNGYSCQIETSGTHEVRCSHTTWVTVSPKVNMRGGYDVLSQALERADEIKHPVGRVRDIEALDELLATLTDEKQRVIALQPISQKDDATRLCIETCIARNWRLSMQTHKYLNIA

SEQ ID NO: 29909 - protein, 223 aa, unidentified
  source 1..223: note = Enterobacter roggenkampii
  REGION 1..223: note = tr|A0A1S2ADV0|A0A1S2ADV0_9ENTR 7-carboxy-7-deazaguanine synthase OS=Enterobacter roggenkampii OX=1812935 GN=queE PE=3 SV=1
MQYPINEMFQTLQGEGYFTGVPAIFIRLQGCPVGCAWCDTKHTWDKLADREVSLFSILAKTKESDKWGAGSAEDLLAIIGRQGWTARHVVITGGEPCIHDLTPLTELLEKNGYSCQIETSGTHEVRCSHSTWVTVSPKVNMRGGYDVLSQALERADEIKHPVGRVRDIEALDELLAKLTDEKQRVIALQPISQKDDATRLCIETCIARNWRLSMQTHKYLNIA

SEQ ID NO: 29910 - protein, 223 aa, unidentified
  source 1..223: note = Enterobacter roggenkampii
  REGION 1..223: note = tr|A0A5D1UBB9|A0A5D1UBB9_9ENTR 7-carboxy-7-deazaguanine synthase OS=Enterobacter roggenkampii OX=1812935 GN=queE PE=3 SV=1
MQYPINEMFQTLQGEGYFTGVPAIFIRLQGCPVGCAWCDTKHTWDKLADREVSLFSILAKTKESDKWGAGSAEDLLAIIGRQGWTARHVVITGGEPCIHDLTPLTELLEKNGYSCQIETSGTHEVRCSHSTWVTVSPKVNMRGGYDVLSQALERADEIKHPVGRVRDIEALDELLATLTDEKQRVIALQPISQKDDATRLCIETCIARNWRLSMQTHKYLNIA

SEQ ID NO: 29911 - protein, 223 aa, unidentified
  source 1..223: note = Enterobacter sichuanensis
  REGION 1..223: note = tr|A0A0F1AHB3|A0A0F1AHB3_9ENTR 7-carboxy-7-deazaguanine synthase OS=Enterobacter sichuanensis OX=2071710 GN=queE PE=3 SV=1
MQYPINEMFQTLQGEGYFTGVPAIFIRLQGCPVGCAWCDTKHTWDKLADREVSLFSILAKTKESDKWGAGSSEDLLAIIGRQGWTARHVVITGGEPCIHDLTPLTELLEKHGYSCQIETSGTHEVRCSHTTWVTVSPKVNMRGGYDVLSQALERADEIKHPVGRVRDIEALDELLATLTDEKQRVIALQPISQKEDATRLCIETCIARNWRLSMQTHKYLNIA

SEQ ID NO: 29912 - protein, 223 aa, Enterobacter soli
  REGION 1..223: note = tr|A0A198H2I7|A0A198H2I7_9ENTR 7-carboxy-7-deazaguanine synthase OS=Enterobacter soli ATCC BAA-2102 OX=1354262 GN=queE PE=3 SV=1
MQYPINEMFQTLQGEGYFTGVPAIFIRLQGCPVGCAWCDTKHTWDKLADREVSLFSILAKTKESDKWGAGSSEDLLAIIGRQGWTARHVVITGGEPCIHDLTPLTELLEKNGYSCQIETSGTHEVRCSHATWVTVSPKVNMRGGYDVLSQALERADEIKHPVGRVRDIEALDELLATLSDEKQRVIALQPISQKDDATRLCIETCIARNWRLSMQTHKYLNIA

SEQ ID NO: 29913 - protein, 223 aa, Enterobacter sp.
  REGION 1..223: note = tr|A4WDW3|A4WDW3_ENT38 7-carboxy-7-deazaguanine synthase OS=Enterobacter sp. (strain 638) OX=399742; GN = queE PE=3 SV=1
MQYPINEMFQTLQGEGYFTGVPAIFIRLQGCPVGCAWCDTKHTWDKLADREVSLFSILAKTKESDKWGAGSAEDLLAIIGRQGWTARHVVITGGEPCIHDLMSLTDLLEKNGYSCQIETSGTHEVRCSHTAWVTVSPKVNMRGGYDVLSQALERADEIKHPVGRMRDIEALDELLATLTDEKQRIIALQPISQKDDATRLCIETCIARNWRLSMQTHKYLNIA

SEQ ID NO: 29914 - protein, 223 aa, Enterobacter sp.
  REGION 1..223: note = tr|A0A1E5MUI5|A0A1E5MUI5_9ENTR 7-carboxy-7-deazaguanine synthase OS=Enterobacter sp. ku-bf2 OX=1888167 GN=queE PE=3 SV=1
MQYPINEMFQTLQGEGYFTGVPAIFIRLQGCPVGCAWCDTKHTWDKLADREVSLFSILAKTKESDKWGAGSAEDLLAIIGRQGWTARHVVITGGEPCIHDLTPLTELLEKNGYSCQIETSGTHEVRCSHTTWVTVSPKVNMRGGYDVLSQALERADEIKHPVGRVRDIEALDELLATLTDEKQRVIALQPISQKDDATRLCIETCIARNWRLSMQTHKYLNIA

SEQ ID NO: 29915 - protein, 223 aa, unidentified
  source 1..223: note = Enterobacterales bacterium
  REGION 1..223: note = tr|A0A2I0FRE3|A0A2I0FRE3_9GAMM 7-carboxy-7-deazaguanine synthase OS=Enterobacterales bacterium CwR94 OX=2025587 GN=queE PE=3 SV=1
MQYPINEMFQTLQGEGVYTGVPAIFIRLQGCPVGCSWCDTKHTWEKRDDRETGLGDILIKTVESDAWGSADAATLVATVRQQGWTALHVVITGGEPALYDLRPLTAELEAQGFTCQIETSGTHDIHCSEKTWVTVSPKVNMRGGYDVIAQALQRADEIKHPVARLRDIEALDALLATLSDDKSRVIALQPISQKADATALCIETCIARNWRLSMQTHKYLNIA

SEQ ID NO: 29916 - protein, 223 aa, unidentified
  source 1..223: note = Enterobacterales bacterium
  REGION 1..223: note = tr|A0A389M9N9|A0A389M9N9_9GAMM 7-carboxy-7-deazaguanine synthase OS=Enterobacterales bacterium OX=1993870 GN=queE PE=3 SV=1
MQYPINEMFETLQGEGYFTGVPAIFVRLQGCPVGCSWCDTKHTWDKIADREVDVQRILVKTEESDAWGNATAEQLLQIIEQQGYTARHVVITGGEPCIYDLQPLTSLLEQNGFSCQIETSGTHEVRCSVNTWVTVSPKVNMRGGYDILPQALKRADEVKHPVARQRDIDALEALLATLTDEKSRIIALQPISQKEDATKLCIATCIAKNWRLSMQTHKYLNIA

SEQ ID NO: 29917 - protein, 223 aa, unidentified; identical to SEQ ID NO: 27928
  source 1..223: note = Enterobacteriaceae bacterium
  REGION 1..223: note = tr|A0A3C2BIP0|A0A3C2BIP0_9ENTR 7-carboxy-7-deazaguanine synthase OS=Enterobacteriaceae bacterium OX=1849603 GN=queE PE=3 SV=1

SEQ ID NO: 29918 - protein, 223 aa, unidentified
  source 1..223: note = Enterobacteriaceae bacterium
  REGION 1..223: note = tr|A0A2S0VI03|A0A2S0VI03_9ENTR 7-carboxy-7-deazaguanine synthase OS=Enterobacteriaceae bacterium S05 OX=2052938 GN=queE PE=3 SV=1
MQYPINEMFQTLQGEGYFTGVPAIFIRLQGCPVGCAWCDTKHTWDKLADREVSLFSILAKTKESDKWGPASSEDLLAIIGRQGWTARHVVITGGEPCIHDLTPLTSLLEQNGFSCQIETSGTHEVLCSHNTWVTVSPKVNMRGGYDVLSQALQRADEIKHPVGRVRDIEALDELLETLSDDKPRIIALQPISQKEDATRLCIDTCIARNWRLSMQTHKYLNIA

SEQ ID NO: 29919 - protein, 261 aa, Enterorhabdus caecimuris
  REGION 1..261: note = tr|A0A4S4G559|A0A4S4G559_9ACTN 7-carboxy-7-deazaguanine synthase OS=Enterorhabdus caecimuris OX=671266 GN=queE PE=3 SV=1
MVPEEENDGLLDAERHQARHTIAARAQLFPVAEKFVSLNGEGLAAGRPAAFIRFAGCNMWCTYCDTRWANHPLVEVEGWSVPQLLAWVAETGVSCVTLTGGEPLLQPYLPDLVQALLSVESPRPMRVEIETNGSRDLGPMAHLREACAEAGLPGSLHFTVDWKTPTAGEAVSAAMRRENYELLDARDAVKFVVGSEEDLAFMEARADEAGLWDRCQVLVSPVWGAIEPAEIAACLIERGLDRARLQLQLHKIIWPNETKGV

SEQ ID NO: 29920 - protein, 261 aa, Enterorhabdus caecimuris
  REGION 1..261: note = tr|R9KVR1|R9KVR1_9ACTN 7-carboxy-7-deazaguanine synthase OS=Enterorhabdus caecimuris B7 OX=1235794 GN=queE; PE = 3 SV=1
MVPEEENDGLLDAERHQARHTIAARAQLFPVAEKFVSLNGEGLAAGRPAAFIRFAGCNMWCTYCDTRWANHPLVEVEGWSVPQLLAWVAETGVSCVTLTGGEPLLQPYLPDLVQALLAVSDPRPLRVEIETNGSRDLEPMAHLREVCAEAGLPGSLHFTVDWKTPTAGEAVSAAMRRENYELLDARDAVKFVVGSEEDLTFMEARADEAGLWDRCQVLVSPVWGAIEPAEIAACLIERGLDRARLQLQLHKIIWPNETKGV

SEQ ID NO: 29921 - protein, 261 aa, Enterorhabdus sp.
  REGION 1..261: note = tr|A0A4S2FAQ4|A0A4S2FAQ4_9ACTN 7-carboxy-7-deazaguanine synthase OS=Enterorhabdus sp. NM05_H27 OX=2516956 GN=queE PE=3 SV=1
MVPEEENDGLLDAERHQARHTIAARAQLFPVAEKFVSLNGEGLASGRPAAFIRFAGCNMWCTYCDTRWANHPLVEVEGWSVPQLLAWVAETGVSCVTLTGGEPLLQPYLPDLVQALLSVESPRPLRVEIETNGSRDLGPMAHLREAAAEAGLPGSLHFTVDWKTPTAGEAVSAAMRRENYDVLDERDAVKFVVGSEEDLAFMERMADEAGLWDRCTVLASPVWGAIEPAEIAAYLIERGLDRARLQLQLHKIIWPNESRGV

SEQ ID NO: 29922 - protein, 220 aa, Enterovibrio coralii
  REGION 1..220: note = tr|A0A135I8H9|A0A135I8H9_9GAMM 7-carboxy-7-deazaguanine synthase OS=Enterovibrio coralii; OX = 294935 GN=queE PE=3 SV=1
MYNVNEIFETIQGEGTFTGVPSIFVRLQGCPVGCPWCDTRQTWDTLETDKRDFGAVIAKTGDSPLWAETTADEIVDYLNKSYSAKHVVITGGEPCIFDLVPLTTRLEANGYRCQIETSGTYPIKASENTWVTVSPKINMRGKLPVQKCALARANEIKHPVGTESDIEKLEALLADVDVSGKEIALQPISQKPRATVLCIETCIKKNWRLSIQTHKYLDIA

SEQ ID NO: 29923 - protein, 220 aa, Enterovibrio nigricans
  REGION 1..220: note = tr|A0A1T4VD01|A0A1T4VD01_9GAMM 7-carboxy-7-deazaguanine synthase OS=Enterovibrio nigricans DSM 22720 OX=1121868 GN=queE PE=3 SV=1
MYNVNEIFETIQGEGTFTGVPSIFVRLQGCPVGCPWCDTRQTWDTLDTDQRDFGTIIAKSGDSPLWAQTTSAEIVDHLMKSYTAKHVVITGGEPCMFDLVPLTTQLEANGYRCQIETSGTYDVRASASTWVTVSPKINMRGKLPVLKCALARANEIKHPVGTESDIEKLEDLLAGIDLSEKEVALQPISQKPKATSLCIETCIKKNWRLSIQTHKYLDIA

SEQ ID NO: 29924 - protein, 221 aa, Enterovibrio norvegicus
  REGION 1..221: note = tr|A0A2N7LAF8|A0A2N7LAF8_9GAMM 7-carboxy-7-deazaguanine synthase OS=Enterovibrio norvegicus OX=188144 GN=queE PE=3 SV=1
MYNVNEIFETIQGEGTFTGVPSVFVRLQGCPVGCPWCDTRQTWDTLPTDERDFGAIITKTGDSPIWAAVDANDILTHLQNSYTAKHVVITGGEPCIYDLRPLTERLESAGYRCQIETSGTYPVQTTEGTWVTVSPKINMRGKLPVLESALERANEIKHPVGTESDIEKLDALLDGIALRDNAEIALQPISQKPRATALCIDTCIKRNWRLSIQTHKYLDIA

SEQ ID NO: 29925 - protein, 220 aa, Enterovibrio norvegicus
  REGION 1..220: note = tr|A0A1E5C176|A0A1E5C176_9GAMM 7-carboxy-7-deazaguanine synthase OS=Enterovibrio norvegicus FF-454 OX=1185651 GN=queE PE=3 SV=1
MYNVNEIFETIQGEGTFTGVPSVFVRLQGCPVGCPWCDTRQTWDTLPNDERDFGTVIAKTGDSPTWTSVSAEHILAHLTQSYTAKHVVITGGEPCIFDLFPLTTLLESAGYRCQIETSGTYKVKATVNTWVTVSPKINMRGKLPVLNEALKRANEIKHPVGTESDIEKLDALLEGIDLSNKEVALQPISQKPRATELCIKTCIRRNWRLSIQTHKYLDIA

SEQ ID NO: 29926 - protein, 220 aa, unidentified
  source 1..220: note = Enterovibrio pacificus
  REGION 1..220: note = tr|A0A1C3EPS1|A0A1C3EPS1_9GAMM 7-carboxy-7-deazaguanine synthase OS=Enterovibrio pacificus OX=1080227 GN=queE PE=3 SV=1
MYKVNEIFETIQGEGIFTGLPSIFVRLQGCPVGCAWCDTKQTWDVLEQDHRDFGEILAKTSDSPLWTSITTQSIVQHLQDSYHAKHVVITGGEPCVYDLQPLTTALEAAGYQCQIETSGTYPIQATDSTWVTVSPKIGMRGKLPVLTECLERANEIKHPVGTQSDIEKLDELLEGVVLKDKTVALQPISQKPRATALCIDTCIKRNWRLSIQTHKYLDIA

SEQ ID NO: 29927 - protein, 221 aa, Enterovibrio sp.
  REGION 1..221: note = tr|A0A4Q0Z0L0|A0A4Q0Z0L0_9GAMM 7-carboxy-7-deazaguanine synthase OS=Enterovibrio sp. CAIM 600 OX=1278244 GN=queE PE=3 SV=1
MYRINEIFETIQGEGVFTGLPSIFIRLQGCPVGCSWCDTKQTWDVFEQDERDFGEILAKESDSPNWTSLTVDNIIEHLNRSYTAKHIVITGGEPCIYDLNPLTEALEQNGYQCQIETSGTYTIHATTSTWVTVSPKIGMRGKLPVLAECLERANEIKHPVGTESDIEKLDALIEDVRLRDNVTIALQPISQKQRATQLCIDVCVKRNWRLSIQTHKYLNIA

SEQ ID NO: 29928 - protein, 211 aa, unidentified
  source 1..211: note = Enterovirga rhinocerotis
  REGION 1..211: note = tr|A0A4R7CA77|A0A4R7CA77_9RHIZ 7-carboxy-7-deazaguanine synthase OS=Enterovirga rhinocerotis OX=1339210 GN=queE PE=3 SV=1
MKRYAVKEIFYTLQGEGRQSGRAAVFCRFAGCNLWTGRDGDRAAAACRFCDTDFVGVDGEGGGFFRGAEALADAVAGCWGPGEERRFCVLTGGEPLLQVDEALVDALHARGFEIAVETNGTLEPPRGIDWIAVSPKGEAPLRLTRGNELKLVYPQEDAPPERFAGLAFDDFCLQPMDGPDSARNTALAVAYCKAHPRWRLSLQTHKWLGIP

SEQ ID NO: 29929 - protein, 235 aa, unidentified
  source 1..235: note = Epibacterium mobile
  REGION 1..235: note = tr|A0A1B1A355|A0A1B1A355_9RHOB 7-carboxy-7-deazaguanine synthase OS=Epibacterium mobile F1926 OX=1265309 GN=queE PE=3 SV=1
MTLRIAEIFGPTIQGEGALIGEPTVFVRAGGCDYRCSWCDSLHAVESQYRHSWAPMETDAVWAKVHKLSGGQPLTVSLSGGNPAIQDFGPLITKGRAVGYRFACETQGSIARPWFAELDTLVLSPKPPSSGENVDWDAFDSCRTIGAGARQQVIKIVIFDETDYQWAREVHRHHSDLALYLQPGNPEVDPATPVDLQTLANRLGWLTEKAMADGWFAPRILPQLHVLIWGNKRGV

SEQ ID NO: 29930 - protein, 235 aa, unidentified
  source 1..235: note = Epibacterium mobile
  REGION 1..235: note = tr|A0A1H3DH45|A0A1H3DH45_9RHOB 7-carboxy-7-deazaguanine synthase OS=Epibacterium mobile; OX = 379347 GN=queE PE=3 SV=1
MTLRIAEIFGPTIQGEGALIGEPTVFVRAGGCDYRCSWCDTLHAVETQYRHSWAPMETDAVWAKVHKLSGGQPLTVSLSGGNPAIQDFGPLITKGRAAGYRFACETQGSIARPWFAELDTLVLSPKPPSSGENVDWDAFDSCRAIGAGARQQVMKIVIFDETDYQWAREVHRRHSDLALYLQPGNPEVDPATPVDLQTLANRLGWLTEKAMADGWFAPRILPQLHVLIWGNKRGV

SEQ ID NO: 29931 - protein, 235 aa, unidentified
  source 1..235: note = Epibacterium multivorans
  REGION 1..235: note = tr|A0A0P1GV14|A0A0P1GV14_9RHOB 7-carboxy-7-deazaguanine synthase OS=Epibacterium multivorans OX=928856 GN=queE PE=3 SV=1
MTLRIAEIFGPTIQGEGALIGEPTVFVRTGGCDYRCSWCDSLHAVDSAYRHEWKPMTPKAVWNEVRHLSGGRPLTVSLSGGNPAIQDFAPVIALGHTEGYRFACETQGSIAKPWFADLDTLVLSPKPPSSGEAVDWDAFDACLKAAGDRPQVVLKIVVFDKTDYAWAKAASERYPGLPLYLQPGNPEVDPETPIETQDSLDRMLWLVDKVTRDRWFTPRILPQLHVLLWGNKRGV

SEQ ID NO: 29932 - protein, 235 aa, unidentified
  source 1..235: note = Epibacterium ulvae
  REGION 1..235: note = tr|A0A1G5PJN5|A0A1G5PJN5_9RHOB 7-carboxy-7-deazaguanine synthase OS=Epibacterium ulvae; OX = 1156985 GN=queE PE=3 SV=1
MTLRIAEIFGPTIQGEGALIGEPTVFVRAGGCDYRCSWCDSLHAVDSAFRHTWTPMQAADVWQQVLDLSGDRPLTVSISGGNPAIQDFAPVIALGQTAGYRFACETQGSIAKPWFAELNTLVLSPKPPSSGETVDWDAFDACLAAAGEAPEVVLKIVIFDETDYDWAKEVADRYAQLPLYLQPGNPEVDPEIPVETQDTLDRLLWLVDKTTAEGWFTPRILPQLHVLLWGNKRGV

SEQ ID NO: 29933 - protein, 236 aa, unidentified
  source 1..236: note = Epsilonproteobacteria bacterium
  REGION 1..236: note = tr|A0A496XTU5|A0A496XTU5_9PROT 7-carboxy-7-deazaguanine synthase OS=Epsilonproteobacteria bacterium OX=2026809 GN=queE PE=3 SV=1
MQSVKMGIHSIYLATEGEGIHIGRPQIFVRFQGCDIGCRNCDSKETWAFKGAKRPLESILLEIHNIGLKGKIKHLSITGGDPLNEVHLPGLQALLIELKKQGYYINIEAAGTKVVEEVFQLVDFISFDFKTPSTGVSTHPELILKMQQDFPGKFQVKAVVESEEDFTATHKAYLQLKERLGDISFDWCLTPSFNPREDFPMERFIMVIECNQKFGGPFKVIGQQHKWIYGSNAKNK

SEQ ID NO: 29934 - protein, 252 aa, unidentified
  source 1..252: note = Epsilonproteobacteria bacterium
  REGION 1..252: note = tr|A0A426VX90|A0A426VX90_9PROT 7-carboxy-7-deazaguanine synthase OS=Epsilonproteobacteria bacterium (ex Lamellibrachia satsuma) OX=2496635 GN=queE; PE = 3 SV=1
MFYLTEQFFSIQGEGKYAGVPSYFLRTGGCNLSCPGFAAAYEVNGELRLGCDTYFAVDSAFAKSWIKVNDSTALIKRLQQEFKTIGYHPDVVITGGEPLMYYSDPVFYQVILWLLEQGIQITFETNGTIEIDFEKYPAYKSCIFALSIKLANSGEPSQKRIIPQALKNIQSYAKESFLKFTIDKNLVETTAIKEINQIREILPKLEVFCMPVGESRDTIWRNDRAVFEFCMKHNFRYSDRLHIRVFDTTQGV

SEQ ID NO: 29935 - protein, 218 aa, unidentified
  source 1..218: note = Epulopiscium sp.
  REGION 1..218: note = tr|A0A1V2YHT0|A0A1V2YHT0_9FIRM 7-carboxy-7-deazaguanine synthase OS=Epulopiscium sp. Nuni2H_MBin001 OX=1884656 GN=queE PE=3 SV=1
MKVVEKFVSIDGEGPMAGELATFVRFEGCNLRCSWCDTSYSWDGESESLTASQIYDYIISTGINHITLTGGEPLLHEDIEVLLAKLSDNYNLIVNIETNGSVLIAPFKQKFASNIRYVIDYKLPDSGMTNKMDIANLKAVTANDTYKFVIASSQDLEKAYELICEYDLNYRCNVHLSPVQEQINPQVIVDYMKQQAIQNIRLQLQLHKFIWPKECRGV

SEQ ID NO: 29936 - protein, 217 aa, unidentified
  source 1..217: note = Epulopiscium sp.
  REGION 1..217: note = tr|A0A1S9CU90|A0A1S9CU90_9FIRM 7-carboxy-7-deazaguanine synthase OS=Epulopiscium sp. Nele67-Bin004 OX=1764962 GN=queE PE=3 SV=1
MKIVEKFVSIDGEGPMAGELAVFVRFLGCNLRCSWCDTSYSWEEEHTNEEMTPKEVYTYIKQTNISHVTLTGGEPLIQQGIYELLDILDSDSSLLVHIETNGSVDIKPFKQRYKNIRYILDYKLGESTMTQKMCEKNLDQVGQNDVYKFVVASDADLQQAYQIIKKYNLPCKVYLSAVAEKLSPQQVVNFMIEKQLEGVKLQLQLHKFIWPKESRGV

SEQ ID NO: 29937 - protein, 255 aa, Erwinia amylovora
  REGION 1..255: note = tr|D4HWL4|D4HWL4_ERWAC 7-carboxy-7-deazaguanine synthase OS=Erwinia amylovora (strain CFBP1430) OX=665029; GN = ygcF PE=3 SV=1
MIRPDLIRTLCLALSVQSAIICGLYSPPVEKLMQYPINEMFQTLQGEGVYTGVPAIFIRLQGCPVGCSWCDTKHTWDKLANRETSLGDILLKTVESDAWGAADAPALLETIRRHGWTAKHIVITGGEPCIHDLTPLTAALQGSGFSCQIETSGTHEVHCTAETWVTVSPKVNMRGGYDVLNQALVRADEVKHPVARQRDVDALDDLLATLSDNKARIIALQPVSQKADATQLCIDTCIARNWRLSMQTHKYLNIA

SEQ ID NO: 29938 - protein, 223 aa, Erwinia amylovora
  REGION 1..223: note = tr|E5B284|E5B284_ERWAM 7-carboxy-7-deazaguanine synthase OS=Erwinia amylovora ATCC BAA-2158 OX=889211; GN = ygcF PE=3 SV=1
MQYPINEMFQTLQGEGVYTGVPAIFIRLQGCPVGCSWCDTKHTWDKLANRETSLGDILLKTVESDAWGAADAPALLETIRRHGWTAKHIVITGGEPCIYDLTPLTAALQGSGFSCQIETSGTHEVHCTAETWVTVSPKVNMRGGYDVLNQALVRADEVKHPVARQRDVDALDDLLATLSDNKARIIALQPVSQKADATQLCIDTCIARNWRLSMQTHKYLNIA

SEQ ID NO: 29939 - protein, 223 aa, Erwinia aphidicola
  REGION 1..223: note = tr|A0A4R6PB31|A0A4R6PB31_ERWAP 7-carboxy-7-deazaguanine synthase OS=Erwinia aphidicola; OX = 68334 GN=queE PE=3 SV=1
MQYPINEMFQTLQGEGVYTGVPAIFIRLQGCPVGCSWCDTKHTWDKLADRETSLGDILLKTVETDAWGAADAAALLGVIRQHGWTAKHVVITGGEPCIHDLTPLTAALQENGFSCQIETSGTHEVLCTPETWVTVSPKVNMRGGYDVLNQALIRADEVKHPVARQRDVDALDELLATLSDEKTRIIALQPISQKDDATRLCIETCIARNWRLSMQTHKYLNIA

SEQ ID NO: 29940 - protein, 223 aa, Erwinia billingiae
  REGION 1..223: note = tr|D8MW65|D8MW65_ERWBE 7-carboxy-7-deazaguanine synthase OS=Erwinia billingiae (strain Eb661) OX=634500; GN = queE PE=3 SV=1
MQYPINEMFQTLQGEGFYTGVPAIFIRLQGCPVGCSWCDTKHTWDKLADRETSLGDILTKTVETDAWGSANAAALLAVIANHGWTARHIVITGGEPCIHDLTPLTATLQQHGFSCQIETSGTHEVLCSAETWVTVSPKVNMRGGYDVLNQALVRADEVKHPVARQRDVEALQALLATLNDDKPRIIALQPISQKDDATKLCIETCIKHNWRLSMQTHKYLNIA

SEQ ID NO: 29941 - protein, 223 aa, Erwinia billingiae
  REGION 1..223: note = tr|A0A5J6LS79|A0A5J6LS79_9GAMM 7-carboxy-7-deazaguanine synthase QueE OS=Erwinia billingiae OX=182337 GN=queE PE=4 SV=1
MQYPINEMFQTLQGEGFYTGVPAIFIRLQGCPVGCSWCDTKHTWDKLADRETSLGDILTKTVETDAWGSADAAALLAVIANHGWTARHIVITGGEPCIHDLTPLTQTLQQHGFSCQIETSGTHEVLCSAETWVTVSPKVNMRGGYDVLNQALVRADEVKHPVARQRDVEALQALLATLNDDKPRIIALQPISQKDDATKLCIETCIKHNWRLSMQTHKYLNIA

SEQ ID NO: 29942 - protein, 223 aa, unidentified
  source 1..223: note = Erwinia citreus
  REGION 1..223: note = tr|A0A358L733|A0A358L733_ERWCI 7-carboxy-7-deazaguanine synthase OS=Erwinia citreus; OX = 558 GN=queE PE=3 SV=1
MQYPINEMFQTLQGEGFYTGVPAIFIRLQGCPVGCSWCDTKHTWDKLADRETSLGDILLKTVETDAWGAADAEALLAVITRHGWTARHVVITGGEPCIHDLTPLTQALEQQGFSCQIETSGTHPVQCSEKTWVTVSPKVNMRGGYDVLSQALVRADEVKHPVARQRDVDALDALLATLNDSKPRIIALQPISQKDDATRLCIETCIARNWRLSMQTHKYLNIA

SEQ ID NO: 29943 - protein, 223 aa, unidentified
  source 1..223: note = Erwinia gerundensis
  REGION 1..223: note = tr|A0A0U5L6R0|A0A0U5L6R0_9GAMM 7-carboxy-7-deazaguanine synthase OS=Erwinia gerundensis; OX = 1619313 GN=queE PE=3 SV=1
MQYPINEMFQTLQGEGFYTGVPAIFIRMQGCPVGCSWCDTKHTWDKLANRETALGDILVKTEESDAWGSADAATLIQTIADQQWTARHVVITGGEPAIYDLRPLTESLEQAGFSCQIETSGTHEIRCSSATWVTVSPKVNMRGGYDVIAQALQRADEVKHPVGRQRDIDELELLLSTLKDDKSRIIALQPISQKDAATRLCIETCIARNWRLSMQTHKYLNIA

SEQ ID NO: 29944 - protein, 223 aa, unidentified
  source 1..223: note = Erwinia iniecta
  REGION 1..223: note = tr|A0A0L7T1C5|A0A0L7T1C5_9GAMM 7-carboxy-7-deazaguanine synthase OS=Erwinia iniecta; OX = 1560201 GN=queE PE=3 SV=1
MQYPINEMFQTLQGEGFYTGVPAIFIRLQGCPVGCSWCDTKHTWDKLADRETSLGDILIKTVETDAWGSADADALLATIAQQGWTARHVVITGGEPSIYDLTPLTEALETAGFSCQIETSGTHEVQCSARTWVTVSPKVNMRGGYDVLSQALIRADEIKHPVARQRDIEALEALLATLSDDKPRIVALQPISQKEDATKLCIETCIARNWRLSMQTHKYLNIA

SEQ ID NO: 29945 - protein, 223 aa, Erwinia mallotivora
  REGION 1..223: note = tr|A0A014N6B9|A0A014N6B9_9GAMM 7-carboxy-7-deazaguanine synthase OS=Erwinia mallotivora; OX = 69222 GN=queE PE=3 SV=1
MQYPINEMFQTLQGEGFYTGVPAIFIRLQGCPVGCSWCDTKHTWDKLASRETALGDILLKTVESDAWGMADAQALLAVIGQHGWTARHVVITGGEPCIYDLTPLTEYLEQQGYRCQIETSGTHQVLCSSATWVTVSPKVNMRGGYDVLNQALVRADEVKHPVARQRDIDALDALLVTLDDQKSRIVALQPISQKKDATQLCIETCIARNWRLSMQTHKYLNIA

SEQ ID NO: 29946 - protein, 223 aa, Erwinia persicina
  REGION 1..223: note = tr|A0A3S7RZH0|A0A3S7RZH0_9GAMM 7-carboxy-7-deazaguanine synthase OS=Erwinia persicina; OX = 55211 GN=queE PE=3 SV=1
MQYPINEMFQTLQGEGLYTGVPAIFIRLQGCPVGCSWCDTKHTWDKLADRETSLGDILLKTVETDAWGAADAQALIDVIRQHGWTAKHIVITGGEPCIHDLTPLTAALQQQGFGCQIETSGTHEVRCTPDTWVTVSPKVNMRGGYDVLNQALVRADEVKHPVARQRDVDALDALLATLSDDKARIIALQPISQKADATKLCIETCIARNWRLSMQTHKYLNIA

SEQ ID NO: 29947 - protein, 223 aa, Erwinia persicina
  REGION 1..223: note = tr|A0A4U3FE95|A0A4U3FE95_9GAMM 7-carboxy-7-deazaguanine synthase OS=Erwinia persicina; OX = 55211 GN=queE PE=3 SV=1
MQYPINEMFQTLQGEGLYTGVPAIFIRLQGCPVGCSWCDTKHTWDKLADRETSLGDILLKTVETDAWGAADAQALIGVIRQHGWTAKHIVITGGEPCIHDLTPLTAALEQEGFGCQIETSGTHEVRCTPETWVTVSPKVNMRGGYDVLNQALVRADEVKHPVARQRDVDALDTLLATLSDDKARIIALQPISQKADATKLCIETCIARNWRLSMQTHKYLNIA

SEQ ID NO: 29948 - protein, 224 aa, Erwinia piriflorinigrans
  REGION 1..224: note = tr|V5Z587|V5Z587_9GAMM 7-carboxy-7-deazaguanine synthase OS=Erwinia piriflorinigrans CFBP 5888 OX=1161919; GN = ygcF PE=3 SV=1
MQYPINEMFQTLQGEGFYTGVPAIFIRLQGCPVGCSWCDTKHTWDKLANRETSLGDILLKTVETDAWGAADAPALLETIRRHGWTAKHIVITGGEPCIHDLTPLTATLQDSGFSCQIETSGTHEVSCTAQTWVTVSPKVNMRGGYDVLHQALVRADEVKHPVARQRDVDALDELLATLNDDNKARIIALQPISQKADATQLCIDTCIARNWRLSMQTHKYLNIA

SEQ ID NO: 29949 - protein, 223 aa, Erwinia psidii
  REGION 1..223: note = tr|A0A3N6UWC1|A0A3N6UWC1_9GAMM 7-carboxy-7-deazaguanine synthase OS=Erwinia psidii; OX = 69224 GN=queE PE=3 SV=1
MQYPINEMFQTLQGEGFYTGVPAIFIRLQGCPVGCSWCDTKHTWDKQANRETDLGDILQKTVESDAWGAANAEALLAVITQQGWTAQHVVITGGEPCIYDLVPLTDYLEQHGFSCQIETSGTHPVRCSAATWVTVSPKVNMRGGYDVLNQALVRADEVKHPVARQRDVDALDLLLSTLHDDKNRIVALQPISLKEDATRLCIETCIARNWRLSMQTHKYLNIA

SEQ ID NO: 29950 - protein, 277 aa, Erwinia pyrifoliae
  REGION 1..277: note = tr|D2T5M0|D2T5M0_ERWP6 7-carboxy-7-deazaguanine synthase OS=Erwinia pyrifoliae (strain DSM 12163 / CIP 106111 / Ep16/96) OX=644651 GN=ygcF PE=3 SV=1
MIDAGEGRQALHPLLRYALSVQIIRPDTIRTLCLALSAQSAIICARHLPPVEKLMQYPINEMFQTLQGEGFYTGVPAIFIRLQGCPVGCSWCDTKHTWDKLADRETSLGDILLKTVETDAWGAADAPALLETIRRHGWTAKHIVITGGEPCIYDLTPLTAALQDSGFSCQIETSGTHQVRCTAQTWVTVSPKVNMRGGYDVLNQALVRADEVKHPVARQRDVDALDELLATLNDNKARIIALQPISQKADATQLCIDTCIARNWRLSMQTHKYLNIA

SEQ ID NO: 29951 - protein, 223 aa, Erwinia rhapontici
  REGION 1..223: note = tr|A0A4R7GIQ5|A0A4R7GIQ5_ERWRD 7-carboxy-7-deazaguanine synthase OS=Erwinia rhapontici; OX = 55212 GN=queE PE=3 SV=1
MQYPINEMFQTLQGEGLYTGVPAIFIRLQGCPVGCSWCDTKHTWDKLADRETSLGDILLKTVETDAWGAADAEALIGVIRQHGWTAKHIVITGGEPCIHDLTPLTAALQQHGFGCQIETSGTHDVRCTPETWVTVSPKVNMRGGYDVLHQALVRADEVKHPVARQRDVDALDDLLATLSDDKARIIALQPISQKDDATKLCIETCIARNWRLSMQTHKYLNIA

SEQ ID NO: 29952 - protein, 223 aa, Erwinia sp.
  REGION 1..223: note = tr|E3DHJ4|E3DHJ4_ERWSE 7-carboxy-7-deazaguanine synthase OS=Erwinia sp. (strain Ejp617) OX=215689 GN=ygcF; PE = 3 SV=1
MQYPINEMFQTLQGEGFYTGVPAIFIRLQGCPVGCSWCDTKHTWDKLANRETSLGDILLKTVETDAWGAADAPALLETIRRHGWTAKHIVITGGEPCIYDLTPLTAALQDSGFSCQIETSGTHQVRCTAQTWVTVSPKVNMRGGYDVLNQALARADEVKHPVARQRDVDALDELLATLNDNKARIIALQPISQKADATQLCIDTCIARNWRLSMQTHKYLNIA

SEQ ID NO: 29953 - protein, 223 aa, Erwinia sp.
  REGION 1..223: note = tr|A0A0Q4NN66|A0A0Q4NN66_9GAMM 7-carboxy-7-deazaguanine synthase OS=Erwinia sp. Leaf53; OX = 1736225 GN=queE PE=3 SV=1
MQYPINEMFQTLQGEGIYTGVPAIFIRLQGCPVGCSWCDTKHTWDKLADRETSLGDILLKTAETDAWGAADAAALIAVVRQHGWTAQHIVITGGEPCIHDLTPLTAELEQQGFSCQIETSGTHEVRCTATTWVTVSPKVNMRGGYDVLHSALVRADEVKHPVARQRDVDALDDLLATLSDSKARIIALQPISQKDDATKLCIDTCIARNWRLSMQTHKYLNIA

SEQ ID NO: 29954 - protein, 223 aa, Erwinia tasmaniensis
  REGION 1..223: note = tr|B2VFY6|B2VFY6_ERWT9 7-carboxy-7-deazaguanine synthase OS=Erwinia tasmaniensis (strain DSM 17950 / CIP 109463 / Et1/99) OX=465817 GN=queE PE=3 SV=1
MQYPINEMFQTLQGEGVYTGVPAIFIRLQGCPVGCSWCDTKHTWDKLANRETSLGDILLKTVETDAWGAADAPALLETIRRHGWTAKHIVVTGGEPCIHDLVPLTAALQDAGFSCQIETSGTHEVSCTAQTWVTVSPKVNMRGGYDVLNQALVRADEVKHPVARQRDVEALDELLGTLNDNKARIIALQPISQKADATQLCIDTCIARNWRLSMQTHKYLNIA

SEQ ID NO: 29955 - protein, 223 aa, Erwinia tracheiphila
  REGION 1..223: note = tr|A0A345CTG3|A0A345CTG3_9GAMM 7-carboxy-7-deazaguanine synthase OS=Erwinia tracheiphila; OX = 65700 GN=queE PE=3 SV=1
MQYPINEMFQTLQGEGFYTGVPAIFIRLQGCPVGCSWCDTKHTWDKLASRETSMGDILIKTVESDAWGAADAQTLHAMMVQQGWAARHVVITGGEPCIYDLTPLTEYLEQLGFSCQIETSGTHTVQCSAGTWVTVSPKVNMRGGYDVLDQALVRADEVKHPVARQRDVEALDKLLARLRDEKSRIVALQPISQKDEATRLCIETCIARNWRLSMQTHKYLNIA

SEQ ID NO: 29956 - protein, 223 aa, Erwinia tracheiphila
  REGION 1..223: note = tr|A0A0M2K7J9|A0A0M2K7J9_9GAMM 7-carboxy-7-deazaguanine synthase OS=Erwinia tracheiphila; OX = 65700 GN=queE PE=3 SV=1
MQYPINEMFQTLQGEGFYTGVPAIFIRLQGCPVGCSWCDTKHTWDKLASRETSMGDILIKTVESDAWGAADAQTLHAMMVQQGWAARHVVITGGEPCIYDLTPLTEYLEQLGFSCQIETSGTHTVQCSAGTWVTVSPKVNMRGGYDVLVQALVRADEVKHPVARQRDVEALDKLLARLRDEKSRIVALQPISQKDEATRLCIETCIARNWRLSMQTHKYLNIA

SEQ ID NO: 29957 - protein, 223 aa, Erwinia typographi
  REGION 1..223: note = tr|A0A0A3Z6Y9|A0A0A3Z6Y9_9GAMM 7-carboxy-7-deazaguanine synthase OS=Erwinia typographi; OX = 371042 GN=queE PE=3 SV=1
MQYPINEMFQTLQGEGFYTGVPAIFIRLQGCPVGCSWCDTKHTWDKLADRETSLGDILLKTIESDAWGAADAGALLKVIAAQGWTARHVVITGGEPCIHDLTPLTDTLQQQGFSCQIETSGTHEVRCSAETWVTVSPKVNMRGGYDVLHQALVRADEVKHPVARQRDVEALQALLATLSDEKARIVALQPISQKDDATRLCIETCIKHNWRLSMQTHKYLNIA

SEQ ID NO: 29958 - protein, 223 aa, unidentified
  source 1..223: note = Erwiniaceae bacterium
  REGION 1..223: note = tr|A0A3D5MCB7|A0A3D5MCB7_9GAMM 7-carboxy-7-deazaguanine synthase OS=Erwiniaceae bacterium; OX = 2053552 GN=queE PE=3 SV=1
MQYPINEMFQTLQGEGFYTGVPAIFIRLQGCPVGCSWCDTKHTWDKLADRETSLGDILIKTVESDAWGAADADALLATIKRQQWTARHVVITGGEPCIHDLTPLTAALQQAGFSCQIETSGTHEVQCSPETWVTVSPKVNMRGGYDVLNQALARADEIKHPVARQRDIDALDELLARLENEKARIVALQPISQKEDATRLCIATCIARNWRLSMQTHKYLNIA

SEQ ID NO: 29959 - protein, 220 aa, unidentified
  source 1..220: note = Erysipelatoclostridium ramosum
  REGION 1..220: note = tr|A0A3E3EH82|A0A3E3EH82_9FIRM 7-carboxy-7-deazaguanine synthase; OS = Erysipelatoclostridium ramosum OX=1547 GN=queE PE=3 SV=1
MNNYKVVEKFISINGEGSRAGQLAAFIRFHYCNLNCSYCDTRYANDSNSNYELLSAQNILDYLKANKVVNVTLTGGEPLLQQNIDYLIDLLLKNGFSVEIETNGSIDIKPFIKETRPIFTLDYKVPSSTMENEMCLNNYQYLTKNDVVKFVVSNLSDLNKAKEIIDTYDLVNRTKVYFSPVFGKIEPRMIVDYMVKHHLNGINMQLQMHKFIWDINQRGV

SEQ ID NO: 29960 - protein, 220 aa, unidentified
  source 1..220: note = Erysipelatoclostridium ramosum
  REGION 1..220: note = tr|B0N7X9|B0N7X9_9FIRM 7-carboxy-7-deazaguanine synthase OS=Erysipelatoclostridium ramosum DSM 1402; OX = 445974 GN=queE PE=3 SV=1
MNNYKVVEKFISINGEGSRAGQLAAFIRFHYCNLNCSYCDTRYANDSNSNYELLSAQNILDYLKANKVVNVTLTGGEPLLQQNIDYLIDLLLKNGFSVEIETNGSIDIKPFIKETRPIFTLDYKVPSSTMENEMCLNNYQYLTKNDVVKFVVSNLSDLNKAKEIIDTYDLVNRTKVYFSPVFGKIEPRMIVDYMVKHHLNGINMQLQMHKFIWDVNQRGV

SEQ ID NO: 29961 - protein, 220 aa, unidentified
  source 1..220: note = Erysipelatoclostridium sp.
  REGION 1..220: note = tr|A0A1Y4MWT7|A0A1Y4MWT7_9FIRM 7-carboxy-7-deazaguanine synthase; OS = Erysipelatoclostridium sp. An173 OX=1965571 GN=queE; PE = 3 SV=1
MNNFKVVEKFISINGEGSKAGQLAAFIRFQGCNLNCSYCDSKYANSDDAKYSLMTEEEIINYLNENKIKNVTLTGGEPLLQKNIKSLIFELLKLNYNVEIETNGSVNIKPFISDLRPIFTLDYKTPSSLMENYMNEKNYNYLTKDDVVKFVVGNQKDLITAKNIIDKYDLINKAQVYFSPIYGQIDPKEIVAFMIENQLNGVNFQLQLHKYIWNPNMRGV

SEQ ID NO: 29962 - protein, 220 aa, unidentified; identical to SEQ ID NO: 29961
  source 1..220: note = Erysipelatoclostridium sp.
  REGION 1..220: note = tr|A0A1Y4QTG4|A0A1Y4QTG4_9FIRM 7-carboxy-7-deazaguanine synthase; OS = Erysipelatoclostridium sp. An15 OX=1965566 GN=queE PE=3; SV = 1

SEQ ID NO: 29963 - protein, 217 aa, unidentified
  source 1..217: note = Erysipelotrichaceae bacterium
  REGION 1..217: note = tr|A0A3G9J379|A0A3G9J379_9FIRM 7-carboxy-7-deazaguanine synthase OS=Erysipelotrichaceae bacterium SG0102 OX=2487118 GN=queE PE=3 SV=1
MNYKVVEIFDSINGEGPLAGRLSTFVRFASCNLRCHYCDTRYAYDHPQYTLMSLAEILTRIEEASLDLVTLTGGEPLATPHVDVLIEKLGEMGKHVEIETNGSIDIAPFHRLAHRPSFTLDYKLPGSGMSAFMKTENYQYLKDGDIVKFVCGAKDDLEEALRIIRIYHLNEEDCYFSAVFNQLAPRDIVDFLLAHKLKAKVQLQLHKYIWDPMKRGV

SEQ ID NO: 29964 - protein, 217 aa, unidentified
  source 1..217: note = Erysipelotrichaceae bacterium
  REGION 1..217: note = tr|A0A3C1N0W7|A0A3C1N0W7_9FIRM 7-carboxy-7-deazaguanine synthase OS=Erysipelotrichaceae bacterium OX=2049044 GN=queE PE=3 SV=1
MNYKVVEIFDSINGEGPLAGRLSTFVRFASCNLRCHYCDTRYAYDHPQYTLMSLAEILTRIEEASLDLVTLTGGEPLATPHVDVLIEKLGEMGKHVEIETNGSIDIAPFHRLAHRPSFTLDYKLPSSGMSAFMKTENYQYLKDGDIVKFVCGAKDDLEEALRIIRIYHLNEEDCYFSAVFNQLAPRDIVDFLLAHKLKAKVQLQLHKYIWDPMKRGV

SEQ ID NO: 29965 - protein, 243 aa, unidentified
  source 1..243: note = Erythrobacter aquimixticola
  REGION 1..243: note = tr|A0A419RTG8|A0A419RTG8_9SPHN 7-carboxy-7-deazaguanine synthase OS=Erythrobacter aquimixticola OX=1958945 GN=queE PE=3 SV=1
MLTLATDDTGGPEIFASLQGEGPSVGMPVAFLRLSRCNLACVWCDTAYTWHFEGDERPHRSGETFDRKANQVKLEVEDVAARIAAFGQNRLVITGGEPTLQAGRLADMLEHLPDMQVEIETNGTVEPPARLDVRVDQYNVSPKLAHSGNPADLSLKPEMLDRWEMDPRAWFKFVIAEPGDVEEVLTLAERHRFDSKRVFLMPEGTDSETLRKREKWLAPLALEHGFRMSDRLHIHLYGDTRGT

SEQ ID NO: 29966 - protein, 244 aa, unidentified
  source 1..244: note = Erythrobacter atlanticus
  REGION 1..244: note = tr|A0A0H4VZT8|A0A0H4VZT8_9SPHN 7-carboxy-7-deazaguanine synthase OS=Erythrobacter atlanticus OX=1648404 GN=queE PE=3 SV=1
MSLTLATQAPGEAEIFASLQGEGPSAGAPVAFLRLSRCNLACVWCDTAYTWHFEGDNRPHRDGETYQRRPNQLELEEAEVAKMIAALGQNRLVITGGEPLMQAGKLAAMLELLPDIAVEVETNGTIDPPARFDVRVDQYNVSPKLAHSGNPADLALKPEMLDRWATDERAFFKFVIAEPDDVEEVLTLARTHFIPAKRIFLMPEGTDSAALRQRMDWLAPLCLKHGFRMSDRLHIHLYGDTRGS

SEQ ID NO: 29967 - protein, 244 aa, Erythrobacter citreus
  REGION 1..244: note = tr|A0A0L1KC46|A0A0L1KC46_9SPHN 7-carboxy-7-deazaguanine synthase OS=Erythrobacter citreus LAMA 915 OX=1306953 GN=queE PE=3 SV=1
MPLVLATQAPGEPEIFASVQGEGPSAGMPCTFLRLSRCNLACVWCDTAYTWHFAGDERPHRDGVEFDRTANQLTLDEEEVAARITALGQKRLVITGGEPLLQAPALARLLGHLPDVTVEIETNGTTKASPALDIRIDQFNVSPKLAHSGNPAELALIPERLDAYATDPRAWFKFVIAAPADLDEVLALRDRYRFKPDHVFLMPEGTDSATLREREQWLAPLCVEHGFRMSDRLHIHLFGDTRGT

SEQ ID NO: 29968 - protein, 210 aa, Erythrobacter citreus
  REGION 1..210: note = tr|A0A0L1KFX6|A0A0L1KFX6_9SPHN 7-carboxy-7-deazaguanine synthase OS=Erythrobacter citreus LAMA 915 OX=1306953 GN=queE PE=3 SV=1
MAYAVKEIFKTLQGEGAHAGRTAVFCRFSGCNLWSGREKDRASAQCSFCDTDFVGVDGTGGGRFADAELLAQTIADEWAGSNESRYVVLTGGEPLLQVDAPLVDALHRHGFEIGVETNGTRPAPEGIDWICVSPKGENELVLRSGNELKLVFPQAGAPPERFEDLEFEHFFLQPMDCAEADQCLDDTIHYCLENPRWRLSLQSHKLVGIR

SEQ ID NO: 29969 - protein, 244 aa, Erythrobacter flavus
  REGION 1..244: note = tr|A0A222EYB5|A0A222EYB5_9SPHN 7-carboxy-7-deazaguanine synthase OS=Erythrobacter flavus; OX = 192812 GN=queE PE=3 SV=1
MPLVLATQAPGEPEIFASVQGEGPSAGMPCTFLRLSRCNLACVWCDTAYTWHFAGDERPHRDGVEFERKANQLTLDEEEVAARIAALGQKRLVITGGEPLLQAPALARLLELLPDVTVEIETNGTTKASPALDIRIDQFNVSPKLAHSGNPADLALIPERLDAYATDPRAWFKFVIAAPADLDEVLVLRDRYRFKRDHVFLMPEGTDSATLRAREQWLAPLCVEHGFRMSDRLHIHLFGDTRGT

SEQ ID NO: 29970 - protein, 244 aa, Erythrobacter flavus
  REGION 1..244: note = tr|A0A3T1CGR0|A0A3T1CGR0_9SPHN 7-carboxy-7-deazaguanine synthase OS=Erythrobacter flavus; OX = 192812 GN=queE PE=3 SV=1
MPLVLATQAPGEPEIFASVQGEGPSAGMPCTFLRLSRCNLACVWCDTAYTWHFAGDERPHRDGVEFDRKANQLTLDEAEIAARIAALGQKRLVITGGEPLLQAPALARLLELLPDVTVEIETNGTTKANPPLDIRIDQFNVSPKLAHSGNPADLALIPERLDAYATDPRAWFKFVIAAPADLDEVLALRDRYRFKRDHVFLMPEGTDSATLREREQWLAPLCVEHGFRMSDRLHIHLFGDTRGT

SEQ ID NO: 29971 - protein, 244 aa, Erythrobacter gangjinensis
  REGION 1..244: note = tr|A0A0G9MS18|A0A0G9MS18_9SPHN 7-carboxy-7-deazaguanine synthase OS=Erythrobacter gangjinensis OX=502682 GN=queE PE=3 SV=1
MTLVLATDETGGPEIFASVQGEGPSAGMPVAFIRLSRCNLACVWCDTAYTWHFDGDERPHRSGETFDRKANQVTLQAADAAQRIAALGQNRLVITGGEPTMQAGKLAEMLEHLPDMRVEIETNGTVKPPARLDVRVDQYNVSPKLAHSGNPAELALKPDMLDHWASEPRAWFKFVIAAPGDVDEVLSLVERHAIPRDRVFLMPEGTDSATLRERMEWLVPLCLKHGFRLSDRAHIHLFGDTRGT

SEQ ID NO: 29972 - protein, 244 aa, Erythrobacter litoralis
  REGION 1..244: note = tr|A0A074MKJ9|A0A074MKJ9_9SPHN 7-carboxy-7-deazaguanine synthase OS=Erythrobacter litoralis OX=39960 GN=queE PE=3 SV=1
MSLVLATDNAGAPEIFASLQGEGPSTGRPVAFVRLSRCNLACTWCDTAYTWRFEGDNRPHRDDTVYDRKANQVALSPADAAEQIAALGQDRLVITGGEPLLQGGKLAEMLEHLPDMTVEIETNGTVKAPPRLDVRIDQYNVSPKLSHSGNPAELALVAERLDDYATDSRAFFKFVIASPEDVSEVLALRDRYRLRPCHVFLMAEGRDSRTQRARHEWLAPLCLEHGFRMSDRMHIHLYGDTRGT

SEQ ID NO: 29973 - protein, 245 aa, Erythrobacter litoralis
  REGION 1..245: note = tr|Q2ND93|Q2ND93_ERYLH 7-carboxy-7-deazaguanine synthase OS=Erythrobacter litoralis (strain HTCC2594); OX = 314225 GN=queE PE=3 SV=1
MAQLTLATDDTGGPEIFASVQGEGLSAGAPVAFVRLSRCNLACVWCDTAYTWHFEGDTRPHRSGETFERKANQVSLDPADVAERIAALGQKRLVITGGEPLMQGGPLAELLELLPDMTVEIETNGTTKAPPRLDIRIDQYNVSPKLAHSGNPAELALITERLDSYALDDRAFFKFVIAEPSDVEEVLTLQRAHAIPAKRIFLMPEGTDSETLREREQWLVPLCLEHGFRMSDRLHIHLFGDTRGT

SEQ ID NO: 29974 - protein, 249 aa, Erythrobacter longus
  REGION 1..249: note = tr|A0A074MA54|A0A074MA54_ERYLO 7-carboxy-7-deazaguanine synthase OS=Erythrobacter longus; OX = 1044 GN=queE PE=3 SV=1
MADLVLATDDAGGAEIFASLQGEGPSMGKPVAFIRLSRCNLACIWCDTAYTWRFANEQGGDNRPHRDGVAYEKAANQVKLSPEKAAAKVAALGQKRLVITGGEPLMQCGPLADMLAILPDIEVEIETNGTVRPSAHVDIRVDQYNVSPKLSHSGNAGELALIPERIDFYASDPRAFFKFVVATPDDVDEVDALQREYRIPKDRLFLMAEGVDSITLRDRQMWLSTLCLEKGYRMSDRMHIHLYGDTRGT

SEQ ID NO: 29975 - protein, 244 aa, unidentified
  source 1..244: note = Erythrobacter luteus
  REGION 1..244: note = tr|A0A0G9MSR2|A0A0G9MSR2_9SPHN 7-carboxy-7-deazaguanine synthase OS=Erythrobacter luteus; OX = 1581420 GN=queE PE=3 SV=1
MTLVLATQAPGEPEIFASPQGEGPSAGIPVAFVRLSRCNLACLWCDTPYTWHFDGDARPHRSGETFPRHPNQIALDEAEVAARVAAFGRDRLVITGGEPLMQGAQLARMLEHLPGMAVEIETNGTVAPQPALDARVTQYNVSPKLAHSGNAAELALKPHMLARWATDERAFFKFVIARPGDVDEVRALVSAHQIPPDRVYLMPEGTDSETLRDRLDWLAPLAKAEGWRITDRLHIHLFGDTRGT

SEQ ID NO: 29976 - protein, 244 aa, unidentified
  source 1..244: note = Erythrobacter lutimaris
  REGION 1..244: note = tr|A0A395LP27|A0A395LP27_9SPHN 7-carboxy-7-deazaguanine synthase OS=Erythrobacter lutimaris OX=1538146 GN=queE PE=3 SV=1
MNLVLATDDAGGPEIFASVQGEGPSAGEPTAFMRLSRCNLCCVWCDTAYTWHFDGDERPHRGGETYDRKANQVTRAVEDVAARIEALGQRRLVVTGGEPMLQAPALAQLLAALPDLTVEIETNGTALPPPKLDVWVDQFNVSPKLAHSGNARDLAIVPKVLRTYVSDGRAVFKFVVAEPSDVEEVRELVRAHALPRGRVFVMPEGTDSNTLRARQEWLVPLCLEHGFRLSDRLHIHLFGDTRGT

SEQ ID NO: 29977 - protein, 244 aa, unidentified
  source 1..244: note = Erythrobacter marinus
  REGION 1..244: note = tr|A0A0H0XRY8|A0A0H0XRY8_9SPHN 7-carboxy-7-deazaguanine synthase OS=Erythrobacter marinus; OX = 874156 GN=queE PE=3 SV=1
MPLVLATDDTGGPEIFASIQGEGPSAGMPVTFVRLSRCNLACVWCDTAYTWHFEGDNRPHRSGETFARSANQLSLEVEDVAARIAALGQNRLVITGGEPLMQAGKLAQMLEHLPDMQVEIETNGTVDTPARLDVRVDQYNVSPKLAHSGNPAELALKPEMLDRWATDPRAFFKFVIAEPGDVEEVQALARTHAIPAGRLFLMPEGTTSAALREREKWLVPLCLENGYRMSDRLHIHLFGDTRGT

SEQ ID NO: 29978 - protein, 244 aa, Erythrobacter nanhaisediminis
  REGION 1..244: note = tr|A0A1I5NJ84|A0A1I5NJ84_9SPHN 7-carboxy-7-deazaguanine synthase OS=Erythrobacter nanhaisediminis OX=604088 GN=queE PE=3 SV=1
MALVLSTDDTGGPEIFASVQGEGPSMGRPVAFMRLSRCNLACVWCDTAYTWHFEGDNRPHRDDRTFERKANQVTLDEAEVAERILALGQDRLVITGGEPLLQAPALAKLLDHLPDISVEIETNGTTKAPVPLDIRIDQFNVSPKLAHSGNPADLALLPERLDAYATDPRAFFKFVIAEPSDVDEVLALHERYRFRPGHVFLMPEGTDSETLRTREKWLADLCLKHGFRMSDRLHIHLFGDTRGT

SEQ ID NO: 29979 - protein, 244 aa, Erythrobacter sp.
  REGION 1..244: note = tr|A0A1E4AVE1|A0A1E4AVE1_9SPHN 7-carboxy-7-deazaguanine synthase OS=Erythrobacter sp. SCN 62-14 OX=1660099 GN=queE PE=3 SV=1
MNLTLATDDSGGPEIFASLQGEGPSAGTPVAFVRLSRCNLACVWCDTAYTWRFEGDNRPHRDCVAFERRANQVTLSPQEAAAQIAALGQKRLVITGGEPLLQAGGLAEMLAHLHDVSVEIETNGTVAAPARLDIRVDQYNVSPKLSHSGNPAELALIPERLDAYAADPRAFFKFVIASPEDVAEVLTLQRRYRIKPSHIFLMAEGTTSAAQRERQAWLSALCLEHGFRMSDRLHIHLYGDTRGT

SEQ ID NO: 29980 - protein, 245 aa, Erythrobacter sp.
  REGION 1..245: note = tr|A0A2Z4JYE3|A0A2Z4JYE3_9SPHN 7-carboxy-7-deazaguanine synthase OS=Erythrobacter sp. KY5; OX = 2011159 GN=queE PE=3 SV=1
MADLICATDDKGGAEIFASIQGEGPRMGTPVAFIRLSRCNLACVWCDTAYTWRFEGDNRPHRDGIEYERKANQVALSPAKAAAKIAALGQKRLVITGGEPLMQCGPLADMLAILPDIEVEVETNGTTRASAHIDIRVDQYNVSPKLAHSGNDASLALIAERLDDYAADPRAFFKFVIAEPGDVAEVLELQRRHRIPAKRIFLMAEGTTSEALRARQEWLAPLCLEHGFRLSDRLHIHLYGDSRAT

SEQ ID NO: 29981 - protein, 244 aa, unidentified
  source 1..244: note = Erythrobacter xanthus
  REGION 1..244: note = tr|A0A3A1P1U5|A0A3A1P1U5_9SPHN 7-carboxy-7-deazaguanine synthase OS=Erythrobacter xanthus; OX = 1784712 GN=queE PE=3 SV=1
MALVLATQAPGEPEIFASLQGEGPSTGTPVAFVRLSRCNLACVWCDTPYTWHFADDERPHRDNTTYDRKANQLTLDEADVAARIAALGQKRLVITGGEPMLQGGALATMLEHLPAMTVEIETNGTTKPPARLDVRIDQFNVSPKLAHSGNPASLALKPAMLDFWASEPRAVLKFVIGAREHIDEVLALVRRHMIAPAKVYLMPEGTDSQTLREREKWLAPICLAHGFRMSDRMHIHLFGDTRGT

SEQ ID NO: 29982 - protein, 244 aa, unidentified
  source 1..244: note = Erythrobacter zhengii
  REGION 1..244: note = tr|A0A418NVN3|A0A418NVN3_9SPHN 7-carboxy-7-deazaguanine synthase OS=Erythrobacter zhengii; OX = 2307003 GN=queE PE=3 SV=1
MSLILATDDTGGPEIFASVQGEGPSAGTPVAFVRLSRCNLACVWCDTAYTWRFEGDERPHRSGEHFDRKANQVELDEAEVAHRIAALGQKRLVITGGEPTMQAGKLAAMLEHLPDMQVEIETNGTVAPPAQLDVRVDQYNVSPKLAHSGNPAHLALKPDMLDRWATDERAFFKFVLAHPDDLDGVLRIVREHMIPPQRVFLMPEGTDSKTLRSRMEWLVPLCLQHGFRLSDRLHIHLFGDTRGS

SEQ ID NO: 29983 - protein, 244 aa, unidentified
  source 1..244: note = Erythrobacteraceae bacterium
  REGION 1..244: note = tr|A0A2E0Q7Y1|A0A2E0Q7Y1_9SPHN 7-carboxy-7-deazaguanine synthase OS=Erythrobacteraceae bacterium OX=2026738 GN=queE PE=3 SV=1
MNLVLATDDTGGPEIFASVQGEGPSSGEPTAFVRLSRCNLACVWCDTAYTWHFEGDERPHRSGETFDRKANQVTLEVEDVAARIAALGQRRLVVTGGEPMLQAAGLAQLLAALPDMTVEIETNGTAFPPPKLEVWVDQFNISPKLTHSGNARELAIVPGVLRRYASDGRAFFKFVVAEPADVEEVREVVRANALPRGRVFLMAEGTDGATLRARQEWLVPLCLEHGFRLSDRLHIHLFGDTRGT

SEQ ID NO: 29984 - protein, 244 aa, unidentified
  source 1..244: note = Erythrobacteraceae bacterium
  REGION 1..244: note = tr|A0A0P7VT12|A0A0P7VT12_9SPHN 7-carboxy-7-deazaguanine synthase OS=Erythrobacteraceae bacterium HL-111 OX=1666908 GN=queE PE=3 SV=1
MSLVLATDDAGGPEIFASLQGEGPSMGVPVAFVRLSRCNLACTWCDTAYTWRFTGDNRPHRDEAVFDRKANQVTLSPAETAERIAALGQDRLVITGGEPLLQGGRLAEMLEHLPDMAVEIETNGTVKAPPRLDVRVDQYNVSPKLSHSGNPADLALIPERLDDYATDPRAFFKFVIASPGDVEEVLALHRRYRFRPGHVFLMAEGTDSATLRARQEWLAPLCLEHGFRMSDRMHIHLYGDTRGT

SEQ ID NO: 29985 - protein, 223 aa, Escherichia albertii
  REGION 1..223: note = tr|A0A1X3JRE0|A0A1X3JRE0_9ESCH 7-carboxy-7-deazaguanine synthase OS=Escherichia albertii B156 OX=550693 GN=queE PE=3 SV=1
MQYPINEMFQTLQGEGYFTGVPAIFIRLQGCPVGCAWCDTKHTWEKLEDREVSLFSILGKTKESDKWGAASSEDLLAVIGRQGYTARHVVITGGEPCIHDLLPLTDLLEKNGFSCQIETSGTHEVRCTPNTWVTVSPKLNMRGGYEVLSQALERANEIKHPVGRVRDIEALDELLATLTDDKPRVIALQPISQKEDATRLCIDTCIARNWRLSMQTHKYLNIA

SEQ ID NO: 29986 - protein, 223 aa, Escherichia albertii
  REGION 1..223: note = tr|A0A3T5VEE4|A0A3T5VEE4_9ESCH 7-carboxy-7-deazaguanine synthase OS=Escherichia albertii; OX = 208962 GN=queE PE=3 SV=1
MQYPINEMFQTLQGEGYFTGVPAIFIRLQGCPVGCAWCDTKHTWEKLEDREVSLFSILGKTKESDKWGAASSEDLLAVIGRQGYTARHVVITGGEPCIHDLLPLTDLLEKNGFSCQIETSGTHEVRCTPNTWVTVSPKLNMRGGYEVLSQALERANEIKHPVGRVRDIEALDELLATLTDDKPRVIALQPISQKDDATRLCIETCIARNWRLSMQTHKYLNIA

SEQ ID NO: 29987 - protein, 223 aa, Escherichia fergusonii
  REGION 1..223: note = tr|F0JRP9|F0JRP9_ESCFE 7-carboxy-7-deazaguanine synthase OS=Escherichia fergusonii ECD227 OX=981367; GN = ygcF PE=3 SV=1
MQYPINEMFQTLQGEGYFTGVPAIFIRLQGCPVGCAWCDTKHTWEKLEDREVSLFSILAKTKESDKWGAASSEDLLAVIGRQGYTARHVVITGGEPCIHDLLPLTDLLEKNGFSCQIETSGTHEVRCTPNTWVTVSPKLNMRGGYEVLSQALERANEIKHPVGRVRDIEALDELLATLTDDKPRVIALQPISQKDDATRLCIETCIARNWRLSMQTHKYLNIA

SEQ ID NO: 29988 - protein, 223 aa, unidentified
  source 1..223: note = Escherichia marmotae
  REGION 1..223: note = tr|A0A2B7LVP1|A0A2B7LVP1_9ESCH 7-carboxy-7-deazaguanine synthase OS=Escherichia marmotae; OX = 1499973 GN=queE PE=3 SV=1
MQYPINEMFQTLQGEGYFTGVPAIFIRLQGCPVGCAWCDTKHTWEKLEDREVSLFSILAKTKESDKWGAASSEDLLAVISRQGYTARHVVITGGEPCIHDLLPLTDLLEKNGFSCQIETSGTHEVRCTPNTWVTVSPKLNMRGGYEVLSQALERANEIKHPVGRVRDIEALDELLATLTDDKPRVIALQPISQKEDATRLCIDTCIARNWRLSMQTHKYLNIA

SEQ ID NO: 29989 - protein, 223 aa, Escherichia sp.; identical to SEQ ID NO: 29988
  REGION 1..223: note = tr|A0A4V6BGT9|A0A4V6BGT9_9ESCH 7-carboxy-7-deazaguanine synthase OS=Escherichia sp. MR; OX = 2575922 GN=queE PE=3 SV=1

SEQ ID NO: 29990 - protein, 223 aa, Escherichia sp.
  REGION 1..223: note = tr|A0A4Q9JJ14|A0A4Q9JJ14_9ESCH 7-carboxy-7-deazaguanine synthase OS=Escherichia sp. E10V4; OX = 2478971 GN=queE PE=3 SV=1
MQYPINEMFQTLQGEGYFTGVPAIFIRLQGCPVGCAWCDTKHTWEKLEDREVSLFSILGKTKESDKWGAASSEDLLAVIGRQGYTARHVVITGGEPCIHDLMPLTDLLEKNGFSCQIETSGTHEVRCTPNTWVTVSPKLNMRGGYEVLSQALERANEIKHPVGRVRDIEALDELLATLTDDKPRIIALQPISQKEDATRLCIETCIARNWRLSMQTHKYLNIA

SEQ ID NO: 29991 - protein, 220 aa, unidentified
  source 1..220: note = Estrella lausannensis
  REGION 1..220: note = tr|A0A0H5DRK1|A0A0H5DRK1_9BACT 7-carboxy-7-deazaguanine synthase OS=Estrella lausannensis; OX = 483423 GN=queE PE=3 SV=1
MNDVLKQTIRLIEIFPSVQGETSFSGLTSTFIRLASCNLRCTWCDTTYSFGRGEPSTIENILATVDSLGLRWVCVTGGEPLLQKEAIPLMELLSQKGYVVSLETSGSLPIDAVPKSVKIILDIKCPGSGMESKNLYENLRILKEEDEVKFVIKDRADYDFACAISEKWGLFLRREPVLFSPVWGVLSPEELTWWMVKDKLKARLNLQMHKVIFGAERKGV

SEQ ID NO: 29992 - protein, 222 aa, unidentified
  source 1..222: note = Eubacteriaceae bacterium
  REGION 1..222: note = tr|A0A143XZ41|A0A143XZ41_9FIRM 7-carboxy-7-deazaguanine synthase OS=Eubacteriaceae bacterium CHKCI004 OX=1780380 GN=queE PE=3 SV=1
MNVIYPLAEKFISINGEGPKAGMMAAFLRMKGCNLSCNYCDTSWANESDCPTEPLTAREILHWLKESGTVNVTLTGGEPLLIPHVSELIEALGEAGFAVEIETNGSVPLAPFCELSHRPVFTMDYKCPDSGMEDYMRPDNFSLLTKDDSVKFVVSSENDLARAEEITAGYHLTERCRVYLSAVFGRIEPRTITEYMIHHQWNDVRLQLQMHKFIWPPQQRGV

SEQ ID NO: 29993 - protein, 202 aa, unidentified
  source 1..202: note = Eubacteriaceae bacterium
  REGION 1..202: note = tr|A0A143ZWR9|A0A143ZWR9_9FIRM 7-carboxy-7-deazaguanine synthase OS=Eubacteriaceae bacterium CHKCI005 OX=1780381 GN=queE PE=4 SV=1
MTISYIFEGSLYINMTNRCTNRCDFCVRTNTDALGDADSLWLEREPTVEEVIADLSTRDLSQFPEIVFCGYGEPTCRLDDVIAVCDWLHAHCDVPIRINTNGLSDLEYGCDTVEKLKGHVDALSISLNCSTPEEYDRICHSQFGLDAHPAMLDFAARAAKVIPSVTLTVVDTIPAEEIEACRKLAQKAGTKFRVRSYIGKGQ

SEQ ID NO: 29994 - protein, 218 aa, unidentified
  source 1..218: note = [Eubacterium] cellulosolvens
  REGION 1..218: note = tr|I5AU65|I5AU65_EUBCE 7-carboxy-7-deazaguanine synthase OS=[Eubacterium] cellulosolvens 6 OX=633697; GN = queE PE=3 SV=1
MKVVEKFVSINGEGTHAGELAVFVRFRGCNLNCSYCDTMWANEPGCPYAEESPEQIVSYIEETKVKNVTLTGGEPLLQKEMPELLRLLSEKKELRVEIETNGAVDLSGFRNGGGCVFTMDYKLPSSGCENGMRTENFSILEKKDTVKFVVGSRVDLERADQIIQEYGLIDRCHVYFSPVFGKIEPEQIVNYMVEHRLNGVRIQIQIHKVIWDPNRRGV

SEQ ID NO: 29995 - protein, 222 aa, unidentified
  source 1..222: note = [Eubacterium] eligens
  REGION 1..222: note = tr|A0A174YT06|A0A174YT06_9FIRM 7-carboxy-7-deazaguanine synthase OS=[Eubacterium] eligens; OX = 39485 GN=queE_2 PE=3 SV=1
MSKYEVVEKFVSINGEGTKAGQLAVFIRFKGCNLNCKYCDTKWANEQGTPSQPMTEKEILDYVLSTGVKNVTLTGGEPLLREGIENVITVLAENNLNIEIETNGSVYLDKIRKLHKENVTFTMDYKLSCSGMEAAMNLDNFDILNSNDTVKFVAGCREDLIKAKQIIEKYNLYGKCNLYISPVFGMIEPEEIVNFMKENVMNDVNMQIQLHKIIWSPDKKGV

SEQ ID NO: 29996 - protein, 221 aa, unidentified
  source 1..221: note = [Eubacterium] eligens
  REGION 1..221: note = tr|A0A415M993|A0A415M993_9FIRM 7-carboxy-7-deazaguanine synthase OS=[Eubacterium] eligens; OX = 39485 GN=queE PE=3 SV=1
MKVVEKFISINGEGRRAGELAVFIRFKGCNLNCSYCDTKWANEPACDYEELSPDEICEYVSETGIKNVTLTGGEPLLQKDIRSLVEKLLNKSDIRVEIETNGAVDIAPLANAFSKEKLSLTMDYKLPSSGCEEKMLLSNMEALRKQDTVKFVSGSINDLECAEKIIEKFHLTERCQVFISSVFGSIEPVEIVNFMTGKRMNDLRLQIQMHKVIWNPEERGV

SEQ ID NO: 29997 - protein, 221 aa, Eubacterium eligens
  REGION 1..221: note = tr|C4Z7K6|C4Z7K6_EUBE2 7-carboxy-7-deazaguanine synthase OS=Eubacterium eligens (strain ATCC 27750 / VPI C15-48) OX=515620 GN=queE PE=3 SV=1
MKVVEKFISINGEGRRTGELAVFIRFKGCNLNCSYCDTKWANEPACDYEELSPDEICEYVSETGIKNVTLTGGEPLLQKDIRSLVEKLLNKSDIRVEIETNGAVDIAPLANAFSKEKLSLTMDYKLPSSGCEEKMLLSNMEVLRKQDTVKFVSGSINDLECAEKIIEKFHLTERCQVFISSVFGSIEPVEIVNFMTSKRMNDVRLQIQMHKVIWNPEERGV

SEQ ID NO: 29998 - protein, 222 aa, Eubacterium eligens; identical to SEQ ID NO: 29995
  REGION 1..222: note = tr|R5ZPW5|R5ZPW5_9FIRM 7-carboxy-7-deazaguanine synthase OS=Eubacterium eligens CAG:72 OX=1263077 GN=queE; PE = 3 SV=1

SEQ ID NO: 29999 - protein, 221 aa, Eubacterium hallii; identical to SEQ ID NO: 27742
  REGION 1..221: note = tr|R6GAF0|R6GAF0_9FIRM 7-carboxy-7-deazaguanine synthase OS=Eubacterium hallii CAG:12 OX=1263078 GN=queE; PE = 3 SV=1

SEQ ID NO: 30000 - protein, 218 aa, Eubacterium oxidoreducens
  REGION 1..218: note = tr|A0A1G6A5B7|A0A1G6A5B7_EUBOX 7-carboxy-7-deazaguanine synthase OS=Eubacterium oxidoreducens OX=1732 GN=queE PE=3 SV=1
MKVVERFTSINGEGQRAGELAMFVRFKGCNLSCSYCDTMWANEDGCPYTDKSPAELYKEIIDSGVRNVTLTGGEPLLQKEMPQLLALLSENENIRVEVETNGSIDLSAFSGANRPSFTMDYKLPSSGCESKMLLSNFQMLQLEDTVKFVVGSREDLDKARRIIEQYHLTTKCKVYLSPVFGKIEPALIVQFMIAHHMNDVRMQIQMHKVIWDPNERGV

SEQ ID NO: 30001 - protein, 221 aa, Eubacterium pyruvativorans
  REGION 1..221: note = tr|A0A1I7FDL7|A0A1I7FDL7_9FIRM 7-carboxy-7-deazaguanine synthase OS=Eubacterium pyruvativorans OX=155865 GN=queE PE=3 SV=1
MSVSLTVNEIFGSIDGEGLTAGGLACFIRLAGCNLRCSYCDTGYALEAGDGREMTVPEILAKVRRIGYRHVTLTGGEPLIHPGAEELIDALLEEGRLVNIETNGSVPVRPYQKPGVMITMDWKCPGSGMEEAMLPENPELLREGDVLKFVCEASDFDAVRRVLEEHALRCWVYLSPVFGKVRPEQLVDFLKSLADSGLDTEKIRVQVQLHKVIWDPEERGV

SEQ ID NO: 30002 - protein, 222 aa, Eubacterium ramulus
  REGION 1..222: note = tr|A0A2V1JV44|A0A2V1JV44_EUBRA 7-carboxy-7-deazaguanine synthase OS=Eubacterium ramulus; OX = 39490 GN=queE PE=3 SV=1
MANYKVVEIFSSINGEGTRAGQLAVFIRMQGCNLNCAYCDTKWANEADARFRWTSTEEIVELLRTMEIKNVTITGGEPLLQENVLELLETLAQEKTLRVEIETNGSVDLTPFTEIPNGPSFTMDYKLPGSGMEAQMRTKNFALLGADDTVKFVVKDYTDLCRARDVIREYDLTEKCHVYLSPVYGQIELEDIVNFMKDNRMNDVNMQLQMHKIIWDSEMRGV

SEQ ID NO: 30003 - protein, 222 aa, Eubacterium ramulus
  REGION 1..222: note = tr|U2PU07|U2PU07_EUBRA 7-carboxy-7-deazaguanine synthase OS=Eubacterium ramulus ATCC 29099 OX=1256908; GN = queE PE=3 SV=1
MTNYKVVEIFSSINGEGTRAGQLAVFVRMQGCNLNCTYCDTKWANEADAKFHWTSTEEILELLRSMEIKNVTITGGEPLLQEEIGELLEAMAKEENLRVEIETNGSVPLQPFAEIPNGPSFTMDYKLPGSGMEKYMLPENFAVLRAQDTVKFVVKDYEDLCRARDVIREYDLTEKCHVYLSPVYGQIELENIVNFMKDNRLNDVNMQLQMHKIIWDSEMRGV

SEQ ID NO: 30004 - protein, 223 aa, Eubacterium ruminantium
  REGION 1..223: note = tr|A0A1T4Q967|A0A1T4Q967_9FIRM 7-carboxy-7-deazaguanine synthase OS=Eubacterium ruminantium OX=42322 GN=queE PE=3 SV=1
MNKYKIAEKFISINGEARKAGELSVFIRLVGCNLRCNYCDTLWACDNSAPGGMMTEDEIYDYIKKSGVKNVTITGGEPMLADNIKALLLRLSSDKDLSIEVETNGAVSLTEYYKEMPANISFTVDYKCPGSGMEKAMVPENFANIRNNDTVKFVVSDKNDLDKMCEIIETNNLTEKCMVYVSAVFGRIKPDEIVNYMIEHKMNDVRLQLQIHKYIWDPDKKGV

SEQ ID NO: 30005 - protein, 223 aa, Eubacterium ruminantium
  REGION 1..223: note = tr|A0A1H5Y9E4|A0A1H5Y9E4_9FIRM 7-carboxy-7-deazaguanine synthase OS=Eubacterium ruminantium OX=42322 GN=queE PE=3 SV=1
MTEFKVVEKFISINGEAVRAGELSVFIRFKGCNLRCNYCDTLWACEDGAEYSLMNTEDIYEYIKASGIKNVTLTGGEPMLQEGIGELLQRLGSDTDLRIEVETNGAVPLTDYYRSVPDNVSFTVDYKCTGSGMEKAMYLPNFEGLRSIDTVKFVVSDIIDLDKAAEVIEKYRLSEKCPVYLSAVFGRITPEEIVEYMKDNKLNDIRLQLQMHKYIWPPEMKGV

SEQ ID NO: 30006 - protein, 222 aa, Eubacterium sp.
  REGION 1..222: note = tr|A0A413PAY5|A0A413PAY5_9FIRM 7-carboxy-7-deazaguanine synthase OS=Eubacterium sp. AM49-13BH OX=2292351 GN=queE PE=3 SV=1
MSKYEVVEKFVSINGEGTKAGQLAVFIRFKGCNLNCKYCDTKWANEQETPSQPMTEKEILDYVLSTGVKNVTLTGGEPLLREGIENVITVLAENNLNIEIETNGSVYLDKIRKLHKENVTFTMDYKLSCSGMEAAMNVDNFNILSSNDTVKFVAGCREDLIKAKQIIEKYNLYGKCNLYISPVFGMIEPEEIVNFMKENVMNDVNMQIQLHKIIWSPDKKGV

SEQ ID NO: 30007 - protein, 221 aa, Eubacterium sp.; identical to SEQ ID NO: 29996
  REGION 1..221: note = tr|A0A351RGW6|A0A351RGW6_9FIRM 7-carboxy-7-deazaguanine synthase OS=Eubacterium sp.; OX = 142586 GN=queE PE=3 SV=1

SEQ ID NO: 30008 - protein, 222 aa, Eubacterium ventriosum; identical to SEQ ID NO: 28429
  REGION 1..222: note = tr|A0A413S6G0|A0A413S6G0_9FIRM 7-carboxy-7-deazaguanine synthase OS=Eubacterium ventriosum OX=39496 GN=queE PE=3 SV=1

SEQ ID NO: 30009 - protein, 256 aa, unidentified
  source 1..256: note = Euhalothece natronophila
  REGION 1..256: note = tr|A0A5B8NIX5|A0A5B8NIX5_9CHRO 7-carboxy-7-deazaguanine synthase OS=Euhalothece natronophila Z-M001 OX=522448 GN=queE PE=3 SV=1
MTLVTTATANLVEVFSAIQGEGLNVGTRQIFIRFGGCDLRCWFCDSANTWKADSQCRIEETPGQRDFKIYPNPIEEEQLLSWIKQQHQPRLHDSISLTGGEPLLHAKFLQQFLPKLKAITQLPIYLETGGHRPQQLSLILDQLDCIGMDMKLPSVSGEERWLAHKEFLQICIPQKEVFVKLIVSNETTEADLQQARSIIAEVSSEIPVILQPVTPLEGNSPTPPTAEQVLFWQSFFKEALSEVRVIPQTHKMIGQL

SEQ ID NO: 30010 - protein, 256 aa, unidentified
  source 1..256: note = Euhalothece sp.
  REGION 1..256: note = tr|A0A2K3AUJ0|A0A2K3AUJ0_9CHRO 7-carboxy-7-deazaguanine synthase OS=Euhalothece sp. KZN 001 OX=1884791 GN=queE PE=3 SV=1
MATVATATANLVEVFSAIQGEGLNVGTRQIFLRFGGCDLRCDFCDSANTWQANSTFRVEQTPGKRDFQVYNNPVEDTQLLRWIEQQNQFNLHDSISLTGGEPLLHAKFLKQFLPQLKQSTSLPIYLETGGHRPQQLSLILDFLDCIGMDMKLPSVSGEQHWEAHAAFLRLCIPQKHIFVKLIVSDQTSDDDLNQATRIIAKVSPDIPVILQPVTPLVGKTITPPRAEQVLSWQSQMKQLLREVRVIPQTHKMIGQL

SEQ ID NO: 30011 - protein, 213 aa, Euzebya sp.
  REGION 1..213: note = tr|A0A346XS56|A0A346XS56_9ACTN 7-carboxy-7-deazaguanine synthase OS=Euzebya sp. DY32-46; OX = 1608957 GN=queE PE=3 SV=1
MTYAVKEAFHTLQGEGAHAGRAAVFLRFAGCNLWSGREDGRASAICKFCDTDFVGTDGEGGGSFADPVELATHVASLWTVDDDPAGRRYVVCTGGEPLLQLDPPLIDALHSEGFTIAVETNGTIEAPPGIDWLTVSPKLGSTLVQTSGSELKLVYPQVAGDPAQFVDLDFDHFYLQPMDGPDAVDNTKRTVEYCRRHPLWTLSLQTHKLLGIP

SEQ ID NO: 30012 - protein, 210 aa, unidentified
  source 1..210: note = Euzebyella marina
  REGION 1..210: note = tr|A0A3G2L9K7|A0A3G2L9K7_9FLAO 7-carboxy-7-deazaguanine synthase OS=Euzebyella marina; OX = 1761453 GN=queE PE=3 SV=1
MLQEDVLREVDKGTLLPLMEEFYTIQGEGFHKGTAAYFIRVGGCDVGCHWCDVKESWNAGTHPPTAIESIVENAAKYSNTIVVTGGEPLTWNMEPLTNALKANNLTTHIETSGAYPLTGIWDWICLSPKKNKLPEERIYDVAHELKVIVYNKHDLIFAEEQAAKVNGECILYLQPEWSVRDKVVPLIVDYVMKNPKWKVSLQTHKYLNIP

SEQ ID NO: 30013 - protein, 235 aa, Ewingella americana
  REGION 1..235: note = tr|A0A085GNV1|A0A085GNV1_9GAMM 7-carboxy-7-deazaguanine synthase OS=Ewingella americana ATCC 33852 OX=910964 GN=queE PE=3 SV=1
MRADFLEMIEKTMQYPINEMFETLQGEGYFTGVPAIFIRLQGCPVGCSWCDTKHTWDKIADREVDVQRILVKTEESDAWGNATAEQLHEIIVQQGYTARHVVITGGEPCIYDLMPLTTLLEKNGFSCQIETSGTHEVRCSVNTWVTVSPKVNMRGGYDILPQALKRADEVKHPVARQRDIDALEELLATLTDEKARIIALQPISQKEEATKLCIATCIAKNWRLSMQTHKYLNIA

SEQ ID NO: 30014 - protein, 291 aa, Ewingella americana
  REGION 1..291: note = tr|A0A502GE97|A0A502GE97_9GAMM 7-carboxy-7-deazaguanine synthase OS=Ewingella americana; OX = 41202 GN=queE PE=3 SV=1
  VARIANT 273: note = Xaa can be any naturally occurring amino acid
MDLLAIQVKDVSINDDDVPQSAPEISSEAAVEFANGIIDRALLQGYQFPEGLTREDFLSSELPLNEDFFSFQGEGASSGIPSYFIRTNKCNLRCTWCDSKRTWTAKARVEMADLLYKVHSSKARRIILTGGEPLLHQKNKQLKAFLLICKALGMALEIETSGSMDANVDFLKHFDQINISPKLSNSECGMNINEEEGLKRYVKALRTFTCNDALVTPWLKFVIVEDKDLDEVKLLLKETDMGPENVYLMPEGVTLDKQLLAMKRIALLCLEEXYNFCPRAHVLVWNDKHGV

SEQ ID NO: 30015 - protein, 238 aa, Exiguobacterium antarcticum
  REGION 1..238: note = tr|K0AGB8|K0AGB8_EXIAB 7-carboxy-7-deazaguanine synthase OS=Exiguobacterium antarcticum (strain B7); OX = 1087448 GN=queE PE=3 SV=1
MSQLKKTPKMPVLEIFGPTFQGEGRSIGQKTMFVRTGGCDYSCAWCDSAFTWDGSEKPDLLTAEEILTRLDALGSYGHVTISGGNPLLHASIGTLVDALKTRGITMSVETQGSYWQNWVLDIEDVTISPKPPSSGMTVDYDRLDVFFKRLPEQQRAVKIVIFDESDLDFAAAISERYALKTLYLSLGNPDPAEQGTIAPRMLSGLKTLWERVADDERFNHARVLPQLHALVFANDRGV

SEQ ID NO: 30016 - protein, 231 aa, Exiguobacterium aurantiacum
  REGION 1..231: note = tr|A0A377FX60|A0A377FX60_9BACL 7-carboxy-7-deazaguanine synthase OS=Exiguobacterium aurantiacum OX=33987 GN=queE PE=3 SV=1
MKIPVLEVFGPTFQGEGRAIGQKTMFVRTAGCDYRCSWCDSAFTWDGSEKPDMLSADAIIERLDALGTYDYVTISGGNPLLIAGMKDLVDKLKARGVKLAVETQGSRYQDWLTQIDDVTLSPKPPSSGMSTDWEKLDAIVERLRPEQTTFKVAVFDEVDLAYAKQVQTRYTPDVMYLSAGNPEPGADGDITDAQLRRLKQLWEDVARDPSWQSVRVLPQLHTLLYANERGV

SEQ ID NO: 30017 - protein, 231 aa, unidentified
  source 1..231: note = Exiguobacterium chiriqhucha
  REGION 1..231: note = tr|U1LEG5|U1LEG5_9BACL 7-carboxy-7-deazaguanine synthase OS=Exiguobacterium chiriqhucha RW-2 OX=1345023; GN = queE PE=3 SV=1
MKIPVLEVFGPTFQGEGRAIGQKTMFVRTAGCDYRCSWCDSAFTWDGSEKPDMLTADEVIERLDALGVYDYVTISGGNPLLIAAMKDLVTKLKARDVKLAVETQGSRYQDWLADIDDVTLSPKPPSSGMTTDWEKLDAIVERLRPEQTTFKVAVFDEIDLAYAKSVQMRYTPDVMYLSAGNPEPGADGDITDAQLRRLKELWEDVARDPSWQSVRVLPQLHTLLYANERGV

SEQ ID NO: 30018 - protein, 238 aa, unidentified
  source 1..238: note = Exiguobacterium enclense
  REGION 1..238: note = tr|A0A0V8GDS8|A0A0V8GDS8_9BACL 7-carboxy-7-deazaguanine synthase OS=Exiguobacterium enclense OX=1017277 GN=queE PE=3 SV=1
MSALIKTPKIPVLEIFGPTFQGEGRSIGQKTMFVRTGGCDYSCSWCDSAFTWDGSEKPELLTAETIIERLDALGSYGHVTISGGNPLLHASIGTLVAALKERNITMSVETQGSYWQNWLLDIDDVTLSPKPPSSGMKIDFDRLDVFFKRLPEQQRAVKIVIFNEEDLDFAAMISERYALKTLYLSLGNPDPHEEGTIAPRMLHDLKTLWERVASDERFNHARVLPQLHALVFANDRGV

SEQ ID NO: 30019 - protein, 236 aa, Exiguobacterium mexicanum
  REGION 1..236: note = tr|A0A099DFN3|A0A099DFN3_9BACL 7-carboxy-7-deazaguanine synthase OS=Exiguobacterium mexicanum OX=340146 GN=queE PE=3 SV=1
MVGGLMKIPVLEVFGPTFQGEGRAIGQKTMFVRTAGCDYRCSWCDSAFTWDGSEKPDMLTADEVIERLDALGVYDYVTISGGNPLLIAAMKDLVTKLKARDVKLAVETQGSRYQDWLADIDDVTLSPKPPSSGMTTDWEKLDAIFERLRPEQMTFKVAVFDEIDLAYAKSIQTRYTPDVMYLSAGNPEPGADGDITDAQLRRLKELWEDVARDPSWQSVRVLPQLHTLLYANERGV

SEQ ID NO: 30020 - protein, 238 aa, Exiguobacterium sibiricum
  REGION 1..238: note = tr|B1YFM8|B1YFM8_EXIS2 7-carboxy-7-deazaguanine synthase OS=Exiguobacterium sibiricum (strain DSM 17290 / JCM 13490 / 255-15) OX=262543 GN=queE PE=3 SV=1
MSQLKKTPKIPVLEIFGPTFQGEGRSIGQKTMFVRTGGCDYSCAWCDSAFTWDGSEKPDLLTADEILAQLDALGSYGHVTISGGNPLLHASIGTLVDALKSRGITMSVETQGSYWQNWVLDIEDVTISPKPPSSGMTVDYDRLDVFFKRLPEQQRAVKIVIFDEADLDFAAAISDRYALKTLYLSLGNPDPAEEGTIAPRMLSDLKTLWERVAADERFNHARVLPQLHALVFANDRGV

SEQ ID NO: 30021 - protein, 238 aa, Exiguobacterium sp.
  REGION 1..238: note = tr|A0A031IEZ6|A0A031IEZ6_9BACL 7-carboxy-7-deazaguanine synthase OS=Exiguobacterium sp. RIT341 OX=1470592 GN=queE PE=3 SV=1
MSALTKTPKIPVLEIFGPTFQGEGRSIGQKTMFVRTGGCDYSCSWCDSAFTWDGSEKPELLTAETIMERLDALGSYGHVTISGGNPLLHASIGTLVEALKERNITMSVETQGSYWQNWLLDIDDVTLSPKPPSSGMNIDFDRLDVFFKRLPEQQRAVKIVIFDEADLDFAAMISERYALKTLYLSLGNPDPHEEGTIAPRMLHDLKTLWERVARDERFNHARVLPQLHALVFANDRGV

SEQ ID NO: 30022 - protein, 236 aa, Exiguobacterium sp.
  REGION 1..236: note = tr|A0A069F530|A0A069F530_9BACL 7-carboxy-7-deazaguanine synthase OS=Exiguobacterium sp. AB2 OX=1484479 GN=queE PE=3 SV=1
MVGGLMKIPVLEVFGPTFQGEGRAIGQKTMFVRTAGCDYRCSWCDSAFTWDGSEKPDMLSADAIIERLDALGMYDYVTISGGNPLLIAGMKDLVEKLKARGVKLAVETQGSRYQDWLTQIDDVTLSPKPPSSGMSTDWEKLDAIVERLRPEQTTFKVAVFDEVDLAYAKQVQTRYTPDVMYLSAGNPEPGADGDITDAQLRRLKQLWEDVARDPSWQSVRVLPQLHTLLYANERGV

SEQ ID NO: 30023 - protein, 203 aa, unidentified
  source 1..203: note = Fabibacter misakiensis
  REGION 1..203: note = tr|A0A1E5T2V5|A0A1E5T2V5_9BACT 7-carboxy-7-deazaguanine synthase OS=Fabibacter misakiensis OX=1563681 GN=queE PE=3 SV=1
MVEKQAKLPVMEAFYTIQGEGHFSGNSAYFIRLGGCDVGCVWCDVKESWEAGKWPEQSVEEIVGNVLKSPTRLSVITGGEPLMYDLNELTSALRFSGLQTNVETSGAHPLSGDWDWICFSPKKFMKPRAEFYEVADELKVVVYNKSDFKWAEEHAARVKPDCLLYLQPEWDKSESMLPEIISYVKDNPQWKISLQTHKFMNIP

SEQ ID NO: 30024 - protein, 204 aa, unidentified
  source 1..204: note = Fabibacter pacificus
  REGION 1..204: note = tr|A0A1I0M781|A0A1I0M781_9BACT 7-carboxy-7-deazaguanine synthase OS=Fabibacter pacificus; OX = 1267423 GN=queE PE=3 SV=1
MTETIQSKLPIMEAFYTIQGEGHFSGTPAYFIRLGGCDVGCVWCDVKDSWDASQWPEQTLDEIVAGAQAYKGRLAVITGGEPLMYNLDELTAELHRNDFKANIETSGAHPLSGSWDWICFSPKKFKQPREEFYEKADELKVVVYNKSDFKWAESHAAKVNPDCLLYLQPEWDKSEKMLPAIIDYVKDNPRWNISLQTHKFMQIP

SEQ ID NO: 30025 - protein, 203 aa, Fabibacter sp.
  REGION 1..203: note = tr|A0A1E5SWH6|A0A1E5SWH6_9BACT 7-carboxy-7-deazaguanine synthase OS=Fabibacter sp. 4D4; OX = 1889784 GN=queE PE=3 SV=1
MTKETNGLPVMEAFYTIQGEGHFSGNSAYFIRLGGCDVGCVWCDVKDSWDASQWPKQSVDEIVSNAKEYPTRLAVVTGGEPLMYDLAKLTHELKVQGLQTNIETSGAHPLSGDWNWICFSPKKFMKPRDEFYRMADELKVVVYNKSDFEWAEEHAARVNPDCLLYLQPEWDKQEVILPQIIDYVKDNPQWKISLQTHKFMNIP

SEQ ID NO: 30026 - protein, 380 aa, unidentified
  source 1..380: note = Faecalicoccus pleomorphus
  REGION 1..380: note = tr|A0A380LJU0|A0A380LJU0_9FIRM MarR family Transcriptional regulator OS=Faecalicoccus pleomorphus; OX = 1323 GN=queE PE=4 SV=1
MNRDFQNSSDLLLDISILYRSTQKYYDQMLQSISLTYAQLPILILIYENEGISQQQIAQDGGYDKGTITKQVQKLEEMGYIRVQPSKKDKRAKELYTTAKARGIMSKVYAIRTSWWRHISSSIPKEDMAAFSNFYKNMAASAKEFAKADLNAISFFEHQKLSFQSVPGKVSTIVATGGCNYRCPFCNESHLVFLKEDSISYSQEEILQYVKSRKDMLDSITITGGEPLMHTELDPFLKKVKQMGFFINLMTNGSYFEHLKSLVEQKLVDRVVMHIKNVPGKYGETIGLKTYEIHEVEKSIRLLNTEKIESVFVITPVHEFHTPEDLVAMAKWLQPAPSLELHIFEEKETVIQKGYHGYTREELNKIKKELEVYIPNVKIR

SEQ ID NO: 30027 - protein, 240 aa, Falsibacillus pallidus
  REGION 1..240: note = tr|A0A370GHN1|A0A370GHN1_9BACI 7-carboxy-7-deazaguanine synthase OS=Falsibacillus pallidus OX=493781 GN=queE PE=3 SV=1
MKKFPVIEIFGPTVQGEGMVIGQKTMFVRTAGCDYSCSWCDSAFTWDGSAKEDINMMTAEEIFSQLKETGGSRFSHVTISGGNPALLKDLHQLIDILHENGIKTALETQGSKWQDWFLQIDELTISPKPPSSLMKTDFSILSDIVEKLQTNERDFSLKVVIFNDEDLAYAKDVHTRYPDVPFYLQTGNDSLTETDDEKLLGRLVDQYENLIDKVMESSELNDVRVLPQLHTYVWGNKKGV

SEQ ID NO: 30028 - protein, 240 aa, Falsibacillus sp.
  REGION 1..240: note = tr|A0A3L7JYP8|A0A3L7JYP8_9BACI 7-carboxy-7-deazaguanine synthase OS=Falsibacillus sp. GY 10110 OX=2478915 GN=queE PE=3 SV=1
MNKFPVLEVFGPTVQGEGMVVGQKTMFVRTAGCDYSCSWCDSAFTWDGSAKDEIKMMTAEEIFHQLKMIGEDRFSHVTISGGNPALLKNLHELVGLLHENGIEVALETQGSKWQDWFLHIDDLTISPKPPSSLMKTDFHILSEIISRLQENRSNFSLKVVIFNEEDFVYAKDVHKRYPDVPFYLQAGNDLLAEDDDGKLLQHLVKRYEWLIEQTMGSSDLNNVRVLPQLHTYVWGNKKGV

SEQ ID NO: 30029 - protein, 249 aa, unidentified
  source 1..249: note = Falsochrobactrum sp.
  REGION 1..249: note = tr|A0A316JDZ2|A0A316JDZ2_9RHIZ 7-carboxy-7-deazaguanine synthase OS=Falsochrobactrum sp. HN4 OX=2201899 GN=queE PE=3 SV=1
MGGIPAMKMASDIRISEIFGPTIQGEGVLIGEPTVFVRTGGCDYRCAWCDSLHAVESRFRHQWKPMSVDAIWDQVTALSGKTPLTVSLSGGNPAIQPLEPLIRRGQGEGYRFALETQGSVAKDWFSSLDTLVLSPKPPSSGMETDWLAFEQCLKAAASKPRTVLKFVIFDEADYAFAKNAAARYPHLSLYLQPGNHTPPPPEAEDAQIDMNGIMQRMQWLLDRVIADRWFNAHVLPQLHVLIWGNKRGV

SEQ ID NO: 30030 - protein, 193 aa, unidentified
  source 1..193: note = Fermentimonas caenicola
  REGION 1..193: note = tr|A0A521J2C9|A0A521J2C9_9PORP 7-carboxy-7-deazaguanine synthase OS=Fermentimonas caenicola OX=1562970 GN=queE PE=3 SV=1
MNLNVNEIFYSLQGEGGRTGQASIFIRLAKCNLACSFCDTDFERGVKMSLEEVFKEIEKYNCKWIIWTGGEPALQLNDKIVAFFKERGYLQAIETNGTKRIPSGIDYITCSPKQNFEIVRELIPEVDELRFPIQKGDPLPDISILPKTNRYLLSPIFDNDKVIQENVDYCISLIKDNPVWALSLQTHKLIGIR

SEQ ID NO: 30031 - protein, 193 aa, unidentified
  source 1..193: note = Fermentimonas caenicola
  REGION 1..193: note = tr|A0A098C3U9|A0A098C3U9_9PORP 7-carboxy-7-deazaguanine synthase OS=Fermentimonas caenicola OX=1562970 GN=queE PE=3 SV=1
MNLNVNEIFYSLQGEGGRTGQASIFIRLAKCNLACSFCDTDFERGVKMSLEEVLKEIEQYNCKWIIWTGGEPALQLNDKIVAFFKERGYLQAIETNGTKRIPSGIDYITCSPKQNFEIVRELIPEVDELRFPIQKGDPLPDISILPKTNRYLLSPIFDNDKVIQENVDYCISLIKDNPVWALSLQTHKLIGIR

SEQ ID NO: 30032 - protein, 213 aa, Ferrimicrobium acidiphilum
  REGION 1..213: note = tr|A0A0D8FW57|A0A0D8FW57_9ACTN 7-carboxy-7-deazaguanine synthase OS=Ferrimicrobium acidiphilum DSM 19497 OX=1121877 GN=queE PE=3 SV=1
MAYIVKEIYYTLQGEGMQVGRPAVFCRFSRCNLWTGKESQRAQAICQFCDTDFVGTDGPGGGRFASAIDLASAIASSWEGSSHTRSKPYVVCTGGEPLLQLDERAVDALHDQGFAVGVETNGTQPAPRGLDWICVSPKAGAPLVLDRGDELKLVYPQALAPPELFEELQFDHLLLQPMDGPKRAENTARAIDYCLAHPQWRLSLQTHKYTGIR

SEQ ID NO: 30033 - protein, 222 aa, Ferrimonas balearica
  REGION 1..222: note = tr|E1SMP7|E1SMP7_FERBD 7-carboxy-7-deazaguanine synthase OS=Ferrimonas balearica (strain DSM 9799 / CCM 4581 / PAT) OX=550540 GN=queE PE=3 SV=1
MQYPVNEIFETIQGEGHFTGVPAVFLRLQGCPVGCAWCDTRHTWEVLAEDQVEPGLVIGAGDGEPRWAQWPLEQLVAHLTGPQYRARHLVITGGEPCMYDLRPLTERMIAAGWRCQIETSGCFEVKTDPQTWVTVSPKVGMKGGLEVQRSALERANEIKHPVAMQKHVDELDALLAGVALEGKEVALQPISQQHRANELCVRVCIERNWRLSVQTHKYLNID

SEQ ID NO: 30034 - protein, 224 aa, Ferrimonas balearica
  REGION 1..224: note = tr|E1SVZ5|E1SVZ5_FERBD 7-carboxy-7-deazaguanine synthase OS=Ferrimonas balearica (strain DSM 9799 / CCM 4581 / PAT) OX=550540 GN=queE PE=3 SV=1
MNNASYPVNELFETIQGEGVHTGVPAIFLRLQGCPVGCSWCDTKHTWDLQENRKVMLSDVLVKTEESVMWCSVGPREILDLCMSRYTATHLVITGGEPCMYDLQPLCEVFEAEGYSIQVETSGTYPVMVSDSAWVTVSPKIKMRGGLSVLASAIDRADEIKHPVATVKDIEQLDELLTGSAGADAKVALQPISQKPKATELAIRTCIKRNWRLSVQTHKYLGIE

SEQ ID NO: 30035 - protein, 223 aa, Ferrimonas marina
  REGION 1..223: note = tr|A0A1M5R8N9|A0A1M5R8N9_9GAMM 7-carboxy-7-deazaguanine synthase OS=Ferrimonas marina; OX = 299255 GN=queE PE=3 SV=1
MQYPVNEIFETLQGEGFYTGVPAVFLRLQGCPVGCAWCDTKHTWHCDPELKVDAEQVIGVSGDKGHWSQWPLSALVAHLTSGQYTARQLVITGGEPCLYDLTPLTEAMSEAGWQCQIETSGCFQVRCDANTWVTVSPKEGMKGGLAIQPQALTRANEIKYPVATEQHIDNLKALLATLPDGATPVVALQPISQRPRATKLCIEQCIANNWRLSAQVHKYLQID

SEQ ID NO: 30036 - protein, 223 aa, unidentified
  source 1..223: note = Ferrimonas sediminum
  REGION 1..223: note = tr|A0A1G8NZQ7|A0A1G8NZQ7_9GAMM 7-carboxy-7-deazaguanine synthase OS=Ferrimonas sediminum; OX = 718193 GN=queE PE=3 SV=1
MSLPVNELFETIQGEGQFTGVPAVFVRLQGCPVGCPWCDTRHTWELDEADEVAREGVIGISGDTPRWASYEVEQLVALLTDGRFRARHLVITGGEPCLYDLRALTEQMHRAGWRCQVETSGCAEVKVDDHTWVTVSPKINMKGGLPVLTQALQRADEIKHPVALEKHIEELDQLLQGVALPRKPQICLQPISTQKRATEMAIRVCIERNWRLSVQTHKYLNID

SEQ ID NO: 30037 - protein, 224 aa, Ferrimonas sp.
  REGION 1..224: note = tr|A0A4V5NV39|A0A4V5NV39_9GAMM 7-carboxy-7-deazaguanine synthase OS=Ferrimonas sp. IMCC35001 OX=2569538 GN=queE PE=3 SV=1
MSRLPVNEIFETIQGEGQFTGMPAVFLRLQGCPVGCPWCDTRHTWEVEPEHQVDPERIIGVSGDRPIWAYYDEARLVALLTDGRYSARHLVITGGEPCLYDLTELTRLMHAAGWRCQIETSGCVEVRCDEQTWVTVSPKIGMKGGLTVLPQALERADEIKHPIATERHIEELDALLADQPLPRHPQICLQPISTKKRATQLAIDTCIKRNWRLSVQTHKYLEID

SEQ ID NO: 30038 - protein, 222 aa, Ferrimonas sp.
  REGION 1..222: note = tr|A0A4U1BN28|A0A4U1BN28_9GAMM 7-carboxy-7-deazaguanine synthase OS=Ferrimonas sp. IMCC35002 OX=2569539 GN=queE PE=3 SV=1
MLAVNEVFETIQGEGGFTGVPAVFVRLQGCPVGCPWCDTRHTWEQLPQDEVAANEVLTISGDTPKWANYSAQQLVDVLTDGRFTARHLVITGGEPCLFDLTELTAKMSDCGWQCQIETSGCAEVRCDERTYVTVSPKINMKGGLPVLTQALERADEIKHPVSMQKHIDELDQLLEPCTLARKPQICLQPISTQKRATELAIATCIARNWRLSVQTHKYLNID

SEQ ID NO: 30039 - protein, 219 aa, unidentified
  source 1..219: note = Ferriphaselus amnicola
  REGION 1..219: note = tr|A0A2Z6GB23|A0A2Z6GB23_9PROT 7-carboxy-7-deazaguanine synthase OS=Ferriphaselus amnicola OX=1188319 GN=queE PE=3 SV=1
MSEPDTRASLRITEIFYSLQGETSRVGLPTVFVRLTGCPLRCTYCDTAYAFTGGRSMLLTETLAEVAQHGARYVTVTGGEPLAQKNCLPLLQALCDAGYQVSLETSGALDVSGVDARVAKVLDIKTPASGESDKNLWGNLISLNPQDEIKFVLCDEIDYLWAKQVLDEHALASRCEVLFSPAQGQLDPTVLADWILRDHLPVRLQVQLHKLLWGNQQGK

SEQ ID NO: 30040 - protein, 215 aa, unidentified
  source 1..215: note = Ferrovum sp.
  REGION 1..215: note = tr|A0A149VXL7|A0A149VXL7_9PROT 7-carboxy-7-deazaguanine synthase OS=Ferrovum sp. Z-31; OX = 1789004 GN=queE PE=3 SV=1
MTYSVKEIFLTLQGEGCHTGRAAVFCRFSGCNLWSGRAEDRAQARCRFCDTDFLGTEGAGGGKFDSAPALAHAIERCWQDGMAGEDSMRRWVVLTGGEPLLQVDEDLVGALHERGFGVAVETNGTIPPPPGIDWICVSPKGKEPLQVHRGDELKLVYPQADCPPERFVTLNFHHFLLQPLDEGGDRRHEPATVSYCRSHPRWQLSLQIHKWLGIP

SEQ ID NO: 30041 - protein, 193 aa, unidentified
  source 1..193: note = Ferrovum sp.
  REGION 1..193: note = tr|A0A149VST2|A0A149VST2_9PROT 7-carboxy-7-deazaguanine synthase OS=Ferrovum sp. PN-J185; OX = 1356306 GN=queE PE=3 SV=1
MGRVAVFCRFTGCNLWSGREEDREIARCNFCDTDFVGTDGVGGGRFASAQLLAQAIQRCWGESRPGQAWVVLTGGEPLLQVDELLINALHEIGFLVALETNGTIVAPPGIDWICVSPKGQEILKQTVGHELKLVFPQNHVDPERFEKLAFDHFLIQPMDGPQQADNLRQAINYCLSHPQWQLSLQTHKLMGIP

SEQ ID NO: 30042 - protein, 193 aa, Ferruginibacter sp.
  REGION 1..193: note = tr|A0A3M9NJN8|A0A3M9NJN8_9BACT 7-carboxy-7-deazaguanine synthase OS=Ferruginibacter sp. BO-59 OX=2294116 GN=queE PE=3 SV=1
MESFYTLQGEGFHQGKAAYFIRLAGCDVGCVWCDVKESWDEEKYPLQSIEEIVAKAKQYPAKLAVITGGEPTLYNLEYLTSALQAEGFATNIETSGSSPLTGTWDWICLSPKKFKPPLPGILEKANELKIIVFNKSDFDWAEKYGAEVSDSCKLYLQPEWGKSEKVTPMIIDYIKQNPRWRFSLQMHKYINVP

SEQ ID NO: 30043 - protein, 248 aa, Fervidicella metallireducens
  REGION 1..248: note = tr|A0A017RTB2|A0A017RTB2_9CLOT 7-carboxy-7-deazaguanine synthase OS=Fervidicella metallireducens AeB OX=1403537 GN=queE PE=3 SV=1
MKLNDFMKEKIPVVEIFTSISGEGITAGEVVTFIRTAGCNLRCSYCDTTYSYDEFSDENQLLTPVEILDRITEIGVKEIICTGGEPLEIGKSKRYLPLYLADKGFKVRIETNGSCPVYNKTEIINFTGDNKIPNLFYVLDIKSPSSGMSRFNIFEDNLRKLRKGDELKFVVGDSNDIDYALKVIEKYKNLLANGEVIINFSPVFNRIEAGEIVEMLKRHYSYFIQNGLKVRLSLQIHKFIWPPEKRGV

SEQ ID NO: 30044 - protein, 225 aa, Fervidicola ferrireducens
  REGION 1..225: note = tr|A0A140L292|A0A140L292_9THEO 7-carboxy-7-deazaguanine synthase OS=Fervidicola ferrireducens OX=520764 GN=queE PE=4 SV=1
MNIRGFQKVSLVDFPGVICTTVFTGGCNFRCGYCHNRELVLNPGNLPKYDKSEILQYLVKCTGKIDGVCITGGEPTLQKDLTPFIKQIKALGLKVKLDTNGTNPEKLEELIALKLLDYVAMDIKAPLHRYYLVAGVRCEAGKIQKSIEILAGSGIEHEFRTTLVPLLTEGDIFEIREMIPKERYVLQQFRVTNTLIDPALQDMAPWPPEMVKKIAAVVNAVVRGA

SEQ ID NO: 30045 - protein, 211 aa, Fibrella aestuarina
  REGION 1..211: note = tr|I0KA41|I0KA41_9BACT 7-carboxy-7-deazaguanine synthase OS=Fibrella aestuarina BUZ 2 OX=1166018 GN=queE; PE = 3 SV=1
MLTEQSQQTITTTTLPVMEAFYTLQGEGTFAGRAAYFIRLGGCDVGCHWCDVKESWDVNAHPHQTIDQIVAGALAFPGRLAVITGGEPLMHDLTALTGALQAAGFQTNIETSGVCQAVTGSWDWICFSPKKFKQPNPAIFTRADELKVIIYNASDFAFAESFVPNLRPNCRLLLQPEWGRSDEMLPRIVDYVKANPQWQISLQTHKFMAIP

SEQ ID NO: 30046 - protein, 193 aa, Fibrella sp.
  REGION 1..193: note = tr|A0A1W6EBF0|A0A1W6EBF0_9BACT 7-carboxy-7-deazaguanine synthase OS=Fibrella sp. ES10-3-2-2 OX=1834519 GN=queE PE=3 SV=1
MEAFYTLQGEGAHSGKAAYFIRLGGCDVGCHWCDVKESWDVNAHPHFTIDQIVAGALAHPGRMAVITGGEPLMHDLTTLTNALQVAGFQTNIETSGVYAVSGSWDWICFSPKKFKQPNPDIYAKADELKVIIYNASDFAFAESFVAQLRPDCRLLLQPEWSRSDEMLPRIVEYVKANPQWQISLQTHKFMQIP

SEQ ID NO: 30047 - protein, 211 aa, Fibrisoma limi
  REGION 1..211: note = tr|I2GFN8|I2GFN8_9BACT 7-carboxy-7-deazaguanine synthase OS=Fibrisoma limi BUZ 3 OX=1185876 GN=queE PE=3; SV = 1
MTTEQKQQVIDQTVLPVMEAFYTLQGEGAHTGRAAYFIRLGGCDVGCHWCDVKESWDADAHPKLTIDTIVNGALAHPGRMAVITGGEPLMHDLTDLTAVLQSAGFQTNIETSGVCEAVTGSWDWICFSPKKFKKPNPAIFELADELKVIIYNQSDFAFAESFVPYLRSDCRLFLQTEWGRSNEMLPRIVDYVKRNPQWQISLQTHKYLDIP

SEQ ID NO: 30048 - protein, 211 aa, Fibrisoma sp.
  REGION 1..211: note = tr|A0A418LXM9|A0A418LXM9_9BACT 7-carboxy-7-deazaguanine synthase OS=Fibrisoma sp. HYT19; OX = 2305895 GN=queE PE=3 SV=1
MTTEQKQQTINQTVLPVMEAFYTLQGEGAHTGRAAYFIRLGGCDVGCHWCDVKESWDADVHPKRTIDTIVTEALAHPGRMAVVTGGEPLMHDLTNLTAALQSAGFQTNIETSGVCESVTGSWDWICFSPKKFRKPNPAIFERADELKVIIYNQSDFAFAESFVPHLRPDCRLFLQTEWGRSNEMLPRIVDYVKRNPQWQISLQTHKYLDIP

SEQ ID NO: 30049 - protein, 224 aa, Fibrobacter sp.
  REGION 1..224: note = tr|A0A285ZYN7|A0A285ZYN7_9BACT 7-carboxy-7-deazaguanine synthase OS=Fibrobacter sp. UWB16; OX = 1945874 GN=queE PE=3 SV=1
MKVCEIFKSIEGEGIRMGQAAVFVRLHGCNLRCSYCDSMYAVEGPDFKQMSVGEILAAVEAYRNESGVKCVTLTGGEPLIHENVGELLTAFSDAGFEVNIETNGTVPCKWQLPGLFYTMDWKCKSSGMSARMKMENIISLGKNDVLKFVVGSVEDLQEAEGVVARLSLTSPDNMPHIFISPVWGELTNEQIVNWMVGSKVMTQNNARFQVQLHKIVWNPDMRGV

SEQ ID NO: 30050 - protein, 189 aa, Fibrobacter sp.
  REGION 1..189: note = tr|A0A254SZY1|A0A254SZY1_9BACT 7-carboxy-7-deazaguanine synthase OS=Fibrobacter sp. UWB1; OX = 1964355 GN=queE PE=3 SV=1
MQKIYRINKIFFSIQGEGKRVGTPQVFVRFSGCNMKCPFCDTNHEPFDEMTAEQIIQTCLSIAGNCRSVSFCGGEPTLQLDDELIKAFDGWYKSIETNGTHKVPQGIDYIVCSPKTSRIEPDNIDELRFVIKAGDPLPTPCKTAKRMCLSPCFDGDNLVKENLYHCIKLVQENPSWLLSLQWHKFIGIE

SEQ ID NO: 30051 - protein, 224 aa, Fibrobacter succinogenes
  REGION 1..224: note = tr|C9RPJ9|C9RPJ9_FIBSS 7-carboxy-7-deazaguanine synthase OS=Fibrobacter succinogenes (strain ATCC 19169 / S85) OX=59374 GN=queE PE=3 SV=1
MKVCEIFKSIEGEGIRMGQAAVFVRLHGCNLRCSYCDSMYAVEGPDFKQMSVGEVLAAVEMYRNESGVKCVTLTGGEPLIHEGVGELLTAFSDAGFEVNIETNGTVPCKWQLPGLFYTMDWKCKSSGMSARMKMENIISLGKNDVLKFVVGSVEDLQEAEGVVARLSLTSPDNMPHIFISPVWGELTNEQIVNWMVGSKVMTQNNARFQVQLHKIVWDPDMRGV

SEQ ID NO: 30052 - protein, 228 aa, Fibrobacter succinogenes
  REGION 1..228: note = tr|A0A380RVN3|A0A380RVN3_FIBSU 7-carboxy-7-deazaguanine synthase OS=Fibrobacter succinogenes OX=833 GN=queE PE=3 SV=1
MGVFMKVSEIFKSIEGEGIRMGQSAVFVRLHGCNLRCSYCDSMYAVEGPDFKLMSVGEVLAAVEAYRNESGVKCVTLTGGEPLIHEGVGELLTAFSEAGFEVNVETNGTVPCKWQLPGLFYTMDWKCKSSGMSARMKMENIISLGKNDVLKFVVGSVEDLQEAEGVVARLSLTSPDNMPHIFISPVWGELTNEEIVNWMVGSKVMSQNNARFQVQLHKIVWDPDMRGV

SEQ ID NO: 30053 - protein, 205 aa, unidentified
  source 1..205: note = Fibrobacteres bacterium
  REGION 1..205: note = tr|A0A3C1WGM4|A0A3C1WGM4_9BACT 7-carboxy-7-deazaguanine synthase OS=Fibrobacteres bacterium OX=2052160 GN=queE PE=3 SV=1
MPSDTLRISEIFYSIQGEGFHAGTPAVFVRGAGCNLACVFCDTDFSLKEKLSPEQIVDRIAEYPSRFVVLTGGDPTIQPEAFRKLVELLHDRGYYVTMETNGTSEDDLGVDWITVSPKLSQGGEKRLRTGDELKLVYEGQDLRFFENSNFSHYFLQPKEIRTGSFGKGERDLAATRAEWEKTVAALLANPRWKLSFQLHKELGLR

SEQ ID NO: 30054 - protein, 242 aa, unidentified
  source 1..242: note = Fictibacillus aquaticus
  REGION 1..242: note = tr|A0A235FAP2|A0A235FAP2_9BACI 7-carboxy-7-deazaguanine synthase OS=Fictibacillus aquaticus OX=2021314 GN=queE PE=3 SV=1
MKTFNLPVKNEWMAWKLPMVEIFETVEGEGLAAGYPTVFVRVFHCNLRCTWCDTPYSYAPAKPEYEASIQEILETIKSFKAERICFTGGEPLIHREKSAALLLGMADLEHIVDIHIETNGAIDLAPFEKLRQSHPELKRKMRFVMDYKLPASGEMEKMNHENFKELGMQDEIKFVVGSDEDFSITKKVVNSLYEKGQISLSPVWETMPPRRLVEKLLADPLPNAKISLQLHKIIWDPAERGV

SEQ ID NO: 30055 - protein, 247 aa, unidentified
  source 1..247: note = Fictibacillus arsenicus
  REGION 1..247: note = tr|A0A1V3GAQ0|A0A1V3GAQ0_9BACI 7-carboxy-7-deazaguanine synthase OS=Fictibacillus arsenicus OX=255247 GN=queE PE=3 SV=1
MDGGRMKSFVLPSKDIWKNWKLPMVEIFETVEGEGLQAGYPTVFVRVFHCNLRCTWCDTTYSYAPAKPEFEATIDEIISTINSFRSSRICFTGGEPLIHREKSAALLMAMADLDHIVDIHIETNGAIDLEPFENLRNSHPELQRKMRFVMDYKLPASGEMDKMNLENFKELQNQDEIKFVIGSEEDFEITQQVVENHYRKGQICVSPVWESMPPRRLVELLLESHLPNAKLSLQLHKVIWHPEERGV

SEQ ID NO: 30056 - protein, 242 aa, unidentified
  source 1..242: note = Fictibacillus arsenicus
  REGION 1..242: note = tr|A0A1B1Z701|A0A1B1Z701_9BACI 7-carboxy-7-deazaguanine synthase OS=Fictibacillus arsenicus OX=255247 GN=queE PE=3 SV=1
MKSFDLPSKDIWRHWKLPMVEIFETVEGEGLQAGYPTVFVRVFHCNLRCTWCDTTYSYAPAKPEFEASIDEIISTIKSFRSSRICFTGGEPLIHREKSAALLMAMADLEHIVDIHIETNGAIDLVPFEKLRNSHPELQRKMRFVMDYKLPASGEMDKMNLGNFKELQNQDEIKFVIGSEEDFEITQQVVEHHYRKGQICVSPVWESMPPRRLVELLLESHLPNAKLSLQLHKVIWHPEERGV

SEQ ID NO: 30057 - protein, 243 aa, unidentified
  source 1..243: note = Fictibacillus enclensis
  REGION 1..243: note = tr|A0A0V8J9G3|A0A0V8J9G3_9BACI 7-carboxy-7-deazaguanine synthase OS=Fictibacillus enclensis OX=1017270 GN=queE PE=3 SV=1
MTNHFELPSSDVYSQWKLPMVEIFETIEGEGMAAGFPTIFVRVFHCNLRCTWCDTPYSYAPAKPEFEATIEEIIERINTFASKRICFTGGEPLIHREKSAALLKAMAGIERIEDIHVETNGAIALKPFQLLRESDPVLSSKVRFVMDYKLPASGEMDRMIHENFVVLKPHDEIKFVIGTDEDFDIASSVLEQHHKQGLALFSPVWETMPPEKLVNKVLSARMSDVKVSMQLHKIIWDPEKRGV

SEQ ID NO: 30058 - protein, 243 aa, unidentified
  source 1..243: note = Fictibacillus macauensis
  REGION 1..243: note = tr|I8UF50|I8UF50_9BACI 7-carboxy-7-deazaguanine synthase OS=Fictibacillus macauensis ZFHKF-1 OX=1196324; GN = queE PE=3 SV=1
MTARFNLPEPERYMQWEVPMVEIFETIEGEGTGAGFPTVFVRVFHCNLRCTWCDTPYSYAPAKPEFHATIAEIIETIQQFSSKRICFTGGEPLIHREKSAALLKAMADLEHIEDIHIETNGAIALAPFEQLRNEDEMIKQKARFVMDYKLPASGEMNRMITDNFLSLRAQDEIKFVIGSDEDFKLACEVVDCHHEAGQVLFSPVWETMPPATLVEKVLAEKRADIRVNIQLHKIIWDPNKRGV

SEQ ID NO: 30059 - protein, 242 aa, unidentified
  source 1..242: note = Fictibacillus phosphorivorans
  REGION 1..242: note = tr|A0A165N4Y6|A0A165N4Y6_9BACI 7-carboxy-7-deazaguanine synthase OS=Fictibacillus phosphorivorans OX=1221500 GN=queE PE=3 SV=1
MKTFDLPSKDVWKHWKVPMVEIFETVEGEGLQAGYPTVFVRVFHCNLRCTWCDTTYSYAPAKPEFEASIEEIVSTIKTFRSQRICFTGGEPLIHREKSAALLMAMADLDHIVDIHIETNGAIDLQPFENLRNAHPDLQKKMRFVMDFKLPASGEMDKMNVENFKQLQNQDEIKFVVGSEEDFEITKQVVSEHYRNGQICVSPVWESMPPRRLVELLLENPLPNAKLSLQLHKVIWHPEERGV

SEQ ID NO: 30060 - protein, 240 aa, unidentified
  source 1..240: note = Fictibacillus phosphorivorans
  REGION 1..240: note = tr|A0A168W6I6|A0A168W6I6_9BACI 7-carboxy-7-deazaguanine synthase OS=Fictibacillus phosphorivorans OX=1221500 GN=queE PE=3 SV=1
MFDLPSKDVWKNWKIPMVEIFETVEGEGLQAGYPTVFVRVFHCNLRCTWCDTTYSYAPAKPEFEATIEEIVNTIKSYRSQRICFTGGEPLIHREKSAALLLAMADLDHIVDIHIETNGAIDLQPFEQLRNSHHDLQKKMRFVMDYKLPASGEMDRMHMDNFKELQHQDEIKFVVGSENDFEITKQVVSEHYRNGQISVSPVWESMPPRRLVELLLKNPLPNAKLSLQLHKVIWHPEERGV

SEQ ID NO: 30061 - protein, 243 aa, unidentified
  source 1..243: note = Fictibacillus solisalsi
  REGION 1..243: note = tr|A0A1G9X264|A0A1G9X264_9BACI 7-carboxy-7-deazaguanine synthase OS=Fictibacillus solisalsi OX=459525 GN=queE PE=3 SV=1
MTNHFELPLSDVYSQWKLPMVEIFETIEGEGMAAGFPTIFVRVFHCNLRCTWCDTPYSYAPAKPEFEATIEEIIERINTFASKRICFTGGEPLIHREKSAALLKAMAGIERIEDIHVETNGAIALKPFQLLRESDPMLSSKVRFVMDYKLPASGEMNRMIHENFDVLKPNDEIKFVIGSDDDFDIASSVLEQHHKQGLALFSPVWETMPPEKLVNKVLTARMPDVKVSMQLHKIIWDPEKRGV

SEQ ID NO: 30062 - protein, 243 aa, unidentified; identical to SEQ ID NO: 30057
  source 1..243: note = Fictibacillus sp.
  REGION 1..243: note = tr|A0A4Q2HYQ4|A0A4Q2HYQ4_9BACI 7-carboxy-7-deazaguanine synthase OS=Fictibacillus sp. S7; OX = 2212476 GN=queE PE=3 SV=1

SEQ ID NO: 30063 - protein, 242 aa, unidentified
  source 1..242: note = Fictibacillus sp.
  REGION 1..242: note = tr|A0A4Q7QPU2|A0A4Q7QPU2_9BACI 7-carboxy-7-deazaguanine synthase OS=Fictibacillus sp. BK138 OX=2512121 GN=queE PE=3 SV=1
MKSFVLPSKDIWRNWKLPMVEIFETVEGEGLQAGYPTVFVRVFHCNLRCTWCDTTYSYAPAKPEFEATIDEIISTIKSFRSSRICFTGGEPLIHREKSAALLMAMADLDHIEDIHIETNGAIDLEPFENLRNSHPELQRKMRFVMDYKLPASGEMEKMNLDNFKELQNQDEIKFVIGSEEDFEITKQVVEQHYRKGQICVSPVWESMPPRRLVELLLESHLPNAKLSLQLHKVIWHPEERGV

SEQ ID NO: 30064 - protein, 216 aa, unidentified
  source 1..216: note = Unknown
  REGION 1..216: note = tr|A0A2T1DPF9|A0A2T1DPF9_9CYAN 7-carboxy-7-deazaguanine synthase OS=filamentous cyanobacterium CCP2 OX=2107700 GN=queE PE=3 SV=1
MTRISNSVAKNAVGLNQSEPSLPIVETFHSVQGEGAWTGTSAFFIRLAGCDVGCPWCDTKESWNVRRHADRSIADLVSEAVQVQPAIVVITGGEPLMHDLTDLTRSLHTAKLRVHLETSGAYPLSGTFDWITVSPKRHKPPQPSIYNHANELKIVVAEALDLEWAEQQAVYVSPDTLKLLQPEWNTPDSTALVFDYVLRHPAWRVSLQTHKFLGVR

SEQ ID NO: 30065 - protein, 214 aa, unidentified
  source 1..214: note = Unknown
  REGION 1..214: note = tr|A0A2P8WB21|A0A2P8WB21_9CYAN 7-carboxy-7-deazaguanine synthase OS=filamentous cyanobacterium CCT1 OX=2107702 GN=queE PE=3 SV=1
MISPTTISQATESSALALELPVVETFHSIQGEGMWAGTNAFFIRLAGCDVGCSWCDTKQSWNPKRFPLKTPEELVAEARSANPQIVVITGGEPLMHDLSALTGQLKEAGLQTHLETSGAHPFSGTFDWVTFSPKRFKPPHASIYAHANELKVVIGNETDLEWAEQQATQVSSTVTKLLQPEWETPSSCDKVFAYVLKHPQWRVSLQTHKFLGVQ

SEQ ID NO: 30066 - protein, 378 aa, Filibacter sp.
  REGION 1..378: note = tr|A0A3P5X3V4|A0A3P5X3V4_9BACL 7-carboxy-7-deazaguanine synthase OS=Filibacter sp. TB-66; OX = 2483811 GN=queE PE=4 SV=1
MKNNLVSVEQMTPVFDPWEAYLDVQEHGKLTLSSIEFTTTYLCNMRCEHCAVGYMLQHKDPDALPIELLLSRLDEIPHLRTISITGGEPIFSKKSVDQYVLPLLKYANERGVRTQINSNLTMPLDRYMAIAPYLDVLHISHNWGTVDDFVDGGFANMERKPSKERRAKQFQRMITNSRALAEAGVMVSAETMLNKRTLPHLEHIHRQVIEEMKCARHEIHPMYPSDFASQLEVLSLDETRKAIHQLLDSRNEDVWMLFGTLPFYPCSDNEEDLALLQRIYSSKNVSVRNDPDGRSRLNVNIFTGDVIVTDFGDTPPMGNIQTESLPIMLDRWLERPLAETIGCHCPAVNCLGPNLLVKDAYYPEMDFQKKKADILLSI

SEQ ID NO: 30067 - protein, 216 aa, unidentified
  source 1..216: note = Filimonas endophytica
  REGION 1..216: note = tr|A0A561IV62|A0A561IV62_9BACT 7-carboxy-7-deazaguanine synthase OS=Filimonas endophytica; OX = 1500311 GN=queE PE=3 SV=1
MNELAETATAVTLPVMEAFYTLQGEGFHQGKAAYFIRLGGCDVGCFWCDVKESWDASVHPRQTIEQIVATALHEVNCTHGQANNLIAVVTGGEPLMHNLDALTLALKQAGFQTNIETSGASPLSGHWDWICFSPKKFKAPVPEILPAANELKVVIYNKHDFEWAEEWAAQVSPQCKLYLQPEWDKSDTVLPLMIDYIKAHPRWQLSAQVHKYINVP

SEQ ID NO: 30068 - protein, 216 aa, Filimonas lacunae
  REGION 1..216: note = tr|A0A173MMY8|A0A173MMY8_9BACT 7-carboxy-7-deazaguanine synthase OS=Filimonas lacunae; OX = 477680 GN=queE PE=3 SV=1
MNELVETATAVTLPVMEAFYTIQGEGFHQGKAAYFIRLGGCDVGCFWCDVKDSWDASIHPPFSTQQIVATALQEVNRTHGQANHLIAVVTGGEPLMHNLDELTLALQAAGFDTNIETSGSSPLSGHWNWICLSPKKFKAPVPEILPVANELKVVIFNKHDFEWAEQYAAQVSSTCKLYLQPEWDKSAVVLPLIIDYIKANPQWQLSAQVHKYINVP

SEQ ID NO: 30069 - protein, 216 aa, Filimonas sp.
  REGION 1..216: note = tr|A0A2U0ZXT9|A0A2U0ZXT9_9BACT 7-carboxy-7-deazaguanine synthase OS=Filimonas sp. YR581; OX = 2135469 GN=queE PE=3 SV=1
MNELVETATVVTLPVMEAFYTLQGEGFHQGKAAYFIRLGGCDVGCFWCDVKDSWDAAMHPQLTIAQIVNRALEDVNRTHGQANHLIAVVTGGEPLMHNLDALTLALQQAGFSTNIETSGSSPLSGHWDWICFSPKKFKAPVPEILPAANELKVVIYNKHDFEWAEQYAAQVSPHCKLYLQPEWDKSDTVLPLIIDYIKANPRWQLSAQVHKYINVP

SEQ ID NO: 30070 - protein, 201 aa, Filimonas sp.
  REGION 1..201: note = tr|A0A4Q1D849|A0A4Q1D849_9BACT 7-carboxy-7-deazaguanine synthase OS=Filimonas sp. TTM-71; OX = 2508721 GN=queE PE=3 SV=1
MESFYTIQGEGFYQGKAAYFIRLGGCDVGCFWCDVKESWDASAHPLYTIEQITERAVQEVTAVTPDTFPVIAVVTGGEPLMHELYELTEALQTAGFATNIETSGSSPLSGYWDWICLSPKKFKAPLPEVAQAANELKVIIYNKHDLIWAEEQAKLVLPSCKLYLQPEWGKAAEVTPYIVDYIKTHPHWGLSLQIHKYINVP

SEQ ID NO: 30071 - protein, 242 aa, Filobacillus milosensis
  REGION 1..242: note = tr|A0A4Y8IFJ6|A0A4Y8IFJ6_9BACI 7-carboxy-7-deazaguanine synthase OS=Filobacillus milosensis OX=94137 GN=queE PE=3 SV=1
MNKFPVLEIFGPTIQGEGMVVGRKTMFVRTAGCDYSCSWCDSAFTWDGSAKDEIERLTAEDIFARLKEIGGNQFDHVTVSGGNPALLKKLHELIDLLHEAGIEVALETQGSRWQEWFTDIDDLTISPKPPSSKMLTDWGILDDIVARLREGDRLSHTSLKVVIFNDEDLAYAEKVHERYPNLPFYLQVGNDELEENQAPNLAQHLLDRYEWLINRVVESSKLNKVRVLPQVHALVWGNKRGV

SEQ ID NO: 30072 - protein, 232 aa, unidentified
  source 1..232: note = Fimbriiglobus ruber
  REGION 1..232: note = tr|A0A225DBR5|A0A225DBR5_9BACT 7-carboxy-7-deazaguanine synthase OS=Fimbriiglobus ruber; OX = 1908690 GN=queE PE=3 SV=1
MIALPSTTHRVAPLQSVPPGNLLIHEIYLSVQGESTFAGLPCVFVRTTVCDLRCVWCDTPHAFTRGEQMTRADVLARALAFDCPLVELTGGEPLLQPAVLPLMTDLCDAGKTVLLETSGAHPVGPVDPRVHIIMDLKCPDSGECDRNLWANLDVLKPTDQIKFVIASRRDWDWAADTIRAHNLDKRFHVLVGTVFGDATPRDLVEWLLASGLNIRMQLQMHKYIWDPAARGV

SEQ ID NO: 30073 - protein, 233 aa, unidentified
  source 1..233: note = Fimbriimonas ginsengisoli
  REGION 1..233: note = tr|A0A068NL80|A0A068NL80_9BACT 7-carboxy-7-deazaguanine synthase OS=Fimbriimonas ginsengisoli Gsoil 348 OX=661478 GN=queE PE=3 SV=1
MSDDARLRIAEIFASVQGEGSWVGIPSVFVRVSGCNLRCAWCDTPYASWRPEGPVMPVGEILERVIATGIDHVVLTGGEPMLFGGVETLAEECHRLGKTITIETAGTIYRELPCDLMSISPKLANSTPQDEAWRERHESTRLQIDVLQRLIDRYRYQLKFVVGPNVEADLVEIEGLLSRLRGVVPQRVLLMPEGTDAETLHRRARALVGPVMRRNWRLTTRLHIDLFGNTKGT

SEQ ID NO: 30074 - protein, 226 aa, unidentified
  source 1..226: note = Firmicutes bacterium
  REGION 1..226: note = tr|A0A373PTL6|A0A373PTL6_9FIRM 7-carboxy-7-deazaguanine synthase OS=Firmicutes bacterium AM55-24TS OX=2292896 GN=queE PE=3 SV=1
MKVIEIFDSIDGEGIRTGQCATFIRLAGCNLRCSYCDTVYSLFGEETPCEYTEMTVDEIISKVNMTYKRVTLTGGEPLVHTDSAELVSKLTELGCDVNIETNGAVDIVDFLGKVQKSDNLFFTIDYKLPSSGMTDKMIWNNFINLRPCDVIKFVIGSDEDMNLTIGIVKKLKQVYTEMPHIYLGAVYGMYDAQKLVNIMLKEPVLCDATFQIQLHKVIWDPEERGV

SEQ ID NO: 30075 - protein, 222 aa, unidentified
  source 1..222: note = Firmicutes bacterium
  REGION 1..222: note = tr|A0A2N2B3K1|A0A2N2B3K1_9FIRM 7-carboxy-7-deazaguanine synthase OS=Firmicutes bacterium HGW-Firmicutes-7 OX=2013788 GN=queE PE=3 SV=1
MTYSVVEKFISINGEGRLSGQLAVFIRLQGCNLSCSFCDTSWANDEGCSCTFMTKEELDAYIHSIGITNVTLTGGEPLIQEHFIDLVTYLSRDQQRRIEIETNGSVLISSIKEVGNDNICVTMDYKLPVSGMEQFMKLENLRLLSKEDTIKFVVGNEEDLNRAKELIDEYKLVQHTNVYISPVFGQITPEEIVEWMKMHVLNQVTLQLQLHKIIWGNEVKGV

SEQ ID NO: 30076 - protein, 265 aa, Fischerella major
  REGION 1..265: note = tr|A0A1U7GW83|A0A1U7GW83_9CYAN 7-carboxy-7-deazaguanine synthase OS=Fischerella major NIES-592 OX=210994 GN=queE PE=3 SV=1
MTNKIGITPVARLVEVFSAIQGEGLNVGTRQIFIRFAFCDLRCHFCDSAHTWNAPATCRIERSPGRRDFEIHSNPVPLPILLEWIERQNIPSLHDSISLTGGEPLLHAAFLVEFLPQLRNVTALPIYLETGGHRPEQLAMILPYLDSVGMDLKLPSTSGENRWQEHAKFLQLCYESQVEVFVKIIISKQTDPGELEHSASLVAQVSPSIPVFLQPVTPLPASEQLTENPVLAPSPEQVLMWQALMKRFVKQVRVIPQTHKMLNQL

SEQ ID NO: 30077 - protein, 265 aa, unidentified
  source 1..265: note = Fischerella muscicola
  REGION 1..265: note = tr|A0A2N6JUE6|A0A2N6JUE6_FISMU 7-carboxy-7-deazaguanine synthase OS=Fischerella muscicola CCMEE 5323 OX=2019572 GN=queE PE=3 SV=1
MTTKIGITPIARLVEVFSAIQGEGLNVGTRQIFIRFAFCDLRCHFCDSAHTWNAPTTCRIERSPGKRDFEIHSNPVPLPILLEWIERQNIPSLHDSISLTGGEPLLHAAFLVEFLPQLRNITALPIYLETSGHRPEQLAMILPYLDSVGMDLKLPSTSGENRWQEHAKFLQLCYESQVEVFVKIIISEQTDPAELERSASLVAQVSPSIPVFLQPVTPLPASEQLTENPVLAPSPDQVLMWQALMKRFVKQVRVIPQTHKMLNQL

SEQ ID NO: 30078 - protein, 296 aa, Fischerella sp.
  REGION 1..296: note = tr|A0A1Z4TQ08|A0A1Z4TQ08_9CYAN 7-carboxy-7-deazaguanine synthase OS=Fischerella sp. NIES-4106 OX=2005456 GN=queE PE=3 SV=1
METASKVHNRTRSSEISLLYAERAHTPFDHQMTTKIGITPTARLVEVFSAIQGEGLNVGTRQIFIRFALCDLRCQFCDSAHTWNAPTNCRIERSPGKRDFEIYSNPVSLPILLEWIERQNIPSLHDSISLTGGEPLLHAGFLVEFLPQIRAITALPIYLETGGHRPEQLAMILPYLDSVGMDLKLPSTSGENCWQEHSKFLQLCYESQVEIFVKIIISDETNPAELERSALLVAQVSPAIPVFLQPVTPLPASEQFTKNPVLAPSPEQVLMWQALIKRFVKQVRVIPQTHKMLNQL

SEQ ID NO: 30079 - protein, 265 aa, Fischerella sp.
  REGION 1..265: note = tr|A0A0S3TV76|A0A0S3TV76_9CYAN 7-carboxy-7-deazaguanine synthase OS=Fischerella sp. NIES-3754 OX=1752063 GN=queE PE=3 SV=1
MTNKIGITPVARLVEVFSAIQGEGLNVGTRQIFIRFAFCDLRCHFCDSAHTWNAPATCRIERSPGRRDFEIHSNPVPLPILLEWIERQNIPSLHDSISLTGGEPLLHAAFLVEFLPQLRNVTALPIYLETGGHRPEQLAMILPYLDSVGMDLKLPSTSGENRWQEHAKFLQLCYESQVEVFVKIIISKQTDPGELERSASLVAQVSPSIPVFLQPVTPLPASEQLTENPVLAPSPEEVLMWQALMKRFVKQVRVIPQTHKMLNQL

SEQ ID NO: 30080 - protein, 265 aa, Fischerella thermalis
  REGION 1..265: note = tr|A0A2N6MDF2|A0A2N6MDF2_9CYAN 7-carboxy-7-deazaguanine synthase OS=Fischerella thermalis CCMEE 5330 OX=2019670 GN=queE PE=3 SV=1
MTNKIGITPVARLVEVFSAIQGEGLNVGTRQIFIRFAFCDLRCHFCDSAHTWNAPATCRIERSPGRRDFEIHSNPVPLPILLEWIERQNIPSLHDSISLTGGEPLLHAAFLVEFLPQIRNITALPIYLETGGHRPEQLAMILPYLDSVGMDLKLPSTSGENRWQEHAKFLQLCYESQVEVFVKIIISEKTDPAELERSASLVAQVSPSIPVFLQPVTPLPASEQLTENPVLAPSPEQVLMWQALMKRFVKQVRVIPQTHKMLNQL

SEQ ID NO: 30081 - protein, 265 aa, Fischerella thermalis
  REGION 1..265: note = tr|A0A2N6N157|A0A2N6N157_9CYAN 7-carboxy-7-deazaguanine synthase OS=Fischerella thermalis CCMEE 5201 OX=2019672 GN=queE PE=3 SV=1
MTTKIGITPIARLVEVFSAIQGEGLNVGTRQIFIRFAFCDLRCHFCDSAHTWNAPTTCRIERSPGRRDFEIHSNPVPLPILLEWIERQNIPSLHDSISLTGGEPLLHAAFLVEFLPQIRNITALPIYLETGGHRPEQLAMILPYLDSVGMDLKLPSTSGENRWQEHAKFLQLCYESQVEVFVKIIISEKTDPAELERSASLVAQVSPSIPVFLQPVTPLPASEQLTENPVLAPSPEQVLMWQALMKRFVKQVRVIPQTHKMLNQL

SEQ ID NO: 30082 - protein, 210 aa, unidentified
  source 1..210: note = Flagellimonas aquimarina
  REGION 1..210: note = tr|A0A316KV37|A0A316KV37_9FLAO 7-carboxy-7-deazaguanine synthase OS=Flagellimonas aquimarina OX=2201895 GN=queE PE=3 SV=1
MVTAEVHDLVNKGHMLPLMEEFYTIQGEGYHKGTAAYFIRIGGCDVGCHWCDVKESWNAETHPPTSIDSIVDNAASYSDTIVITGGEPLTWDMGPLTTALKAKNLQTHIETSGAYPLTGTWDWICLSPKKNKLPEEEIYNVANELKVIVYNKHDLIFAEEQAAKVNENCILYLQPEWSVRDKMVPLIVDYVMQNPKWKVSLQTHKYLNIP

SEQ ID NO: 30083 - protein, 210 aa, Flagellimonas eckloniae
  REGION 1..210: note = tr|A0A0Q0XQ71|A0A0Q0XQ71_9FLAO 7-carboxy-7-deazaguanine synthase OS=Flagellimonas eckloniae OX=346185 GN=queE PE=3 SV=1
MVSEQVMDLVDKGLMLPLMEEFYTIQGEGYHKGTAAYFIRVGGCDVGCHWCDVKESWNAETHPPTQIASIVDNASNYSDTIVITGGEPLTWDMGPLTAALKEKKLQTHIETSGAYPFTGIWDWICLSPKKNKLPEEEIYAVAHELKVIVYNKHDFIFAEEQAEKVNGKCILYLQPEWSVREKMVPLIVDYVMKNPKWKVSLQTHKYLNIP

SEQ ID NO: 30084 - protein, 215 aa, unidentified
  source 1..215: note = Flagellimonas flava
  REGION 1..215: note = tr|A0A1M5NPX3|A0A1M5NPX3_9FLAO 7-carboxy-7-deazaguanine synthase OS=Flagellimonas flava; OX = 570519 GN=queE PE=3 SV=1
MYLCRMVTADVMQLVEQGKMLPLMEEFYTIQGEGYHKGTAAYFIRVGGCDVGCHWCDVKESWNAETHPPTAIENIIENANTYSDTIVITGGEPLTWDMGPLTTGLKDKKLQTHIETSGAYTLTGIWDWICLSPKKNKLPVPEIYPLAHELKVIVYNRHDFVFAEEQAQKVSEDCILYLQPEWSVREKMVPLIVDYVMQHPKWKVSLQTHKYLNIP

SEQ ID NO: 30085 - protein, 210 aa, unidentified
  source 1..210: note = Flagellimonas maritima
  REGION 1..210: note = tr|A0A2Z4LPF4|A0A2Z4LPF4_9FLAO 7-carboxy-7-deazaguanine synthase OS=Flagellimonas maritima OX=1383885 GN=queE PE=3 SV=1
MVSEKVMDLVGKGLMLPLMEEFYTIQGEGYHKGTAAYFIRVGGCDVGCHWCDVKESWNAETHPPTAIERIIDNASKYSNIIVITGGEPLTWDMGPLTSGLKNKNLQIHIETSGAYPLTGKWDWICLSPKKNKLPKNKIYALANELKIIVYNKHDFIFAEEQAAQVSEDCILYLQPEWSVRDKMVPEIVDYVMKNPKWKVSLQTHKYLNIP

SEQ ID NO: 30086 - protein, 210 aa, unidentified
  source 1..210: note = Flagellimonas pacifica
  REGION 1..210: note = tr|A0A285N0V4|A0A285N0V4_9FLAO 7-carboxy-7-deazaguanine synthase OS=Flagellimonas pacifica OX=1247520 GN=queE PE=3 SV=1
MVLEQVKDLVEKGQMLPLMEEFYTIQGEGYHKGTAAYFVRIGGCDVGCHWCDVKESWDAETHPPTDIKKIVANAAKYSNTIVITGGEPLMWDMAPLTSGLKTKNLHTHIETSGAYPLTGTWDWICLSPKKNKLPTEEIYDVASELKVIVYNKHDFVFAEEQAAKVNENCILYLQPEWSVREKMIPLIVDYVMQNPKWIVSLQTHKYLNIP

SEQ ID NO: 30087 - protein, 210 aa, Flagellimonas sp.
  REGION 1..210: note = tr|A0A5C8V2Z5|A0A5C8V2Z5_9FLAO 7-carboxy-7-deazaguanine synthase OS=Flagellimonas sp. 176CP5-101 OX=2603628 GN=queE PE=3 SV=1
MVTTQVMDLVNKGTMLPLMEEFYTIQGEGYHKGTAAYFIRVGGCDVGCHWCDVKESWDAEIHPPTAIESIIDNASSYSDTIVVTGGEPLTWDMGPLTSGLKTKNLQIHIETSGAYPLTGVWDWICLSPKKNKLPVPEIYDSANELKIIVYNKHDLVFAEEQAAKVGKDCILYLQPEWSVREKMVPIIVDYVMQNPQWKVSLQTHKYLNIP

SEQ ID NO: 30088 - protein, 214 aa, Flammeovirga kamogawensis
  REGION 1..214: note = tr|A0A553GK20|A0A553GK20_9BACT 7-carboxy-7-deazaguanine synthase OS=Flammeovirga kamogawensis OX=373891 GN=queE PE=3 SV=1
MVKHLEYSTKERVQLGYALPVMEAFYTIQGEGSFSGHAAYFIRLAGCDVGCVWCDVKESWEQDKHPILDIEEIIQDAKAHPGRLAIITGGEPLMHELGPLTKRLKEEGFQINIETSGTHKFTGEIDYVCLSPKKFKAPVEEAYKKADEFKVVVFHKSDLQWAIDLSEKLNPNCKLYIQPEWSKRNTVTPLLVEFVKENPEWHLSLQTHKYIDIP

SEQ ID NO: 30089 - protein, 214 aa, Flammeovirga pacifica
  REGION 1..214: note = tr|A0A1S1YX32|A0A1S1YX32_9BACT 7-carboxy-7-deazaguanine synthase OS=Flammeovirga pacifica; OX = 915059 GN=queE PE=3 SV=1
MVKKIDYSLKERVKLGNALPVMEAFYTIQGEGAYTGQAAYFIRLAGCDVGCVWCDVKESWEQDAHPVLDIEEIISNAKEHPGRLAIITGGEPLMHNLAPLTKRLKDEGFHINIETSGTHQFTGHLDYITLSPKKFKKPVEEAYQLASEFKVVVYHKSDIQWAINLSEKLNKDCKLYIQPEWSKRQEVTPMLVEFVKNNPEWQLSLQTHKYIDIP

SEQ ID NO: 30090 - protein, 214 aa, Flammeovirga sp.
  REGION 1..214: note = tr|A0A1B1FQK4|A0A1B1FQK4_9BACT 7-carboxy-7-deazaguanine synthase OS=Flammeovirga sp. MY04; OX = 1191459 GN=queE PE=3 SV=1
MVKKLDYSVKERVKQGHALPVMEAFYTIQGEGAYTGQAAYFIRLAGCDVGCVWCDVKESWEQDAHPVLEIEEIIQNAKKHPGRLAIITGGEPLMHNLEPLTKRLKEEGFHINIETSGTHKFTGHLDYITLSPKKFKKPVEEAYQLASEFKVVVFHKSDIQWAINLSEKLNKDCKLYIQPEWSKRQEITPLLVEFVKNNPEWQLSLQTHKYIDIP

SEQ ID NO: 30091 - protein, 214 aa, Flammeovirga sp.
  REGION 1..214: note = tr|A0A150AB01|A0A150AB01_9BACT 7-carboxy-7-deazaguanine synthase OS=Flammeovirga sp. SJP92 OX=1775430 GN=queE PE=3 SV=1
MVKHLEYSTKERVQLGLSLPVMEAFYTIQGEGAYTGQAAYFIRLAGCDVGCVWCDVKESWEQDKHPVLTVEEIVQNAKKYPGRLAIITGGEPLMHDLGPLTEQLKEEGFHINIETSGAHPLSGELDYITLSPKKFKQPVEEVYQRANEFKVVVYHKSDLQWAINLSEKLSDDCKLYIQPEWSKRAQITPLLVEFVKSNPEWQLSLQTHKYIDIP

SEQ ID NO: 30092 - protein, 203 aa, unidentified
  source 1..203: note = Flammeovirgaceae bacterium
  REGION 1..203: note = tr|A0A2D5QJM0|A0A2D5QJM0_9BACT 7-carboxy-7-deazaguanine synthase OS=Flammeovirgaceae bacterium OX=2026740 GN=queE PE=3 SV=1
MKRGSVNLPVMESFYSIQGEGYHSGKPAYFVRLAGCDVKCTWCDVKDSWSNTDDQFIHVKKIVNEINKYPTDLIIITGGEPFYHDLGPLTKLLKEEGKLVHVETSGTEKFTGTFDWICLSPKRFKKPLENFYEISDELKVIIYQDSDFRWAERISSKMKKDIQRILQPEWSVEKKANTNILNYIKKNPSWRISLQTHKYLKVD

SEQ ID NO: 30093 - protein, 211 aa, unidentified
  source 1..211: note = Flammeovirgaceae bacterium
  REGION 1..211: note = tr|A0A2D6AKL8|A0A2D6AKL8_9BACT 7-carboxy-7-deazaguanine synthase OS=Flammeovirgaceae bacterium OX=2026740 GN=queE PE=3 SV=1
MKTRIQKDNGLIVDELPVMESFLTVQGEGGHTGSAAYFIRLGGCDVGCVWCDVKESWDPKAHPIQKIDDIVNEASQQGVKIIVVTGGEPLMYNLDHFTDNLHATGLKTHIETSGAHSLSGNWDWLCFSPKKFMAPKEEFYSAADELKVVVYNKSDFKWAEEHAAKCANKVNLFLQPEWSKKDQMLPMIVDYVKKNPKWRISLQTHKYMDIP

SEQ ID NO: 30094 - protein, 193 aa, unidentified
  source 1..193: note = Flaviaesturariibacter sp.
  REGION 1..193: note = tr|A0A4R4E7G7|A0A4R4E7G7_9BACT 7-carboxy-7-deazaguanine synthase OS=Flaviaesturariibacter sp. 17J68-15 OX=2545761 GN=queE PE=3 SV=1
MEHFYTLQGEGLYQGKAAYFIRLGGCDVGCVWCDVKDSWDASMHPQRSIPELTELVTATPAPIVVITGGEPLLHNLDGLTAALRAAGIRTHIETSGSSPLSGQWDWITLSPKKFKAPLPEVVAEADELKVVVFNKSDFAWAEQWAALVKPACRLYLQPEWDKAGLMTPLIIDYVKEHPQWQLSLQIHKYINVP

SEQ ID NO: 30095 - protein, 251 aa, unidentified
  source 1..251: note = Flaviaesturariibacter sp.
  REGION 1..251: note = tr|A0A4R1BBL2|A0A4R1BBL2_9BACT 7-carboxy-7-deazaguanine synthase OS=Flaviaesturariibacter sp. 17J68-12 OX=2502780 GN=queE PE=3 SV=1
MLKLARLNGQPEIFHSIQGEGKSIGRPSVFIRLSLCNLYCAWCDTDYTWNWEGTAFTHNNDVRPGYRKYRKEEYQQLISNEEIRDRLAVISCSNLIFTGGEPLVQQKDLRSLFRLLKENNPDYHIEFETNGTLKPLPEIDALTDQYNVSVKLANSKVAPEDRLNPEAIRFFAASPKANFKFVVDSRADLDEVLALVQGYGIRPEAVYLMPQGTSAAALREKQAWVAELCKQYNYNYTDRLHIHIWGDKRGV

SEQ ID NO: 30096 - protein, 206 aa, Flavihumibacter petaseus
  REGION 1..206: note = tr|A0A0E9N717|A0A0E9N717_9BACT 7-carboxy-7-deazaguanine synthase OS=Flavihumibacter petaseus NBRC 106054 OX=1220578 GN=queE PE=3 SV=1
MNLASTISTRLPLMEAFYTLQGEGRHQGRAAYFIRLGGCDVGCVWCDVKDSWDADKHPLTAINDMVHGAATYPGRLAVITGGEPLLHQLDELTDALKAAGFETNIETSGSSPLSGQWDWICLSPKKFKAPLPEVVEKADELKVVIFHPSDFKWAEQWAAQVKPGCKLYLQPEWEKREKMMPLIIQYILDNPQWELSIQSHKYIGVP

SEQ ID NO: 30097 - protein, 208 aa, unidentified
  source 1..208: note = Flavihumibacter solisilvae
  REGION 1..208: note = tr|A0A0C1L132|A0A0C1L132_9BACT 7-carboxy-7-deazaguanine synthase OS=Flavihumibacter solisilvae OX=1349421 GN=queE PE=3 SV=1
MEVEQIIPDTTTLPVMEAFYTLQGEGYHQGKAAYFIRLGGCDVGCVWCDVKDSWDADRHPQLSITEIITEAQKYPGRLAVVTGGEPLLHNLDNLTAALHAAGFDTNIETSGSSPLSGKWDWICLSPKKFKFPLDEVILAADELKVVIFNKSDFEWAEKYASQVKPSCKLFLQPEWDKKDQMLPLIIDYIKENPQWELSIQAHKYIHVP

SEQ ID NO: 30098 - protein, 205 aa, Flavihumibacter sp.
  REGION 1..205: note = tr|A0A162NBS0|A0A162NBS0_9BACT 7-carboxy-7-deazaguanine synthase OS=Flavihumibacter sp. CACIAM 22H1 OX=1812911 GN=queE PE=3 SV=1
MVEITDIPALPVMESFYTLQGEGFHQGRAAYFIRLGGCDVGCVWCDVKESWDASKHPQQSIQTIVKNALEYPGKLAVITGGEPLLYNLDALTLQLRQAGFETNIETSGSSPLSGYWDWICLSPKKFKFPLPEVIAAANELKVVIFNKSDFQWAEKYAAQVQPGCKLYLQPEWDKQTDMLPLIIDYIKAHPQWELSIQSHKYINVP

SEQ ID NO: 30099 - protein, 193 aa, Flavihumibacter sp.
  REGION 1..193: note = tr|A0A0C1KPX2|A0A0C1KPX2_9BACT 7-carboxy-7-deazaguanine synthase OS=Flavihumibacter sp. ZG627 OX=1463156 GN=queE PE=3 SV=1
MESFYTLQGEGFHQGRAAYFIRLGGCDVGCSWCDVKESWDESLHPKQSVEEIVENAKAYPGRLAVITGGEPLLHNLNNLTSALQEAGFETNIETSGSSDLSGNWDWICLSPKKFKFPLPEVVQTADELKVVVFNKTDFDWAEKWAADVKPACKLYLQPEWGKKEQMLPLIIDYIKAHPRWELSIQSHKYINVP

SEQ ID NO: 30100 - protein, 193 aa, unidentified
  source 1..193: note = Flavipsychrobacter stenotrophus
  REGION 1..193: note = tr|A0A2S7SVF7|A0A2S7SVF7_9BACT 7-carboxy-7-deazaguanine synthase OS=Flavipsychrobacter stenotrophus OX=2077091 GN=queE PE=3 SV=1
MEHFYTLQGEGLHTGRAAYFIRLGGCDVGCVWCDVKESWDASIHPQMTANEITQLAAANPGRIAVITGGEPALHDLTALCNLLHGEGFKTHIETSGSSPIVGAIDWVTLSPKKFKAPIQEALDLANELKVVVYHHSDFKWAEEHAAKVGKDCLLYLQPEWSKRDSVTPLIIDYIQQHPQWQLSLQTHKYINIP

SEQ ID NO: 30101 - protein, 209 aa, Flaviramulus basaltis
  REGION 1..209: note = tr|A0A1K2IAE2|A0A1K2IAE2_9FLAO 7-carboxy-7-deazaguanine synthase OS=Flaviramulus basaltis; OX = 369401 GN=queE PE=3 SV=1
MNKDIQILVDKGEMLPLMEEFYTIQGEGFHKGTAAYFVRIGGCDVGCHWCDVKESWNANLHPPTETSKIVENAKKHSDTIVVTGGEPLTWDMTALTTKLKAEGLQVHIETSGAYKLTGIWDWICLSPKKMKLPTKEVYERADELKMIIYNKDDFRFAEEQAAKVNKNCILYLQPEWSKRDKVVPEIVDYVMKNPKWKVSLQTHKYLNIP

SEQ ID NO: 30102 - protein, 214 aa, Flavisolibacter ginsengisoli
  REGION 1..214: note = tr|A0A1M5D5S9|A0A1M5D5S9_9BACT 7-carboxy-7-deazaguanine synthase OS=Flavisolibacter ginsengisoli DSM 18119 OX=1121884 GN=queE PE=3 SV=1
MNGLSTMSSTIEIVPITALPVMEHFYTLQGEGVHQGKAAYFIRLAGCDVGCVWCDVKDSWDSTRHPLLEIEFLVEKVKQAGSPIAVITGGEPLLHDLQELTRQLQDAGLKTHMETSGSSSLSGSWDWITLSPKKFKPPLTEVVIKANELKVVVFNKSDFEWAEKWADQVSPGCKLYLQPEWDKAALVTPMIIDYIKAHPQWQLSLQIHKYINVP

SEQ ID NO: 30103 - protein, 193 aa, unidentified
  source 1..193: note = Flavisolibacter ginsenosidimutans
  REGION 1..193: note = tr|A0A5B8UPC0|A0A5B8UPC0_9BACT 7-carboxy-7-deazaguanine synthase OS=Flavisolibacter ginsenosidimutans OX=661481 GN=queE PE=3 SV=1
MEHFYTLQGEGVHTGKAAYFIRLGGCDVGCVWCDVKDSWDGGKHPLWKIEDLVTTVKQTPAQIVVITGGEPLMHDLAALTKALHDAGLRTHIETSGSSPLSGELDWITLSPKKFKAPLPEVLPQAQELKIVVFNGSDFAWAEDWAAKVSPQCKLFLQPEWSKAEQMTPLIVDYIKAHPQWQLSLQTHKYINVP

SEQ ID NO: 30104 - protein, 238 aa, unidentified
  source 1..238: note = Flavisolibacter tropicus
  REGION 1..238: note = tr|A0A172TVM6|A0A172TVM6_9BACT 7-carboxy-7-deazaguanine synthase OS=Flavisolibacter tropicus OX=1492898 GN=queE PE=3 SV=1
MNQHQESKYRVKAIWKTLQGEGLFAGRPAVFVRLVGCNMWSGYEQTRQRDAERNGGSCPLWCDTDFTKEGSQDYTAEALAAAMQKVGGDVRFCVITGGEPLMQLDYTLVKALHKAGYFIAIETNGTLSLAERCWDPKAEKLEAPDWIVCSPKLAVPQLQLEFFDELKLVVPDYKPEDFDAFVGLQRINKIHNHTLPLLWLQPEDGARLQEARKMAIETALAHPQWRVSVQTHKILNVE

SEQ ID NO: 30105 - protein, 209 aa, unidentified
  source 1..209: note = Flavivirga eckloniae
  REGION 1..209: note = tr|A0A2K9PUC1|A0A2K9PUC1_9FLAO 7-carboxy-7-deazaguanine synthase OS=Flavivirga eckloniae; OX = 1803846 GN=queE PE=3 SV=1
MKEMIQLQIDRGEMLPLMEEFYTIQGEGYHKGTAAYFIRIGGCDVGCHWCDVKESWNANLHPPTETVNIVENAKKYSDTIVVTGGEPLMWDMTVLTERLKDKGLQVHIETSGAYKFTGTWDWVCLSPKKTKLPTEEAYEKADELKMIIYNKDDFRFAEEQAAKVNKDCILYLQPEWSKRDKVVPEIVDYVMANPKWKVSLQTHKYLNIP

SEQ ID NO: 30106 - protein, 209 aa, Flavivirga sp.
  REGION 1..209: note = tr|A0A4V6R460|A0A4V6R460_9FLAO 7-carboxy-7-deazaguanine synthase OS=Flavivirga sp. RZ03; OX = 2559571 GN=queE PE=3 SV=1
MKKSVQLQVDKGEMLPLMEEFYTIQGEGYHKGTAAYFIRIGGCDVGCHWCDVKESWNADLHPPTETVKIVGNAKKYSDTIVVTGGEPLMWDMTVLTDQLKEKGFQVHIETSGAYKLTGTWDWICLSPKKMKLPTKEVYDKANELKVIVYNKDDFRFAEEQAAKVNKDCILYLQPEWSKRDKVVPEIVDYVMANPKWKVSLQTHKYLNIP

SEQ ID NO: 30107 - protein, 210 aa, unidentified
  source 1..210: note = Flavobacteria bacterium
  REGION 1..210: note = tr|A3J285|A3J285_9FLAO 7-carboxy-7-deazaguanine synthase OS=Flavobacteria bacterium BAL38 OX=391598; GN = queE PE=3 SV=1
MLKKETQLAVEKGEMLPLMEEFYTIQGEGYHTGTAAYFIRIGGCDVGCHWCDVKESWNAELHPPTNTDIIVSNAKKYADTVVVTGGEPLTWDMTLLTSKLKEQNLRVHIETSGAYEVTGTWDWFCLSPKKNKLPVQSAYDIANELKVIIYNKHDFIFAEEQAAKVNPNAILFLQPEWSKKEEMTPLIVDYVMNNPKWRVSLQTHKYLNIP

SEQ ID NO: 30108 - protein, 219 aa, unidentified
  source 1..219: note = Flavobacteria bacterium
  REGION 1..219: note = tr|Q26EL0|Q26EL0_FLABB 7-carboxy-7-deazaguanine synthase OS=Flavobacteria bacterium (strain BBFL7); OX = 156586 GN=queE PE=3 SV=1
MIFKKYLCSMLEKSISQAVEKGMMLPLMEEFYTIQGEGSHTGKAAYFIRVGGCDVGCHWCDVKESWDQEKHPPTAVEAIVANAAKYSKTIVVTGGEPLTWDMGPLTTGLKEEGMQVHIETSGAYPLSGTWDWICLSPKKMKMPLPEVYEAAHELKVIVFNKHDFAFAKAEAEKVSSNCKLYLQPEWSVREKMIPLITEFVMENPEWHVSLQTHKYLNIP

SEQ ID NO: 30109 - protein, 210 aa, unidentified
  source 1..210: note = Flavobacteriaceae bacterium
  REGION 1..210: note = tr|A0A3R7TRQ7|A0A3R7TRQ7_9FLAO 7-carboxy-7-deazaguanine synthase OS=Flavobacteriaceae bacterium TMED206 OX=1986710 GN=queE PE=3 SV=1
  VARIANT 34: note = Xaa can be any naturally occurring amino acid
  VARIANT 51: note = Xaa can be any naturally occurring amino acid
  VARIANT 62: note = Xaa can be any naturally occurring amino acid
  VARIANT 68: note = Xaa can be any naturally occurring amino acid
  VARIANT 72: note = Xaa can be any naturally occurring amino acid
  VARIANT 77: note = Xaa can be any naturally occurring amino acid
  VARIANT 79: note = Xaa can be any naturally occurring amino acid
  VARIANT 94: note = Xaa can be any naturally occurring amino acid
  VARIANT 120: note = Xaa can be any naturally occurring amino acid
  VARIANT 207..208: note = Xaa can be any naturally occurring amino acid
MNQNLEKIKVNNGKILPLMDTFTTLQGEGFHSGXSAHFLRIGGCDIGCHWXDIKESWNSDLXPLVKVXNILXTIDPXTXLVIISGGEPLIWNMXPLTDALKKMNKKIHLETSGAYELSGXWDWICLSPKKNKLPIPDLFEKANELKVIVYNKHDLIFAKQNAKYVEKDCVLFLQPEWSNKEKVMPLISKFILENPNWRLSLQTHKYXXIK

SEQ ID NO: 30110 - protein, 210 aa, unidentified
  source 1..210: note = Flavobacteriaceae bacterium
  REGION 1..210: note = tr|A0A5B7SQV8|A0A5B7SQV8_9FLAO 7-carboxy-7-deazaguanine synthase OS=Flavobacteriaceae bacterium F202Z8 OX=2583587 GN=queE PE=3 SV=1
MLKTTSLDKVDAGTMLPLMEEFYTIQGEGFHKGTAAYFIRVGGCDVGCHWCDVKESWNAETHPPTAIEHIVENAAKYSDTIVVTGGEPLTWNMLPLTQALKAKNLKTHIETSGAYTLSGLWDWICLSPKKNKLPEGKIYDEAHELKVIVYNKHDFIFAEEQAAVTNENCILYLQPEWSVREKVTPLIVDYVMQNPKWKVSLQTHKYLNIP

SEQ ID NO: 30111 - protein, 210 aa, unidentified
  source 1..210: note = Flavobacteriales bacterium
  REGION 1..210: note = tr|A0A2M7VPV5|A0A2M7VPV5_9FLAO 7-carboxy-7-deazaguanine synthase OS=Flavobacteriales bacterium CG_4_10_14_0_2_um_filter_35_18 OX=1973999; GN = queE PE=3 SV=1
MQNLKNTSEVTQGKLLPLMEAFYTIQGEGFYTGKAAYFIRIGGCDVGCHWCDVKESWNAKLHPLTQTDFIVANAKKHSDTAVITGGEPLIWNMDYLTNALNKIGVKTHLETSGSYPMSGNWNWICLSPKKTKLPLAQIYQKANELKMIISNKHDFKFAEEQAQKVNASCELFLQPEWSKRAEFNNLITDYVLANPKWKISLQTHKFLNIP

SEQ ID NO: 30112 - protein, 219 aa, unidentified
  source 1..219: note = Flavobacteriales bacterium
  REGION 1..219: note = tr|A0A2A5HNY0|A0A2A5HNY0_9FLAO 7-carboxy-7-deazaguanine synthase OS=Flavobacteriales bacterium OX=2021391 GN=queE PE=3 SV=1
MINILIKNKLSEEQQQRFVEGKMLPIMEEFYSVQGEGYNTGKAAYFIRVGGCDVGCHWCDVKESWNPDLHPLVDVQQIIENIIEIEAKAIVITGGEPLLYNLDYITNQLKAIGVEVFLETSGAHQSSGSWDWYCLSPKKNIPPLDDAYHYADELKVIIHNKNDFKWAEEHAAKVKKHCRLYLQPEWSSQEKMLPLIIEYVKKHTQWSISLQTHKYMHIP

SEQ ID NO: 30113 - protein, 197 aa, unidentified
  source 1..197: note = Flavobacteriia bacterium
  REGION 1..197: note = tr|A0A432IET4|A0A432IET4_9BACT 7-carboxy-7-deazaguanine synthase OS=Flavobacteriia bacterium OX=2044941 GN=queE PE=3 SV=1
MVLPFMEEFYSIQGEGFHTGKAAYFIRIGGCDVGCHWCDVKESWNPDLHPATSTDQVVKNAKKYAKTVVVTGGEPLTWNMDYLTKKLHEEQLKIHIETSGSYDISGEWDWICLSPKRTKLPKKKIYGLADELKIIINTKQDLIFAEEQAKKVTGSCELFLQPEWSKREKMIPVIIDYVLKYPKWKISLQTHKYLHIP

SEQ ID NO: 30114 - protein, 205 aa, unidentified
  source 1..205: note = Flavobacteriia bacterium
  REGION 1..205: note = tr|A0A1Q3ZHB5|A0A1Q3ZHB5_9BACT 7-carboxy-7-deazaguanine synthase OS=Flavobacteriia bacterium 40-80 OX=1895763 GN=queE PE=3 SV=1
MIEKKHPATFPVMEQFYTLQGEGFYSGRAAYFVRLGGCDVGCVWCDVKESWDAAAHPEKSIAEILEDIEACNADFTVITGGEPAMYDLTELTDTLHEKNIEVAIETSGCYVLNGAIDWYCFSPKKFKKPLQDAYDKANELKVVIYHKSDLKWAEEHAALVNSNCFLYLQPEWSKREQLLPLIIEYIKLNPKWKISLQTHKYMDIP

SEQ ID NO: 30115 - protein, 210 aa, unidentified
  source 1..210: note = Flavobacterium aciduliphilum
  REGION 1..210: note = tr|A0A328YFW8|A0A328YFW8_9FLAO 7-carboxy-7-deazaguanine synthase OS=Flavobacterium aciduliphilum OX=1101402 GN=queE PE=3 SV=1
MLTKEIQIAVEKGTFLPLMEEFYTIQGEGYYTGTAAYFIRIGGCDVGCHWCDVKESWNAALHPPTAIETIVDHAKALADTVVVTGGEPLTWDMNPLTDLLKTAGLRVHIETSGCYDVTGTWDWFCLSPKKNKLPVASAYEIADELKMIIYNKHDFIFAEEQAAKVNPNARLYLQPEWSKKEEMTPLIVDYVMKHPKWKVSLQTHKYLNIP

SEQ ID NO: 30116 - protein, 210 aa, unidentified
  source 1..210: note = Flavobacterium akiainvivens
  REGION 1..210: note = tr|A0A0M9VJ96|A0A0M9VJ96_9FLAO 7-carboxy-7-deazaguanine synthase OS=Flavobacterium akiainvivens OX=1202724 GN=queE PE=3 SV=1
MLRKEVQVDVEKGVMLPLMEEFYTIQGEGYHTGTAAYFIRVGGCDVGCHWCDVKESWNADLHPPTHIDTIVQHATQQAKTIVITGGEPLTWDMGPLTGALKDKGMRVHIETSGAYPLSGTWDWICLSPKKTKLPVDDVYAHAHELKCIIHNKHDFIFAEEQAAKVNGNAILFLQPEWSRREEVTPLIVNYVMANPKWRVSLQTHKYLNIP

SEQ ID NO: 30117 - protein, 210 aa, unidentified
  source 1..210: note = Flavobacterium album
  REGION 1..210: note = tr|A0A2S1QU55|A0A2S1QU55_9FLAO 7-carboxy-7-deazaguanine synthase OS=Flavobacterium album; OX = 2175091 GN=queE PE=3 SV=1
MLNKEIQMEVEKGEMLPLMEEFYTIQGEGYHTGTAAYFIRVGGCDVGCHWCDVKESWNAALHPPTSTDTIVANAKQYAKTIVITGGEPLTWDMGPLTSKLKAEGMKTHIETSGAYSLSGTWDWICLSPKKTKLPTYTVYAHAHELKVIIHNRHDFIFAEEQAAKVNGNAILFLQPEWSKKEEMTPLIVDYVMANPKWRVSLQTHKYLNIP

SEQ ID NO: 30118 - protein, 210 aa, unidentified
  source 1..210: note = Flavobacterium alvei
  REGION 1..210: note = tr|A0A2S5AE36|A0A2S5AE36_9FLAO 7-carboxy-7-deazaguanine synthase OS=Flavobacterium alvei; OX = 2080416 GN=queE PE=3 SV=1
MLSKEIQLEVNKGAMLPLMEEFYTIQGEGFHTGTAAYFIRIGGCDVGCHWCDVKESWNAELHPPTSTDLIVANASKYADTVVVTGGEPLTWDMTLLTQKLKENNRKVHIETSGAYPLSGTWDWICLSPKKNKLPTQTVYDKAHELKVIIYNKHDFIFAEEQAALVNDNAILFLQPEWSKKEEMTPLIVDYVMNNPKWRVSLQTHKYLNIP

SEQ ID NO: 30119 - protein, 210 aa, Flavobacterium anhuiense
  REGION 1..210: note = tr|A0A1G5K8Q5|A0A1G5K8Q5_9FLAO 7-carboxy-7-deazaguanine synthase OS=Flavobacterium anhuiense OX=459526 GN=queE PE=3 SV=1
MLPKEIQLEVNKGAMLPLMEEFYTIQGEGSHTGRAAYFIRIGGCDVGCHWCDVKESWNAEIHPPTKVDLIVENAAKYADTVVVTGGEPLSWDMTLLTERLKEKNLKVHIETSGAFPLSGTWDWICLSPKKNKLPTQTVYDNAHELKVIIYNKHDFIFAEEQAELVNDNAILFLQPEWSKKEEMTPLIVDYVMNNPKWRVSLQTHKYLNIP

SEQ ID NO: 30120 - protein, 210 aa, unidentified
  source 1..210: note = Flavobacterium aquaticum
  REGION 1..210: note = tr|A0A327YS58|A0A327YS58_9FLAO 7-carboxy-7-deazaguanine synthase OS=Flavobacterium aquaticum OX=1236486 GN=queE PE=3 SV=1
MLQKEVQLAVEKGEMLPLMEEFYTIQGEGYHTGTAAYFIRIGGCDVGCHWCDVKESWNAELHPPTNTDVIVANAKKYADTVVVTGGEPLTWDMTLLTSKLKSQNLKVHIETSGAYEVSGTWDWFCLSPKKNKLPVQSAYDIANELKVIIYNKHDFIFAEEQAAKVNPKAILFLQPEWSKKEEMTPLIVDYVMNNPKWRVSLQTHKYLNIP

SEQ ID NO: 30121 - protein, 210 aa, Flavobacterium aquatile
  REGION 1..210: note = tr|A0A095STK0|A0A095STK0_9FLAO 7-carboxy-7-deazaguanine synthase OS=Flavobacterium aquatile LMG 4008 = ATCC 11947 OX=1453498 GN=queE PE=3 SV=1
MLEKNIQIAVDKGEMLPLMEEFYTIQGEGFHTGTAAYFIRIGGCDVGCHWCDVKESWNAELHPPTSTDLIVSNAKKYADTVVITGGEPLTWDMSLLTQKLKNQNLKVHIETSGCYPVTGTWDWFCLSPKKNKLPVDDAYAIAHELKVIIYNKHDFIFAEEQAEKVNKNAILFLQPEWSKKEEMTPLIVDYVMNNPKWRVSLQTHKYLNIP

SEQ ID NO: 30122 - protein, 210 aa, unidentified
  source 1..210: note = Flavobacterium aquicola
  REGION 1..210: note = tr|A0A3E0EDR1|A0A3E0EDR1_9FLAO 7-carboxy-7-deazaguanine synthase OS=Flavobacterium aquicola OX=1682742 GN=queE PE=3 SV=1
MLSKEVQLEVNKGTMLPLMEEFYTIQGEGFHTGTAAYFIRIGGCDVGCHWCDVKESWNAELHPPTQINLIVKNASKYADTIVITGGEPLMWDMDPLTQKLKDNNLKVHIETSGAYPLSGTWDWICLSPKKNKLPTQTVYDSANELKVIIYNKHDFIFAEEQALKVNPGAILFLQPEWSKKEEMTPQIVDYVMNNPKWRVSLQTHKYLNIP

SEQ ID NO: 30123 - protein, 210 aa, Flavobacterium aquidurense
  REGION 1..210: note = tr|A0A1H3TI17|A0A1H3TI17_9FLAO 7-carboxy-7-deazaguanine synthase OS=Flavobacterium aquidurense OX=362413 GN=queE PE=3 SV=1
MLSKEIQLEVNKGAMLPLMEEFYTIQGEGFHTGTAAYFIRIGGCDVGCHWCDVKESWNAELHPPTSVDLIVENASTYADTVVITGGEPLTWDMSLLTQRLKDKKLKVHIETSGAYPLSGTWDWICLSPKKNKLPTQTVYDNAHELKVIIYNKHDFIFAEEQAELVNDNAILFLQPEWSKKEEMTPLIVDYVMNNPKWRVSLQTHKYLNIP

SEQ ID NO: 30124 - protein, 210 aa, Flavobacterium aquidurense
  REGION 1..210: note = tr|A0A0Q0XWI1|A0A0Q0XWI1_9FLAO 7-carboxy-7-deazaguanine synthase OS=Flavobacterium aquidurense OX=362413 GN=queE PE=3 SV=1
MLSKEIQLEVNKGAMLPLMEEFYTIQGEGFHTGTAAYFIRIGGCDVGCHWCDVKESWNAELHPPTSVDLIVNNAATYADTVVITGGEPLTWDMSLLTQELKNRNLKVHIETSGAYPLTGTWDWICLSPKKNKLPTQTVYDNAHELKVIIYNKHDFIFAEEQAELVNGNAILFLQPEWSKKEEMTPLIVDYVMNNPKWRVSLQTHKYLNIP

SEQ ID NO: 30125 - protein, 210 aa, Flavobacterium araucananum
  REGION 1..210: note = tr|A0A227P5J7|A0A227P5J7_9FLAO 7-carboxy-7-deazaguanine synthase OS=Flavobacterium araucananum OX=946678 GN=queE PE=3 SV=1
MLSKEIQLEVNKGAMLPLMEEFYTIQGEGFHTGTAAYFIRIGGCDVGCHWCDVKESWNAELHPPTSVDLIVNNAASSADTVVITGGEPLTWDMSLLTQELKNRNLKVHIETSGAYPLTGTWDWICLSPKKNKLPTQTVYDNAHELKVIIYNKHDFIFAEEQAELVNDKAILFLQPEWSKKEEMTPLIVDYVMNNPKWRVSLQTHKYLNIP

SEQ ID NO: 30126 - protein, 210 aa, unidentified
  source 1..210: note = Flavobacterium arcticum
  REGION 1..210: note = tr|A0A345HCG3|A0A345HCG3_9FLAO 7-carboxy-7-deazaguanine synthase OS=Flavobacterium arcticum OX=1784713 GN=queE PE=3 SV=1
MLKKEEQIAVEKGELLPLMEEFYTIQGEGYHTGTAAYFIRVGGCDVGCHWCDVKESWNAELHPPTATNVIVENAAKYAKTIVITGGEPLTWDMNPLTARLKEKGLNVHIETSGAYPVTGNWDWFCLSPKKNKLPVQGAYDIAHELKVIIYNKHDFLFAEEQAERVNDKAILFLQPEWSKREQMTPLIVDYVMNNPKWRISLQTHKYLNIP

SEQ ID NO: 30127 - protein, 211 aa, unidentified
  source 1..211: note = Flavobacterium aurantiibacter
  REGION 1..211: note = tr|A0A255ZUA2|A0A255ZUA2_9FLAO 7-carboxy-7-deazaguanine synthase OS=Flavobacterium aurantiibacter OX=2023067 GN=queE PE=3 SV=1
MALPSEIQEQVNLGLQLPLMEAFYTVQGEGYHTGTPAYFIRVGGCDVGCHWCDVKESWNADLHPPTSVENIVTEAARFSKTIVVTGGEPLMWDMNPLTQALKNAGMQIHIETSGAYALTGNWDWICLSPKKTKLPVDEVYQKANELKVIVYNKNDFKFAEEQAAKTNPNAILFLQPEWSKRDEMTPQIVDYVMQNPKWRISLQTHKFLNIP

SEQ ID NO: 30128 - protein, 210 aa, Flavobacterium beibuense
  REGION 1..210: note = tr|A0A444WCH3|A0A444WCH3_9FLAO 7-carboxy-7-deazaguanine synthase OS=Flavobacterium beibuense OX=657326 GN=queE PE=3 SV=1
MLKKDIQIAVEKGEMLPLMEEFYTIQGEGYHTGTAAYFIRVGGCDVGCHWCDVKESWNADLHPPTHIESIVENANKYAKTIVITGGEPLTWDMGPLTQSLKEKGLRIHIETSGAYPLSGTWDWICLSPKKTKLPVEGVYEKAHELKVIIHNKHDFIFAEEQAAKTNKDAILFLQPEWSKKEEMTPLIVDYVMANPKWRVSLQTHKYLNIP

SEQ ID NO: 30129 - protein, 210 aa, Flavobacterium beibuense
  REGION 1..210: note = tr|A0A0A2LW66|A0A0A2LW66_9FLAO 7-carboxy-7-deazaguanine synthase OS=Flavobacterium beibuense F44-8 OX=1406840 GN=queE PE=3 SV=1
MLKKDIQIAVEKGVMLPLMEEFYTIQGEGYHTGTAAYFIRVGGCDVGCHWCDVKESWNADLHPPTQIEAIVENAAKYAKTIVITGGEPLTWDMGPLTAGLKEKGLKIHIETSGAYPLTGTWDWICLSPKKTKLPVDEVYNKAQELKVIIYNKHDFIFAEEQAAKVNKDAILFLQPEWSKKEEMTPLIVDYVMNNPKWRVSLQTHKYLNIP

SEQ ID NO: 30130 - protein, 210 aa, Flavobacterium branchiophilum
  REGION 1..210: note = tr|A0A2H3KCE5|A0A2H3KCE5_9FLAO 7-carboxy-7-deazaguanine synthase OS=Flavobacterium branchiophilum OX=55197 GN=queE PE=3 SV=1
MLSKESQTAIQKGELLPLMEAFYTIQGEGAHTGTAAYFIRIGGCDVGCHWCDVKESWNADLHPPTAITTIVEEAKLYSNTIVVTGGEPLMWNMDGLTQKLKSVGMTIHIETSGAYPLTGIWDWICLSPKKNKLPLPEVYEKANELKVIVHNKHDFEFAEAQALLVNSNATLFLQAEWSKKDMITPFIVDYVMNNPKWRISLQTHKYLNIP

SEQ ID NO: 30131 - protein, 210 aa, Flavobacterium branchiophilum
  REGION 1..210: note = tr|G2YZU9|G2YZU9_FLABF 7-carboxy-7-deazaguanine synthase OS=Flavobacterium branchiophilum (strain FL-15); OX = 1034807 GN=ygcF PE=3 SV=1
MLSKESQTAIQKGELLPLMEAFYTIQGEGAHTGTAAYFIRIGGCDVGCHWCDVKESWNADLHPPTAITTIVEEAKLYSNTIVVTGGEPLMWNMDGLTQKLKRVGMTIHIETSGAYPLTGIWDWICLSPKKNKLPLPEVYEKANELKVIVHNKHDFEFAEAQALLVNSNATLFLQAEWSKKDMITPFIVDYVMNNPKWRISLQTHKYLNIP

SEQ ID NO: 30132 - protein, 231 aa, Flavobacterium caeni
  REGION 1..231: note = tr|A0A1G5JUL1|A0A1G5JUL1_9FLAO 7-carboxy-7-deazaguanine synthase OS=Flavobacterium caeni; OX = 490189 GN=queE PE=3 SV=1
MPQFRSRFIVFVLTRIAYLCGMLTKEIQSAVEKGAMLPLMEEFYTIQGEGFHTGTAAYFIRIGGCDVGCHWCDVKESWNADLHPPTNVDQIVANARQYADTVVITGGEPLTWDMTLLTAKLKEQHMRIHIETSGAYPLTGTWDWICLSPKKTKLPTQTVYDKADELKVIIYNKHDFVFAEEQAQKVNPNAILFLQPEWSKKEEMTPLIVDYVMNNPKWRVSLQTHKYLNIP

SEQ ID NO: 30133 - protein, 210 aa, Flavobacterium cauense
  REGION 1..210: note = tr|V6S5L1|V6S5L1_9FLAO 7-carboxy-7-deazaguanine synthase OS=Flavobacterium cauense R2A-7 OX=1341154; GN = queE PE=3 SV=1
MLKKEIQIAVEKGEMLPLMEEFYTIQGEGYHTGTAAYFIRIGGCDVGCHWCDVKESWNAELHPPTNTDVIVANAKKYAETVVVTGGEPLTWDMSVLTAKLKDQNLRVHIETSGAYPVSGTWDWFCLSPKKTKLPVAEAYEIAHELKVIIHNKHDFQFAEEQAAKVNENAILFLQPEWSKKEEMTPLIVDYVMQNPKWRVSLQTHKYLNIP

SEQ ID NO: 30134 - protein, 210 aa, Flavobacterium cheniae
  REGION 1..210: note = tr|A0A562KFH5|A0A562KFH5_9FLAO 7-carboxy-7-deazaguanine synthase OS=Flavobacterium cheniae OX=295428 GN=queE PE=3 SV=1
MLQKETQLAVEKGEMLPLMEEFYTIQGEGYHTGTAAYFIRIGGCDVGCHWCDVKESWNAELHPPTNTDIIVANAKKYADTVVVTGGEPLTWDMTLLTSKLKAQNLKVHIETSGAYEVSGTWDWFCLSPKKNKLPVQSAYDIANELKVIIYNKHDFIFAEEQAAKVNPNAILFLQPEWSKKEEMTPLIVDYVMNNPKWRVSLQTHKYLNIP

SEQ ID NO: 30135 - protein, 210 aa, Flavobacterium chilense
  REGION 1..210: note = tr|A0A1M7E5Q7|A0A1M7E5Q7_9FLAO 7-carboxy-7-deazaguanine synthase OS=Flavobacterium chilense OX=946677 GN=queE PE=3 SV=1
MLSKEIQLEVNKGAMLPLMEEFYTIQGEGFHTGTAAYFIRIGGCDVGCHWCDVKESWNAELHPPTSIDLIVDNASSQADTVVITGGEPLTWDMSLLTQELKNKNLKVHIETSGAYPLTGVWDWICLSPKKNKLPTQTVYDNAHELKVIIYNKHDFIFAEEQAELVNDKAILFLQPEWSKKEEMTPLIVDYVMNNPKWRVSLQTHKYLNIP

SEQ ID NO: 30136 - protein, 210 aa, unidentified
  source 1..210: note = Flavobacterium circumlabens
  REGION 1..210: note = tr|A0A4Y7U7P3|A0A4Y7U7P3_9FLAO 7-carboxy-7-deazaguanine synthase OS=Flavobacterium circumlabens OX=2133765 GN=queE PE=3 SV=1
MLAKEIQLEVNKGAMLPLMEEFYTIQGEGFHTGTAAYFIRIGGCDVGCHWCDVKESWNAELHPPTSVDLIVKNASVYADTVVITGGEPLTWDMTLLTQQLKDRNLKVHIETSGAYPLSGTWDWICLSPKKNKLPTQTVYDNAHELKVIIYNKHDFIFAEEQAELVNDNAILFLQPEWSKKEEMTPLIVDYVMNHPKWRVSLQTHKYLNIP

SEQ ID NO: 30137 - protein, 210 aa, Flavobacterium columnare
  REGION 1..210: note = tr|A0A2T4HCS5|A0A2T4HCS5_9FLAO 7-carboxy-7-deazaguanine synthase OS=Flavobacterium columnare OX=996 GN=queE PE=3 SV=1
MLSKEIQLAVNKGDMLPLMEEFYTIQGEGAYTGTAAYFVRIGGCDVGCHWCDVKESWNAELHPPTQTSIIVENAKKQANTVVVTGGEPLTWNMEPLTTKLKKAGLRVHIETSGAYPVTGEWDWFCLSPKKTKLPVQEAYNKAHELKIIIYNKHDFLFAEEQALKTNPNAKLYLQPEWSKKDEVLPLIIDYVMKNPKWKISLQTHKYLNIP

SEQ ID NO: 30138 - protein, 210 aa, Flavobacterium columnare
  REGION 1..210: note = tr|A0A2N9P9K9|A0A2N9P9K9_9FLAO 7-carboxy-7-deazaguanine synthase OS=Flavobacterium columnare OX=996 GN=queE PE=3 SV=1
MLSKEIQLAVNKGDMLPLMEEFYTIQGEGAYTGTAAYFVRIGGCDVGCHWCDVKESWNAELHPPTKTSVIVENAKKKANTVVVTGGEPLTWNMTPLTTKLKEAGLRVHIETSGAYPVTGEWDWFCLSPKKTKLPVQEAYEKAHELKIIIYNKHDFLFAEEQALKTNSNAKLYLQPEWSKKEEVLDLIINYVMENPKWKISLQTHKYLNIP

SEQ ID NO: 30139 - protein, 210 aa, unidentified
  source 1..210: note = Flavobacterium commune
  REGION 1..210: note = tr|A0A1D9P7Y4|A0A1D9P7Y4_9FLAO 7-carboxy-7-deazaguanine synthase OS=Flavobacterium commune OX=1306519 GN=queE PE=3 SV=1
MLSKEIQLEVNKGAMLPLMEEFYTIQGEGFHTGTAAYFIRIGGCDVGCHWCDVKESWNAELHPPTSIDHIVDNASKYADTVVITGGEPLTWDMSLLTSRLKDKNLKVHIETSGAYPLSGTWDWICLSPKKNKLPTETVYNAAHELKVIIHNKHDFIFAEEQAELVNHKAILFLQPEWSKKEEMTPLIVEYVMNNPKWRVSLQTHKYLNIP

SEQ ID NO: 30140 - protein, 210 aa, unidentified
  source 1..210: note = Flavobacterium crassostreae
  REGION 1..210: note = tr|A0A1B9DZM5|A0A1B9DZM5_9FLAO 7-carboxy-7-deazaguanine synthase OS=Flavobacterium crassostreae OX=1763534 GN=queE PE=3 SV=1
MLSKEIQLEVNKGAMLPLMEEFYTIQGEGYHTGTAAYFIRIGGCDVGCHWCDVKESWNAELHPPTAVDLIVNNASKYAETVVITGGEPLMWDMSLLTSKLKQNNRKVHIETSGAYPLSGTWDWICLSPKKNKLPTETVYQNAQELKVIIHNKHDFIFAEEQAELVQKNAILFLQPEWSKKEEMTPLIVDYVMKHPKWRVSLQTHKYLNIP

SEQ ID NO: 30141 - protein, 210 aa, Flavobacterium croceum
  REGION 1..210: note = tr|A0A2S4N553|A0A2S4N553_9FLAO 7-carboxy-7-deazaguanine synthase OS=Flavobacterium croceum DSM 17960 OX=1121886 GN=queE PE=3 SV=1
MLHKEAQIAVENGTMLPLMEEFYTIQGEGYHTGTAAYFIRIGGCDVGCHWCDVKESWNATLHPPTHIETIVKNAKQYADIVVITGGEPLTWNMQPITHLLQYQNIKTHIETSGCYEVTGTWDWFCLSPKKNKLPVLSAYAIANELKVIIYNKHDFIFAEEQALLVNQDAILFLQPEWSKKDEMTPLIIDYVMKNPKWRISLQTHKYLNIP

SEQ ID NO: 30142 - protein, 210 aa, unidentified
  source 1..210: note = Flavobacterium crocinum
  REGION 1..210: note = tr|A0A2S1YGI7|A0A2S1YGI7_9FLAO 7-carboxy-7-deazaguanine synthase OS=Flavobacterium crocinum OX=2183896 GN=queE PE=3 SV=1
MLAKEIQLEVNKGAMLPLMEEFYTIQGEGSHTGRAAYFIRIGGCDVGCHWCDVKESWNAEIHPPTSIDLIVENAAKYADTVVVTGGEPLSWDMTLLTQRLKDRNLKVHIETSGAFPLSGTWDWICLSPKKNKLPTKTVYDNAHELKVIIYNKHDFIFAEEQAELVNDNAILFLQPEWSKKEEMTPLIVDYVMNNPKWRVSLQTHKYLNIP

SEQ ID NO: 30143 - protein, 210 aa, Flavobacterium cucumis
  REGION 1..210: note = tr|A0A1M7ZW54|A0A1M7ZW54_9FLAO 7-carboxy-7-deazaguanine synthase OS=Flavobacterium cucumis OX=416016 GN=queE PE=3 SV=1
MLQKEVQLAVEKGEMLPLMEEFYTIQGEGYHTGTAAYFIRIGGCDVGCHWCDVKESWNAELHPPTNTDLIVANAKKYADTVVVTGGEPLTWDMTLLTSKLKVQNLKVHIETSGAYEVSGTWDWFCLSPKKNKLPVQSAYDIANELKVIIYNKHDFIFAEEQAAKVNPNAILFLQPEWSKKEEMTPLIVDYVMNNPKWRVSLQTHKYLNIP

SEQ ID NO: 30144 - protein, 210 aa, unidentified
  source 1..210: note = Flavobacterium cupreum
  REGION 1..210: note = tr|A0A434A1B9|A0A434A1B9_9FLAO 7-carboxy-7-deazaguanine synthase OS=Flavobacterium cupreum OX=2133766 GN=queE PE=3 SV=1
MLAKEIQLEVNKGAMLPLMEEFYTIQGEGFHTGTAAYFIRIGGCDVGCHWCDVKESWNAELHPPTSVDLIVKNASAYADTVVITGGEPLTWDMTLLTQQLKDRNLKVHIETSGAYPLSGTWDWICLSPKKNKLPTQTVYDNAHELKVIIYNKHDFIFAEEQAELVNDNAILFLQPEWSKKEEMTPLIVDYVMNNPKWRVSLQTHKYLNIP

SEQ ID NO: 30145 - protein, 210 aa, unidentified
  source 1..210: note = Flavobacterium cutihirudinis
  REGION 1..210: note = tr|A0A3D9FUR2|A0A3D9FUR2_9FLAO 7-carboxy-7-deazaguanine synthase OS=Flavobacterium cutihirudinis OX=1265740 GN=queE PE=3 SV=1
MLSKEIQLEVNKGAMLPLMEEFYTIQGEGFHTGTAAYFIRIGGCDVGCHWCDVKESWNAELHPPTSIDLIVKNASTYADTVVVTGGEPLSWDMSLLTQKLKDEKLKVHIETSGAYPLSGTWDWICLSPKKNKLPTQTVYDNAHELKVIIHNKHDFIFAEEQAELVNDKAILFLQPEWSKKEEMTPLIVDYVMNNPKWRVSLQTHKYLNIP

SEQ ID NO: 30146 - protein, 210 aa, unidentified
  source 1..210: note = Flavobacterium cyanobacteriorum
  REGION 1..210: note = tr|A0A255ZDI2|A0A255ZDI2_9FLAO 7-carboxy-7-deazaguanine synthase OS=Flavobacterium cyanobacteriorum OX=2022802 GN=queE PE=3 SV=1
MLKEDIQAAVDRGELLPLMEEFYTIQGEGFHTGTAAYFIRVGGCDVGCHWCDVKESWNAELHPPTAIDAIAGNAARFSKTVVVTGGEPLMWDMAPLTSLLRAQGMKVHIETSGAYPLTGYWDWICLSPKKTKLPVGDIYGHAHELKVIIHNRHDFVFAEEQAAKVNSNAVLFLQPEWSKREQVTPLIVDYVMNNPKWRVSLQTHKYLNIP

SEQ ID NO: 30147 - protein, 210 aa, Flavobacterium daejeonense
  REGION 1..210: note = tr|A0A0Q0RZA6|A0A0Q0RZA6_9FLAO 7-carboxy-7-deazaguanine synthase OS=Flavobacterium daejeonense OX=350893 GN=queE PE=3 SV=1
MLAKEIQLEVNKGAMLPLMEEFYTIQGEGFHTGTAAYFIRIGGCDVGCHWCDVKESWNAELHPPTKINQIVDNAAKYADTIVITGGEPLMWDMGLLTSSLKEKNLKVHIETSGAYPLSGTWDWICLSPKKNKLPTETVYANADELKVIIYNKHDFIFAEEQAEKVNKNAKLFLQPEWSKKEEMTPLIVDYVMNNPKWRVSLQTHKYLNIP

SEQ ID NO: 30148 - protein, 210 aa, unidentified
  source 1..210: note = Flavobacterium dankookense
  REGION 1..210: note = tr|A0A4R6QA17|A0A4R6QA17_9FLAO 7-carboxy-7-deazaguanine synthase OS=Flavobacterium dankookense OX=706186 GN=queE PE=3 SV=1
MIAKEIQLAVDKGEMLPLMEEFYTIQGEGFHTGTAAYFIRIGGCDVGCHWCDVKESWNADLHPPTATDLIVENAAKYADTVVVTGGEPLTWDMTLLTQKLKSKNLRVHIETSGAYPVSGTWDWFCLSPKKNKLPVNSAYEIADELKVIIYNKHDFQFAEEQAAKVNSKAILFLQPEWSKKEEMTPLIVDYVMNNPKWRVSLQTHKYLNIP

SEQ ID NO: 30149 - protein, 210 aa, Flavobacterium defluvii
  REGION 1..210: note = tr|A0A1M5M7J1|A0A1M5M7J1_9FLAO 7-carboxy-7-deazaguanine synthase OS=Flavobacterium defluvii OX=370979 GN=queE PE=3 SV=1
MLPKEIQLEVNKGAMLPLMEEFYTIQGEGFHTGTAAYFIRIGGCDVGCHWCDVKESWNAELHPPTNIDVIVNNASSYANTVVVTGGEPLTWDMTLLTQQLKDKNLKVHIETSGAYPLTGTWDWICLSPKKNKLPTKDVYDNADELKVIIYNKHDFIFAEEQAELVNDNAILFLQPEWSKKEEMTPLIVDYVMNNPKWRVSLQTHKYLNIP

SEQ ID NO: 30150 - protein, 210 aa, Flavobacterium degerlachei
  REGION 1..210: note = tr|A0A1H2XSV9|A0A1H2XSV9_9FLAO 7-carboxy-7-deazaguanine synthase OS=Flavobacterium degerlachei OX=229203 GN=queE PE=3 SV=1
MLSKEVQLEVNKGAMLPLMEEFYTIQGEGFHTGTAAYFVRIGGCDVGCHWCDVKESWNASLHPPTSVDLIVANASKYAETVVVTGGEPLMWDMTLLTQMLKDNQRKVHIETSGAYDLTGTWDWICLSPKKNKLPTKTVYDKAHELKVIIFNKHDFIFAEEQAELVNDDAILFLQPEWSKKEEMTPLIVDYVMNNPKWRVSLQTHKYLNIP

SEQ ID NO: 30151 - protein, 210 aa, unidentified
  source 1..210: note = Flavobacterium endophyticum
  REGION 1..210: note = tr|A0A495MPW1|A0A495MPW1_9FLAO 7-carboxy-7-deazaguanine synthase OS=Flavobacterium endophyticum OX=1540163 GN=queE PE=3 SV=1
MLKKELQTAVEKGEMLPLMEEFYTIQGEGYHTGTAAYFVRIGGCDVGCHWCDVKESWNAEVHPPTAIDAIVENAKKYADTVVVTGGEPLTWDMGPLTQKLKEKNLRIHIETSGAYPLSGDWDWITLSPKKNKLPTQTVYDNASELKVIIYNKHDFIFAEEQAEKVNKNAILFLQPEWSKKEAMTPLIVDYVMNNPKWRVSLQTHKYLNIP

SEQ ID NO: 30152 - protein, 210 aa, unidentified
  source 1..210: note = Flavobacterium enshiense
  REGION 1..210: note = tr|V6S310|V6S310_9FLAO 7-carboxy-7-deazaguanine synthase OS=Flavobacterium enshiense DK69 OX=1107311; GN = queE PE=3 SV=1
MLKKEIQIAVEKGEMLPLMEEFYTIQGEGYHTGTAAYFIRIGGCDVGCHWCDVKESWNAELHPPTTTEVIVANAKKYAETVVVTGGEPLTWDMTALTSKLKEQNLRVHIESSGAYPVTGTWDWFCLSPKKTKLPVDDAYEIAHELKVIIHNKHDFIFAEEQAAKVNENAILFLQPEWSKKEEMTPLIVDYVMNNPKWRVSLQTHKYLNIP

SEQ ID NO: 30153 - protein, 210 aa, unidentified
  source 1..210: note = Flavobacterium faecale
  REGION 1..210: note = tr|A0A2S1LC19|A0A2S1LC19_9FLAO 7-carboxy-7-deazaguanine synthase OS=Flavobacterium faecale OX=1355330 GN=queE PE=3 SV=1
MLSKEVQLEVNRGGMLPLMEEFYTIQGEGYHTGTAAYFIRIGGCDVGCHWCDVKESWNAELHPPTAVDTIVENASKYSETVVVTGGEPLSWDMSLLTQKLKENNRKTHIETSGAYPLSGTWDWICLSPKKNKLPTETVYAAAHELKVIIHNKHDFIFAEEQAQLVNNNAILFLQPEWSKKEEMTELIVDYVMKNPQWRVSLQTHKYLNIP

SEQ ID NO: 30154 - protein, 210 aa, Flavobacterium flevense
  REGION 1..210: note = tr|A0A4Y4AZ59|A0A4Y4AZ59_9FLAO 7-carboxy-7-deazaguanine synthase OS=Flavobacterium flevense OX=983 GN=queE PE=3 SV=1
MLSKEIQLEVNKGAMLPLMEEFYTIQGEGFHTGTAAYFIRIGGCDVGCHWCDVKESWNAELHPPTSIDQIVDNADKYADTIVITGGEPLMWDMSLLTNKLKNRNLRVHIETSGAYPLSGTWDWICLSPKKNKLPTETVYNAAHELKVIIHNKHDFIFAEEQAEKVNKNAILFLQPEWSKKEEMTPLIVDYVMNNPKWRVSLQTHKYLNIP

SEQ ID NO: 30155 - protein, 210 aa, Flavobacterium fluvii
  REGION 1..210: note = tr|A0A1M5DNL2|A0A1M5DNL2_9FLAO 7-carboxy-7-deazaguanine synthase OS=Flavobacterium fluvii; OX = 468056 GN=queE PE=3 SV=1
MLSKEIQLEVNKGAMLPLMEEFYTIQGEGFHTGTAAYFIRIGGCDVGCHWCDVKESWNAELHPPTSIDLIVANASKYADTVVVTGGEPLTWDMTLLTQKLKDQNLKVHIETSGAYELSGQWDWICLSPKKNKLPTQTVYDKAHELKVIIYNKHDFVFAEEQAEKVNKNAILFLQPEWSKKEEMTPLIVDYVMNNPKWRVSLQTHKYLNIP

SEQ ID NO: 30156 - protein, 210 aa, unidentified
  source 1..210: note = Flavobacterium fontis
  REGION 1..210: note = tr|A0A1M5B606|A0A1M5B606_9FLAO 7-carboxy-7-deazaguanine synthase OS=Flavobacterium fontis; OX = 1124188 GN=queE PE=3 SV=1
MLTQEVQKAVDRGELLPLMEEFYTIQGEGFHTGTAAYFIRIGGCDVGCHWCDVKESWNADLHPPTAVEHIVANAQKYADTVVVTGGEPLTWDMTLLTASLKEAQLRVHIETSGSYPVTGHWDWFCLSPKKNRLPVPEAYQAADELKVIIHNKHDFIFAEEQAALVNPKAILFLQPEWSKREQMTPLIVEYVMQHPKWRVSLQTHKYLNIP

SEQ ID NO: 30157 - protein, 210 aa, Flavobacterium frigidimaris
  REGION 1..210: note = tr|A0A1M5TYG3|A0A1M5TYG3_FLAFR 7-carboxy-7-deazaguanine synthase OS=Flavobacterium frigidimaris OX=262320 GN=queE PE=3 SV=1
MLSKEIQLEVNKGAMLPLMEEFYTIQGEGFHTGTAAYFIRIGGCDVGCHWCDVKESWNAELHPPTSVDLIVNNAASSADTVVITGGEPLTWDMSLLTQELKNRNLKVHIETSGAYPLTGIWDWICLSPKKNKLPTQTVYDNAHELKVIIYNKHDFIFAEEQAELVNDNAILFLQPEWSKKEEMTPLIVDYVMNNPKWRVSLQTHKYLNIP

SEQ ID NO: 30158 - protein, 210 aa, Flavobacterium frigoris
  REGION 1..210: note = tr|H7FMS0|H7FMS0_FLAFP 7-carboxy-7-deazaguanine synthase OS=Flavobacterium frigoris (strain PS1); OX = 1086011 GN=queE PE=3 SV=1
MLSKEVQLEVNKGAMLPLMEEFYTIQGEGFHTGTAAYFVRIGGCDVGCHWCDVKESWNAALHPPTSVDLIVANASKYAETVVVTGGEPLMWDMTLLTQMLKDNQRKVHVETSGAYDLTGTWDWICLSPKKNKLPTKTVYDKAHELKVIIFNKHDFIFAEEQAELVNDDAILFLQPEWSKKEEMTPLIVDYVMNNPKWRVSLQTHKYLNIP

SEQ ID NO: 30159 - protein, 211 aa, Flavobacterium frigoris
  REGION 1..211: note = tr|A0A1H9E2F9|A0A1H9E2F9_FLAFI 7-carboxy-7-deazaguanine synthase OS=Flavobacterium frigoris OX=229204 GN=queE PE=3 SV=1
MMLSKEIQLEVNKGAMLPLMEEFYTIQGEGFHTGTAAYFVRIGGCDVGCHWCDVKESWNAELHPPSSIDQIVANAKKYGETVVVTGGEPLMWDMTLLTQTLKDNGRKVHIETSGAYPLTGMWDWICLSPKKNKLPTQTVYDNAHELKVIIYNKHDFIFAEEQAELVNDDAILFLQPEWSKKEEMTPLIVDYVMNNPKWRVSLQTHKYLNIP

SEQ ID NO: 30160 - protein, 210 aa, Flavobacterium fryxellicola
  REGION 1..210: note = tr|A0A167TY20|A0A167TY20_9FLAO 7-carboxy-7-deazaguanine synthase OS=Flavobacterium fryxellicola OX=249352 GN=queE PE=3 SV=1
MLSKEIQLEVNKGAMLPLMEEFYTIQGEGFHTGTAAYFIRIGGCDVGCHWCDVKESWNAALHPPTSVDLIVENANNYANTVVVTGGEPLMWDMTLLTQKLKEQNLKVHIETSGAYPLSGTWDWICLSPKKNKLPTETVYDNAHELKVIIFNKHDFIFAEEQAEKVNPKAILFLQPEWSKKEEMTPLIVDYVMKNPKWRVSLQTHKYLNIP

SEQ ID NO: 30161 - protein, 210 aa, Flavobacterium gillisiae
  REGION 1..210: note = tr|A0A1H4CF79|A0A1H4CF79_9FLAO 7-carboxy-7-deazaguanine synthase OS=Flavobacterium gillisiae OX=150146 GN=queE PE=3 SV=1
MLSKEIQLEVNKGAMLPLMEEFYTIQGEGFHTGTAAYFVRIGGCDVGCHWCDVKESWNAELHPPSSITQIVDNAKKHAETVVVTGGEPLMWDMTLLTQALKDNGRKVHIETSGAYPLSGAWDWICLSPKKNKLPTETVYDNAHELKVIIHNKHDFIFAEEQAELVNDNAILFLQPEWSKKEEMTPLIVEYVMNNPKWRVSLQTHKYLNIP

SEQ ID NO: 30162 - protein, 210 aa, unidentified
  source 1..210: note = Flavobacterium gilvum
  REGION 1..210: note = tr|A0A085EEE6|A0A085EEE6_9FLAO 7-carboxy-7-deazaguanine synthase OS=Flavobacterium gilvum; OX = 1492737 GN=queE PE=3 SV=1
MLSKEIQLEVNKGIMLPLMEEFYTIQGEGFHTGTAAYFIRVGGCDVGCHWCDVKESWNAESHPPTNIDLIVDNATKYANTIVVTGGEPLMWDMGPLTQKLKQNNLKVHIETSGAYPLSGTWDWICLSPKKNKLPTQTAYDNADELKVIIYNKHDFIFAEEQAEKVNSKAILFLQPEWSKKEEMTPLIVDYVMNNPKWRVSLQTHKYLNIP

SEQ ID NO: 30163 - protein, 210 aa, Flavobacterium glaciei
  REGION 1..210: note = tr|A0A562PLH4|A0A562PLH4_9FLAO 7-carboxy-7-deazaguanine synthase OS=Flavobacterium glaciei OX=386300 GN=queE PE=3 SV=1
MLSKEIQLEVNKGAMLPLMEEFFTIQGEGFHTGTAAYFIRIGGCDVGCHWCDVKESWNAELHPPTGIDLIVSNASKYSETVVVTGGEPLMWDMTLLTQKLKENNRKVHIETSGAYPLTGTWDWICLSPKKNKLPTKTVYDNAHELKVIIYNKHDFIFAEEQAEKVNGEAILFLQPEWSKKEEMTPLIVDYVMNNPKWRVSLQTHKYLNIP

SEQ ID NO: 30164 - protein, 210 aa, Flavobacterium glycines
  REGION 1..210: note = tr|A0A1B9DN65|A0A1B9DN65_9FLAO 7-carboxy-7-deazaguanine synthase OS=Flavobacterium glycines OX=551990 GN=queE PE=3 SV=1
MLSKEIQLEVNKGAMLPLMEEFYTIQGEGFHTGTAAYFIRIGGCDVGCHWCDVKESWNAELHPPTAVSQIVDNASKYADTVVVTGGEPLTWDMSLLTSKLKEKNMKVHIETSGAYPLSGTWDWICLSPKKNKLPTDTVYSAANELKVIIYNKHDFIFAEEQAELVNDNAILFLQPEWSKKEEMTPLIVDYVMNNPKWRVSLQTHKYLNIP

SEQ ID NO: 30165 - protein, 210 aa, Flavobacterium granuli
  REGION 1..210: note = tr|A0A1M5PSE7|A0A1M5PSE7_9FLAO 7-carboxy-7-deazaguanine synthase OS=Flavobacterium granuli OX=280093 GN=queE PE=3 SV=1
MLSKEIQLEVNKGAMLPLMEEFYTIQGEGFHTGTAAYFIRIGGCDVGCHWCDVKESWNSELHPPTAVDRIVDNASKYSETVVVTGGEPLMWDMNLLTQKLKENNRKVHIETSGAYPLSGTWDWICLSPKKNKLPTQTVYDSAQELKVIIHNKHDFIFAEEQAELVNDNAILFLQPEWSKKEEMTPMIVDYVMNNPKWRVSLQTHKYLNIP

SEQ ID NO: 30166 - protein, 210 aa, Flavobacterium haoranii
  REGION 1..210: note = tr|A0A1M6DCE9|A0A1M6DCE9_9FLAO 7-carboxy-7-deazaguanine synthase OS=Flavobacterium haoranii OX=683124 GN=queE PE=3 SV=1
MLKKEIQLAVDKGEMLPLMEEFYTIQGEGYHTGTAAYFIRIGGCDVGCHWCDVKESWNADLHPPTSTEQIVANAKQYAETVVVTGGEPLTWDMEVLTTRLKNAGLRVHIETSGAYKVTGNWDWFCLSPKKTKLPVQEAYDIAHELKVIIYNKHDFQFAEEQAAKINKNAILFLQPEWSKKEEMTPLIIDYVMKNPKWRISLQTHKYLNIP

SEQ ID NO: 30167 - protein, 210 aa, Flavobacterium hercynium
  REGION 1..210: note = tr|A0A226GYM4|A0A226GYM4_9FLAO 7-carboxy-7-deazaguanine synthase OS=Flavobacterium hercynium OX=387094 GN=queE PE=3 SV=1
MLAKEIQLEVNKGAMLPLMEEFYTIQGEGFHTGRAAYFIRIGGCDVGCHWCDVKESWNAELHPPTSIDLIVKNASTYADTVVVTGGEPLSWDMTLLTKELKDKNLKVHIETSGAYPLSGTWDWICLSPKKNKLPTQTVYDNAHELKVIIHNKHDFIFAEEQAEQVNKDAILFLQPEWSKKEEMTPLIVDYVMNNPKWRVSLQTHKYLNIP

SEQ ID NO: 30168 - protein, 210 aa, Flavobacterium hibernum
  REGION 1..210: note = tr|A0A0D0ETW9|A0A0D0ETW9_9FLAO 7-carboxy-7-deazaguanine synthase OS=Flavobacterium hibernum OX=37752 GN=queE PE=3 SV=1
MLSKEIQLEVNKGAMLPLMEEFYTIQGEGFHTGTAAYFIRIGGCDVGCHWCDVKESWNAELHPPTSVDLIVKNASSQADTVVITGGEPLTWDMSLLTQELKNKNLRVHIETSGAYPLTGIWDWICLSPKKNKLPTQTVYDNAHELKVIIYNKHDFIFAEEQAELVNDNAILFLQPEWSKKEEMTPLIVDYVMNNPKWRVSLQTHKYLNIP

SEQ ID NO: 30169 - protein, 210 aa, Flavobacterium hydatis
  REGION 1..210: note = tr|A0A086AU17|A0A086AU17_FLAHY 7-carboxy-7-deazaguanine synthase OS=Flavobacterium hydatis OX=991 GN=queE PE=3 SV=1
MLSKEIQLEVNKGAMLPLMEEFYTIQGEGFHTGTAAYFIRIGGCDVGCHWCDVKESWNAELHPPTSVDLIVENASKYADTVVVTGGEPLTWDMTVLTTELKNKNLKVHIETSGAYPLTGTWDWICLSPKKNKLPTQTVYDNAHELKVIIYNKHDFIFAEEQAELVNGNAILFLQPEWSKKEEMTPLIVEYVMNNPKWRVSLQTHKYLNIP

SEQ ID NO: 30170 - protein, 224 aa, Flavobacterium indicum
  REGION 1..224: note = tr|H8XSL4|H8XSL4_FLAIG 7-carboxy-7-deazaguanine synthase OS=Flavobacterium indicum (strain DSM 17447 / CIP 109464 / GPTSA100-9) OX=1094466 GN=ygcF PE=3 SV=1
MFNFDVSLQTIFKRMLQKEIQLAVDKGEMLPLMEEFYTIQGEGFYTGTAAYFIRVGGCDVGCHWCDVKESWNADLHPPTEISTIVSNAKQYAETVVVTGGEPLSWNMLPLTNALKEENLRVHIETSGAYEVTGSWDWFCLSPKKTKLPTQSAFELADELKVIIHNKHDFMFAEEQATKVNPKAILFLQPEWSKKEEMTPLIVDYVMNNPKWRVSLQTHKYLNIP

SEQ ID NO: 30171 - protein, 210 aa, Flavobacterium johnsoniae
  REGION 1..210: note = tr|A5FMQ1|A5FMQ1_FLAJ1 7-carboxy-7-deazaguanine synthase OS=Flavobacterium johnsoniae (strain ATCC 17061 / DSM 2064 / UW101) OX=376686 GN=queE PE=3 SV=1
MLPKEIQLEVNKGAMLPLMEEFYTIQGEGFHTGTAAYFIRIGGCDVGCHWCDVKESWNAELHPPTNIDIIVNNASSYANTVVVTGGEPLTWDMTLLTQQLKDKNLKVHIETSGAYPLSGTWDWICLSPKKNKLPTPDVYANAHELKVIIYNKHDFIFAEEQAELVNDNAILFLQPEWSKKEEMTPLIVDYVMNNPKWRVSLQTHKYLNIP

SEQ ID NO: 30172 - protein, 210 aa, Flavobacterium johnsoniae
  REGION 1..210: note = tr|A0A1M5T6F4|A0A1M5T6F4_FLAJO 7-carboxy-7-deazaguanine synthase OS=Flavobacterium johnsoniae OX=986 GN=queE PE=3 SV=1
MLPKEIQLEVNKGAMLPLMEEFYTIQGEGFHTGTAAYFIRIGGCDVGCHWCDVKESWNAELHPPTNIDVIVNNASSYANTVVVTGGEPLTWDMTLLTQQLKDKNLKVHIETSGAYPLSGTWDWICLSPKKNKLPTPDVYANAHELKVIIYNKHDFIFAEEQAELVNDNAILFLQPEWSKKEEMTPLIVDYVMNNPKWRVSLQTHKYLNIP

SEQ ID NO: 30173 - protein, 210 aa, unidentified
  source 1..210: note = Flavobacterium kingsejongi
  REGION 1..210: note = tr|A0A2S1LNB9|A0A2S1LNB9_9FLAO 7-carboxy-7-deazaguanine synthase OS=Flavobacterium kingsejongi OX=1678728 GN=queE PE=3 SV=1
MIMEDVSQLVDKGEMLPLMEEFYTIQGEGYHTGTAAYFIRLGGCYVGCHWCDVKESWNAELHPPTATSVIVENAKKNADTVVVTGGEPLMWDMTSLTRQLKEKNMRVHIETSGAYVLSGTWDWICLSPKKNKLPTQTVYDNAHELKVIIHNKHDFIFAEEQAALVNDGAILFLQPEWSKKEQMTPLIVEYVMSNPKWRVSLQTHKYLNIP

SEQ ID NO: 30174 - protein, 210 aa, unidentified
  source 1..210: note = Flavobacterium lacus
  REGION 1..210: note = tr|A0A328WU48|A0A328WU48_9FLAO 7-carboxy-7-deazaguanine synthase OS=Flavobacterium lacus; OX = 1353778 GN=queE PE=3 SV=1
MLQKEIQLAVEKGEMLPLMEEFYTIQGEGYHTGTAAYFIRIGGCDVGCHWCDVKESWNAELHPPTQTDVIVEHAKAYADTVVVTGGEPLTWDMSVLTQKLKEAQLKIHIETSGCYDVTGQWDWFCLSPKKNKLPVQSAYDMANELKVIIYNKHDFIFAEEQAVKVNANAILFLQPEWSKKEEMTPLIVDYVMKNPKWRVSLQTHKYLNIP

SEQ ID NO: 30175 - protein, 210 aa, Flavobacterium limicola
  REGION 1..210: note = tr|A0A495S3J7|A0A495S3J7_9FLAO 7-carboxy-7-deazaguanine synthase OS=Flavobacterium limicola OX=180441 GN=queE PE=3 SV=1
MLSKEIQLEVNKGAMLPLMEEFYTIQGEGFHTGTAAYFIRIGGCDVGCHWCDVKESWNAELHPPTGIDLIVENASKYSETVVITGGEPLMWDMNLLTQKLKVNNRRVHIETSGAYPLTGTWDWICLSPKKNKLPTDTVYDNAHELKVIIYNKHDFIFAEEQAEKVNSNAILFLQPEWSKKEEMTPLIVDYVMNNPKWRVSLQTHKYLNIP

SEQ ID NO: 30176 - protein, 217 aa, unidentified
  source 1..217: note = Flavobacterium limnosediminis
  REGION 1..217: note = tr|V6SS59|V6SS59_9FLAO 7-carboxy-7-deazaguanine synthase OS=Flavobacterium limnosediminis JC2902; OX = 1341181 GN=queE PE=3 SV=1
MQTILYKMLKKEIQIAVEKGEMLPLMEEFYTIQGEGYHTGTAAYFIRIGGCDVGCHWCDVKESWNAELHPPTATDVIVANAKKYAETVVVTGGEPLTWDMTVLTTKLKEQNLRVHIETSGAYPVTGTWDWFCLSPKKTKLPVDDAYKTAHELKVIIHNKHDFIFAEEQAAKVNDKAILFLQPEWSKKEEMTPLIVDYVMNNPKWRVSLQTHKYLNIP

SEQ ID NO: 30177 - protein, 210 aa, Flavobacterium lindanitolerans
  REGION 1..210: note = tr|A0A497VAW8|A0A497VAW8_9FLAO 7-carboxy-7-deazaguanine synthase OS=Flavobacterium lindanitolerans OX=428988 GN=queE PE=3 SV=1
MLKKELQIAVEKGVMLPLMEEFYTIQGEGYHTGTAAYFIRVGGCDVGCHWCDVKESWNAELHPPTAIEAIVENAKKYANTVVVTGGEPLTWDMGPLTQKLKEKDLKVHIETSGAYPLSGTWDWITLSPKKNKLPTQTVYDNASELKVIVHNKHDFIFAEEQAEKVNKDAILFLQPEWSKKEAMTPLIVDYVMNNPKWRVSLQTHKYLNIP

SEQ ID NO: 30178 - protein, 210 aa, unidentified
  source 1..210: note = Flavobacterium macacae
  REGION 1..210: note = tr|A0A3P3WC05|A0A3P3WC05_9FLAO 7-carboxy-7-deazaguanine synthase OS=Flavobacterium macacae OX=2488993 GN=queE PE=3 SV=1
MLKKELQAAVEKGTMLPLMEEFYTIQGEGYHTGTAAYFIRVGGCDVGCHWCDVKESWNAELHPPTEIEKIVENAKRESNVIVITGGEPLTWDMGPLTAQLKENNLKVHMETSGAYPLSGTWDWITLSPKKTKLPTQTVYDSAHELKVIIFNKHDFIFAEEQAALVNKDAILFLQPEWSKKEEMTPLIVDYVMQNPKWRVSLQTHKYLNIP

SEQ ID NO: 30179 - protein, 210 aa, unidentified
  source 1..210: note = Flavobacterium magnum
  REGION 1..210: note = tr|A0A2S0RG23|A0A2S0RG23_9FLAO 7-carboxy-7-deazaguanine synthase OS=Flavobacterium magnum; OX = 2162713 GN=queE PE=3 SV=1
MLSKEIQSEVEKGIMLPLMEEFYTIQGEGYHTGTAAYFIRVGGCDVGCHWCDVKESWNADLHPPTHVDEIVAHASLFSETVVVTGGEPLTWDMTALTTRLKAAHRKIHIETSGAYPLSGIWDWICLSPKKTKLPVQQVYDHAHELKMIIHNRHDFIFAEEQAEKVNDQAILFLQPEWSKKEEMTPLIVDYVMKNPKWRVSLQTHKYLNIP

SEQ ID NO: 30180 - protein, 205 aa, unidentified
  source 1..205: note = Flavobacterium marinum
  REGION 1..205: note = tr|A0A1H6KKY1|A0A1H6KKY1_9FLAO 7-carboxy-7-deazaguanine synthase OS=Flavobacterium marinum OX=1159016 GN=queE PE=3 SV=1
MINNSRSNEKLPLMEAFYTIQGEGFYTGHAAYFIRLAGCDVGCHWCDVKESWNENLHPTIAIDEIVAQAEKHGKLVVITGGEPLMWNLDALTSQLKQKGIQTNMETSGAYELSGFWDWICLSPKKTKLPTQSVYDAANELKCIIYNKHDFTFAEEQAARVNKAAKLYLQVEWSKKDEMLPVLIEYVKNNPKWAISTQTHKYLDIP

SEQ ID NO: 30181 - protein, 210 aa, Flavobacterium micromati
  REGION 1..210: note = tr|A0A1M5F7W0|A0A1M5F7W0_9FLAO 7-carboxy-7-deazaguanine synthase OS=Flavobacterium micromati OX=229205 GN=queE PE=3 SV=1
MLSKEVQLEVNRGAMLPLMEEFYTIQGEGFHTGKAAYFIRIGGCDVGCHWCDVKESWNAELHPPTAIDLIVNNASKYSETVVVTGGEPLMWDMSLLTQRLKNLNLKVHIETSGAYPLSGSWDWICLSPKKNKLPTETVYNNANELKVIIYNKHDFIFAEEQAEKVNPKAILFLQPEWSKSEEMTPFIVEYVMKNPKWRVSLQTHKYLNIP

SEQ ID NO: 30182 - protein, 210 aa, unidentified
  source 1..210: note = Flavobacterium nitrogenifigens
  REGION 1..210: note = tr|A0A521D7H7|A0A521D7H7_9FLAO 7-carboxy-7-deazaguanine synthase OS=Flavobacterium nitrogenifigens OX=1617283 GN=queE PE=3 SV=1
MLPKEIQLEVNKGAMLPLMEEFYTIQGEGSHTGRAAYFIRIGGCDVGCHWCDVKESWNAELHPPTKVDLIVENAAKYADTVVVTGGEPLSWDMTFLTKRLKEKNLKVHIETSGAFPLSGTWDWICLSPKKNKLPTQTVYDNAHELKVIIYNKHDFIFAEEQAELVNDNAILFLQPEWSKKEEMTPLIVDYVMNNPKWRVSLQTHKYLNIP

SEQ ID NO: 30183 - protein, 210 aa, unidentified
  source 1..210: note = Flavobacterium noncentrifugens
  REGION 1..210: note = tr|A0A1G9B4U7|A0A1G9B4U7_9FLAO 7-carboxy-7-deazaguanine synthase OS=Flavobacterium noncentrifugens OX=1128970 GN=queE PE=3 SV=1
MLPKEIQSAVEKGAMLPLMEEFYTIQGEGFHTGTAAYFIRIGGCDVGCHWCDVKESWNADLHPPTAIEQIVDNANLHANTVVITGGEPLTWDMTLLTNKLKEKNLKVHIETSGAYPLSGTWDWICLSPKKNKLPTQTVYDHAHELKVIIYNKHDFIFAEEQAEKVNKNAILFLQPEWSKKEEMTPLIVDYVMNNPKWRVSLQTHKYLNIP

SEQ ID NO: 30184 - protein, 210 aa, Flavobacterium omnivorum
  REGION 1..210: note = tr|A0A1G7Y0A4|A0A1G7Y0A4_9FLAO 7-carboxy-7-deazaguanine synthase OS=Flavobacterium omnivorum OX=178355 GN=queE PE=3 SV=1
MLSKEIQLEVNKGAMLPLMEEFYTIQGEGFHTGTAAYFIRIGGCDVGCHWCDVKESWNAALHPPTVIDLIVENANKYADTVVVTGGEPLMWDMTLLTQKLKEQKLKVHIETSGAYPLSGAWDWICLSPKKNKLPTETVYVNAHELKVIIYNKHDFIFAEEQAERVNPNAILFLQPEWSKKEEMTPLIVDYVMKNPKWRVSLQTHKYLNIP

SEQ ID NO: 30185 - protein, 210 aa, Flavobacterium oncorhynchi
  REGION 1..210: note = tr|A0A226HZJ4|A0A226HZJ4_9FLAO 7-carboxy-7-deazaguanine synthase OS=Flavobacterium oncorhynchi OX=728056 GN=queE PE=3 SV=1
MLSKEIQLEVNKGAMLPLMEEFYTIQGEGFHTGTAAYFIRIGGCDVGCHWCDVKESWNAELHPPTGIDVIVNNAATYANTVVVTGGEPLTWDMTLLTNKLKEKNLRVHIETSGAYPLSGTWDWICLSPKKNKLPTQDVYENAHELKVIIYNKHDFIFAEEQAELVNDNAILFLQPEWSKKEEMTPLIVDYVMNNPKWRVSLQTHKYLNIP

SEQ ID NO: 30186 - protein, 210 aa, unidentified
  source 1..210: note = Flavobacterium pallidum
  REGION 1..210: note = tr|A0A2S1SGJ4|A0A2S1SGJ4_9FLAO 7-carboxy-7-deazaguanine synthase OS=Flavobacterium pallidum OX=2172098 GN=queE PE=3 SV=1
MLSKEIQSAVEKGIMLPLMEEFYTIQGEGYHTGTAAYFIRVGGCDVGCHWCDVKESWNADLHPPTHVDHIVENASRFSETVVVTGGEPLTWDMSELTTRLKSANRRVHIETSGAYPLSGYWDWICLSPKKSKLPVQEVYDNADELKVIIHNKHDFIFAEEQAQKVNPKAILFLQPEWSKKEEMTPLIVDYVMNNPKWRVSLQTHKYLNIP

SEQ ID NO: 30187 - protein, 210 aa, Flavobacterium pectinovorum
  REGION 1..210: note = tr|A0A502ERZ0|A0A502ERZ0_9FLAO 7-carboxy-7-deazaguanine synthase OS=Flavobacterium pectinovorum OX=29533 GN=queE PE=3 SV=1
MLSKEIQLEVNKGAMLPLMEEFYTIQGEGFHTGTAAYFIRIGGCDVGCHWCDVKESWNAELHPPTSVDLMVKNASTYANTVVITGGEPLTWDMTFLTQELKNKDLKVHIETSGAYPLTGTWDWICLSPKKNKLPTQTVYDNAHELKVIIYNKHDFIFAEEQAELVNDNAILFLQPEWSKKEEMTPLIVDYVMNNPKWRVSLQTHKYLNIP

SEQ ID NO: 30188 - protein, 210 aa, Flavobacterium pectinovorum
  REGION 1..210: note = tr|A0A1M7P5D1|A0A1M7P5D1_9FLAO 7-carboxy-7-deazaguanine synthase OS=Flavobacterium pectinovorum OX=29533 GN=queE PE=3 SV=1
MLSKEIQLEVNKGAMLPLMEEFYTIQGEGFHTGTAAYFIRIGGCDVGCHWCDVKESWNAELHPPTSVDLIVKNAATYADTVVITGGEPLTWDMTLLTQELKNKNLKVHIETSGAYPLTGFWDWICLSPKKNKLPTQTVYDNAHELKVIIYNKHDFIFAEEQAELVNDGAILFLQPEWSKKEEMTPLIVDYVMNNPKWRVSLQTHKYLNIP

SEQ ID NO: 30189 - protein, 210 aa, Flavobacterium phragmitis
  REGION 1..210: note = tr|A0A1I1SFJ9|A0A1I1SFJ9_9FLAO 7-carboxy-7-deazaguanine synthase OS=Flavobacterium phragmitis OX=739143 GN=queE PE=3 SV=1
MLSKEIQLEVNKGAMLPLMEEFYTIQGEGSHTGRAAYFIRIGGCDVGCHWCDVKESWNAEIHPPTSIDLIVENAAKYADTVVVTGGEPLSWDMTLLTQRLKDKNLKVHIETSGAFPLSGTWDWICLSPKKNKLPTQTVYDNAHELKVIIYNKHDFIFAEEQAELVNDNAILFLQPEWSKKEEMTPLIVDYVMNNPKWRVSLQTHKYLNIP

SEQ ID NO: 30190 - protein, 210 aa, Flavobacterium psychrolimnae
  REGION 1..210: note = tr|A0A366AYV4|A0A366AYV4_9FLAO 7-carboxy-7-deazaguanine synthase OS=Flavobacterium psychrolimnae OX=249351 GN=queE PE=3 SV=1
MLSKEIQLEVNKGAMLPLMEEFYTIQGEGFHTGTAAYFIRIGGCDVGCHWCDVKESWNAELHPPTSVEQIVSNASQYSETVVVTGGEPLMWDMTLLTQKLKQNNRKVHIETSGAYPLTGIWDWICLSPKKNKLPTETVYDNAHELKVIIYNKHDFIFAEEQAEKVNPNAILFLQPEWSKKEEMTPLIVDYVMNNPKWRVSLQTHKYLNIP

SEQ ID NO: 30191 - protein, 210 aa, Flavobacterium psychrophilum
  REGION 1..210: note = sp|A6H1N2|QUEE_FLAPJ 7-carboxy-7-deazaguanine synthase OS=Flavobacterium psychrophilum (strain JIP02/86 / ATCC 49511) OX=402612 GN=queE PE=3 SV=1
MLTKEIQIAVEKGEMLPLMEEFYTIQGEGYHTGTAAYFIRIGGCDVGCHWCDVKESWNAALHPPTKTDVIVENATKYAKTIVVTGGEPLTWDMTVLTQRLKAENLQVHIETSGAYPVTGAWDWFCLSPKKNKLPVAEAYEIAHELKVIIYNKHDFIFAEEQAAKVNKNAILFLQSEWSKKEEMTPFIVDYVMNNPKWRVSLQTHKYLNIP

SEQ ID NO: 30192 - protein, 210 aa, Flavobacterium psychrophilum; identical to SEQ ID NO: 30191
  REGION 1..210: note = tr|A0A076P686|A0A076P686_FLAPS 7-carboxy-7-deazaguanine synthase OS=Flavobacterium psychrophilum OX=96345 GN=queE PE=3 SV=1

SEQ ID NO: 30193 - protein, 210 aa, Flavobacterium reichenbachii
  REGION 1..210: note = tr|A0A085ZKM4|A0A085ZKM4_9FLAO 7-carboxy-7-deazaguanine synthase OS=Flavobacterium reichenbachii OX=362418 GN=queE PE=3 SV=1
MLSKEIQLEINKGAMLPLMEEFYTIQGEGFHTGRAAYFIRIGGCDVGCHWCDVKESWNAELHPPTSTDVIVKNAASYADTVVVTGGEPLSWDMTLLTQQLKERNLKVHIETSGAYPLSGTWDWICLSPKKNKLPTQTVYDNAHELKVIIYNKHDFIFAEEQAELVNNNAILFLQPEWSKKEEMTPLIVDYVMNNPKWRVSLQTHKYLNIP

SEQ ID NO: 30194 - protein, 210 aa, Flavobacterium resistens
  REGION 1..210: note = tr|A0A521EEA4|A0A521EEA4_9FLAO 7-carboxy-7-deazaguanine synthase OS=Flavobacterium resistens OX=443612 GN=queE PE=3 SV=1
MLSKEIQLEVNKGAMLPLMEEFYTIQGEGYHTGTAAYFIRIGGCDVGCHWCDVKESWNAELHPPTSIDLIVKNASTYADTVVITGGEPLTWDMTLLTQQLKNENLKVHIETSGAYPLSGTWDWICLSPKKNKLPTQTVYDNADELKVIIYNKHDFIFAEEQAELVNDNAILFLQPEWSKKEEMTPLIVDYVMNNPKWRVSLQTHKYLNIP

SEQ ID NO: 30195 - protein, 210 aa, Flavobacterium rivuli
  REGION 1..210: note = tr|A0A0A2M192|A0A0A2M192_9FLAO 7-carboxy-7-deazaguanine synthase OS=Flavobacterium rivuli WB 3.3-2 = DSM 21788 OX=1121895 GN=queE PE=3 SV=1
MLKKETQIEVEKGEMLPLMEEFYTIQGEGYHTGTAAYFIRVGGCDVGCHWCDVKESWNADLHPPTDTDVIVANAAQWGKTIVITGGEPLMWNMDPITLKLKAAGLKVHIETSGAYPLSGYWDWICLSPKKNKLPTQAVYDNAHELKVIIHNKHDFIFAEEQAAKVNGNAILFLQPEWSKKEQITPLIVDYVMQNPKWRVSLQTHKYLNIP

SEQ ID NO: 30196 - protein, 210 aa, Flavobacterium saccharophilum
  REGION 1..210: note = tr|A0A1M6YVA1|A0A1M6YVA1_9FLAO 7-carboxy-7-deazaguanine synthase OS=Flavobacterium saccharophilum OX=29534 GN=queE PE=3 SV=1
MLSKEIQLEVNKGAMLPLMEEFYTIQGEGFHTGTAAYFIRIGGCDVGCHWCDVKESWNAELHPPTSVDLIVKNASSYADTVVITGGEPLTWDMTLLTQQLKDKNLKVHIETSGAYPLSGTWDWICLSPKKNKLPTQTVYDNAHELKVIIYNKHDFIFAEEQAELVNDNAILFLQPEWSKKEEMTPLIVDYVMNNPKWRVSLQTHKYLNIP

SEQ ID NO: 30197 - protein, 210 aa, Flavobacterium saliperosum
  REGION 1..210: note = tr|A0A1G4VV05|A0A1G4VV05_9FLAO 7-carboxy-7-deazaguanine synthase OS=Flavobacterium saliperosum OX=329186 GN=queE PE=3 SV=1
MLKKEIQIAVEKGEMLPLMEEFYTIQGEGYHTGTAAYFIRIGGCDVGCHWCDVKESWNAELHPPTSIDIIVANAKKYAETVVVTGGEPLTWDMTVLTNKLKEQNLRVHIETSGAYPVTGSWDWFCLSPKKTKLPVEDAYKIAHELKVIIHNKHDFQFAEEQAAKINDNAILFLQPEWSKKEEMTPLIVDYVMNNPKWRVSLQTHKYLNIP

SEQ ID NO: 30198 - protein, 210 aa, unidentified
  source 1..210: note = Flavobacterium sediminis
  REGION 1..210: note = tr|A0A2U8QSQ1|A0A2U8QSQ1_9FLAO 7-carboxy-7-deazaguanine synthase OS=Flavobacterium sediminis OX=2201181 GN=queE PE=3 SV=1
MLSKEIQLAVDKGEMLPLMEEFYTIQGEGFHTGRAAYFIRIGGCDVGCHWCDVKESWNADLHPPTTTDDIVKNAKELAETVVVTGGEPLTWDMSVLTAKLKAEGLRVHIETSGAYPVTGEWDWFCLSPKKTKLPVQQAYECAHELKMIVHNKHDFQFAEEQAAKVNPNAILFLQPEWSRKEEMTPLIIDYVMQHPKWRISLQTHKYLNIP

SEQ ID NO: 30199 - protein, 210 aa, Flavobacterium segetis
  REGION 1..210: note = tr|A0A1M5FT77|A0A1M5FT77_9FLAO 7-carboxy-7-deazaguanine synthase OS=Flavobacterium segetis OX=271157 GN=queE PE=3 SV=1
MLSREIQLEVNRGTMLPLMEEFYTIQGEGYHTGTAAYFIRIGGCDVGCHWCDVKESWNAELHPPTAIDLIVNNASKYSETVVVTGGEPLMWDMSALTKSLKSKNLKVHIETSGAYPLSGIWDWICLSPKKNKLPTETVYDNAHELKVIIFNKHDFIFAEEQAEKVNNNAILFLQPEWSKKEEMTPLIVEYVMKNPKWRISLQTHKYLNIP

SEQ ID NO: 30200 - protein, 210 aa, unidentified
  source 1..210: note = Flavobacterium seoulense
  REGION 1..210: note = tr|A0A066WSS4|A0A066WSS4_9FLAO 7-carboxy-7-deazaguanine synthase OS=Flavobacterium seoulense OX=1492738 GN=queE PE=3 SV=1
MLAKEIQLEVNKGAMLPLMEEFYTIQGEGFHTGTAAYFVRIGGCDVGCHWCDVKESWNAELHPPTALDVIVENASKYADTVVVTGGEPLTWDMTLLTQKLKERNRKVHIETSGAYPLSGTWDWICLSPKKNKLPTQTVYDNAHELKVIIHNKHDFIFAEEQAELVNDNAILFLQPEWSKKEEMTPLIVDYVMNHPKWRVSLQTHKYLNIP

SEQ ID NO: 30201 - protein, 210 aa, Flavobacterium sinopsychrotolerans
  REGION 1..210: note = tr|A0A1H8QSP4|A0A1H8QSP4_9FLAO 7-carboxy-7-deazaguanine synthase OS=Flavobacterium sinopsychrotolerans OX=604089 GN=queE PE=3 SV=1
MLSKEIQLEVNKGAMLPLMEEFYTIQGEGFHTGTAAYFIRIGGCDVGCHWCDVKESWNAELHPPTGIDLIVENASKYSETVVITGGEPLMWDMNLLTQKLKENNRRVHIETSGAYPLTGTWDWICLSPKKNKLPTQTVYDNAHELKVIIYNKHDFVFAEEQAEKVNSNAILFLQPEWSKKEEMTPLIVDYVMNNPKWRVSLQTHKYLNIP

SEQ ID NO: 30202 - protein, 210 aa, Flavobacterium sp.
  REGION 1..210: note = tr|A0A2N0HE85|A0A2N0HE85_9FLAO 7-carboxy-7-deazaguanine synthase OS=Flavobacterium sp. 5; OX = 2035199 GN=queE PE=3 SV=1
MLSKEVQLEVNKGTMLPLMEEFYTIQGEGFHTGTAAYFIRIGGCDVGCHWCDVKESWNAELHPPTKIDLIVDNATKYADTIVITGGEPLMWDMDPLTQKLKDNNVRVHIETSGAYPLSGTWDWICLSPKKNKLPTKTVYDNADELKVIIYNKHDFIFAEEQAEKVNPNAILFLQPEWSKKEEMTPLIVDYVMNNPKWRVSLQTHKYLNIP

SEQ ID NO: 30203 - protein, 210 aa, Flavobacterium sp.
  REGION 1..210: note = tr|A0A243SEN8|A0A243SEN8_9FLAO 7-carboxy-7-deazaguanine synthase OS=Flavobacterium sp. FPG59 OX=1929267 GN=queE PE=3 SV=1
MLSKEIQLEVNKGAMLPLMEEFYTIQGEGSHTGTAAYFIRIGGCDVGCHWCDVKESWNAELHPPTAVDLIVSNASKYAETVVVTGGEPLMWDMTLLTQKLHDNNRKVHIETSGAYPLTGSWDWICLSPKKNKLPTSTVYEAAHELKVIIYNKHDFIFAEEQAEKVSANAILFLQPEWSKKEEMTPLIVDYVMQNPKWRVSLQTHKYLNIP

SEQ ID NO: 30204 - protein, 210 aa, unidentified
  source 1..210: note = Flavobacterium spartansii
  REGION 1..210: note = tr|A0A1S1J8F4|A0A1S1J8F4_9FLAO 7-carboxy-7-deazaguanine synthase OS=Flavobacterium spartansii OX=1278819 GN=queE PE=3 SV=1
MLSKEIQLEVNKGAMLPLMEEFYTIQGEGFHTGTAAYFIRIGGCDVGCHWCDVKESWNAELHPPTSIDLIVNNASSQADTVVITGGEPLTWDMSLLTQQLKDKNMKVHIETSGAYPLSGTWDWICLSPKKNKLPTQTVYDNAHELKVIIYNKHDFIFAEEQAELVNDNAILFLQPEWSKKEEMTPLIVDYVMNNPKWRVSLQTHKYLNIP

SEQ ID NO: 30205 - protein, 210 aa, Flavobacterium subsaxonicum
  REGION 1..210: note = tr|A0A0A2MUZ3|A0A0A2MUZ3_9FLAO 7-carboxy-7-deazaguanine synthase OS=Flavobacterium subsaxonicum WB 4.1-42 = DSM 21790 OX=1121898 GN=queE PE=3; SV = 1
MLKKELQIEVEKGIMLPLMEEFYTIQGEGFHTGTAAYFIRVGGCDVGCHWCDVKESWNADLHPPTSIDTIVNNAKQYGKTIVITGGEPLMWNMSPLTQKLKDEGLRVHIETSGAYPLSGTWDWICLSPKKTKLPTPDVYLFAQELKVIIHNKHDFIFAEEQAAKTNSDAILFLQPEWSKRDEVTPLIVDYVMNNPKWRVSLQTHKYLNIP

SEQ ID NO: 30206 - protein, 210 aa, Flavobacterium succinicans
  REGION 1..210: note = tr|A0A199XV23|A0A199XV23_9FLAO 7-carboxy-7-deazaguanine synthase OS=Flavobacterium succinicans OX=29536 GN=queE_1 PE=3 SV=1
MLSKEIQLEVNKGAMLPLMEEFYTIQGEGNHTGTAAYFIRIGGCDVGCHWCDVKESWNAELHPPTPIENIVANAVKYADTVVVTGGEPLTWDMSLLTSKLKEHKLKIHIETSGAYPLSGTWDWICLSPKKNKLPTQTVYDHADELKVIIFNKHDFIFAEEQAAKVNSNALLFLQPEWSNKEDMTPLIVDYVMKNPKWRVSLQTHKYLNIP

SEQ ID NO: 30207 - protein, 229 aa, Flavobacterium succinicans
  REGION 1..229: note = tr|A0A199XNG8|A0A199XNG8_9FLAO 7-carboxy-7-deazaguanine synthase OS=Flavobacterium succinicans OX=29536 GN=queE_2 PE=4 SV=1
MNVSASTPLYSITPFTLLDYPHQSACILWFAGCNMRCQYCYNPEIVLGKGKFTFQHALDFIQTRKNLLDAVVFSGGECLLHKNCIEFIATVKKMGFLVKIDTNGSKPKVLQTLLEQQTIDYVALDFKAMPQTFETITQSDLFAPFEQSLELLLKHSVPFEVRTTIHSDLISASDLQKMIQFLEQKGYQGKYFIQYFVNEAPTIEKMGFSHRELDPETLSTANIKIVIRN

SEQ ID NO: 30208 - protein, 210 aa, Flavobacterium suncheonense
  REGION 1..210: note = tr|A0A0A2M6J7|A0A0A2M6J7_9FLAO 7-carboxy-7-deazaguanine synthase OS=Flavobacterium suncheonense GH29-5 = DSM 17707 OX=1121899 GN=queE PE=3; SV = 1
MLQKEIQIAVEKGEMLPLMEEFYTIQGEGYHTGTAAYFIRIGGCDVGCHWCDVKESWNAELHPPTSTDVIVNNAKKYAETVVVTGGEPLTWDMTALTGKLKAADLRVHIETSGAYPVTGHWDWFCLSPKKTKLPVQQAYDMAHELKVIIYNKHDFIFAEEQAAKVNGKAILFLQPEWSKKEEMTPLIIDYVMNNPKWRISLQTHKYLNIP

SEQ ID NO: 30209 - protein, 210 aa, Flavobacterium swingsii
  REGION 1..210: note = tr|A0A1I0XWF1|A0A1I0XWF1_9FLAO 7-carboxy-7-deazaguanine synthase OS=Flavobacterium swingsii OX=498292 GN=queE PE=3 SV=1
MLTKEIQIAVEKGEMLPLMEEFYTIQGEGYHTGTAAYFIRIGGCDVGCHWCDVKESWNAALHPPTKTDIIVGNAKKYAKTIVVTGGEPLTWDMTVLTQKLKAENLQVHIETSGAYPVTGNWDWFCLSPKKNKLPVADAYAIAHELKVIIYNKHDFIFAEEQAAKVNKNAILFLQPEWSKKEEMTPLIVDYVMNNPKWRVSLQTHKYLNIP

SEQ ID NO: 30210 - protein, 210 aa, Flavobacterium terrae
  REGION 1..210: note = tr|A0A1M6BT79|A0A1M6BT79_9FLAO 7-carboxy-7-deazaguanine synthase OS=Flavobacterium terrae; OX = 415425 GN=queE PE=3 SV=1
MLEKHTQLAVEKGEMLPLMEEFYTIQGEGYHTGTAAYFVRIGGCDVGCHWCDVKESWNAELHPPTHIEKIVSNAKKYAETVVVTGGEPLTWDMSQLTTKLKEANLRVHIETSGAYSVTGTWDWFCLSPKKTKLPVDDAYAIADELKVIIYNKHDFIFAEEQAEKVNNKAILFLQPEWSKRDEITPLIVDYVMSNPKWRVSLQTHKYLNIP

SEQ ID NO: 30211 - protein, 210 aa, Flavobacterium terrigena
  REGION 1..210: note = tr|A0A1H6WNS9|A0A1H6WNS9_9FLAO 7-carboxy-7-deazaguanine synthase OS=Flavobacterium terrigena OX=402734 GN=queE PE=3 SV=1
MLNKETQILVNKGEMLPLMEEFYTIQGEGYHTGTAAYFIRVGGCDVGCHWCDVKESWNADLHPPTSVETIVTNAKKYAKTIVITGGEPLTWDMNPITKQLKNAGLHVHIETSGAYDVTGTWDWFCLSPKKNKLPVESAYAIANELKVIIHNKHDFIFAEEQAEKTNKNAILFLQPEWSKKEEMTPLIVDYVMNNPKWRVSLQTHKYLNIP

SEQ ID NO: 30212 - protein, 244 aa, unidentified
  source 1..244: note = [Flavobacterium] thermophilum
  REGION 1..244: note = tr|A0A377FY99|A0A377FY99_9BACL 7-carboxy-7-deazaguanine synthase OS=[Flavobacterium] thermophilum OX=1414643 GN=queE PE=3 SV=1
MARTIPVLEIFGPTIQGEGMVIGQKTMFVRTAGCDYRCRWCDSAFTWDGSAKDEIEQLTADEIWRRLEAIGGRRFRHVTISGGNPLLIAALGELIALLHEKGMRVAVETQGSRWQDWLLDIDDVTLSPKPPSSGMDTDWAALDQIIERLQADQSRVRRISLKVVVFDDADLAYAKEVHRRYLGVPFYLQVGNADVADSDVDALRTKLLHRLEWLVEQAADSEELADVHILPQLHTLLWGNKRGV

SEQ ID NO: 30213 - protein, 210 aa, unidentified
  source 1..210: note = Flavobacterium tibetense
  REGION 1..210: note = tr|A0A365P1Z4|A0A365P1Z4_9FLAO 7-carboxy-7-deazaguanine synthase OS=Flavobacterium tibetense OX=2233533 GN=queE PE=3 SV=1
MLQKEIQLAVEKGEMLPLMEEFYTIQGEGFHTGTAAYFIRIGGCDVGCHWCDVKESWNAELHPPTKTDIIVANAKKYADTVVVTGGEPLTWDMSLLTSKLKEQNLKVHIETSGAYEVTGTWDWFCLSPKKNKLPVQSAYNIADELKVIIYNKHDFIFAEEQAAKVNPNAILFLQPEWSKKEEMTPLIVDYVMNNPKWRVSLQTHKYLNIP

SEQ ID NO: 30214 - protein, 232 aa, unidentified
  source 1..232: note = Flavobacterium ummariense
  REGION 1..232: note = tr|A0A1I5ETA6|A0A1I5ETA6_9FLAO 7-carboxy-7-deazaguanine synthase OS=Flavobacterium ummariense OX=913024 GN=queE PE=3 SV=1
MKEQLNGCSFFMKNFYDNYCIFAENIKMTTTETIVDKLPLMEAFYTIQGEGFYTGHAAYFIRLAGCDVGCHWCDVKESWDENLHPKILVSDIVSQAEDNGKLVVITGGEPLMWNLDHLTSKLKEKGIQTNIETSGAYELSGFWDWICLSPKKKKLPTQSVYDAANELKCIIYNHHDFKFAEEQAAKVNKNAKLYLQVEWGKKEEMLPLVIDYVKNNPKWAISTQTHKYLDIP

SEQ ID NO: 30215 - protein, 210 aa, unidentified
  source 1..210: note = Flavobacterium urocaniciphilum
  REGION 1..210: note = tr|A0A1H9C1Z2|A0A1H9C1Z2_9FLAO 7-carboxy-7-deazaguanine synthase OS=Flavobacterium urocaniciphilum OX=1299341 GN=queE PE=3 SV=1
MLNKEIQIQVDKGEMLPLMEEFYTIQGEGFYTGTAAYFIRVGGCDVGCHWCDVKESWNADLHPPTAISHIVANAKKYAETVVVTGGEPLTWNMLPLTTELKANNLRVHIETSGAYEVSGEWDWFCLSPKKTKLPVQSAYDMADELKMIIHNKHDFMFAEEQAAKTNSNAILFLQPEWSKKEEMTPLIIDYVMNNPKWRISLQTHKYLNIP

SEQ ID NO: 30216 - protein, 210 aa, Flavobacterium urumqiense
  REGION 1..210: note = tr|A0A1H5RSX2|A0A1H5RSX2_9FLAO 7-carboxy-7-deazaguanine synthase OS=Flavobacterium urumqiense OX=935224 GN=queE PE=3 SV=1
MLSKEIQLEVNKGAMLPLMEEFYTIQGEGFHTGTAAYFIRIGGCDVGCHWCDVKESWNAEIHPPTSIDLIVANANKYADTVVITGGEPLMWDMTLLTQRLKDQNLKVHIETSGAYPLSGTWDWICLSPKKNKLPTETVYDNAHELKVIIYNKHDFVFAEEQAEKVNPNAILFLQPEWSKKEEMTPLIVDYVMNNPKWRVSLQTHKYLNIP

SEQ ID NO: 30217 - protein, 210 aa, Flavobacterium weaverense
  REGION 1..210: note = tr|A0A3L9ZX05|A0A3L9ZX05_9FLAO 7-carboxy-7-deazaguanine synthase OS=Flavobacterium weaverense OX=271156 GN=queE PE=3 SV=1
MLSKEVQLEVNKGMMLPLMEEFYTIQGEGYHTGTAAYFIRIGGCDVGCHWCDVKESWNAELHPPTGIDLIVANASKYSKTIVITGGEPLMWDMTLLTQKLKDKNLNVHIETSGAYPLSGTWDWICLSPKKNKLPTDTIYDNAHELKVIIHNKHDFIFAEEQAEKVNPNAILFLQPEWSKNDEMTPLIVEYVMKKPKWRVSLQTHKYLNIP

SEQ ID NO: 30218 - protein, 210 aa, Flavobacterium xanthum
  REGION 1..210: note = tr|A0A1M7H1J9|A0A1M7H1J9_9FLAO 7-carboxy-7-deazaguanine synthase OS=Flavobacterium xanthum OX=69322 GN=queE PE=3 SV=1
MLSKEIQLEVNKGAMLPLMEEFYTIQGEGFHTGTAAYFIRIGGCDVGCHWCDVKESWNAALHPPTSIDLIVENANKYADTVVVTGGEPLMWDMTLLTQKLKEQNLKVHIETSGAYPLSGAWDWICLSPKKNKLPTETVYDNAHELKVIIYNKHDFVFAEEQAEKVNPNAILFLQPEWSKKEEMTPLIVDYVMKNPKWRVSLQTHKYLNIP

SEQ ID NO: 30219 - protein, 210 aa, Flavobacterium xinjiangense
  REGION 1..210: note = tr|A0A1M7G4R6|A0A1M7G4R6_9FLAO 7-carboxy-7-deazaguanine synthase OS=Flavobacterium xinjiangense OX=178356 GN=queE PE=3 SV=1
MLSKEIQLEVNKGAMLPLMEEFYTIQGEGFHTGTAAYFIRIGGCDVGCHWCDVKESWNAELHPPTSIDLIVANANKYADTVVVTGGEPLMWDMTLLTQKLKDQNLKVHIETSGAYPLSGSWDWICLSPKKNKLPTETVYDNAHELKVIIYNKHDFIFAEEQAEKVNPNAILFLQPEWSKKEEMTPLIVDYVMNNPKWRVSLQTHKYLNIP

SEQ ID NO: 30220 - protein, 210 aa, Flavobacterium xueshanense
  REGION 1..210: note = tr|A0A1I2DZ02|A0A1I2DZ02_9FLAO 7-carboxy-7-deazaguanine synthase OS=Flavobacterium xueshanense OX=935223 GN=queE PE=3 SV=1
MLSKEIQLEVNKGAMLPLMEEFYTIQGEGFHTGTAAYFIRIGGCDVGCHWCDVKESWNAELHLPTAIDLIVANASKYSETVVVTGGEPLMWDMSLLTQKLKENNRKVHIETSGAYPLTGYWDWICLSPKKNKLPTQTVYDNAHELKVIIFNKHDFIFAEEQAEKVNNNAILFLQPEWSKKEEMTPLIVDYVMNNPKWRVSLQTHKYLNIP

SEQ ID NO: 30221 - protein, 194 aa, Flectobacillus sp.
  REGION 1..194: note = tr|A0A267TG67|A0A267TG67_9BACT 7-carboxy-7-deazaguanine synthase OS=Flectobacillus sp. BAB-3569 OX=1509483 GN=queE PE=3 SV=1
MEAFYTLQGEGYYQGKAAYFIRLGGCDVGCHWCDVKESWDVNAHPQLTLDEIVAEAAKHPGKLAVITGGEPLMHHLDELTNALHNAGIQTNIETSGVCEAVTGYWDWICFSPKKFKAPNPDIFEKAHELKVVIYHPSDFEWAEGYAAKMSPECLLYLQPEWSKSETILPLIIEYIKDNPKWRISLQVHKFMNIP

SEQ ID NO: 30222 - protein, 193 aa, Flexibacter flexilis
  REGION 1..193: note = tr|A0A1I1HV95|A0A1I1HV95_9BACT 7-carboxy-7-deazaguanine synthase OS=Flexibacter flexilis DSM 6793 OX=927664 GN=queE PE=3 SV=1
MEAFYTIQGEGRYQGTAAYFIRLGGCDVGCHWCDVKESWDAEAHPQQSIEEIVEQASKYPSRVAVITGGEPLMHNLDALCEALHLQGFRTHLETSGAYPLTGHWDWVCLSPKKFKKPLAEVCQAADELKVVIYNKFDFEWAESYSQQVGKDCTLLLQPEWDRTELMLPLMISYIKQHPQWRMSLQMHKYINVP

SEQ ID NO: 30223 - protein, 210 aa, unidentified
  source 1..210: note = [Flexibacter] sp.
  REGION 1..210: note = tr|A0A1V2CGI9|A0A1V2CGI9_9FLAO 7-carboxy-7-deazaguanine synthase OS=[Flexibacter] sp. ATCC 35103 OX=1937528 GN=queE PE=3 SV=1
MLSKEIQLEVNKGAMLPLMEEFYTIQGEGFHTGTAAYFIRIGGCDVGCHWCDVKESWNAELHPPTSVDLIVNNAATHADTVVITGGEPLTWDMTLLTQELKNRNLKVHIETSGAYPLTGSWDWICLSPKKNKLPTQTVYDNAHELKVIIYNKHDFIFAEEQAELVNGNAILFLQPEWSKKEEMTPLIVDYVMNNPKWRVSLQTHKYLNIP

SEQ ID NO: 30224 - protein, 88 aa, unidentified
  source 1..88: note = [Flexibacter] sp.
  REGION 1..88: note = tr|A0A1V2ATJ6|A0A1V2ATJ6_9BACT 7-carboxy-7-deazaguanine synthase QueE (Fragment); OS = [Flexibacter] sp. ATCC 35208 OX=1936242 GN=BW716_36140; PE = 4 SV=1
SSDLSPKKNKLPTQTVYDNAHELKVIIYNKHDFIFAEEQAELVNGNAILFLQPEWSKKEEMTPLIVDYVMNNPKWRVSLQTHKYLNIP

SEQ ID NO: 30225 - protein, 245 aa, Flexibacter sp.
  REGION 1..245: note = tr|A0A2M7NK92|A0A2M7NK92_9BACT 7-carboxy-7-deazaguanine synthase OS=Flexibacter sp. CG_4_10_14_3_um_filter_32_15 OX=1975530 GN=queE PE=3 SV=1
MEFAYLRRILFIILNYEIKMPTISSSSFSKLSKPVSKPTRQTKPELTSSLPVMEAFYTLQGEGVFTGHAAYFIRLGGCDVGCFWCDVKESWDKEAHPQQSISQIVKEASSFSARLAVITGGEPLMHDLDELTAALKKEGFRVHIETSGAHPLSGTLDWITLSPKRFKKPLEAIYPKVHELKMVVYALSDLEWAQEEAKKVSDSCKLLIQPEWSKSDKNLPILIEFVKENPRWQVSLQTHKFMNIP

SEQ ID NO: 30226 - protein, 235 aa, Flexistipes sinusarabici
  REGION 1..235: note = tr|A0A5D0MXW9|A0A5D0MXW9_FLESI 7-carboxy-7-deazaguanine synthase OS=Flexistipes sinusarabici OX=2352 GN=queE PE=3 SV=1
MNNSFGYIKEIFPSIQGEGKYIGAKQLFVRFAGCSVNCLNCDTDYSAEDSFSINDKKIQNPISPVTLADNISEGFDLNSFHSISLTGGEPLDQFDFLENFIRAVKKISEIRIFLETSGFYSEKLLKLKDVVDIFSVDLKIKSSFGVSNLQNIQKFLRSVDTNKTYVKLIINKNFTETEINSVLKISMDSKIKEIYLQPLNNISYNKNLKSVIDLLQKNKIDTYFIPQVQKFMEIK

SEQ ID NO: 30227 - protein, 242 aa, Flexistipes sinusarabici
  REGION 1..242: note = tr|A0A3D5Q9M4|A0A3D5Q9M4_FLESI 7-carboxy-7-deazaguanine synthase OS=Flexistipes sinusarabici OX=2352 GN=queE PE=3 SV=1
MILQRSIMNNSSGYIKEIFPSIQGEGKYVGAKQLFVRLAGCSVNCLNCDTDYSAEDFFIINDKRIQNPVSPVDLAGNITEAFGLNSFHSISITGGEPLDQFGFLKDFIKAVKEMSGIRIFLETSGFYSDKLLALQDIVDIFSIDLKIKSSFGVNNLQSVQKIMRSIDTSKTYVKLIINKNITEIEMNAALKFLMDLKIKEIYLQPLNNISYNNKLEHIIDLLQDNGVNAYFIPQIHKFMEIR

SEQ ID NO: 30228 - protein, 291 aa, Fluoribacter bozemanae
  REGION 1..291: note = tr|A0A0W0RF55|A0A0W0RF55_FLUBO 7-carboxy-7-deazaguanine synthase OS=Fluoribacter bozemanae OX=447 GN=queE PE=3 SV=1
MFGLNDRVGKSFFKTAKPDELFITSRFFTLQGEGPFRGHPAYFIRLAKCNLACSFCDTYFDAGEWKSFNSLLEEADSVIAAFFQGRNLPTPSWAKGLAKKMVLVITGGEPSLQQNLSVFLEEAKPYFQYIQIESNGISLLPDLLQSTTLVVSPKCLEKDGKAIRYLKPNSKMLERADCLKFVMSAPEEDRYIPYSEIPTWAHEWAEKTNKQVFVSPMNKYRKEPQRVNAIRDKGHDLTLAERSEINEVVSFWEAGLLDMEKNQRNHEHAAEYCMKYGFILNLQIHLFASLP

SEQ ID NO: 30229 - protein, 291 aa, Fluoribacter dumoffii
  REGION 1..291: note = tr|A0A377G791|A0A377G791_9GAMM 7-carboxy-7-deazaguanine synthase OS=Fluoribacter dumoffii; OX = 463 GN=queE PE=3 SV=1
MFGLNDRVGKSFFNDAKSDELFVTSRFFTLQGEGPFRGHPAYFIRLAKCNLACSFCDTYFDTGEWIDFTSLLEEADTVIHSFFQTRNLTSPSWAQGLGKNMVLVITGGEPSLQRNLSAFLEQAQPYFQYTQIESNGVSILPDLPAKTTLVVSPKCLEKEGKVIRYLEPNSKMLKRADYLKFVMSAPEDGQYTPYSEIPAWAHEWAEKTGKQVFVSPMNRYQKEPQRAQAMREKGRDLTIAERSEINETVSFWEPGLLHLEKNQRNHEYAAEYCMKYGFVLNLQIHLFASLP

SEQ ID NO: 30230 - protein, 291 aa, Fluoribacter gormanii
  REGION 1..291: note = tr|A0A377GHI7|A0A377GHI7_9GAMM 7-carboxy-7-deazaguanine synthase OS=Fluoribacter gormanii; OX = 464 GN=queE PE=3 SV=1
MFGLNEKVGKSFFKTANPGELFVTSRFFTLQGEGPFRGHPAYFIRLAKCNLACSFCDTYFDVGEWRSFSSLLEEADTLIGAFFQNRSLPTPSWAQGRAKKIILVITGGEPSLQQNLSAFLEAAQPYFQQTQIESNGIAILSDLPKSTILVVSPKCLEKNGKTIRYLEPNAKMLERADYLKFVMSAPEEGQYKPYSEIPAWAHEWAEKTKKQVFVSPMNRYQKEPQRVRAIRDKGQDLTLAERSEINEVVSFWEPGLLDLEKNQRNHEYAAEYCMKYGFILNLQIHLFASLP

SEQ ID NO: 30231 - protein, 220 aa, unidentified
  source 1..220: note = Fluviicoccus keumensis
  REGION 1..220: note = tr|A0A4V2G645|A0A4V2G645_9GAMM 7-carboxy-7-deazaguanine synthase OS=Fluviicoccus keumensis OX=1435465 GN=queE PE=3 SV=1
MLTDNLPRELRITEIFHSLQGEARSVGVPTVFVRLTGCPLRCVYCDTTYSFSGGEKFSFDALLQQIRAYRTPVVCVTGGEPLAQPNCIPFLKQLCDEGFRVSLETGGAMDIRDVDTRVSRVVDLKTPDSGEMHRNLYENMALLTRHDQVKFVICSRKDYEWARFKLDEYQLADRAGDVLFSPSHGQLAPRELAEWILDDRLPVRFQLQLHKYLWNNEPGH

SEQ ID NO: 30232 - protein, 206 aa, Fluviicola sp.
  REGION 1..206: note = tr|A0A1G0CH74|A0A1G0CH74_9FLAO 7-carboxy-7-deazaguanine synthase OS=Fluviicola sp. RIFCSPHIGHO2_12_FULL_43_24 OX=1798019 GN=queE PE=3 SV=1
MSQQLRLAVTYPVMEHFYTLQGEGRYSGVAAYFIRLGGCDVGCVWCDVKESWDADAHPKMSVAEMVNEVSNHPGNLVVITGGEPAMYDLTPLVEELKVAGKYVAIETSGAHPLIGEVDWYTFSPKKFKEPVAEAYQKASELKVVIYHSSDFAWAEKHARNVSEDCRLYLQPEWSKQERLLPELIEYVKQHPKWTVSLQTHKYLQIP

SEQ ID NO: 30233 - protein, 207 aa, Fluviicola sp.
  REGION 1..207: note = tr|A0A2G2FGX5|A0A2G2FGX5_9FLAO 7-carboxy-7-deazaguanine synthase OS=Fluviicola sp.; OX = 1917219 GN=queE PE=3 SV=1
MEKAKKEKPKSWPVMESFYTIQGEGYYSGRAAYFIRFGGCDVGCVWCDVKDSWDKEKHPEVHLDTLISAVEATPTNFVVLTGGEPAMYDLTTLVDELKKQGKEIAIETSGCYPLIGNVDWYCFSPKKFKAPDEEAYDLADELKVVIFNKSDFEWAETHAERVNQGCELFLQPEWSKQEQFLPEIIEYVKKNPKWRISQQTHKFMNIP

SEQ ID NO: 30234 - protein, 204 aa, Fluviicola taffensis
  REGION 1..204: note = tr|F2IH51|F2IH51_FLUTR 7-carboxy-7-deazaguanine synthase OS=Fluviicola taffensis (strain DSM 16823 / NCIMB 13979 / RW262) OX=755732 GN=queE PE=3 SV=1
MTQYSSASYPVMEHFYTIQGEGKYTGTSAYFIRLGGCDVGCVWCDVKESWDADIHPKMTVDELITVVAQYPGELVVITGGEPAMYDLSVLVDALHSIGKYVAIETSGTSPLVGAVDWYTFSPKKFKSPVDEAYNKASELKIVIFHQSDLKWAEEHSLKVNDACVLYLQPEWSKREQLLPTIIEYVKNHPKWKISLQTHKYLEIP

SEQ ID NO: 30235 - protein, 218 aa, Fodinibius salinus
  REGION 1..218: note = tr|A0A5D3YQL9|A0A5D3YQL9_9BACT 7-carboxy-7-deazaguanine synthase OS=Fodinibius salinus; OX = 860790 GN=queE PE=3 SV=1
MFNMLEKNKMDNLIDEDEMKGVKYPLVEDFYTIQGEGAHSGRPAYFIRTAGCDVNCWWCDVKESWDEEKHSKKSVADIVQGAKDSGAKFAVITGGEPLLHDLGPLTYQLKQAGMDVHIETSGSSPVSGYLDWITLSPKRFKEPTDDIFRYVDELKVVVLTNKDLEWAEKNAAKCPDSTQLLLQPEWEKEGAVELIIDYVKSNPEWGISLQTHKFMGVE

SEQ ID NO: 30236 - protein, 244 aa, Fontibacillus panacisegetis
  REGION 1..244: note = tr|A0A1G7GVH9|A0A1G7GVH9_9BACL 7-carboxy-7-deazaguanine synthase OS=Fontibacillus panacisegetis OX=670482 GN=queE PE=3 SV=1
MTSKEKPIPVLEIFGPTVQGEGLVIGQKTMFVRTAGCDYSCSWCDSSFTWDGSAKNEIKQLSAQMIWDELKILGGNTFEHVTISGGNPALLKNIGYLVNLLHDQGIRVGLETQGSRWQEWMADIDDLTISPKPPSSGMITDWEKLDEVMENLKNSSNEICIKVVVFDEDDLQYAVQAHKRYPHIRLVLQVGNSDVTTLDREGLAFALLEKYEWLINQVMASSDLRQVKVLPQLHTLLWGNKRGV

SEQ ID NO: 30237 - protein, 250 aa, Fontibacillus panacisegetis
  REGION 1..250: note = tr|A0A1G7Q0B0|A0A1G7Q0B0_9BACL 7-carboxy-7-deazaguanine synthase OS=Fontibacillus panacisegetis OX=670482 GN=queE PE=3 SV=1
MTDHTKKSTSLIPVLEIFGPTVQGEGMVIGQKTMFIRTAGCDYHCTWCDSAFTWDGSAKSLIKMMEPQNIWEELRRIGGNRFSHVTLSGGNPALLPQMSGLVALLHQQGITMAVETQGSRWQDWLKDIDQVTLSPKPPSSGMNTKWEILDEVVERLLHREPCFSMSLKVVIFDEQDLAYAKKIHQRYARIPMFLQVGNPDVHRMDIQHHAADLLSRYEDLIEIVMSSNELNDVRVLPQLHALVWGNKRGV

SEQ ID NO: 30238 - protein, 263 aa, unidentified
  source 1..263: note = Fontibacillus phaseoli
  REGION 1..263: note = tr|A0A369BG16|A0A369BG16_9BACL 7-carboxy-7-deazaguanine synthase OS=Fontibacillus phaseoli OX=1416533 GN=queE PE=3 SV=1
MNSGSGINSSPGNGNTDNPVGTPTIPVLEIFGPTVQGEGMVIGQKTMFVRTAGCDYRCLWCDSAFTWDGSAKDLIIKMTPTEIRDELRRIGDNRFSHVTLSGGNPALLPQLEGLVSLLRGEGITIAVETQGSRWQDWLAEIHQVTLSPKPPSSGMATDWPVLDDIVAKLSARPAPFAVSLKVVVFDEADLSYTRQVHARYPGVAMFLQVGNPDVRRMDIGHHAADLLHRYEGLIDRVMSLSDLNDVRVLPQLHALVWGNRRGV

SEQ ID NO: 30239 - protein, 248 aa, unidentified
  source 1..248: note = Fonticella tunisiensis
  REGION 1..248: note = tr|A0A4R7KVP2|A0A4R7KVP2_9CLOT 7-carboxy-7-deazaguanine synthase OS=Fonticella tunisiensis OX=1096341 GN=queE PE=3 SV=1
MTVDKFKGTVIPVVEIFNSVSGEGISAGTITTFVRVARCNLRCSYCDTTYSYDEFSENNQMMTPDEIVDRVSQFGCKDIICTGGEPLEPQKPKRYLPLYLASKGFKVRIETNGSCPVYSNEELECFLKGDRFQVLYYTLDIKCPGSGMSKYNIFEENLEKLHEGDELKFVVSNQEDIAYAIKVIDKYKDILVLNKVVINFSPAYGLIKPEELVEVLKEKHQYFSNYELRVRLSLQLHKIIWPADARGV

SEQ ID NO: 30240 - protein, 222 aa, unidentified
  source 1..222: note = Fontimonas thermophila
  REGION 1..222: note = tr|A0A1I2HTZ4|A0A1I2HTZ4_9GAMM 7-carboxy-7-deazaguanine synthase OS=Fontimonas thermophila OX=1076937 GN=queE PE=3 SV=1
MITSSVAAVEPRLKITEIFRSLQGESSLVGWPTAFVRLTGCPLRCQYCDTAYAFHGGQWMTLAQVRERVASLDVRHVCVTGGEPLAQKACLGLLAMLCDAGYQVSLETSGALDISAVDPRVVRVMDLKTPDSGESQRNRWENLAHLSARDEVKFVICSRADYEWARDVVRTHALDRRCTVLFSPSAGQLEPVQLADWLLADRLPVRFQVQLHKLLWGNTPGR

SEQ ID NO: 30241 - protein, 216 aa, Formivibrio citricus
  REGION 1..216: note = tr|A0A1I4ZHR3|A0A1I4ZHR3_9NEIS 7-carboxy-7-deazaguanine synthase OS=Formivibrio citricus; OX = 83765 GN=queE PE=3 SV=1
MKKPPSLRVSEIFYSLQGETSRIGLPTVFVRLTGCPLRCGYCDSKHAYNGGTSLSLSEILAAVAGYRAHYVCVTGGEPLVQAATPEFLTALCDAGYSVSLETSGALPVDKVDPRVSRIVDIKTPGSGEAAKMHWENLALLTPHDEIKLVLCGRGDYEWARDLILERELFKLAPVSLSPVWETLPPVDLAQWVLEDHLPVRMQVQLHKVLWGDRPGV

SEQ ID NO: 30242 - protein, 209 aa, Formosa agariphila
  REGION 1..209: note = tr|T2KIW0|T2KIW0_FORAG 7-carboxy-7-deazaguanine synthase OS=Formosa agariphila (strain DSM 15362 / KCTC 12365 / LMG 23005 / KMM 3901) OX=1347342 GN=queE PE=3 SV=1
MKKEIQELVNKGEMLPLMEEFYTIQGEGFYKGTAAYFIRVGGCDVGCHWCDVKESWDAELHPPTETSKIVEKAALHSNTIVVTGGEPLTWDMTALTTQLKAKGLNVHIETSGAYPLTGVWDWICLSPKKMKLPTAEVSAKAHELKVIIFNRDDFKFAEEQAALVNEDCILYMQPEWSKRDKMIPEIVEYVMANPKWKVSLQTHKYLNIP

SEQ ID NO: 30243 - protein, 209 aa, Formosa algae
  REGION 1..209: note = tr|A0A2K2ZD63|A0A2K2ZD63_9FLAO 7-carboxy-7-deazaguanine synthase OS=Formosa algae; OX = 225843 GN=queE PE=3 SV=1
MKKDIQELVNKGEMLPLMEEFYTIQGEGFYKGTAAYFIRVGGCDVGCHWCDVKESWDAELHPPTATTTIVEKAALHSKTIVVTGGEPLTWDMTALTTQLKAKGLQVHIETSGAYPLTGTWDWICLSPKKLKLPTPEVSAKAHELKVIIFNKDDFKFAEEQAALVNKDCILYMQPEWSKRDKMIPEIVEYVMANPQWKVSLQTHKYLNIP

SEQ ID NO: 30244 - protein, 210 aa, Formosa sp.
  REGION 1..210: note = tr|A0A2E0I326|A0A2E0I326_9FLAO 7-carboxy-7-deazaguanine synthase OS=Formosa sp.; OX = 2018467 GN=queE PE=3 SV=1
MPKLETQALVNAGKMLPLMEAFYTIQGEGYHKGTAAYFIRIGGCDVGCHWCDVKDSWNAELHPPTNIEFIAKQAANFSDTIVVTGGEPLMWDMNPLTNLLKEKNLITHIETSGAYPLSGDWDWICLSPKKRKPPVFEIYSKADELKVIVYNKSDFKFAEKHAEKVSNSCILYLQPEWSAREKITPFIVEYVMKHPKWRISLQTHKYLNIP

SEQ ID NO: 30245 - protein, 217 aa, Formosa sp.
  REGION 1..217: note = tr|A0A516GQQ4|A0A516GQQ4_9FLAO 7-carboxy-7-deazaguanine synthase OS=Formosa sp. PS13; OX = 2594004 GN=queE PE=3 SV=1
MCELSLHVMKKDIQELVNKGEMLPLMEEFYTIQGEGFYKGTAAYFIRVGGCDVGCHWCDVKESWDAELHPPTETSKIVEKAALHSKTIVVTGGEPLTWDMTPLTTQLKAKGLQVHIETSGAYPLTGVWDWICLSPKKMKLPTPEVSAKAHELKVIIFNKDDFKFAEEQAALVNKDCILYMQPEWSKRDKMIPQIVEYVMANPKWKVSLQTHKYLNIP

SEQ ID NO: 30246 - protein, 210 aa, Formosa spongicola
  REGION 1..210: note = tr|A0A316DIJ6|A0A316DIJ6_9FLAO 7-carboxy-7-deazaguanine synthase OS=Formosa spongicola; OX = 570520 GN=queE PE=3 SV=1
MTRSERQELIDKGLLLPLMEEFYTIQGEGFHKGTAAYFVRIGGCDVGCHWCDVKESWLAELHPPTETEKIVENAVKYSDTIVVTGGEPLTWDMTQLTTQLKAKGVQTHIETSGAYKLTGTWDWICLSPKKLKLPTEEIYNKAHELKMIIYNKSDFKFAEEQAAKVNKDCILYLQPEWSKRDKVVPEIVDYVMANPKWKVSLQTHKYLNIP

SEQ ID NO: 30247 - protein, 306 aa, unidentified
  source 1..306: note = Francisella adeliensis
  REGION 1..306: note = tr|A0A2Z4XW15|A0A2Z4XW15_9GAMM 7-carboxy-7-deazaguanine synthase OS=Francisella adeliensis OX=2007306 GN=queE PE=3 SV=1
MYYLLKYLNYLCSKLKDITYSEIFYSPQGEGHYTGVVSAWIRLFSCNLQCDGFGQKDPTDVNIYQLPYKTCDVSNIKRMKDLPVFETGCDSSYSWSKKFKHLAKTQSIEKTVDELENILPTKKFLHKDSKQETHLCITGGEPLINQDQIVAMLQEFERRENLPKFITIETNGTQKLNNEFKKYFKKYIAKGNELFLSVSPKLFSITGEKRAKAIKPETIKEYYELSSKGQLKFVIDNKQPSQIELEELVSIFRTYGIWYNVWCMPLGALKEQQYKIAREVAEYASSKGYYTCARVHTYLFGNEIGT

SEQ ID NO: 30248 - protein, 223 aa, unidentified
  source 1..223: note = Franconibacter pulveris
  REGION 1..223: note = tr|A0A0J8YAF3|A0A0J8YAF3_9ENTR 7-carboxy-7-deazaguanine synthase OS=Franconibacter pulveris OX=435910 GN=queE PE=3 SV=1
MQYPINEMFQTLQGEGYFTGVPAIFIRLQGCPVGCAWCDTKHTWDKLADREVSLYSVIAKTKESDKWGAASSEDLLAVISRQGYTARHVVITGGEPCIHDLLPLTHLLEKNGFSCQIETSGTHEVRCTPTTWVTVSPKVNMRGGYEVLDQALQRADEVKHPVGRMRDIEALDELLARLHDDKQRVIALQPISQKEDATRLCIETCIARNWRLSMQTHKYLNIA

SEQ ID NO: 30249 - protein, 221 aa, Frankia alni
  REGION 1..221: note = tr|Q0RM62|Q0RM62_FRAAA 7-carboxy-7-deazaguanine synthase OS=Frankia alni (strain ACN14a) OX=326424 GN=queE; PE = 3 SV=1
MQGEGPAAGRLATFVRLGGCNLSCSWCDTSYTWDGARFDLRTEITSTAVETIAAKVTTDLVVITGGEPLLHQERPGWTALLRTLTQQQRAIHVETNGTVRPTPMSLQHVAMWVVSPKLRNAGTHRGRQRARLATEWPALAAQHDGRAHLKIVCEGADDVQEAARLAERWGWPAGQVWAMPQGASVERLAQTWPAVVEAAAAAGLNASHRLHVLAWGQQRGH

SEQ ID NO: 30250 - protein, 251 aa, unidentified
  source 1..251: note = Frankia casuarinae
  REGION 1..251: note = tr|Q2JC63|Q2JC63_FRACC 7-carboxy-7-deazaguanine synthase OS=Frankia casuarinae (strain DSM 45818 / CECT 9043 / CcI3) OX=106370 GN=queE PE=3 SV=1
MTAKESCRPNTSPTGHDVLVVNEIFGPTVQGEGPSTGRRCVFLRLGGCNLTCSWCDTPYTWDWWGVSDTGRRFDPGRELHAMSAAQVGDRLRGLGSGLVVISGGEPLSQQRRLLGLVTGLVDDGIEVEIETNGTVAPLEELAESGVAFNVSVKLAHSGVAEPRRLVPEALAAFAGNPSARFKFVCADRDDLDEVGTLVDRFNLAPVWIMPKGATPSAVLTGLAMLTDAAVARGWNVCTRLHVLVWGDERGR

SEQ ID NO: 30251 - protein, 212 aa, unidentified
  source 1..212: note = Frankia casuarinae
  REGION 1..212: note = tr|Q2J7K7|Q2J7K7_FRACC 7-carboxy-7-deazaguanine synthase OS=Frankia casuarinae (strain DSM 45818 / CECT 9043 / CcI3) OX=106370 GN=queE PE=3 SV=1
MVYRIKEIFYTLQGEGVRSGRPAVFCRFALCNLWTGRERDRHRAVCQFCDTDFVGTDGPDGGVFDTPDDLADAVAARWPSDAPGALPYVVCTGGEPLLQLDTPAVSALHTRGFEVAVETNGTCPAPAGLDWVCVSPKAGAPLRLTTGDELKLVFPQPGAGPELFAGLEFGHHLLQPMDGPHREANTRAALDYCLAHPRWRLSIQTHKILGIR

SEQ ID NO: 30252 - protein, 237 aa, Frankia sp.
  REGION 1..237: note = tr|A0A0P7CSQ9|A0A0P7CSQ9_9ACTN 7-carboxy-7-deazaguanine synthase OS=Frankia sp. R43; OX = 269536 GN=queE PE=3 SV=1
MRAGGATLPVSEVFGPTLQGEGPHAGRLATFIRLGGCDLSCAWCDTAYTWDGSRYDLRVELTPTSPEALAAQAGTPIVVITGGEPLLHQDSPAWARLLDLLRDRGHTIHVETNGTRGPNEVSLASVTAWVVSPKLPSAGPHRGHQDPALHPDWPALAWEGTGVHLKVVCADEAEVAQAAALASRTRWPGVRVWVMPRGTTRAELDATWPVVAQAATEHGLNATHRLHVLAWGDERGR

SEQ ID NO: 30253 - protein, 239 aa, Frankia sp.
  REGION 1..239: note = tr|A0A062X6K5|A0A062X6K5_9ACTN 7-carboxy-7-deazaguanine synthase OS=Frankia sp. BMG5.23; OX = 683305 GN=queE PE=3 SV=1
MIPTVQSAAPPRDILVSECFGPTFQGEGASSGRLALFLRLATCNLCCGWCDTPFTWDWSRFDRSAETRHARAADLVNWATSSAATLVVITGGEPLLQRDSLADLVASLAAAGKRVEIETNGTLVPGPALAASTAQFNVGIKLANSGMQEGRRVRPDVIRTFAETAACVWKFVVRDLADLDEISALEARFGLAPIWVMPEGTDTESTLTVMRSLGDEVLARGWNLTPRLHILLWGDARGR

SEQ ID NO: 30254 - protein, 225 aa, Frateuria aurantia
  REGION 1..225: note = tr|H8L144|H8L144_FRAAD 7-carboxy-7-deazaguanine synthase OS=Frateuria aurantia (strain ATCC 33424 / DSM 6220 / NBRC 3245 / NCIMB 13370) OX=767434 GN=queE PE=3 SV=1
MSDAALPDAADAAQRLRITEIFHSLQGEADAIGWRTVFVRLTGCPLRCVWCDTTYSFHGGEWRDIDAILAEVASYGARHVCVTGGEPLSQKRCLILLERLCDAGYEVSLETSGALDVSQVDARVRKVLDLKAPDSGESARNLWSNLEHLQAADQVKFVLASRADYDWARDVVASHDLAARCMPMFSPVQGTLAPRELADWIVADRLPVRFQMQLHKLLWNDSPGH

SEQ ID NO: 30255 - protein, 229 aa, Frateuria sp.
  REGION 1..229: note = tr|A0A0Q9PDI8|A0A0Q9PDI8_9GAMM 7-carboxy-7-deazaguanine synthase OS=Frateuria sp. Soil773; OX = 1736407 GN=queE PE=3 SV=1
MSGSEATAAVAAGQAAGERLRITEIFHSIQGEADAIGWRTVFVRLTGCPLRCVWCDTTYSFHGGEWRAIDDILAEVAGHGAHHVCVTGGEPLSQKRCLILLQRLCDAGYEVSLETSGALDVAAVDPRVRKVMDLKAPDSGESARNLWPNLAHLLPHDQVKIVIASRADYEWARGVVAEHGLDRRCMVLFSPVHGAVQPRELAEWIVADKLPVRFQLQLHKLLWNDAPGH

SEQ ID NO: 30256 - protein, 227 aa, Frateuria terrea
  REGION 1..227: note = tr|A0A1H6YNH3|A0A1H6YNH3_9GAMM 7-carboxy-7-deazaguanine synthase OS=Frateuria terrea; OX = 529704 GN=queE PE=3 SV=1
MGSDAGAASVAPMPAERLRITEIFHSIQGEADAIGWPTVFVRLTGCPLRCVWCDTEYSFHGGQWHAIDEILAEVARHGARHVCVTGGEPLAQKRCPILLRKLCDAGYEVSLETSGALDVAAVDPRVRKVMDLKAPDSGESARNLWSNLDHLLPHDQLKIVIASRADYEWARGVVAEHALERRCMVLFSPVHGAVQPRELAEWILADRLPVRFQMQLHKLLWNDAPGH

SEQ ID NO: 30257 - protein, 214 aa, unidentified
  source 1..214: note = Frederiksenia canicola
  REGION 1..214: note = tr|A0A3N4WRX0|A0A3N4WRX0_9PAST 7-carboxy-7-deazaguanine synthase OS=Frederiksenia canicola OX=123824 GN=queE PE=3 SV=1
MMQAVSFSQRFANTEYRIVEIFETLQGEGFNTGMPSIFIRFGKCNLACPWCDTNYNQYTTKTLAEIMAVVRGFSAKNIIITGGEPTIQPNLERLLDVLKAEGYFIAVETNGLKPVPKQIDYIATSPKRIYQKNYLKHHIPFAHEVRIVVDGDMLEFCEQIENTIPAERYYLSPCETDGVMNMLETIAQLGKLNQRSHKPRWQLSIQTHKMAGIE

SEQ ID NO: 30258 - protein, 265 aa, unidentified
  source 1..265: note = Fremyella diplosiphon
  REGION 1..265: note = tr|A0A1Z4M4S0|A0A1Z4M4S0_MICDP 7-carboxy-7-deazaguanine synthase OS=Fremyella diplosiphon NIES-3275 OX=1973485 GN=queE PE=3 SV=1
MTAKTTVKPTARLIEVFSAIQGEGLNVGTRQIFIRFALCDLRCHFCDSAHTWNAPSTCRIERTPGLRDFEEHSNPIPVPILLEWIERQNQPSIHDSISLTGGEPLLHAPFLELFLPQVRSLTNLPIYLETGGHRPEQLAMILPYLDSVGMDLKLPSVSGESYWQEHGQCLKLSYDSHLNIFVKIIISQQTDPTELERSALLVADVSPDIPVFLQPVTPLPVSEKSTAKTILAPTPDQVLQWQALMKQWLKHVRVVPQTHKMLNQL

SEQ ID NO: 30259 - protein, 204 aa, unidentified
  source 1..204: note = Frischella perrara
  REGION 1..204: note = tr|A0A0A7S4C7|A0A0A7S4C7_FRIPE 7-carboxy-7-deazaguanine synthase OS=Frischella perrara; OX = 1267021 GN=queE PE=3 SV=1
MPNFPIVEIFQSLQGEGYNTGMPAIFIRFGGCNLRCPWCDTNFDNFQKLSLTAILTRVLTYSAKNIIITGGEPTLQKYLPELVTRLKQLGYYVAIETNGLKSVYSEIDYIAVSPKYHYWRRYHDAPLIKADEVRIVVEEAKDIAEFCLAMEQRIEAKRYYLSPCEQNGQMALLPTLELLGKLNQGRQNNKWQLSIQTHKLANIE

SEQ ID NO: 30260 - protein, 204 aa, unidentified
  source 1..204: note = Frischella perrara
  REGION 1..204: note = tr|A0A318MTA0|A0A318MTA0_FRIPE 7-carboxy-7-deazaguanine synthase OS=Frischella perrara; OX = 1267021 GN=queE PE=3 SV=1
MLNFPIVEIFQSLQGEGYNTGMPAIFIRFGGCNLRCPWCDTNFDNFQKLSLTAILTRVLTYSAKNIIITGGEPTLQKYLPELVTRLKQLGYYVAIETNGLKSVYSEIDYIAVSPKYHYWRRYHDAPLIKADEVRIVVEEAKDIAEFCLAMEKRIEAKRYYLSPCEQNGQMALLPTLELLGKLNQGRQNNKWQLSIQTHKLANIE

SEQ ID NO: 30261 - protein, 225 aa, unidentified
  source 1..225: note = Fuerstia marisgermanicae
  REGION 1..225: note = tr|A0A1P8WNK4|A0A1P8WNK4_9PLAN 7-carboxy-7-deazaguanine synthase OS=Fuerstia marisgermanicae OX=1891926 GN=queE PE=3 SV=1
MFISETYESFQGEGPFAETSSLFIRTSGCNLRCSFCDTPYTSWHPEGDQVSLEELAAQIAASTAPHVVLTGGEPMLAPQLSELTDICRTAEKVITIETAGTVDRSVECDLMAISPKLRNSTPDDAVWSIRHEETRHQPAVIRSLFARYDSILKFVIDVDADVAEVEEYLTEFPQVERSKVWLMPQARTREELSEKTDWVRTAAESHGFQFSSRLHVEKFGNMRGV

SEQ ID NO: 30262 - protein, 234 aa, Fulvimarina sp.
  REGION 1..234: note = tr|A0A371WZZ3|A0A371WZZ3_9RHIZ 7-carboxy-7-deazaguanine synthase OS=Fulvimarina sp. 85; OX = 2293836 GN=queE PE=3 SV=1
MSLRIAEIFGPTIQGEGPLIGEPTVFVRAGGCDYRCLWCDSLHAVESRYRHEWLPMEADAIMERIEALSGGRPLLVSISGGNPAIQDFGPLIALGRQKGYRFACETQGTIAPLWFADLDMLVLSPKPPSSGMETDWSAFEACIAAKGAVPAAMKIVIFDEADLAFARLAAERYPDLPLFLQPGNGETDPAIPVDLDALAGRLSWLVAQTVGKGWLRPRILPQLHVIVWGNQRGV

SEQ ID NO: 30263 - protein, 230 aa, Fulvimonas soli
  REGION 1..230: note = tr|A0A316IEC5|A0A316IEC5_9GAMM 7-carboxy-7-deazaguanine synthase OS=Fulvimonas soli; OX = 155197 GN=queE PE=3 SV=1
MGGSDATVAPATSAPAVAGRLRITEIFHSIQGEADAIGWPTVFVRLTGCPLRCVWCDTEYAFHGGEWRAIEDILAEVAGHGARHVCVTGGEPLAQKRCLVLLRRLCDAGYEVSLETSGALDVAAVDPRVRKVVDLKAPGSGEEKRNLWSNLDHLLPHDQVKIVIAGRGDYEWARQVVAEHGLDRRCTVLFSPVHGAVEPRALAEWILEDRLPVRFQLQLHKLLWNDAQGR

SEQ ID NO: 30264 - protein, 250 aa, unidentified
  source 1..250: note = Fulvivirga imtechensis
  REGION 1..250: note = tr|L8JNN4|L8JNN4_9BACT 7-carboxy-7-deazaguanine synthase OS=Fulvivirga imtechensis AK7 OX=1237149 GN=queE; PE = 3 SV=1
MKLARLNGKAEIFYSIQGEGKNIGRPSIFIRTSLCNLHCSWCDTDYTWNWKGTPFHHQNEALPGYQKFDKAEYIAELSIEGIACEVVALGCKNIVLTGGEPLLQQTDLLDLIRHLRNIDPGYWFEIETNGTIIPSAKFDVLIDQYNVSPKLANSGNTQRIREKEDAYNFFSSNAKAVFKFVVNTPEDMEEVFRLIRKYEINHNKVYLMPEGTSAETLKQKQQWLIEQCKEHHFHYTDRLHIHIYGNKRGV

SEQ ID NO: 30265 - protein, 250 aa, Fulvivirga sp.
  REGION 1..250: note = tr|A0A553F620|A0A553F620_9BACT 7-carboxy-7-deazaguanine synthase OS=Fulvivirga sp. M361; OX = 2594266 GN=queE PE=3 SV=1
MKLACLNDRPEIFHTIQGEGKSLGKPSVFVRLSLCNLHCVWCDTDYTWNWKGTTFKHNYDEIPDYAKYDKKAWIIELNVEEINNIIQSFNCKNVVITGGEPLLQQNELATLCRTLKSSKEGFEIEIETNGTIIPNISLDPWVDQYNVSPKLKNSGNSDHLRIKPKVLDFFGNNSKAYFKYVIESTTDLEEVLSMVKGHTIRTEQVFLMPQGVSAEELKKKRIWLVEACKKYGFNYTDRLHIHIWGNKRGV

SEQ ID NO: 30266 - protein, 222 aa, Fusibacter sp.
  REGION 1..222: note = tr|A0A1B6BAI4|A0A1B6BAI4_9FIRM 7-carboxy-7-deazaguanine synthase OS=Fusibacter sp. 3D3; OX = 1048380 GN=queE PE=3 SV=1
MKYQVVESFSSINGEGLKAGELAYFIRFAGCNLNCSYCDTKWANAADVDFEWQTKAQIYKKIKAAGIKNVTLTGGEPLLQKGIKDLLSFLDQDEQIEVEIETNGSIDLALFKAQGYKRIAFTMDYKLEGSQMEAHMYLANFTALTKDDVLKFVISSPKELEQVAEIVRDYELIDRCHILLSPVYGKIEPLQIVDFMKAKQLNGVRVQLQLHKIIWNPDERGV

SEQ ID NO: 30267 - protein, 225 aa, Fusibacter sp.
  REGION 1..225: note = tr|A0A4Q2A0Z4|A0A4Q2A0Z4_9FIRM 7-carboxy-7-deazaguanine synthase OS=Fusibacter sp. A1; OX = 2283630 GN=queE PE=3 SV=1
MSDTLYDVVEIFDSINGEGLNAGKLATFVRLKGCNLRCSYCDTAWAITPDAPSVKMSAEEIKSSILASGLEHVTLTGGEPLLVDKSVELLTALVSDRYKIDIETNGSVPIRPILEHEGLSAVDLIMDYKLPSSGMTESMHLENLELIRKQDTVKFVIGSEADMDEAYSIIKKYSLTGRTNIYFSPVFGSITPEAMVDFMKKHRLNGVTLQLQLHKIIWHPDAKGV

SEQ ID NO: 30268 - protein, 221 aa, unidentified
  source 1..221: note = Fusobacteriia bacterium
  REGION 1..221: note = tr|A0A1W9W0Q2|A0A1W9W0Q2_9BACT 7-carboxy-7-deazaguanine synthase OS=Fusobacteriia bacterium 4572_74 OX=1972457 GN=queE PE=3 SV=1
MKYYNIVEKFVSINGEGQRSGELAVFIRLAKCNLRCNYCDTMWANEENVTVTPMTKEDIYNYILDSKVKNITLTGGEPLLDLKVKDLIEYIVKDRSLFLEIETNGSIDLNLFRVDVKNLSFTMDYKGPSSEMEKFMFIKNFETISKQDTVKFVVGDYNDLLKAKEIIEKYNLMNKCRIYFSSVYKKIELDEIVEFMKEFRLNGVRLQLQMHKFIWGNKQGV

SEQ ID NO: 30269 - protein, 222 aa, unidentified
  source 1..222: note = Fusobacteriia bacterium
  REGION 1..222: note = tr|A0A1W9TLM0|A0A1W9TLM0_9BACT 7-carboxy-7-deazaguanine synthase OS=Fusobacteriia bacterium 4572_132 OX=1971640 GN=queE PE=3 SV=1
MEYKVVEKFISVNGEGQKSGELSVFIRFAGCNLDCTYCDTKWANQKDVAYELMTENEIYSYIEGTGIKNITLTGGEPLLQENFEKLLEKLSEDENINIEIETNGSIDVSKFIKKTIKRPSFTLDYKSKSSKMEDKMLFENYNYINKNDTVKFVVGTMEDLKKSKLIMDKYELPKKTTVFFSPVFGKIEMSDIVEYMKVNKMNDVKLQIQLHKIIWDVTKKGV

SEQ ID NO: 30270 - protein, 222 aa, Fusobacterium equinum
  REGION 1..222: note = tr|A0A133N8D8|A0A133N8D8_9FUSO 7-carboxy-7-deazaguanine synthase OS=Fusobacterium equinum; OX = 134605 GN=queE PE=3 SV=1
MPKYKVVEIFESINGEGKKAGQLALFIRFQYCNLNCSYCDTKWANSKNSPFTWMSLEEILSLAKEKRIKNITLTGGEPLLQTDIRSLLEAFSKEKQFEIEIETNGSVPLETFRNIENSPSFTIDYKLPESHMEEYMSLENFSSVHRNDTVKFVVSNRKDLEKAKEIIEQYSLIGKCAVYFSPVFGKIALPSIVDFMKEHHLNGVNMQLQMHKFIWDPEEKGV

SEQ ID NO: 30271 - protein, 222 aa, Fusobacterium gonidiaformans; identical to SEQ ID NO: 30270
  REGION 1..222: note = tr|E5BED5|E5BED5_9FUSO 7-carboxy-7-deazaguanine synthase OS=Fusobacterium gonidiaformans 3-1-5R OX=469605; GN = queE PE=3 SV=1

SEQ ID NO: 30272 - protein, 201 aa, unidentified
  source 1..201: note = Fusobacterium hwasookii
  REGION 1..201: note = tr|A0A0S2ZD43|A0A0S2ZD43_9FUSO 7-carboxy-7-deazaguanine synthase OS=Fusobacterium hwasookii ChDC F300 OX=1307444 GN=queE PE=3 SV=1
MKIVEIFKSIQGEGSNFGKQVIFIRLGNCNLKCPWCDTDWKKYKELTIQEIMEEISKYNCKNVIITGGEPTISNLIPLLKELKDKGYWIAIETNGTNNIGYEYIDYIATSPKFIYGPNIVKLKEANEVRIVVDVDNKMDFITFCINVKNKIKAKKYFLSPVEIKGEFKNLALLGEIKQKLKERGAGEWEISIQLHKLMKIQ

SEQ ID NO: 30273 - protein, 222 aa, Fusobacterium mortiferum
  REGION 1..222: note = tr|C3WEG2|C3WEG2_FUSMR 7-carboxy-7-deazaguanine synthase OS=Fusobacterium mortiferum ATCC 9817 OX=469616; GN = queE PE=3 SV=1
MANFKVVEIFESINGEGRRVGQLAIFIRLQKCNLNCSYCDTRWANGDDAPYTLMSEDKIYDRILKSGIKNITLTGGEPLLHKDVEILLEKIGENPNLSLEIETNGSIELEKFSKLKNPPLFTMDYKLPSSKMENKMCLDNFKYLTLKDTVKFVVGTIEDLKKAKEIIERYSLIGKCAVYFSPVFNSIDPIEIVKFMKENRLNGVNLQLQIHKFIWDPESKGV

SEQ ID NO: 30274 - protein, 222 aa, Fusobacterium mortiferum
  REGION 1..222: note = tr|A0A414PV70|A0A414PV70_FUSMR 7-carboxy-7-deazaguanine synthase OS=Fusobacterium mortiferum OX=850 GN=queE PE=3 SV=1
MANFKVVEIFESINGEGRRVGQLAIFIRLQKCNLNCSYCDTRWANGDDAPYTLMSEDEIYDRILKSGIKNITLTGGEPLLHKDVEILLEKIGENPNLSLEIETNGSIELEKFSKLKNPPLFTMDYKLPSSKMENKMCLDNFKYLTSKDTVKFVVGTIEDLKKAKEIIERYSLIGKCAVYFSPVFNSIDPIEIVKFMKENRLNGVNLQLQIHKFIWDPESKGV

SEQ ID NO: 30275 - protein, 222 aa, Fusobacterium necrogenes
  REGION 1..222: note = tr|A0A377GXV5|A0A377GXV5_9FUSO 7-carboxy-7-deazaguanine synthase OS=Fusobacterium necrogenes OX=858 GN=queE PE=3 SV=1
MANFKVVEMFESINGEGRKAGQLAIFIRLQKCNLNCSYCDTKWANGDDAPYTLMNEKEIYNRILESGIKNITLTGGEPLLHKDVEILLEKIGNNLNLSLEIETNGSIELERFSKLKNPPSFTMDYKLPSSKMESKMCLDNFKYLTAKDTVKFVVGTIEDLKKAKEIIERYSLIGKCAVYFSPVFNSIDPVEIVEFMKEKRLNGVNLQLQIHKFIWDPESKGV

SEQ ID NO: 30276 - protein, 222 aa, Fusobacterium necrophorum
  REGION 1..222: note = tr|A0A162IL92|A0A162IL92_9FUSO 7-carboxy-7-deazaguanine synthase OS=Fusobacterium necrophorum subsp. funduliforme OX=143387 GN=queE PE=3 SV=1
MPKYKVVEMFESINGEGKKAGQLALFIRFQFCNLNCSYCDTKWANTKKSPFTWMSLEEILETARQRGIKNITLTGGEPLLQSHIFALLEAFSKEKMFEVEIETNGSIPLKKFQSIENPPSFTLDYKLPQSNMEEYMCLENFSSVSAKDTIKFVVSDLQDLERSREIMNKYSLIGKCSLYLSPVFGKIPLPSIVDFMKKYHLNGVNMQLQMHKFIWDPETKGV

SEQ ID NO: 30277 - protein, 222 aa, Fusobacterium necrophorum
  REGION 1..222: note = tr|A0A017H666|A0A017H666_9FUSO 7-carboxy-7-deazaguanine synthase OS=Fusobacterium necrophorum subsp. funduliforme B35 OX=1226633 GN=queE; PE = 3 SV=1
MPKYKVVEMFESINGEGKKAGQLALFIRFQFCNLNCSYCDTKWANTKKSPFTWMSLEEILETARQRGIKNITLTGGEPLLQSHIFALLEAFSKEKMFEVEIETNGSIPLKKFQSIENPPSFTLDYKLPQSNMEEYMCLENFSSVSAKDTIKFVVSDLQDLERAREIMNKYSLIGKCSLYLSPVFGKIPLPSIVDFMKKYHLNGVNMQLQMHKFIWDPETKGV

SEQ ID NO: 30278 - protein, 201 aa, Fusobacterium nucleatum
  REGION 1..201: note = tr|A0A2B7YJ21|A0A2B7YJ21_FUSNP 7-carboxy-7-deazaguanine synthase OS=Fusobacterium nucleatum subsp. polymorphum OX=76857 GN=queE PE=3 SV=1
MKIVEIFKSIQGEGSNFGKQVIFIRLGNCNLKCSWCDTDWKKYKELTIQEIMEEISKYNCKNVIITGGEPTISNLTSLLKELKDKGYWIAIETNGTNNIGYEYIDYIATSPKFIYGSKIIKLKKANEVRIVVDTDNKIDFITFCINIRNKIKAKKYFLSPVEIDGEFKNLVLLGEIKQKLKERGAGEWEISMQLHKLMKIQ

SEQ ID NO: 30279 - protein, 201 aa, Fusobacterium periodonticum
  REGION 1..201: note = tr|A0A2D3LVN2|A0A2D3LVN2_9FUSO 7-carboxy-7-deazaguanine synthase OS=Fusobacterium periodonticum OX=860 GN=queE PE=3 SV=1
MKIVEIFKSIQGEGSNFGKQVIFIRLGNCNLKCPWCDTDWKKYKELTIQEIIEEISKYNCKNVVITGGEPTISNLTPLLKELKNRDYWIAIETNGTNNIGYEYIDYIATSPKFIYGPNIVKLKVADEVRIVIDKDNKMDFITFCINIKNKIKAKKYFLSPVEKKGEFKNLSLLGEIKQKLKERGAGEWDISIQLHKLMKIQ

SEQ ID NO: 30280 - protein, 222 aa, Fusobacterium sp.
  REGION 1..222: note = tr|R7JFM1|R7JFM1_9FUSO 7-carboxy-7-deazaguanine synthase OS=Fusobacterium sp. CAG:439 OX=1262899 GN=queE; PE = 3 SV=1
MNKVKIKEIFESVQGEGPYVGYKQLFVRFCNCNLKCNYCDTEFSSDSDYKEFEPCALADKINTYKTVHSVSLTGGEPLLASEFLKELLPRVSKKIYLETNATLADKFLEVKPFIDIVSADIKLESATGIKNSYKFHDKFFENCKGIETFAKIVFNDKITDDEIETCCALGKKYGIELILQPEMEGVKMKISSNFVAETLDKFLNNYERVRLIPQVHKFLDVR

SEQ ID NO: 30281 - protein, 224 aa, Fusobacterium sp.
  REGION 1..224: note = tr|R7LYK8|R7LYK8_9FUSO 7-carboxy-7-deazaguanine synthase OS=Fusobacterium sp. CAG:815 OX=1262901 GN=queE; PE = 3 SV=1
MNVKVKEIFSSIQGEGPVVGYKQLFIRFCNCNLKCNYCDTEFDKTNSEEFSPQELYKKITSEYNLKTFHSISLTGGEPLLSAEFLKEFLPLIKRQTKIYLETNATLSNNLEKIKNLIDIISADIKLETSTGLNTFDKHREFFAHCNGIETFAKIVFDKNITEEEIKTCAEIGNEFNIELVLQPKMIEDKMSVNSDFCNELLEKFTALHHNTRLIPQVHKFLDVR

SEQ ID NO: 30282 - protein, 209 aa, Gaetbulibacter sp.
  REGION 1..209: note = tr|A0A2G5KNX6|A0A2G5KNX6_9FLAO 7-carboxy-7-deazaguanine synthase OS=Gaetbulibacter sp. 5U11 OX=1889780 GN=queE PE=3 SV=1
MKQETQDLVNKGLMLPLMEEFYTIQGEGYHKGTAAYFIRIGGCDVGCHWCDVKESWNADLHPPTSTDVIVANAKKYSDTVVVTGGEPLTWDMTALTNKLKAEGCKIHIETSGAYELTGQWDWICLSPKKMKLPTQGVYDKAHELKCIIFNKDDFKFAEAQAAKVNKDCILYLQPEWSKRDTMIPLIVDYVMANPKWKVSLQTHKYLNIP

SEQ ID NO: 30283 - protein, 209 aa, Gaetbulibacter sp.
  REGION 1..209: note = tr|A0A2G5GK98|A0A2G5GK98_9FLAO 7-carboxy-7-deazaguanine synthase OS=Gaetbulibacter sp. 4G1 OX=1891971 GN=queE PE=3 SV=1
MNKDIQLLVDKGEMLPLMEEFYTIQGEGYHKGTAAYFIRIGGCDVGCHWCDVKESWNADLHPPTDTNKIVENAKKYSDTIVITGGEPLTWDMTLLTNKLKAEGMQTHIETSGAYKLTGTWDWICLSPKKMKLPTKEVYEKAHELKVIVYNKDDFRFAEEQATKVNKDCILYLQPEWSKRDKVVPEIVDYVMANPKWKVSLQTHKYLNIP

SEQ ID NO: 30284 - protein, 210 aa, unidentified
  source 1..210: note = Galbibacter marinus
  REGION 1..210: note = tr|K2PN42|K2PN42_9FLAO 7-carboxy-7-deazaguanine synthase OS=Galbibacter marinus OX=555500 GN=queE PE=3 SV=1
MIEEGILAKVNAGEMLPLMEEFYTIQGEGFHKGTAAYFIRVGGCDVGCHWCDVKESWNAATHPPTDVKQIVDNAAKYSDTIVITGGEPLTWDMSFITSELKKRGLKIHIETSGAYPLTGQWDWICLSPKKLKLPTEEIYKKAHELKVIVFNQHDLKFAEEQAAKVNENCILYLQPEWSKRDKVIPMIVDYVMQHPKWKVSLQTHKYLNIP

SEQ ID NO: 30285 - protein, 221 aa, Gallaecimonas pentaromativorans
  REGION 1..221: note = tr|A0A3N1PTC2|A0A3N1PTC2_9GAMM 7-carboxy-7-deazaguanine synthase OS=Gallaecimonas pentaromativorans OX=584787 GN=queE PE=3 SV=1
MRYPVNEIFETLQGEGRFTGMPAIFVRLQGCPVGCSWCDTKHTWEQNSEDERPLGDILVKTAATSCWAWATPEAMLATFAERGFNAKLVVITGGEPCMFDLVPLCEALHSAGYSTQIETSGTFEINVPQETVITLSPKVGMKGGYAILDSALERADDIKHPVARERDIEELDALLARCSSDKPVYLQPVSQGKRATKLCITTCIKRNWRLSVQLHKYLGIE

SEQ ID NO: 30286 - protein, 220 aa, unidentified
  source 1..220: note = Gallaecimonas xiamenensis
  REGION 1..220: note = tr|K2IFC3|K2IFC3_9GAMM 7-carboxy-7-deazaguanine synthase OS=Gallaecimonas xiamenensis 3-C-1 OX=745411; GN = queE PE=3 SV=1
MRYPVNEIFETLQGEGRFTGLPAIFVRLQGCPVGCSWCDTKHTWEQQPQDERPLGDILVKTAASSCWAWATPEAMLATFAERGFNAKLVVITGGEPCMFDLVPLCEALHGAGYSTQIETSGTFEIKVPKETVITLSPKVGMKGGYAILDSALERADDIKHPVARERDIEELDALLARCGEKPVYLQPVSQGKRATELCIKTCIERNWRLSVQLHKYLGIE

SEQ ID NO: 30287 - protein, 203 aa, Gallibacterium anatis
  REGION 1..203: note = tr|A0A263HKV3|A0A263HKV3_9PAST 7-carboxy-7-deazaguanine synthase OS=Gallibacterium anatis; OX = 750 GN=queE PE=3 SV=1
MQTEYAIVEIFESLQGEGFNTGMPAIFIRFGKCNLACPWCDTDYQTFSLMTLQQIADQVTAFSAKNIIITGGEPTIQPNLEKLLSYFKTLGYFLAIETNGLKPVPPQIDYIATSPKRLYRHKYQQRGITHADEVRIVNDDKNIQLFCQEIAKKIQAKHYYLSPCEQQGEMNLLDTIRKLGQLNENTDIKWQLSIQTHKLVGIE

SEQ ID NO: 30288 - protein, 203 aa, Gallibacterium anatis
  REGION 1..203: note = tr|F4HCW0|F4HCW0_GALAU 7-carboxy-7-deazaguanine synthase OS=Gallibacterium anatis (strain UMN179); OX = 1005058 GN=queE PE=3 SV=1
MQTEYAIVEIFESLQGEGFNTGMPAVFIRFGKCNLACPWCDTDYQTFSLMTLQQIADQVTAFSAKNIIITGGEPTIQPNLEKLLSYFKTLGYFLSIETNGLKPVPPQIDYIATSPKRLYRHKYQQRCITHADEVRIVNDDENILSFCREIAKKIEAKHYFLSPCEQQGEMNLLDTIRKLGQLNENTDIKWQLSIQTHKLVGIE

SEQ ID NO: 30289 - protein, 203 aa, unidentified
  source 1..203: note = Gallibacterium genomosp.
  REGION 1..203: note = tr|A0A0A2Y382|A0A0A2Y382_9PAST 7-carboxy-7-deazaguanine synthase OS=Gallibacterium genomosp. 1 OX=155515 GN=queE PE=3 SV=1
MKTEYAIVEIFESLQGEGFNTGMPAIFIRFGKCNLACPWCDTDYQTFSLMTLQQIANQVTSFTAKNIIITGGEPTIQPNLEKLLSHFKKLGYYLAIETNGLKPIPPQIDYIATSPKRLYRHKYQQRGITHADEVRIVNDDKNIQLFCQEIAKKIQAKHYYLSPCEQQGEMNLLDTIRKLGQLNENTDIKWQLSIQTHKLVGIE

SEQ ID NO: 30290 - protein, 203 aa, unidentified
  source 1..203: note = Gallibacterium genomosp.
  REGION 1..203: note = tr|A0A0A2XCK4|A0A0A2XCK4_9PAST 7-carboxy-7-deazaguanine synthase OS=Gallibacterium genomosp. 2 OX=155517 GN=queE PE=3 SV=1
MQTEYAIVEIFESLQGGGFNTGMHAIFIRFGKCNLTCPWCDTDYQTFSLMTLQQIANQVTSFTAKNIIITGGEPTIQPNLEKLLSHFKKLGYFLAIETNGLKPIPPQIDYIATSPKRLYRHKYQQRGITHADEVRIVNDDKNIQLFCQEIAKKIQAKHYYLSPCEQQGEMNLLDTIRKLGQLNENTDIKWQLSIQTHKLVGIE

SEQ ID NO: 30291 - protein, 204 aa, Gallibacterium salpingitidis
  REGION 1..204: note = tr|A0A1A7P2K1|A0A1A7P2K1_9PAST 7-carboxy-7-deazaguanine synthase OS=Gallibacterium salpingitidis OX=505341 GN=queE PE=3 SV=1
MQTPYQIVEIFESLQGEGFNTGMPAIFIRFGKCNLACPWCDTDYHHFQTMTLQQIAERVATYTAKNIIITGGEPTIQPHLRKLLNYLKQQGYFLAIETNGLKPIPSEIDYIATSPKRLYQDKYWQRSIDFADEVRIVNDCDDILQFCEKIATKIHAKHYYLSPCEQNGEMNILDTIRTIGILNQHSKTIKWQLSLQTHKLVGIE

SEQ ID NO: 30292 - protein, 219 aa, unidentified
  source 1..219: note = Gallionella capsiferriformans
  REGION 1..219: note = tr|D9SCJ7|D9SCJ7_GALCS 7-carboxy-7-deazaguanine synthase OS=Gallionella capsiferriformans (strain ES-2); OX = 395494 GN=queE PE=3 SV=1
MSEQNSAAQLRITEIFFSLQGETRLIGLPTVFVRLTGCPLRCVYCDTAYAFSGGKNHTLAEILQQVAQYKTRYVTVTGGEPLAQRNCLPLLKALCDAGYQVSLETSGALDIGAVDARVMRVVDIKTPASGEVDKNRWENLAILTPQDEIKFVLCDENDYDWACQILAQYHLADQCPVLFSPAQGDLDPTQLADWILRDGLPVRFQLQLHKILWNNEAGH

SEQ ID NO: 30293 - protein, 219 aa, Gallionella sp.
  REGION 1..219: note = tr|A0A3D2NM93|A0A3D2NM93_9PROT 7-carboxy-7-deazaguanine synthase OS=Gallionella sp.; OX = 2052161 GN=queE PE=3 SV=1
MSESALQAQLRISEIFFSLQGETRRIGLPTVFVRLTGCPLRCGYCDTVYAFTGGQNKSLAEILEQVAQYAPRYVTVTGGEPLAQKNCLPLLTALCDAGYDVSLETSGALDIGGVDARVMRVVDIKTPASGEAARNRWENLPLLTQHDEIKFVLCDEPDYRWAKEILKERQLADSCEVTFSPAQGTLAATQLADWILRDHLPVRFQVQLHKILWNNEAGH

SEQ ID NO: 30294 - protein, 219 aa, Gallionella sp.
  REGION 1..219: note = tr|A0A3D2HA02|A0A3D2HA02_9PROT 7-carboxy-7-deazaguanine synthase OS=Gallionella sp.; OX = 2052161 GN=queE PE=3 SV=1
MPEQNSAAQLRITEIFFSLQGETRLIGLPTVFVRLTGCPLRCVYCDTAYAFTGGKNHTLTDILQQVAQYKTRYVTVTGGEPLAQRNCLPLLKALCDAGYHVSLETSGALDISAVDARVMRVVDIKTPASGEVDKNRWENLNFLTPQDEIKFVLCDENDYEWACQILAQYHLADHCPVLFSPAQGMLDPTQLADWILRDGLPVRFQLQLHKILWNNEAGH

SEQ ID NO: 30295 - protein, 218 aa, unidentified
  source 1..218: note = Gallionellaceae bacterium
  REGION 1..218: note = tr|A0A1J4TAC9|A0A1J4TAC9_9PROT 7-carboxy-7-deazaguanine synthase OS=Gallionellaceae bacterium CG1_02_60_325 OX=1805162 GN=queE PE=3 SV=1
MNQPVADTLRISEIFYSLQGETSRAGLPTVFVRLTGCPLRCSYCDTAYAFSGGQTLPLPAILAAVARHAPRYVTVTGGEPLAQKNSLSLLRALCDSGYAVSLETGGMLDISRVDERVMIVLDIKTPASGEVEKNYWSNLEQLKPQDEIKFVLCGEADYQWAKQVLHEHKLAGRCGVLFSPAQGQLAPSELAQWILRDHLPVRFQLQLHKLLWGNEAGR

SEQ ID NO: 30296 - protein, 218 aa, unidentified; identical to SEQ ID NO: 30295
  source 1..218: note = Gallionellaceae bacterium
  REGION 1..218: note = tr|A0A2H0NLN2|A0A2H0NLN2_9PROT 7-carboxy-7-deazaguanine synthase OS=Gallionellaceae bacterium CG11_big_fil_rev_8_21_14_0_20_60_62 OX=1974012; GN = queE PE=3 SV=1

SEQ ID NO: 30297 - protein, 229 aa, unidentified
  source 1..229: note = Gallionellales bacterium
  REGION 1..229: note = tr|A0A1G0DWB0|A0A1G0DWB0_9PROT 7-carboxy-7-deazaguanine synthase OS=Gallionellales bacterium RIFCSPLOWO2_02_58_13 OX=1798252 GN=queE PE=3 SV=1
MPPRDGGAELSAAGGATAQLRINEIFFSLQGETSRIGLPTVFIRLTGCPLRCTYCDTTYAFAGGRNLGIADILRHVAEYAPRYVTVTGGEPLAQKNCLPLLCALCDEGYVVSLETSGALDIGEVDARVMRVMDIKTPASGEAGKNRWENLPLLNMHDEIKFVLCDESDYRWAKQILLQHRLNDKCAVALSPAHGMLDATQLAEWILRDRLPVRMLLQLHKLLWNDAPGH

SEQ ID NO: 30298 - protein, 219 aa, unidentified; identical to SEQ ID NO: 30293
  source 1..219: note = Gallionellales bacterium
  REGION 1..219: note = tr|A0A2M8DY63|A0A2M8DY63_9PROT 7-carboxy-7-deazaguanine synthase OS=Gallionellales bacterium CG_4_9_14_0_8_um_filter_55_61 OX=1974015 GN=queE; PE = 3 SV=1

SEQ ID NO: 30299 - protein, 218 aa, unidentified
  source 1..218: note = Unknown
  REGION 1..218: note = tr|E1VPX7|E1VPX7_9GAMM 7-carboxy-7-deazaguanine synthase OS=gamma proteobacterium HdN1 OX=83406 GN=queE; PE = 3 SV=1
MSLPTASLRITEIFHSLQGETRTLGLPTVFVRLTGCPLRCQYCDTAYAFSGGQQMSLEQILETVAGFRTHYVTVTGGEPLAQPNCIPLLQALCDQGYEVSLETSGALDISEIDARVVRVVDLKTPGSGEMHRNLYENIKYLQPHDQVKFVLCSRQDYDWARAKLLEYDLCNRVSDVLFSPSWGQLDATELAEWILADRLPVRFQMQLHKLLWADAAGH

SEQ ID NO: 30300 - protein, 213 aa, unidentified
  source 1..213: note = Unknown
  REGION 1..213: note = tr|A0A2T9ZUH5|A0A2T9ZUH5_9GAMM 7-carboxy-7-deazaguanine synthase OS=gamma proteobacterium symbiont of Ctena orbiculata OX=1968598 GN=queE PE=3 SV=1
MSQLRVTEIFLSLQGEGRSAGYPTVFIRLTGCPLRCDYCDTPYAFSGGELLSLEQILQQVDAFQAEYVCVTGGEPLAQKGCLPLLSALCDAEYRVSLETSGALDIVAVDERVTRVMDLKTPGSGEMERNRLANLDALRTADQVKFVITDRVDYEWSCEQMKRFRIAQKCEVLFSPAQDRIDPTALADWMVEDRIEARLQLQLHKLLWGDQVGR

SEQ ID NO: 30301 - protein, 210 aa, unidentified
  source 1..210: note = Gammaproteobacteria bacterium
  REGION 1..210: note = tr|A0A1G0G7F7|A0A1G0G7F7_9GAMM 7-carboxy-7-deazaguanine synthase OS=Gammaproteobacteria bacterium RIFCSPHIGHO2_02_FULL_39_13 OX=1798270 GN=queE; PE = 3 SV=1
MKITEIFFSLQGETKTVGLPTVFVRLTGCPLRCQYCDTEYAFSGGKNYSIDDVIKNIEKYSTKYVTVTGGEPLAQKECLLLLKTLCDLQYYVSLETSGALDISEVDSRVIKIVDIKTLASLESSKNNFDNIKYLLSHDQIKFVICDRNDYEWSKKIMLQFELNKKCEILFSPSYHQIDYATLADWILADQLPVRFQVQLHKVVWGDVEGK

SEQ ID NO: 30302 - protein, 219 aa, unidentified
  source 1..219: note = Gammaproteobacteria bacterium
  REGION 1..219: note = tr|A0A2E0N3C2|A0A2E0N3C2_9GAMM 7-carboxy-7-deazaguanine synthase OS=Gammaproteobacteria bacterium OX=1913989 GN=queE PE=3 SV=1
MPVNPAVTLRITEIFHSLQGEASTVGRPTVFIRLTGCPLRCQYCDTAYAFEGGSMRKLEEILAEVERLDCQLITVTGGEPLAQPNCILLLQLLCDEGYQVSLETSGALSVEKVDPRVSIVLDLKTPGSREADRNDLDNLSLISQKDQVKFVICNNQDYVWAKAKLLEWNLAARAGEVLFSPSFGEQNPAELAEWILEDHLPVRMQMQLHKLLWGEAAGR

SEQ ID NO: 30303 - protein, 203 aa, unidentified
  source 1..203: note = Geitlerinema sp.
  REGION 1..203: note = tr|K9S846|K9S846_9CYAN 7-carboxy-7-deazaguanine synthase OS=Geitlerinema sp. PCC 7407 OX=1173025 GN=queE; PE = 3 SV=1
MTKTEVLTYPVVEMFHSVQGEGHWAGTSAFFVRLAGCDVGCWFCDTKESWNAKRHPQHSVEEIASAAIAARPAIAVITGGEPLLHDLGPLTQALRSRGLRVQLETSGAHPFSGHLDWVTLSPKPFKAPHPSVYCHVNELKVVITQAQDFAWAEEQAAQVPASALRLLQPEWSTPESQQLIFDYVLQHPQWRVSLQTHKFLGVR

SEQ ID NO: 30304 - protein, 210 aa, Gelidibacter algens
  REGION 1..210: note = tr|A0A1A7QW31|A0A1A7QW31_9FLAO 7-carboxy-7-deazaguanine synthase OS=Gelidibacter algens; OX = 49280 GN=queE PE=3 SV=1
MTKSEKQELIAQGLLLPLMEEFYTIQGEGFHKGTAAYFIRLGGCDVGCHWCDVKESWNAELHPPTMADVIVDHATKYSKTIVITGGEPLMWNMDPLTSKLKENGLQIHIETSGAYQLTGTWDWICLSPKKLKLPTEEVYEKANELKVIVYNKDDFRFAEEQAAKVNKDCILYLQPEWSKRDKVVPEIVDYVMANPKWKVSLQTHKYLNIP

SEQ ID NO: 30305 - protein, 210 aa, Gelidibacter gilvus
  REGION 1..210: note = tr|A0A4Q0XDF8|A0A4Q0XDF8_9FLAO 7-carboxy-7-deazaguanine synthase OS=Gelidibacter gilvus; OX = 59602 GN=queE PE=3 SV=1
MTKSEKQELIDQGLLLPLMEEFYTIQGEGFHKGTAAYFIRLGGCDVGCHWCDVKESWNAELHPPTMADAIVENAAKFSKTIVITGGEPLMWNMGPLTSKLKDKGLQIHIETSGAYNLTGTWDWICLSPKKLKLPTQAVYDQANELKVIIYNNDDFRFAEEQAAKVNKDCILFLQPEWSKRDKVIPEIVEYVMANPQWKVSLQTHKYLNIP

SEQ ID NO: 30306 - protein, 210 aa, Gelidibacter salicanalis
  REGION 1..210: note = tr|A0A5C7AFH9|A0A5C7AFH9_9FLAO 7-carboxy-7-deazaguanine synthase OS=Gelidibacter salicanalis OX=291193 GN=queE PE=3 SV=1
MTKSEKQELIAQGLLLPLMEEFYTIQGEGFHKGTAAYFIRLGGCDVGCHWCDVKESWVAELHPPTMADAIVENAAKYSNTIVITGGEPLMWNMKPLTSKLKEKGLQVHIETSGAYELTGTWDWICLSPKKLKLPTELVYEKANELKVIVYNKDDFKFAEEQAAKVNKDCILYLQPEWSKRDKVVPQIVDYVMANPKWKVSLQTHKYLNIP

SEQ ID NO: 30307 - protein, 210 aa, unidentified
  source 1..210: note = Gelidibacter sediminis
  REGION 1..210: note = tr|A0A4R7PIT3|A0A4R7PIT3_9FLAO 7-carboxy-7-deazaguanine synthase OS=Gelidibacter sediminis OX=1608710 GN=queE PE=3 SV=1
MTKSEKQELIAQGLLLPLMEEFYTIQGEGYHKGTAAYFIRIGGCDVGCHWCDVKESWVAELHPPTMADAIVDNAAKYSNTIVITGGEPLMWNMDPLTSKLKQRGLQVHIETSGAYELTGVWDWICLSPKKLKLPTPRVYERANELKVIVYNKDDFRFAEEQAAKVNKECILYLQPEWSKRDKVVPEIVDYVMANPKWKVSLQTHKYLNIP

SEQ ID NO: 30308 - protein, 212 aa, unidentified
  source 1..212: note = Geminocystis sp.
  REGION 1..212: note = tr|A0A0D6AR17|A0A0D6AR17_9CHRO 7-carboxy-7-deazaguanine synthase OS=Geminocystis sp. NIES-3709 OX=1617448 GN=queE PE=3 SV=1
MLLSQNKVDYSLNLDYEYPLVEMFHSIQGEGFWSGVNAFFIRLAGCDVFCPWCDQKETWSMKKYPLFTVQNIVDNLENINTKHIIITGGEPLLHDLLPLTNILKKKGYKTHLETSGSHHFTGDFDWVTFSPKPYKKIHNSIYDRVGELKIIIDNNNDFIFAELEAKKIPNNIPKYLQPQWDNPLSQELIFNYILDHPEWRLSLQTHKFMGVR

SEQ ID NO: 30309 - protein, 208 aa, unidentified
  source 1..208: note = Geminocystis sp.
  REGION 1..208: note = tr|A0A0D6AHS2|A0A0D6AHS2_9CHRO 7-carboxy-7-deazaguanine synthase OS=Geminocystis sp. NIES-3708 OX=1615909 GN=queE PE=3 SV=1
MLLINNKTNLEHQYFIVEMFHSIQGEGFWSGENSFFIRLAGCDVYCPWCDQKETWSMKKYPFLTLEKIINNLTNINTQHIIITGGEPLLHDLFPLTKSLKNLGYKTHLETSGSHIFSGEFDWVTFSPKPYKKPHESIYNQVSELKIVINDQNDLMWAESEAQKLPINIPKYLQPQWENPDSQELIFDYILNHPQWRLSLQTHKFLGVR

SEQ ID NO: 30310 - protein, 242 aa, Gemmata obscuriglobus
  REGION 1..242: note = tr|A0A2Z3GZR5|A0A2Z3GZR5_9BACT 7-carboxy-7-deazaguanine synthase OS=Gemmata obscuriglobus; OX = 114 GN=queE PE=3 SV=1
MSEPKRTLLADVPPEARHRVTLLRDLPAGELLVHEIYLSVQGESTFAGLPCVFVRTSVCDSRCRWCDTPHAFTQGTRVPRAEVLGKVLSFGCPLVEITGGEPLLQPDVLPLMSELCAAGKTVLLETSGAHDVSAVDPRVHIIMDVKCPASGESHRNRWANFDALKPTDQIKFVIASRADWDWAVGVIRAHKLDERFACLVSCVFSDLKPVELVGWLLASGLHRVRMQLQMHKYIWEPNARGV

SEQ ID NO: 30311 - protein, 238 aa, Gemmata sp.
  REGION 1..238: note = tr|A0A142XGW8|A0A142XGW8_9BACT 7-carboxy-7-deazaguanine synthase OS=Gemmata sp. SH-PL17; OX = 1630693 GN=queE PE=3 SV=1
MRTPLLDVPAEAAHRVVLLRDVPAGELLVHEIYISVQGESTFAGLPCVFVRASVCDSRCRWCDTPHAFNQGTRMTRADVLAKALSYNCPLVEITGGEPLLQSEMFTLMTELCDAGKTVLLETSGAHSVAEVDPRVHVIMDLKCPDSGESHRNRWANLDVLKPTDQIKFVIASRADWDWAANAIRTNKLDERFTCLVSCVFTSVKPVELVGWLLESGLHRVRMQLQMHKYIWEPSTRGV

SEQ ID NO: 30312 - protein, 231 aa, unidentified
  source 1..231: note = Gemmataceae bacterium
  REGION 1..231: note = tr|A0A5C1AC16|A0A5C1AC16_9BACT 7-carboxy-7-deazaguanine synthase OS=Gemmataceae bacterium PX52 OX=2598579 GN=queE PE=3 SV=1
MSAEPKVAGRVALLQAVPPGELLIHELYRSLQGESRYAGLPCVFVRTTGCSLRCTWCDTPYAFTRGERMSRTDVVTKALAFDTPLIEITGGEPLEQPEVLPLMAALCDAGKTVLLETSGALDISKVDRRVHVIMDLKCPDSGECGRNLWANLDHLKPSDEIKFVIASERDWRWAEAIIRERRLDLRFGVLASGVFGVNLADLAAWVLASRLTVRMQLQMHKYVWEPNTRGV

SEQ ID NO: 30313 - protein, 246 aa, unidentified
  source 1..246: note = Gemmataceae bacterium
  REGION 1..246: note = tr|A0A4V0I7C4|A0A4V0I7C4_9BACT 7-carboxy-7-deazaguanine synthase OS=Gemmataceae bacterium; OX = 2052164 GN=queE PE=3 SV=1
MGGMSELKTISLLESVPPEARHRVQLLGRVPAGELLVHEVYRSVQGESTFAGLPCVFVRLSVCDLRCVWCDTPHAFNRGERMSRADVLAEALAFDCPLVEVTGGEPLLQPDVFPLMSELADAGRTVLLETSGAHDVSRVDRRVHVVMDLKCPDSGECDRNLWANLDALKPTDEIKFVISSRRDWDWAAATIREHQLDARFACLVSPVFGNVQPVELVNWLLESGLQRVRFQLQLHKIVWDPATRGV

SEQ ID NO: 30314 - protein, 222 aa, unidentified
  source 1..222: note = Gemmatimonadaceae bacterium
  REGION 1..222: note = tr|A0A2E0DNB1|A0A2E0DNB1_9BACT 7-carboxy-7-deazaguanine synthase OS=Gemmatimonadaceae bacterium OX=2026741 GN=queE PE=3 SV=1
  VARIANT 82: note = Xaa can be any naturally occurring amino acid
  VARIANT 90: note = Xaa can be any naturally occurring amino acid
MTEQFLRISEIFHSIQGESTWAGTPCTFVRVTGCPLRCSWCDTTYAFQGGTRMSFAQILEAVASFPTRIVEVTGGEPLAHPXSFALTDEXLKEGYTVLVETSGAFDISSLDQRVHKIMDLKCPGSEESEKNRYENLEHLTGRDEIKFVLQDREDYDWAKSAIQQYELEQRVEDGTLRAILVSPVWGKIDLQELSQWILEDGLQVRFQLQVHKLIWGPEATGV

SEQ ID NO: 30315 - protein, 199 aa, unidentified; identical to SEQ ID NO: 28844
  source 1..199: note = Gemmatimonadaceae bacterium
  REGION 1..199: note = tr|A0A1V4R9T4|A0A1V4R9T4_9BACT 7-carboxy-7-deazaguanine synthase OS=Gemmatimonadaceae bacterium 4484_173 OX=1956166 GN=queE PE=3 SV=1

SEQ ID NO: 30316 - protein, 213 aa, unidentified
  source 1..213: note = Gemmatimonadales bacterium
  REGION 1..213: note = tr|A0A524IPW7|A0A524IPW7_9BACT 7-carboxy-7-deazaguanine synthase OS=Gemmatimonadales bacterium OX=2448054 GN=queE PE=3 SV=1
MRVTEIFHSIQGESSFAGQPCVFVRTTGCNLRCTWCDTAYAFHGGTDMAVDEIIKEVERIGGACRLVELTGGEPLLQHDIGDLAAALLAGGYTVLCETSGSVPVDRVPASVVKILDFKCPGSGEVESNDWTNLDRLSPERDEIKFVICDRADYEWAKSQVANRTLDRFTVHFSPEFESMDRRDLATWILSDGLPVRLQLQLHKFVWDPAKRGV

SEQ ID NO: 30317 - protein, 212 aa, unidentified
  source 1..212: note = Gemmatimonadales bacterium
  REGION 1..212: note = tr|A0A524GY93|A0A524GY93_9BACT 7-carboxy-7-deazaguanine synthase OS=Gemmatimonadales bacterium OX=2448054 GN=queE PE=3 SV=1
MSYAVKEIFYTLQGEGAQAGRPAVFCRFAGCNLWSGRESDRADATCDFCDTDFVGTDGPGGGRFATAEALAAAVKAAWPTAAGEGVPYVVCTGGEPLLQLDRGAVDALHAAGFEVAVETNGTQPAPAGLDWVCVSPKAGAALLLRRGDELKLVYPQPSALPDAFDDLEFTHRYLQPMDGPRLQEYTAGAAAYCLAHPSWRLSLQMHKLIGLP

SEQ ID NO: 30318 - protein, 259 aa, unidentified
  source 1..259: note = Gemmatimonadetes bacterium
  REGION 1..259: note = tr|A0A2E4MXY3|A0A2E4MXY3_9BACT 7-carboxy-7-deazaguanine synthase OS=Gemmatimonadetes bacterium OX=2026742 GN=queE PE=3 SV=1
  VARIANT 212: note = Xaa can be any naturally occurring amino acid
  VARIANT 236: note = Xaa can be any naturally occurring amino acid
MNGIDGIPDAAENNKPVWNDGQTLQVNEIFYSIEGEGVRVGQPTTFIRLSKCNLRCFFCDTEFDSFTEMSIRKIVEEVRMHSAEWVSLTGGEPIGQNIAPLCERLLGNGYRLHIETSGSLTPQAELFELIEHWTVSPKRRRIVDGFERITELKYVVGKAFREDMIEGDRSDLVYLQPESSKPEYVIKTLEILQRHPGWRLSCRIHKMLHLPXRLPVPKQENRRVSGRKKGGHRSSXVPTDIVRCVYRGGVVFCETKDAR

SEQ ID NO: 30319 - protein, 230 aa, unidentified
  source 1..230: note = Gemmatimonadetes bacterium
  REGION 1..230: note = tr|A0A2V7QPJ6|A0A2V7QPJ6_9BACT 7-carboxy-7-deazaguanine synthase OS=Gemmatimonadetes bacterium OX=2026742 GN=queE PE=3 SV=1
MTYTVKEIFYTLQGEGAQTGRAAVFCRFSGCNLWSGREEDRSRAVCQFCDTDFVGTGPEGGRFTSAKELADVIDGCWTGGVSRTDSEAGEAAGTLVDSTPQRGRKYVVCTGGEPLLQVNESLISALHQRGFEVAVETNGTRPAPGSLDWICVSPKAGAPLVQTTGNELKLVYPQENAPPENFEQLDFRHFFLQPMDGPHTERNTALAIEYCLRHPRWRLSIQTHKLVGLR

SEQ ID NO: 30320 - protein, 212 aa, Gemmatimonas aurantiaca
  REGION 1..212: note = tr|C1AA82|C1AA82_GEMAT 7-carboxy-7-deazaguanine synthase OS=Gemmatimonas aurantiaca (strain T-27 / DSM 14586 / JCM 11422 / NBRC 100505) OX=379066 GN=queE PE=3; SV = 1
MAYTVKECFYTLQGEGVNAGRAAVFCRFSGCNLWTGREADRHKATCTFCDTDFVGVGPDGGKFATAAALAAFVKSRWPVDAPGSARPFVVCTGGEPLLQLDEAAIDALHAEGFEIAVETNGTQPAPAGLDWICVSPKADAPVVLTRGDELKLVFPQEQARPERFASLEFAHFLLQPMDDPQAAENTRAALAYCLAHPQWRLSVQTHKVLGIR

SEQ ID NO: 30321 - protein, 212 aa, Gemmatimonas aurantiaca; identical to SEQ ID NO: 30320
  REGION 1..212: note = tr|A0A3D4VB23|A0A3D4VB23_9BACT 7-carboxy-7-deazaguanine synthase OS=Gemmatimonas aurantiaca OX=173480 GN=queE PE=3 SV=1

SEQ ID NO: 30322 - protein, 212 aa, unidentified
  source 1..212: note = Gemmatimonas phototrophica
  REGION 1..212: note = tr|A0A143BM19|A0A143BM19_9BACT 7-carboxy-7-deazaguanine synthase OS=Gemmatimonas phototrophica OX=1379270 GN=queE PE=3 SV=1
MSYTVKECFYTLQGEGVNAGRAAVFCRFSGCNLWTGREVDRASAVCTFCDTDFVGVGPDGGKFATAEALAAFVKSRWPADAPASVRPFVVCTGGEPLLQLDEAAIAALHAEGFEVAVETNGTQPAPAGLDWICVSPKANAPVVLAAGDELKLVYPQPLAMPERFAGLNFAHFLLQPMDGPDQAANTAAALAYCLAHPQWRLSVQTHKTLGIR

SEQ ID NO: 30323 - protein, 212 aa, Gemmatimonas sp.
  REGION 1..212: note = tr|A0A0S8GZ06|A0A0S8GZ06_9BACT 7-carboxy-7-deazaguanine synthase OS=Gemmatimonas sp. SM23_52 OX=1703359 GN=queE PE=3 SV=1
MKITEIFFSIQGESSWAGMPCVFVRTTGCNLRCVWCDTDYAFYGGKDMPVEEIMREVERIGRGCKLVAITGGEPLLQKDVRPLAEALLASGYTVLCETSGSLDVGTLPADVIKIVDIKCPGSGEADRNLWSNLEKLGPADEIKFVIRDRADYEWTMGVIAERGLAGRRLLFAPVWGELELKALAEWMLEDNAPARLQTQLHKHIWGPSTSGV

SEQ ID NO: 30324 - protein, 222 aa, Gemmatimonas sp.
  REGION 1..222: note = tr|A0A0S7ZAS3|A0A0S7ZAS3_9BACT 7-carboxy-7-deazaguanine synthase OS=Gemmatimonas sp. SG8_23 OX=1703356 GN=queE PE=3 SV=1
MTGDFLRITEIFHSIQGESTWAGMPCTFVRLTGCPLRCVWCDTEYAFQGGTRMSFEEILAEVRRHPANVVEITGGEPLAHPGAVRLAQLLLEEGYTVLVETSGAFDISPLDDRVHTIMDLKCPGSGESARNRWENLDHLGARDEIKFVVRDREDYVWAREVIRERRLDRRLEEGSLRAILMSPVWGETDLEQLAGWILEDGLPVRFQMQLHKLIWGPEATGV

SEQ ID NO: 30325 - protein, 222 aa, unidentified
  source 1..222: note = Gemmatirosa kalamazoonesis
  REGION 1..222: note = tr|W0RM13|W0RM13_9BACT 7-carboxy-7-deazaguanine synthase OS=Gemmatirosa kalamazoonesis OX=861299 GN=queE; PE = 3 SV=1
MSYTVKEIFYTLQGEGANAGRAAVFCRFAGCNLWTGREADRHRAVCRFCDTDFVGVGPDGGRFASAEALADAVAERWAAGTGQLPDAAWTGGVAPLVVCTGGEPLLQLDEAAVDALHAAGFEVAVETNGTQPAPAGLDWICVSPKAGTTLAVTAGDELKLVYPQREAEAQPKHFERLSFRHFFLQPMDGPDLAENTRAAIAYCLAHPRWRLSVQTHKVVGLR

SEQ ID NO: 30326 - protein, 253 aa, Geoalkalibacter ferrihydriticus
  REGION 1..253: note = tr|A0A1G9QZG7|A0A1G9QZG7_9DELT 7-carboxy-7-deazaguanine synthase OS=Geoalkalibacter ferrihydriticus OX=392333 GN=queE PE=3 SV=1
MPVPAIPPTEAPLLEVFSSIQGEGLLVGCRQVFLRFALCNLDCAYCDTPYAPTPECRIEDAPGSGVFRGLANPVPLEILAGILCRWHQEAPQMHHSLSLTGGEPLLQANVLGEWLPVLRQIMPIYLETNGTLAASLETLIDHLDWISMDLKLASVSGCPTPWAAHREFLSIARRRQCYVKAVIGEETPASEVLRAARLVHETAPEVVLVLQPLTRNGQIGVCASTLLDLQRQASAIHANLRIIPQTHRFVGLL

SEQ ID NO: 30327 - protein, 253 aa, Geoalkalibacter ferrihydriticus; identical to SEQ ID NO: 30326
  REGION 1..253: note = tr|A0A0C2DVE6|A0A0C2DVE6_9DELT 7-carboxy-7-deazaguanine synthase OS=Geoalkalibacter ferrihydriticus DSM 17813 OX=1121915 GN=queE PE=3 SV=1

SEQ ID NO: 30328 - protein, 254 aa, Geoalkalibacter subterraneus
  REGION 1..254: note = tr|A0A0B5FFE1|A0A0B5FFE1_9DELT 7-carboxy-7-deazaguanine synthase OS=Geoalkalibacter subterraneus OX=483547 GN=queE PE=3 SV=1
MPVQAMSPTEEAKLIEVFSSIQGEGLWVGCRQIFVRFADCNLACRYCDTPHQPQPNCRIEDAPGSGQFRSLPNPVSLEILHGILSQWHRNVPGMHHSLSLTGGEPLAQVEALQLWLPQLRELLPVYLETNGTLPAALEKIICDIDYVSMDFKLESLSGAQTPWDEHREFLRIAAKREGFVKVVVGEQTPVSELVQAAGLIHEIAPQMPLIIQPLTEQGRCAVRGTVLLQLQQEVSRIHSPVRVIPQTHRFIDVV

SEQ ID NO: 30329 - protein, 243 aa, Geobacillus galactosidasius
  REGION 1..243: note = tr|A0A226QRT2|A0A226QRT2_9BACI 7-carboxy-7-deazaguanine synthase OS=Geobacillus galactosidasius OX=883812 GN=queE PE=3 SV=1
MAKKIPVLEIFGPTIQGEGMVIGQKTMFVRTAGCDYRCRWCDSAFTWDGSAKEEIRQMTAEQIWERLYELGGDRFSHVTISGGNPVLIQALEELVVLLKNKGIRIAVETQGSRWQDWLYHIDDITISPKPPSSGMDTDFAMLDHIVGKLAGAGRASHMSLKVVVFDEIDFDYAKKVHRRYPDIPFYLQVGNADLAEADDAALRTQLLARLEWLVEKVAQSNELNDVRVLPQLHTLLWGNKRGV

SEQ ID NO: 30330 - protein, 244 aa, Geobacillus kaustophilus
  REGION 1..244: note = tr|A0A4D7Q981|A0A4D7Q981_GEOKU 7-carboxy-7-deazaguanine synthase OS=Geobacillus kaustophilus NBRC 102445 OX=1220595 GN=queE PE=3 SV=1
MARTIPVLEIFGPTIQGEGMVIGQKTMFVRTAGCDYRCRWCDSAFTWDGSAKDEIEQLTADDIWRRLEAIGGRRFRHVTISGGNPLLIAALGELIALLHEKGMRVAVETQGSRWQDWLLDIDDVTLSPKPPSSGMDTDWAALDQIIERLQADQSRVRRISLKVVVFDDADLAYAKEVHCRYPSVPFYLQAGNADVADSDVDALRAKLFSRLEWLVEQAADSEELADVHILPQLHTLLWGNKRGV

SEQ ID NO: 30331 - protein, 244 aa, Geobacillus kaustophilus; identical to SEQ ID NO: 28005
  REGION 1..244: note = tr|Q5L1B8|Q5L1B8_GEOKA 7-carboxy-7-deazaguanine synthase OS=Geobacillus kaustophilus (strain HTA426); OX = 235909 GN=queE PE=3 SV=1

SEQ ID NO: 30332 - protein, 244 aa, Geobacillus lituanicus
  REGION 1..244: note = tr|A0A223DZ12|A0A223DZ12_9BACI 7-carboxy-7-deazaguanine synthase OS=Geobacillus lituanicus OX=169283 GN=queE PE=3 SV=1
MARTIPVLEIFGPTIQGEGMVIGQKTMFVRTAGCDYRCRWCDSAFTWDGSAKDEIEQLTADDIWRRLEAMGGRRFRHVTISGGNPLLIAALGELVALLHEKGVRVAVETQGSRWQDWLLDVDDVTISPKPPSSGMDTDWSALDQIMERLQADQSRGRRISLKVVVFDDTDLAYAKEVHCRYPGVPFYLQTGNADVADSDVDALRAKLLHRLEWLVEQAADSEELADVHILPQLHTLLWGNKRGV

SEQ ID NO: 30333 - protein, 244 aa, unidentified
  source 1..244: note = Geobacillus proteiniphilus
  REGION 1..244: note = tr|A0A1Q5T7M7|A0A1Q5T7M7_9BACI 7-carboxy-7-deazaguanine synthase OS=Geobacillus proteiniphilus OX=860353 GN=queE PE=3 SV=1
MARTIPVLEIFGPTIQGEGMVIGQKTMFVRTAGCDYRCRWCDSAFTWDGSAKDEIEQLTADEIWRRLEAIGGRRFRHVTISGGNPLLIAALGELIALLHEKGMRVAVETQGSRWQDWLLDIDDVTLSPKPPSSGMDTDWAALDQIIERLQADQSRVRRISLKVVVFDDADLAYAKEVHCRYPSVPFYLQAGNADVADSDVDALRAKLFSRLEWLVEQAADSEELADVHILPQLHTFLWGNKRGV

SEQ ID NO: 30334 - protein, 244 aa, Geobacillus sp.
  REGION 1..244: note = tr|A0A0N1KFJ3|A0A0N1KFJ3_9BACI 7-carboxy-7-deazaguanine synthase OS=Geobacillus sp. BCO2; OX = 1547578 GN=queE_2 PE=3 SV=1
MARTIPVLEIFGPTIQGEGMVIGQKTMFVRTAGCDYRCRWCDSAFTWDGSAKDEIEQLTADDIWRRLEAMGGRRFRHVTISGGNPLLIAALGELIALLHEKGMRVAVETQGSRWQDWLLDVDDITISPKPPSSGMDTDWSVLDPIMERLQADRSRVRRISLKVVVFDDADLAYAKEVHRRYPGVPFYLQAGNADVADSDVDALRAKLLSRLEWLVEQAADSEELADVHILPQLHTLLWGNKRGV

SEQ ID NO: 30335 - protein, 243 aa, Geobacillus sp.
  REGION 1..243: note = tr|A0A0F6BQ83|A0A0F6BQ83_GEOS0 7-carboxy-7-deazaguanine synthase OS=Geobacillus sp. (strain Y4.1MC1) OX=581103 GN=queE PE=3 SV=1
MAKKIPVLEIFGPTIQGEGMVIGQKTMFVRTAGCDYSCRWCDSAFTWDGSAKGEIRQMTAGQIWERLCELGGDRFRHVTISGGNPVLIQALEELVLLLKNKGVRIAVETQGSRWQDWLYDIDDVTISPKPPSSGMETDFAVLDHIIGKLVGAGRASHVSLKVVVFDDDDFDYAKIIHKRYPEISFYLQAGNDDIMEKDVAALREKLLAKLDWLVEKVAQSNELNDVRVLPQLHALLWGNKRGV

SEQ ID NO: 30336 - protein, 244 aa, Geobacillus stearothermophilus
  REGION 1..244: note = tr|A0A150NEP7|A0A150NEP7_GEOSE 7-carboxy-7-deazaguanine synthase OS=Geobacillus stearothermophilus OX=1422 GN=queE PE=3 SV=1
MTRTIPVLEIFGPTIQGEGMVIGQKTMFVRTAGCDYRCRWCDSAFTWDGSAKDEIEQLTADDIWRRLEAMGGRRFRHVTISGGNPLLIAALGELVALLHEKGVRVAVETQGSRWQDWLLDVDDVTISPKPPSSGMDTDWSALDQIMERLQADQSRVRRISLKVVVFDDTDLAYAKEVHCRYPGVPFYLQTGNADVADSDVDALRAKLLHRLEWLVERAADSEELADVHILPQLHTLLWGNKRGV

SEQ ID NO: 30337 - protein, 244 aa, Geobacillus stearothermophilus
  REGION 1..244: note = tr|A0A0K9HJB2|A0A0K9HJB2_GEOSE 7-carboxy-7-deazaguanine synthase OS=Geobacillus stearothermophilus OX=1422 GN=queE PE=3 SV=1
MARTIPVLEIFGPTIQGEGMVIGQKTMFVRTAGCDYRCRWCDSAFTWDGSAKDEIEQLTADDIWRRLEAMGGRRFRHVTISGGNPLLIAALGELVALLHEKGVRVAVETQGSRWQDWLLDVDDVTISPKPPSSGMDTDWSALDQIMERLQADQSRVRRISLKVVVFDDTDLAYAKEVHCRYPGVPFYLQTGNADVADSDVDALRAKLLHRLEWLVERAADSEELADVHILPQLHTLLWGNKRGV

SEQ ID NO: 30338 - protein, 244 aa, Geobacillus subterraneus
  REGION 1..244: note = tr|A0A143MNH1|A0A143MNH1_9BACI 7-carboxy-7-deazaguanine synthase OS=Geobacillus subterraneus OX=129338 GN=queE PE=3 SV=1
MARTIPVLEIFGPTIQGEGMVIGQKTMFVRTAGCDYRCRWCDSAFTWDGSAKEEIEQLTADDIWRRLEAIGGLRFRHVTISGGNPLLIAALGELVALLHEKGVRVAVETQGSRWQDWLLDVDDVTISPKPPSSGMDTDWAALDAIIGRLQKDQNRTRRVSLKVVVFDEVDLAYAKEAHRRYPGVPFYLQTGNADVGDLDVEALRAKLLGRLEWLVEQAAESEELADVHILPQLHTLLWGNKRGV

SEQ ID NO: 30339 - protein, 244 aa, Geobacillus thermocatenulatus
  REGION 1..244: note = tr|A0A226Q4P9|A0A226Q4P9_9BACI 7-carboxy-7-deazaguanine synthase OS=Geobacillus thermocatenulatus OX=33938 GN=queE PE=3 SV=1
MARTIPVLEIFGPTIQGEGMVIGQKTMFVRTAGCDYRCRWCDSAFTWDGSAKDEIEQLTADDIWRRLEAMGGRRFRHVTISGGNPLLIAALGELIALLHEKGMRVAVETQGSRWQDWLLDVDDITISPKPPSSGMDTDWSALDPIMERLQADRSRVRRISLKVVVFDDADLAYAKEVHRRYPGVPFYLQAGNADVADSDVDALRAKLLSRLEWLVEQAADSEELADVHILPQLHTLLWGNKRGV

SEQ ID NO: 30340 - protein, 225 aa, Geobacillus thermodenitrificans
  REGION 1..225: note = tr|A4ILN9|A4ILN9_GEOTN 7-carboxy-7-deazaguanine synthase OS=Geobacillus thermodenitrificans (strain NG80-2) OX=420246 GN=queE PE=3 SV=1
MVIGQKTMFVRTAGCDYRCRWCDSAFTWDGSAKEEIEQLTAEDIWQRLEAIGGRRFRHVTISGGNPLLLAALGELVALLHEKGVQVAVETQGSRWQDWLLDVDDVTISPKPPSSGMDTDWAMLDSIIRKLLADQNRTRRVSLKVVVFDEADLAYAKEVHRRYPGVPFYLQTGNADVEALDTNALRMKLFDQLDWLVERVAQSDELNDVHVLPQLHTLLWGTKRGV

SEQ ID NO: 30341 - protein, 244 aa, Geobacillus thermodenitrificans
  REGION 1..244: note = tr|A0A1W6VPK2|A0A1W6VPK2_GEOTD 7-carboxy-7-deazaguanine synthase OS=Geobacillus thermodenitrificans OX=33940 GN=queE PE=3 SV=1
MARTIPVLEIFGPTIQGEGMVIGQKTMFVRTAGCDYRCRWCDSAFTWDGSAKEEIEQLTAEDIWQRLEAIGGRRFRHVTISGGNPLLLAALGELVALLHEKGVQVAVETQGSRWQDWLLDVDDVTISPKPPSSGMDTDWAMLDSIIRKLLADQNRTRRVSLKVVVFDEADLAYAKEVHRRYPGVPFYLQTGNADVEALDTNALRMKLFDQLDWLVERVAQSDELNDVHVLPQLHTLLWGTKRGV

SEQ ID NO: 30342 - protein, 244 aa, Geobacillus thermoleovorans; identical to SEQ ID NO: 28005
  REGION 1..244: note = tr|G8MYT0|G8MYT0_GEOTH 7-carboxy-7-deazaguanine synthase OS=Geobacillus thermoleovorans CCB_US3_UF5; OX = 1111068 GN=queE PE=3 SV=1

SEQ ID NO: 30343 - protein, 244 aa, Geobacillus thermoleovorans; identical to SEQ ID NO: 28005
  REGION 1..244: note = tr|A0A098L4I5|A0A098L4I5_GEOTH 7-carboxy-7-deazaguanine synthase OS=Geobacillus thermoleovorans B23 OX=1406857 GN=queE PE=3 SV=1

SEQ ID NO: 30344 - protein, 244 aa, unidentified
  source 1..244: note = Geobacillus zalihae
  REGION 1..244: note = tr|A0A1V9CQN5|A0A1V9CQN5_9BACI 7-carboxy-7-deazaguanine synthase OS=Geobacillus zalihae; OX = 213419 GN=queE PE=3 SV=1
MARTIPVLEIFGPTIQGEGMVIGQKTMFVRTAGCDYRCRWCDSAFTWDGSAKDEIEQLTADDIWRRLEAMGGRRFRHVTISGGNPLLIAALGELIALLHEKGMRVAVETQGSRWQDWLLDIDDVTLSPKPPSSGMDTDWSALDQIMERLQADQSRVRRISLKVVVFDDADLAYAKEVHCRYPGVPFYLQTGNADVADSDVDALRAKLLSRLEWLVEQAADSEELADVHILPQLHTLLWGNKRGV

SEQ ID NO: 30345 - protein, 231 aa, Geobacter argillaceus
  REGION 1..231: note = tr|A0A562VNR3|A0A562VNR3_9DELT 7-carboxy-7-deazaguanine synthase OS=Geobacter argillaceus; OX = 345631 GN=queE PE=3 SV=1
MLVGLRQVFLRLWGCNIACAYCDTCHEELPERCLLENSPGRRDFVDVANPVPFERILTHLERWNRGWPDIHHSLSLTGGEPLMHPETLRVILPDLITCLPVYLETNGLLPQALELVIDNVSMIGMDIKLPSATGCEIRWETHLDFLRIGSRKDIFVKVVVTDTTEEWELQRACTIVAQVRKDIPFIIQPVTSSGGVVAVSPLKLLEFQELASQTLSGVRVIPQTHRFMGQL

SEQ ID NO: 30346 - protein, 251 aa, Geobacter bemidjiensis
  REGION 1..251: note = tr|B5EI73|B5EI73_GEOBB 7-carboxy-7-deazaguanine synthase OS=Geobacter bemidjiensis (strain Bem / ATCC BAA-1014 / DSM 16622) OX=404380 GN=queE PE=3 SV=1
MSNGLRAPLVECFSSIQGEGVLVGLRQVFLRLAGCNLNCSFCDTPGMSETPKECLLELTPGRRDFFKVPNPVGLERVATLLESWTEGWPGIHHSISVTGGEPLLYAKELKEWLPVLRTLLPVYLETNGTLAHQLAPLMPHLDYIGMDFKLPSTSGCVNLWDAHRAFLETASKTSVFVKIVIDQSTEDWEIERSCQMIMAVNPGIPLILQPMTLGSGAVALPALRMLELQELCSGLNEVRVIPQTHKFMGQL

SEQ ID NO: 30347 - protein, 249 aa, Geobacter daltonii
  REGION 1..249: note = tr|B9M258|B9M258_GEODF 7-carboxy-7-deazaguanine synthase OS=Geobacter daltonii (strain DSM 22248 / JCM 15807 / FRC-32) OX=316067 GN=queE PE=3 SV=1
MNKSSADLIEVFSSIQGEGLLVGLRQVFIRFSGCNLTCSYCDTEPDRTQYCQLESTPGRRDFFQVENPVPVDRLVNLVSGWQRGWPGIHHSISITGGEPLLCHQLLQELLPALRHYLPIYLETNGILHGQLAQLLDHVDYVSMDIKLPSTSGYTDLWQAHEEFLRLAASKKTYVKTVIGTDTEDWEIIRTAELVAAIDSRIPLILQPFTDLKGRVNLSAIRMLEMQETANRYLQEVRIIPQTHKFIGQL

SEQ ID NO: 30348 - protein, 254 aa, Geobacter lovleyi
  REGION 1..254: note = tr|B3E1R2|B3E1R2_GEOLS 7-carboxy-7-deazaguanine synthase OS=Geobacter lovleyi (strain ATCC BAA-1151 / DSM 17278 / SZ) OX=398767 GN=queE PE=3 SV=1
MPVPNTMNSSAPLVEIFSSLQGEGVLAGYRQIFVRFPGCNLDCSFCDTDFEAQTACRVETTPGSGQFQELAQPVSLETLLGIITRWCKQLPNAHHSISITGGEPMLHADLLARWLPELNILLPIHLETNGTLPEALPRLIEHLDVISMDIKLPGSAATPELWQEHKRFLEIALERDVSVKVIVGELTTEQELLKACKLVAELDDEIPFIIQPVTGRDGRVAVAPERLMQFQAVAAKRLCDVRVLPQMHRFLEVA

SEQ ID NO: 30349 - protein, 250 aa, Geobacter metallireducens
  REGION 1..250: note = tr|Q39V35|Q39V35_GEOMG 7-carboxy-7-deazaguanine synthase OS=Geobacter metallireducens (strain GS-15 / ATCC 53774 / DSM 7210) OX=269799 GN=queE PE=3 SV=1
MSKPTAELAEVFSSVQGEGMLIGLRQVFVRFRGCNLTCDYCDTPTEITAEPCLVEQTPGRRDFVPTANPVALDRIVSLIDGWQRGWPGVHHSISITGGEPLLSHTVLSAWLPELRNILPVYLETNGIMHSVLGLLIDHIDIIGMDIKIPSTSGCTGLWDDHRSFLQIAARKNVFVKIIVGDETEEWEIIRASELIAAINSHIPLILQPVTEPGGRVGINPVRALEFQEIACRHLDEVRIIPQTHKFMAQL

SEQ ID NO: 30350 - protein, 242 aa, Geobacter pelophilus
  REGION 1..242: note = tr|A0A1W7QNR7|A0A1W7QNR7_9DELT 7-carboxy-7-deazaguanine synthase OS=Geobacter pelophilus; OX = 60036 GN=queE PE=3 SV=1
MECFSSIQGEGVLVGLRQVFLRLAGCNLNCSFCDTPGMSETPDECLLELTPGRRDFFKVPNPVGLERVATLLESWTAGWPGIHHSISVTGGEPLLYAAELKEWLPVLRGLLPVYLETNGTLPDALAPLMPYLDYIGMDFKLPSTSGCADLWDAHRTFLETAAETSVFVKIVVDQSTEDWEIERSCRMILDVNPAIPLILQPMTLGNGTVTLPALRMLELQELCSGLNEVRVIPQTHKFMGQL

SEQ ID NO: 30351 - protein, 250 aa, Geobacter pickeringii
  REGION 1..250: note = tr|A0A0B5B9T6|A0A0B5B9T6_9DELT 7-carboxy-7-deazaguanine synthase OS=Geobacter pickeringii; OX = 345632 GN=queE PE=3 SV=1
MSSSSAELAEVFSSIQGEGGLIGLRQVFVRFRGCNLQCDYCDTPTDFSAEPCLAEQTPGRRDFVPVENPVALHRILSLIEGWHRGWPGVHHSVSITGGEPLVSHEILRSWLPHLRSLLPVYLETNGVMHTALELLIDHIDMIGMDIKIPSTSGCTDLWDDHRRFLRVAATKDVFVKVVVGEQTEEWEVERSAEIVGGEGREIPLILQPITRLDGTIGIAPVRVLELQEIASRYLRAVRVIPQTHKFMGQL

SEQ ID NO: 30352 - protein, 250 aa, unidentified
  source 1..250: note = Geobacter soli
  REGION 1..250: note = tr|A0A0C1U361|A0A0C1U361_9DELT 7-carboxy-7-deazaguanine synthase OS=Geobacter soli; OX = 1510391 GN=queE PE=3 SV=1
MSKPGAELEEVFSSVQGEGMLIGLRQVFIRFRGCNLTCDYCDTPAGTPAEPCRIEQTPGRRDFVPVDNPVALDRVAALVEGWQRGWPGVHDSISITGGEPLLRHDILMQWLPVLREHLPVYLETNGVMHAALGLVINHVDIIGMDIKIPSTSGCTDLWDDHRQFLEIANTRRAFIKIVVGEETEDWEITRAGEIIAGVNRDIPLILQPVTRAGDTLGIKPVKALELQELACRYLAEVRIIPQTHRFMGQL

SEQ ID NO: 30353 - protein, 250 aa, Geobacter sp.
  REGION 1..250: note = tr|A0A212PFD9|A0A212PFD9_9DELT 7-carboxy-7-deazaguanine synthase OS=Geobacter sp. DSM 9736 OX=1277350 GN=queE PE=3 SV=1
MNNGSASIVELFSSIQGEGVLVGLRQAFLRFHGCNLACEYCDTRSDEPPEEALLEETPGRQDFLRERNPVPLERVARLLQLWESALPGIHHSLSITGGEPLINHRCLQEWLPELRAILPVYLETNGILHHALSEVIPHLDYISMDIKLPSSSGCTGLWEEHRRFLKIAARTTVFVKAVVSAETEDWEILRTAEMIAEVNPRITCILQPVTRADGTPGIAPIRALEMQEMAGRCLTDVRVIPQTHKFMGQL

SEQ ID NO: 30354 - protein, 249 aa, Geobacter sp.
  REGION 1..249: note = tr|A0A351VIJ6|A0A351VIJ6_9DELT 7-carboxy-7-deazaguanine synthase OS=Geobacter sp.; OX = 46610 GN=queE PE=3 SV=1
MSDMIHISELFSSIQGEGLLAGRRQIFVRLTECNLDCCYCDTEFGRTEIGRVESRPGSADLINIPQPMPLHAITDIIAEWQALLPGAHHSVSFTGGEPLLYADLLARLFPDIRRIIPIHLETNGTMHLALGQVKRHLDYISMDMKLPSTAGCTGQLWDLHALFLREAQGCNVSVKVVVGDVTEQHEIFKVCEIIARINIDTPLFLQPLTLPDGTIGIKAAHLLHLQELASGRLPDVRVIPQMHKLLGAL

SEQ ID NO: 30355 - protein, 250 aa, Geobacter sulfurreducens
  REGION 1..250: note = sp|Q74CF3|QUEE_GEOSL 7-carboxy-7-deazaguanine synthase OS=Geobacter sulfurreducens (strain ATCC 51573 / DSM 12127 / PCA) OX=243231 GN=queE PE=3 SV=1
MSKPGAELEEVFSSVQGEGMLIGLRQVFIRFRGCNLTCDYCDTPAGTPAEPCRIEQTPGRRDFVPADNPVSLDRVAALVEGWQRGWPGVHDSISITGGEPLLRHDILMQWLPVLREHLPVYLETNGVMHAALGLVINHVDIIGMDIKIPSTSGCTDLWDDHRQFLEIANTRRAFIKIVVGEETEDWEITRASEIIAGVNRDIPLILQPVTRAGDTLGIKPVKALELQELACRYLAEVRIIPQTHRFMGQL

SEQ ID NO: 30356 - protein, 250 aa, Geobacter sulfurreducens
  REGION 1..250: note = tr|A0A2Z5SRP6|A0A2Z5SRP6_GEOSN 7-carboxy-7-deazaguanine synthase OS=Geobacter sulfurreducens OX=35554 GN=queE PE=3 SV=1
MSKPGAELEEVFSSVQGEGMLIGLRQVFIRFRGCNLTCDYCDTPAGTPAEPCRIEQTPGRRDFVPVDNPVSLDRVAALVEGWQRGWPGVHDSISITGGEPLLRHDILMQWLPVLREHLPVYLETNGVMHAALGLVINHVDIIGMDIKIPSTSGCTDLWDDHRQFLEIANTRRAFIKIVVGEETEDWEITRAGEIIAGVNRDIPLILQPVTRAGDTLGIKPVKALELQELACRYLAEVRIIPQTHRFMGQL

SEQ ID NO: 30357 - protein, 248 aa, Geobacter thiogenes
  REGION 1..248: note = tr|A0A1T4QNJ9|A0A1T4QNJ9_9DELT 7-carboxy-7-deazaguanine synthase OS=Geobacter thiogenes; OX = 115783 GN=queE PE=3 SV=1
MNSAVPLIEIFSSLQGEGELAGYRQIFVRFPGCNLDCAFCDTKIEAPAVCSVESAPGSGQFQELAQPVSLETLIGIITRWCKQLPGAHHSISITGGEPMLHADLLARWLPELNILLPIHLETNGTLPEALPQLIEHLDFISMDIKLPTSAATPALWQEHKRFLEIALERDVSVKVIVGELTTEQELLQACKLVAEVDDEISFIIQPVTGRDGRVAVAPERLMKFQAVAAKKLCDVRVLPQMHRFLEVA

SEQ ID NO: 30358 - protein, 250 aa, Geobacter uraniireducens
  REGION 1..250: note = tr|A5G3E2|A5G3E2_GEOUR 7-carboxy-7-deazaguanine synthase OS=Geobacter uraniireducens (strain Rf4); OX = 351605 GN=queE PE=3 SV=1
MNNRQAEMIELFSSIQGEGMLVGLRQIFIRLCGCNFTCNYCDTESNVSVEFCQMEGTPGRRDFIQVKNPVALERLTCLISGWQRGWPGIHHSISITGGEPLLHYELLQEWLPVLREFLPIYLETNGVLHKELSQVISHIDHVGMDIKIPSTSGCADLWKDHEAFLRIAAAKNVFVKAVIGNNTEDWEIIKASEIIASIDNAIPLILQPLTNPDGKIDIAPVKMLELQETASIFLKEVRIIPQTHKFIGQL

SEQ ID NO: 30359 - protein, 249 aa, unidentified
  source 1..249: note = Geobacteraceae bacterium
  REGION 1..249: note = tr|A0A1G0LR92|A0A1G0LR92_9DELT 7-carboxy-7-deazaguanine synthase OS=Geobacteraceae bacterium GWC2_48_7 OX=1798315 GN=queE PE=3 SV=1
MNNTTHLCELFSSIQGEGYLVGRRQIFIRFPGCNMECRYCDTDHSDSGIFRQETAPGSSEFHHLQQPVALDDILVTIEKWIALLPGTHHSISVTGGEPLLHVDILNQWLPKLRRLLPIHLETNGTLPAQLAELLTHLDYISMDMKLPSASGCGEDIWELHRQFLEIAHSSQVSVKIVAGNTATAAEISKAAEIISQVDRNIPLFIQPLTLLDGRIGISVPHLLKLQELASTALHDVRVVPQMHKLLGAL

SEQ ID NO: 30360 - protein, 249 aa, unidentified; identical to SEQ ID NO: 30354
  source 1..249: note = Geobacteraceae bacterium
  REGION 1..249: note = tr|A0A1G0MDQ0|A0A1G0MDQ0_9DELT 7-carboxy-7-deazaguanine synthase OS=Geobacteraceae bacterium GWC2_55_20 OX=1798317 GN=queE PE=3 SV=1

SEQ ID NO: 30361 - protein, 210 aa, unidentified
  source 1..210: note = Geodermatophilus aquaeductus
  REGION 1..210: note = tr|A0A521EY89|A0A521EY89_9ACTN 7-carboxy-7-deazaguanine synthase OS=Geodermatophilus aquaeductus OX=1564161 GN=queE PE=3 SV=1
MKTYFIKEIFYTLQGEGAHAGRPAVFCRFSRCNLWTGLERDRHRAVCQFCDTDFVGVDGEGGGKYVGADALAEAVARRWPGGGRPFVVCTGGEPLLQLDETAVDALHDRGFEIAVETNGTQRPPRGLDWICVSPKAGAELVVTSGDELKLVFPQPEALPETFELLDFRSFRLQPLDDQRVEENTAQAVAYCLSNPQWSLSLQTHKYLRIP

SEQ ID NO: 30362 - protein, 286 aa, Geofilum rubicundum
  REGION 1..286: note = tr|A0A0E9M2R6|A0A0E9M2R6_9BACT 7-carboxy-7-deazaguanine synthase OS=Geofilum rubicundum JCM 15548 OX=1236989 GN=queE PE=3 SV=1
MNQKISLANEGVFPIVKDKEGQVLPKAPATGITVAGTIQGEGKLAGIPSLFIRFSSCNLRCIWQLPDGTYSRCDTPYASFDANGIQQITVDDVLALVKHNLGPIRHIVITGGEPLLQKDALIELAARLKSELQLHLTIETNGSIFNAQVAQQIDLFSISPKLANSTPNPAKLAALGLSPSGPLKFHGERRLNLSALQAYIDVCRSADKAFQLKFVVGQAADEQEITSAYLNRLTGWAVSDIMLMPLGATQEELQQTTPMVLEMAIRNGWRFTPRVHIDLFGSKPGV

SEQ ID NO: 30363 - protein, 237 aa, Geomicrobium sp.
  REGION 1..237: note = tr|A0A061NLX7|A0A061NLX7_9BACL 7-carboxy-7-deazaguanine synthase OS=Geomicrobium sp. JCM 19037 OX=1460634 GN=queE PE=3 SV=1
MKIPVLEIFGPTVQGEGMVAGQKTMFVRTGGCDYSCSWCDSAFTWDGSQKAEALSAESVLERLDDTGGDRYNHVTISGGNPALHKALVSSNFLQIEEFKLRWKPKGVYWQDWLLSIDDVTISPKPPSSTMVTNFEQLDLFVERLSSRSEGSQSLKVVIFNDGDLAYAKQVHQRYPRMPFYLQVGNDDLHENQPEKLRDHLLHRYEWLVDTVMEDRELNNVRVLPQIHALIWGNKQGV

SEQ ID NO: 30364 - protein, 238 aa, Geomicrobium sp.
  REGION 1..238: note = tr|A0A061PEM6|A0A061PEM6_9BACL 7-carboxy-7-deazaguanine synthase OS=Geomicrobium sp. JCM 19039 OX=1460636 GN=queE PE=3 SV=1
MKIPVLEIFGPTVQGEGMVAGQKTMFVRTGGCDYSCSWCDSAFTWDGSQKAEALSAENVLERLDDTGGDRYNHVTISGGNPALHKGIGELVELLTDREIQTAVETQGSYWQDWLLSIDDVTISPKPPSSTMVTNFEQLDLFVERLSARSEGSQSLKVVIFNDGDLAYAKQVHQRYPHMPFYLQVGNDDLHENQPEKLRDHLLHRYEWLVDTVMEDRELNNVRMLPQIHALIWGNKQGV

SEQ ID NO: 30365 - protein, 250 aa, unidentified
  source 1..250: note = Geomonas terrae
  REGION 1..250: note = tr|A0A4S1CBT6|A0A4S1CBT6_9DELT 7-carboxy-7-deazaguanine synthase OS=Geomonas terrae; OX = 2562681 GN=queE PE=3 SV=1
MSKLQAPLVECFSSIQGEGVLVGLRQVFLRFAGCNLNCSFCDTPGMSAVPQECLLELTPGRRDFQQLPNPVTLERVATLLESWGAAWPGIHHSISITGGEPLLYGALLDEWLPELRKLLPIYLETNGTLPEALAPLIPHLDSIGMDIKLPSASGCPELWDQHHAFLELAAMKEVFVKIVVDQSTEEWEIRRSCAMIGAVDPAIPLILQPLTREDGTIGITAQRALELQELCTSLKEVRVIPQTHKFMGQL

SEQ ID NO: 30366 - protein, 246 aa, Geothermobacter ehrlichii
  REGION 1..246: note = tr|A0A5D3WP40|A0A5D3WP40_9DELT 7-carboxy-7-deazaguanine synthase OS=Geothermobacter ehrlichii OX=213224 GN=queE PE=3 SV=1
MTELGLKEIFSSLQGEGIYIGCRQIFVRLTGCNLACRYCDTDFRPTSVCRIETEPGCGRFREVESPLAAVQVSALLQRWQASFPGLHQAITLTGGEPLLQATALAQWLPQLGCELPVHLETNGTLPEQAQALRPWIDFFSIDLKLSSVTGEPTPWKAHRRFLEVCRGKAAQVKIVVAPGLDERELRQAAELAAACLPQTPLILQPVTAEGRPLVPGGQLLSWQTALSRTHPDCRVIPQVHPLLAVF

SEQ ID NO: 30367 - protein, 266 aa, Geothermobacter sp.
  REGION 1..266: note = tr|A0A1X0YEN8|A0A1X0YEN8_9DELT 7-carboxy-7-deazaguanine synthase OS=Geothermobacter sp. EPR-M OX=1969733 GN=queE PE=3 SV=1
MSPSSRSMSGSRTMPVPATASTELPLVECFSSLQGEGLHIGRRQVFLRLGGCNLNCGYCDTDFRICDTCRFETTPGSGRFKAVPNPVSVETLCALLDQWLALAPNLHHALSLTGGEPLLHADALNDWLPVLAERLPIHLETNGTLYQCLPALMPHLTFLSIDLKLEATTGSPTPWNEHRHFLQAARSRPAQVKIVVDTGQDEEELVQGATLVEELLPAAPLFLQPVTRDGGPDVSGEQLLAWQQLLSRHHPDTRVVPQIHPLLRID

SEQ ID NO: 30368 - protein, 253 aa, Geothermobacter sp.
  REGION 1..253: note = tr|A0A2K2H6X9|A0A2K2H6X9_9DELT 7-carboxy-7-deazaguanine synthase OS=Geothermobacter sp. HR-1 OX=654845 GN=queE PE=3 SV=1
MPVPATASTELPLVECFSSLQGEGLHIGRRQVFLRLGGCNLNCGYCDTDFRICDTCRFETAPGSGRFKAVPNPVSAETLCALLDQWLVLAPNLHHALSLTGGEPLLHADALNDWLPVLAERLPIHLETNGTLYQCLPALMPHLTFLSIDLKLEATTGTPTPWNEHRHFLQAARSRPAQVKIVVDTGQDEEELVQGATLVEELLPAAPLFLQPVTRDGGPDVSGEQLLAWQQLLSRHHPDTRVVPQIHPLLRVD

SEQ ID NO: 30369 - protein, 238 aa, Geovibrio thiophilus
  REGION 1..238: note = tr|A0A410JYJ6|A0A410JYJ6_9BACT 7-carboxy-7-deazaguanine synthase OS=Geovibrio thiophilus; OX = 139438 GN=queE PE=3 SV=1
MRLRNTGNKGRINEVFHSVQGEGFYAGARQLFVRLAGCSVGCEYCDTEFGTPESFEVYGKPFKNPVTPEEFFVAVCAGADLSLFHSVSFTGGEPTEQIRFLKGTALLFKQAGCKLFLETSGYRHAELKALKPVFDIFSIDVKLCRADWRENLAKLLPVLKFLGKEKFYLKAVFDDNNTEDELAEAAGVLHSAGVTEVFAQSVDNKADFNRIDTVQVIFSKEGVEMFYRPQIHRFLGIR

SEQ ID NO: 30370 - protein, 223 aa, Gibbsiella quercinecans
  REGION 1..223: note = tr|A0A250AZD7|A0A250AZD7_9ENTR 7-carboxy-7-deazaguanine synthase OS=Gibbsiella quercinecans OX=929813 GN=queE PE=3 SV=1
MQYPINEMFQTLQGEGYFTGVPAIFIRLQGCPVGCSWCDTKHTWEKDANREVDLQRILVKTQESAAWGSASAEQLLAVVRQQGYTARHIVITGGEPCIHDLAPLTALFEQHGFSCQIETSGTHTILCSPGTWVTVSPKVNMRGGLKVLPTALARADEIKHPVGRQRDIEALDALLATLHDDKQRVIALQPISRKEEATRLCIETCIARNWRLSMQTHKYLDIA

SEQ ID NO: 30371 - protein, 212 aa, Giesbergeria anulus
  REGION 1..212: note = tr|A0A1H9IW70|A0A1H9IW70_9BURK 7-carboxy-7-deazaguanine synthase OS=Giesbergeria anulus; OX = 180197 GN=queE PE=3 SV=1
MSYSVKEIFYTLQGEGAQAGLPAVFCRFAGCNLWSGRPSDRASALCRFCDTDFVGTDGTLGGKFDSAMALAEQIAALWPAGDKQHRLVVLTGGEPLLQVDTALIDALHAQGFRIALETNGTLLAPPGIDWLCVSPKAGTTWVQQQGQELKVVWPQPGLDLDLLESTGQFAHRFLQPLDNAQQAQHIALCIDTCLQRPAWRLSLQTHKLTGIR

SEQ ID NO: 30372 - protein, 204 aa, unidentified
  source 1..204: note = Gilliamella apicola
  REGION 1..204: note = tr|A0A1B9N0I7|A0A1B9N0I7_9GAMM 7-carboxy-7-deazaguanine synthase OS=Gilliamella apicola; OX = 1196095 GN=queE PE=3 SV=1
MIEFRIVEIFESLQGEGYNTGMPAIFIRFAGCNLNCAWCDTNFRQFTRFTLEALIAKVSEYKSKNIIITGGEPTRVKALPQLLLSLKNAGYFIAIESNGLGKVDALIDYIALSPKFCYQSHYQKIVQPTANEVRIVTENHRDFIAFCQYIETQIQAKRYYLSPCEKDGAFNIFDTIKLLGKINENRLDNKWLLNIQSHKLADIE

SEQ ID NO: 30373 - protein, 204 aa, unidentified
  source 1..204: note = Gilliamella apicola
  REGION 1..204: note = tr|A0A066T6N0|A0A066T6N0_9GAMM 7-carboxy-7-deazaguanine synthase OS=Gilliamella apicola; OX = 1196095 GN=queE PE=3 SV=1
MIEFRIVEIFESLQGEGYNTGMPAVFIRFAGCNLNCAWCDTNFRKFTRFTLDALMTKVGEYKSKNIIITGGEPTMVKALPELLLPLKKAGYFIAIESNGLGKVDPLIDYIALSPKFCYQSRYQKIAQPIANEVRIVAENHCNFIPFCQYIETHIQAKHYYLSPCEKDGAFNMFETIDLLGKINQNRLNNKWLLSVQSHKFANIE

SEQ ID NO: 30374 - protein, 204 aa, unidentified
  source 1..204: note = Gilliamella apis
  REGION 1..204: note = tr|A0A242NW44|A0A242NW44_9GAMM 7-carboxy-7-deazaguanine synthase OS=Gilliamella apis; OX = 1970738 GN=queE PE=3 SV=1
MIEYRIVEIFESLQGEGYNTGMPAIFIRFAGCNLNCSWCDTNFRKFQRFTLEQILAKVKQYKSSNIIITGGEPTMVKELSLLLTHLKQAGYYIAIESNGLGKVDPLIDYIALSPKFCYHHRYQKILQSTASEVRIVAEKQTGFIDYCYYIEQHIQAKRYYLSPCEVNGEMNMFDTIELLGKINHNRIDNKWMLSLQTHKFANIE

SEQ ID NO: 30375 - protein, 204 aa, unidentified
  source 1..204: note = Gilliamella apis
  REGION 1..204: note = tr|A0A2V4E885|A0A2V4E885_9GAMM 7-carboxy-7-deazaguanine synthase OS=Gilliamella apis; OX = 1970738 GN=queE PE=3 SV=1
MIEYRIVEIFESLQGEGYNTGMPAIFIRFAGCNLNCSWCDTNFRKFQRFTLEQIVAKVKQYKSSNIIITGGEPTMVKELSSLLTHLKQAGYYIAIESNGLGKVDPLIDYIALSPKFCYHHRYQKILQPTASEIRIVAEKQTGFIDFCYYIEQHIQAKRYYLSPCEVNGEMNMFDTIELLGKINHKRIDNKWMLSLQTHKFANIE

SEQ ID NO: 30376 - protein, 204 aa, unidentified
  source 1..204: note = Gilliamella bombicola
  REGION 1..204: note = tr|A0A1C4D2M5|A0A1C4D2M5_9GAMM 7-carboxy-7-deazaguanine synthase OS=Gilliamella bombicola; OX = 1798182 GN=queE PE=3 SV=1
MIEFRIVEIFESLQGEGYNTGMPAVFIRFAGCNLNCAWCDTNFRQFTRFTLDTLLAKVNEYNSKNIIITGGEPTMVKALPQLLVPLKNAGYFIAIESNGLGKVDPLIDYIALSPKFCYQSRYQKIVQPTANEVRIVAENHADFIPFCQYIETQIHAKRYYLSPCEKDGAFNMFETIELLGKINKDRFDNKWLLSVQSHKFANID

SEQ ID NO: 30377 - protein, 204 aa, unidentified
  source 1..204: note = Gilliamella intestini
  REGION 1..204: note = tr|A0A1C4CZ72|A0A1C4CZ72_9GAMM 7-carboxy-7-deazaguanine synthase OS=Gilliamella intestini; OX = 1798183 GN=queE PE=3 SV=1
MVDFRIVEIFESLQGEGYNTGMPAVFIRFAGCNLNCTWCDTNFRKFTRFTLNDLMTKVSKYKSKNIIITGGEPTMVKALPELLLPLKKAGYFIAIESNGLGKVDPLIDYIALSPKFCYQSRYKKIAQSTANEVRIVAENHPDFIDFCQYIETHIQAKHYYLSPCEKDGVFNMFETIKLLGKINQNRLDNKWFLSVQSHKFANIE

SEQ ID NO: 30378 - protein, 204 aa, unidentified
  source 1..204: note = Gilliamella sp.
  REGION 1..204: note = tr|A0A242PBM0|A0A242PBM0_9GAMM 7-carboxy-7-deazaguanine synthase OS=Gilliamella sp. N-G2; OX = 1970471 GN=queE PE=3 SV=1
MIEYRIVEIFESLQGEGYNTGMPAIFIRFAGCNLNCSWCDTNFRKFQRFTLEQILTKVKQYKSSNIIITGGEPTMVKELSLLLTHLKQAGYYIAIESNGLGKVDPLIDYIALSPKFCYHHRYQKILQSTASEVRIVAEKHIGFIDFCFYIEQQIQAKRYYLSPCETNGEMNMFDTIELLGKINHNRIDNKWMLSLQTHKFANIE

SEQ ID NO: 30379 - protein, 204 aa, unidentified
  source 1..204: note = Gilliamella sp.
  REGION 1..204: note = tr|A0A242P030|A0A242P030_9GAMM 7-carboxy-7-deazaguanine synthase OS=Gilliamella sp. A7; OX = 1970465 GN=queE PE=3 SV=1
MIEYRIVEIFESLQGEGYNTGMPAIFIRFAGCNLNCSWCDTNFRKFQRFTLEQILTKIKQYKSSNIIITGGEPTMVKELSLLLTHLKQAGYYIAIESNGLGKVDPLIDYIALSPKFCYKSRYHKIVQPTASEVRIVAEKQTGFIDFCYYIEQHIQAKRYYLSPCEVNGEMNMFDTIELLGKINHKRIDNKWMLSLQTHKFANIE

SEQ ID NO: 30380 - protein, 210 aa, Gillisia hiemivivida
  REGION 1..210: note = tr|A0A5C6ZQM1|A0A5C6ZQM1_9FLAO 7-carboxy-7-deazaguanine synthase OS=Gillisia hiemivivida; OX = 291190 GN=queE PE=3 SV=1
MITEDTKVLVDKGIMLPLMEEFYTIQGEGFYKGTAAYFIRIGGCDVGCHWCDVKESWDASLHPPTHVGKIVENAVSHSDTVVITGGEPLTWDMTILTETLKAQGCKIHIETSGAYKLTGVWDWICLSPKKIKLPTEEIYEVANELKVIVYNLHDLKFAEEQAALVNKDCILYLQPEWSKRDSVIPVIVDYVMKNPKWKVSLQTHKYLNIP

SEQ ID NO: 30381 - protein, 210 aa, Gillisia limnaea
  REGION 1..210: note = tr|H2BY95|H2BY95_9FLAO 7-carboxy-7-deazaguanine synthase OS=Gillisia limnaea DSM 15749 OX=865937 GN=queE; PE = 3 SV=1
MITKEKQTLVDEGIMLPLMEAFYTIQGEGFHKGTAAYFIRIGGCDVGCHWCDVKESWNADLHPPTAIGEIIENAVEYSKTVVVTGGEPLTWNMDPLTQLLKKQGCQIHIETSGAYKLTGIWDWICLSPKKIKLPTEEIYEVANELKVIVFNAHDLKFAEEQADKVNKDCILYLQPEWSKRDKMIPLIVEYVMKNPRWKVSLQTHKYLNIP

SEQ ID NO: 30382 - protein, 210 aa, Gillisia mitskevichiae
  REGION 1..210: note = tr|A0A495P593|A0A495P593_9FLAO 7-carboxy-7-deazaguanine synthase OS=Gillisia mitskevichiae OX=270921 GN=queE PE=3 SV=1
MITEDTKVLVDKGIMLPLMEEFYTIQGEGFYKGTAAYFIRIGGCDVGCHWCDVKESWDATMHPPTHIGKIVENAVSYSDTIVITGGEPLTWDMTILTETLKTQGCKVHIETSGAYKLTGVWDWICLSPKKMKLPTEEICAVANELKVIVYNAHDLIFAEEQAARVNENCILYLQPEWSKRDKVVPMIVDYVMKNPKWKVSLQTHKYLNIP

SEQ ID NO: 30383 - protein, 213 aa, Gillisia sp.
  REGION 1..213: note = tr|A0A559PJA4|A0A559PJA4_9FLAO 7-carboxy-7-deazaguanine synthase OS=Gillisia sp. Hel_I_86; OX = 1249981 GN=queE PE=3 SV=1
MQAMITEDTKVLVDKGIMLPLMEEFYTIQGEGFYKGTAAYFIRIGGCDVGCHWCDVKESWDASLHPPTHIGKIVENAVSHSDTVVITGGEPLTWDMTILTEALKAKGCKVHIETSGAYKLTGIWDWICLSPKKIKLPTEEIYKVANELKVIVYNQHDLKFAEEQAAKVNKGCILYLQPEWSKRDAVIPMIVDYVMKNPKWKVSLQTHKYLNIP

SEQ ID NO: 30384 - protein, 210 aa, Gillisia sp.
  REGION 1..210: note = tr|A0A1H1PB91|A0A1H1PB91_9FLAO 7-carboxy-7-deazaguanine synthase OS=Gillisia sp. Hel1_33_143 OX=1336796 GN=queE PE=3 SV=1
MITEETKALVDKGIMLPLMEEFYTIQGEGFHKGTAAYFIRIGGCDVGCHWCDVKESWDAGLHPPTHVGEIVEKAIAQSKTIVITGGEPLTWDMTALTNNLKANDCQIHIETSGAYKLSGTWDWICLSPKKIKLPTEEIYPLANELKVIIFNKHDLIFAEEQAAKVSEDCILYLQPEWSNRDKVIPLIVDYVMNNPKWKVSLQTHKYLNIP

SEQ ID NO: 30385 - protein, 192 aa, Gilvibacter sp.
  REGION 1..192: note = tr|A0A1Y0MVH5|A0A1Y0MVH5_9FLAO 7-carboxy-7-deazaguanine synthase OS=Gilvibacter sp. SZ-19; OX = 754429 GN=queE PE=3 SV=1
MEAFYTIQGEGFHKGTAAYFVRIGGCDVGCHWCDVKESWNAELHPPTRTEDIVSEALKHSDTVVVTGGEPLTWNMEPLTSALKERGAKVHIETSGAYNLTGQWDWICLSPKKVKLPLEPIYKEADELKVIVYNKHDLQFAEEQAAKVGEQCILYLQPEWSVRDKVMPLIVDYVMANPKWKVSLQTHKYLNIP

SEQ ID NO: 30386 - protein, 226 aa, unidentified
  source 1..226: note = Gimesia maris
  REGION 1..226: note = tr|A0A3D3RFN2|A0A3D3RFN2_9PLAN 7-carboxy-7-deazaguanine synthase OS=Gimesia maris OX=122; GN = queE PE=3 SV=1
MLISEIFHSPQGEGKWIGVPSIFIRTSGCNLRCWFCDTPYTSWNPEGEKMSVDQILEHITQYDCEHVVVTGGEPMLSHEIESLTQRLHADGKTITIETAGTILSDVHADLMSISPKLSNSIPVKDPEWAHRHDARRDQPTVIHELIKRHPYQIKFVVDRREDIAEIEDYLIRYPEIDRANVYLMPQGITAEMLAERLPWIEEVAARLGCQVTRRMHIELWGNVRGK

SEQ ID NO: 30387 - protein, 226 aa, unidentified
  source 1..226: note = Gimesia maris
  REGION 1..226: note = tr|A6C143|A6C143_9PLAN 7-carboxy-7-deazaguanine synthase OS=Gimesia maris DSM 8797 OX=344747 GN=queE PE=3; SV = 1
MLISEIFHSPQGEGKWIGVPSIFIRTSGCNLRCWFCDTPYTSWNPEGEKMSVDQILEHIAQYDCEHVVVTGGEPMLSHEIESLTQRLHADGKIITIETAGTILSDVHADLMSISPKLSNSIPVDNPEWAHRHDARRDQPTVIHELIKRHPYQIKFVVDRREDIAEIEDYLIRYPEIDRANVYLMPQGITAEMLAERMPWIEEIAAQLGCQVTRRMHIELWGNVRGK

SEQ ID NO: 30388 - protein, 226 aa, unidentified; identical to SEQ ID NO: 30386
  source 1..226: note = Gimesia sp.
  REGION 1..226: note = tr|A0A2D5H2F0|A0A2D5H2F0_9PLAN 7-carboxy-7-deazaguanine synthase OS=Gimesia sp.; OX = 2024833 GN=queE PE=3 SV=1

SEQ ID NO: 30389 - protein, 215 aa, unidentified
  source 1..215: note = Gimesia sp.
  REGION 1..215: note = tr|A0A2E7KDI8|A0A2E7KDI8_9PLAN 7-carboxy-7-deazaguanine synthase OS=Gimesia sp.; OX = 2024833 GN=queE PE=3 SV=1
MSYSIKEIYYTLQGEGANAGRPAVFCRFTGCNLWSGREEDRSKAICKFCDTQFVGVDGIRGGFFSSPDALAEEVDSCWPNTYDSRDGRNKLVVCTGGEPLLQLDEPIIEALHDKGFSVAVETNGTKLPPPGVDWICVSPKANAECVLQKGDELKLVFPQVGGEPSKYEVYNFRRFFLQPMDGEAQEENMKMAIQYCLEHPQWELSIQTHKLIGLP

SEQ ID NO: 30390 - protein, 224 aa, Glaciecola nitratireducens
  REGION 1..224: note = tr|G4QKN7|G4QKN7_GLANF 7-carboxy-7-deazaguanine synthase OS=Glaciecola nitratireducens (strain JCM 12485 / KCTC 12276 / FR1064) OX=1085623 GN=queE PE=3 SV=1
MQNLKVNEVFESLQGEGSFTGVPSIFVRLQGCPVGCSWCDTKHTWEISLEEETTVANVMQQNYESSEWFSATTESLFTLFDTQGYVAKHIVLTGGEPCMYDLTDFTRLAHSKGYSTQIETSGTFEILTSEETWVTVSPKINMQGGYKMRNDALARANEIKHPVAMQKHIDELDLLLASMDQRALPLIYLQPISQQKRATDLAVKTCIQRNWRLSLQMHKYIGLE

SEQ ID NO: 30391 - protein, 224 aa, Glaciecola pallidula
  REGION 1..224: note = tr|K6YCA9|K6YCA9_9ALTE 7-carboxy-7-deazaguanine synthase OS=Glaciecola pallidula DSM 14239 = ACAM 615; OX = 1121922 GN=queE PE=3 SV=1
MKNLKVNEVFESLQGEGSFTGVPSIFVRLQGCPVGCSWCDTKHTWEISLERETTPDTIMQQNEESSQWFSANEDSLFALFDKQGYVAKHIVLTGGEPCMYDLTEFTKQAHSKGFSTQIETSGTFEIHTSKDTWVTVSPKINMQGGYKMRDDALARANEIKHPVAMQKHVDELDLLLASMDQNALPLIYLQPISQQKRATDLAVKTCIQRNWRLSLQMHKFIGLE

SEQ ID NO: 30392 - protein, 241 aa, Glaciecola punicea
  REGION 1..241: note = tr|H5T8R3|H5T8R3_9ALTE 7-carboxy-7-deazaguanine synthase OS=Glaciecola punicea ACAM 611 OX=1121923 GN=queE; PE = 3 SV=1
MTTLLVNEIFETIQGEGSFTGTPSIFVRLQGCPVGCPWCDTKHTWETLPQHQVNSDIIFLKAGDSPSYFSVQSHDLLPLLEKQGYTAKHIVITGGEPCLFDLNEFTTRAHDKGFSTQIETSGTYEVQCHSDTWVTVSPKINMKAGMPILSQAMQRANEIKHPIAMQKHIDELDALLHKENLVNPLKELNDKSQIKATPFQSPMVYLQPISQQERATALAIKTCIERNWRLSVQLHKYIGVE

SEQ ID NO: 30393 - protein, 224 aa, Glaciecola sp.
  REGION 1..224: note = tr|A0A2N1HPY4|A0A2N1HPY4_9ALTE 7-carboxy-7-deazaguanine synthase OS=Glaciecola sp. 33A; OX = 2057807 GN=queE PE=3 SV=1
MKNLKVNEVFESLQGEGSFTGVPSIFVRLQGCPVGCSWCDTKHTWEISLEAETTPDTIMQQSEDSSQWFSANECSLFALFDKQGYVAKHIVLTGGEPCMYDLTEFTKQAHNKGFSTQIETSGTFEILTSKDTWVTVSPKINMQGGYKMRDDALARANEIKHPIAMQKHIDELDSLLASMDQNMLPLIYLQPISQQKRATDLAVKTCIERNWRLSLQMHKFIGLE

SEQ ID NO: 30394 - protein, 224 aa, Glaciecola sp.
  REGION 1..224: note = tr|A0A2Z6U648|A0A2Z6U648_GLASK 7-carboxy-7-deazaguanine synthase OS=Glaciecola sp. (strain KUL10) OX=2161813 GN=queE PE=3 SV=1
MQALKVNEVFQSVQGEGAYTGVPSIFVRLQGCPVGCPWCDTQHTWAIDLAHEKSVQEVMKQDEETQDWFASDAEALFRLFDNCGYTAKHIVITGGEPCMYDLNELTNLAHEKGFSTQIETSGTFEARCHESAWVTLSPKINMPGKFEILDKVLFRANEIKHPIAMQKHVDELDELLTRYTHQPHPLIYLQPISQQKRATDLAVSVCIARNWRLSLQTHKFIGVE

SEQ ID NO: 30395 - protein, 211 aa, Glaciimonas sp.
  REGION 1..211: note = tr|A0A2T6F0C5|A0A2T6F0C5_9BURK 7-carboxy-7-deazaguanine synthase OS=Glaciimonas sp. PCH181 OX=2133943 GN=queE PE=3 SV=1
MTYSIKEIFYTLQGEGTHAGRPAVFCRFSGCNLWTGREEDRSKAICQFCDTDFVGTDGEGGGKFKTADALAETINALWPTTYTDSKFVVFTGGEPLLQLDTALIASMHAAGFEIAIETNGTIEVPAGVDWICVSPKMGSVLKVFKGNELKVVIPQLGQSLATYETLDFDHFYLQAMDGPLLADNLARAIETCKRNPKWKLSLQTHKLLQIP

SEQ ID NO: 30396 - protein, 204 aa, unidentified
  source 1..204: note = Glaesserella parasuis
  REGION 1..204: note = tr|U4SGU7|U4SGU7_HAEPR 7-carboxy-7-deazaguanine synthase OS=Glaesserella parasuis D74 OX=1275971 GN=queE; PE = 3 SV=1
MKNPEYRIVEIFETLQGEGFNTGMPSIFIRFGKCNLACPWCDTNYNQYETKTLADIMQVVKGFSAKNIIITGGEPTIQPDLTYLLDTLKAEGYFIAIETNGLKPVPPQIDYIATSPKRLYQKNYLKHHIPFANEVRIVVDGDVLAFCEQIESTIKAERYYLSPCEENGVMNMLETITQLGKLNQRPNKPRWQLSIQTHKMAGIE

SEQ ID NO: 30397 - protein, 204 aa, unidentified; identical to SEQ ID NO: 30396
  source 1..204: note = Glaesserella parasuis
  REGION 1..204: note = tr|A0A017QLK6|A0A017QLK6_HAEPR 7-carboxy-7-deazaguanine synthase OS=Glaesserella parasuis str. Nagasaki OX=1117322 GN=queE PE=3 SV=1

SEQ ID NO: 30398 - protein, 204 aa, unidentified
  source 1..204: note = Glaesserella sp.
  REGION 1..204: note = tr|A0A328C070|A0A328C070_9PAST 7-carboxy-7-deazaguanine synthase OS=Glaesserella sp. HHC-2018 OX=2094024 GN=queE PE=3 SV=1
MLNTEYRIVEIFETLQGEGFNTGMPSIFIRFGKCNLACPWCDTNYNQYQSKTLGEIMQIVRGFRARNIIITGGEPTIQPNLERLLDQLKSEGYFIAIETNGLKPVPLQIDYIATSPKRLYQKNYLKHHIPFAHEVRIVVDGDVSAFCEQIEQTIKADRYYLSPCEKNGKINMLETITQLGLLNQRKDKPRWQLSIQTHKIAGIA

SEQ ID NO: 30399 - protein, 214 aa, unidentified
  source 1..214: note = Gloeobacter kilaueensis
  REGION 1..214: note = tr|U5QCB9|U5QCB9_9CYAN 7-carboxy-7-deazaguanine synthase OS=Gloeobacter kilaueensis JS1 OX=1183438 GN=queE; PE = 3 SV=1
MNTSTTPILSTATQSLLVQECFGPTIQGEGYWAGTLVDFIRLYGCPVGCPWCDTGYAGGGSHLPCERRTIGELVAALQSPRTVISGGEPFLHAGIVALVEAIGKSGRAVSIETSGAFYQPVADWAWVTLSPKQHLSPRYPVRPEIWQRANEVKIVISTGEEVEYYRPYLLPGVPVSLQPEWEERERTLPLTLSLLRNYPRYRLSVQLHKYIQVP

SEQ ID NO: 30400 - protein, 214 aa, unidentified
  source 1..214: note = Gloeobacter violaceus
  REGION 1..214: note = sp|Q7NCE3|QUEE_GLOVI 7-carboxy-7-deazaguanine synthase OS=Gloeobacter violaceus (strain ATCC 29082 / PCC 7421) OX=251221 GN=queE PE=3 SV=1
MNAASTVVKPVSAQSIPVQETFGPTIQGEGYWAGAVVDFIRLYGCPVGCPWCDTGYADGGPQLPRAVRTFSDLILELKSPRVVISGGEPFIHAALPALVEAIGRTGRAVAIETSGAFWQPVPDWAWVTLSPKEHVSPRHPVNPQMWRRANEVKIVIAGGAELDVYRRFLPPGVPVSLQPEWEARERTLPLTLELLKAHPRYRLSVQLHKYLQVP

SEQ ID NO: 30401 - protein, 265 aa, Gloeocapsa sp.
  REGION 1..265: note = tr|K9XHU6|K9XHU6_9CHRO 7-carboxy-7-deazaguanine synthase OS=Gloeocapsa sp. PCC 7428 OX=1173026 GN=queE; PE = 3 SV=1
MSVTTAETTTARLVEVFSAIQGEGLNVGTRQIFIRFALCDLRCHFCDSAHTWRVPRTYRVERSPGSRDFETYDNPVSLDLLLKWVQQLNVPGLHDSISLTGGEPLLHSAFLLQFLPQVQKRTGLPIYLETGGHRPQQLAMVLPHLNSVGMDLKLPSVSGESYWQEHAEFLQRCNKSGVEVFAKVIVSAETDSAELHQAAELVADVNPEIVLFLQPVTLLESAQRHSQANFSAPTPAQVLTWQAEMKRSLKHVRVVPQTHKMLNQL

SEQ ID NO: 30402 - protein, 199 aa, Gloeocapsa sp.
  REGION 1..199: note = tr|L8LLT0|L8LLT0_9CHRO 7-carboxy-7-deazaguanine synthase OS=Gloeocapsa sp. PCC 73106 OX=102232 GN=queE; PE = 3 SV=1
MIITYPIVETFHSLQGEGYWTGVSAFFIRLGGCDVHCPWCDQKESWSQSNHPRLSCQVLSKQVIETQPSIIIITGGEPLMHDLGPLTQELSATEIPIHLETSGAYPLSGRFDWITFSPKPYKLPDESIYPLVKELKVVISTPEDLEWAEIHAHKVPPGAIKYLQPEWYSKKTQKLVYNHVLKHPQWRVSLQTHKFIGVR

SEQ ID NO: 30403 - protein, 251 aa, unidentified
  source 1..251: note = Gloeomargarita lithophora
  REGION 1..251: note = tr|A0A1J0AFH0|A0A1J0AFH0_9CYAN 7-carboxy-7-deazaguanine synthase OS=Gloeomargarita lithophora Alchichica-D10 OX=1188229 GN=queE PE=3 SV=1
MNQKANLVEIFAAIQGEGSYLGERQIFLRLGGCDLRCRFCDSPHTWQTKPHARVEVTAGERDFQPVTNPVTRAQILAWLHRQAQGGRHQAISITGGEPLLQANFLAALLPELTAQIPLPIYLETGGHRPQELAQVLPWVSIIAMDYKLPSVSGESQHRAHQEFLTQAIGTGVELFVKIILDQHTQTSELAAALAMIQAIAPEILVILQPVTPRPTSPAPTPAQVLGWQKLAQDYMQKVRVIPQTHPFLGQL

SEQ ID NO: 30404 - protein, 210 aa, unidentified
  source 1..210: note = Gloeothece citriformis
  REGION 1..210: note = tr|B7K7J6|B7K7J6_GLOC7 7-carboxy-7-deazaguanine synthase OS=Gloeothece citriformis (strain PCC 7424); OX = 65393 GN=queE PE=3 SV=1
MLTYFMKTVDLTNCTYPIVETFHSVQGEGAWTGVSAFFIRLGGCDVYCPWCDQKESWNAKRHPHQSVDTLAQAAKMANPAIVIITGGEPLMHDLDPLTTELKKLGLQVHLETSGSHPFSGNFDWVTFSPKPYKKPHDSIYNYVNELKVVVANEEDLHMAEVQAAKLSLTVIKYLQPEWNTPNSKELIFDFVLKHPQWRISLQTHKFLNVR

SEQ ID NO: 30405 - protein, 205 aa, unidentified
  source 1..205: note = Gloeothece verrucosa
  REGION 1..205: note = tr|E0UJP9|E0UJP9_GLOV7 7-carboxy-7-deazaguanine synthase OS=Gloeothece verrucosa (strain PCC 7822); OX = 497965 GN=queE PE=3 SV=1
MKTVNLTHCTYPIVETFHSIQGEGAWTGVSAFFIRLGGCDVYCPWCDQKESWNPKRHPHQSVENLLESAKMANPAIVVITGGEPLMHDLIPLTRELQLLGLRVHLETSGSHPFSGNFHWVTFSPKPYKRPHESIYEQVNELKVVIANEEDLHWAQRQAAKLPSTVVKYLQPEWNTPNSGALIFEFVLKHPQWRMSLQTHKFLNVR

SEQ ID NO: 30406 - protein, 211 aa, Gluconacetobacter diazotrophicus
  REGION 1..211: note = tr|A9HRF4|A9HRF4_GLUDA 7-carboxy-7-deazaguanine synthase OS=Gluconacetobacter diazotrophicus (strain ATCC 49037 / DSM 5601 / PAl5) OX=272568 GN=queE PE=3 SV=1
MSYAIKEMFATLQGEGAHAGRAAVFCRFAGCNLWSGREADRATAVCRFCDTDFVGTDGTGGGRFADASSLADAIAATWEAPGREHAFVVFTGGEPLLQLDDALIGAVHERGFEIAVETNGTLPVPPGVDWICVSPKAGADLVQRTGHELKLVYPQPDLLPERVAGLDFRQFWLQPMDGPAQAANTAAAVAYCRAHPRWRLSLQTHKLIGIP

SEQ ID NO: 30407 - protein, 211 aa, Gluconacetobacter entanii
  REGION 1..211: note = tr|A0A318PTJ7|A0A318PTJ7_9PROT 7-carboxy-7-deazaguanine synthase OS=Gluconacetobacter entanii OX=108528 GN=queE PE=3 SV=1
MSYTVKEIFPTLQGEGGQSGRAAVFCRFAGCNLWSGREEDRSDAACRFCDTDFIGTDGEGGGRFADAAALADAIAAAWPAPSRAGAFVVFTGGEPLLQLDAALIDAMHARGFFIAVETNGTVAAPDGIDWICVSPKAGTTLVQASGQELKLVFPQPGLMPEQVAGLEFTQFWLQPMDGPDRVANTARAVEYCMAHPQWRLSLQTHKLIGIP

SEQ ID NO: 30408 - protein, 211 aa, Gluconacetobacter liquefaciens
  REGION 1..211: note = tr|A0A370G2K4|A0A370G2K4_GLULI 7-carboxy-7-deazaguanine synthase OS=Gluconacetobacter liquefaciens OX=89584 GN=queE PE=3 SV=1
MAYMIKEMFATLQGEGAHAGRAAVFCRFAGCNLWSGREADRADATCRFCDTDFVGTDGEGGGRFADADALADAIAATWAAPDMDHAFVVFTGGEPLLQLDAPLIAAVHARGFEIAIETNGTLPAPEGIDWICVSPKADAPLVQRTGHELKLVYPQPERLPETVADLDFQQFWLQPMDGPDQARNTAQAVAYCRTHPRWRLSLQTHKLIGIP

SEQ ID NO: 30409 - protein, 211 aa, Gluconacetobacter sp.
  REGION 1..211: note = tr|F3SDH7|F3SDH7_9PROT 7-carboxy-7-deazaguanine synthase OS=Gluconacetobacter sp. SXCC-1 OX=1004836; GN = queE PE=3 SV=1
MSYTVKEIFPTLQGEGAHAGRTAVFCRFTGCNLWSGLERDRARATCRFCDTDFIGTDGAGGGRFASASLLADAIAAHWPAPDRKAAFVVFTGGEPLLQLDDALITAVHARGFEIAVETNGTLRAPGGIDWICVSPKAGAPLVQTSGHELKLVYPQPDLLPGQVAGLDFSQFWLQPMDNAARDHNTRAAVDYCLHHPQWRLSLQTHKLIGIP

SEQ ID NO: 30410 - protein, 213 aa, Gluconobacter albidus
  REGION 1..213: note = tr|A0A1U9KVL9|A0A1U9KVL9_9PROT 7-carboxy-7-deazaguanine synthase OS=Gluconobacter albidus; OX = 318683 GN=queE PE=3 SV=1
MSYAVKEMFVTLQGEGAQTGRASVFCRFAGCNLWSGREQDRAMAACTFCDTDFIGTNGEGGGRFETAEALAATIAACWTGIADESGRRYVVFTGGEPLLQLDDALIAAVKAQGFEIAVETNGTIAAPAGIDWVCVSPKPSSTLVQTDGAELKLIYPQPDLPPELFEKLSFRHFWLQPMDGPDRIANTQAAVAYCLRHPRWRLSLQTHKLIGIP

SEQ ID NO: 30411 - protein, 213 aa, Gluconobacter albidus
  REGION 1..213: note = tr|A0A149TGZ1|A0A149TGZ1_9PROT 7-carboxy-7-deazaguanine synthase OS=Gluconobacter albidus; OX = 318683 GN=queE PE=3 SV=1
MSYAVKEMFVTLQGEGAQTGRASVFCRFAGCNLWSGREQDRATAACTFCDTDFIGTNGEGGGRFDTAEALAATIAACWTGTADESGRRYVVFTGGEPLLQLDDALIAAVKAQGFEIAVETNGTIAAPAGIDWVCVSPKPSSTLVQTDGAELKLIYPQPDLPPELFEKLSFRHFWLQPMDGPDRIANTQAAVAYCLRHPRWRLSLQTHKLIGIP

SEQ ID NO: 30412 - protein, 213 aa, Gluconobacter cerinus
  REGION 1..213: note = tr|A0A1B6VLK7|A0A1B6VLK7_9PROT 7-carboxy-7-deazaguanine synthase OS=Gluconobacter cerinus; OX = 38307 GN=queE PE=3 SV=1
MSYAVKEMFVTLQGEGAQTGRASVFCRFAGCNLWSGREQDRETAACRFCDTDFIGTDGEGGGRFQDAATLADTIEQCWQSVADASGHRYVVFTGGEPLLQLNAELIAAVKARGFEIAVETNGTIAAPDGIDWICVSPKPGGALVQKNGSELKLVYPQIELPPELFDTLSFQHFWLQPMDGPNRLENTQAAVAYCLAHPRWRLSLQTHKMIGIP

SEQ ID NO: 30413 - protein, 213 aa, Gluconobacter frateurii
  REGION 1..213: note = tr|A0A0D6PLU4|A0A0D6PLU4_9PROT 7-carboxy-7-deazaguanine synthase OS=Gluconobacter frateurii M-2 OX=1231354 GN=queE PE=3 SV=1
MSYAVKEMFVTLQGEGAQTGRASVFCRFAGCNLWSGREQDRETAACRFCDTDFIGVDGEGGGRFKTASELAETIEQCWKNAADESGRRYVVFTGGEPLLQLDAELIAAVKANGFEIAVETNGTITAPAGIDWVCVSPKPGGPLVQTSGAELKLVYPQTELPPEMFDGLSFQHFWLQPMDGLARLENTQAAVAYCLAHPRWRLSLQTHKLIGIP

SEQ ID NO: 30414 - protein, 213 aa, Gluconobacter frateurii
  REGION 1..213: note = tr|A0A0K8N494|A0A0K8N494_9PROT 7-carboxy-7-deazaguanine synthase OS=Gluconobacter frateurii NBRC 101659 OX=1104996 GN=queE PE=3 SV=1
MSYAVKEMFVTLQGEGAQTGRASVFCRFAGCNLWSGREQDRETAACRFCDTDFIGVDGEGGGRFKTAADLAETIEQCWKSAADESGRRYVVFTGGEPLLQLDAELIAAVKANGFEIAVETNGTIAAPDGIDWVCVSPKPGGPLVQTSGAELKLVYPQTELLPEMFDSLSFQHFWLQPMDGPARLENTQAAVAYCLTHPRWRLSLQTHKLIGIP

SEQ ID NO: 30415 - protein, 213 aa, Gluconobacter japonicus
  REGION 1..213: note = tr|A0A149TM51|A0A149TM51_GLUJA 7-carboxy-7-deazaguanine synthase OS=Gluconobacter japonicus OX=376620 GN=queE PE=3 SV=1
MSYAVKEMFVTLQGEGAQTGRASVFCRFAGCNLWSGREQDRETAACRFCDTDFIGVDGEGGGRFKTAAELAETIEQCWKSAADESGRRYVVFTGGEPLLQLDAELIAAVKANGFEIAVETNGTIAAPDGIDWVCVSPKPDGPLVQTRGAELKLVYPQTELPPEMFEDLSFQHFWLQPMDGPARLENTQAAVAYCLAHPRWRLSLQTHKLIGIP

SEQ ID NO: 30416 - protein, 213 aa, Gluconobacter japonicus
  REGION 1..213: note = tr|A0A149SG22|A0A149SG22_GLUJA 7-carboxy-7-deazaguanine synthase OS=Gluconobacter japonicus OX=376620 GN=queE PE=3 SV=1
MSYAVKEMFVTLQGEGAQTGRASVFCRFAGCNLWSGREQDRETAACRFCDTDFIGVDGEGGGRFKTAADLAETIEQCWKSAADESGRRYVVFTGGEPLLQLDAELIAAVKANGFEIAVETNGTIAAPDGIDWVCVSPKPGGPLVQTSGAELKLVYPQTELPPEMFDSLSFQHFWLQPMDGPARLENTQAAVAYCLAHPRWRLSLQTHKLIGIP

SEQ ID NO: 30417 - protein, 213 aa, Gluconobacter kanchanaburiensis
  REGION 1..213: note = tr|A0A511B8L9|A0A511B8L9_9PROT 7-carboxy-7-deazaguanine synthase OS=Gluconobacter kanchanaburiensis NBRC 103587 OX=1307948 GN=queE PE=3 SV=1
MSYAVKEMFVTLQGEGAQTGRASVFCRFAGCNLWSGREQDRATAACTFCDTDFIGTNGEGGGRFDTAEALAHTIAACWTDTADESGRRYVVFTGGEPLLQLDDALIAAVKAQGFEIAVETNGTIAAPAGIDWVCVSPKPNSTLVQTEGAELKLVYPQPELPPELFEQFSFRHFWLQPMDGPDRIANTQAAVAYCLRHPRWRLSLQTHKLIGIP

SEQ ID NO: 30418 - protein, 209 aa, unidentified
  source 1..209: note = Gluconobacter morbifer
  REGION 1..209: note = tr|G6XFJ7|G6XFJ7_9PROT 7-carboxy-7-deazaguanine synthase OS=Gluconobacter morbifer G707 OX=1088869 GN=queE; PE = 3 SV=1
MKEMFATLQGEGAQTGRASVFCRFAGCNLWSGREQDRATAACRFCDTDFIGTDGEGGARFGTAEALADAIETCWTDAADESGRRYVVFTGGEPLLQLDAPLIAAVRARRFEIAVETNGTIAAPDGIDWICVSPKPGGPLVQTSGSELKLVHPQTELPPEMFTALDFRHFWLQPMDGPARADNTQAAVAYCLKHPQWRLSLQTHKMIGIP

SEQ ID NO: 30419 - protein, 213 aa, Gluconobacter oxydans; identical to SEQ ID NO: 30413
  REGION 1..213: note = tr|K7SJ41|K7SJ41_GLUOY 7-carboxy-7-deazaguanine synthase OS=Gluconobacter oxydans H24 OX=1224746 GN=queE; PE = 3 SV=1

SEQ ID NO: 30420 - protein, 213 aa, Gluconobacter oxydans
  REGION 1..213: note = tr|Q5FQR1|Q5FQR1_GLUOX 7-carboxy-7-deazaguanine synthase OS=Gluconobacter oxydans (strain 621H) OX=290633; GN = queE PE=3 SV=1
MSYAVKEMFVTLQGEGAQTGRASVFCRFAGCNLWSGREQDRATAACSFCDTDFIGTDGEGGGRFETADALADTIAACWTSTADESGRRYVVFTGGEPLLQLDDALIAAVKARGFEIAVETNGTIAAPAGIDWVCVSPKPGGALVQTEGAELKLVYPQPELPPEMFEKLSFRHFWLQPMDGPDRIANTEAAVAHCLRHPRWRLSLQTHKLIGIP

SEQ ID NO: 30421 - protein, 213 aa, Gluconobacter roseus
  REGION 1..213: note = tr|A0A4Y3M5N2|A0A4Y3M5N2_9PROT 7-carboxy-7-deazaguanine synthase OS=Gluconobacter roseus NBRC 3990 OX=1307950 GN=queE PE=3 SV=1
MSYAVKEMFVTLQGEGAQTGRASVFCRFAGCNLWSGREQDRATAACTFCDTDFIGTDGEGGGRFETAEALADTIAACWTGTADDSGRRYVVFTGGEPLLQLDDALIAAVKARGFEIAVETNGTIAAPAGIDWVCVSPKPGGTLVQTEGAELKLVYPQPELPPELFEQLSFRHFWLQPMDGPDRIANTQAAVAYCLRHPRWRLSLQTHKLIGIP

SEQ ID NO: 30422 - protein, 213 aa, Gluconobacter sp.
  REGION 1..213: note = tr|A0A252BML8|A0A252BML8_9PROT 7-carboxy-7-deazaguanine synthase OS=Gluconobacter sp. DsW_058 OX=1511210 GN=queE PE=3 SV=1
MSYAVKEMFVTLQGEGAQTGRASVFCRFAGCNLWSGREQDRETAACRFCDTDFIGTDGEGGGRFQDAATLADTIEQCWQSVADASGRRYVVFTGGEPLLQLDAELIAAVKARGFEIAVETNGTIVAPDGIDWICVSPKPGGAMVQKNGSELKLVYPQIELPPELFDTLSFQHFWLQPMDGPNRLENTQAAVAYCLAHPRWRLSLQTHKMIGIP

SEQ ID NO: 30423 - protein, 213 aa, Gluconobacter sphaericus
  REGION 1..213: note = tr|A0A4Y3Q8D3|A0A4Y3Q8D3_9PROT 7-carboxy-7-deazaguanine synthase OS=Gluconobacter sphaericus NBRC 12467 OX=1307951 GN=queE PE=3 SV=1
MSYAVKEMFVTLQGEGAQTGRASVFCRFAGCNLWSGREQDRATASCTFCDTDFIGTDGEGGGRFETAEALASTIEFCWTGTADDSGRRYVVFTGGEPLLQLDDALITAVKARGFEIAVETNGTIAAPAGIDWVCVSPKPGGAIVQDEGAELKLVYPQPELPPELFEQLAFRYFWLQPMDGPDRIANTQAAVAYCLRHPRWRLSLQTHKLIGIP

SEQ ID NO: 30424 - protein, 213 aa, Gluconobacter thailandicus; identical to SEQ ID NO: 30413
  REGION 1..213: note = tr|M9LWC8|M9LWC8_GLUTH 7-carboxy-7-deazaguanine synthase OS=Gluconobacter thailandicus NBRC 3255; OX = 1291534 GN=queE PE=3 SV=1

SEQ ID NO: 30425 - protein, 213 aa, Gluconobacter thailandicus
  REGION 1..213: note = tr|A0A149SLZ6|A0A149SLZ6_GLUTH 7-carboxy-7-deazaguanine synthase OS=Gluconobacter thailandicus OX=257438 GN=queE PE=3 SV=1
MSYAVKEMFVTLQGEGAQTGRASVFCRFAGCNLWSGREQDRETAACRFCDTDFIGVDGEGGGRFKTASELAETIEQCWKNAADESGRRYVVFTGGEPLLQLDAELIAAVKATGFEIAVETNGTITAPAGIDWVCVSPKPGGPLVQTSGAELKLVYPQTELPPEMFDGLSFQHFWLQPMDGAARVENTQAAVAYCLAHPRWRLSLQTHKLIGIP

SEQ ID NO: 30426 - protein, 213 aa, Gluconobacter wancherniae
  REGION 1..213: note = tr|A0A511B3P3|A0A511B3P3_9PROT 7-carboxy-7-deazaguanine synthase OS=Gluconobacter wancherniae NBRC 103581 OX=656744 GN=queE PE=3 SV=1
MSYAVKEMFVTLQGEGAQTGRASVFCRFAGCNLWSGRESDRATAACQFCDTDFIGTDGEGGGRFETATLLAETIEACWNSRADSSGRRYVVFTGGEPLLQLDPALIDAVSKRGFEIAVETNGTIKAPEGIDWICVSPKPGGKLIQNTGSELKLVYPQTELPPEMFKELTFEHFWLQPMDGPERLENTQASVAYCLEHPQWRLSLQTHKMIGIP

SEQ ID NO: 30427 - protein, 213 aa, unidentified
  source 1..213: note = Glycocaulis alkaliphilus
  REGION 1..213: note = tr|A0A3T0E7V3|A0A3T0E7V3_9RHOB 7-carboxy-7-deazaguanine synthase OS=Glycocaulis alkaliphilus OX=1434191 GN=queE PE=3 SV=1
MGRRMSYAVKETFLTVQGEGGQAGRVAVFLRFAGCNLWSGLERDRAKAVCQFCDTDFVGTDGPGGGKFASAESLAAHVKSYWPGGGKPLVVCTGGEPLLQLDEAAIAALKAAGFEIAVETNGTIEAPEGLDWICVSPKSTAPLKQRSGHELKLVYPQADAMPGLFENLDFGAFRLQPMDGPHQMENAKAAFEYCLTHPQWSLSLQTHKWIGVD

SEQ ID NO: 30428 - protein, 209 aa, unidentified
  source 1..209: note = Glycocaulis sp.
  REGION 1..209: note = tr|A0A550JZV3|A0A550JZV3_9RHOB 7-carboxy-7-deazaguanine synthase OS=Glycocaulis sp. ZYF765 OX=2518983 GN=queE PE=3 SV=1
MTYSVKEMFLTVQGEGGQAGHPAVFIRFAGCNLWSGLERDRAAAVCTFCDTDFVGTDGANGGKFREPEALAKAAFALWPGGGEPLAVCTGGEPLLQLDAPLIAALHAAGFRIAVETNGTLQAPEGLDWICVSPKSTAPLKQTSGHELKLVFPQPEAMPELFEHLDFQEFRLQPMDGPDQMANAQAAFEYCLKHPKWRLSLQTHKWIGAP

SEQ ID NO: 30429 - protein, 210 aa, Gordonia paraffinivorans
  REGION 1..210: note = tr|M3VGN2|M3VGN2_9ACTN 7-carboxy-7-deazaguanine synthase OS=Gordonia paraffinivorans NBRC 108238; OX = 1223543 GN=queE PE=3 SV=1
MTYKVKEIFYTLQGEGTHAGRPAVFCRFASCNLWTGREKDRARAICQFCDTDFVGTDGPGGGKFATADELADAVLSHWVADGGERMVVCTGGEPLLQLDKELVEAFHAREFYVAVETNGTILPPPGVDWLCVSPKAGAPLAVQGGDELKLVYPQRDLSPTEFESLEFPSLKLQPLDDDNRVANTAAAVKYCLDHPRWQLSLQTHKMLGIP

SEQ ID NO: 30430 - protein, 213 aa, Gordonia polyisoprenivorans
  REGION 1..213: note = tr|H0RJ64|H0RJ64_9ACTN 7-carboxy-7-deazaguanine synthase OS=Gordonia polyisoprenivorans NBRC 16320 = JCM 10675 OX=1077976 GN=queE PE=3 SV=1
MPYQVKEIFYTLQGEGQNTGRPAVFCRFSGCNLWNGREHGRKDAICRFCDTDFVGTNGDGGGVFASADILVDAVAATWQGASHPRAARFVVCTGGEPLLQLDAPLVEGLHAAGFEVAVETNGTRSTVPGLDWVCVSPKGGTDLAITSGNELKLVFPQDGVDPARFESLGFDRLWLQPMDGPDVEQNTALAVRYCLENPQWRLSIQTHKHIGIR

SEQ ID NO: 30431 - protein, 213 aa, Gordonia sp.
  REGION 1..213: note = tr|A0A1V4Q3Q0|A0A1V4Q3Q0_9ACTN 7-carboxy-7-deazaguanine synthase OS=Gordonia sp. i37; OX = 1961707 GN=queE PE=3 SV=1
MPYQVKEIFYTLQGEGQNTGRPAVFCRFSDCNLWNGREHGRKDAICRFCDTDFVGTDGDGGGVFASADILVDAVAATWQGASHPRAARFVVCTGGEPLLQLDAPLVEGLHAAGFEVAVETNGTRSTVPGLDWVCVSPKGGTDLAITSGNELKLVFPQDGVDPARFESLGFDRLWLQPMDGPDVEQNTALAVRYCLENPQWRLSIQTHKHIGIR

SEQ ID NO: 30432 - protein, 221 aa, unidentified
  source 1..221: note = Gottschalkia acidurici
  REGION 1..221: note = tr|K0B342|K0B342_GOTA9 7-carboxy-7-deazaguanine synthase OS=Gottschalkia acidurici (strain ATCC 7906 / DSM 604 / BCRC 14475 / CIP 104303 / NCIMB 10678 / 9a) OX=11283 98 GN=queE PE=3 SV=1
MYRVVEKFISINGEGKLSGQLALFIRFAECNLNCRYCDTQWANKSDVKYEIMTKEEIYNYIKQTKVKNVTLTGGEPLIQKDIYELLEYLSKDNDISIEIETNGSISLKRFQDIKINQLRFTMDYKLPYSNMENEMLLENFEYLKEKDVVKFVAGSMEDLEKAKLIIEQFDLTKKTNVYISGVYENIDAKDIVEFIKENNMNDVTFQLQLHKFIWDPNQKGV

SEQ ID NO: 30433 - protein, 254 aa, Gracilibacillus boraciitolerans
  REGION 1..254: note = tr|W4VQG6|W4VQG6_9BACI 7-carboxy-7-deazaguanine synthase OS=Gracilibacillus boraciitolerans JCM 21714; OX = 1298598 GN=queE PE=3 SV=1
MSKIPVLEIFGPTIQGEGMVVGRKTMFVRTAGCDYSCAWCDSAFTWDGSAKDEIVKMESDEIFTKLKEIGGNQFDHVTVSGGNPPALLKHLDGLIHLLHEHNMEVALETQGSRWQEWFLDVDDLTLSPKPPSSKMKTNWTILDEIIDLLIINNRLAHTSLKIVVFDEKDLQYAEKVHQRYPAVPFFLQVGNDDLQENQPSHLAGHLLEKYEWLIDKVMSNSQLNHVRVLPQVHALVWGGNKRGGFDYVNPPLIS

SEQ ID NO: 30434 - protein, 243 aa, Gracilibacillus dipsosauri
  REGION 1..243: note = tr|A0A317L1V5|A0A317L1V5_9BACI 7-carboxy-7-deazaguanine synthase OS=Gracilibacillus dipsosauri OX=178340 GN=queE PE=3 SV=1
MSKIPVLEIFGPTIQGEGMVVGRKTMFVRTAGCDYQCSWCDSAFTWDGSAKEEIRQMTADEIMDGLHQIGKDCFDHVTISGGNPALLASIGELVALLNQKGIEIALETQGSRWQDWMKDIDDLTISPKPPSSGMKTNFEILDQIIEKLTNSQKSTGLLSLKIVIFEEDDFEYAIGIHERYRNIPLFLQVGNDDTMCQSDQQLALMLLEKYEWLINKTTSSSKLNNVRVLPQLHTLVWGNKRGY

SEQ ID NO: 30435 - protein, 242 aa, Gracilibacillus halophilus
  REGION 1..242: note = tr|N4WJJ5|N4WJJ5_9BACI 7-carboxy-7-deazaguanine synthase OS=Gracilibacillus halophilus YIM-C55.5; OX = 1308866 GN=queE PE=3 SV=1
MNKFPILEIFGPTIQGEGMVVGRKTMFVRTAGCDYSCAWCDSAFTWDGSAKDEIVKMTAQDIMEQLYQKGGDRFDHVTISGGNPALLKGLNELIDALHERNIEVALETQGSRWQNWFTAIDDLTISPKPPSSKMKTNWKVLDEIIETLISQQRKHHTSIKVVVFDEEDLAYAEMVHQRYPDISFYVQVGNDDVNEERPSNLASHLLDKYEWLIDQVVASKSLNHVRVLPQVHALVWGNKRGV

SEQ ID NO: 30436 - protein, 242 aa, Gracilibacillus kekensis
  REGION 1..242: note = tr|A0A1M7IER1|A0A1M7IER1_9BACI 7-carboxy-7-deazaguanine synthase OS=Gracilibacillus kekensis OX=1027249 GN=queE PE=3 SV=1
MNKIPVLEIFGPTIQGEGMVVGRKTMFVRTAGCDYSCAWCDSPFTWNGSAKDDIVKMSADQIYLRLKEIGGNQFDHVTISGGNPALLKYLGELIDTLHEHKIEVALETQGSRWQDWFVKIDDLTISPKPPSSKMKTNWQVLDDIIDKLITNKRLSNTSLKVVVFNNEDLQFAEKVHQRYPSVPFFLQVGNDDLEEHKPRDLASHLLEKYEWLIDKVMANSALNHVRVLPQVHALVWGNKRGV

SEQ ID NO: 30437 - protein, 242 aa, Gracilibacillus orientalis
  REGION 1..242: note = tr|A0A1I4GYK4|A0A1I4GYK4_9BACI 7-carboxy-7-deazaguanine synthase OS=Gracilibacillus orientalis OX=334253 GN=queE PE=3 SV=1
MNKLPILEIFGPTIQGEGMVIGRKTMFVRTAGCDYSCAWCDSSFTWDGSAKEDIVKMTSVEIFERLKEAGGDKFDHVTISGGNPALLKHIGELIDILHSNDMEVALETQGSRWQDWFLEVDDLTISPKPPSSKMKTNWMMLDDIIAQLEKHGRLTQTSLKVVIFDDHDLDYAKNVHQRYPGVPFFLQVGNDDLEEVAPNELASHLLTKYEWLIDQVMNSSALNDVRVLPQIHTLVWGNKRGV

SEQ ID NO: 30438 - protein, 239 aa, Gracilibacillus ureilyticus
  REGION 1..239: note = tr|A0A1H9P7X8|A0A1H9P7X8_9BACI 7-carboxy-7-deazaguanine synthase OS=Gracilibacillus ureilyticus OX=531814 GN=queE PE=3 SV=1
MNNRIPVLEIFGPTIQGEGMVIGRKTMFVRTAGCDYSCTWCDSAFTWDGSTKEEIRQMETEEVLAELKQIGGEYFDHVTISGGNPALFTSVNELIDLLHHHHIEVALETQGSRWQDWFLKVDDLTISPKPPSSGMETDWSVLHNIINRLKENNISLKVVIFSRGDLAYAEKVHQRFPGIPFYLQVGNDDIIEKNPDQLALYLLEKYHWLIDQVVASKTLNQVHVLPQLHALVWGNKRGV

SEQ ID NO: 30439 - protein, 216 aa, unidentified
  source 1..216: note = Gracilimonas mengyeensis
  REGION 1..216: note = tr|A0A521ARL4|A0A521ARL4_9BACT 7-carboxy-7-deazaguanine synthase OS=Gracilimonas mengyeensis OX=1302730 GN=queE PE=3 SV=1
MFKTDEQADLLTDLDQAMETEYPIVEHFYTIQGEGAHTGRASYFIRTAGCDVNCWWCDVKESWEEEGHPKMKVKDLVQLAKESGAPFVVITGGEPLLHDLLPLTLGLKSEGLQVHIETSGSSPLSGQLDWITLSPKRFKKPTEEVFAYVDELKVVVLTNKDLKWAEDNAAKCPDGTRLLLQPEWDTPKSIELIVDYVKENPEWGISLQTHKFLKVP

SEQ ID NO: 30440 - protein, 217 aa, Gracilimonas sp.
  REGION 1..217: note = tr|A0A316TR29|A0A316TR29_9BACT 7-carboxy-7-deazaguanine synthase OS=Gracilimonas sp. 8A47; OX = 2079485 GN=queE PE=3 SV=1
MYSTEEQTTRTTGEVTELDQVEYPLMEDFYTIQGEGAHTGSAAYFIRLAGCDVKCWWCDVKDSWDESKHPRVKTGDIVKRAKESGTRLAVITGGEPLLHNLEPLTIRLRQEGFSVHIETSGSSPLSGHLDWITLSPKRFKEPLDEVFPYVDELKVVVLKKKDLEWAEKNAVKCPKGTRLLLQPEWETPESVNLIVEYVKKNPRWGISLQTHKFMNVP

SEQ ID NO: 30441 - protein, 210 aa, unidentified
  source 1..210: note = Gramella flava
  REGION 1..210: note = tr|A0A1L7I2L4|A0A1L7I2L4_9FLAO 7-carboxy-7-deazaguanine synthase OS=Gramella flava JLT2011 OX=1229726 GN=queE PE=3 SV=1
MISEETKELVDKGIMLPLMEEFYTIQGEGYHKGTAAYFIRIGGCDVGCHWCDVKESWDAEVHPPTPIGQIVENATKFSKTIVITGGEPLTWDMTALTSALKKQGCQIHIETSGAYDMTGTWDWVCLSPKKIKLPKPEIYAQANELKVIVFNKHDFQFAEEQAAKVHEDCILYLQPEWSNREKMIPQIVDYVMQNPKWKVSLQTHKYLNIP

SEQ ID NO: 30442 - protein, 210 aa, unidentified
  source 1..210: note = Gramella forsetii
  REGION 1..210: note = tr|A0M511|A0M511_GRAFK 7-carboxy-7-deazaguanine synthase OS=Gramella forsetii (strain KT0803) OX=411154; GN = queE PE=3 SV=1
MISEETKELVDKGVMLPLMEEFYTIQGEGFHKGTAAYFIRIGGCDVGCHWCDVKESWDAEVHPPTRIGQIVENAVKYSKTIVITGGEPLTWDMTELTGSLKKKGCDIHIETSGAYDLTGTWDWICLSPKKIKLPKDKIYPVANELKVIVFNKHDLKFAEEQAAKVGEKCVLYLQPEWSKREEMIPLIVDYVMANPKWKVSLQTHKYLNIP

SEQ ID NO: 30443 - protein, 210 aa, Gramella gaetbulicola
  REGION 1..210: note = tr|A0A2T6AE56|A0A2T6AE56_9FLAO 7-carboxy-7-deazaguanine synthase OS=Gramella gaetbulicola; OX = 703340 GN=queE PE=3 SV=1
MISEETKELVDRGIMLPLMEEFYTIQGEGYHKGTAAYFIRIGGCDVGCHWCDVKESWDAEVHPPTHVGQIVENATKYSKTIVITGGEPLTWDMTELTGNLKNKGCDIHIETSGAYDLTGTWDWICLSPKKIKLPKPEIYPLANELKVIVFNKHDLKFAEEQAALVSDNCILYLQPEWSNREKMIPLIVDYVMKNPKWKVSLQTHKYLNIP

SEQ ID NO: 30444 - protein, 210 aa, unidentified
  source 1..210: note = Gramella jeungdoensis
  REGION 1..210: note = tr|A0A4Y8AUR0|A0A4Y8AUR0_9FLAO 7-carboxy-7-deazaguanine synthase OS=Gramella jeungdoensis; OX = 708091 GN=queE PE=3 SV=1
MINEAIQQQINKGEMLPLMEEFYTIQGEGFHTGKAAYFIRIGGCDVGCHWCDVKESWNAKLHPPTNTDTIVENAKKYANTVVVTGGEPLMWSLDYITTKLQSLNLKTHIETSGAYPLSGKWNWICLSPKKTKLPLNEIYNEAHELKVIISNNHDFKFAEEQAAKVNTNCELYLQPEWSKREKMTPLIVEFVMKNPHWKISLQTHKYLNIP

SEQ ID NO: 30445 - protein, 210 aa, unidentified
  source 1..210: note = Gramella salexigens
  REGION 1..210: note = tr|A0A1L3J7X8|A0A1L3J7X8_9FLAO 7-carboxy-7-deazaguanine synthase OS=Gramella salexigens; OX = 1913577 GN=queE PE=3 SV=1
MISEETKQLVDKGVMLPLMEEFYTIQGEGYHKGTAAYFIRIGGCDVGCHWCDVKESWDAEVHPPTPVGQIVENAVKYSKTIVITGGEPLTWDMTELTGNLKKQGCDIHIETSGAYELTGEWDWICLSPKKIKLPTKEIYPLANELKVIVFNKHDLKFAEEQAAKVSDDCILYLQPEWSNREKMIPLIVDYVMKNPKWKVSLQTHKYLNIP

SEQ ID NO: 30446 - protein, 210 aa, Gramella sp.
  REGION 1..210: note = tr|A0A1H1PBK2|A0A1H1PBK2_9FLAO 7-carboxy-7-deazaguanine synthase OS=Gramella sp. MAR_2010_102 OX=1250231 GN=queE PE=3 SV=1
MISEETKELVDRGIMLPLMEEFYTIQGEGYHKGTAAYFIRIGGCDVGCHWCDVKESWDAEIHPPTHVGQIVENATKFSKTIVITGGEPLTWDMTELTRNLKHKGCDIHIETSGAYDLTGTWDWICLSPKKIKLPKPEIYPLANELKVIVFNKHDLKFAEEQAEKVSDECILYLQPEWSNREKVIPMIVDYVMENPKWKVSLQTHKYLNIP

SEQ ID NO: 30447 - protein, 210 aa, Gramella sp.
  REGION 1..210: note = tr|A0A2R3Z1F3|A0A2R3Z1F3_9FLAO 7-carboxy-7-deazaguanine synthase OS=Gramella sp. SH35; OX = 2126553 GN=queE PE=3 SV=1
MISEETKELVEKGVMLPLMEEFYTIQGEGFHKGTAAYFIRIGGCDVGCHWCDVKESWNADLHPPTPVGKIVENAVKYSDTVVVTGGEPLTWDMTVLTNSLKKKGCKIHIETSGAYDITGIWDWICLSPKKIKLPKPEIYPLAHELKVIIFNKHDFKFAEEQAAKVSDHCILYLQPEWSNREKMMPLIVDYVMKNPKWKVSLQTHKYLNIP

SEQ ID NO: 30448 - protein, 220 aa, Granulibacter bethesdensis
  REGION 1..220: note = tr|A0A1L3S1D0|A0A1L3S1D0_9PROT 7-carboxy-7-deazaguanine synthase OS=Granulibacter bethesdensis OX=364410 GN=queE PE=3 SV=1
MCGAVMTQPARTYTVKEIFLTLQGEGIHAGRPAVFCRFAGCNLWSGREEDRQTARCTFCDTDFIGMDGENGGRYPDAASLARAIAACWQGGAEHRFVVLTGGEPLLQVDAALIDALHEAGFQIAVETNGTQPAPEGLDWICVSPKADNSLALTRGDELKLVFPQPDAPPERFEALDFRHFLLQPLDDSRRADHTRAAIEYCLHHPRWRLSVQTHKTLGIP

SEQ ID NO: 30449 - protein, 220 aa, Granulibacter bethesdensis
  REGION 1..220: note = tr|Q0BPP9|Q0BPP9_GRABC 7-carboxy-7-deazaguanine synthase OS=Granulibacter bethesdensis (strain ATCC BAA-1260 / CGDNIH1) OX=391165 GN=queE PE=3 SV=1
MCGAVMTQPTRNYTVKEIFLTLQGEGIHAGRPAVFCRFAGCNLWSGREEDRQMAGCTFCDTDFIGMDGENGGRYPDAASLARAIAACWQGGAEHRFVVLTGGEPLLQVDAALIDALHEAHFQIAVETNGTQPAPAGLDWICVSPKADNPLVLTGGDELKLVFPQPDAPPERFEALNFRHFLLQPLDDSRRADHTRAAIEYCLHHPRWRLSVQTHKTLGIP

SEQ ID NO: 30450 - protein, 227 aa, unidentified
  source 1..227: note = Granulicella mallensis
  REGION 1..227: note = tr|G8NYM7|G8NYM7_GRAMM 7-carboxy-7-deazaguanine synthase OS=Granulicella mallensis (strain ATCC BAA-1857 / DSM 23137 / MP5ACTX8) OX=682795 GN=queE PE=3 SV=1
MHLIELYKSVQGESSFAGVPCIFVRLAGCNLRCAWCDSEYTFTGGKPFTTDEIVAQIEALQPCPLIEFTGGEPMLQQKELLPLMQRLLDANYTLMMETSGERPLADVPKAVHKIVDVKCPGAGSAANSFHMANLDALTPHDEVKFVLSNRADYEFARDFIRTHALETTCGSILLSPAFSKAPSELRTTDNATLDPRFVVEWMLADGLPARLSLQIHKYIWEPRKKGV

SEQ ID NO: 30451 - protein, 227 aa, Granulicella pectinivorans
  REGION 1..227: note = tr|A0A1I6MZ20|A0A1I6MZ20_9BACT 7-carboxy-7-deazaguanine synthase OS=Granulicella pectinivorans OX=474950 GN=queE PE=3 SV=1
MHLIELYKSVQGESSFAGLPCIFVRLAGCNLRCAWCDSEYTFTGGKPFTADEIVAQIEALAPCRLVEFTGGEPMLQARELLPLMRRLIDSGYTLMMETSGERPLEDVPVEVHKIVDVKCPGAGAASNSFRMSNLDVLTKRDEVKFVLTNRADYDFARAFIAEHSLRSRVAGILLSPAFSKDPSPLRTTENATLDPRTLVEWMMADGVDARLSLQIHKFIWEPMKKGV

SEQ ID NO: 30452 - protein, 227 aa, Granulicella rosea
  REGION 1..227: note = tr|A0A239JLE3|A0A239JLE3_9BACT 7-carboxy-7-deazaguanine synthase OS=Granulicella rosea; OX = 474952 GN=queE PE=3 SV=1
MHLIELYKSVQGESSFTGLPCIFVRLAGCNLRCAWCDSEYTFTGGKPFTADEIVAQIEALAPCRLVEFTGGEPMLQARELLPLMERLLAAGYTLMMETSGERALADVPKAVHKIVDVKCPGAGAAAYSFRMENLDALTKGDEVKFVLSHRADYEFARAFIAEHRLNERAGGVLLSPAFSKNPSPLRTVENATLDPRTLVEWMMEDGVDARLSLQIHKFIWEPMKKGV

SEQ ID NO: 30453 - protein, 227 aa, unidentified
  source 1..227: note = Granulicella sibirica
  REGION 1..227: note = tr|A0A4Q0T5E2|A0A4Q0T5E2_9BACT 7-carboxy-7-deazaguanine synthase OS=Granulicella sibirica; OX = 2479048 GN=queE PE=3 SV=1
MHLIELYKSVQGESSFAGLPCIFVRLAGCNLRCAWCDSEYTFTGGKPFTADEIVREIEALAPCRLVEFTGGEPMLQARELLPLMDRLIHSGYTLMMETSGERPLEDVPVPVHKIVDVKCPGAGSAANSFRMSNLEALTKRDEVKFVLSHREDYEFAKAFIVEHDLNRRVGSILLSPAFSKSPSPIRTTENATLDPRTLVEWMMEDGIDARLSLQIHKFIWEPQKKGV

SEQ ID NO: 30454 - protein, 227 aa, Granulicella sp.
  REGION 1..227: note = tr|A0A3N1JKU3|A0A3N1JKU3_9BACT 7-carboxy-7-deazaguanine synthase OS=Granulicella sp. GAS466 OX=2485170 GN=queE PE=3 SV=1
MHLIELYKSVQGESSFAGLPCIFVRLAGCNLRCAWCDSEYTFTGGKPFTLDEVEQQIKALAPCALIEFTGGEPMLQSKELLPLMDRLLAQNFTLMIETSGERPLSEVPKAVHKIVDVKCPGSGSAANTFRLENLAALTKNDEVKFVISHREDYEFARDFIRTHALEQKAGQILLSPAFQKTPSPQRTADNMALDPRKLVDWMLADGLPARLSLQIHKFIWEPQKKGV

SEQ ID NO: 30455 - protein, 227 aa, unidentified
  source 1..227: note = Granulicella tundricola
  REGION 1..227: note = tr|E8X156|E8X156_GRATM 7-carboxy-7-deazaguanine synthase OS=Granulicella tundricola (strain ATCC BAA-1859 / DSM 23138 / MP5ACTX9) OX=1198114 GN=queE PE=3 SV=1
MHLIELYKSVQGESSFTGLPCIFVRFAGCNLRCAWCDSEYTFTGGNPFTQEEVIAQIEALAPCKLVEFTGGEPMLHAKELLPLMDVLLTQGYTLMMETSGERPLDLVPKAVHKIVDVKCPGAGAAANSFRLSNLETLTKNDEVKFVLTNRADYEFARAFIAEHRLNDLAAGVLLSPAFTKNPSPLRTVENATLDPRTLVEWMMHDGVDARLSLQIHKFIWEPMKKGV

SEQ ID NO: 30456 - protein, 223 aa, unidentified
  source 1..223: note = Grimontella sp.
  REGION 1..223: note = tr|A0A318G296|A0A318G296_9GAMM 7-carboxy-7-deazaguanine synthase OS=Grimontella sp. AG753; OX = 2183905 GN=queE PE=3 SV=1
MQYPINEMFQTLQGEGYFTGVPAIFIRLQGCPVGCAWCDTKHTWDKLEDREVSLYSILAKTKESDKWGAASSEDLLAIIERQGWTARHVVITGGEPCIHDLIPLTHLLEKQGFSCQIETSGTHEVRTSHATWVTVSPKVNMRGGYDILQQALERADEIKHPVGRTRDIEALDELLTQLTDDKHRVIALQPISQKDDATRLCIETCIARNWRLSMQTHKYLNIA

SEQ ID NO: 30457 - protein, 220 aa, unidentified
  source 1..220: note = Grimontia celer
  REGION 1..220: note = tr|A0A128EYV1|A0A128EYV1_9GAMM 7-carboxy-7-deazaguanine synthase OS=Grimontia celer; OX = 1796497 GN=queE_1 PE=3 SV=1
MYNVNEIFETIQGEGTFTGVPSVFVRLQGCPVGCPWCDTRQTWDTLPADERDFGTIITKNGDSPLWTQVTAEEVITHLQASYSAKHVVITGGEPCMFDLLPLTSLLESEGYRCQIETSGTYAVKATPNTWVTVSPKINMRGKLPVLAEALKRANEIKHPVGTETDIEKLDELLKDTDLTGKEVALQPISQKARATNLCIEVCIKRNWRLSIQTHKYLEIA

SEQ ID NO: 30458 - protein, 154 aa, unidentified
  source 1..154: note = Grimontia celer
  REGION 1..154: note = tr|A0A128F665|A0A128F665_9GAMM Anaerobic ribonucleoside-triphosphate reductase-activating protein; OS = Grimontia celer OX=1796497 GN=queE_2 PE=3 SV=1
MNFHQYYPVDVVNGEGTRCTLFVSGCEHQCRGCYNQSTWSPSSGEFFDQAMEDRIIADLNDTRIKRRGLSISGGDPLLPVNLQSVLKLVQRVKDECEAKDIWMWTGYSLDDLTEAQREVVSYVDVLVDGKFEKALADPSLPWRGSSNQVVHRLT

SEQ ID NO: 30459 - protein, 220 aa, Grimontia hollisae
  REGION 1..220: note = tr|A0A377HLV4|A0A377HLV4_GRIHO 7-carboxy-7-deazaguanine synthase OS=Grimontia hollisae; OX = 673 GN=queE PE=3 SV=1
MYNVNEIFETIQGEGTFTGIPSVFIRLQGCPVGCPWCDTRQTWDTLPLDQRDFGTIIAKNDESPLWARVSAEDILSHLQSRYTAKHIVITGGEPCMFDLMPLTSLLDAHGYRCQIETSGTYVVYATENTWVTVSPKINMRGKLPILKEALDRANEIKHPVGTESDIEKLDELLKHVDLKGKEVALQPISQKARATALCIETCIARNWRLSVQTHKYLNIA

SEQ ID NO: 30460 - protein, 220 aa, Grimontia hollisae; identical to SEQ ID NO: 30459
  REGION 1..220: note = tr|D0IB18|D0IB18_GRIHO 7-carboxy-7-deazaguanine synthase OS=Grimontia hollisae CIP 101886 OX=675812; GN = queE PE=3 SV=1

SEQ ID NO: 30461 - protein, 220 aa, unidentified
  source 1..220: note = Grimontia indica
  REGION 1..220: note = tr|R1IMG7|R1IMG7_9GAMM 7-carboxy-7-deazaguanine synthase OS=Grimontia indica OX=1056512 GN=queE PE=3 SV=1
MYNVNEIFETIQGEGTFTGVPSVFVRLQGCPVGCPWCDTRQTWDTLPADERDFGTIIAKNGDSPLWTKVTAEEILTHLQSSYHAKHVVITGGEPCMFDLLPLTSLLESNGYRCQIETSGTYAVKATSNTWVTVSPKINMRGKLPVLGEALARANEIKHPVGTESDIEKLEELLKDIDLSGKEVALQPISQKERATKLCIETCIKKNWRLSIQTHKYLEIA

SEQ ID NO: 30462 - protein, 220 aa, unidentified
  source 1..220: note = Grimontia marina
  REGION 1..220: note = tr|A0A128FFN3|A0A128FFN3_9GAMM 7-carboxy-7-deazaguanine synthase OS=Grimontia marina; OX = 646534 GN=queE_1 PE=3 SV=1
MYKVNEIFETIQGEGTFTGVPSVFVRLQGCPVGCPWCDTRQTWDTLPADERDFGTIIAKNGDSPLWTKVSAEEILAHLQASYSAKHVVITGGEPCMFDLIPLTSLLESNNYRCQIETSGTYAVKATTNTWVTVSPKINMRGKLPVLIEALERANEIKHPVGTESDIEKLDNLLKDIDLSGKEVALQPISQKERATKLCIETCIKKNWRLSIQTHKYLEIA

SEQ ID NO: 30463 - protein, 156 aa, unidentified
  source 1..156: note = Grimontia marina
  REGION 1..156: note = tr|A0A128FFZ1|A0A128FFZ1_9GAMM Anaerobic ribonucleoside-triphosphate reductase-activating protein; OS = Grimontia marina OX=646534 GN=queE_2 PE=3 SV=1
MNCHQYYPVDVVNGEGTRCTLFVSGCEHQCRGCYNQSTWSPSSGELFDQVMEDRIIADLNDTRIKRRGLSISGGDPLLPVNLQSVLRLVQRVRNECEGRDIWMWTGYTLANLSDAQREVVNYVDVLVDGKFEKALADPSLPWRGSSNQVVHRLTPR

SEQ ID NO: 30464 - protein, 220 aa, Grimontia sp.
  REGION 1..220: note = tr|A0A0F5ZWM0|A0A0F5ZWM0_9GAMM 7-carboxy-7-deazaguanine synthase OS=Grimontia sp. AD028; OX = 1581149 GN=queE PE=3 SV=1
MYNVNEIFETIQGEGTFTGVPSVFVRLQGCPVGCPWCDTRQTWDTLPADERDFGTIIAKNGDSPLWTKVTAEEILTHLQSSYHAKHVVITGGEPCMFDLLPLTSLLESNGYHCQIETSGTYAVKATSNTWVTVSPKINMRGKLPVLGEALARANEIKHPVGTESDIEKLEELLKDVDLSNKEVALQPISQKERATKLCIETCIKKNWRLSIQTHKYLEIA

SEQ ID NO: 30465 - protein, 209 aa, Gulbenkiania indica
  REGION 1..209: note = tr|A0A0K6GSI5|A0A0K6GSI5_9NEIS 7-carboxy-7-deazaguanine synthase OS=Gulbenkiania indica; OX = 375574 GN=queE PE=3 SV=1
MYTVKEIFYTLQGEGRQAGRAAVFCRFAGCNLWSGKERHRHKAICQFCDTDFVGTGPDGGKFAEADALADRIAASWPAGSGGTPYVVCTGGEPLLQLDAPLLAALHTRGFEVAVETNGTVAAPAGLDWICVSPKAGAPLVQTRGHELKLVYPQPTLLPEAVAALDFEHFYLQPMDGPDGAANTRAAIAYCMAHPQWRLSVQTHKVVNIR

SEQ ID NO: 30466 - protein, 232 aa, unidentified
  source 1..232: note = Guyparkeria sp.
  REGION 1..232: note = tr|A0A426QEM4|A0A426QEM4_9GAMM 7-carboxy-7-deazaguanine synthase OS=Guyparkeria sp. SCN-R1 OX=2341113 GN=queE PE=3 SV=1
MTVESAQRPESLESIAPKAARSLRITEIFRSLQGESDHIGWPTVFVRLTGCPLRCVYCDTAYAFTGGERMEQEVILSRVAELNTRHVCVTGGEPLAQPGCIELLRQLVDEGHVVSLETSGALDIAHVDPRVHIVMDLKTPSSGEVERNRWANLEALKPQDEVKVVIGSREDFDWAVARVREHDLAGRFAVLFSPVFGGVTPTELADWVLETGLEIRFQMQLHKLIWGDEPGR

SEQ ID NO: 30467 - protein, 216 aa, unidentified
  source 1..216: note = Gynuella sunshinyii
  REGION 1..216: note = tr|A0A0C5V9Z9|A0A0C5V9Z9_9GAMM 7-carboxy-7-deazaguanine synthase OS=Gynuella sunshinyii YC6258 OX=1445510 GN=queE PE=3 SV=1
MYSIKEMFYSLQGEGAHTGRPAIFLRFSGCNLWSGLEKHRREAICQFCDTDFIGTDGQNGGKFKDATTLADTVSRLWPSNQQNRYVICTGGEPALQLDTELILAFKDLGFEVGIETNGTLPLPKGIDWICVSPKGRSTVVVKQCHELKLVYPQPDAMPDRFTDIDAGVRYLSPKNPYDSDHLIISEQSSTRACIEYCLAHPQWRLCLQTHKILKID

SEQ ID NO: 30468 - protein, 290 aa, unidentified
  source 1..290: note = Gynuella sunshinyii
  REGION 1..290: note = tr|A0A0C5V0I1|A0A0C5V0I1_9GAMM 7-carboxy-7-deazaguanine synthase OS=Gynuella sunshinyii YC6258 OX=1445510 GN=queE PE=3 SV=1
MKYQWSEIFLSIEGEAKWSGHPTVYIRFTRCNFSCKGFNNPDNIEPASERALGFSPQHINTISEIPEISIGCDSIYSWHKDFRHLWHQGDEHVLAAEVTKVLPSYGWKSNTGQEVILSLTGGEPTLHAKTIPHLLSTPEFNQVKHVLIETNCSVPLSETFITALDDWALNRKGRITWSNSPKLKASGEPFDKAIRPEIALMQRRVTQDRCIQYFKFVCRNDDDFQEVQYVMEQYYRAGIPRNVEVYIMPMACTEQQQKKVMQDVAMKCLEYGFIYCHRIQNTVFENAIGK

SEQ ID NO: 30469 - protein, 213 aa, unidentified
  source 1..213: note = Haematospirillum jordaniae
  REGION 1..213: note = tr|A0A143DBT9|A0A143DBT9_9PROT 7-carboxy-7-deazaguanine synthase OS=Haematospirillum jordaniae OX=1549855 GN=queE PE=3 SV=1
MTYSIKELFYTLQGEGAQAGRAAVFCRFSGCNLWSGREQDRSTATCSFCDTDFVGTNGTGGGKFASARALAHAVRACWDQNARQGGTPYVVCTGGEPLLQLDTPLVQAFHEAGMEVAVETNGTQDPPHGIDWICVSPKAGSDLVLTQGDELKVVWPQQGLDLVYLAELKFRHFFLQPMDGHAATESLATCIQTCQQFPQWRLGLQIHKLTGIP

SEQ ID NO: 30470 - protein, 209 aa, Haemophilus aegyptius
  REGION 1..209: note = tr|A0A3S4UKL9|A0A3S4UKL9_HAEAE 7-carboxy-7-deazaguanine synthase OS=Haemophilus aegyptius; OX = 197575 GN=queE PE=3 SV=1
MEKYHDFEPNFNIVEIFESLQGEGFNTGMPSVFVRFGKCNLDCPWCDTPYNNFKRWSVSQILEKVRSFSSKNIIITGGEPTIVPKIEYLLEQFKSDGYFLAIETNGLKAIPAQIDYIATSPKSLYAHKYEKRCIPFANEVRIVMDSNMPSFCELIEQKIKAKNYYLSPCEIDGKMNLLETITLLGQLNQRSNKPKWQLSLQTHKLIGIE

SEQ ID NO: 30471 - protein, 209 aa, Haemophilus ducreyi
  REGION 1..209: note = tr|Q7VNH8|Q7VNH8_HAEDU 7-carboxy-7-deazaguanine synthase OS=Haemophilus ducreyi (strain 35000HP / ATCC 700724) OX=233412 GN=queE PE=3 SV=1
MKQTIFTTTTFPIVEIFESLQGEGFNTGLPCIFIRLGKCNLACPWCDTNYNEYQKWTLEMILAKVKSYTAKNIIITGGEPTLYANLTILLEQLKNAGYWLAIETNGLKAVPSQIDYIATSPKKMYQEKYQREYLTQADEVRIVVDDDVTEFCALIEQKIQAHHYYLSPCEIEGKMNLLETITQLGQLNQRVNKPKWQLSIQTHKIIGIE

SEQ ID NO: 30472 - protein, 209 aa, Haemophilus ducreyi
  REGION 1..209: note = tr|A0A448KIQ6|A0A448KIQ6_HAEDC 7-carboxy-7-deazaguanine synthase OS=Haemophilus ducreyi; OX = 730 GN=queE PE=3 SV=1
MKQTIFTTTTFPIVEIFESLQGEGFNTGLPCIFIRLGKCNLACPWCDTNYNEYQKWTLEMILAKVKSYTAKNIIITGGEPTLYANLTILLDQLKNAGYWLAIETNGLKAVPSQIDYISTSPKKMYQEKYQREYLTQADEVRIVVDDDVTEFCAVIEQKIQAHHYYLSPCEIEGKMNLLETITQLGQLNQRVNKPKWQLSIQTHKIIGIE

SEQ ID NO: 30473 - protein, 216 aa, unidentified
  source 1..216: note = [Haemophilus] felis
  REGION 1..216: note = tr|A0A1T0BBJ2|A0A1T0BBJ2_9PAST 7-carboxy-7-deazaguanine synthase OS=[Haemophilus] felis; OX = 123822 GN=queE PE=3 SV=1
MQRVRFLEKNANVADTEYRIVEIFETLQGEGFNTGMPSIFIRFGKCNLACPWCDTNYNQYETKTLAEIMQTVRQFTARNIIITGGEPTIQPNLERLLDQLKAEGYFIAIETNGLKPVPLQIDYIATSPKRLYQKNYLKHHIPFAHEVRIVVDDDVFAFCEQIEQSIKAERYYLSPCECNGEMNMLETITLLGLLNQRPNRPRWQLSIQTHKMAGIE

SEQ ID NO: 30474 - protein, 211 aa, Haemophilus haemolyticus
  REGION 1..211: note = tr|A0A502JKA4|A0A502JKA4_HAEHA 7-carboxy-7-deazaguanine synthase OS=Haemophilus haemolyticus OX=726 GN=queE PE=3 SV=1
MLVEKYHEFEPYFNIVEIFESLQGEGFNTGMPSIFVRFGKCNLDCPWCDTPYNDFKRWSASQILEKVRSFPSRNIIITGGEPTIVPKIEYLLEQFKADGYFLAIETNGLKTVPAQIDYIAASPKSLYAHKYEKRCIPFANEVRIVMDGNVSSFCELIEKKIKAENYYLSPCEIAGEMNLLETITLLGQLNQRPNKPKWLLSLQTHKLIGIE

SEQ ID NO: 30475 - protein, 211 aa, Haemophilus haemolyticus
  REGION 1..211: note = tr|A0A502KFU1|A0A502KFU1_HAEHA 7-carboxy-7-deazaguanine synthase OS=Haemophilus haemolyticus OX=726 GN=queE PE=3 SV=1
MSVEKYHNFEPHFNIVEIFESLQGEGFNTGMPSIFVRFGKCNLDCPWCDTPYNDFKRWSASQILEKVRSFSSRNIVITGGEPTIVPKIEYLLEQFKADSYFLAIETNGLKTVPAQIDYIATSPKSFYAHKYEKRCIPFANEVRIVMDGNVSSFCELIEKKIKAENYYLSPCEIAGKRNLLETITLLGQLNQRSNKPKWQLSLQTHKLIGIE

SEQ ID NO: 30476 - protein, 211 aa, Haemophilus influenzae
  REGION 1..211: note = sp|P45097|QUEE_HAEIN 7-carboxy-7-deazaguanine synthase OS=Haemophilus influenzae (strain ATCC 51907 / DSM 11121 / KW20 / Rd) OX=71421 GN=queE PE=3 SV=1
MLMEKYHDFEPNFNIVEIFESLQGEGFNTGMPSVFVRFGKCNLDCPWCDTPYNNFKRWSVSQILEKVRSFSSKNIIITGGEPTIVPKIEYLLEQFKSDGYFLAIETNGLKAIPAQIDYIATSPKSLYAHKYEKRCIPFANEVRIVMDSNMPSFCELIEQKIKAKNYYLSPCEIDGKMNLLETITLLGQLNQRSNKPKWQLSLQTHKLIGIE

SEQ ID NO: 30477 - protein, 209 aa, Haemophilus influenzae
  REGION 1..209: note = tr|A0A2X1PPK2|A0A2X1PPK2_HAEIF 7-carboxy-7-deazaguanine synthase OS=Haemophilus influenzae OX=727 GN=queE PE=3 SV=1
MGKYHDFEPNFNIVEIFESLQGEGFNTGMPSVFVRFGKCNLDCPWCDTPYNNFKRWSVSQILEKVRSFSSKNIIITGGEPTIVPKIEYLLEQFKSDGYFLAIETNGLKAIPAQIDYIATSPKSLYAHKYEKRCIPFANEVRIVMDSNMPSFCELIEQKIKAKNYYLSPCEIDGKMNLLETITLLGQLNQRSNKPKWQLSLQTHKLIGIE

SEQ ID NO: 30478 - protein, 209 aa, Haemophilus paracuniculus
  REGION 1..209: note = tr|A0A1T0AQN0|A0A1T0AQN0_9PAST 7-carboxy-7-deazaguanine synthase OS=Haemophilus paracuniculus OX=734 GN=queE PE=3 SV=1
MQNIINPNPEYRIVEIFETLQGEGYNTGMPSIFIRFGKCNLACPWCDTNYNQFETKTLNEIMAVVRGFSARNIIITGGEPTIQPNIEILLDVLKSEGYFIAVETNGLKPVPKQIDYIATSPKRLYQKNYLKHHLDFAHEVRIVVDGDVLDFCEQIENTIKADRYYLSPCEQDGVMNMLDTITQLGKLNQRSNKPHWQLSIQTHKIAGIE

SEQ ID NO: 30479 - protein, 209 aa, Haemophilus parahaemolyticus
  REGION 1..209: note = tr|A0A369ZIS5|A0A369ZIS5_HAEPH 7-carboxy-7-deazaguanine synthase OS=Haemophilus parahaemolyticus OX=735 GN=queE PE=3 SV=1
MQNTIFSTITYPIVEIFESLQGEGFNTGMPSIFVRFGKCNLTCPWCDTDYMTFESWTLEQILAKVKSCSARNIIITGGEPTIQPNLGVLLDAFKLEGYFLAIETNGLKEVPKQIDYIATSPKRLYQEKYQRRCIPFAHEVRIVADENVLAFCEQIEQQIQAEHYYLSPCEIDGKMNLLETITQLGQLNQRINKPKWHLSLQTHKIVGIE

SEQ ID NO: 30480 - protein, 213 aa, Haemophilus parahaemolyticus
  REGION 1..213: note = tr|A0A377JDW9|A0A377JDW9_HAEPH 7-carboxy-7-deazaguanine synthase OS=Haemophilus parahaemolyticus OX=735 GN=queE PE=3 SV=1
MANKMQNTIFSTISYPIVEIFESLQGEGFNTGMPSIFVRFGKCNLTCPWCDTDYMTFESWTLDQILAKVKSYSARNIIITGGEPTIQPNLDVLLDAFKLEGYFLAIETNGLKEVPKQIDYIATSPKRLYQEKYQRRCIPFAHEVRIVADEDVLAFCEQIEQQIQAEHYYLSPCEIDGKMNLLETITQLGQLNQRENEPKWQLSLQTHKIVGIE

SEQ ID NO: 30481 - protein, 209 aa, Haemophilus parainfluenzae
  REGION 1..209: note = tr|A0A3S4ZBD6|A0A3S4ZBD6_HAEPA 7-carboxy-7-deazaguanine synthase OS=Haemophilus parainfluenzae OX=729 GN=queE PE=3 SV=1
MEKQIISEPYYNIVEIFESLQGEGFNTGMPAIFIRFGKCNLACTWCDTNYHQFKRCSLSQILNKVRSFSAKNIIITGGEPTIVPKLEMILNQLKSLGYFLAIETNGLNTVPAQIDFIATSPKRLYAHKYEKRCISFAHEVRIVADDNIIPFCEMIENKIQAKYYYLSPCEVHGKMNLLETITQLGKLNQRTNKPRWLLSLQTHKLIGIE

SEQ ID NO: 30482 - protein, 209 aa, Haemophilus parainfluenzae
  REGION 1..209: note = tr|A0A1B8T2J6|A0A1B8T2J6_HAEPA 7-carboxy-7-deazaguanine synthase OS=Haemophilus parainfluenzae OX=729 GN=queE PE=3 SV=1
MEKRPISEPYYNIVEIFESLQGEGFNTGMPAIFIRFGKCNLACPWCDTNYHQFKHWSLSQILNKVRSFSAKNIIITGGEPTIVPKLEIVLNQLKSLGYFLAIETNGLRSVPSQIDFIATSPKRLYAHKYEKRCISFAHEVRIVADDNIIPFCEMIENKIQAKYYYLSPCEVHGNMNLLETITQLGKLNQRTNKPRWLLSLQTHKLIGME

SEQ ID NO: 30483 - protein, 213 aa, Haemophilus paraphrohaemolyticus
  REGION 1..213: note = tr|A0A369ZMT6|A0A369ZMT6_9PAST 7-carboxy-7-deazaguanine synthase OS=Haemophilus paraphrohaemolyticus OX=736 GN=queE PE=3 SV=1
MANKTQNTILSTISYPIVEIFESLQGEGFNTGMPSIFVRFGKCNLTCPWCDTDYMTFESWTLEQILAKVKSYSSKNIIITGGEPTIQPNLGVLLDAFKQAGYFLVIETNGLKEVPKQIDYIATSPKRLYQEKYQRRCIPFAHEVRIVADENVLDFCEQIEQQIQAEHYYLSPCEVDGKMNLLETITQLGQLNQRENKPKWQLSLQTHKIVGIE

SEQ ID NO: 30484 - protein, 213 aa, Haemophilus paraphrohaemolyticus; identical to SEQ ID NO: 30480
  REGION 1..213: note = tr|I2NFU8|I2NFU8_9PAST 7-carboxy-7-deazaguanine synthase OS=Haemophilus paraphrohaemolyticus HK411; OX = 1095743 GN=queE PE=3 SV=1

SEQ ID NO: 30485 - protein, 204 aa, Haemophilus parasuis; identical to SEQ ID NO: 30396
  REGION 1..204: note = tr|A0A084EXS2|A0A084EXS2_HAEPR 7-carboxy-7-deazaguanine synthase OS=Haemophilus parasuis; OX = 738 GN=queE PE=3 SV=1

SEQ ID NO: 30486 - protein, 204 aa, Haemophilus parasuis
  REGION 1..204: note = tr|A0A143CFP7|A0A143CFP7_HAEPR 7-carboxy-7-deazaguanine synthase OS=Haemophilus parasuis; OX = 738 GN=nrdG_2 PE=3 SV=1
MKNPEYRIVEIFETLQGEGFNTGMPSIFIRFGKCNLACPWCDTNYNQYETKTLADIMQVVKGFSAKNIIITGGEPTIQPDLAYLLDTLKAAGYFIAIETNGLKPVPPQIDYIATSPKRLYQKNYLKHHIPFANEVRIVVDGDVLAFCEQIESTIKAERYYLSPCEENGVMNMLETITQLGKLNQRPNKPRWQLSIQTHKMAGIE

SEQ ID NO: 30487 - protein, 209 aa, Haemophilus pittmaniae
  REGION 1..209: note = tr|F9Q7R6|F9Q7R6_9PAST 7-carboxy-7-deazaguanine synthase OS=Haemophilus pittmaniae HK 85 OX=1035188; GN = queE PE=3 SV=1
MEKQNLLEPQYNIVEIFESLQGEGANTGMPSIFIRFGKCNLACPWCDTHYNQFTRWSMSQILDKVRSFSARNIIITGGEPTIVPKLEILLSQLKTLGYFLAIETNGLKPVPPQIDFIATSPKRLYAHKYAKRCISFAHEVRIVADENILPFCEMIEEKICAQHYYLSPCEIDGQMNLLETITQLGKLNQRAHKPKWQLSLQTHKLIGIE

SEQ ID NO: 30488 - protein, 209 aa, Haemophilus pittmaniae
  REGION 1..209: note = tr|A0A377IZ50|A0A377IZ50_9PAST 7-carboxy-7-deazaguanine synthase OS=Haemophilus pittmaniae OX=249188 GN=queE PE=3 SV=1
MERQNLLEPQYNIVEIFESLQGEGANTGMPSIFIRFGKCNLACPWCDTHYNQFTRWSMSQILDKVRSFSARNIIITGGEPTIVPKLEILLSQLKTLGYFLAIETNGLKPVPPQIDFIATSPKRLYAHKYAKRCISFAHEVRIVADENILPFCEMIEEKICAQHYYLSPCEIDGQMNLLETITQLGKLNQRAHKPKWQLSLQTHKLIGIE

SEQ ID NO: 30489 - protein, 209 aa, Haemophilus sp.; identical to SEQ ID NO: 30482
  REGION 1..209: note = tr|A0A1S1FKY5|A0A1S1FKY5_9PAST 7-carboxy-7-deazaguanine synthase OS=Haemophilus sp. HMSC61B11 OX=1608882 GN=queE PE=3 SV=1

SEQ ID NO: 30490 - protein, 211 aa, Haemophilus sp.
  REGION 1..211: note = tr|A0A1B8QPL4|A0A1B8QPL4_9PAST 7-carboxy-7-deazaguanine synthase OS=Haemophilus sp. CCUG 66565 OX=1859694 GN=queE PE=3 SV=1
MSVEKYHNFEPHFNIVEIFESLQGEGFNTGMPSIFVRFGKCNLDCPWCDTPYNDFKRWSVSQILEKVRSFPSKNIIITGGEPTIVPKIEYLLEQFKADGYFLAIETNGLKTVPAQIDYIATSPKSLYAHKYEKRCIPFANEVRIVMDGNISSFCELIEKKIKAENYYLSPCEIAGEMNLLETITLLGQLNQRPNKPKWQLSLQTHKLIGIE

SEQ ID NO: 30491 - protein, 209 aa, unidentified
  source 1..209: note = Haemophilus sputorum
  REGION 1..209: note = tr|J5HJ32|J5HJ32_9PAST 7-carboxy-7-deazaguanine synthase OS=Haemophilus sputorum HK 2154 OX=1078483; GN = queE PE=3 SV=1
MSLPIFTTTRFPIVEIFESLQGEGFNTGMPAIFVRLGKCNLACPWCDTNYEEYEKWTVDTILHQVQSYQAKQVIITGGEPTMYANLNILLDALKAQGYWLAIETNGLKSVPSQIDYIATSPKRMYQEKYLRECIPFANEVRIVVDGDIFDFCEQIESQIQAEHYYLSPCEQDGKMNLLETITQLGQLNLRANKPKWQLSLQTHKIIGIE

SEQ ID NO: 30492 - protein, 209 aa, unidentified
  source 1..209: note = Haemophilus sputorum
  REGION 1..209: note = tr|A0A369YLB3|A0A369YLB3_9PAST 7-carboxy-7-deazaguanine synthase OS=Haemophilus sputorum; OX = 1078480 GN=queE PE=3 SV=1
MSLPIFTTTRFPIVEIFESLQGEGFNTGMPAIFVRLGKCNLACPWCDTNYEEYEKWTVDAILRQVQSYQAKQVIITGGEPTMYANLNILLDALKAQGYWLAIETNGLKSVPSQIDYIATSPKRMYQEKYLRECIPFANEVRIVVDGDILDFCEQIESQIQAEHYYLSPCEQDGKMNLLETITQLGQLNLRANKPKWQLSFQTHKIIGIE

SEQ ID NO: 30493 - protein, 223 aa, Hafnia alvei
  REGION 1..223: note = tr|A0A1C6Z0D1|A0A1C6Z0D1_HAFAL 7-carboxy-7-deazaguanine synthase OS=Hafnia alvei OX=569; GN = queE PE=3 SV=1
MSYPINELFQTLQGEGFYTGVPAIFIRLQGCPVGCSWCDTKHTWEQLPEREIGMNEILIKTEESDAWGSASPEQLLDILRERGYTARHVVITGGEPCIHDLRPLTELLNQNGFSCQIETSGTHEIRCSEATWVTVSPKVNMKGGMKVLESSLVRADEVKHPVARERDIEDLDALLSVLHDDKKRIIALQPISQKESATKLCIETCIARNWRLSMQTHKYLNIA

SEQ ID NO: 30494 - protein, 223 aa, Hafnia alvei
  REGION 1..223: note = tr|A0A2J9HFN5|A0A2J9HFN5_HAFAL 7-carboxy-7-deazaguanine synthase OS=Hafnia alvei OX=569; GN = queE PE=3 SV=1
MSYPINELFQTLQGEGFYTGVPAIFIRLQGCPVGCSWCDTKHTWEQLPEREIGMNEILIKTEESDAWGSASPEQLLDILRERGYTARHVVITGGEPCIHDLRPLTELLNQNGFSCQIETSGTHDIRCSEATWVTVSPKVNMKGGMKVLESSLVRADEVKHPVARERDIEDLDALLSVLHDDKKRIIALQPISQKESATKLCIETCIARNWRLSMQTHKYLNIA

SEQ ID NO: 30495 - protein, 223 aa, Hafnia paralvei
  REGION 1..223: note = tr|A0A4Q9EHU1|A0A4Q9EHU1_9GAMM 7-carboxy-7-deazaguanine synthase OS=Hafnia paralvei; OX = 546367 GN=queE PE=3 SV=1
MSYPINELFQTLQGEGFYTGVPAIFIRLQGCPVGCSWCDTKHTWEQLPEREIGMNEILIKTAESDAWGSATPDQLLAILHERGYTARHVVITGGEPCIHDLRPLTELLNQHGFSCQIETSGTHEIRCSDATWVTVSPKVNMKGGMKVLESALIRADEVKHPVARERDIEDLDTLLAVLHDDKQRIIALQPISQKESATKLCIETCIARNWRLSMQTHKYLNIA

SEQ ID NO: 30496 - protein, 223 aa, Hafnia paralvei
  REGION 1..223: note = tr|A0A2A2M944|A0A2A2M944_9GAMM 7-carboxy-7-deazaguanine synthase OS=Hafnia paralvei; OX = 546367 GN=queE PE=3 SV=1
MSYPINELFQTLQGEGFYTGVPAIFIRLQGCPVGCSWCDTKHTWEQLPEREIGMNEILIKTAESDAWGSATPDQLLAILQERGYTARHVVITGGEPCIHDLRPLTELLNQHGFSCQIETSGTHEIRCSDATWVTVSPKVNMKGGMKVLESALIRADEVKHPVARERDIEDLDTLLAVLHDDKQRIIALQPISQKESATKLCIETCIARNWRLSMQTHKYLNIA

SEQ ID NO: 30497 - protein, 217 aa, Hahella chejuensis
  REGION 1..217: note = tr|Q2S7U8|Q2S7U8_HAHCH 7-carboxy-7-deazaguanine synthase OS=Hahella chejuensis (strain KCTC 2396); OX = 349521 GN=queE PE=3 SV=1
MYRVKEAFYTLQGEGAHQGRPAVFCRFSKCNLWTGREKDRAGAVCNFCDTDFIGVDGQNGGKFATAEELADHILAFWPPEQDNRFVVCTGGEPLLQLDEPLIEAFHARGFEVAVETNGTLPAPAGIDWLCVSPKGRAEVVITECDELKLVYPQPEAPPERFSDIRAGRHYLSPMANPLVREGNDEQKRRNTQLAMEYCMRHPKWRLSVQLHKILGID

SEQ ID NO: 30498 - protein, 217 aa, Hahella sp.
  REGION 1..217: note = tr|A0A3T0VUZ4|A0A3T0VUZ4_9GAMM 7-carboxy-7-deazaguanine synthase OS=Hahella sp. KA22; OX = 1628392 GN=queE PE=3 SV=1
MYRVKEIFYTLQGEGAHQGRPAVFCRFSKCNLWTGREKDRAGAVCNFCDTDFVGVDGQNGGKFATAEELAERILSFWPQEEAERFVVCTGGEPLLQLDEPLVEAFHARGFEVAVETNGTLPAPAGIDWLCVSPKGRAEVVIKECDELKLVYPQPEAPPERFDDIRAGRYYLSPMANPLALEGEDERKIHNTKLAMDFCMRYPKWRLSVQLHKILGID

SEQ ID NO: 30499 - protein, 217 aa, Hahella sp.
  REGION 1..217: note = tr|A0A261GU68|A0A261GU68_9GAMM 7-carboxy-7-deazaguanine synthase OS=Hahella sp. CCB-MM4; OX = 1926491 GN=queE PE=3 SV=1
MYRVKEIFYTLQGEGAQQGRAAVFCRFSKCNLWTGREKDRANAVCNFCDTDFIGTDGQNGGKYASAEELAARIDELWPQGHAGKFVVCTGGEPLLQLDSTMIEALHAKGFEVAVETNGTLPAPPGIDWMCVSPKGTAPVVIESCDELKLVYPQPEALPEQFAHIQASHYYLSPMADPLVRSGDDDVKQSNTQAALEYCMQHPKWKLSVQLHKILGIE

SEQ ID NO: 30500 - protein, 247 aa, unidentified
  source 1..247: note = Hahellaceae bacterium
  REGION 1..247: note = tr|A0A2D8R8I7|A0A2D8R8I7_9GAMM 7-carboxy-7-deazaguanine synthase OS=Hahellaceae bacterium; OX = 2048971 GN=queE PE=3 SV=1
MTGYRIKEAFYTLQGEGANQGRPAVFCRFSKCNLWNGRESDRASAICNFCDTDFVGVDGQNGGTFADANALADHLISLWPAAFRPAFVVCTGGEPLLQLDDDLIAALHDRGFEIAVETNGTLPAPAGIDWICVSPKGRSTVVIDSCNELKFVYPQDDLDPKDCAHIKADHYYLSPRDDRYLTQSGTPEQVAALRDANLIAVGSADVTSSDALPSPRITNHTADCVQYCMANPPWKLSLQTHKYLGID

SEQ ID NO: 30501 - protein, 211 aa, Haliangium ochraceum
  REGION 1..211: note = tr|D0LGT4|D0LGT4_HALO1 7-carboxy-7-deazaguanine synthase OS=Haliangium ochraceum (strain DSM 14365 / JCM 11303 / SMP-2) OX=502025 GN=queE PE=3 SV=1
MPTKHPHSYRVKEIFGPTLQGEGTHAGRACVFLRFAGCNLQCSWCDTDFSPEGAERLRADEITERLLALDVHGARTVIVTGGEPALQWDQELADALRAAGFRVHMESNGTRPPRAPVDWLTVSPKVQFHGPREALFASAEAAVSECKLVVDDSVSHDTLAALEHHYEGADLLLQPCMDADYEQHLARTLTLIGERPRWRLSLQLHKIVGVP

SEQ ID NO: 30502 - protein, 65 aa, Haliea salexigens
  REGION 1..65: note = tr|A0A3C1KQ65|A0A3C1KQ65_9GAMM 7-carboxy-7-deazaguanine synthase QueE (Fragment); OS = Haliea salexigens OX=287487 GN=DCP75_14265 PE=4 SV=1
MTSTLSTSAGLAPDAVGDPTLRITEIFYSLQGEARTVGLPTVFVRLTGCPLRCVYCDTAYAFNGG

SEQ ID NO: 30503 - protein, 167 aa, Haliea salexigens
  REGION 1..167: note = tr|A0A3C1KQU0|A0A3C1KQU0_9GAMM 7-carboxy-7-deazaguanine synthase QueE (Fragment); OS = Haliea salexigens OX=287487 GN=DCP75_14260 PE=4 SV=1
GELRALSGVLAEVAAHRPRYVTVTGGEPLAQKNCLPLLYALCDAGYEVSLETSGALPVGEVDPRVVKVLDLKTPASQEAHRNDYSNVQHLTPHDQVKFVICDRADYEWARFKLNEYNLAQRVSDVLFSPSHGQLHGRELAAWILADNLPVRLQLQLHKLLWNDEPGH

SEQ ID NO: 30504 - protein, 240 aa, Haliea sp.
  REGION 1..240: note = tr|A0A2D5F754|A0A2D5F754_9GAMM 7-carboxy-7-deazaguanine synthase OS=Haliea sp. OX=1932666; GN = queE PE=3 SV=1
MRPPVAAPSTWPGTSCVTITETRVDLSASLRITEIFHSLQGETRTVGLPTVFVRLTGCPLRCVYCDTAYAFSGGELRTLEAILEEVRRHGAHFVTVTGGEPLAQPNCLPLLAALCDAGYEVSLETSGALSVAGVDPRVVKVLDLKTPASAESHRNDYANIDQLNPRDQVKFVICDRADYEWARFKLDEYRLAERVDDVLFSPSHHDLPARELAEWILADRLPVRLQLQLHKLLWNDEPGH

SEQ ID NO: 30505 - protein, 211 aa, Haliea sp.
  REGION 1..211: note = tr|A0A2D5F8B9|A0A2D5F8B9_9GAMM 7-carboxy-7-deazaguanine synthase OS=Haliea sp. OX=1932666; GN = queE PE=3 SV=1
MTYSVKEMFYTLQGEGAQAGRPAVFLRFAGCNLWNGLERDRADAVCNFCDTDFVGVDGQNGGQFKAADELAARVSSFWPEGKDGKPFVVCTGGEPLLQLDLPLIDALHAQGFEIAVETNGTIKAPAGIDWICVSPKADAPLQQLCGDELKLVYPQAKALPERFETLEFRHFYLQPMDGVAAAENTRAATSYCLSNPHWSLSLQTHKFLGID

SEQ ID NO: 30506 - protein, 222 aa, unidentified
  source 1..222: note = Halieaceae bacterium
  REGION 1..222: note = tr|A0A3C7VZ77|A0A3C7VZ77_9GAMM 7-carboxy-7-deazaguanine synthase OS=Halieaceae bacterium; OX = 2026743 GN=queE PE=3 SV=1
MTAAVDPSATTLRITEIFHSLQGEARTVGLPTVFVRLTGCPLRCVYCDTAYAFSGGELWTQERVLDTVAGYGARYVTVTGGEPLAQPACLPLLAALCDAGYEVSLETSGAMPVGDVDRRVVKVLDLKTPASGEMARNDYGNIEHLTAQDQVKFVICDRADYDWARFKLDEYRLAERAGDVLFSPSHGQQDARELAEWILADRLPVRLQLQLHKLLWNDEPGH

SEQ ID NO: 30507 - protein, 231 aa, unidentified
  source 1..231: note = Halieaceae bacterium
  REGION 1..231: note = tr|A0A359EJB5|A0A359EJB5_9GAMM 7-carboxy-7-deazaguanine synthase OS=Halieaceae bacterium; OX = 2026743 GN=queE PE=3 SV=1
MTSTLSTSAGLAPDAVGDPTLRITEIFYSLQGEARTVGLPTVFVRLTGCPLRCVYCDTAYAFNGGELRALSGVLAEVAAHRPRFVTVTGGEPLAQKNCLPLLSALCDAGYEVSLETSGALPVGEVDPRVVKVLDLKTPASQEAHRNDYSNVQHLTPHDQVKFVICDRADYEWARFKLDEYNLAQRVSDVLFSPSHGQLHGRELAAWILADNLPVRLQLQLHKLLWNDEPGH

SEQ ID NO: 30508 - protein, 229 aa, unidentified
  source 1..229: note = Halioglobus japonicus
  REGION 1..229: note = tr|A0A2N5Y896|A0A2N5Y896_9GAMM 7-carboxy-7-deazaguanine synthase OS=Halioglobus japonicus; OX = 930805 GN=queE PE=3 SV=1
MADHAPQSTDSTLDTTPTLRLTEMFYSLQGETRTVGLPTVFVRLTGCPLRCVYCDTEYAFSGGEIFTLDHIAAKVAEWQPRYVTVTGGEPLAQPNCLPLLIRLCDAGYEVSLETGGAMPLAGVDPRVVTVLDLKTPASGEMSRNDYANIPLLKPHDQVKFVICDRADYEWMRFKLEEYQLATRVAEVLLSPSHGQLSGRELAEWILEDNLPVRMQLQLHKILWNDEPGH

SEQ ID NO: 30509 - protein, 222 aa, unidentified
  source 1..222: note = Halioglobus lutimaris
  REGION 1..222: note = tr|A0A2N5X0G0|A0A2N5X0G0_9GAMM 7-carboxy-7-deazaguanine synthase OS=Halioglobus lutimaris; OX = 1737061 GN=queE PE=3 SV=1
MSPSLVHSDDALRITEIFYSLQGETRTMGLPTVFVRLTGCPLRCTYCDTEYAFSGGELLALEDILNTVGGYNPRYVTVTGGEPLAQPNCLSLLERLCDAGYEVSLETGGAISLVGVDPRVITVLDLKTPGSGEMQRNDYANIPLLREHDQVKFVICDRQDYEWARFKLDELGLQGRVSELLFSPSHGSLQGRQLAEWILEDNLPVRLQLQLHKILWNDQPGH

SEQ ID NO: 30510 - protein, 222 aa, unidentified
  source 1..222: note = Halioglobus sp.
  REGION 1..222: note = tr|A0A3L7DSC7|A0A3L7DSC7_9GAMM 7-carboxy-7-deazaguanine synthase OS=Halioglobus sp. U0301; OX = 2283635 GN=queE PE=3 SV=1
MSTSLVHSDDALRITEIFYSLQGEARTVGLPTVFVRLTGCPLRCVYCDTEYAFSGGELQSLEDVVARVAAYQPRYVTVTGGEPLAQPNCLPLLAALCDAGYEVSLETGGAMPLAGVDPRVVKVVDLKTPASGEMNRNDYDNLALLQSHDQIKFVICDRADYDWARFKLDEFQLASRVSDVLFSPSHGELSGRQLAEWILADKLPVRMQLQLHKILWNDEPGH

SEQ ID NO: 30511 - protein, 221 aa, unidentified
  source 1..221: note = Halioglobus sp.
  REGION 1..221: note = tr|A0A5B0WUK7|A0A5B0WUK7_9GAMM 7-carboxy-7-deazaguanine synthase OS=Halioglobus sp. NY5; OX = 2606449 GN=queE PE=3 SV=1
MSSLVHSEDALRITEIFYSLQGETRTMGLPTVFVRLTGCPLRCTYCDTEYAFTGGELMAIQDILARVAEYQPAYVTVTGGEPLAQPNCLPLLTQLCDAGYEVSLETGGAMSLEGVDSRVVSVLDLKTPASGEMQRNDYDNVPRLRSQDQVKFVICDREDYEWARFKLDELKLADRVADVLFSPSHADLSGRQLAEWILQDRLPVRMQLQLHKILWDDQRGH

SEQ ID NO: 30512 - protein, 228 aa, Haliscomenobacter hydrossis
  REGION 1..228: note = tr|F4KX36|F4KX36_HALH1 7-carboxy-7-deazaguanine synthase OS=Haliscomenobacter hydrossis (strain ATCC 27775 / DSM 1100 / LMG 10767 / O) OX=760192 GN=queE PE=3 SV=1
MTTYKIKEIFYTLQGEGAQSGRPAVFCRFSGCNLWSGREEDRSKAICQFCDTDFWGMDGENGGKYNAEELADKVIGLWPGGSEKRIANSEKQVGEISDLRGKPYVVCTGGEPLLQLDEPLIEAFHRRGLEVAVETNGTIAAPAGLDWICMSPKANTELLIQSGHELKLVYPQAGAEPERYEHLDFEHFYLQPMDGVDAQHNTRLTLAYCLSHPQWSLSLQTHKILGIA

SEQ ID NO: 30513 - protein, 247 aa, Haloactinopolyspora alba
  REGION 1..247: note = tr|A0A2P8DF21|A0A2P8DF21_9ACTN 7-carboxy-7-deazaguanine synthase OS=Haloactinopolyspora alba OX=648780 GN=queE PE=3 SV=1
MVSVTDTPTLPTVEVFGPTIQGEGPSTGRPATFIRLGHCNLSCSWCDTPYSWDATRHDLEAEITDRPAGDLLDVVAASGEPVSLTVLTGGEPLMHQRRPGMAALLDGLDELDQDVEVETNGTIPPTDELTQRPRVRFNVSPKLAHAGMDEKRTLRPGALKQFAALARDGRAVFKFVATDRDDLEDVRDIVRRYSVPARAVWIMPEGTQPGQLLASARDLLTDPYLLRMGWNLTPRLHALLWPNERSR

SEQ ID NO: 30514 - protein, 249 aa, unidentified
  source 1..249: note = Haloarcobacter mediterraneus
  REGION 1..249: note = tr|A0A4Q1AV24|A0A4Q1AV24_9PROT 7-carboxy-7-deazaguanine synthase OS=Haloarcobacter mediterraneus OX=2023153 GN=queE PE=3 SV=1
MLEINEIFGPTIQGEGKLVGSPSIFIRVGKCNFRCEGFNVEYETPSGIKKCSCDTYYAVDPAFKDQWQKMSAENIINKISKIEPKYKIDIVITGGEPLLYWKNDEFQKLLRYYIENNYKVTIETNASLDITLDKSYQKEIIFSMSVKLSNSLEPLKKRVNTTTLNTIIDKTKNSYLKFVVDKNFKKQAEEEIKNILLQIPRTEVYLMPMGDTAEQINQNSEAVINLAIKNGFKYCDRLHIRVWDNKRGV

SEQ ID NO: 30515 - protein, 242 aa, Halobacillus aidingensis
  REGION 1..242: note = tr|A0A1H0S917|A0A1H0S917_HALAD 7-carboxy-7-deazaguanine synthase OS=Halobacillus aidingensis OX=240303 GN=queE PE=3 SV=1
MNKFPVLEIFGPTIQGEGMVVGRKTMFVRTAGCDYSCSWCDSAFTWDGSAKHDIERLTSEEIVTRLIDTGGEQFDHVTISGGNPALLKNLHELIVPLHERGIEVALETQGSRWQEWFTQIDDLTISPKPPSSGMKTDWNILDDILIRLEGADRLQNTSIKVVIFNKEDLSYAEKVHERYPNVPFFLQVGNDDLEENEAGTLASHLLDQYEWLIDQVVASSKLNKVRVLPQVHALVWGNKRGV

SEQ ID NO: 30516 - protein, 242 aa, Halobacillus alkaliphilus
  REGION 1..242: note = tr|A0A1I2TI93|A0A1I2TI93_9BACI 7-carboxy-7-deazaguanine synthase OS=Halobacillus alkaliphilus OX=396056 GN=queE PE=3 SV=1
MSKFPVLEIFGPTIQGEGMVVGRKTMFVRTAGCDYSCAWCDSAFTWDGSAKDEIERLTADEIVNRLLETGGRHFDHVTISGGNPALLAKLDELIEPLHARGIEVALETQGSRWQDWFPEIDDLTISPKPPSSKMNTNWQVLDDIIERLLERGRLANVSLKVVVFNDEDLTYAERVHERYPDVPFFLQVGNDDLEEDAPPALASHLLDQYEWLIDQVVASEKLNHVRVLPQVHALVWGNKRGV

SEQ ID NO: 30517 - protein, 242 aa, Halobacillus dabanensis
  REGION 1..242: note = tr|A0A1I3XV21|A0A1I3XV21_HALDA 7-carboxy-7-deazaguanine synthase OS=Halobacillus dabanensis OX=240302 GN=queE PE=3 SV=1
MNKYPVLEIFGPTIQGEGMVVGRKTMFVRTAGCDYSCAWCDSAFTWDGSAKEEIERLTAEEIINRLINTGGNQFDHVTISGGNPALLKNLDELIAPLHEKGIEVALETQGSRWQDWFPEIDDLTISPKPPSSKMTTNWDVLDDIIQRLRTAGRIDNTSLKVVIFNESDLSYAEKVHQRYSDIPFFLQVGNDDLEENESNTLASHLLHQYEWLIDKVVESSKLNRVRVLPQVHALVWGNKRGV

SEQ ID NO: 30518 - protein, 242 aa, Halobacillus faecis
  REGION 1..242: note = tr|A0A511WYD8|A0A511WYD8_9BACI 7-carboxy-7-deazaguanine synthase OS=Halobacillus faecis; OX = 360184 GN=queE PE=3 SV=1
MNKFPVLEIFGPTIQGEGMVVGRKTMFVRTAGCDYSCAWCDSAFTWDGSAKHDIERLTSEEIVARLFNIGGEQFDHVTISGGNPALLKNLHELILPLHEKGIEVALETQGSRWQEWFTEIDDLTISPKPPSSGMKTDWDILDDMISRLEYADRGKHTSLKVVIFNEDDLTYAELVHQRYPNVPFFLQVGNDDLEESEAGTLASHLLDQYEWLIDQVVASSKLNKVRVLPQVHALVWGNKRGV

SEQ ID NO: 30519 - protein, 242 aa, Halobacillus halophilus
  REGION 1..242: note = tr|I0JJQ0|I0JJQ0_HALH3 7-carboxy-7-deazaguanine synthase OS=Halobacillus halophilus (strain ATCC 35676 / DSM 2266 / JCM 20832 / NBRC 102448/ NCIMB 2269) OX=866895; GN = queE PE=3 SV=1
MNKFPVLEIFGPTIQGEGMVVGRKTMFVRTAGCDYSCAWCDSAFTWDGSAKEEIERLTANEIVDRLLEAGGRHFDHVTISGGNPALLAKLDELIEPLHARGIEVALETQGSRWQDWFPEIDDLTISPKPPSSKMKTNWQVLDQIIERLLEQGRLANVSLKVVVFNHEDLAYAETVHERYPDVPFFLQVGNDDLEEDAPPALASHLLDQYEWLIDQVVASEKLNHVRVLPQVHALVWGNKRGV

SEQ ID NO: 30520 - protein, 242 aa, Halobacillus karajensis
  REGION 1..242: note = tr|A0A024P5S4|A0A024P5S4_9BACI 7-carboxy-7-deazaguanine synthase OS=Halobacillus karajensis OX=195088 GN=queE PE=3 SV=1
MNKFPVLEIFGPTIQGEGMVVGRKTMFVRTAGCDYSCAWCDSAFTWDGSAKQDIERLTAHEIVDRLIQTGGDQFDHVTISGGNPALLKNLHDLINLLHEKEIEIALETQGSRWQDWFLEIDDLTISPKPPSSKMETNWEALDGIINHLEKEERLRNTSLKVVIFNNEDLKYAEKVHERYPNVPFFLQVGNDDLEEDESSTLASHLLDQYEWLIDQVVASPKLNKVRVLPQVHALVWGNKRGV

SEQ ID NO: 30521 - protein, 242 aa, Halobacillus litoralis
  REGION 1..242: note = tr|A0A410MAV1|A0A410MAV1_9BACI 7-carboxy-7-deazaguanine synthase OS=Halobacillus litoralis OX=45668 GN=queE PE=3 SV=1
MNKFPVLEIFGPTIQGEGMVVGRKTMFVRTAGCDYSCAWCDSAFTWDGSAKEDIERLTSEEIVAHLIEEGGSQFDHVTISGGNPALLKNLHELIEPLHEEGIEVALETQGSRWQDWFLDIDDLTISPKPPSSKMDTNWMVLDDILFRLREGSRLSHTSLKVVIFNQEDLGYAEEVHQRYPEVPFFLQVGNDDLEENESSSLASHLLTQYEWLIDQVVASSRLNRVRVLPQVHALVWGNKRGV

SEQ ID NO: 30522 - protein, 242 aa, Halobacillus mangrovi
  REGION 1..242: note = tr|A0A1W5ZYF4|A0A1W5ZYF4_9BACI 7-carboxy-7-deazaguanine synthase OS=Halobacillus mangrovi; OX = 402384 GN=queE PE=3 SV=1
MNKFPVLEIFGPTIQGEGMVVGRKTMFVRTAGCDYSCAWCDSAFTWDGSAKDEIERLTADEIIARLKDEGGDKFDHVTVSGGNPALLKHLHELIDPLHEQGIEVALETQGSRWQDWFTSIDDLTISPKPPSSKMNTNWIVLDEIVARLKENGRLSNLSLKVVIFNDEDLTYAEEVHERYPDVPFFLQVGNDDLEEEKSSNLASHLLDQYEWLIDQVVDSEKLNHVRVLPQVHALVWGNKRGV

SEQ ID NO: 30523 - protein, 242 aa, Halobacillus salinus
  REGION 1..242: note = tr|A0A4Z0H457|A0A4Z0H457_9BACI 7-carboxy-7-deazaguanine synthase OS=Halobacillus salinus; OX = 192814 GN=queE PE=3 SV=1
MNKFPVLEVFGPTIQGEGMVVGRKTMFVRTAGCDYSCAWCDSAFTWDGSAKEDIERLTADEIIERLLSIGGQQFDHVTISGGNPALLKNLGELIDPLHQRGIEVALETQGSRWQDWFTDIDDLTISPKPPSSKMNTNWLVLDEIIARLKENGRDRHTSLKVVIFNEEDLGYAEEVHERYPDVPFFLQVGNDDLEENQPANLASHLLDQYEWLIDQVVASEKLNRVRVLPQVHALVWGNKRGV

SEQ ID NO: 30524 - protein, 242 aa, Halobacillus sp.
  REGION 1..242: note = tr|A0A0B0D4K8|A0A0B0D4K8_9BACI 7-carboxy-7-deazaguanine synthase OS=Halobacillus sp. BBL2006 OX=1543706 GN=queE PE=3 SV=1
MNKFPVLEIFGPTIQGEGMVVGRKTMFVRTAGCDYSCAWCDSAFTWDGSAKDEIERLTADEIITRLKDEGGNKFDHVTVSGGNPALLNNLHELIEPLHEQGVEVALETQGSRWQDWFTSIDDLTISPKPPSSKMKTNWMVLDEIVTRLKENDRLSNLSLKVVVFNDEDLVYAEEVHERYPDVPFFLQVGNDDLEEDKPANLASHLLDQYEWLIDKVVDSEKLNHVRVLPQVHALVWGNKRGV

SEQ ID NO: 30525 - protein, 242 aa, Halobacillus sp.
  REGION 1..242: note = tr|L5NFF4|L5NFF4_9BACI 7-carboxy-7-deazaguanine synthase OS=Halobacillus sp. BAB-2008 OX=1246484 GN=queE; PE = 3 SV=1
MNKFPVLEIFGPTIQGEGMVVGRKTMFVRTAGCDYSCAWCDSAFTWDGSAKEDIERLTAEEIITRLKETGGERFDHVTISGGNPALLKHLNELIDGLHDLGIEVALETQGSRYQDWFPDIDDLTISPKPPSSLMKTDWNILDDILHRLERKGRSDSTSLKVVIFNEEDLDYAAQVHERYPAIPFFLQVGNDDLKEGEPANLAGYLLEQYEWLIDQVVASEKLNHVRVLPQVHALVWGNKRGV

SEQ ID NO: 30526 - protein, 242 aa, Halobacillus trueperi
  REGION 1..242: note = tr|A0A3E0J753|A0A3E0J753_9BACI 7-carboxy-7-deazaguanine synthase OS=Halobacillus trueperi; OX = 156205 GN=queE PE=3 SV=1
MNKFPVLEIFGPTIQGEGMVVGRKTMFVRTAGCDYSCSWCDSAFTWDGSAKHDIERLTSEEIVTRLIDTGGEQFDHVTISGGNPALLKNLHELIVPLHERGIEVALETQGSRWQEWFTQIDDLTISPKPPSSGMKTDWNILDDILIRLEGADRLQNTSIKVVIFNKKDLSYAEKVHERYPNVPFFLQVGNDDLEENEAGTLASHLLDQYEWLIDQVVASSKLNKVRVLPQVHALVWGNKRGV

SEQ ID NO: 30527 - protein, 242 aa, Halobacillus trueperi
  REGION 1..242: note = tr|A0A3D8VSR5|A0A3D8VSR5_9BACI 7-carboxy-7-deazaguanine synthase OS=Halobacillus trueperi; OX = 156205 GN=queE PE=3 SV=1
MNKFPVLEIFGPTIQGEGMVVGRKTMFVRTAGCDYSCSWCDSAFTWDGSAKHDIERLTSEEIVTRLIDTGGEQFDHVTISGGNPALLKNLHELIVPLHERGIEVALETQGSRWQEWFTQIDDLTISPKPPSSGMKTDWNILDDILIRLEGADRLQNTSIKVVIFNKEDLSYAEKVHEHYPNVPFFLQVGNDDLEENEAGTLASHLLDQYEWLIDQVVASSKLNKVRVLPQVHALVWGNKRGV

SEQ ID NO: 30528 - protein, 245 aa, unidentified
  source 1..245: note = Halobacteriovoraceae bacterium
  REGION 1..245: note = tr|A0A2E5X024|A0A2E5X024_9PROT 7-carboxy-7-deazaguanine synthase OS=Halobacteriovoraceae bacterium OX=2026745 GN=queE PE=3 SV=1
MCYKLSTMSSKLAINSIYMATEGEGIHIGTPQIFVRFQGCNIGCINCDSKDTWEFTDPEMSFDSAISKVEELAGEYPMRVKRVSITGGDPLHPKHVPAVTAIARELKKRGYFINLEAAGTRIVHEIFDVIDFISFDFKTPSTGVRTNTKLLVKLWEQYKNKAQIKAVVASRHDYEAALDAYKTVSEQTEHQFDIPWVITPCYEPGDELPKTLAQSIVELNHSYGAPFRVILQQHKVIYTADFGDF

SEQ ID NO: 30529 - protein, 237 aa, unidentified
  source 1..237: note = Halobacteriovoraceae bacterium
  REGION 1..237: note = tr|A0A2E2EI90|A0A2E2EI90_9PROT 7-carboxy-7-deazaguanine synthase OS=Halobacteriovoraceae bacterium OX=2026745 GN=queE PE=3 SV=1
MTQLVVNSIYMATEGEGIHIGTPQIFVRFQGCSIGCLNCDSKETWDFDAAGLSLEQVLNEVETQAGKYPYRIKRVSITGGDPLHPKHAPQVEALAMELKKRGYYINLEAAGTRVLDSLFDSIDFISFDFKTPSTGVKTNIKLLEKVFVQYASKAQIKSVIADKKDFEFTYDTYMSLQQKHEYSLTTPWVLTPCYEPGEEFPKERFIEVINFNEAYGSPFRVIGQQHKWIHGPNKQNV

SEQ ID NO: 30530 - protein, 233 aa, unidentified
  source 1..233: note = Halobacteriovorax marinus
  REGION 1..233: note = tr|E1X3S8|E1X3S8_HALMS 7-carboxy-7-deazaguanine synthase OS=Halobacteriovorax marinus (strain ATCC BAA-682 / DSM 15412 / SJ) OX=862908 GN=queE PE=3 SV=1
MKSFLINSIYPATEGEGVHIGTPQIFVRFQGCAIGCLNCDSKDTWDFTGRNWTLDEVLGAIEDAGGERIKRVSITGGDPLHPSHTEQVSLLVSTLKERGYFINIEAAGTRVVDEIFNKIDFISFDFKTPSTGVKTRVQNLNKLIQNYPNKFQIKAVVETREDFEATLDIYNELLSMNESLSFPWCLTPSYNLNEEFPLERFRNVIKWNEEGGSIFRVIGQQHKWLYGPDEKQV

SEQ ID NO: 30531 - protein, 228 aa, unidentified
  source 1..228: note = Halobacteriovorax marinus
  REGION 1..228: note = tr|A0A1Y5FCW0|A0A1Y5FCW0_9PROT 7-carboxy-7-deazaguanine synthase OS=Halobacteriovorax marinus OX=97084 GN=queE PE=3 SV=1
MNSIYLATEGEGVHIGTPQVFVRFQGCTIGCLNCDSKDTWDFEGNRWTKEEVLSAIEDAGGKNLKRVSITGGDPLHPSHVPNVLELVTELKSRGYYINLEAAGTRIVPEIFEKIDYISMDFKTPSTGVKTRVELLSTLINNYPSKFQIKAVIETHEDMIATTDAYNQLLSMNTTLNFPWNLTPSYNLNEEFPLERFRNVIKWNEEAGGLFRVIGQQHKWLYGPDEKQV

SEQ ID NO: 30532 - protein, 235 aa, unidentified
  source 1..235: note = Halobacteriovorax sp.
  REGION 1..235: note = tr|A0A2E6HB73|A0A2E6HB73_9PROT 7-carboxy-7-deazaguanine synthase OS=Halobacteriovorax sp.; OX = 2020862 GN=queE PE=3 SV=1
MKDFLINSIYRATEGEGVNIGQSQIFVRFQGCAVGCLNCDSMDTWDFDPSTVMTLKEVMAAVEYQGHIGKIKRVSITGGDPLHPKHTPRVLELVKELKQKGYWINIEAAGTRVVDELFDLIDFISFDFKTPSTGVATNPNLLRRVIEQYGNRAQIKSVVENKADFSSALFAHQWLLENTDLYLTPWVVTPAYNLGEEFPEKRFQDIIAWNEEVGAPFRVIGQQHKWIFGPDKKQV

SEQ ID NO: 30533 - protein, 233 aa, unidentified
  source 1..233: note = Halobacteriovorax sp.
  REGION 1..233: note = tr|A0A2G8HXZ3|A0A2G8HXZ3_9PROT 7-carboxy-7-deazaguanine synthase OS=Halobacteriovorax sp. JY17 OX=2014617 GN=queE PE=3 SV=1
MKSFLINSIYPATEGEGVHIGTPQVFVRFQGCAIGCLNCDSKDTWDFTGRNWTLEEVLTGIEDAGGERMKRVSITGGDPLHPSHTDQVLSLVETLKERGYFVNIEAAGTRVVDEIFNKLDFISFDFKTPSTGVKTRVQALNKLIQNYPGKFQIKAVVETEEDYRATVDMYNELLSMNSSLNFPWCLTPSYNLNEEFPLERFRNVIKWNEEGGSLFRVIGQQHKWLFGPDEKQV

SEQ ID NO: 30534 - protein, 212 aa, unidentified
  source 1..212: note = Halodesulfovibrio marinisediminis
  REGION 1..212: note = tr|A0A1N6I871|A0A1N6I871_9DELT 7-carboxy-7-deazaguanine synthase OS=Halodesulfovibrio marinisediminis DSM 17456 OX=1121457 GN=queE PE=3 SV=1
MSFRVTEIFYTLQGEGFHAGRAAVFCRFSGCNLWTGREEDREQATCKFCDTNFVQPAESGGTFASASELVSSIMNTFPDIQHAKYTPYVVFTGGEPALQVTPELISLLKEQQVEIGIETNGTLPLPEGLDWITVSPKAGTQLAVTSGHELKLVWPQENVILSDFQALDFEHFYIQPKDGQKRSTSTQLAVKICRENPVWKLSLQTHKYIGIP

SEQ ID NO: 30535 - protein, 216 aa, unidentified
  source 1..216: note = Halomonadaceae bacterium
  REGION 1..216: note = tr|A0A139CD61|A0A139CD61_9GAMM 7-carboxy-7-deazaguanine synthase OS=Halomonadaceae bacterium T82-2 OX=1783518 GN=queE PE=3 SV=1
MYSVKEAFYSLQGEGARTGRPSVFCRFTGCNLWSGRERDRAGSLCRFCDTDFIGTDGQNGGRFADAEQLATHLAELWPDGTERAVPYVVFTGGEPLLQLDPALIAAMHTLGFEIAVETNGTLPAPEGIDWLCVSPKGRAELTITRGDELKLVYPQPDAPPARFADLAFRHFYLQPMDTRPAGMANDESPLAASLAFCLAHPQWHLSLQTHKQLGID

SEQ ID NO: 30536 - protein, 218 aa, unidentified
  source 1..218: note = Halomonas aestuarii
  REGION 1..218: note = tr|A0A1J0VBR9|A0A1J0VBR9_9GAMM 7-carboxy-7-deazaguanine synthase OS=Halomonas aestuarii; OX = 1897729 GN=queE PE=3 SV=1
MYSVKEAFYSLQGEGGQAGRASVFCRFTGCNLWSGRERDRATAACRFCDTDFIGTDGQHGGRFSDAAALADHLAALWPDQDGVATPYVVFTGGEPLLQLDEALVSAMHDRGFEVAVETNGTLPAPAGIDWLCVSPKGDAPLVLTGGDELKLVHPQAGVSPEGFARLDFAHFFLQPMDTAPAGIAGDATPDTMAETVAYCLAHPQWRLSLQTHKIAGVD

SEQ ID NO: 30537 - protein, 218 aa, Halomonas alkaliantarctica
  REGION 1..218: note = tr|A0A4R7Y7H2|A0A4R7Y7H2_9GAMM 7-carboxy-7-deazaguanine synthase OS=Halomonas alkaliantarctica OX=232346 GN=queE PE=3 SV=1
MYQVKEAFYTLQGEGAQAGRASVFCRFSGCNLWSGREIDRATAKCTFCDTDFIGTNGINGGKFATATALAEHIAALWPSHSSDAKSKATPYVVFTGGEPLLQLDTALIATLHSHGFEVAVETNGTLPPPPGIDWLCVSPKGSNPLAVTQGDELKLVYPQAEAPPEQFSSLGFRHFFLQPMDLAPINQDKTTVAEATAYCMANPQWRLSLQMHKLAGFD

SEQ ID NO: 30538 - protein, 214 aa, Halomonas alkaliphila
  REGION 1..214: note = tr|A0A386X435|A0A386X435_9GAMM 7-carboxy-7-deazaguanine synthase OS=Halomonas alkaliphila; OX = 272774 GN=queE PE=3 SV=1
MYHVKEAFYTLQGEGAQAGRASVFCRFSGCNLWSGREIDRASAKCSFCDTDFVGTDGINGGRFNTPRELADHIKALWPVHAGRATPYVVFTGGEPLLQLDTPLITLLHSDGFEVAVETNGTVIPPPGIDWLCVSPKGTNPLVVTHGDELKLVFPQSAAPPTQFANLDFNHFFLQPMDHGIAHRNHETVQATTEYCMANPQWRLSLQTHKIAGFE

SEQ ID NO: 30539 - protein, 214 aa, Halomonas andesensis
  REGION 1..214: note = tr|A0A433KT18|A0A433KT18_9GAMM 7-carboxy-7-deazaguanine synthase OS=Halomonas andesensis; OX = 447567 GN=queE PE=3 SV=1
MYHVKEAFYTLQGEGAQAGRASVFCRFSGCNLWSGREADRASAKCSFCDTDFIGTDGINGGRFNTPSELAEHIKALWPTPAEKATPYVVFTGGEPLLQLDTPLIALLHSDGFEVAVETNGTVVPPPGIDWLCVSPKSTNPLVVTCGDELKLVFPQSSAPPTQFANLDFKHFFLQPMDHGIAQKNHETVQATTAYCMANPQWRLSLQTHKIAGFE

SEQ ID NO: 30540 - protein, 215 aa, Halomonas anticariensis
  REGION 1..215: note = tr|S2KR43|S2KR43_HALAF 7-carboxy-7-deazaguanine synthase OS=Halomonas anticariensis (strain DSM 16096 / FP35) OX=1121939 GN=queE PE=3 SV=1
MYSVKEAFYTLQGEGARAGRASVFCRFTGCNLWSGREADRASSPCRFCDTDFVGTDGQHGGRFRDATSLADHLAALWPTNTVGKAAPYVVFTGGEPLLQLDASLIEAMHARDFEVAVETNGTIEIPAGIDWLCVSPKGTSRMVVTRGDELKLVYPQRDAPPERFAHLDFQYFYLQPMDLTPLHGEGDTMAEVVAYCLRTPQWQLSLQTHKIVGID

SEQ ID NO: 30541 - protein, 220 aa, Halomonas aquamarina
  REGION 1..220: note = tr|A0A1H8INW5|A0A1H8INW5_9GAMM 7-carboxy-7-deazaguanine synthase OS=Halomonas aquamarina; OX = 77097 GN=queE PE=3 SV=1
MYHVKEAFYTLQGEGAQAGRASVFCRFTGCNLWSGREIDRANAQCTFCDTDFNGTDGVNGGRFNTAQALAEHIKALWPQEANNAVPYVVFTGGEPLLQLDTELIATLHSEGFEVAVETNGTVPAPTGIDWLCVSPKGSNPLAITQGDELKLVFPQADAPPEQFSHLAFSHFFLQPMDLSAVAQKSIATDGAATVQATTAYCMANPQWRLSLQTHKIAGFE

SEQ ID NO: 30542 - protein, 214 aa, Halomonas arcis
  REGION 1..214: note = tr|A0A1H0F9Z5|A0A1H0F9Z5_9GAMM 7-carboxy-7-deazaguanine synthase OS=Halomonas arcis; OX = 416873 GN=queE PE=3 SV=1
MYHVKEAFYTLQGEGAQAGRASVFCRFSGCNLWSGREQDRATAKCTFCDTDFIGTDGTGGGRFTTPDALADHILGLWPLEADNATPYVVFTGGEPLLQLNPALIAHLHSRGFEVAVETNGTLPPPAGIDWLCVSPKGKNPLVVNQGDELKLVYPQVEAPPEAFAQLDFRHFFLQPMDLSPVQQDADTVARTTAYCLAHPQWRLSLQTHKIAGFD

SEQ ID NO: 30543 - protein, 214 aa, unidentified
  source 1..214: note = Halomonas beimenensis
  REGION 1..214: note = tr|A0A291P801|A0A291P801_9GAMM 7-carboxy-7-deazaguanine synthase OS=Halomonas beimenensis; OX = 475662 GN=queE PE=3 SV=1
MYSVKEAFYSLQGEGGQAGRASVFCRFSGCNLWSGREAHRAAAACRFCDTDFVGTDGQHGGRFTSTAALADHLVALWPEAPGTATPQVIFTGGEPLLQLDEALIAAMHERGFDVAVETNGTLPAPAGIDWLCVSPKGQAPLVQTRGDELKLIHPQPDAPPERFVDLGFRHFFLQPMDTAPLGGGGDSLAETVAYCLAHPQWRLSLQTHKIAGID

SEQ ID NO: 30544 - protein, 214 aa, Halomonas boliviensis
  REGION 1..214: note = tr|A0A265DUY9|A0A265DUY9_9GAMM 7-carboxy-7-deazaguanine synthase OS=Halomonas boliviensis LC1 OX=1072583 GN=queE PE=3 SV=1
MYQVKEAFYTLQGEGAQAGRASVFCRFSGCNLWSGREVDRPTAKCTFCDTDFIGTNGINGGKFATATALAEHIAALWPSQNDNATPYVVFTGGEPLLQLDAALIATLHSHGFEVAVETNGTLKPPPGIDWLCVSPKGSNPLAVTRGDELKLVYPQTDAPPEQFSRLGFRHFFLQPMDLTPLDQAKSTVAEATAYCMANPQWRLSLQMHKLAGFD

SEQ ID NO: 30545 - protein, 214 aa, Halomonas campaniensis
  REGION 1..214: note = tr|A0A060BAH6|A0A060BAH6_9GAMM 7-carboxy-7-deazaguanine synthase OS=Halomonas campaniensis OX=213554 GN=queE PE=3 SV=1
MYHVKEAFYTLQGEGAQAGRASVFCRFSGCNLWSGREIDRASAKCSFCDTDFVGTDGINGGRFNTARELAEHIKALWPVHAGRATPYVVFTGGEPLLQLDTPLIALLHSDGFEVAVETNGTVIPPPGIDWLCVSPKGTNPLVVTHGDELKLVFPQSAAPPTQFANLDFNHFFLQPMDHGIAQKNHATVQATTEYCMANPQWRLSLQTHKIAGFE

SEQ ID NO: 30546 - protein, 214 aa, Halomonas campaniensis
  REGION 1..214: note = tr|A0A3D0KJ22|A0A3D0KJ22_9GAMM 7-carboxy-7-deazaguanine synthase OS=Halomonas campaniensis OX=213554 GN=queE PE=3 SV=1
MYHVKEAFYTLQGEGAQAGRASVFCRFSGCNLWSGREIDRASAKCSFCDTDFIGTDGINGGRFNTPRELADHIKALWPVHAGRATPYVVFTGGEPLLQLDTPLIALLHSDGFEVAVETNGTVIPPPGIDWLCVSPKGTNSLVVTRGDELKLVFPQSAAPPTQFANLDFNHFFLQPMDHGIAQRNHATVQATTEYCMANPQWRLSLQTHKIAGFE

SEQ ID NO: 30547 - protein, 214 aa, Halomonas caseinilytica
  REGION 1..214: note = tr|A0A1M6NTB8|A0A1M6NTB8_9GAMM 7-carboxy-7-deazaguanine synthase OS=Halomonas caseinilytica OX=438744 GN=queE PE=3 SV=1
MYSVKEAFYSLQGEGGQAGRASVFCRFAGCNLWSGREADRAAAACRFCDTDFRGTDGQNGGRFADAPALADHLVALWQGTSDGARPQVIFTGGEPLLQLDEALIEAMHEREFDIAVETNGTLAAPAGIDWLCVSPKGDTPLVQTRGDELKLVHPQPDAPPERFTELDFRHFFLQPMDTSPLGEARDTMAATVAYCLAHPRWRLSIQAHKIAGID

SEQ ID NO: 30548 - protein, 214 aa, unidentified
  source 1..214: note = Halomonas chromatireducens
  REGION 1..214: note = tr|A0A0X8HDJ3|A0A0X8HDJ3_9GAMM 7-carboxy-7-deazaguanine synthase OS=Halomonas chromatireducens OX=507626 GN=queE PE=3 SV=1
MYSVKEAFYTLQGEGGQAGRASVFCRFTGCNLWSGRERDRATAACTFCDTDFLGTDGQNGGRFRDADALADHLTALWPDQYGVVTPYVVFTGGEPLLQLDEALIAAMHRRGFEVAVETNGTIAPPPGIDWLCVSPKGATELAVTGGDEIKLVYPQQEAPPARFQRLDFHYFFLQPMDSAPLGKHESHMDATVAYCLAHPQWRLSLQTHKIAGFD

SEQ ID NO: 30549 - protein, 221 aa, Halomonas cupida
  REGION 1..221: note = tr|A0A1M7AU95|A0A1M7AU95_9GAMM 7-carboxy-7-deazaguanine synthase OS=Halomonas cupida; OX = 44933 GN=queE PE=3 SV=1
MYSIKEAFYTLQGEGMQAGRASVFCRFSGCNLWSGREQDRERAQCRFCDTDFVGTDGEGGGRFANAAGLAEHIAGLWPFAAGAQGATPYVVFTGGEPLLQLDEALIEAMHQRGFEVAVETNGTLTAPAGIDWICVSPKGNTPLTQTSGHELKLVYPQQGVSPEHFADLDFDHFLLQPMDVSHMAPSSQPRHDNPLQATLDYCMTHPLWRFSLQTHKIAGIA

SEQ ID NO: 30550 - protein, 214 aa, Halomonas daqingensis
  REGION 1..214: note = tr|A0A1H5RRC5|A0A1H5RRC5_9GAMM 7-carboxy-7-deazaguanine synthase OS=Halomonas daqingensis; OX = 419596 GN=queE PE=3 SV=1
MYHVKEAFYSLQGEGARAGRASVFCRFSGCNLWSGREQDRSSAACSFCDTDFVGTDGQNGGRFASAEALADHLAALWPDTAGVATPYVVFTGGEPLLQLDAALIAAMHAHGFEVAVETNGTLPAPAGIDWLCVSPKGTTPLALTAGDELKLVYPQPEAPPERFAELAFRYHFLQPMDTTALSANEEHVSATVAYCLAHPLWRLSLQTHKITGID

SEQ ID NO: 30551 - protein, 214 aa, Halomonas desiderata
  REGION 1..214: note = tr|A0A243T3E7|A0A243T3E7_9GAMM 7-carboxy-7-deazaguanine synthase OS=Halomonas desiderata SP1 OX=1191209 GN=queE PE=3 SV=1
MYHVKEAFYSLQGEGARAGRASVFCRFSGCNLWSGREQDRSSAACSFCDTDFVGTDGQNGGRFASAEALADHLAALWPDTAGVATPYVVFTGGEPLLQLDAALITAMHAHGFEVAVETNGTLPAPAGIDWLCVSPKGTTPLALTAGDELKLVYPQPEAPPERFAELAFRYHFLQPMDTTALSANDEHVSATVAYCLTHPLWRLSLQTHKITGID

SEQ ID NO: 30552 - protein, 214 aa, Halomonas elongata
  REGION 1..214: note = tr|E1VC57|E1VC57_HALED 7-carboxy-7-deazaguanine synthase OS=Halomonas elongata (strain ATCC 33173 / DSM 2581 / NBRC 15536 / NCIMB 2198 / 1H9) OX=768066 GN=queE; PE = 3SV=1
MYSVKEAFYSLQGEGGQAGRASVFCRFAGCNLWSGREADRVSAACRFCDTDFRGTDGQNGGRFADAETLAEHLVGLWEGAPDGSRPQVIFTGGEPLLQLDDALIAAMHDREFDVAVETNGTLAAPAGIDWLCVSPKGDVPLVQTRGDELKLVHPQPEAPPERFTGLDFRHFFLQPMDTSPLGETRDTMAATVAYCLANPRWRLSLQTHKIAGID

SEQ ID NO: 30553 - protein, 214 aa, Halomonas elongata
  REGION 1..214: note = tr|A0A329Q9F9|A0A329Q9F9_HALEL 7-carboxy-7-deazaguanine synthase OS=Halomonas elongata; OX = 2746 GN=queE PE=3 SV=1
MYSVKEAFYSLQGEGGQAGRASVFCRFAGCNLWSGREADRVSAACRFCDTDFRGTDGQNGGRFVDAETLAEHLVALWQGAPDGSRPQVIFTGGEPLLQLDDALIAAMHDREFDVAVETNGTLAAPDGIDWLCVSPKGDVPLVQTRGDELKLVHPQPEAPPERFTGLDFRHFFLQPMDTSPLGETRDTMAATVTYCLANPRWRLSLQTHKIAGID

SEQ ID NO: 30554 - protein, 214 aa, unidentified
  source 1..214: note = Halomonas endophytica
  REGION 1..214: note = tr|A0A2N7TXM4|A0A2N7TXM4_9GAMM 7-carboxy-7-deazaguanine synthase OS=Halomonas endophytica; OX = 2033802 GN=queE PE=3 SV=1
MYHVKEAFYTLQGEGGQAGRASVFCRFTGCNLWSGRERDRATAACRFCDTDFLGTDGQNGGRFTDAETLAGHLTALWPDQDGVVTPYVVFTGGEPLLQLDETLIRAMHRQGFEVAVETNGTIVPPAGIDWLCVSPKGASVLAVTGGDEIKLVYPQRDAPPERFATLDFRYYFLQPMDTGPLGEPGSRMAETVGYCMAHPQWRLSLQTHKIAGFD

SEQ ID NO: 30555 - protein, 214 aa, Halomonas eurihalina
  REGION 1..214: note = tr|A0A5D9DB78|A0A5D9DB78_HALER 7-carboxy-7-deazaguanine synthase OS=Halomonas eurihalina; OX = 42566 GN=queE PE=3 SV=1
MYSVKEAFYSLQGEGGQAGRASVFCRFAGCNLWSGREADRVSAACRFCDTDFRGTDGQNGGRFADAETLAEHLVALWQGASDGSRPQVIFTGGEPLLQLDEALIEAMHDRAFDVAVETNGTLAAPAGIDWLCVSPKGDVPLVQTRGDELKLVHPQPEAPPERFTGLDFRHFFLQPMDTSPLGETRDTMATTVAYCLANPRWRLSLQTHKIAGID

SEQ ID NO: 30556 - protein, 217 aa, Halomonas halmophila
  REGION 1..217: note = tr|A0A4Y4F041|A0A4Y4F041_9GAMM 7-carboxy-7-deazaguanine synthase OS=Halomonas halmophila; OX = 252 GN=queE PE=3 SV=1
MYSVKEAFYSLQGEGGQAGRASVFCRFAGCNLWSGREADRATAACHFCDTDIRGTDGQNGGRFGDADALGAHLESLWPGVPDGAHPQVIFTGGEPLLQLDDALIAAMHERGFDVAVETNGTLAAPAGIDWLCVSPKGRNPLVQTRGDELKLVYPQDEAPPERFTGMGFRHFYLQPMDSAPLASMEHSGDTMASTVAYCLANPRWRLSLQTHKIAGID

SEQ ID NO: 30557 - protein, 213 aa, Halomonas halophila
  REGION 1..213: note = tr|A0A510Z7V1|A0A510Z7V1_9GAMM 7-carboxy-7-deazaguanine synthase OS=Halomonas halophila; OX = 29573 GN=queE PE=3 SV=1
MYSVKEAFYSLQGEGGQAGRASVFCRFSGCNLWSGREADRAAAACRFCDTDIRGTDGQHGGRFHDAEALVDHLTALWPDAPGTATPQVIFTGGEPLLQLDEPLIAAMHERGFDVAVETNGTLPAPPGIDWLCVSPKGESVLAQTSGDELKLVYPQSDAPPERFTDLDFHHFFLQPMDTAAVGGGDVTAETVAYCLSHPQWRLSLQTHKITGID

SEQ ID NO: 30558 - protein, 214 aa, unidentified
  source 1..214: note = Halomonas heilongjiangensis
  REGION 1..214: note = tr|A0A2N7TIE8|A0A2N7TIE8_9GAMM 7-carboxy-7-deazaguanine synthase OS=Halomonas heilongjiangensis OX=1387883 GN=queE PE=3 SV=1
MYSVKEAFYSLQGEGARAGRASVFCRFSGCNLWSGRERDRAGAACHFCDTDFVGTDGQHGGRFADAAALAGHLAALWPAEAGVATPYVVFTGGEPLLQLDEALIDAMHARGFEVAVETNGTLPAPAGIDWLCVSPKGATSLTLTAGDELKLVYPQDAAPPERFAGLDFHHFFLQPMDTAPLGRTDSPMAETVAYCLAHPQWRLALQTHKIAGID

SEQ ID NO: 30559 - protein, 221 aa, unidentified
  source 1..221: note = Halomonas huangheensis
  REGION 1..221: note = tr|W1NCP9|W1NCP9_9GAMM 7-carboxy-7-deazaguanine synthase OS=Halomonas huangheensis OX=1178482 GN=queE PE=3; SV = 1
MYSVKEAFYTLQGEGIQAGRASVFCRFSGCNLWSGREQDRERAQCRFCDTDFVGTDGQGGGRFSDAASLADHIVELWPFPVGASGSVPYVVFTGGEPLLQLDAALIDAMHQRGFEVAVETNGTLPAPPGIDWICVSPKGDAPLAQTYGNELKLVYPQRDLAPARFSGLEFDHFLLQPMDISHVPEHHIPTTESPMQATLEYCLSNPLWRFSLQTHKIAGIA

SEQ ID NO: 30560 - protein, 224 aa, Halomonas hydrothermalis
  REGION 1..224: note = tr|A0A291JWY4|A0A291JWY4_9GAMM 7-carboxy-7-deazaguanine synthase OS=Halomonas hydrothermalis OX=115561 GN=queE PE=3 SV=1
MYHVKEAFYTLQGEGAQAGRASVFCRFAGCNLWSGRDADRATAKCTFCDTDFIGTDGANGGRFESPQQLARHIKQLWPANAGSAVPYVVFTGGEPLLQLDTPLIAMLHSEGFEVAVETNGTLPAPAGIDWLCVSPKGSNPLAIHQGDELKLVYPQHDAPPGQFAALHFRHFYLQPMDHVAQHPDTIHTTVAERNAATVAATTAYCMTHPQWRLSLQTHKIAGFD

SEQ ID NO: 30561 - protein, 214 aa, Halomonas korlensis
  REGION 1..214: note = tr|A0A1I7F3C7|A0A1I7F3C7_9GAMM 7-carboxy-7-deazaguanine synthase OS=Halomonas korlensis; OX = 463301 GN=queE PE=3 SV=1
MYQVKEAFYTLQGEGGQTGRPSVFCRFSGCNLWSGRERDRATAACRFCDTDFVGTDGQNGGRFTDAEALAGHLAALWPDVGGRSRPYVVFTGGEPLLQLDAPLIDALHARHFEVAVETNGTLPAPAGVDWLCVSPKGENSLIVTEGDELKLVYPQPDAPPERFADLGFRLFFLQPMDRTPLGQATTTVDDTLAYCLDNPQWRLSLQTHKIMGID

SEQ ID NO: 30562 - protein, 220 aa, Halomonas meridiana
  REGION 1..220: note = tr|A0A0D7V0J0|A0A0D7V0J0_9GAMM 7-carboxy-7-deazaguanine synthase OS=Halomonas meridiana; OX = 29570 GN=queE PE=3 SV=1
MYHVKEAFYTLQGEGAQAGRASVFCRFTGCNLWSGREIDRANAKCTFCDTDFNGTDGVNGGRFNTAQALAEHIKALWPQEANNAVPYVVFTGGEPLLQLDTELIATLHSEGFEVAVETNGTVPAPAGIDWLCVSPKGSNPLAITQGDELKLVFPQADAPPEQFSHLAFSHFFLQPMDLSAVAQKSIATDGAATVQATTAYCMANPQWRLSLQTHKIAGFE

SEQ ID NO: 30563 - protein, 220 aa, Halomonas meridiana
  REGION 1..220: note = tr|A0A1N6CNM5|A0A1N6CNM5_9GAMM 7-carboxy-7-deazaguanine synthase OS=Halomonas meridiana; OX = 29570 GN=queE PE=3 SV=1
MYHVKEAFYTLQGEGAQAGRASVFCRFTGCNLWSGREIDRANAKCTFCDTDFNGTDGVNGGRFNTAQALAEHIKALWPQEANNAVPYVVFTGGEPLLQLDTELIATLHSEGFEVAVETNGTVPAPAGIDWLCVSPKGSNPLAITQGDELKLVFPQADAPPEQFSHLAFSHFFLQPMDLSAVAQKSIVTDGAATVQATTAYCMANPQWRLSLQTHKIAGFE

SEQ ID NO: 30564 - protein, 219 aa, Halomonas muralis
  REGION 1..219: note = tr|A0A1G9FRU6|A0A1G9FRU6_9GAMM 7-carboxy-7-deazaguanine synthase OS=Halomonas muralis; OX = 119000 GN=queE PE=3 SV=1
MYSVKEAFYSLQGEGARAGRASVFCRFSGCNLWSGRERDRASSACRFCDTDFVGSDGQNGGRFDNADSLADHLAGLWPFDACSEAERRGVPYVVFTGGEPLLQLGSALIEAMRERGFEIALETNGTLPVPSGIDWLCVSPKGLTELVVTQGDELKLVYPQSDNRPERFAALDFRHFYLQPMDRQPLGGNGTTIGDTVAYCLAHPQWQLSLQTHKIAGID

SEQ ID NO: 30565 - protein, 214 aa, unidentified
  source 1..214: note = Halomonas nigrificans
  REGION 1..214: note = tr|A0A2A4HL89|A0A2A4HL89_9GAMM 7-carboxy-7-deazaguanine synthase OS=Halomonas nigrificans; OX = 2042704 GN=queE PE=3 SV=1
MYHIKEAFYTLQGEGAQAGRASVFCRFTGCNLWSGREIDRANAQCTFCDTDFIGTDGINGGRFTTPNALAEHLNALWPQHNTRATPYVVFTGGEPLLQLDTPLITAMHDYGFEVAVETNGTLPPPPGIDWLCVSPKGANTLAITQGDELKLVYPQSKALPEKFAPLGFKHFFLQPMDRGNPQVNAETVHLTTAYCMANPQWRLSLQTHKIAGFD

SEQ ID NO: 30566 - protein, 214 aa, Halomonas nitroreducens
  REGION 1..214: note = tr|A0A431V8B6|A0A431V8B6_9GAMM 7-carboxy-7-deazaguanine synthase OS=Halomonas nitroreducens OX=447425 GN=queE PE=3 SV=1
MYSVKEAFYSLQGEGGQAGRASVFCRFAGCNLWSGREVDRASAACRFCDTDIRGTDGQHGGRFASAAALAEHLTMLWPDAPGTATPQVIFTGGEPLLQLDGALIEAMHDRGFDVAVETNGTLPAPPGIDWLCVSPKGTAPLVQTSGDELKLVYPQDDAPPSRFVDLDFRHFFLQPMDTAPLGGGDAALADTVTYCLGHPQWRLSLQTHKIAGID

SEQ ID NO: 30567 - protein, 214 aa, Halomonas pacifica
  REGION 1..214: note = tr|A0A510X6N1|A0A510X6N1_9GAMM 7-carboxy-7-deazaguanine synthase OS=Halomonas pacifica; OX = 77098 GN=queE PE=3 SV=1
MYHVKEAFYSLQGEGARAGRASVFCRFSGCNLWSGREADRDTSICRFCDTDFIGSDGQNGGRFADAEALAAHLCALWPDSRGVATPYVVFTGGEPLLQLDPPLIQAMQRLGFEVAVETNGTLLPPPGIDWLCVSPKGRAELAVDGGDELKLVYPQAEAPPERFQALDFAHFCLQPMDLTPRGGTGTTLDACVDYCLAHPQWHLSLQTHKIAGID

SEQ ID NO: 30568 - protein, 214 aa, Halomonas pantelleriensis
  REGION 1..214: note = tr|A0A1G9MC51|A0A1G9MC51_9GAMM 7-carboxy-7-deazaguanine synthase OS=Halomonas pantelleriensis OX=48727 GN=queE PE=3 SV=1
MYHVKEAFYTLQGEGARAGRASVFCRFSGCNLWSGREQDRATSVCQFCDTDFVGTDGPGGGRFSSADALADHLLGQWPARSHGATPYVVFTGGEPLLQLDTALIEAMHARGFEIAVETNGTLAPPPGIDWLCVSPKGASRLAVTGGDELKLVYPQSAAPPERFAELDFQHFYLQPMDLAPQGRDGTTLEATLAYCLATPRWQLSLQTHKIAGFA

SEQ ID NO: 30569 - protein, 218 aa, Halomonas saccharevitans
  REGION 1..218: note = tr|A0A1I6ZPH7|A0A1I6ZPH7_9GAMM 7-carboxy-7-deazaguanine synthase OS=Halomonas saccharevitans OX=416872 GN=queE PE=3 SV=1
MYSVKEAFYSLQGEGGQAGRASVFCRFSGCNLWSGREADRTTAACRFCDTDFIGTDGQNGGRFREAAALADHLTALWPDHGGVATPYVVFTGGEPLLQLDEVLVAAMHESGFEVAVETNGTLPPPAGIDWLCVSPKGDNPLVVTGGDELKLVHPQAGVTPERFARLDFAHFFLQPMDTTPAGLEGDGASNTMAETVAYCLAHPQWRLSLQTHKIAGVD

SEQ ID NO: 30570 - protein, 214 aa, unidentified
  source 1..214: note = Halomonas songnenensis
  REGION 1..214: note = tr|A0A2T0V140|A0A2T0V140_9GAMM 7-carboxy-7-deazaguanine synthase OS=Halomonas songnenensis OX=1176243 GN=queE PE=3 SV=1
MYHVKEAFYTLQGEGAQAGRASVFCRFTGCNLWSGREADRAQAKCTFCDTDFIGTDGVNGGRFASAAELGAHIQALWPENARNATPYVVFTGGEPLLQLDKALIDTLHEAGFEIAVETNGTLLPPSGIDWVCVSPKGSNALAITQGDELKLVYPQADAPPELFSELAFKHFFLQPMDLGFLAQQPDHVANTTEYCMANPQWRLSLQTHKIAGFD

SEQ ID NO: 30571 - protein, 215 aa, Halomonas sp.
  REGION 1..215: note = tr|A0A1A0FML6|A0A1A0FML6_9GAMM 7-carboxy-7-deazaguanine synthase OS=Halomonas sp. G11; OX = 1684425 GN=queE PE=3 SV=1
MYQVKEAFYTLQGEGAQAGRASVFCRFSGCNLWSGRERDRATARCTFCDTDFVGTDGQGGGRFETPAALADHISTLWPSDSGTAIPYVVFTGGEPLLQLDPALIATLHSVGFEVAVETNGTLTPPAGIDWLCVSPKGKNPLVIDQGDELKLVYPQTEAPPEAFAKLDFRHFFLQPMDLSPSDAQDDDTVARTTAYCLANPQWRLSLQTHKIAGFD

SEQ ID NO: 30572 - protein, 218 aa, Halomonas sp.
  REGION 1..218: note = tr|A0A2E4U1X0|A0A2E4U1X0_HALSX 7-carboxy-7-deazaguanine synthase OS=Halomonas sp.; OX = 1486246 GN=queE PE=3 SV=1
MYQVKEAFYTLQGEGAQAGRASVFCRFSGCNLWSGREIDRATAKCTFCDTDFIGTNGINGGKFATATALAEHIAALWPSHSSDAKSKATPYVVFTGGEPLLQLDTALIATLHSHGFEVAVETNGTLPPPPGIDWLCVSPKGSNPLAVTQGDELKLVYPQAEAPPEQFSSLGFRHFFLQPMDLAPLNQDKTTVAEATAYCMANPQWRLSLQMHKLAGFD

SEQ ID NO: 30573 - protein, 215 aa, Halomonas subterranea
  REGION 1..215: note = tr|A0A1H9VJ53|A0A1H9VJ53_9GAMM 7-carboxy-7-deazaguanine synthase OS=Halomonas subterranea; OX = 416874 GN=queE PE=3 SV=1
MYQVKEAFYTLQGEGAQAGRASVFCRFSGCNLWSGRERDRATARCTFCDTDFVGTDGQGGGRFETPAALAEHISALWPSEAGRAIPYVVFTGGEPLLQLDPALIATLHSVGFEVAVETNGTLTPPAGIDWLCVSPKGKNTLVIDQGDELKLVYPQTEAPPEAFAKLDFRHFFLQPMDVSPLDAHDNDTVARTTAYCLANPQWRLSLQTHKIAGFD

SEQ ID NO: 30574 - protein, 222 aa, Halomonas sulfidaeris
  REGION 1..222: note = tr|A0A365TPC6|A0A365TPC6_9GAMM 7-carboxy-7-deazaguanine synthase OS=Halomonas sulfidaeris; OX = 115553 GN=queE PE=3 SV=1
MYQVKEAFYTLQGEGAQAGRASVFCRFSGCNLWSGREIDRANAKCTFCDTDFIGTNGINGGKFVTANALAQHIASLWPSQSGDAKPDTKNDATPYVVFTGGEPLLQLDATLITALHSHGFEVAVETNGTLAPPPGIDWLCVSPKGSNSLAVTQGDELKLVFPQADAPPEQFSSLDFRHFFLQPMDLTPLNQEKTTVAEATAYCMANPQWRLSLQMHKLAGFD

SEQ ID NO: 30575 - protein, 213 aa, Halomonas taeanensis
  REGION 1..213: note = tr|A0A1G7V7P0|A0A1G7V7P0_9GAMM 7-carboxy-7-deazaguanine synthase OS=Halomonas taeanensis; OX = 284577 GN=queE PE=3 SV=1
MYSVKEAFYTLQGEGARAGRASVFCRFSGCNLWSGREKDRATSACRFCDTDFVGTDGQNGGRFHDAEALADHLAALWPAVPGGKRYVVFTGGEPLLQLDAALIEALHARDFEIAVETNGTLTPPAGIDWLCVSPKGDTSLAITAGDELKLVYPQQDALPERFAGLDFCHFYLQPMDLGPLGGDGNTMGDVVDYCLNAPQWQMSLQTHKIAGID

SEQ ID NO: 30576 - protein, 213 aa, Halomonas taeanensis
  REGION 1..213: note = tr|A0A328XJW5|A0A328XJW5_9GAMM 7-carboxy-7-deazaguanine synthase OS=Halomonas taeanensis; OX = 284577 GN=queE PE=3 SV=1
MYSVKEAFYTLQGEGARAGRASVFCRFSGCNLWSGREQDRATSACRFCDTDFVGTDGQNGGRFHDAEGLADHLAALWPAVPGGQRYVVFTGGEPLLQLDSPLIEALHARDFEVAVETNGTLTPPTGIDWLCVSPKGDTSLAIMAGDELKLVYPQQHAPPERFAGLNFRHFYLQPMDLGPLGGDGNTMADVVDYCLSAPQWQLSLQAHKIAGID

SEQ ID NO: 30577 - protein, 214 aa, Halomonas titanicae
  REGION 1..214: note = tr|A0A558J5D1|A0A558J5D1_9GAMM 7-carboxy-7-deazaguanine synthase OS=Halomonas titanicae; OX = 664683 GN=queE PE=3 SV=1
MYQVKEAFYTLQGEGAQAGRASVFCRFSGCNLWSGREVDRATAKCTFCDTDFIGTNGINGGKFATAAALAEHIAALWPSQSDNATPYVVFTGGEPLLQLDAPLIATLHSHGFEVAVETNGTLPPPPGIDWLCVSPKGSNPLVVTQGDELKLVYPQADAPPEQFSRLGFHHFFLQPMDLAPLNQAKTTVAEATAYCMANPQWRLSLQMHKLAGFD

SEQ ID NO: 30578 - protein, 222 aa, Halomonas ventosae
  REGION 1..222: note = tr|A0A4R6ZUU6|A0A4R6ZUU6_9GAMM 7-carboxy-7-deazaguanine synthase OS=Halomonas ventosae; OX = 229007 GN=queE PE=3 SV=1
MYHVKEAFYTLQGEGGQAGRASVFCRFSGCNLWSGREADRTSAACRFCDTDFIGTDGQNGGRFSSAEALANHLAALWPDQDGHDGRAATPYVVFTGGEPLLQLDEALIREMHACGFEVAVETNGTLPAPAGIDWLCISPKGDNALAITAGNELKLVHPQADAPPTRFTRLDFDHFFLQPMATGPAVPSGDALPDTLAETVAYCLAHPRWRLSLQTHKIAGID

SEQ ID NO: 30579 - protein, 222 aa, Halomonas ventosae
  REGION 1..222: note = tr|A0A2T0VEQ4|A0A2T0VEQ4_9GAMM 7-carboxy-7-deazaguanine synthase OS=Halomonas ventosae; OX = 229007 GN=queE PE=3 SV=1
MYHVKEAFYTLQGEGGQAGRASVFCRFSGCNLWSGREADRTSAACRFCDTDFIGTDGQNGGRFSSAEALANHLAALWPDQDGHNGRAATPYVVFTGGEPLLQLDEALIREMHARGFAVAVETNGTLPAPAGIDWLCVSPKGDNALAITAGNELKLVHPQADAPPARFTRLDFDHFFLQPMATGPADTSGDATPDTLAETVAYCLAHPRWRLSLQTHKIAGID

SEQ ID NO: 30580 - protein, 214 aa, Halomonas venusta
  REGION 1..214: note = tr|A0A3Q8WF86|A0A3Q8WF86_9GAMM 7-carboxy-7-deazaguanine synthase OS=Halomonas venusta; OX = 44935 GN=queE PE=3 SV=1
MYHVKEAFYTLQGEGAQAGRASVFCRFSGCNLWSGREIDRASAKCSFCDTDFIGTDGINGGRFNTPHELADHLKALWPVHAGRATPYVVFTGGEPLLQLDTPLIELLHSDGFEVAVERNGTVIPPPGIDWLCVSPKGTNPLVVTRGDELKLVFPQSVAPPDQFANLDFNHFFLQPMDQGIAHKNHATVQATVAYCMANPQWRLSLQTHKIAGFE

SEQ ID NO: 30581 - protein, 215 aa, Halomonas xianhensis
  REGION 1..215: note = tr|A0A1I3A601|A0A1I3A601_9GAMM 7-carboxy-7-deazaguanine synthase OS=Halomonas xianhensis; OX = 442341 GN=queE PE=3 SV=1
MYSVKEAFYSLQGEGARAGRAGVFCRFSGCNLWSGRERDRASSLCRFCDTDFVGIDGQNGGRFATADALAEHLAALWPSSLGEAATPYVIFTGGEPLLQLDGTLIDVMHDHGFEVAVETNGTLPPPAGIDWLCVSPKGQAPLALHQGNELKLVYPQPDAMPQRFSALDFEHFFLQPMDRQPQGLEGTTLAETVDYCLTHPQWRLSMQLHKLAGID

SEQ ID NO: 30582 - protein, 215 aa, Halomonas xianhensis
  REGION 1..215: note = tr|A0A4R8G304|A0A4R8G304_9GAMM 7-carboxy-7-deazaguanine synthase OS=Halomonas xianhensis; OX = 442341 GN=queE PE=3 SV=1
MYSVKEAFYSLQGEGARAGRAGVFCRFSGCNLWSGRERDRAASLCRFCDTDFVGTDGQNGGRFATADALAEHLASLWPSSLEKAATPYVIFTGGEPLLQLDNALIDAMHDHGFEVAVETNGTLPPPAGIDWLCVSPKGQAPLALHQGNELKLVYPQPDAMPQRFSALDFEHFFLQPMDRHPQGVEGTTLAETVDYCLTHPQWRLSMQLHKLAGID

SEQ ID NO: 30583 - protein, 219 aa, Halorhodospira halochloris
  REGION 1..219: note = tr|A0A0X8X736|A0A0X8X736_HALHR 7-carboxy-7-deazaguanine synthase OS=Halorhodospira halochloris OX=1052 GN=queE PE=3 SV=2
MATHAGTPMPYLTHSIFYSLQGEGAWSGRPAVFVRFAGCNLWSGREQDRAAALCRFCDTDFVSTKDGRGGRFADPQQLVARIVSLWPDANVPPYVIFTGGEPALQLDAELITACHRRGFQVAVETNGTRSLPQGLDWVCVSPKPGTELMIDRGDELKLVYPVPGLHPQAYAGLAFRHFYLQPLDEGGEGGTHIAAALEYCLRHPQWSLSLQLHKWIGIE

SEQ ID NO: 30584 - protein, 209 aa, Halorhodospira halophila
  REGION 1..209: note = tr|A1WW29|A1WW29_HALHL 7-carboxy-7-deazaguanine synthase OS=Halorhodospira halophila (strain DSM 244 / SL1) OX=349124 GN=queE PE=3 SV=1
MSYAVHSLFYTLQGEGARSGRPAVFLRFAGCNLWSGREADRATAVCTFCDTDFVGTGGPGGGRFADAPELAAAVAAWWPGGGEPYVVCTGGEPALQLDAALVAALHARGFEVAVETNGTLPLPAGVDWICVSPKAGTELAITAGDELKLIYPQPGAEPQRFTHLAFRRFYLQPLDDNQRGAHTRAVLDYCRGHPQWWLSVQIHKDLGIP

SEQ ID NO: 30585 - protein, 220 aa, Halospina denitrificans
  REGION 1..220: note = tr|A0A4R7K122|A0A4R7K122_9GAMM 7-carboxy-7-deazaguanine synthase OS=Halospina denitrificans OX=332522 GN=queE PE=3 SV=1
MYRVKEVFATLQGEGAQAGRVAVFCRFSKCNLWTGREADRHRAVCQFCDTDFVGTDGQNGGEFETPEALARHVAAFWPGSFSDAENPLVVCTGGEPLLQLDGPMVEAFHAQGLSVAVETNGTLPAPEGIDWLCMSPKAGTTIVIEECDELKLVYPQEGQDPADYDHIRASERFIAPMASPQVISGADAFRDANTRQAIEFCLAHPQWRLSVQMHKMVGID

SEQ ID NO: 30586 - protein, 220 aa, Halospina sp.
  REGION 1..220: note = tr|A0A5J5FKN8|A0A5J5FKN8_9GAMM 7-carboxy-7-deazaguanine synthase OS=Halospina sp. K52047b; OX = 2614160 GN=queE PE=4 SV=1
MYRIKEAFTTLQGEGLQAGRVAVFCRFSKCNLWTGREKDRATAVCQFCDTDFVGTDGPNGGVFETPEGLVDHIASLWPGSGSIEESPMVVCTGGEPLLQLDGALLEAFHQRHFFVAVETNGTLDAPDGIDWLCVSPKAGTGIRIRRCDELKLVYPQQGQDPADYDDIEARARLLSPMSSPDAGAERDLVRDASTREAIRYCMAHPRWRLSVQMHKMVGIE

SEQ ID NO: 30587 - protein, 214 aa, Halotalea alkalilenta
  REGION 1..214: note = tr|A0A172YEN5|A0A172YEN5_9GAMM 7-carboxy-7-deazaguanine synthase OS=Halotalea alkalilenta; OX = 376489 GN=queE PE=3 SV=1
MYAVKEAFYTLQGEGARSGRAAVFCRFTGCNLWSGREKDRERSICRFCDTDFVGTDGQNGGRFRTAQALGEHIDRLWPSRAAGVVPYVVFTGGEPLLQLDTALIEEMHARGFEIAVETNGTLAPPAGIDWLCVSPKGASQLAVSGGDEIKLVYPQLEAPPERFEALGFTHFFLQAMDLAPRGGQGDTLKETLEYCMRHPRWRLSLQMHKIVGID

SEQ ID NO: 30588 - protein, 256 aa, unidentified
  source 1..256: note = Halothece sp.
  REGION 1..256: note = tr|K9Y8W5|K9Y8W5_HALP7 7-carboxy-7-deazaguanine synthase OS=Halothece sp. (strain PCC 7418) OX=65093; GN = queE PE=3 SV=1
MTAVKTATANLVEVFSAIQGEGLNVGTRQIFVRFGGCDLRCHFCDSEQTWEKISQCRIEKTSGQRDFEVYANPVTQEQLLSWIRQQNQNHLHDSISLTGGEPLLHAKFLQQFLPQLKAEVALPIYLETGGHRPQQVSLLLDYIDCIGMDMKLPSVSGEKHWQAHADFLRVCIPQTNLFVKLIVSDQTSEEDLVQARSIIAKINAEIPVILQPATPISREAIFPPNPEQVLAWQGLLKESLFRVRVIPQTHKMIGQL

SEQ ID NO: 30589 - protein, 218 aa, unidentified
  source 1..218: note = Halothiobacillaceae bacterium
  REGION 1..218: note = tr|A0A545SCG9|A0A545SCG9_9GAMM 7-carboxy-7-deazaguanine synthase OS=Halothiobacillaceae bacterium OX=2268194 GN=queE PE=3 SV=1
MHAEATETLRLTEIFYSLQGESTRVGLPTVFVRLTGCPLRCVYCDTAYAFTGGETWTIASILEEVARHKTRYVCVTGGEPLAQKRCLTLLTALCDAGYSVSLETSGAFDITAVDSRVSRIMDIKTPASGEVERNLYENVQALRAGDEVKFVIADRGDYEWSVDTLREHDIASTSEVLFSAVNGQLSPGQLADWILEDHLPVRMQVQLHKILWEEARGR

SEQ ID NO: 30590 - protein, 227 aa, Halothiobacillus neapolitanus
  REGION 1..227: note = tr|D0KY69|D0KY69_HALNC 7-carboxy-7-deazaguanine synthase OS=Halothiobacillus neapolitanus (strain ATCC 23641 / c2) OX=555778 GN=queE PE=3 SV=1
MISALDDIAIQEKAPLQLRITEIFRSLQGESESAGWPTVFVRLTGCPLRCVYCDTAYAFTGGERLSLLSILDQVAAYHTQDVCVTGGEPLAQPACLPLLTSLCDAGHLVSLETSGALSIEGVDPRVRVVMDLKTPSSGEAEKNRFENIDLLKTSDEIKFVIGSAEDFKWAVQHVRQFQMDKRFNVLISPVFGQVTPLALADWILESGLRLRFQQQLHKLIWGNEPGH

SEQ ID NO: 30591 - protein, 532 aa, Halothiobacillus sp.
  REGION 1..532: note = tr|A0A259SBK4|A0A259SBK4_9GAMM Multifunctional fusion protein OS=Halothiobacillus sp. 13-55-253; OX = 1970379 GN=cpoB PE=3 SV=1
MNRLKMKRNAKKITVLAVFGMVMTQPTWAQTPPGWLNWSDKSDAAPAATGQAPETDAQSATPQPLPSQPLGTGETGTNSASGQTVIIQNLLDNVSRLQEQVRDLRGQNEVQENQIQRLQKAQQSAFSSFDDRLSKLEQTGGSTVAPSAPIPPSVPATKEPAVSVPTAPVPASSASAAPAASPAPATSQDAAATAKQQALYNAAFAQLKDGQYDQAITGFQAAIDADPQGQWTPSALFWQGETYYVEQKRDKSEAAYQKILTQFPNSDRVPDALLKTGYIAYDENKNKQARDIFQQVISKYPQSQAANLALDDIAVQEKAPLQLRITEIFRSLQGESESAGWPTVFVRLTGCPLRCVYCDTAYAFTGGERLSLSSILDQVAAYHTQDVCVTGGEPLAQPACLPLLTSLCDAGHLVSLETSGALSIEGVDPRVRVVMDLKTPSSGEAEKNRFENIDLLKTSDEIKFVIGSAEDFKWAVQHVRQFQMDKRFNVLISPVFGEVTPLALADWILESGLRLRFQQQLHKLIWGNEPGH

SEQ ID NO: 30592 - protein, 228 aa, Halothiobacillus sp.
  REGION 1..228: note = tr|A0A191ZIC0|A0A191ZIC0_9GAMM 7-carboxy-7-deazaguanine synthase OS=Halothiobacillus sp. LS2 OX=1860122 GN=queE PE=3 SV=1
MRVDEARVVDAPEAVIPQVRLTEIFRSLQGESGSVGWPTVFVRLTGCPLRCVYCDTAYAFTGGQRYPIDEIMDQVAAHRTRHVCVTGGEPLAQPGCLPLLTALCDQGFSVSLETSGAMAIEDVDSRVRLVMDLKAPSSGESARNLMKNLDYLKPTDEIKIVIGSVEDFRWAEQVIVEYGLDERFDVLVSPVFGAVSPQALAEWVLGSERRMRYQFQLHKLIWGNEPGH

SEQ ID NO: 30593 - protein, 220 aa, Halovibrio sp.
  REGION 1..220: note = tr|A0A2A2FBB9|A0A2A2FBB9_9GAMM 7-carboxy-7-deazaguanine synthase OS=Halovibrio sp. YL5-2; OX = 2032626 GN=queE PE=3 SV=1
MYRIKEAFTTLQGEGLQAGRVAVFCRFSKCNLWTGREKDRATAVCQFCDTDFVGTDGPNGGVFETPEQLADHIASLWPGSGSGEESPMVVCTGGEPLLQLDGPLLEAFHQRHFFVAVETNGTLDAPDGIDWLCVSPKAGTGIRIRRCDELKLVYPQEGQDPADYDDIAARARLLSPMSSPDAGAERDLVRDANTREAIRYCMAHPRWRLSVQMHKMVGIE

SEQ ID NO: 30594 - protein, 223 aa, unidentified
  source 1..223: note = Halovibrio variabilis
  REGION 1..223: note = tr|A0A511URL8|A0A511URL8_9GAMM 7-carboxy-7-deazaguanine synthase OS=Halovibrio variabilis; OX = 31910 GN=queE PE=3 SV=1
MYQVKEAFYTLQGEGAQAGRASVFCRFSGCNLWSGRDVDRATAKCTFCDTDFIGTDGINGGKFASASALAEHIVSLWPEQNTIATQHATPRSATPYVVFTGGEPLLQLDTALIATLHSHGFEVAVETNGTLAPPPGIDWLCVSPKGGNSLVVTKGDELKLVFPQADAPPEQFASLGFRHFFLQPMDLAPLNQDKTTVAETTAYCMANPQWRLSLQMHKLAGFD

SEQ ID NO: 30595 - protein, 223 aa, unidentified
  source 1..223: note = Hamiltonella defensa
  REGION 1..223: note = tr|C4K335|C4K335_HAMD5 7-carboxy-7-deazaguanine synthase OS=Hamiltonella defensa subsp. Acyrthosiphon pisum (strain 5AT) OX=572265 GN=queE PE=3 SV=1
MLYPINEIFQTLQGEGHFMGTPAIFIRLQGCPVGCSWCDTKHTWEKKNEQQVDLFSILQKKTANDFWSHSGEQNLLAVIRAQGYQASHVVITGGEPCLYDLTPLTQLLEQEGYFCQIETSGTHLVHCTPSCWVTVSPKINMRGGFKIQHQALERADELKHVVARKSDIETLDALIGNLKDRKKRIISLQPVSQKKSATQLCIDTCIERNWRLSVQMHKYLGIE

SEQ ID NO: 30596 - protein, 220 aa, unidentified
  source 1..220: note = Handelsmanbacteria sp.
  REGION 1..220: note = tr|A0A1F6CYQ1|A0A1F6CYQ1_HANXR 7-carboxy-7-deazaguanine synthase OS=Handelsmanbacteria sp. (strain RIFCSPLOWO2_12_FULL_64_10) OX=1817868 GN=queE; PE = 3 SV=1
MSHTRKRDTLVVKEIYKSIQGESTWAGLPCVFVRLTGCDLRCVWCDAAHAFTGGDRLTVPEVVAQVETLACPLVEITGGEPLLQPAVHPLMSALLDRGHRVLIETGGHLDISGIDPRAVRIIDVKCPASGESEKVRWENLGLLRQGDQVKFVLSDRADYDWAKDVVLRHDLPGRAEVLFSVAHALLPPAHLAAWLLEDRLPVRLQLQIHKYIWKPDTPRI

SEQ ID NO: 30597 - protein, 210 aa, Hansschlegelia zhihuaiae
  REGION 1..210: note = tr|A0A4Q0MM51|A0A4Q0MM51_9RHIZ 7-carboxy-7-deazaguanine synthase OS=Hansschlegelia zhihuaiae OX=405005 GN=queE PE=3 SV=1
MTYAVKELFKTLQGEGAQAGRAAVFCRFAGCNLWSGREQDREAAICRFCDTDFVGTDGAGGGKFKDAETLAEAIEREWGGSPGPRYVVFTGGEPLLQLDRNLVASVHARGFEVAIETNGTEQPPHGVDWICVSPKAGAELRLTRGDELKLVFPQDGIDPAGLAALDFRHFFLQPMDGPARERNTAAAAAYCLANPPWRLSLQTHKLIGLP

SEQ ID NO: 30598 - protein, 210 aa, unidentified
  source 1..210: note = Hanstruepera neustonica
  REGION 1..210: note = tr|A0A2K1DZM4|A0A2K1DZM4_9FLAO 7-carboxy-7-deazaguanine synthase OS=Hanstruepera neustonica OX=1445657 GN=queE PE=3 SV=1
MTRSERQELIDKGLLLPLMEEFYTIQGEGYHKGTAAYFVRIGGCDVGCHWCDVKESWLAELHPPTETHKIVENAVKYSDTIVVTGGEPLTWDMTELTNQLKAKGVQTHIETSGAYKLTGTWDWICLSPKKLKLPTEEIYTKAHELKMIIYNKSDFKFAEEQAAKVNSHCKLFLQPEWSKRDKVVPEIVDYVMANPKWKVSLQTHKYLNIP

SEQ ID NO: 30599 - protein, 265 aa, Hapalosiphon sp.
  REGION 1..265: note = tr|A0A0M0SQ24|A0A0M0SQ24_9CYAN 7-carboxy-7-deazaguanine synthase OS=Hapalosiphon sp. MRB220 OX=1704290 GN=queE PE=3 SV=1
MTTKIGITPTARLIEVFSAIQGEGLNVGTRQIFIRFALCDLRCQFCDSAHTWNAPTTCRIERSPGRRDFEFYSNPVSLPTLLEWIERQNIPSLHDSISLTGGEPLLHAGFLVEFLPQIRAITGLSVYLETGGHRPEQLAMILPYLDSVGMDLKLPSTSGENHWQEHSKFLQLCYESQVEVFVKIIISDETNPAELERSALLVAQVSPSIPVFLQPVTPLPASEQFTENPVLAPSPEQVLMWQALIKRFVKQVRVIPQTHKMLNQL

SEQ ID NO: 30600 - protein, 265 aa, unidentified
  source 1..265: note = Hapalosiphonaceae cyanobacterium
  REGION 1..265: note = tr|A0A328IJC1|A0A328IJC1_9CYAN 7-carboxy-7-deazaguanine synthase OS=Hapalosiphonaceae cyanobacterium JJU2 OX=2109628 GN=queE PE=3 SV=1
MTTKIGITPTARLVEVFSAIQGEGLNVGTRQIFIRFALCDLRCQFCDSAHTWNAPTTCRIERSPGKRDFEIYSNPVSLPILLEWIERQNIPCLHDSISLTGGEPLLHAGFLVEFLPQIRAITGLPIYLETGGHRPEQLAMILPYLDSVGMDLKLPSTSGENRWQEHSKFLQLCYESQIEVFVKIIISDQTNPAELERSALLVAQVSPSIPVFLQPVTPLPASEQLTANPVLAPSPEQVLMWQALIKRFVKQVRVIPQTHKMLNQL

SEQ ID NO: 30601 - protein, 230 aa, Helicobacter acinonychis
  REGION 1..230: note = tr|Q17WY6|Q17WY6_HELAH 7-carboxy-7-deazaguanine synthase OS=Helicobacter acinonychis (strain Sheeba); OX = 382638 GN=queE PE=3 SV=1
MKLPVVESFFSLQGEGQRIGKPSLFLRLGGCNLSCKGFGCKTLFNDEILIGCDSLYAVHPKFKKSWDYYNEPKPLIERLVHLTPNHKNFDFILTGGEPSLYFNNPILTSVLEHFHRKKIPLFVESNGSIFFEFSSILKELHFTLSVKLSLSLEKENKRINLKALQNILDNAKSVHFKFVLDSKNAVQSITEIKSLLKQLSLKNNEIFLMPLGTNNNELDNHLYAFLLLDN

SEQ ID NO: 30602 - protein, 251 aa, Helicobacter acinonychis
  REGION 1..251: note = tr|Q17WY0|Q17WY0_HELAH 7-carboxy-7-deazaguanine synthase OS=Helicobacter acinonychis (strain Sheeba); OX = 382638 GN=queE PE=3 SV=1
MKLPVVESFFSLQGEGQRIGKPSLFLRLGGCNLSCKGFGCKTLFNDEILIGCDSLYAVHPKFKKSWDYYNEPKPLIERLVHLTPNHKNFDFILTGGEPSLYFNNPILTSVLEHFHRKKIPLFVESNGSIFFEFSSILKELHFTLSVKLSLSLEKENKRINLKALQNILDNAKSVHFKFVLDSKNAVQSITEIKSLLKQLSLKNNEIFLMPLGTNNNELDNHLKIIAPLAIEHGFRLSDRLHIRLWDNKKGF

SEQ ID NO: 30603 - protein, 242 aa, unidentified
  source 1..242: note = Helicobacter ailurogastricus
  REGION 1..242: note = tr|A0A0K2X2L4|A0A0K2X2L4_9HELI 7-carboxy-7-deazaguanine synthase OS=Helicobacter ailurogastricus OX=1578720 GN=queE PE=3 SV=1
MSLPLVETFYSLQGEGSCVGQPSVFIRLGGCNFKCVGFGVRANIEGQEFMGCDSIYAVRPNSKWQYLKSAGELLDKLPAFNPACLPLIVLTGGEPSLHFKNPILLEALQILQERGHVLWVESNGSVLFDFSPPLDSLHFTLSPKLSFSQETTPLKPLQNILDHALEVVLKFVLKNPTDIHEVQNLLKQLCFKTPPLVYLMPLATDKERLQEGLEGLAEVALAHGYSLGQRLHIQLWGNEAGR

SEQ ID NO: 30604 - protein, 250 aa, Helicobacter anseris
  REGION 1..250: note = tr|A0A3D8JA84|A0A3D8JA84_9HELI 7-carboxy-7-deazaguanine synthase OS=Helicobacter anseris; OX = 375926 GN=queE PE=3 SV=1
MMLKISEIFYSIQGEGRQMGRPSVFVRVGMCNLTCKGFSESVQYEGKKIIGCDSIYAANKAFSKEWIVFEDSKKLISEIEQKGNGNFDIVLTGGEPSLYFGNKVLLETLKYFIKRHHHIYVESNGSVFFDFNEILKSLHFTLGVKLSNTLDLKEKRINIKAIQNILDHAKSVYFKFVLNQEMCKDGSGIAEINEILAQVSGSYEVYLMPQGSDIETLNRNIKFLLPLCLENNFYLSDRLHIRIWGNKRGV

SEQ ID NO: 30605 - protein, 247 aa, Helicobacter bizzozeronii
  REGION 1..247: note = tr|F8KRX2|F8KRX2_HELBC 7-carboxy-7-deazaguanine synthase OS=Helicobacter bizzozeronii (strain CIII-1); OX = 1002804 GN=queE PE=3 SV=1
MLPLVETFYSLQGEGLCIGLPSVFVRLGGCNLRCKGFGVKSVINQQEVIGCDSAYAVYPNAEWQEITQSQTLLERVHALMPKALKPLIILTGGEPSLHFKNPILLEALSVWVQEGFTIWVESNGSVLFAFDSLLESLHFTLSVKLSFIESAPKRLDVRAIQNILDHAPVVFKFVLGMPFVEQGIQEIQAMMETLSFKTPPPIYLMPMGITHAQVQANLKALAPACLQHGYGLSDRLHIHLWDNAKGR

SEQ ID NO: 30606 - protein, 247 aa, Helicobacter bizzozeronii; identical to SEQ ID NO: 30605
  REGION 1..247: note = tr|H5V9K0|H5V9K0_HELBI 7-carboxy-7-deazaguanine synthase OS=Helicobacter bizzozeronii CCUG 35545; OX = 1002805 GN=queE PE=3 SV=1

SEQ ID NO: 30607 - protein, 251 aa, Helicobacter cetorum
  REGION 1..251: note = tr|I0EN07|I0EN07_HELC0 7-carboxy-7-deazaguanine synthase OS=Helicobacter cetorum (strain ATCC BAA-429 / MIT 00-7128) OX=182217 GN=queE PE=3 SV=1
MKLPVVESFFSLQGEGKRIGRPSLFLRLGGCNLSCKGFDCKTPLNDEILIGCDSLYAVHSKFKDFWDYYSRPKALIRHLESLAPNYNNFDFILTGGEPSLHFNNPTLLSVLEYFHQKEIPLFVESNGSIFFEFSPILKELHFTLSVKLSLSLEKENKRINLKALQNILDNAKSVNFKFVLDSINATQSIMEIQNLLKQLSLNNNEVFLMPLGTTKNELDKNLKALAPLALENGYSLSDRLHIRLWDNQKGF

SEQ ID NO: 30608 - protein, 251 aa, Helicobacter cetorum
  REGION 1..251: note = tr|I0ETC0|I0ETC0_HELCM 7-carboxy-7-deazaguanine synthase OS=Helicobacter cetorum (strain ATCC BAA-540 / MIT 99-5656) OX=1163745 GN=queE PE=3 SV=1
MKLPVVESFFSLQGEGKRIGRPSLFLRLGGCNLSCKGFNCKTTLNDEILVGCDSLYAVHSKFKDSWDYYSEPKSLIKRLETLTPSYHHFDLILTGGEPSLHFNNPILLSVLEYFHHHSIPLYVESNGSIFFEFSPILKELHFTLSVKLSLSLEKENKRINLKALQNILDNAKSVNFKFVLDSMNATQSITEIQNLLKQLTLKNNEIFLMPLGTTSHELDKNLKALAPLALEHGYSLSDRLHIRLWNNEKGF

SEQ ID NO: 30609 - protein, 242 aa, Helicobacter felis
  REGION 1..242: note = tr|E7A9W7|E7A9W7_HELFC 7-carboxy-7-deazaguanine synthase OS=Helicobacter felis (strain ATCC 49179 / NCTC 12436 / CS1) OX=936155 GN=queE PE=3 SV=1
MTLPFVESFYSLQGEGSCVGQPAIFIRLGGCNFKCTGFGVQSDIEGKKVLGCDSAYAIYPNAKWQYLNSTQELLDKLPPFNSNRPPLIVLTGGEPSLHFKNPILLEALEILLKRGHGIWVESNGSVFFDFNPPLDSLHFTLSPKLSFAQEKTPLKPLQHILDHALEVVFKFVLHCPTDVDEVQVLLKQLRFKKPLLIYLMPLATDMQTLQEGLNSLAGVCLEHGYSLGQRLHIQLWGNEAGR

SEQ ID NO: 30610 - protein, 242 aa, Helicobacter heilmannii
  REGION 1..242: note = tr|A0A0K2XYU7|A0A0K2XYU7_HELHE 7-carboxy-7-deazaguanine synthase OS=Helicobacter heilmannii OX=35817 GN=queE PE=3 SV=1
MSLPLVEIFYSLQGEGSCVGQPSVFIRLGGCNFKCVGFGVKANIEGQEFMGCDSIYAVRPNSKWQYLRSAVELLDKLPAFNSQCLPLIVLTGGEPSLHFKNPILLEALQILHERGHTLWVESNGSVFFDFSPPLDTLHFTLSPKLSFSGEQTPLKPLQHILEHALEVVFKFVLKTPRDIQEVQDLLQQLRFKTPPLVYLMPLATSKENLQEGLESLAGVCLAHGYSLGQRLHIQLWGNTPGC

SEQ ID NO: 30611 - protein, 242 aa, Helicobacter heilmannii
  REGION 1..242: note = tr|A0A0K2XMS8|A0A0K2XMS8_HELHE 7-carboxy-7-deazaguanine synthase OS=Helicobacter heilmannii OX=35817 GN=queE PE=3 SV=1
MSLPLVETFYSLQGEGSCVGQPSVFIRLGGCNFKCVGFGVRANVEGQEFMGCDSIYAVRPNSKWQYLRSAVELLDKLPAFNSQCLPLIVLTGGEPSLHFKNPILLEALQILHERGHTLWVESNGSVFFDFSPPLDTLHFTLSPKLSFSGEQTPLKPLQHILEHALEVVFKFVLKTPRDIQEVQDLLQQLRFKTPPLVYLMPLATSKENLQEGLESLAGVCLAHGYSLGQRLHIQLWGNTPGC

SEQ ID NO: 30612 - protein, 286 aa, Helicobacter mustelae
  REGION 1..286: note = tr|D3UHV4|D3UHV4_HELM1 7-carboxy-7-deazaguanine synthase OS=Helicobacter mustelae (strain ATCC 43772 / LMG 18044 / NCTC 12198 / 12198) OX=679897 GN=queE PE=3 SV=1
MQILKISEIFYSLQGEGSAIGMPSVFVRVGLCNLRCKGFGERLRYRGEEILGCDSIYAANPKFQEEWREFESSKELISAIFAAVCGNLGSSVDAALRGEAGDFSSAQVGGDALLEAPEPLPPFDIVLTGGEPSLYFQNPALLGAIEFFLARHHRISVESNGSVLFAFTPLLERLHFTLGIKLSNSGEREQKRLNFPAIQNILDHAASVVLKFVLDAKMCQDGSALKEIDAILSQISGSYEVYLMPMGSSIETINQNIKAILPLCLKRGYKLSDRLHIRIWGNQRGF

SEQ ID NO: 30613 - protein, 251 aa, Helicobacter pylori
  REGION 1..251: note = tr|J0MVL5|J0MVL5_HELPX 7-carboxy-7-deazaguanine synthase OS=Helicobacter pylori Hp A-27 OX=992057 GN=nrdG; PE = 3 SV=1
MKLPVVESFFSLQGEGKRIGKPSLFLRLGGCNLSCKGFNCKTLFNDEILIGCDSLYAVHPKFKTSWDYYNEPKPLIERLEDLAPNYKHFDFILTGGEPSLYFNNPILISVLEHFYRQKIPLCVESNGSIFFEFSPILKELHFTLSVKLSFSLEKESKRINLKALQNILNNAKSAHFKFVLESQNAAQSIIEIQSLLKQLSLKNNEIFLMPLGTNNNELDKNLKTLAPLAIKHGFRLSDRLHIRLWDNQKGF

SEQ ID NO: 30614 - protein, 251 aa, Helicobacter pylori
  REGION 1..251: note = tr|J0N682|J0N682_HELPX 7-carboxy-7-deazaguanine synthase OS=Helicobacter pylori Hp H-6 OX=992061 GN=nrdG; PE = 3 SV=1
MKLPVVESFFSLQGEGKRIGKPSLFLRLGGCNLSCKGFNCKTLLNDEILTGCDSLYAVHPKFQTSWDYYSEPKPLIERLVNLAPNYKDFDFILTGGEPSLYFNNPILLSVLEHFYHKKIPLCVESNGSIFFEFSPILKELHFTLSVKLSFSLEQESKRINLKALQNILNNAKSAHFKFVLESQNATQSIIEIQSLLKQLSLKNNEIFLMPLGTTNNELDKNLKTLAPLAIKHGFRLSDRLHIRLWDNKKGF

SEQ ID NO: 30615 - protein, 193 aa, Helicobacter sp.
  REGION 1..193: note = tr|A0A3D6E3Y3|A0A3D6E3Y3_9HELI 7-carboxy-7-deazaguanine synthase OS=Helicobacter sp.; OX = 218 GN=queE PE=3 SV=1
MYPVTEIFYSIQGEGHHSGKAALFVRLHGCNLACDFCDEPSHTQGEYENQSQEAILEQLRAYPAHFVVITGGEPTLFDLNPLIKFLQKEGYFVAIETNGYNLAHIQAADWITYSPKNWNTLAKEGYDELKFIIHHASDITPLLALFQEKPLYLQPQSDGSALNAANVARCVELILEHPEWRLSLQTHKILEIP

SEQ ID NO: 30616 - protein, 250 aa, Helicobacter sp.
  REGION 1..250: note = tr|A0A268TAP3|A0A268TAP3_9HELI 7-carboxy-7-deazaguanine synthase OS=Helicobacter sp. 11S02596-1 OX=1476194 GN=queE PE=3 SV=1
MLAVSEIFYSLQGEGEFIGTPSVFLRLGGCNLSCAGFGIKSQLDTAEFLGCDSIYAANFSYAKEWESFANSTTLIEKMTSFSPGKFDVIITGGEPSLHFKNPILLEVIAYFLERNHRVCVESNASVPFGFNELLRRLYFTLSVKLSNSGEPLKKRIKPEVIQSIIDNAPHVVFKFVLNAKMCQDGRALEEIRDLLSKLKLKGNKIFLMPQGVNEEELNENIQAILPLCLREGFCLSDRLHIRIWGDKRGF

SEQ ID NO: 30617 - protein, 246 aa, Helicobacter suis
  REGION 1..246: note = tr|A0A510HBC7|A0A510HBC7_9HELI 7-carboxy-7-deazaguanine synthase OS=Helicobacter suis; OX = 104628 GN=queE PE=3 SV=1
MPLPLVETFYSLQGEGSCVGQPSVFIRLGGCNFKCVGFGVKSMIDSKEVVGCDSAYAVYPNAQWSYLKSSQELLARLEPLMQTFTLPHIVLTGGEPSLHFNNPILLEALQVLHTRGHTIWVESNGSVFFEFKAPLNTLHFTLSPKLAFAQTFKDYSKPLQNILNHAKEIVFKFVVKPPFEVCIAQIKALLKPLHFKKSPLIYLMPLGVQAQEILEGLKDLAPLCLQHGYLLSQRLHILLWGNKPGV

SEQ ID NO: 30618 - protein, 246 aa, Helicobacter suis
  REGION 1..246: note = tr|E7G4C9|E7G4C9_9HELI 7-carboxy-7-deazaguanine synthase OS=Helicobacter suis HS5 OX=710394 GN=nrdG PE=3; SV = 1
MPLPLVETFYSLQGEGSCVGQPSVFIRLGGCNFKCVGFGVKSMIDSKEVVGCDSAYAVYPNAKWSYLKSAQELLTRLEPLIYPSTLPHIVLTGGEPSLHFNNLILLEALQVLHTRGHTIWVESNGSVFFEFKAPLNTLHFTLSPKLAFAQTFKDYSKPLQNILNHAKEIVFKFVVKPPFEVCIAQIKALLKPLHFKKSPLIYLMPLGVQAQEILEGLKDLAPLCLQHGYLLSQRLHILLWGNKPGV

SEQ ID NO: 30619 - protein, 252 aa, unidentified
  source 1..252: note = Helicobacteraceae bacterium
  REGION 1..252: note = tr|A0A1J5F0R4|A0A1J5F0R4_9HELI 7-carboxy-7-deazaguanine synthase OS=Helicobacteraceae bacterium CG2_30_36_10 OX=1805215 GN=queE PE=3 SV=1
MLYLVEHFYSIQGEGRYTGTPSLFFRFGGCNMKCEGFGCEEKAADGTVVLGCDTVYAVNKEHFSQNWIPITNAKELLNVLELYELPRAVDIVLTGGEPLIYANNAIFIEFLNVLHAKGHQITFETNGSLDVDFEKHPIYKECIFALSVKLSNSNEHFHKRVRGDIIYNIASNAKGAFFKFSIEAESIDLGLEEEIESIIAHSLKTKVYCMPLGGSKEEVERNTEPLIEFCKSKGYNFSDRLHIRIWDQNKGV

SEQ ID NO: 30620 - protein, 252 aa, unidentified
  source 1..252: note = Helicobacteraceae bacterium
  REGION 1..252: note = tr|A0A1J4TXC9|A0A1J4TXC9_9HELI 7-carboxy-7-deazaguanine synthase OS=Helicobacteraceae bacterium CG1_02_36_14 OX=1805214 GN=queE PE=3 SV=1
MLYLVEHFYSIQGEGRYTGVPSLFFRFGGCNLKCEGFACSEKASDGVVVVGCDTVYAVNREHFSHNWIPIKNAKELLNILNLYELPHAVDIVLTGGEPLLYANDEIFVEFLNVLHQNGHQITFETNGSLDVDFERFPVYKECIFALSVKLSNSGEPFSKRVKGDVIYSIASNAKEAFFKFSIDAESINLGLEEEINAITLHSKKTKVYCMPLGGSKEEIELNTEPLIEFCKSKGYNFSDRLHIRIWNQNKGV

SEQ ID NO: 30621 - protein, 246 aa, Heliobacterium modesticaldum
  REGION 1..246: note = tr|B0TAY1|B0TAY1_HELMI 7-carboxy-7-deazaguanine synthase OS=Heliobacterium modesticaldum (strain ATCC 51547 / Ice1) OX=498761 GN=queE PE=3 SV=1
MNNSLPTADLVEIMVSAQGEGPWIGCRQVFLRFFGCNLSCSYCDTPGSRGPRPSACRIEKEPGSSLFDLWENPVTVDRVAEYLCHTVPIHSVSLTGGEPLLHVEFIQQLIPLLGAQRPDLYLETNGTLPEQLALIVDDLDYVSMDLKTPLDNHWDLHRLFLRIASRKKGYVKIVITPTTALDVVQRAAAIIEEEAPHFPLVLQPVTGKTGLPLTVPGHLLNLQGAALAIHRDVRIIPQVHPILGIL

SEQ ID NO: 30622 - protein, 249 aa, Heliophilum fasciatum
  REGION 1..249: note = tr|A0A4R2RHG2|A0A4R2RHG2_9FIRM 7-carboxy-7-deazaguanine synthase OS=Heliophilum fasciatum; OX = 35700 GN=queE PE=3 SV=1
MSEIKAQIMDIMVSAQGEGPWVGHRQLFLRFFGCNLHCSYCDTPASQSEQPGPCQIERQPGSAVFDYLPNPLSVTHLAAQIRPLLNRSLHSISLTGGEPLLHVPFIRELADVLGAERPLFYLETNGTLVDALKEVLPVIDFISMDLKMPSHCTGLLWEYHSRFLRVAAQKPGYVKTVVLPSTTHDDIEQAARLVKAEASHYPLILQPVSDKRGIPLVPGNRLLEFQDAAMVWHQDVRVIPQTHKWLEIL

SEQ ID NO: 30623 - protein, 223 aa, unidentified
  source 1..223: note = Henriciella algicola
  REGION 1..223: note = tr|A0A399R9E0|A0A399R9E0_9RHOB 7-carboxy-7-deazaguanine synthase OS=Henriciella algicola; OX = 1608422 GN=queE PE=3 SV=1
MAGAPEVKTYSVKEAYVTLQGEGAQTGRAAVFLRFAGCNLWSGLERDRDSAVCKFCDTDFVGTDGENGGKFKGADALADHVVSVWREKTGESGAQGYVVCTGGEPLLQLDEAAIAALHARGFEVGVETNGTLPAPSSLDWVCVSPKANSDIVQLRGNELKLVYPQPELEAQPERFAALQFEHFFLQPKDDNRQAENIAAAADYCMKHPEWRLSLQTHKLIGLP

SEQ ID NO: 30624 - protein, 217 aa, unidentified
  source 1..217: note = Henriciella barbarensis
  REGION 1..217: note = tr|A0A399R254|A0A399R254_9RHOB 7-carboxy-7-deazaguanine synthase OS=Henriciella barbarensis OX=86342 GN=queE PE=3 SV=1
MKTYSVKEAYVTLQGEGAQTGRTAVFLRFAGCNLWSGLERDRDSAVCKFCDTDFVGTDGENGGKFKGAEALADHVVSVWREKTGETGAKGYVVCTGGEPLLQLDEAAIDALHNRGFEVGVETNGTLPAPSSLDWVCVSPKANSEIVQLKGSELKLVYPQSEEEAQPERYAALQFEHFFLQPKDDNRQAENIAAAADYCMKHPKWRLSLQTHKLIGLP

SEQ ID NO: 30625 - protein, 217 aa, Henriciella sp.
  REGION 1..217: note = tr|A0A399RL63|A0A399RL63_9RHOB 7-carboxy-7-deazaguanine synthase OS=Henriciella sp. JN25; OX = 2305466 GN=queE PE=3 SV=1
MKIYSVKEAYVTLQGEGAQTGRAAVFLRFAGCNLWSGLERDRHKAVCQFCDTDFVGTNGENGGKFEGADALADHVASLWAAAAGAHADEAYVVCTGGEPLLQLDSPLIEALHARGFEVGVETNGTVAAPAGLDWICISPKANAALVQSRGDELKLVYPQDEPEAQPERFEMLQFQHFFLQPKDDNRQAENIAAAAAYCMKHPKWRLSLQTHKLIGLP

SEQ ID NO: 30626 - protein, 217 aa, Henriciella sp.
  REGION 1..217: note = tr|A0A2D8YCT6|A0A2D8YCT6_9RHOB 7-carboxy-7-deazaguanine synthase OS=Henriciella sp.; OX = 1968823 GN=queE PE=3 SV=1
MKTYSVKEAYVTLQGEGAQTGRAAVFLRFAGCNLWTGLERDRPRAVCQFCDTDFVGTDGENGGKFKGAEALADHVALVWRETSGDTGQKGYVVCTGGEPLLQLDEEAIAALHARGFDVGVETNGTLPAPESLDWVCVSPKANAEVVQTRGNELKLVYPQDEPEAQPERYAALQFDHFFLQPKDDNRQADNIAAAAAYCMKHPEWRLSLQTHKLIGLP

SEQ ID NO: 30627 - protein, 210 aa, unidentified
  source 1..210: note = Hephaestia caeni
  REGION 1..210: note = tr|A0A397NJB3|A0A397NJB3_9SPHN 7-carboxy-7-deazaguanine synthase OS=Hephaestia caeni; OX = 645617 GN=queE PE=3 SV=1
MTYAVKEMFLTLQGEGVQCGRRAVFVRFAGCNLWSGREQDRATAVCRFCDTDFVGTDGAGGGKFAEAAGLAAAVEGFWGAADAHRFVVLTGGEPMLQVDDALVAALHARGFAIAIETNGTLPVHPAIDWVCVSPKAGSDVVQRVGDELKLVWPQDGIDPAALEGWDFRHFLIQPKDDPHAVANRQAAIALVLDRPRWRLSTQTHKVLGLR

SEQ ID NO: 30628 - protein, 211 aa, Herbaspirillum aquaticum
  REGION 1..211: note = tr|A0A225SWV7|A0A225SWV7_9BURK 7-carboxy-7-deazaguanine synthase OS=Herbaspirillum aquaticum OX=568783 GN=queE PE=3 SV=1
MTYSIKEIFYTLQGEGAHAGRPAVFCRFSGCNLWTGREEDRARAICQFCDTDFVGTDGENGGKFKSAAELADKINSFWPARHAASKYVVFTGGEPLLQLDTALIEAMHAVGFEIAIETNGTIEVPEGVDWICVSPKMGSELKVKRGSELKVVVPQPGQPLDEYEKLDFQHFLLQPMDGLQAAANTRLAIEMVKDNPKWKLSIQTHKLLNIP

SEQ ID NO: 30629 - protein, 211 aa, Herbaspirillum hiltneri
  REGION 1..211: note = tr|A0A561JT68|A0A561JT68_9BURK 7-carboxy-7-deazaguanine synthase OS=Herbaspirillum hiltneri OX=341045 GN=queE PE=3 SV=1
MTYSIKEIFYTLQGEGTHAGRPAVFCRFSGCNLWTGREEDRSKAICQFCDTDFVGTDGEGGGKFKTSDALAQAINQLWPASYAASKYVVFTGGEPLLQLDEALIASMHAVGFEIAIETNGTIPVPPGIDWICVSPKMGSELKVFKGSELKVVIPQQAQVLADYEKLDFAHFLLQPMDGPDAARNTKMAIELVKNNPRWKLSIQTHKLLQIP

SEQ ID NO: 30630 - protein, 211 aa, Herbaspirillum huttiense
  REGION 1..211: note = tr|A0A4V3H6G7|A0A4V3H6G7_9BURK 7-carboxy-7-deazaguanine synthase OS=Herbaspirillum huttiense OX=863372 GN=queE PE=3 SV=1
MTYSIKEIFYTLQGEGAHAGRPAVFCRFSGCNLWTGREEDRARAICQFCDTDFVGTDGENGGKFKSAAELADKINSFWPARHAASKYVVFTGGEPLLQLDTTLIEAMHAVGFEIAIETNGTIEVPEGVDWICVSPKMGSELKVKRGSELKVVVPQPGQPLDEYEKLDFQHFLLQPMDGLQAAANTRLAIEMVKNNPKWKLSIQTHKLLNIP

SEQ ID NO: 30631 - protein, 211 aa, Herbaspirillum huttiense
  REGION 1..211: note = tr|A0A4P7A8V7|A0A4P7A8V7_9BURK 7-carboxy-7-deazaguanine synthase OS=Herbaspirillum huttiense OX=863372 GN=queE PE=3 SV=1
MTYSIKEIFYTLQGEGAHAGRPAVFCRFSGCNLWTGREEDRARAICQFCDTDFVGTDGENGGKFKSAAELADKINSFWPARHAASKYVVFTGGEPLLQLDTALIEAMHAVGFEIAIETNGTIEVPQGVDWICVSPKMGSELKVKRGSELKVVVPQPGQPLDEYEKLDFQHFLLQPMDGLQAAANTRLAIEMVKNNPKWKLSIQTHKLLNIP

SEQ ID NO: 30632 - protein, 211 aa, unidentified
  source 1..211: note = Herbaspirillum robiniae
  REGION 1..211: note = tr|A0A246WWN3|A0A246WWN3_9BURK 7-carboxy-7-deazaguanine synthase OS=Herbaspirillum robiniae OX=2014887 GN=queE PE=3 SV=1
MTYSIKEIFYTLQGEGAHAGRPAVFCRFSGCNLWTGREEDRSRAICRFCDTDFVGTDGENGGKFRSPQELAAKIDSLWPATYAPSKYVVFTGGEPLLQLDGPLIDAMHAAGFEIAIETNGTIEVPPGVDWICVSPKMGSELKVKKGSELKVVVPQPGQPLDEYERLDFQNFLLQPMDGPDAAANTKMAIEMVKNNPKWKLSIQTHKLLNIP

SEQ ID NO: 30633 - protein, 229 aa, Herbaspirillum rubrisubalbicans
  REGION 1..229: note = tr|A0A0U3LEZ3|A0A0U3LEZ3_9BURK 7-carboxy-7-deazaguanine synthase OS=Herbaspirillum rubrisubalbicans M1 OX=1078773 GN=queE PE=3 SV=1
MASSDPFCFRLPGRLSLIVTYSIKEIFYTLQGEGAHAGRPAVFCRFSGCNLWTGREEDRARAICQFCDTDFVGTDGENGGKFKSAEALAAKIDSLWPATYAPSKYVVFTGGEPLLQLDAALIAAMHAVGFEIAIETNGTIAVPEGVDWICVSPKMGAELKVTRGSELKVVVPQAGQPLAHYETLDFQHFLLQPMDGPQAAANTRLAIEMVKHNPKWKLSIQTHKLLNIP

SEQ ID NO: 30634 - protein, 211 aa, Herbaspirillum rubrisubalbicans
  REGION 1..211: note = tr|A0A328J4G9|A0A328J4G9_9BURK 7-carboxy-7-deazaguanine synthase OS=Herbaspirillum rubrisubalbicans OX=80842 GN=queE PE=3 SV=1
MTYSIKEIFYTLQGEGTHAGRPAVFCRFSGCNLWTGREEDRARAICQFCDTDFVGTDGENGGKFKSAEALAAKIDSLWPATYAPSKYVVFTGGEPLLQLDAALIAAMHAVGFEIAIETNGTIAVPEGVDWICVSPKMGSELKVTRGSELKVVVPQAGQPLAHYETLDFQHFLLQPMDGPQAAANTRLAIEMVKHNPKWKLSIQSHKLLNIP

SEQ ID NO: 30635 - protein, 229 aa, Herbaspirillum seropedicae
  REGION 1..229: note = tr|D8IU47|D8IU47_HERSS 7-carboxy-7-deazaguanine synthase OS=Herbaspirillum seropedicae (strain SmR1); OX = 757424 GN=queE PE=3 SV=1
MALSDPFCLWLPGRPFLIVTYSIKEIFYTLQGEGAHAGRPAVFCRFSGCNLWTGREEDRVRAICQFCDTDFVGTDGENGGKFKSPAELAAKIDSLWPARYAPSKYVVFTGGEPLLQLDAALIEAMHAVGFEIAIETNGTIDVPDGVDWICVSPKMGSELKVRRGSELKVVVPQPGQPLDEYEKLDFQHFLLQPMDGLQAAANTRLAIEMVKNNPKWKLSIQTHKLLNIP

SEQ ID NO: 30636 - protein, 211 aa, Herbaspirillum seropedicae; identical to SEQ ID NO: 30630
  REGION 1..211: note = tr|A0A4R8NSL6|A0A4R8NSL6_HERSE 7-carboxy-7-deazaguanine synthase OS=Herbaspirillum seropedicae OX=964 GN=queE PE=3 SV=1

SEQ ID NO: 30637 - protein, 228 aa, Herbaspirillum sp.
  REGION 1..228: note = tr|I3CVM6|I3CVM6_9BURK 7-carboxy-7-deazaguanine synthase OS=Herbaspirillum sp. GW103 OX=1175306 GN=queE; PE = 3 SV=1
MYIHPRAAPRLPFVFPIVTYSIKEIFYTLQGEGAHAGRPAVFCRFSGCNLWTGREEDRARAICQFCDTDFVGTDGENGGKFKSASELADRINSFWPVRHAASKYVVFTGGEPLLQLDAALIEAMHAVGFEIAIETNGTIEVPPGVDWICVSPKMGAELKVRQGSELKVVVPQAGQPLDEYEQLDFRHFLLQPMDGPQAAANTRLAIEMVKNNPKWKLSIQTHKLLNIP

SEQ ID NO: 30638 - protein, 232 aa, Herbaspirillum sp.
  REGION 1..232: note = tr|J2VSX9|J2VSX9_9BURK 7-carboxy-7-deazaguanine synthase OS=Herbaspirillum sp. YR522 OX=1144342 GN=queE; PE = 3 SV=1
MISAWPTAVFFRARSRRHSTIVTYSIKEIFYTLQGEGAHAGRPAVFCRFSGCNLWTGREQDRASATCRFCDTDFVGTDGENGGKFKSASALAAMIDSLWPASYAPSKYVVFTGGEPLLQLDGPLIEAMHAVGFEIAIETNGTIAVPEGVDWICVSPKMGAELKVTRGSELKVVVPQAGQPLADYEKLDFAHFLLQPMDGPDAAANTTMAIQMVKDNPKWKLSIQTHKLLQIP

SEQ ID NO: 30639 - protein, 211 aa, Herminiimonas arsenicoxydans
  REGION 1..211: note = tr|A4G4W4|A4G4W4_HERAR 7-carboxy-7-deazaguanine synthase OS=Herminiimonas arsenicoxydans OX=204773 GN=queE; PE = 3 SV=2
MTYSIKEIFYTLQGEGAHAGRPAVFCRFSGCNLWTGRESDRATAVCQFCDTDFVGTDGEGGGKFADAVKLANTINALWPASYAASKYVVFTGGEPLLQLDTELINAMHAVGFEIAIETNGTLPVPAGVDWICVSPKMGSQLVVRKGSELKVVIPQLAQSLAAYEDLDFQHFFVQPMDGPLAEQNTRLAIEICKKNPKWKLSLQTHKLLQIP

SEQ ID NO: 30640 - protein, 211 aa, Herminiimonas fonticola
  REGION 1..211: note = tr|A0A4R6G6X0|A0A4R6G6X0_9BURK 7-carboxy-7-deazaguanine synthase OS=Herminiimonas fonticola OX=303380 GN=queE PE=3 SV=1
MTYSVKEIFYTLQGEGAHAGRPAVFCRFSGCNLWTGRESDRATAVCKFCDTDFVGTDGEGGGKFSDATKLANTINALWPESYTASKYVVFTGGEPLLQLDTELIDAMHAIGFEIAIETNGTLPVPAGVDWICVSPKMGSQLVVRKGSELKVVIPQLAQSLAAYEDLDFEHFFVQPMDGPLVEQNTKLAIDVCKRNPKWKLSIQTHKLLQIP

SEQ ID NO: 30641 - protein, 211 aa, Herminiimonas sp.
  REGION 1..211: note = tr|A0A3N7A6L6|A0A3N7A6L6_9BURK 7-carboxy-7-deazaguanine synthase OS=Herminiimonas sp. KBW02 OX=2153363 GN=queE PE=3 SV=1
MTYSVKEIFYTLQGEGAHAGRPAVFCRFSGCNLWTGRESDRATAVCQFCDTDFVGTDGEGGGKFASGTTLANTINALWPESYAASKYVVFTGGEPLLQLDAELIDAMHAVGFEIAIETNGTLPVPTGVDWICVSPKMGSQLVVRKGNELKVVIPQAEQSLAAYEGLDFEHFFVQPMDGPLAEQNTKLAIDVCKRNPKWKLSLQTHKLLQIP

SEQ ID NO: 30642 - protein, 230 aa, Herpetosiphon aurantiacus
  REGION 1..230: note = tr|A9AWJ7|A9AWJ7_HERA2 7-carboxy-7-deazaguanine synthase OS=Herpetosiphon aurantiacus (strain ATCC 23779 / DSM 785 / 114-95) OX=316274 GN=queE PE=3 SV=1
MNVMEVYRSVQGEGTLMGVPTTFVRFFACNLRCSWCDTKYSWSVKEGGKWEDLPIATLAQRIADQGARHVVLTGGEPMLQRELPALAQTLRAAGHHLTVETNSTLFRPELVELINLWSLSPKLAGANTGMLRLEPLRQFMQLPAEQQQWKFVITGESDLAQLHQFVSEHQAFAEAQLPIIWQPEGRWAERDYAHALEWLAERAQLPEWRPFNVRVLPQMHVLIWGQKRLV

SEQ ID NO: 30643 - protein, 211 aa, Hippea maritima
  REGION 1..211: note = tr|F2LX28|F2LX28_HIPMA 7-carboxy-7-deazaguanine synthase OS=Hippea maritima (strain ATCC 700847 / DSM 10411 / MH2) OX=760142 GN=queE PE=3 SV=1
MIVDVSEIFYSIQGEGSKIGYKAIFIRLCGCNLKCPFCDTKYALSCKNPMNAHEIYEKISRFPAKNIIFTGGEPTLKDNFMAYFMKKYNNYSYFLETNGTLFPKKSINLFSHIVVSPKMFAINLDVLKSLIKYSISIEFKFVVDENFTKELELMEELGLKEATFQPVWLNDSMESYIKKTVRIIEKLKDIPYNIRIIPQIHKILYGQKKGV

SEQ ID NO: 30644 - protein, 43 aa, unidentified
  source 1..43: note = Holophagaceae bacterium
  REGION 1..43: note = tr|A0A3D6EI80|A0A3D6EI80_9BACT 7-carboxy-7-deazaguanine synthase QueE (Fragment); OS = Holophagaceae bacterium OX=2052165 GN=DHV93_02665 PE=4; SV = 1
MKFKVNEVFHSIQGEGARIGRPCLFIRLTGCPLRCAYCDTEYA

SEQ ID NO: 30645 - protein, 203 aa, unidentified
  source 1..203: note = Hormoscilla sp.
  REGION 1..203: note = tr|A0A533NL70|A0A533NL70_9CYAN 7-carboxy-7-deazaguanine synthase OS=Hormoscilla sp. GUM007 OX=2480854 GN=queE PE=3 SV=1
MTLLTEVTYPVVETFHSIQGEGAWTGVSAFFIRLGGCDVYCSWCDTKESWNPKLHPQRTVPDLVAEAAAASPAIVVVTGGEPLMHDLTPLTDALRKSHLRVHLETSGAYPFSGSFDWVTLSPKTFKPPHPSVYPHADELKVVVASPQDLEWAEQEALKVKDSVVMYLQPEWNTSYSRRLVFAYILQHPSWRFSLQTHKFLEVK

SEQ ID NO: 30646 - protein, 203 aa, unidentified
  source 1..203: note = Hormoscilla sp.
  REGION 1..203: note = tr|A0A533NVW4|A0A533NVW4_9CYAN 7-carboxy-7-deazaguanine synthase OS=Hormoscilla sp. GUM202 OX=2480853 GN=queE PE=3 SV=1
MTLLTQVTYLVVETFHSIQGEGAWTGVSAFFIRLGGCDVHCSWCDTKESWNPKLHPQRTVSDLVAEATAATPAIVVVTGGEPLMHDLTPLTDALRKSHLRVHLETSGAHPFSGSFDWVTLSPKTFQPPHPSVYPHADELKVVVADPQDLEWAEQEALKVKNFVVKYLQPEWNTLSSPSLVFAYILQHPQWRLSLQTHKFLEVK

SEQ ID NO: 30647 - protein, 209 aa, unidentified
  source 1..209: note = Hungateiclostridium clariflavum
  REGION 1..209: note = tr|G8LWS0|G8LWS0_HUNCD 7-carboxy-7-deazaguanine synthase OS=Hungateiclostridium clariflavum (strain DSM 19732 / NBRC 101661 / EBR45) OX=720554 GN=queE PE=3 SV=1
MLVNEIFLSIQGESLSTGFPTVFVRFTGCNLRCSYCDTTYAYEEGESMSPSEIFERIKALDYKRVCITGGEPLLQKDLKELLELLRGYTVTIETNGAVSIENVKLGEGHTWVMDMKTPSSGCSEKMVLDNLKFLRDEDEIKFVIGDRKDYEWAKEIIRNHYTKGTISFSPVYGKMDYEELVNWILSDRLEVRFQIQLHKVIWGADRTGV

SEQ ID NO: 30648 - protein, 210 aa, unidentified
  source 1..210: note = Hungateiclostridium saccincola
  REGION 1..210: note = tr|A0A2K9E3H8|A0A2K9E3H8_9FIRM 7-carboxy-7-deazaguanine synthase OS=Hungateiclostridium saccincola OX=1677857 GN=queE PE=3 SV=1
MKVNEIFLSVQGEGLSSGFPTIFVRFTGCNLRCSYCDTTYSYNDGVEMPPEDILKEIKKLHYKRVCLTGGEPLLQEDIEKLLKMLYDYTVTIETNGSVRLDSLDLSNRKYSFVMDMKTPSSGCSGEMVLENFKLLESRDEIKFVIGDREDYEWSKNIILNHYKKGTITFSPVYNRIDYAKMVKWILDDRLDVRFQLQLHKFIWGPDVTGV

SEQ ID NO: 30649 - protein, 210 aa, unidentified
  source 1..210: note = Hungateiclostridium saccincola
  REGION 1..210: note = tr|A0A2S8REE3|A0A2S8REE3_9FIRM 7-carboxy-7-deazaguanine synthase OS=Hungateiclostridium saccincola OX=1677857 GN=queE PE=3 SV=1
MKVNEIFLSVQGEGLSSGFPTIFVRFTGCNLRCSYCDTTYSYNDGVEMPPEDILKEIKKLHYKRVCLTGGEPLLQEDIEKLLKMLYDYTVTIETNGSVRLDSLDLSNRKYSFVMDMKTPSSGCSGEMVLENFKLLKSRDEIKFVIGDREDYEWSKNIILNHYKKGTITFSPVYNRIDYAKMVKWILDDRLDVRFQLQLHKFIWGPDVTGV

SEQ ID NO: 30650 - protein, 210 aa, unidentified
  source 1..210: note = Hungateiclostridium sp.
  REGION 1..210: note = tr|A0A4Q0I0J4|A0A4Q0I0J4_9FIRM 7-carboxy-7-deazaguanine synthase OS=Hungateiclostridium sp. N2K1 OX=2487273 GN=queE PE=3 SV=1
MKVNEIFLSIQGESMSAGFPTVFVRFTGCNLRCSYCDTKYAYNEGRDMTPSEIFEEIKKLHYKRVCLTGGEPLLQKEMGELMALLNDYIVTIETNGSVDLESLILKNPKHSYVMDMKVPSSGCSDQMLFDNFDLLREQDEIKFVIGDRVDYEWAKGLISNYHRKGNITFSPIYEKIDYSTMVRWILEDRLDVRFQVQLHKVIWGPDKTGV

SEQ ID NO: 30651 - protein, 180 aa, unidentified
  source 1..180: note = Hungateiclostridium straminisolvens
  REGION 1..180: note = tr|W4V8B6|W4V8B6_9FIRM 7-carboxy-7-deazaguanine synthase OS=Hungateiclostridium straminisolvens JCM 21531; OX = 1294263 GN=queE PE=3 SV=1
MKVNEIFLSIQGESMSAGFPTVFVRFTGCNLRCSYCDTKYAYNGGEDMTPSEIFEEIKKLHYKRVCLTGGEPLLQKELGELLVLLDDYTVTIETNGSVGLGSVVLKNPRHSYVMDMKVPSSGCSGQMLFENFDLLKEQDEIKFVVGDRTDYEWAKSIISKYHKKGTVTFSPVYGKIDYSA

SEQ ID NO: 30652 - protein, 210 aa, unidentified
  source 1..210: note = Hungateiclostridium thermocellum
  REGION 1..210: note = tr|A0A4S5EX63|A0A4S5EX63_HUNTH 7-carboxy-7-deazaguanine synthase OS=Hungateiclostridium thermocellum OX=1515 GN=queE PE=3 SV=1
MKVNEIFLSIQGESLSAGFPTVFVRFTGCNLRCSYCDTRYAYKEGEDMTPSEVFEEIKKLHYKRVCLTGGEPLLQKELGQLLEFLDDYIVTIETNGSVSLKSVELKNPKHSYVMDMKVPSSGCSDQMLFENFDLLRDNDEIKFVIGSRVDYDWAKNIISKYHKKGTVTFSPVYGKIDYSGIVKWILEDKLDARFQVQLHKVIWGPDKTGV

SEQ ID NO: 30653 - protein, 210 aa, unidentified; identical to SEQ ID NO: 30652
  source 1..210: note = Hungateiclostridium thermocellum
  REGION 1..210: note = tr|A3DK23|A3DK23_HUNT2 7-carboxy-7-deazaguanine synthase OS=Hungateiclostridium thermocellum (strain ATCC 27405 / DSM 1237 / JCM 9322 / NBRC 103400 / NCIMB 10682 / N RRL B-4536 / VPI 7372) OX=203119 GN=queE PE=3 SV

SEQ ID NO: 30654 - protein, 213 aa, Hyalangium minutum
  REGION 1..213: note = tr|A0A085WRD5|A0A085WRD5_9DELT 7-carboxy-7-deazaguanine synthase OS=Hyalangium minutum; OX = 394096 GN=queE PE=3 SV=1
MAYAVKEIFYTLQGEGGQAGRAAVFLRFAGCNLWSGREADRPHGAGGCSRWCDTDFVGTNGAGGGSFRNAEELAAAVEATWRGRHGKRLVVCTGGEPLLQLDVSLLEELHRRSFEIAIETNGTLLPPPGIDWICVSPKANTQLALRAGQELKLVYPQAGMPPENFESLEFSHFFLQPLDGPDRERHTQSCVEYCLAHPRWRLSLQTHKLLGIP

SEQ ID NO: 30655 - protein, 211 aa, Hyalangium minutum
  REGION 1..211: note = tr|A0A085WJZ4|A0A085WJZ4_9DELT 7-carboxy-7-deazaguanine synthase OS=Hyalangium minutum; OX = 394096 GN=queE PE=3 SV=1
MVKEIYLSVQGESSHAGLLCSFVRLTGCHLRCTYCDSEFAFRGGTRMKNAEVVEQVKALRAPLVEVTGGEPLLQPGVYPLMEALLAEGLTVLLETSGAIDVRLVPPAVHKIVDMKTPSSGECDRNDFGNFTSMNANDELKFVIGSRADYDWARALITEHRLLDKPFGLLFSTVFGKLHPRELSEWIIEDRLPVRFQLQLHKYVWDPAARGV

SEQ ID NO: 30656 - protein, 193 aa, unidentified
  source 1..193: note = Hydrobacter penzbergensis
  REGION 1..193: note = tr|A0A1H2WQD8|A0A1H2WQD8_9BACT 7-carboxy-7-deazaguanine synthase OS=Hydrobacter penzbergensis OX=1235997 GN=queE PE=3 SV=1
MESFYTLQGEGFHQGRAAYFIRLGGCDVGCFWCDVKESWDASQHPLLSVEAIVGEAKKYPGRLAVITGGEPLMHSLDELTHALQAAGFETNIETSGSSPLSGNWNWICLSPKKFKAPLPEIVPLAHELKVIIYNKHDFTWAETYAAQVNPTCKLYLQPEWDQSDKVTPLIIDYIKSNPQWELSLQVHKYIHVP

SEQ ID NO: 30657 - protein, 226 aa, unidentified
  source 1..226: note = Hydrocarboniclastica marina
  REGION 1..226: note = tr|A0A4P7XFN5|A0A4P7XFN5_9ALTE 7-carboxy-7-deazaguanine synthase OS=Hydrocarboniclastica marina OX=2259620 GN=queE PE=3 SV=1
MYRVKEMFYTLQGEGAQTGRPAVFCRFSKCNLWNGREKDRANSICSFCDTDFVGTDGQNGGEFADAMSLAKAIADLWPASGGEGRTRHGRVRPYVVCTGGEPLLQLDVPLIDALHGLGFEVGVETNGTLPAPAGVDWLCVSPKAAAVLAVTRCDELKLVYPQAQAMPERFSGFDADYFYLSPMASPDATATSDPLKWENTRRAIEYCLEHPQWRLTLQTHKLVGID

SEQ ID NO: 30658 - protein, 226 aa, Hydrocarboniphaga daqingensis
  REGION 1..226: note = tr|A0A1M5RTM4|A0A1M5RTM4_9GAMM 7-carboxy-7-deazaguanine synthase OS=Hydrocarboniphaga daqingensis OX=490188 GN=queE PE=3 SV=1
MTSAVAQPAPAARTSRLKITEIFLSLQGESSTAGWPTVFVRLTGCPLRCVYCDTEYAFYGGQWRDLEAILATVDSYGARHVCVTGGEPLAQKTCLELMTRLCDAGKQVSLETSGALDVTAVDPRVMRVIDIKTPGSGEQSRNLWSNLDHLRPHDELKFVICSREDYDWSCSMVAQHELTQRCSVLFSPSHRQVTPRQLADWIVEDRLPVRFQMQLHKQLWGEEAGR

SEQ ID NO: 30659 - protein, 225 aa, Hydrocarboniphaga effusa
  REGION 1..225: note = tr|I8T303|I8T303_9GAMM 7-carboxy-7-deazaguanine synthase OS=Hydrocarboniphaga effusa AP103 OX=1172194; GN = queE PE=3 SV=1
MGFAVAQPAPARDERLKLTEIFLSLQGESSYSGWPTVFVRLTGCPLRCVYCDTAYAFHGGQWKGFDQILDEVAALGARHVCVTGGEPLAQKNVVELLKRLCDAGYAVSLETSGALDVSAVDTRVMRVVDVKTPDSGEVERNLWSNLAQLTSHDEVKFVICSRSDYDWSKRIIEEHALTGRCTVLFSPSHGQVKARELADWIVEDRLAVRFQTQLHKQLWGEEQGR

SEQ ID NO: 30660 - protein, 205 aa, Hydrococcus rivularis
  REGION 1..205: note = tr|A0A1U7H8F6|A0A1U7H8F6_9CYAN 7-carboxy-7-deazaguanine synthase OS=Hydrococcus rivularis NIES-593 OX=1921803 GN=queE PE=3 SV=1
MKTTIIETITYPIVETFHSVQGEGAWTGVSAFFIRLGGCDVYCPWCDQKESWNAKRYPQRSLVELATEAKAANPAIVIITGGEPLMHDLNPLTRQLRKLGLRVHLETSGAHPFSGQFDWVTFSPKQYKPPHNSIYDRVSELKVVVANPKDLQWAEQQATRIPPEALKYLQPEWNTPQSQQIIYDYVLQHPEWRISLQMHKFLGVR

SEQ ID NO: 30661 - protein, 207 aa, Hydrocoleum sp.
  REGION 1..207: note = tr|A0A261KKY3|A0A261KKY3_9CYAN 7-carboxy-7-deazaguanine synthase OS=Hydrocoleum sp. CS-953 OX=1671698 GN=queE PE=3 SV=1
MTENLTIPIHETFQKTIQGEGYWTGTPVDFIRLAGCPVGCHYCDTGYADGGVGLPRQMRTFDELINELFSPRVIISGGEPFIHKQLPTLVKRIEATDRKVSIETSGCYWQDISPKTWVTLSPKQHISPKYPVLPQMWKRASEIKLVIETGKELEFYSKILLDNNNIPVYLQPEWYSRNFTLPLVLELLQEYPYYRLSVQLHKYLGLQ

SEQ ID NO: 30662 - protein, 257 aa, Hydrogenimonas sp.
  REGION 1..257: note = tr|A0A3G9H0U4|A0A3G9H0U4_9PROT 7-carboxy-7-deazaguanine synthase OS=Hydrogenimonas sp.; OX = 2231112 GN=queE PE=3 SV=1
MKRESETLYLVEHFFSIQGEGRYSGTPSIFLRFGGCNLRCPGFGCHEADGKRIYGCDTVRAVYSSLYGRSWHRVADLSELEEVILGYEDRLTYRPDIVITGGEPMIYTDHPVFRGLLERLAAGGYRVTVETNATIAPSLERDPFYSEITFAMAVKLSGSGEPECKRVVPEAIEILATKTKESFFKFTLDRGLAREGAADQIARICSGYDNEVYCMPLGSCESELRLNATAVAEFCLKHGYRYSDRLHVRLWNREERR

SEQ ID NO: 30663 - protein, 251 aa, Hydrogenimonas sp.
  REGION 1..251: note = tr|A0A432R1H9|A0A432R1H9_9PROT 7-carboxy-7-deazaguanine synthase OS=Hydrogenimonas sp.; OX = 2231112 GN=queE PE=3 SV=1
MIYLVEDFFSIQGEGPYMGTPSIFLRFGGCNLRCPGFGETWQKGKRILGCDTVRAVYTRLFKEDWQEVEDADRLIEIIQNYVVNLSYRPDIVLTGGEPMLYAENPIFYRAVEWMVENHYRVTVETNATLAPSFEAYPAYRSVTFAMAVKLSNSGEPKERRIVPEAIAHLAKEGKESFFKFTLNSELIERDAYEQISEICDGYENPIYCMPLGESIPQLHEHAKYVVPFCLKHGYHYSDRLHVRLWNREEKR

SEQ ID NO: 30664 - protein, 253 aa, Hydrogenimonas thermophila
  REGION 1..253: note = tr|A0A1I5R3H5|A0A1I5R3H5_9PROT 7-carboxy-7-deazaguanine synthase OS=Hydrogenimonas thermophila OX=223786 GN=queE PE=3 SV=1
MMKLYLVEHFFSVQGEGRYMGSPSIFLRFGGCNLRCPGFGESWYKGKRILGCDTVRATNQKLFKDCWEEVADYKYLINIIENYLKNISYKPDIVLTGGEPMIYAQNQIFYEMIEWLVENDFRVTIETNSTIAPSFKEFQAYKNVTFAMAVKLSNSGEPKERRIVPDAINRLAKESKNSFFKFTLDQELINKDAQSQIEEICSGFSNEIYCMPLGDNISDLQSNALGVAEFCLKYGYNYSDRLHVRLWNREEKR

SEQ ID NO: 30665 - protein, 218 aa, Hydrogenivirga caldilitoris
  REGION 1..218: note = tr|A0A497XT39|A0A497XT39_9AQUI 7-carboxy-7-deazaguanine synthase OS=Hydrogenivirga caldilitoris OX=246264 GN=queE PE=3 SV=1
MLRDKVRATHTLSVNEIYETVQGEGLLVGTPSLFIRLQGCNLRCPWCDQPEALEFKRKPILIEELLKKLSTSKTRHVVITGGEPLAHSNVHILVKTLLGEGFSVQIETNGTLWNEGLEDVAERIHITCSPKAVANFFVHPKILMYAKELKFVVDEELSEESLLREEFKSFLEKGVVVLQPEGNKQTYISKALVIQDLLLERGFPVRVIPQIHKFLGIR

SEQ ID NO: 30666 - protein, 218 aa, Hydrogenivirga sp.
  REGION 1..218: note = tr|A8UQS0|A8UQS0_9AQUI 7-carboxy-7-deazaguanine synthase OS=Hydrogenivirga sp. 128-5-R1-1 OX=392423; GN = queE PE=3 SV=1
MLRDKVRTANALSVNEIYESIQGEGLLVGTPSIFIRLQGCNLRCPWCDQPEALSFSNTTIPVEGILQKVQEFPARHVVITGGEPFAHQNLHVLVRALIEEGFSLQIETNGTLWNEGLDSMAEQVHITCSPKAAANFFVNPRVIKHTNELKFVVDEEFSSDVVLREEFRGLLLAEKVVLQPEGNKVSFLRKALDIQRELSLKGFKVRVIPQVHKLLGLP

SEQ ID NO: 30667 - protein, 218 aa, Hydrogenobacter hydrogenophilus
  REGION 1..218: note = tr|A0A285NQF2|A0A285NQF2_9AQUI 7-carboxy-7-deazaguanine synthase OS=Hydrogenobacter hydrogenophilus OX=35835 GN=queE PE=3 SV=1
MLRDKVRTSTTLSINEIYPTIQGEGLLVGSPCLMVRFQGCNIRCPWCDQPSALVFKRPNTDLSTLLEEIKRHPHKHIVLTGGEPLAQPNLHLLVYELIQEGYFVQIETNGTLWNENLKVVEDRIHITCSPKWTANWYVHPSVLKNAKELKFVVDDNFSSHILKRSEFLPFLEKGLVVLQPEGNKEKFLQKALKIQTDLLEEGYTVRVLPQLHKLIGLK

SEQ ID NO: 30668 - protein, 218 aa, Hydrogenobacter thermophilus
  REGION 1..218: note = tr|D3DIS0|D3DIS0_HYDTT 7-carboxy-7-deazaguanine synthase OS=Hydrogenobacter thermophilus (strain DSM 6534 / IAM 12695 / TK-6) OX=608538 GN=queE PE=3 SV=1
MLRSEVRTSTALSINEIYPSVQGEGLLIGKPCLFVRFQGCNLRCPWCDEPSALSFKRANTDLKELLQELQKYPQKHVVLTGGEPFAEPNLHLLVQELLCRGYSVQIETNGTLWNENLREVVSQVHITCSPKGVADWYVHPAVLSSAKELKFVVDHELCYNVIKRREFMPFLEEGLVVLQPEGNKTKFLQKALELQNLLLREGYTVRVVPQMHKLIGLK

SEQ ID NO: 30669 - protein, 212 aa, Hydrogenobaculum sp.
  REGION 1..212: note = tr|A0A2N7PZE0|A0A2N7PZE0_9AQUI 7-carboxy-7-deazaguanine synthase OS=Hydrogenobaculum sp.; OX = 2053560 GN=queE PE=3 SV=1
MINEIFYSIQGEGFLIGTPALFVRFQGCNLRCVWCDEKSALDFDKTAKSYAKALEEIETLITLHSPSLIVLTGGEPLLNEDFINIFSYFKSLNKTIQIETNATILKDDVETLLKTYAKTYITLSPKYISNYTIDSKFLDFDKNIELKIVVDEHLNESILEREHIRPFIEKGLLILQPLWENGSVKFLDKAIKLAEKFNARIIPQMHKLLGLK

SEQ ID NO: 30670 - protein, 212 aa, Hydrogenobaculum sp.
  REGION 1..212: note = tr|M1RJI2|M1RJI2_9AQUI 7-carboxy-7-deazaguanine synthase OS=Hydrogenobaculum sp. HO OX=547144 GN=queE PE=3; SV = 1
MINEVFYSIQGEGFLIGTPALFVRFQGCNLRCVWCDEKSALDFDKTAKSYIEALEEIEDILAIHNPSLIVLTGGEPLLNEDFINIFSYFKSLDKTIQIETNATILKDDIETLLKTYAKTYITLSPKYISNYNIHTKFLAFDKNIELKIVVDEHLNEGILEREYIRPFVEKGLLVLQPLWENGSVKFIDKAIKLAEKFNARIIPQMHKLLGLK

SEQ ID NO: 30671 - protein, 210 aa, Hydrogenophaga sp.
  REGION 1..210: note = tr|A0A372EKL1|A0A372EKL1_9BURK 7-carboxy-7-deazaguanine synthase OS=Hydrogenophaga sp. LA-38 OX=2294117 GN=queE PE=3 SV=1
MAYSVKEIFYTLQGEGMNAGRPAVFCRFAGCNLWSGREADRAGAVCRFCDTDFVGTDGGGGGRFADAASLAGAVARAWTADAARRLVVLTGGEPLLQVDPALIEALHAQGFFIAVETNGTVAAPAGIDWLCVSPKQGAPLVQREGQEIKVVVPQPGLDLDALAALGFEHRLLQPMDGPSRAANARLAVALCLRDPRWRLSVQTHKALGIR

SEQ ID NO: 30672 - protein, 210 aa, Hydrogenophaga sp.
  REGION 1..210: note = tr|A0A1Q3R974|A0A1Q3R974_9BURK 7-carboxy-7-deazaguanine synthase OS=Hydrogenophaga sp. 70-12 OX=1895769 GN=queE PE=3 SV=1
MAYSVKEIFYTLQGEGMNAGRPAVFCRFAGCNLWSGREPDRAGAVCRFCDTDFVGTDGGGGGRFADAASLAGAVARAWTAGAARRLVVLTGGEPLLQVDPALIEALHARGFFVAVETNGTVAAPAGIDWLCVSPKQGAPLVQREGQEIKVVVPQPGLDLDALAALAFEHRLLQPMDGPSRAANARLAVAWCLRDPRWRLSVQTHKALGIR

SEQ ID NO: 30673 - protein, 205 aa, unidentified
  source 1..205: note = Hydrogenophilaceae bacterium
  REGION 1..205: note = tr|A0A1J4YSQ9|A0A1J4YSQ9_9PROT 7-carboxy-7-deazaguanine synthase OS=Hydrogenophilaceae bacterium CG1_02_62_390 OX=1805218 GN=queE PE=3 SV=1
MFFSLQGEGLRAGLPTVFVRLTGCPLRCGYCDTTYAFQGGQWFEIGAILAAVAGHPTRHVCVTGGEPLAQKASLDLMAALCDAGYDVALETSGALAIDAVDLRVSRIVDVKTPGSGEVDRNRWTNLDLLAERDEVKFVLVDEADYRWAAAIVSRYRIAERCPVLFSAAHGQLQPRDLAGWILRDGLPVRLQIQLHKFLWGEERGR

SEQ ID NO: 30674 - protein, 443 aa, unidentified
  source 1..443: note = Hydrogenophilales bacterium
  REGION 1..443: note = tr|A0A259GL51|A0A259GL51_9PROT 7-carboxy-7-deazaguanine synthase OS=Hydrogenophilales bacterium 17-61-76 OX=1970523 GN=queE PE=3 SV=1
MKQVLSVLVVAGVSLAAPLHLAQAADMADINRTLPVAQQGTGAAQAGLAGEQSPVQQTPSVLNLLQEIETLKAEVARLRGLTEVQAHQLDTLDKRQTDLYADLDQRLTELAKQAQAAPVAAAPAAGSATPADAQAETAAYDAALKQFREDDFSAAIAEFKTFLKTYPDSALAPNAQYWIGYSYYALKDYKTSLAHQQKLLAVYPASAKVPHARGRSGKSPSGRAEVSMSDALTLRLTEVFLSLQGETSRAGLPTVFVRLTGCPLRCRWCDTPYSFQGGETVTLPSLLAQIAALGVSTVCVTGGEPLAQKNCPALLTALCDAGYSVSLETSGALDVSQVDPRVSRIVDIKAPESGEAARNRWENLVHLTPNDEIKFVLANRADYDWAREVIHAQNLTQISPVLLSPVQGELPPAQLADWVLADRLPVRMQLQLHKILWGNAPGK

SEQ ID NO: 30675 - protein, 227 aa, unidentified
  source 1..227: note = Hydrogenophilales bacterium
  REGION 1..227: note = tr|A0A1G0NA55|A0A1G0NA55_9PROT 7-carboxy-7-deazaguanine synthase OS=Hydrogenophilales bacterium RIFOXYD1_FULL_62_11 OX=1798415 GN=queE PE=3 SV=1
MNRQQPRTQADESTTTTLRLTEVFLSLQGETSRAGLPTVFVRLTGCPLRCRWCDTPYSFQGGETVTLNALLAQIAAFGVPTVCVTGGEPLAQKSCPALLTALCDAGYSVSLETSGALDVSPVDPRVSRIVDIKAPESGEEARNRWENLAHLTPNDEIKFVLASRADYDWAREVIRAQNLIRICPVLVSPVQGELQPAQLADWVLADRLPVRMQLQLHKILWGNTPGK

SEQ ID NO: 30676 - protein, 215 aa, Hydrogenophilus thermoluteolus
  REGION 1..215: note = tr|A0A2Z6E0B1|A0A2Z6E0B1_HYDTE 7-carboxy-7-deazaguanine synthase OS=Hydrogenophilus thermoluteolus OX=297 GN=queE PE=3 SV=1
MSEALLRVSEIFTSIQGESSRVGLPTTFVRLTGCPLRCHWCDTAYAFQGGLRQTVSEVVAEVRARGVRTVCVTGGEPLAQPAVHQLLRALADAGYDVSLETSGALPIADVDPRVAVVMDLKAPGSGEHEKNLWQNLVALKPTDEIKIVIADRADYEWAKMVIAEKRFTERCAVLLSPVANALPPHQLAEWIVADKLPVRFQLQLHKVLWGEERGR

SEQ ID NO: 30677 - protein, 214 aa, Hydrogenothermus marinus
  REGION 1..214: note = tr|A0A3M0BL16|A0A3M0BL16_9AQUI 7-carboxy-7-deazaguanine synthase OS=Hydrogenothermus marinus OX=133270 GN=queE PE=3 SV=1
MAKIKIIEIFDSIEGEGSLVGYPVSFIRLEGCNLRCSWCDTKYSYDTENYKLMDINEILKVIKFFKNKKVCLTGGEPLYNEGFDLLFKTLLEEGYFVIIETNGTLFRNIISVLYKRYNKNIHIVCSPKPFNNFYINDKLLPYIKELKFVVDNLLKIEDILKFKDIHLNDIPIILQPEDNKKEMFKKSRDLQKKLLEKNIEVRIIPQYHKIFEVK

SEQ ID NO: 30678 - protein, 210 aa, Hydrogenothermus sp.
  REGION 1..210: note = tr|A0A432REC8|A0A432REC8_9AQUI 7-carboxy-7-deazaguanine synthase OS=Hydrogenothermus sp.; OX = 2231113 GN=queE PE=3 SV=1
MEKIKVIEIFSSIEGEGSLIGYPVTFIRLEGCNLRCVWCDTKYSYDTTDYMELTLDEILYTIRNYKNKKVCITGGEPLFNEGFDILLETLLKEEFFVIVETNGTLFRESIENLYTVYNNQIHIVCSPKPFSDYKVDSKLKNYISEIKLIVDEFLTEDIVKNFLSFPVILQPEGNKKRFFQKALDIQKLILEKYQQEVRVIPQIHKIFDLK

SEQ ID NO: 30679 - protein, 218 aa, unidentified
  source 1..218: note = Hydrogenovibrio crunogenus
  REGION 1..218: note = tr|A0A4P7NYF0|A0A4P7NYF0_9GAMM 7-carboxy-7-deazaguanine synthase OS=Hydrogenovibrio crunogenus OX=39765 GN=queE PE=3 SV=1
MGYRIKEAFYSLQGEGFHSGRPAIFCRFTNCNLWTGREADRSDAVCQFCDTDFLGTDGQNGGSFKDADSLAKHLLALWPTDKNDQACPHPFAVLTGGEPLLQVDQTLVDVFHQYGFEIAIETNGTQKAPDNIDWICVSPKANAPLILDSGDELKLVYPQAALPPEQVENLDFKHFYLQAMDDADPDTQAKNLKATLAYCLKHPQWKLSLQTHKILGVD

SEQ ID NO: 30680 - protein, 218 aa, unidentified
  source 1..218: note = Hydrogenovibrio crunogenus
  REGION 1..218: note = tr|Q31HI3|Q31HI3_HYDCU 7-carboxy-7-deazaguanine synthase OS=Hydrogenovibrio crunogenus (strain XCL-2); OX = 317025 GN=queE PE=3 SV=1
MGYRIKEAFYSLQGEGFHSGRPAIFCRFTNCNLWTGREADRSNAVCQFCDTDFLGTDGQNGGSFKDADSLAKHLLALWPTDKNDQACPHPFVVLTGGEPLLQVDQTLIDVFHQHGFEIAVETNGTQKAPKNIDWICVSPKANAPLILDSGDELKLVYPQTELRPKQVETLNFKHFYLQAMDDADPDIQEKNLKETLAYCLKHPQWKLSLQTHKILGVD

SEQ ID NO: 30681 - protein, 214 aa, Hydrogenovibrio marinus
  REGION 1..214: note = tr|A0A066ZPR5|A0A066ZPR5_HYDMR 7-carboxy-7-deazaguanine synthase OS=Hydrogenovibrio marinus OX=28885 GN=queE PE=3 SV=1
MSYRIKEAFYSLQGEGFHTGRPAIFCRFSHCNLWTGKEADRETAVCQFCDTDFIGENGQNGGRFKDADALLKHLLKLWPTNTDVHPFIVLTGGEPLLQVDKALIDTFHTQQVEIAVETNGTLKAPAGLDWICVSPKANAPIIQDIGHEMKLVYPQKERSPEDVENLDFKFFYLQPMADTDPAVTEKNRRAAVDYCLHHPQWKLSLQTHKILNID

SEQ ID NO: 30682 - protein, 217 aa, Hydrogenovibrio sp.
  REGION 1..217: note = tr|A0A2I2A496|A0A2I2A496_9GAMM 7-carboxy-7-deazaguanine synthase OS=Hydrogenovibrio sp. SC-1 OX=2065820 GN=queE PE=3 SV=1
MNYRIKEAFYSLQGEGKHSGRPAIFCRFSHCNLWTGKEADRAMATCQFCDTDFVGTDGQNGGVFATAESLVNHLLQLWPTQNDQAWSNPFVVLTGGEPLLQVDETLINHLHQQHFEVAVETNGTLNPPAGLDWICVSPKANAPLLLTSGDELKLVYPQTDLLPEKVAQLDFKYFYLQPMDETDPVKQKANQQAAIRYCLDHPQWQLSLQTHKLLGID

SEQ ID NO: 30683 - protein, 223 aa, unidentified
  source 1..223: note = Hydrogenovibrio thermophilus
  REGION 1..223: note = tr|A0A410H264|A0A410H264_9GAMM 7-carboxy-7-deazaguanine synthase OS=Hydrogenovibrio thermophilus OX=265883 GN=queE PE=3 SV=1
MGYRIKEAFYSLQGEGFHSGRPAIFCRFSNCNLWTGREADRAQAVCQFCDTDFLGTDGQNGGQFKTADDLAEHLLTLWPKTNPTDKEPAHAHPHPFVVLTGGEPLLQVDQTLVDSFHEHGFEIAIETNGTQKAPQGIDWVCVSPKANAPLILDEGNELKLVYPQADCPPEKVAGLPFDHFYLQAMDDADPTIQARNLKATLDYCLAHPQWKLSLQTHKILGVD

SEQ ID NO: 30684 - protein, 208 aa, unidentified
  source 1..208: note = Hydromonas duriensis
  REGION 1..208: note = tr|A0A4R6YB30|A0A4R6YB30_9BURK 7-carboxy-7-deazaguanine synthase OS=Hydromonas duriensis; OX = 1527608 GN=queE PE=3 SV=1
MYTVKEIFYTLQGEGAQAGRAAVFCRFSGCNLWNGREDDRLISLCTFCDTDFIGTGQDGGKFATAEALASRIGSTWKGEGGVPYVVFTGGEPLLQLDKALIELMHGMGFEVGVESNGTIAAPTGIDWLCVSPKGSAKLVQTSGQELKLVYPQLNAQPELFENLDFKHFYIQPLDDRAGINNTQVCIEYCMAHPQWQLSLQTHKLTGIR

SEQ ID NO: 30685 - protein, 208 aa, unidentified
  source 1..208: note = Hydromonas sp.
  REGION 1..208: note = tr|A0A345DD82|A0A345DD82_9BURK 7-carboxy-7-deazaguanine synthase OS=Hydromonas sp. F02; OX = 2268024 GN=queE PE=3 SV=1
MYTVKEIFYTLQGEGAQAGRSAVFCRFAGCNLWSGREQDRATAQCTFCDTDFIGVNEDGGKFTTAAALAQRISDTWLGTGGVPYVVFTGGEPLLQLDDGLIAAMHAVGFEVGVESNGTLPAPAGIDWLCISPKGSNALVQMCGQELKLVYPQLNALPESFATLDFEHFYLQPMDSAAQQSNTAACIRYCMAHPQWQLSLQTHKLSGIR

SEQ ID NO: 30686 - protein, 207 aa, unidentified
  source 1..207: note = Hydrotalea sandarakina
  REGION 1..207: note = tr|A0A2W7RRK8|A0A2W7RRK8_9BACT 7-carboxy-7-deazaguanine synthase OS=Hydrotalea sandarakina OX=1004304 GN=queE PE=3 SV=1
MQQLPVMESFYTLQGEGYYQGHAAYFIRLGGCDVGCVWCDVKESWDAQKHPLFTIEAIVQKAIETVTEKAGSTKNVLCVITGGEPLLHPLDELTEALQKAGFLTNIETSGSSPLSGHWNWICLSPKKFKAPLPEIVPLANELKVVIFNQHDFKWAEQFAKQTNPNCKLYLQPEWDKAATVTPLIIEYIEQNPQWELSLQIHKYINVP

SEQ ID NO: 30687 - protein, 201 aa, Hydrotalea sp.
  REGION 1..201: note = tr|A0A4Q0AWS5|A0A4Q0AWS5_9BACT 7-carboxy-7-deazaguanine synthase OS=Hydrotalea sp. AMD; OX = 2501297 GN=queE PE=3 SV=1
MESFYTLQGEGYYQGHAAYFIRLGGCDVGCVWCDVKESWDAAKHPLYTIDAIVQKAVEEVTKQAGAVHNALCVVTGGEPLLHPLDALTTALQNVGFVTNIETSGSSPLSGNWNWICLSPKKFKAPLPEIVSLASELKVVIFNQHDFKWAETYARQTNPNCKLYLQPEWDKAATVTPLIIEYIQQHPQWELSLQLHKYIHVP

SEQ ID NO: 30688 - protein, 210 aa, unidentified
  source 1..210: note = Hyella patelloides
  REGION 1..210: note = tr|A0A563VTR1|A0A563VTR1_9CYAN 7-carboxy-7-deazaguanine synthase OS=Hyella patelloides LEGE 07179 OX=945734 GN=queE PE=3 SV=1
MLNEMTNAIAEKITTYPIVETFHSVQGEGNYTGVSAFFLRLGGCDVACPWCDTKESWNAKPHPKRSVLELAEEVKQAQPAIAIITGGEPLLHNLTPLTTAIREQNIPVHLETSGSHPFSGEFDWVTFSPKQFKAPHSSIYPHVNELKVVIVNEYDLKWAEQQSALVPPETVKYLQPEWNTPQSKDLIFKYILKNPQWRISLQTHKLLQVR

SEQ ID NO: 30689 - protein, 212 aa, Hymenobacter actinosclerus
  REGION 1..212: note = tr|A0A1I0EBU4|A0A1I0EBU4_9BACT 7-carboxy-7-deazaguanine synthase OS=Hymenobacter actinosclerus OX=82805 GN=queE PE=3 SV=1
MLHQLPLTPATQAATTLPVMEQFYTIQGEGYNTGRAAYFIRLGGCDVGCVWCDVKESWPLDAHPRHALPDLVAAVTAHPGRNVVITGGEPLMHELGPLTAALQQAGCQTWIETSGAYPLSGNWNWICVSPKKFKAPLPAVLAAAHELKIVVFNKSDFAWAEEHAALVGPDCRLYLQPEWSKAAAMTPLIVEYVKNNPRWQVSLQTHKYLDIP

SEQ ID NO: 30690 - protein, 210 aa, unidentified
  source 1..210: note = Hymenobacter amundsenii
  REGION 1..210: note = tr|A0A246FKI7|A0A246FKI7_9BACT 7-carboxy-7-deazaguanine synthase OS=Hymenobacter amundsenii OX=2006685 GN=queE PE=3 SV=1
MSAAAPAEPAAAASLPVMEQFYTIQGEGYNTGRAAYFIRLGGCDVGCVWCDVKESWPIDAHPRHTLPDLVAAVTAHPGRNVVVTGGEPLMHELGPLTAALQAAGCQTWIETSGAYPLSGNWNWICVSPKKFKAPLPTVLAVAHELKIIVFNKSDFAWAEEHAALVGPNCRLYLQPEWSKASAMTPLIVDYVKDHPRWQVSLQTHKYLDIP

SEQ ID NO: 30691 - protein, 193 aa, unidentified
  source 1..193: note = Hymenobacter aquaticus
  REGION 1..193: note = tr|A0A4Z0QAD0|A0A4Z0QAD0_9BACT 7-carboxy-7-deazaguanine synthase OS=Hymenobacter aquaticus OX=1867101 GN=queE PE=3 SV=1
MEQFYTIQGEGYNTGRAAYFLRLGGCDVGCVWCDVKESWDADAHPRVAIADMVAAVTAHPGRNVVITGGEPLMHDLTELTAALHAAGCQNWIETSGAYPLSGQWDWICVSPKKFKAPLPEVVRQAHELKIIIFNKSDFAWAEQHAALVGEHTRLYLQPEWSKAPQMMPLIVDYVKENPRWQVSLQTHKYLDIP

SEQ ID NO: 30692 - protein, 216 aa, Hymenobacter chitinivorans
  REGION 1..216: note = tr|A0A2M9BQW5|A0A2M9BQW5_9BACT 7-carboxy-7-deazaguanine synthase OS=Hymenobacter chitinivorans DSM 11115 OX=1121954 GN=queE PE=3 SV=1
MLHVLPLTSAPLAAEPAVAALPLMEQFYTIQGEGYNTGRAAYFLRLGGCDVGCVWCDVKESWDAEAHPRVTIADMVAAATAHAGRNVVITGGEPLMHDLTQLTAALHAAGCQNWIETSGAYPLTGEWDWICVSPKKFKAPLPSVLQQAHELKIIVFNKSDFQWAEQHAALVGEHTRLYLQPEWSKAPQMMPLIVDYVKENPRWQVSLQTHKYLDIP

SEQ ID NO: 30693 - protein, 218 aa, unidentified
  source 1..218: note = Hymenobacter coccineus
  REGION 1..218: note = tr|A0A1G1TD85|A0A1G1TD85_9BACT 7-carboxy-7-deazaguanine synthase OS=Hymenobacter coccineus OX=1908235 GN=queE PE=3 SV=1
MPAVTDLLVALPIVCQPTAGALLPVMEQFYTIQGEGFNTGRAAYFIRLGGCDVGCVWCDVKESWDANAHPRQAVAALVAAAAAYPGRNVVITGGEPLMHDCAPLTGALQAAGFQTWIETSGAHPLSGRWDWICVSPKKFKAPRPDVLAQADELKIIVFNDSDFAWAEEHAALVPATTRLYLQPEWSRAARMTPALIDYVKAHPRWQVSLQTHKYLDIP

SEQ ID NO: 30694 - protein, 207 aa, Hymenobacter daecheongensis
  REGION 1..207: note = tr|A0A1M6JUL9|A0A1M6JUL9_9BACT 7-carboxy-7-deazaguanine synthase OS=Hymenobacter daecheongensis DSM 21074 OX=1121955 GN=queE PE=3 SV=1
MPLAAEPAVAALPLMEQFYTIQGEGYNTGRAAYFLRLGGCDVGCVWCDVKESWDAAAHPRVAIADMVAAVVQHPGRNVVITGGEPLMHDLTDLTAALHAAGCQNWIETSGAYPLSGAWDWICVSPKKFKAPLPDVLRQAHELKIIVFNQSDFKWAEEHAAQVGGHTRLYLQPEWSRAAQMTPLIVDYVKKNPRWQVSLQTHKYLDIP

SEQ ID NO: 30695 - protein, 193 aa, Hymenobacter elongatus
  REGION 1..193: note = tr|A0A4Z0PGX4|A0A4Z0PGX4_9BACT 7-carboxy-7-deazaguanine synthase OS=Hymenobacter elongatus OX=877208 GN=queE PE=3 SV=1
MEQFYTIQGEGYNTGRAAYFLRLGGCDVGCVWCDVKESWDVDAHPRVTIADMVAAVTAYPGRNVVITGGEPLMHDLTQLTAALHEAGCRNWIETSGAYPLSGQWDWICVSPKKFKAPLPSVLQQAHELKIIVFNKSDFTWAEQHAALVGEHTRLYLQPEWSKAAQMTPLIVDYVKQHPRWQVSLQTHKYLDIP

SEQ ID NO: 30696 - protein, 193 aa, Hymenobacter gelipurpurascens
  REGION 1..193: note = tr|A0A212TCM2|A0A212TCM2_9BACT 7-carboxy-7-deazaguanine synthase OS=Hymenobacter gelipurpurascens OX=89968 GN=queE PE=3 SV=1
MEQFYTIQGEGYNTGRAAYFVRLGGCDVGCVWCDVKESWDADAHPRVSIPDIVATTTAHAGRNVVITGGEPLMHNLGHLTAALHAAGCQNWIETSGAYPLSGEWDWICVSPKKFKAPLPEVLAAAHELKIIVFNKSDFAWAEQHAALVSPSCRLYLQPEWSKVSQMMPLIVDYVKENPKWQVSLQTHKFLDIP

SEQ ID NO: 30697 - protein, 222 aa, unidentified
  source 1..222: note = Hymenobacter glacialis
  REGION 1..222: note = tr|A0A1G1T7P5|A0A1G1T7P5_9BACT 7-carboxy-7-deazaguanine synthase OS=Hymenobacter glacialis OX=1908236 GN=queE PE=3 SV=1
MISVNILSSEIVAPIGAVPASPAGVMLPVMEQFYTIQGEGYNTGRAAYFIRLGGCDVGCVWCDVKESWDADAHPRQAVAELVAAVLAYPGRDVVITGGEPLMHELGPLTAALHAAGCRTWLETSGAHPLSGTWDWICLSPKKFKAPLPEVLATAHELKVVVFNGHDFVWAEEHAALVPATTRLYLQPEWSRAARMTPELVEYVKQHPRWQVSLQTHKYLDIP

SEQ ID NO: 30698 - protein, 193 aa, unidentified
  source 1..193: note = Hymenobacter gummosus
  REGION 1..193: note = tr|A0A3S0J6S5|A0A3S0J6S5_9BACT 7-carboxy-7-deazaguanine synthase OS=Hymenobacter gummosus; OX = 1776032 GN=queE PE=3 SV=1
MEQFYTIQGEGANAGRAAYFIRLGGCDVGCHWCDVKESWDAGAHPRLSIASLVEAAAAHPGRNVVITGGEPLMYDLGPLTEALHAAGMQTWMETSGAHPLSGQWDWICVSPKKFKAPLPEVLRNAHELKVVVFNKSDFAWAEQHAAQVGPECRLFLQPEWGKAAQVTPLIIDYVKQHPRWQVSLQTHKYLDIP

SEQ ID NO: 30699 - protein, 222 aa, unidentified
  source 1..222: note = Hymenobacter lapidarius
  REGION 1..222: note = tr|A0A1G1STW5|A0A1G1STW5_9BACT 7-carboxy-7-deazaguanine synthase OS=Hymenobacter lapidarius OX=1908237 GN=queE PE=3 SV=1
MISVNILSSEIVAPNGAVPATAAGVMLPVMEQFYTIQGEGYNTGRAAYFIRLGGCDVGCVWCDVKDSWDADAHPRQSVAQLVAAVLAYPGRDVVITGGEPLMHELGPLTAALHAAGCRTWLETSGAHPLSGTWDWICLSPKKFKAPLPEVLAVAHELKVVVFNGHDFIWAEEHAALVPATTRLYLQPEWSRAARMTPELVEYVKQHPRWQVSLQTHKYLDIP

SEQ ID NO: 30700 - protein, 216 aa, unidentified
  source 1..216: note = Hymenobacter mucosus
  REGION 1..216: note = tr|A0A238V9K8|A0A238V9K8_9BACT 7-carboxy-7-deazaguanine synthase OS=Hymenobacter mucosus; OX = 1411120 GN=queE PE=3 SV=1
MLHELPVTSAAPTSGAPALALPLMEQFYTIQGEGYNTGRAAYFVRLGGCDVGCVWCDVKESWDVDAHPRVAVADIVTMATAHAGRNVVITGGEPLMHNLRPLTTALQTAGCQTWIETSGAYPLSGQWDWICVSPKKFKAPLPEVLAAAHELKIIIFNKSDFAWAEQHAAQVSPTCRLYLQPEWSKAPQMMPLIVDYVKENPKWQVSLQTHKFLDIP

SEQ ID NO: 30701 - protein, 218 aa, unidentified
  source 1..218: note = Hymenobacter nivis
  REGION 1..218: note = tr|A0A502GUE8|A0A502GUE8_9BACT 7-carboxy-7-deazaguanine synthase OS=Hymenobacter nivis; OX = 1850093 GN=queE PE=3 SV=1
MSAVTDLLAALPILHQPTTGALLPVMEQFYTIQGEGFNTGRAAYFIRLGGCDVGCVWCDVKESWDADAHPRQAVGALVAAAAAFPGRNVVITGGEPLMHDCAPLTGALQAAGFQTWIETSGAHPLSGSWDWICVSPKKFKAPRPDVLAHADELKIIVFNDSDFAWAEEHAALVPATTRLYLQPEWSRAARMTPALIDYVKAHPRWQVSLQTHKYLDIP

SEQ ID NO: 30702 - protein, 218 aa, unidentified
  source 1..218: note = Hymenobacter nivis
  REGION 1..218: note = tr|A0A2Z3GDT4|A0A2Z3GDT4_9BACT 7-carboxy-7-deazaguanine synthase OS=Hymenobacter nivis; OX = 1850093 GN=queE PE=3 SV=1
MSAVTDLLAALPILHTPITGVILPVMEQFYTIQGEGFNAGRAAYFIRLGGCDVGCVWCDVKESWDADAHPRQAVAELVAAAAAHPGRNVVITGGEPLMHNCGPLTGALQAAGFQTWIETSGAHPLSGRWDWICVSPKKFRAPRPDVLAHADELKIIVFNDSDFAWAEEHAALVPATTRLYLQPEWSRAARMTPALIDYVKAHPRWQVSLQTHKYLDIP

SEQ ID NO: 30703 - protein, 193 aa, Hymenobacter perfusus
  REGION 1..193: note = tr|A0A428K4C6|A0A428K4C6_9BACT 7-carboxy-7-deazaguanine synthase OS=Hymenobacter perfusus; OX = 1236770 GN=queE PE=3 SV=1
MEQFYTIQGEGYNTGRAAYFIRLGGCDVGCVWCDVKESWPIDAHPRQSIAHLVAAATADAGRNVVITGGEPLMHDLAPLTAALHEAGCRNWIETSGAYPLSGQWDWICVSPKKFKAPLPSVLAAAHELKIIVFNKSDFAWAEQHAALVGPDCRLYLQPEWSKASEMMPLIVDYVKAQPRWQVSLQTHKFLDIP

SEQ ID NO: 30704 - protein, 193 aa, Hymenobacter psychrophilus
  REGION 1..193: note = tr|A0A1H3CQJ7|A0A1H3CQJ7_9BACT 7-carboxy-7-deazaguanine synthase OS=Hymenobacter psychrophilus OX=651662 GN=queE PE=3 SV=1
MEQFYTIQGEGYNTGRAAYFIRLGGCDVGCVWCDVKESWPLDAHPRHALPDLVAAVTAHPGRNVVVTGGEPLMHELGPLTAALQAAGCQTWIETSGAYPLSGNWNWICVSPKKFKAPLPAVLAAAHELKIVVFNKSDFAWAEEHAALVGPECRLYLQPEWSKASAMTPLIVDYVKAHPHWQVSLQTHKYLDIP

SEQ ID NO: 30705 - protein, 210 aa, Hymenobacter psychrotolerans
  REGION 1..210: note = tr|A0A1M6SM05|A0A1M6SM05_9BACT 7-carboxy-7-deazaguanine synthase OS=Hymenobacter psychrotolerans DSM 18569 OX=1121959 GN=queE PE=3 SV=1
MSAASAAAEVPAPALPLMEHFYTIQGEGYNTGRAAYFIRLGGCDVGCVWCDVKESWDAEKHPRVAVSDLVALATAHIGRNVVITGGEPLMYNLGPLTQALHAAGCQNWIETSGAYPLTGGWDWICVSPKKFKAPLPETLRHAHELKIVVFNKSDFAWAEEHAAQVGPECRLYLQPEWSKAPQMMPLIVEYVKNNPKWQVSLQTHKFLDIP

SEQ ID NO: 30706 - protein, 201 aa, Hymenobacter rigui
  REGION 1..201: note = tr|A0A3R9PT21|A0A3R9PT21_9BACT 7-carboxy-7-deazaguanine synthase OS=Hymenobacter rigui; OX = 334424 GN=queE PE=3 SV=1
MAAPELPVMEQFYTIQGEGYNTGRAAYFIRLGGCDVGCVWCDVKESWPLDAHPRQALSSLVHAVTQHPGRNVVITGGEPLMHDLGPLTAALHEAGCQNWIETSGAYPLSGSWDWICVSPKKFKAPLPSVLAAAHELKIIVFNKSDFAWAEQHAALVGPNCRLYLQPEWSKSADMMPLIVEYVKSHPQWQVSLQTHKFLDIP

SEQ ID NO: 30707 - protein, 209 aa, Hymenobacter roseosalivarius
  REGION 1..209: note = tr|A0A1W1W4N8|A0A1W1W4N8_9BACT 7-carboxy-7-deazaguanine synthase OS=Hymenobacter roseosalivarius DSM 11622 OX=645990 GN=queE PE=3 SV=1
MAGSMPVASSTAALPLMEQFYTIQGEGYNTGRAAYFIRLGGCDVGCHWCDVKESWDASQHPRVALADMVAAVTAHPGRNVVVTGGEPLMHDLTQLTTALKAAGCQSWLETSGAYPLTGDWDWICVSPKKFKAPLPSVLHLAHELKVVVFNKSDFVWAEEHAAQVGAHTRLYLQPEWSRAPQMTPLIVDYVKQNPRWQVSLQTHKYLDIP

SEQ ID NO: 30708 - protein, 193 aa, unidentified
  source 1..193: note = Hymenobacter rubripertinctus
  REGION 1..193: note = tr|A0A418R8H1|A0A418R8H1_9BACT 7-carboxy-7-deazaguanine synthase OS=Hymenobacter rubripertinctus OX=2029981 GN=queE PE=3 SV=1
MEQFYTIQGEGYNTGRAAYFIRLGGCDVGCVWCDVKESWPLDAHPRQAVADLVAAATAHPGRNIVITGGEPLMHDLAPLTVALHAAGCQNWIETSGAYPLSGNWNWICVSPKKFKAPLPSVLAAAHELKIIVFNKSDFAWAEEHAALVGPECRLYLQPEWSKAPAMMPLIVDYVKTHPRWQVSLQTHKFLDIP

SEQ ID NO: 30709 - protein, 197 aa, unidentified
  source 1..197: note = Hymenobacter sedentarius
  REGION 1..197: note = tr|A0A0U3SJ06|A0A0U3SJ06_9BACT 7-carboxy-7-deazaguanine synthase OS=Hymenobacter sedentarius OX=1411621 GN=queE PE=3 SV=1
MLPVMEQFYTIQGEGYNTGRAAYFIRLGGCDVGCHWCDVKESWDADAHPRQSIAQLVEAVLAHPGRDVVITGGEPLMHELGPLTAALQAAGCRTWLETSGAHPLSGTWDWICLSPKKFKAPLPDVLAAAHELKVVVFNGHDFAWAEEHAALVPASTRLYLQPEWSRAARMTPELVEYVKQHPRWQVSLQTHKYLDIP

SEQ ID NO: 30710 - protein, 193 aa, Hymenobacter sp.
  REGION 1..193: note = tr|A0A4Z0QIZ9|A0A4Z0QIZ9_9BACT 7-carboxy-7-deazaguanine synthase OS=Hymenobacter sp. 9PBR-1 OX=2563114 GN=queE PE=3 SV=1
MEQFYTIQGEGYNTGRAAYFLRLGGCDVGCVWCDVKESWDADAHPRVTITDMVAAATAHAGRNVVITGGEPLMHDLTQLTAALHAAGCQNWIETSGAYPLTGEWDWICVSPKKFKAPLPSVLAQAHELKIIVFNKSDFQWAEQHAALVGEHTRLYLQPEWSKAPQMMPLIVDYVKENPRWQVSLQTHKYLDIP

SEQ ID NO: 30711 - protein, 206 aa, Hymenobacter sp.
  REGION 1..206: note = tr|A0A5B8A5X9|A0A5B8A5X9_9BACT 7-carboxy-7-deazaguanine synthase OS=Hymenobacter sp. 17J68-5 OX=2502781 GN=queE PE=3 SV=1
MLSSGTGALALPLMEQFYTIQGEGYNTGRAAYFVRLGGCDVGCHWCDVKESWDADQHPRVAIPEIVEAATSYPGRNVVITGGEPLMHDLTSLTHALHEAGCQTWLETSGAHPLSGQWDWICLSPKKFKAPLSDVLRQAHELKVVIFNKSDFAWAEEHAAQVSSDCRLYLQPEWGRAAQMTPLIVDYVKQNPRWQVSLQTHKYLDIP

SEQ ID NO: 30712 - protein, 193 aa, unidentified
  source 1..193: note = Hymenobacter swuensis
  REGION 1..193: note = tr|W8F7D6|W8F7D6_9BACT 7-carboxy-7-deazaguanine synthase OS=Hymenobacter swuensis DY53 OX=1227739 GN=queE; PE = 3 SV=1
MEQFYTIQGEGYNTGRAAYFIRLGGCDVGCVWCDVKESWPIDAHPRQAIARLVAAATADAGRNVVITGGEPLMHDLAPLTAALHEAGCRNWIETSGAYPLSGQWDWICVSPKKFKAPLPSVLAAAHELKIIVFNKSDFAWAEQHAALVRPDCRLYLQPEWSKAPEMMPLIVEYVKNNPQWQVSLQTHKFLDIP

SEQ ID NO: 30713 - protein, 193 aa, unidentified
  source 1..193: note = Hymenobacter wooponensis
  REGION 1..193: note = tr|A0A4Z0MNM6|A0A4Z0MNM6_9BACT 7-carboxy-7-deazaguanine synthase OS=Hymenobacter wooponensis OX=1525360 GN=queE PE=3 SV=1
MEQFYTIQGEGFNTGRAAYFVRLGGCDVGCVWCDVKESWDADAHPKVSIPAIVASATAHAGRNVVITGGEPLMYNLGPLTAALHAAGCQNWIETSGAYPLSGEWDWICVSPKKFKAPLPEVLAAAHELKIIVFNKSDFAWAEQHAALVSPGCRLYLQPEWSKAPQMMPLIVDYVKENPKWQVSLQTHKFLDIP

SEQ ID NO: 30714 - protein, 234 aa, unidentified
  source 1..234: note = Hyphomicrobiaceae bacterium
  REGION 1..234: note = tr|A0A5C7M4Q9|A0A5C7M4Q9_9RHIZ 7-carboxy-7-deazaguanine synthase OS=Hyphomicrobiaceae bacterium OX=2015799 GN=queE PE=3 SV=1
MNQQPIEKRISRDDGILSVHSIFYTIQGEGPFCGTPAVFIRLAGCNLQCPACDTDYTSSRWESGPLGILDKVREQSAYGLVVITGGEPFRQDLAKLLNVLTDAGYYVQIETNGTLEPADVPYSLVTDIRTGVYVVCSPKAGKVHPRIAEVACCYKYVLSQDSIHADGLPLRALEHTASPFVARPPKNWHRPIYVQPVDSKDETTNGQHLKAAIDSCMKNGYILQLQIHKLIDME

SEQ ID NO: 30715 - protein, 209 aa, unidentified
  source 1..209: note = Hyphomicrobiaceae bacterium
  REGION 1..209: note = tr|A0A5C7M0H8|A0A5C7M0H8_9RHIZ 7-carboxy-7-deazaguanine synthase OS=Hyphomicrobiaceae bacterium OX=2015799 GN=queE PE=3 SV=1
MTYAVKEIFYTLQGEGANAGRPAVFCRFSGCNLWSGREEDRYTAVCQFCDTDFVGINGVRGGNYRAEALAAVATGLWPVGKCGRFIVLTGGEPLLQVDKALLDILHANSFTVAVETNGTKIPPEGIDWLCVSPKAGTNLVITVGDELKLVFPQPTAPPAKFANLQFKHFFLQPMAGPAQTAHTNAAVRYCLAHPQWHLSVQTHKILGIP

SEQ ID NO: 30716 - protein, 208 aa, Hyphomicrobium denitrificans
  REGION 1..208: note = tr|D8JYX5|D8JYX5_HYPDA 7-carboxy-7-deazaguanine synthase OS=Hyphomicrobium denitrificans (strain ATCC 51888 / DSM 1869 / NCIB 11706 / TK 0415) OX=582899 GN=queE; PE = 3SV=1
MYAVKEIFYTLQGEGTNAGRPAVFCRFAGCNLWTGREVDRAKAVCQFCDTDFVGTDGEGGGRFRTADDLARACRAACGSDGDMLVVLTGGEPMLQVDQELVDALHARGFTIAIETNGTLPVLETIDWICVSPKAGSQLQQKHGHELKLVYPQEGVDPADYADLAFQTRFLQPMDGATREANTQAAVAYCKANPGWRLSLQTHKLLGIP

SEQ ID NO: 30717 - protein, 208 aa, Hyphomicrobium denitrificans
  REGION 1..208: note = tr|N0BB95|N0BB95_9RHIZ 7-carboxy-7-deazaguanine synthase OS=Hyphomicrobium denitrificans 1NES1 OX=670307; GN = queE PE=3 SV=1
MYSVKEIFYTLQGEGANAGRPAVFCRFAGCNLWTGREADRAKAICQFCDTDFVGTDGDGGGRFQAADAVARACRAACLSDGEMLVVLTGGEPMLQVDQELVDALHASGFTVAIETNGTLPVLDTIDWICVSPKAGSELKQRHGQELKLVYPQDGIDPAQYLDLAFEQRFLQPMDGPQREANTQAAVAYCKANPAWRLSLQTHKLLGIP

SEQ ID NO: 30718 - protein, 209 aa, Hyphomicrobium facile
  REGION 1..209: note = tr|A0A1I7NUW9|A0A1I7NUW9_9RHIZ 7-carboxy-7-deazaguanine synthase OS=Hyphomicrobium facile; OX = 51670 GN=queE PE=3 SV=1
MYAIKEIFYTLQGEGANAGTPAVFCRFAGCNLWTGREQDRAKAVCQFCDTDFVGMDGEGGGRFETADALADACRQAAPASNHSILVVLTGGEPMLQVDQELVDALHARGFRIAIETNGTLPVLETIDWICVSPKVGSDLKQLHGHELKLVFPQEGGDPARYLELDFEERFLQPMDGPDQRANTLAAIAYCKANPAWRLSVQTHKILGIP

SEQ ID NO: 30719 - protein, 209 aa, unidentified
  source 1..209: note = Hyphomicrobium nitrativorans
  REGION 1..209: note = tr|V5SFI5|V5SFI5_9RHIZ 7-carboxy-7-deazaguanine synthase OS=Hyphomicrobium nitrativorans NL23 OX=1029756; GN = queE PE=3 SV=1
MYAVKEIFYTLQGEGANAGRAAVFCRFAGCNLWSGREKDRLSAACDFCDTDFVGTDGEGGGKYAHAHLLVEAVAAAWQGGDAERFVVLTGGEPALQVDDALIDGLHRQGFVIAVETNGTLPLPAGIDWICVSPKAGNDLAQTSGDELKLVYPQEGLVPESLLGLDFPRRYLSPMDGPRLAENTAAAVAYVKAHPIWRLSVQTHKRIGIP

SEQ ID NO: 30720 - protein, 209 aa, Hyphomicrobium sp.
  REGION 1..209: note = tr|A0A258KYF9|A0A258KYF9_9RHIZ 7-carboxy-7-deazaguanine synthase OS=Hyphomicrobium sp. 32-62-53 OX=1970390 GN=queE PE=3 SV=1
MYQVKEIFYTLQGEGANAGTPAVFCRFSGCNLWSGREEDRAGAKCRFCDTDFVGTDGPGGGKFETADALARACRAAVTASYGPAMVVLTGGEPMLQVDQDLIDALHGRGFSIAIETNGTLAVPDAIDWVCVSPKAGQPLVQLWGDELKLVYPQVGIDPAQYQLLEFEHRFLQPMDGPDQAANTLAAIAYCKANPPWRLSVQTHKVLGIP

SEQ ID NO: 30721 - protein, 210 aa, Hyphomicrobium sp.
  REGION 1..210: note = tr|F8J6L3|F8J6L3_HYPSM 7-carboxy-7-deazaguanine synthase OS=Hyphomicrobium sp. (strain MC1) OX=717785; GN = queE PE=3 SV=1
MYAVKEIFYTLQGEGANAGTPAVFCRFAGCNLWSGREQDRAKATCQFCDTDFVGTDGPGGGRFDTAEVLARACRDAAMPTTDSPKFVVLTGGEPMLQVDQDLVDALHAEGFRIAMETNGTLPALDTIDWICVSPKAGADLKQRHGHELKLVFPQTGIDPAGYLDLAFEQRFLQPMDGPDQVANTQAAIAYCKANPAWRLSVQTHKLLGIP

SEQ ID NO: 30722 - protein, 208 aa, Hyphomicrobium sulfonivorans
  REGION 1..208: note = tr|A0A109BCD2|A0A109BCD2_HYPSL 7-carboxy-7-deazaguanine synthase OS=Hyphomicrobium sulfonivorans OX=121290 GN=queE PE=3 SV=1
MYAVKEIFYTLQGEGANAGRPAVFCRFAGCNLWSGRERDRHKADCQFCDTDFVGTDGPGGGKFATAEALAAACVASTGDAGASFIVLTGGEPMLQVDAELIDALHKAEFTIAIETNGTLPVPRAIDWICVSPKAGTDLRQRTGDELKLVYPQAGLDPAALDGVDFSHCYLQPMDGPQQAANTARAIAYCKANPRWRLSVQTHKLLGIP

SEQ ID NO: 30723 - protein, 251 aa, unidentified
  source 1..251: note = Hyphomonadaceae bacterium
  REGION 1..251: note = tr|A0A424KKN4|A0A424KKN4_9RHOB 7-carboxy-7-deazaguanine synthase OS=Hyphomonadaceae bacterium TMED125 OX=1986775 GN=queE PE=3 SV=1
MSQETLWLAVDDHGNPEIFSSIQGEGASLGAPRTFIRLSGCNLHCKWCDTAYTWNFEGTPFFHEDNVKFVPEAERLSRSFGDVAAEVAKSEPSGIVITGGEPMLQKGKLEGLITAIKNACGPVWVEIEANGSIAPPAGLIPLVNQFNVSPKLAHSGNDAAIALNEASLSAYAALPQSWFKFVIGSPEDLEEVLSLTRTFRIPHERVYLMPLGRSSGEVRTRSKWLTEECLRHGMNFTDRLHIHLYGDTRGT

SEQ ID NO: 30724 - protein, 251 aa, unidentified; identical to SEQ ID NO: 30723
  source 1..251: note = Hyphomonadaceae bacterium
  REGION 1..251: note = tr|A0A354CEQ9|A0A354CEQ9_9RHOB 7-carboxy-7-deazaguanine synthase OS=Hyphomonadaceae bacterium OX=2026748 GN=queE PE=3 SV=1

SEQ ID NO: 30725 - protein, 215 aa, Hyphomonas adhaerens
  REGION 1..215: note = tr|A0A069E6I7|A0A069E6I7_9RHOB 7-carboxy-7-deazaguanine synthase OS=Hyphomonas adhaerens MHS-3 OX=1280949 GN=queE PE=3 SV=1
MTYSVKEAFYTLQGEGAQTGRAAVFLRFAGCNLWNGLERDRASAVCQFCDTDFVGTDGENGGKYKTPEEVAALVASIWKANADTAGRPYVVCTGGEPLLQLDPPLIGALHGEGFEIAVETNGTIAAPEGLDWICVSPKANAALVLKKGNELKLVYPQDEAEAQPERFTELDFQHFFLQPKDNSEAARNVQAAAAYCLKNPQWRLSLQTHKLTGLP

SEQ ID NO: 30726 - protein, 251 aa, unidentified
  source 1..251: note = Hyphomonas atlantica
  REGION 1..251: note = tr|A0A059DZC1|A0A059DZC1_9RHOB 7-carboxy-7-deazaguanine synthase OS=Hyphomonas atlantica; OX = 1280948 GN=queE PE=3 SV=1
MRLAVTEPGVPEIFHSLQGEGISAGKPSVFVRFSQCNLHCVWCDTAYTWNFQGTEFIHRDDAPGAPRKFDRAAETVDVSVETLAARLIEQSCRRIIFTGGEPLLQQRDLGVLIQQLKATDPDFYIEIETNGSIKPAGLAAELIDQFNVSPKLAHSGNAAAIRLKPDVLAFYAADPRANFKIVVAEPSDLEEVHELVSSSGMPPARVWLMPEGRTPQELRSRERWLAEACLRAGYNFTDRLHIHLYGDTRGT

SEQ ID NO: 30727 - protein, 253 aa, unidentified
  source 1..253: note = Hyphomonas atlantica
  REGION 1..253: note = tr|A0A3B9KYL3|A0A3B9KYL3_9RHOB 7-carboxy-7-deazaguanine synthase OS=Hyphomonas atlantica; OX = 1280948 GN=queE PE=3 SV=1
MVMRLAVTEPGVPEIFHSLQGEGISAGKPSVFVRFSQCNLHCVWCDTAYTWNFQGTEFIHRDDAPGAPRKFDRAAETVDVSVETLAARLIEQSCRRIIFTGGEPLLQQRDLGVLIQQLKATDPDFYIEIETNGSIKPAGLAAELIDQFNVSPKLAHSGNAAAIRLKPDVLAFYAADPRANFKIVVAEPSDLEEVHELVSSSGMPPARVWLMPEGRTPQELRSRERWLAEACLRAGYNFTDRLHIHLYGDTRGT

SEQ ID NO: 30728 - protein, 251 aa, unidentified
  source 1..251: note = Hyphomonas beringensis
  REGION 1..251: note = tr|A0A062UG33|A0A062UG33_9RHOB 7-carboxy-7-deazaguanine synthase OS=Hyphomonas beringensis OX=1280946 GN=queE PE=3 SV=1
MRLAVTDPGVPEIFHSLQGEGVSAGKPSVFVRLSQCNLHCVWCDTAYTWNFQDTEFQHRDDAPSAPRKYDRAQETVDRTVEELTAHLLALPCRRIIFTGGEPLLQQRELGELIQRLKEVDPSFYIEIETNGTIKPLGLAAELIDQFNVSPKLAHSGNDLAIRFKLETLRFYANDARANFKIVIETPSDLEEVKALVAEAGMPASRVWLMPEGRTPQELHQREHWLAEACLKAGYNFTGRLHIHLYGDTRGT

SEQ ID NO: 30729 - protein, 215 aa, unidentified
  source 1..215: note = Hyphomonas chukchiensis
  REGION 1..215: note = tr|A0A062UKT8|A0A062UKT8_9RHOB 7-carboxy-7-deazaguanine synthase OS=Hyphomonas chukchiensis OX=1280947 GN=queE PE=3 SV=1
MTWTVKEAYYTLQGEGAQTGRAAVFLRFAGCNLWSGLERDRDKAVCRFCDTDFVGTNGVNGGKFRAAEDLAAHVKAIWEAEAGDEGPRYVVCTGGEPLLQLDAPLIAALKAEGFEIGVETNGTIAAPDGLDWICVSPKANAPLVQTSGSELKLVYPQDEAEAQPERFSKLDFSHFFLQPKDDPDQARNIQAATTYCMKNPQWRLSLQTHKLIGLP

SEQ ID NO: 30730 - protein, 215 aa, Hyphomonas hirschiana
  REGION 1..215: note = tr|A0A059G1C1|A0A059G1C1_9RHOB 7-carboxy-7-deazaguanine synthase OS=Hyphomonas hirschiana VP5 OX=1280951 GN=queE PE=3 SV=1
MTYSVKEAFYTLQGEGAHTGRAAVFLRFAGCNLWSGLERDREKAVCRFCDTDFVGTNGEGGGKFREPGLLAAHIESIWQANASPGGRPYVVCTGGEPLMQLDEPLIGALHEAGFEIAIETNGTLPAPASIDWICVSPKANAPLAQKSGNELKLVYPQTEPEAQPECFETLDFEHFFLQPRDDGPSVSHVAAVANYCLKNPKWRLSLQTHKLTGLP

SEQ ID NO: 30731 - protein, 215 aa, Hyphomonas jannaschiana
  REGION 1..215: note = tr|A0A059FF28|A0A059FF28_9RHOB 7-carboxy-7-deazaguanine synthase OS=Hyphomonas jannaschiana VP2 OX=1280952 GN=queE PE=3 SV=1
MTYSVKEAFYTLQGEGAQTGRAAVFLRFAGCNLWSGLERDRAKAVCQFCDTDFVGTDGENGGKYKTPEEVAALVASIWASNADTAGKPYVVCTGGEPLLQLNPPLIEALHGEGFEIAVETNGTIEAPEGLDWICVSPKANAALVLKKGNELKLVYPQDEAEAQPERFTELDFQHFFLQPKDNSEVARNVQAAAAYCLKNPQWRLSLQTHKLTGLP

SEQ ID NO: 30732 - protein, 215 aa, Hyphomonas johnsonii
  REGION 1..215: note = tr|A0A059FQR5|A0A059FQR5_9RHOB 7-carboxy-7-deazaguanine synthase OS=Hyphomonas johnsonii MHS-2 OX=1280950 GN=queE PE=3 SV=1
MTWAVKEAYYTLQGEGAQTGRAAVFLRFAGCNLWSGLERDRLTAVCRFCDTDFVGTDGVNGGKFRAAADLAAHVAGIWKAEAGDAGPRYVVCTGGEPLLQLDPPLIAALKAEGFEIGVETNGTLAAPEGLDWICVSPKANAPLVQTRGNELKLVYPQDEPEAQPERFSQLDFVHFFLQPKDDPDAARNVQAATNYCMKNPQWRLSLQTHKLIGLP

SEQ ID NO: 30733 - protein, 215 aa, Hyphomonas neptunium; identical to SEQ ID NO: 30730
  REGION 1..215: note = tr|Q0C4T1|Q0C4T1_HYPNA 7-carboxy-7-deazaguanine synthase OS=Hyphomonas neptunium (strain ATCC 15444); OX = 228405 GN=queE PE=3 SV=1

SEQ ID NO: 30734 - protein, 215 aa, Hyphomonas oceanitis
  REGION 1..215: note = tr|A0A059GAQ0|A0A059GAQ0_9RHOB 7-carboxy-7-deazaguanine synthase OS=Hyphomonas oceanitis SCH89 OX=1280953 GN=queE PE=3 SV=1
MTWTVKEAYYTLQGEGAQTGRAAVFLRFAGCNLWSGLERDRDKAVCRFCDTDFVGTNGVNGGKFRAAEDLATHVKAIWEAEAGEAGPRYVVCTGGEPLLQLDAPLIAALKAEGFEIGVETNGTIAAPEGLDWICVSPKANAPLVQTRGSELKLVYPQDEAEAQPERFSKLDFSHFFLQPKDDPDQARNIQAATTYCMKNPQWRLSLQTHKLIGLP

SEQ ID NO: 30735 - protein, 215 aa, Hyphomonas polymorpha
  REGION 1..215: note = tr|A0A062VI92|A0A062VI92_9RHOB 7-carboxy-7-deazaguanine synthase OS=Hyphomonas polymorpha PS728 OX=1280954 GN=queE PE=3 SV=1
MTYSVKEAFYTLQGEGAHTGRAAVFLRFAGCNLWSGLERDREKAVCRFCDTDFVGTNGEGGGKFREPGLLAAHVKAIWEANASAGGRPYVVCTGGEPLMQLDEPLIDALHAAGFEIAIETNGTLPAPASIDWICVSPKANAPLAQTSGSELKLVYPQTEPEAQPECFETLDFEHFFLQPRDDGPGVSHVAAVAAYCLKNPKWRLSLQTHKLTGLP

SEQ ID NO: 30736 - protein, 216 aa, Hyphomonas sp.
  REGION 1..216: note = tr|A0A1Z9Y0Y2|A0A1Z9Y0Y2_9RHOB 7-carboxy-7-deazaguanine synthase OS=Hyphomonas sp. TMED17; OX = 1986605 GN=queE PE=3 SV=1
MKVYSVKEAYVTLQGEGAQTGRAAVFLRFSGCNLWNGREEDRAKSVCQFCDTDFIGTDGQNGGRFEGADELAAHVNRVWHETSRSGGRPYVICTGGEPLLQLDRAAIAALKNAGFEVGVETNGTIKAPDGLDWICVSPKGTAPLKQLSGDELKLVFPQAEEAAQPAQFESLHFQHFFLQPKDDTATRDNIAAAAAYCMKQPKWRLSLQTHKLIGLP

SEQ ID NO: 30737 - protein, 251 aa, Hyphomonas sp.
  REGION 1..251: note = tr|A0A059E9G0|A0A059E9G0_9RHOB 7-carboxy-7-deazaguanine synthase OS=Hyphomonas sp. L-53-1-40 OX=1207058 GN=queE PE=3 SV=1
MRLAVTEPGVPEIFHSLQGEGVSAGKPSVFVRLSQCNLHCVWCDTAYTWNFQGTEFVHRDDLPGAPNKFDRTAETVDVSVDALTERLLGQNCRRIIFTGGEPLLQQRDLGELVQNLKAADPAFYIEIETNGTIKPIGLAAELIDQFNVSPKLAHSGNSASIRFRPEVLDFYASDPRANFKIVVANPSDLTEVYALVAQSGMPAHRVWLMPEGRTPAELRARETWLAEACLEAGYNFTDRLHIHLYGDTRGT

SEQ ID NO: 30738 - protein, 222 aa, unidentified
  source 1..222: note = Hypnocyclicus thermotrophus
  REGION 1..222: note = tr|A0A4R7L394|A0A4R7L394_9FUSO 7-carboxy-7-deazaguanine synthase OS=Hypnocyclicus thermotrophus OX=1627895 GN=queE PE=3 SV=1
MKQYKIVEKFISINGEGQRAGEISLFIRFPSCNLKCTYCDTMWANEKNVNTIYITIEDIKNDINMYNIKNITLTGGEPLLQDDISVVIQEILSINNKINIEIETNGSIDLSKLEKINRERVYITMDYKLPTSKMEGLMKIENFDKLTHKDTIKFVIGSNYDLIRAKNIIKNYIKEGKVYFSPVFKEIEPKYIVEFMKEHKLTDVRLQLQMHKIIWNPDERGV

SEQ ID NO: 30739 - protein, 217 aa, Hyunsoonleella jejuensis
  REGION 1..217: note = tr|A0A1H9DG54|A0A1H9DG54_9FLAO 7-carboxy-7-deazaguanine synthase OS=Hyunsoonleella jejuensis OX=419940 GN=queE PE=3 SV=1
MNLYLCALMNKEIQQLVEKGLMLPLMEEFYTIQGEGYHKGTAAYFIRIGGCDVGCHWCDVKESWNADLHPPTETKKIVENAKKYSDTIVVTGGEPLTWDMTELTKQLKAKGLQTHIETSGAYKLTGTWDWICLSPKKLKLPTKEVYAKADELKVIIYNKDDFRFAEEQAAKVNKDCILYLQPEWSKREKVVPEIVDYVMANPKWKVSLQTHKYLNIP

SEQ ID NO: 30740 - protein, 209 aa, unidentified
  source 1..209: note = Hyunsoonleella pacifica
  REGION 1..209: note = tr|A0A4Q9FN53|A0A4Q9FN53_9FLAO 7-carboxy-7-deazaguanine synthase OS=Hyunsoonleella pacifica OX=1080224 GN=queE PE=3 SV=1
MNKDIEILVEKGLMLPLMEEFYTIQGEGYHKGTAAYFIRIGGCDVGCHWCDVKESWNAALHPPTETTKIVENAKKYSDTIVVTGGEPLTWDMTELTAQLKANGLQTHIETSGAYKLTGKWDWICLSPKKMKLPTNEVYKEADELKVIVYNKDDLRFAEEQAAKVNKDCILYLQPEWSKRDKVVPLIVDYVMKHPKWKVSLQTHKYLNIP

SEQ ID NO: 30741 - protein, 209 aa, Hyunsoonleella sp.
  REGION 1..209: note = tr|A0A4Q9FF27|A0A4Q9FF27_9FLAO 7-carboxy-7-deazaguanine synthase OS=Hyunsoonleella sp. T58 OX=2527939 GN=queE PE=3 SV=1
MNKEIEKLVEKGLMLPLMEEFYTIQGEGYHKGTAAYFIRIGGCDVGCHWCDVKESWNADLHPPTETSHIVKNAKKYSDTIVVTGGEPLTWDMTELTAQLKAEGLQIHIETSGAYKLTGTWDWICLSPKKIKLPTKEIYEKADELKVIVYNKDDFRFAEEQAAKVNKDCILYLQPEWSKRDKVVPEIVDYVMQHPKWKVSLQTHKYLNIP

SEQ ID NO: 30742 - protein, 210 aa, unidentified
  source 1..210: note = Ichthyenterobacterium magnum
  REGION 1..210: note = tr|A0A420DFH5|A0A420DFH5_9FLAO 7-carboxy-7-deazaguanine synthase OS=Ichthyenterobacterium magnum OX=1230530 GN=queE PE=3 SV=1
MTRSERQELLDKGLLLPLMEEFYTIQGEGFHKGTAAYFVRIGGCDVGCHWCDVKESWLAELHPPTETEKIVENAVRYSHTIVVTGGEPLTWDMGPLTEQLKAKGVQTHIETSGAYSLSGTWDWICLSPKKMKLPKEDVYAEAHELKCIIYNKDDFRFAEEQAAKVNKDCILYLQPEWSKRDKVVPEIVDYVMANPKWKVSLQTHKYLNIP

SEQ ID NO: 30743 - protein, 210 aa, Ideonella sp.
  REGION 1..210: note = tr|A0A437RRT7|A0A437RRT7_9BURK 7-carboxy-7-deazaguanine synthase OS=Ideonella sp. KYPY4; OX = 1862385 GN=queE PE=3 SV=1
MTYSVKEIFYTLQGEGLRAGRPAVFCRFAGCNLWTGREPDRAQAVCQFCDTDFVGTDGTLGGKYGSAPALSAQIAALWPAGHGHRYVVLTGGEPLLQVDGALVAALHAEGFEIAVETNGTVAAPPGIDWICVSPKAGAAWVQRTGHELKLVYPQPGLMPEAVDTEGFEHCLLQPMDGLLQRANTRAAIAHCQAHPRWRLSVQTHKILDIR

SEQ ID NO: 30744 - protein, 211 aa, Ideonella sp.
  REGION 1..211: note = tr|A0A523Q3H8|A0A523Q3H8_9BURK 7-carboxy-7-deazaguanine synthase OS=Ideonella sp. MAG2; OX = 2083017 GN=queE PE=3 SV=1
MTYSVKEMFYTLQGEGAQAGRAAVFCRFAGCNLWSGREEDRATATCSFCDTDFVGTNGQGGGKFSSAEALASAVAALWPEATGGQRYVVCTGGEPLLQLDDAAIAALHAQGFEVAVETNGTQPAPTGLDWICVSPKADAELVLTQGDELKLVYPQPLAPPERFAHLDFKHFFLQPMDSVLKRQHTQDTVAYCMAHPQWRLGVQMHKVVGIE

SEQ ID NO: 30745 - protein, 233 aa, Idiomarina abyssalis
  REGION 1..233: note = tr|A0A370QDA6|A0A370QDA6_9GAMM 7-carboxy-7-deazaguanine synthase OS=Idiomarina abyssalis; OX = 86102 GN=queE PE=3 SV=1
MLTKAILTEAMSYRINEIFETLQGEGTFTGVPSIFLRLQGCPVGCPWCDTQHTWETNPSDQVSIDALMAKTEASEKWSEMTAEDIIARFEQEGYSAKHVVITGGEPAMFDLLPLGEALEAKGYQLQIETSGTFELKVTDSTWVTVSPKLDMPGGYLVRPDCMARANEIKHPIAMQKHIDALDSLLERCPPKADAIICLQPISQRPRATELAMKTCIARNWRLSVQMHKYLNIE

SEQ ID NO: 30746 - protein, 255 aa, Idiomarina aestuarii
  REGION 1..255: note = tr|A0A2T4D155|A0A2T4D155_9GAMM 7-carboxy-7-deazaguanine synthase OS=Idiomarina aestuarii; OX = 624146 GN=queE PE=3 SV=1
MSGTELALAPDKIRISEIFGPTVQGEGALIGMPTVFVRTGGCDFRCSWCDTLYAVDPAFRADWKPNTAAEVMDRVRTLSGGKPILVTLSGGNPVIQPLGGLIALGKRNGFTFAIETQGSIARDWFADLDYLTLSPKPPSSSTDFDPDALAACIEAARANGVFDGPAITLKFPVRDDADLMFADHVRKRHPDIPVCLQPVNTTPAEPHPDGLNGVDIDGLTERYRWLVDQVSERGWFNIRVLPQWHVHVWGNLRGV

SEQ ID NO: 30747 - protein, 213 aa, Idiomarina aestuarii
  REGION 1..213: note = tr|A0A2T4CXH4|A0A2T4CXH4_9GAMM 7-carboxy-7-deazaguanine synthase OS=Idiomarina aestuarii; OX = 624146 GN=queE PE=3 SV=1
MAQCRITEIFYSLQGETRTVGLPTVFVRLTGCPLRCGYCDTAYAFHGGQKMEISDIVAEVKSYNPRYVTVTGGEPLAQNTCRELLTALCELDVEVSLETSGAMDISNIDPRVVRVMDLKTPTSGEVSKNRYSNIDLLNPQDQIKFVICNREDYDWAREQLFSLELIDRCEILFSPVHGDLNPTDLAEWIIADNLPVRMQIQLHKYLWNDAQGR

SEQ ID NO: 30748 - protein, 223 aa, unidentified
  source 1..223: note = Idiomarina aquatica
  REGION 1..223: note = tr|A0A4R6PLH4|A0A4R6PLH4_9GAMM 7-carboxy-7-deazaguanine synthase OS=Idiomarina aquatica; OX = 1327752 GN=queE PE=3 SV=1
MTYRINEIFETLQGEGTFTGVPSIFIRLQGCPVGCPWCDTQHTWETRAEDEVSVATMMAKTDATSQWAAMSASDILAEISKQGYQAKHVVITGGEPAMFDLLPLANALEAQGLQLQIETSGTFELKVIEGTWVTVSPKLDMPGGYLVRADAMARANEIKHPIAMQKHIDALDALLAHNPVREDVQICLQPISQRPRATELAMQTCIARNWRLSVQLHKYLNIE

SEQ ID NO: 30749 - protein, 228 aa, unidentified
  source 1..228: note = Idiomarina aquimaris
  REGION 1..228: note = tr|A0A432XB81|A0A432XB81_9GAMM 7-carboxy-7-deazaguanine synthase OS=Idiomarina aquimaris; OX = 641841 GN=queE PE=3 SV=1
MNPISTRYPINELFETIQGEGFYTGTPAIFLRLQGCPVGCPWCDTQHTWDKAAEDQVELETVLNKSSATSQWAELSATEVLAAFKQQGFHAKHVVITGGEPAMYDLRELAQVLEAAGYALQIETSGTYELKVSAGTWVTVSPKLDMPGGFLVRPDCMKRANEIKHPVAMQKHIDALDNLLEKCPPAAGTIISLQPISQRPRATELAIKTCIERNWRLSVQLHKYLHIE

SEQ ID NO: 30750 - protein, 228 aa, unidentified
  source 1..228: note = Idiomarina atlantica
  REGION 1..228: note = tr|A0A094IJK4|A0A094IJK4_9GAMM 7-carboxy-7-deazaguanine synthase OS=Idiomarina atlantica; OX = 1517416 GN=queE PE=3 SV=1
MNPITTSYPVNEIFETIQGEGFYTGTPAIFLRLQGCPVGCPWCDTQHTWEQRAEDQVPVAQVVGKPSASPLWAALDAEAILATFQAQGFNAKHVVITGGEPAMFDLRELGETLEAAGYQLQIETSGTFALQVTAQTWVTVSPKLDMPGGYLVRPDCLQRADEIKHPVAMEKHIEALDKLLKSCPPNPAAIICLQPISQRPRATELAIKTCIERNWRLSVQLHKYLHIE

SEQ ID NO: 30751 - protein, 223 aa, Idiomarina baltica
  REGION 1..223: note = tr|A0A348WLS0|A0A348WLS0_9GAMM 7-carboxy-7-deazaguanine synthase OS=Idiomarina baltica; OX = 190892 GN=queE PE=3 SV=1
MTYRINEIFETLQGEGTFTGVPSIFIRLQGCPVGCPWCDTQHTWDVKQEDQVSVATMMAKPEATSEWAEMSSADIVELIKQRGYRAKHVVITGGEPAMYDLRELGEALEAQGMRLQIETSGTYALLITAGTWVTVSPKLDMPGGYLVRSDCLSRADEIKHPVAMQKHIDALDRLLQGQKLKSDVVICLQPISQRPRATELAMKTCIERNWRLSVQMHKYLNIE

SEQ ID NO: 30752 - protein, 222 aa, Idiomarina donghaiensis
  REGION 1..222: note = tr|A0A432XBG3|A0A432XBG3_9GAMM 7-carboxy-7-deazaguanine synthase OS=Idiomarina donghaiensis OX=519452 GN=queE PE=3 SV=1
MYPINEVFQTIQGEGVFTGAPALFIRLQGCPVGCPWCDTQHTWEHKPEDEVSITAVVEKQAASSTWANVTPQQILKLFEQRGYTARHVVITGGEPAMYDLRPLGQVLEQAGYQLQIETSGTFEIRTTNKTWVTVSPKLDMPGGYLVRPDCMKRANEIKYPVAMQKHIDQFDKLLRSCPPSPEAIIALQPISQRPRATALAMRVCIERNWRLSVQLHKYLNIE

SEQ ID NO: 30753 - protein, 223 aa, Idiomarina fontislapidosi
  REGION 1..223: note = tr|A0A432YBB6|A0A432YBB6_9GAMM 7-carboxy-7-deazaguanine synthase OS=Idiomarina fontislapidosi OX=263723 GN=queE PE=3 SV=1
MTYRINEIFETLQGEGTFTGVPSIFIRLQGCPVGCPWCDTQHTWEINSADEVSVARMMDKSEASPHWATMSSDDIVELIKQRGYRAKHVVITGGEPAMYDLRALGEALEAQGMRLQIETSGTYELLITPATWVTVSPKLDMPGGYLVRSDCLSRADEIKHPVAMQKHVDALDQLLKGQRLNADVVICLQPISQRPRATELAMKVCIERNWRLSVQMHKYLNIE

SEQ ID NO: 30754 - protein, 250 aa, unidentified
  source 1..250: note = Idiomarina halophila
  REGION 1..250: note = tr|A0A432XRL5|A0A432XRL5_9GAMM 7-carboxy-7-deazaguanine synthase OS=Idiomarina halophila; OX = 1449799 GN=queE PE=3 SV=1
MITTFFANNLRYNKTNSLPQNRTNPITTLYPVNELFETIQGEGVYTGTPAIFLRLQGCPVGCPWCDTQHTWVKSADAEVDAQTMLSKTEPSSAWAELNAQQLLQLFTEQGFQAKHVVITGGEPAMYDLRELGEVLEQAGYQLQIETSGTFALQLTAATWVTVSPKLDMPGGYLVRPDCMQRANEIKHPIAMQKHIDALDNLLQRCPPRSEAIISLQPISQRPRATQLAIETCIARNWRLSVQLHKYLNIE

SEQ ID NO: 30755 - protein, 228 aa, Idiomarina homiensis
  REGION 1..228: note = tr|A0A432XT69|A0A432XT69_9GAMM 7-carboxy-7-deazaguanine synthase OS=Idiomarina homiensis; OX = 364198 GN=queE PE=3 SV=1
MNPISTRYPINELFETIQGEGFYTGTPAIFLRLQGCPVGCPWCDTQHTWEKSAADKVDLATLLAKSSASAQWAELTAAEILAAFKQQGFQAKHVVITGGEPAMYDLRELAQVLEAAGYRLQIETSGTFALQVSAATWVTVSPKLDMPGGFLVRPDCMKRANEIKHPVAMQKHIDALDNLLAQCPPAENVIIALQPISQRSRATELAIKTCIERNWRLSVQLHKYLHIE

SEQ ID NO: 30756 - protein, 230 aa, unidentified
  source 1..230: note = Idiomarina indica
  REGION 1..230: note = tr|A0A1G6E184|A0A1G6E184_9GAMM 7-carboxy-7-deazaguanine synthase OS=Idiomarina indica; OX = 1159017 GN=queE PE=3 SV=1
MLENPINTLYPLNEVFQTIQGEGTYTGVPAIFIRLQGCPVGCPWCDTQHTWEQRAEDQVPLTAIVEKPAASSTWAQATATEIVALLQDKKYTAKHVVLTGGEPAMYDLLELCEVLESAGYRLQIETSGTFPLRVSPQTWVTLSPKVDMPGGLLVRADCMNRADEIKYPVAMEKHIDELDNLLKVCPPRAGVTIALQPISQRPRATELAIQTCIERNWRLSVQLHKYLHIE

SEQ ID NO: 30757 - protein, 228 aa, Idiomarina insulisalsae
  REGION 1..228: note = tr|A0A432Y8V0|A0A432Y8V0_9GAMM 7-carboxy-7-deazaguanine synthase OS=Idiomarina insulisalsae OX=575789 GN=queE PE=3 SV=1
MNPITTHYPVNELFETIQGEGSFTGTPAIFLRLQGCPVGCPWCDTQHTWEKSAADQVDAARMLNKSSPSPEWAELTAAQLLELFQQQGFQARHVVITGGEPAMYDLRELGEVLEGAGYRLQIETSGTFELKVSAATWVTVSPKLDMPGGFLVRPDSMKRADEIKHPVAMQKHIDALDKLLQRCPPRDDTIIALQPISQRPRATELAIATCIARNWRLSVQLHKYLNIE

SEQ ID NO: 30758 - protein, 233 aa, Idiomarina loihiensis
  REGION 1..233: note = tr|Q5QUZ0|Q5QUZ0_IDILO 7-carboxy-7-deazaguanine synthase OS=Idiomarina loihiensis (strain ATCC BAA-735 / DSM 15497 / L2-TR) OX=283942 GN=queE PE=3 SV=1
MLTKAILTEAMSYRINEIFETLQGEGTFTGVPSIFLRLQGCPVGCPWCDTQHTWETNPTDQVSIDALMAKTEASAKWSEMTAEDIIARFEQEGYSAKHVVITGGEPAMFDLLPLGKALEAKGYQLQIETSGTFELKVTDSTWVTVSPKLDMPGGYLVRPDCMARANEIKHPIAMQKHIDALDSLLERCPPKADAIICLQPISQRPRATELAMKTCIARNWRLSVQMHKYLNIE

SEQ ID NO: 30759 - protein, 168 aa, Idiomarina loihiensis
  REGION 1..168: note = tr|A0A349C3F4|A0A349C3F4_9GAMM 7-carboxy-7-deazaguanine synthase QueE (Fragment); OS = Idiomarina loihiensis OX=135577 GN=DCR51_05385 PE=3 SV=1
YRINEIFETLQGEGTFTGVPSIFLRLQGCPVGCPWCDTQHTWETNPSDQVSIDALMAKTEASAKWSEMTAEDIIARFEQEGYSAKHVVITGGEPAMFDLLPLGKALEAKGYQLQIETSGTFELKVTDSTWVTVSPKLDMPGGYLVRPDCMARANEIKHPIAMQKHIDA

SEQ ID NO: 30760 - protein, 230 aa, Idiomarina marina
  REGION 1..230: note = tr|A0A432YAP6|A0A432YAP6_9GAMM 7-carboxy-7-deazaguanine synthase OS=Idiomarina marina; OX = 502366 GN=queE PE=3 SV=1
MLENPINTLYPINEVFQTIQGEGIFTGVPAVFIRLQGCPVGCPWCDTQHTWEQHVSDEVALSRVTEKTQPTAQWANATAEQLVELMRQKGYSARHIVITGGEPAMYDLTQLGEALEQAGFKLQIETSGTFPLKVTDATWVTVSPKLDMPGGYMVRPDCMKRADEIKYPVAMQKHIDQLDKLLASCPPREGVSIGLQPISQRPRATELAMKVCIERNWRLSVQLHKYLNIE

SEQ ID NO: 30761 - protein, 229 aa, Idiomarina maritima
  REGION 1..229: note = tr|A0A317Q1S4|A0A317Q1S4_9GAMM 7-carboxy-7-deazaguanine synthase OS=Idiomarina maritima; OX = 519453 GN=queE PE=3 SV=1
MENPINNIYPINEIFQTIQGEGVFTGVPAIFIRLQGCPVGCPWCDTQHTWYQHQERQVALSEVVEKAAPSDTWAGVTAASIVAELQQRGYQAKHVVITGGEPAMYDLRELATALEHNGYQLQIETSGTFAIQTSADTWVTVSPKLNMPGGYLVRPDCMQRANEIKYPVAMQKHIDEFDKLLQVCPPAATAVIALQPISQRPRATQLAMQVCIERNWRLSVQMHKYLNIE

SEQ ID NO: 30762 - protein, 230 aa, Idiomarina maritima
  REGION 1..230: note = tr|A0A1I6I230|A0A1I6I230_9GAMM 7-carboxy-7-deazaguanine synthase OS=Idiomarina maritima; OX = 519453 GN=queE PE=3 SV=1
MLENPINTLYPINEVFQTIQGEGIYTGVPAIFVRLQGCPVGCPWCDTQHTWEQHAKDEVALSEITEKTAPTAQWANASANELVMLLKRKGYTATHIVITGGEPAMYDLTELGIALEQAGFKLQIETSGTFPLRVTDGTWVTVSPKLDMPGGYLVRPDCMKRADEIKYPVAMQKHIDQLDKLLASCPPRDGVSIGLQPISQRPRATELAMKVCIERNWRLSVQLHKYLNIE

SEQ ID NO: 30763 - protein, 223 aa, unidentified
  source 1..223: note = Idiomarina piscisalsi
  REGION 1..223: note = tr|A0A432YVN2|A0A432YVN2_9GAMM 7-carboxy-7-deazaguanine synthase OS=Idiomarina piscisalsi; OX = 1096243 GN=queE PE=3 SV=1
MSYRINEIFETLQGEGTFTGVPSIFVRLQGCPVGCPWCDTQHTWETNDSDKVSPDAMMAKTEASSKWTEMTAEDIVKRFEQEGYAAKHVVITGGEPAMFDLQPLGEALEAKGYQLQIETSGTFELKVTDNTWVTVSPKLDMPGGYLVRPDCMARANEIKHPIAMQKHIDALDSLLKRCPPKADAIICLQPISQRPRATELAMQTCIERNWRLSVQMHKYLNIE

SEQ ID NO: 30764 - protein, 223 aa, unidentified
  source 1..223: note = Idiomarina planktonica
  REGION 1..223: note = tr|A0A1Y6EU61|A0A1Y6EU61_9GAMM 7-carboxy-7-deazaguanine synthase OS=Idiomarina planktonica OX=1323738 GN=queE PE=3 SV=1
MLYPINEIFQTIQGEGLFTGAPAIFIRLQGCPVGCPWCDTQHTWELEPQNKVAVKQVINKGAAAPTWAELSAEQIVQALIDAGYTAKHIVLTGGEPAMYDLRPLGEALEAAGYRLQIETSGTFELLLTANTWVTVSPKLDMPGGYLVRPDCMQRADEIKHPVAMQKHIDALDNLLKRCPPKASTSISLQPISQRPRATELAIETCIARNWRLSVQLHKYLAIE

SEQ ID NO: 30765 - protein, 223 aa, Idiomarina ramblicola
  REGION 1..223: note = tr|A0A432YZ38|A0A432YZ38_9GAMM 7-carboxy-7-deazaguanine synthase OS=Idiomarina ramblicola; OX = 263724 GN=queE PE=3 SV=1
MSYRINEIFETLQGEGTFTGVPSIFLRLQGCPVGCPWCDTQHTWETNPSDEVSIDALMAKNEASSKWSEMTAEDIIVRFEQEGYAAKHVVITGGEPAMFDLLPLGKALEAKGYQLQIETSGTFELKVTDSTWVTVSPKLDMPGGYLVRPDCMARANEIKHPIAMQKHIDALDSLLKRSPPKADAIICLQPISQRPRATELAMKTCIARNWRLSVQMHKYLNIE

SEQ ID NO: 30766 - protein, 225 aa, Idiomarina salinarum
  REGION 1..225: note = tr|A0A094L5X0|A0A094L5X0_9GAMM 7-carboxy-7-deazaguanine synthase OS=Idiomarina salinarum; OX = 435908 GN=queE PE=3 SV=1
MSTAYPINEIFETIQGEGQFTGVPSIFVRLQGCPVGCPWCDTQHTWELKEAARVGASGVVNKAGPSEQWAELSAADIVALFREQGYQAKHVVITGGEPAMYDLRPLAAELEPLGYRLQIETSGTFTLLVSADTWVTVSPKLDMPGGYLVRPDCMQRADEIKYPVAMQKHIDALDNLLSRCPPRPEVSISLQPISQRPRATELAIKTCIARNWRLSVQLHKYLNIE

SEQ ID NO: 30767 - protein, 229 aa, Idiomarina sediminum
  REGION 1..229: note = tr|A0A432YZK3|A0A432YZK3_9GAMM 7-carboxy-7-deazaguanine synthase OS=Idiomarina sediminum; OX = 431675 GN=queE PE=3 SV=1
MIPITTVKYPVNEFFQTIQGEGLYTGTPALFLRLQGCPVGCPWCDTKHTWEKSDNARVSAEAMLAKTAPSEAWAEMSAVEILNVIEAQGFTAKHIVITGGEPAMYDLMPLGQELEQHGYQLQIETSGTFPLHVTENTWVTVSPKLDMPGGYLVRPDCMQRADEVKYPVAMEKHIDALDLLLKNCPPRQDTIIALQPISQRPRATELAMQVCIERNWRLSVQMHKYLNIE

SEQ ID NO: 30768 - protein, 223 aa, Idiomarina seosinensis
  REGION 1..223: note = tr|A0A432ZGW9|A0A432ZGW9_9GAMM 7-carboxy-7-deazaguanine synthase OS=Idiomarina seosinensis OX=281739 GN=queE PE=3 SV=1
MTYRINEIFETLQGEGTFTGVPSIFIRLQGCPVGCPWCDTQHTWETNAEDQVSIASMLSKDSASSAWAEMTAEDIVDTFRTQGYQAKHVVITGGEPAMFDLLPMAEALEANGLQLQIETSGTFELLVSERTWVTVSPKLDMPGGYLVRPDCMSRANEIKHPVAMQKHIDALDALLARSQLRDDVQICLQPISQRPRATELAMKTCIARNWRLSVQLHKYLNIE

SEQ ID NO: 30769 - protein, 223 aa, Idiomarina sp.
  REGION 1..223: note = tr|A0A2D8HT45|A0A2D8HT45_9GAMM 7-carboxy-7-deazaguanine synthase OS=Idiomarina sp.; OX = 1874361 GN=queE PE=3 SV=1
MPYRINEIFETLQGEGTFTGVPSIFLRLQGCPVGCPWCDTQHTWETNPSDQVSVERLMAKTEATAEWAEMTAEDIISRFEEEGYTAKHVVITGGEPAMFDLLPLGSALEAKGYQLQIETSGTFELKVTDNTWVTVSPKLDMPGGYLVRPDCMARANEIKHPIAMQKHIDALDSLLKRCPPKADAVICLQPISQRPRATELAMKTCIARNWRLSVQMHKYLNIE

SEQ ID NO: 30770 - protein, 223 aa, Idiomarina sp.
  REGION 1..223: note = tr|A0A139C4F8|A0A139C4F8_9GAMM 7-carboxy-7-deazaguanine synthase OS=Idiomarina sp. T82-3; OX = 1794809 GN=queE PE=3 SV=1
MTYRINEIFETLQGEGTFTGVPSIFIRLQGCPVGCPWCDTQHTWDVKQEDQVSVATMMAKSEATSEWAEMSSADIVELIKQRGYRAKHVVITGGEPAMYDLRELGEVLEAQGMRLQIETSGTYELLITAGTWVTVSPKLDMPGGYLVRSDCLSRADEIKHPVAMQKHIDALDRLLQGQKLKSDVVICLQPISQRPRATELAMKTCIERNWRLSVQMHKYLNIE

SEQ ID NO: 30771 - protein, 229 aa, Idiomarina tainanensis; identical to SEQ ID NO: 30761
  REGION 1..229: note = tr|A0A368USE4|A0A368USE4_9GAMM 7-carboxy-7-deazaguanine synthase OS=Idiomarina tainanensis OX=502365 GN=queE PE=3 SV=1

SEQ ID NO: 30772 - protein, 223 aa, Idiomarina taiwanensis
  REGION 1..223: note = tr|A0A432ZC73|A0A432ZC73_9GAMM 7-carboxy-7-deazaguanine synthase OS=Idiomarina taiwanensis OX=337250 GN=queE PE=3 SV=1
MQYPLNEVFETIQGEGVYTGVPAIFVRLQGCPVGCPWCDTQHTWDLDPEQQVAPSGIIGKLTASATWAEFSASQLLALFKAQNYHAKHVVITGGEPAMFDLRPLAAELESAGYRLQIETSGTFELRVSPQTWVTVSPKLDMPGGYLVRPDCMKRANEIKYPVAMQKHIDAFDHLLKTCPPRADAIIALQPISQRPRATELAIKTCIERNWRLSVQLHKYLNIE

SEQ ID NO: 30773 - protein, 223 aa, unidentified
  source 1..223: note = Idiomarina tyrosinivorans
  REGION 1..223: note = tr|A0A432ZRK8|A0A432ZRK8_9GAMM 7-carboxy-7-deazaguanine synthase OS=Idiomarina tyrosinivorans OX=1445662 GN=queE PE=3 SV=1
MNYRINEIFETLQGEGVFTGVPAIFVRLQGCPVGCPWCDTQHTWNTDADKQVAVAELAKKTAADDRWAELSADDIVAWFERNGYRAKHVVITGGEPAMFDLQPLAEVLEKRGYRLQIETSGTFPLQVSAATWVTLSPKLDMPGGYLVQPENMRRANEIKHPIAMQKHIDALDQLLQQYPVADDVVISLQPISQRPRATELAIATCIERGWRLSVQMHKYLNIE

SEQ ID NO: 30774 - protein, 229 aa, unidentified
  source 1..229: note = Idiomarina woesei
  REGION 1..229: note = tr|A0A0K6HBK3|A0A0K6HBK3_9GAMM 7-carboxy-7-deazaguanine synthase OS=Idiomarina woesei; OX = 1381080 GN=queE PE=3 SV=1
MEKIINTLYPINEVFQTIQGEGIFTGVPALFIRLQGCPVGCPWCDTQHTWEHKPEDEVSITAVVEKQGPSSTWANVTPQQMLNLFEQQGYTARHVVITGGEPAMYDLRPLGQALEQAGYQLQIETSGTFEIRTTDNTWVTVSPKLDMPGGYLVRPDCMKRANEIKYPVAMQKHIDQFDKLLRSCPPNSKAIIALQPISQRPRATELAMRVCIERNWRLSVQLHKYLNIE

SEQ ID NO: 30775 - protein, 223 aa, Idiomarina xiamenensis
  REGION 1..223: note = tr|K2KJL0|K2KJL0_9GAMM 7-carboxy-7-deazaguanine synthase OS=Idiomarina xiamenensis 10-D-4 OX=740709; GN = queE PE=3 SV=1
MIYRINEIFQTIQGEGVFTGSPSIFVRLQGCPVGCPWCDTQHTWDIDPAQQVSVERMLSKSTASAEWAELSAQAIVDCFQQQGYSAKHVVITGGEPAMVDWRPLAELLEARGYQLQIETSGTFALQVSAQTWVTLSPKLDMPGGYLVRADCMARANEIKHPVAMQKHIDALDALLAQYPPAANVVISLQPISQRPRATELAMQVCIERNWRLSVQLHKYLHIE

SEQ ID NO: 30776 - protein, 223 aa, Idiomarina zobellii
  REGION 1..223: note = tr|A0A1G7LI72|A0A1G7LI72_9GAMM 7-carboxy-7-deazaguanine synthase OS=Idiomarina zobellii; OX = 86103 GN=queE PE=3 SV=1
MSYRINEIFETLQGEGTFTGVPSIFVRLQGCPVGCPWCDTQHTWETNDSDKVSTNEMMAKTEASSKWAEMAAEDIVKRFEQEGYAAKHVVITGGEPAMFDLLPLGEALEAKGYQLQIETSGTFELKVTNNTWVTVSPKLDMPGGYLVRPDCMARANEIKHPVAMQKHIDALDSLLKRCPPKADAIICLQPISQRPRATELAMQTCIERNWRLSVQMHKYLNIE

SEQ ID NO: 30777 - protein, 223 aa, unidentified
  source 1..223: note = Idiomarinaceae bacterium
  REGION 1..223: note = tr|A0A2D7YP45|A0A2D7YP45_9GAMM 7-carboxy-7-deazaguanine synthase OS=Idiomarinaceae bacterium OX=1898113 GN=queE PE=3 SV=1
MTYRINEIFETLQGEGTFTGVPSIFIRLQGCPVGCPWCDTQHTWETRAEDEVSVATMMAKADATSQWAAMSASDILAEIRKQGYQAKHVVITGGEPAMFDLLPLANALEAQGLQLQIETSGTFELKVTEGTWVTVSPKLDMPGGYLVRADAMARANEIKHPIAMQKHIDALDALLAHNPVRDDVQICLQPISQRPRATELAMQTCIARNWRLSVQLHKYLNIE

SEQ ID NO: 30778 - protein, 233 aa, unidentified
  source 1..233: note = Idiomarinaceae bacterium
  REGION 1..233: note = tr|A0A0N8KBS5|A0A0N8KBS5_9GAMM 7-carboxy-7-deazaguanine synthase OS=Idiomarinaceae bacterium HL-53 OX=1298881 GN=queE PE=3 SV=1
MKQVHSPLAQKALPINELFETIQGEGLYTGTPAIFLRLQGCPVGCPWCDTQHTWEHRKEDEIAIVDVLKKEVAAPSWGALSPVEFLAVIQSQGWHAKHVVITGGEPCMYDLSELTEVLYDAGYQCQIETSGTFEVNVHADTWVTVSPKVDMPGGYPILPQAVARANEIKFPVAMQKHVDELDALLANFATREDVIIALQPISQRPRATELAMKTCIERNWRLSVQLHKYLAIA

SEQ ID NO: 30779 - protein, 235 aa, unidentified
  source 1..235: note = Ignatzschineria cameli
  REGION 1..235: note = tr|A0A2U2ATV7|A0A2U2ATV7_9GAMM 7-carboxy-7-deazaguanine synthase OS=Ignatzschineria cameli OX=2182793 GN=queE PE=3 SV=1
MNFPVLEIFGPTIQGEGMVIGRKTCFIRLAACDYQCVWCDSKFTWDGSMKPELMSTEAIVSAVTKIADQRADHITISGGNPALYKGLSELVLQLQNKGYQVAIETQGSKWNDALLFIDEVTLSPKPPSSQMETDFTILSEMIAKLSGRNISLKVVIFDEKDLQYAKEIYQRYPNIPLFLQVGNDQTDLEDEAVTAEYLMKRYGELVGAVMNSTTLKNVRVLPQLHALLWGNRRGV

SEQ ID NO: 30780 - protein, 235 aa, Ignatzschineria indica
  REGION 1..235: note = tr|A0A2U2ALP8|A0A2U2ALP8_9GAMM 7-carboxy-7-deazaguanine synthase OS=Ignatzschineria indica OX=472583 GN=queE PE=3 SV=1
MNLPILEIFGPTIQGEGMVIGRKTCFVRLAACDYQCVWCDSKFTWDGSIKPDLMSIEEIVAAVIKLANNRADHITISGGNPALYKGLSELVLQLQDAGYQVAIETQGSKWNEALLLIDEVTLSPKPPSSEMMTDFTLLSEIITRLSGRNISLKVVVFDERDLQYAEEIHQCYPEIPLFLQVGNDQTTLEDEATTARYLLTRYSELVEVVMASTILKNVRVLPQLHALLWGNRRGV

SEQ ID NO: 30781 - protein, 235 aa, Ignatzschineria sp.
  REGION 1..235: note = tr|A0A256CJ32|A0A256CJ32_9GAMM 7-carboxy-7-deazaguanine synthase OS=Ignatzschineria sp. F8392 OX=1980117 GN=queE PE=3 SV=1
MNFPVLEIFGPTIQGEGMVIGRKTCFIRLAACDYQCVWCDSKFTWDGSMKPELMSTEAIVSAVTKIADQRADHITISGGNPALYKGLSELVLQLQNKGYQVAIETQGSKWNDALLFIDEVTLSPKPPSSQMETDFMILSEMIAKLSGRNISLKVVIFDEKDLQYAKEIYQRYPNIPLFLQVGNDQTDLEDEAATAEYLMRRYRELVEVVMASTILKNVRVLPQLHALLWGNRRGV

SEQ ID NO: 30782 - protein, 240 aa, Ignatzschineria ureiclastica
  REGION 1..240: note = tr|A0A2U2ACY0|A0A2U2ACY0_9GAMM 7-carboxy-7-deazaguanine synthase OS=Ignatzschineria ureiclastica OX=472582 GN=queE PE=3 SV=1
MNFPVLEIFGPTVQGEGMVIGRKTCFVRFAACDYQCVWCDSKFTWDGSVKPTLMNSEEILAALIALQQDHLQHNRVDHITISGGNPALFKGLDQLVNLLHQAGFKVAIETQGSHWNEALLEIDEVTLSPKPPSSEMITNFPLLTEIIQQLRGRNISLKVVIFNDEDLRYAEEIYQLYPDIPLYLQVGNDQLEDEDETATAYYLLQKYRQLVDQVMQSTTLKNVRVLPQLHALLWGNRRGV

SEQ ID NO: 30783 - protein, 212 aa, unidentified
  source 1..212: note = Ignavibacteria bacterium
  REGION 1..212: note = tr|A0A2H0D308|A0A2H0D308_9BACT 7-carboxy-7-deazaguanine synthase OS=Ignavibacteria bacterium CG22_combo_CG10-13_8_21_14_all_37_15 OX=1974042; GN = queE PE=3 SV=1
MLKVNEIYYSIQGESTKAGLPCVFIRLTYCNLRCSYCDTEYAFYEGKNLSLEEILTEVKKYRCKLVEVTGGEPLVQSESLELMKLLCDNNYEVLLETGGSLPIEKIDHRVKIIMDLKCPSSNMEKKNLYENIQFLKKSDEVKFVLGSREDYEWTKANILQYDLQNKCDVLFSVVFGKLQPVTVVEWILEDNLQIRFQLQMHKFIWHPEQKGV

SEQ ID NO: 30784 - protein, 212 aa, unidentified
  source 1..212: note = Ignavibacteria bacterium
  REGION 1..212: note = tr|A0A1G0VDI7|A0A1G0VDI7_9BACT 7-carboxy-7-deazaguanine synthase OS=Ignavibacteria bacterium RIFOXYB2_FULL_37_11 OX=1798448 GN=queE PE=3 SV=1
MLKINEIYKSIQGESSKAGLPCTFVRLTYCNLRCTYCDSEYAFYDGKDMEIDEILSEIKKLGCNLVEVTGGEPLFQKESLDLMKRLCDEGYEVMLETGGSLPIEEIDKRVMIILDLKCPSSGMLKKNLYKNLEHLKIIDEVKFVIGTREDYEWAKEKIFEHNISEKCSVLLSTVFGALNPQTLVDWILEDNLNVRFQLQMHKYIWDPKTKGV

SEQ ID NO: 30785 - protein, 223 aa, unidentified
  source 1..223: note = Ignavibacteriae bacterium
  REGION 1..223: note = tr|A0A2N1VLX9|A0A2N1VLX9_9BACT 7-carboxy-7-deazaguanine synthase OS=Ignavibacteriae bacterium HGW-Ignavibacteriae-1 OX=2013808 GN=queE PE=3; SV = 1
MIDLSKYNFNISEIFYSIQGEGTRAGLPCVFVRLQGCRLRCSWCDTPYALEINQPEMLMNGAEIIEIIKSYGCNFVEFTGGEPFEQANIHHVMQHLADEGFVVAVETSGYIDLAFADNRIIKILDVKCPGSGMSKKNRYENFEYLTNHDEVKFVIADRADYDFAKDICNKYSLSSKCDSILFSPVFGKVENLELAEWILADRLNVRMQVQMHKYIWHPDKRGV

SEQ ID NO: 30786 - protein, 222 aa, unidentified
  source 1..222: note = Ignavibacteriae bacterium
  REGION 1..222: note = tr|A0A2N1V8K3|A0A2N1V8K3_9BACT 7-carboxy-7-deazaguanine synthase OS=Ignavibacteriae bacterium HGW-Ignavibacteriae-4 OX=2013811 GN=queE PE=3; SV = 1
MNKDEIKYNVNEIFYSIQGEGSRSGKPCVFVRMQGCLLRCTWCDTPYALERKQTEKLMSIAEILAEVEKHNCKFLMLTGGEPLEQKEIGVLVEEALDQGYEVVIETNGQQDIGKVPKEAVKILDLKCPGSAMHKKNDYSNMPKLDAKDEVKFVIKDRADYDWAIEKCREYYLFNRVSEVLFSPVFGEIEPIELANWILEDKLPARMQMQMHKFIWEPNTRGV

SEQ ID NO: 30787 - protein, 212 aa, unidentified
  source 1..212: note = Ignavibacteriales bacterium
  REGION 1..212: note = tr|A0A2M7ZDF3|A0A2M7ZDF3_9BACT 7-carboxy-7-deazaguanine synthase OS=Ignavibacteriales bacterium CG_4_9_14_3_um_filter_34_10 OX=1974044 GN=queE; PE = 3 SV=1
MLKVNEIYLSVQGESSKAGLPCVFVRLTYCNLRCTYCDSEYSFYEGTEFSNEQILDEIKKFDCNLVEITGGEPLFQKESLELMKNLCDSGFSVMLETSGSLPIKDVDSRIMIIMDLKCPSSKMTKKNLYENIEFLKPTDELKFVIGDYEDYQWAKKIISKYNIENRCQILFSPVFGKIEPKEIVNWILKDKLKVRFQLQMHKHIWEPTAKGV

SEQ ID NO: 30788 - protein, 213 aa, unidentified
  source 1..213: note = Ignavibacteriales bacterium
  REGION 1..213: note = tr|A0A3D6B8N4|A0A3D6B8N4_9BACT 7-carboxy-7-deazaguanine synthase OS=Ignavibacteriales bacterium OX=2049428 GN=queE PE=3 SV=1
MLKVNEIYYSVQGESTAAGLPCIFVRLTYCNLRCTYCDTEYAFYDGKDMAIPAIIDEVKKYNCKLVEITGGEPLVQMEECLGLMRQLCDEGFEVLIETGGSLSIRNIDPRVKIIMDLKCPSSGMEKKNFYENIDYLKPADELKFVIGSREDYDWTKEIISKYSLDKKCEILFSVVFGKLEPVQLVNWILEDKLKVRFQLQMHKFIWHPETKGV

SEQ ID NO: 30789 - protein, 213 aa, Ignavibacterium album
  REGION 1..213: note = tr|I0AGG2|I0AGG2_IGNAJ 7-carboxy-7-deazaguanine synthase OS=Ignavibacterium album (strain DSM 19864 / JCM 16511 / NBRC 101810 / Mat9-16) OX=945713 GN=queE PE=3 SV=1
MAKINEIYYSIQGESSFAGLPCVFVRFTYCNLRCTYCDTAYAFYEGRDASVDEIISEIQEYKCNLVEITGGEPLVQREECIELMRRLCHLDYQVMIETGGSLPINGIDPRVKIIMDLKCPSSGMMKKNLYDNIYFLKPTDEVKFVIGTREDYDWAKEIIAQYDLTNRSTVLFSPVFGQIEPSDIVHWILEDNLQVRFQLQMHKYIWHPESRGV

SEQ ID NO: 30790 - protein, 211 aa, Ilumatobacter fluminis
  REGION 1..211: note = tr|A0A4R7HUX2|A0A4R7HUX2_9ACTN 7-carboxy-7-deazaguanine synthase OS=Ilumatobacter fluminis OX=467091 GN=queE PE=3 SV=1
MSYRVKEIFYTLQGEGARAGRAAVFCRFAGCNLWSGQERHRPTAICQFCDTDFVGTDGPGGGKFSTADELAAAVETAWAGNSTDRRYVVCTGGEPLLQLDEQACAALRERGFEIAIETNGTIEVPSGVDWICVSPKDGAALVVHSGDELKLVFPQAGLQPAEVSELDFEHFYLQPMDGEHRAEATEQAVAYCLEHPSWQLSLQTHKLIGIP

SEQ ID NO: 30791 - protein, 222 aa, Ilyobacter polytropus
  REGION 1..222: note = tr|E3HCY2|E3HCY2_ILYPC 7-carboxy-7-deazaguanine synthase OS=Ilyobacter polytropus (strain DSM 2926 / CuHBu1) OX=572544 GN=queE PE=3 SV=1
MNYKVVETFVSINGEGKKSGELAVFIRLAGCNLRCSYCDTMWANQDDVVFKSMSKEEIYDYIKSTGVTNVTLTGGEPLIQEGVGELIDYLLTDEKLCIEVETNGSVAIQKFRKNHGRRLSFTMDYKGSSSLMEEKMLLKNFETLTEHDTVKFVVGNEYDLSKAKDLIDKYHLTEVCHVFFSPIYKEIEGETIVEFMKTNKLNKVRLQIQLHKIIWSPEERGV

SEQ ID NO: 30792 - protein, 210 aa, unidentified
  source 1..210: note = Imhoffiella purpurea
  REGION 1..210: note = tr|W9VGX2|W9VGX2_9GAMM 7-carboxy-7-deazaguanine synthase OS=Imhoffiella purpurea OX=1249627 GN=queE PE=3; SV = 1
MSYSVKEIFYTLQGEGAQAGRPAVFCRFAGCNLWSGREQDRATAVCRFCDTDFRGTDGEGGGRFEDADALADAVRSLWPDGAVAPYVVCTGGEPLLQLDRELIDALHARGCEIAVETNGTISAPPGIDWICVSPKANSELRITAGNELKLVYPQPEAMPERFAGLAFEHRFLQPMDGPAMTENTATAIAYCKAHPGWRLSVQMHKLVGIP

SEQ ID NO: 30793 - protein, 226 aa, unidentified
  source 1..226: note = Immundisolibacter cernigliae
  REGION 1..226: note = tr|A0A1B1YVA1|A0A1B1YVA1_9GAMM 7-carboxy-7-deazaguanine synthase OS=Immundisolibacter cernigliae OX=1810504 GN=queE PE=3 SV=1
MTVHAQAAPAKVPAVRLKITEIFHSIQGEGLTAGVPTVFVRLTGCPLRCSYCDTAYAFTGGEYVELPAILSRVAAFATSHVTVTGGEPLAQAGCLELLSALCDAGHQVSLETSGALDVAPVDRRVVRVLDLKTPSSGECARNLYANLDLLQSGDQVKFVLTDRADYDWAVETARRYDIASRACVLFSPAFGLLDAATLADWMLADRLPFRLQLQLHKLLWGEVPGR

SEQ ID NO: 30794 - protein, 193 aa, unidentified
  source 1..193: note = Imperialibacter sp.
  REGION 1..193: note = tr|A0A5E7ZWT5|A0A5E7ZWT5_9BACT 7-carboxy-7-deazaguanine synthase OS=Imperialibacter sp. EC-SDR9 OX=2038371 GN=queE PE=3 SV=1
MEAFYTIQGEGAFQGHAAYFIRLGGCDVGCVWCDVKESWEAAAHPDTEVARIVKEALQFPARVAVVTGGEPLMYNLEELTSQLKDKGFRTHIETSGAYPLSGSWDWVCFSPKKFKEPLPEVALAADELKVIVYNKSDFKWAEKYEALVGKNCRLFLQPEWSQQEKVTPLIIDYIKANPQWQVSLQVHKYLNIP

SEQ ID NO: 30795 - protein, 210 aa, unidentified
  source 1..210: note = Imtechella halotolerans
  REGION 1..210: note = tr|I0WDS5|I0WDS5_9FLAO 7-carboxy-7-deazaguanine synthase OS=Imtechella halotolerans K1 OX=946077 GN=queE; PE = 3 SV=1
MTKEEVLALVDKGEMLPLMEEFYTIQGEGFYKGTAAYFIRVGGCDVGCHWCDVKESWNADLHPPTGIDKIVDNAAQYSQTIVVTGGEPLTWNMEPLTKALKAKGLKTHIETSGAYPLTGSWDWVCLSPKKVKLPVEGVYPHANELKMIVYNHHDFAFAEEQAAKVSDSCILYLQPEWSRRDKMIPEIVDFVMKNPRWKVSLQTHKYLNIP

SEQ ID NO: 30796 - protein, 208 aa, Indibacter alkaliphilus
  REGION 1..208: note = tr|S2DL25|S2DL25_9BACT 7-carboxy-7-deazaguanine synthase OS=Indibacter alkaliphilus LW1 OX=1189612 GN=queE; PE = 3 SV=1
MDKKQAIDQGIMLPVMEAFYTIQGEGVHTGTPAYFIRLGGCDVGCVWCDVKESWEAEKWPILSVEDIVNQALEYPGRLVVITGGEPLMYELGPLTGLLKKNGFTINIETSGAHPFSGTFDWVCFSPKKFKKPHPSIYEHANELKVVIFHKSDFDFAEKHAVLVNKNCHKLLQPEWSKSSVHLGSIIDYVKSRPEWKISLQTHKFMDIP

SEQ ID NO: 30797 - protein, 211 aa, Inhella sp.
  REGION 1..211: note = tr|A0A3S2UG70|A0A3S2UG70_9BURK 7-carboxy-7-deazaguanine synthase OS=Inhella sp. CCP-18; OX = 2499851 GN=queE PE=3 SV=1
MTYAVKECFYTLQGEGAQAGRPAVFLRFAGCNLWSGREQDRATAVCNFCDTDFVGTDGEGGGKFTTAQDLAAHVAARWPDLTQGKPYVVCTGGEPLLQLDEAAIDALHAQGFEVAVETNGTQPAPQGLDWICVSPKADAPVVLTAGHELKLVFPQPLARPERFEHLDFQHFYLQPMDGLLQKQHTQAAIAHCLAHPQWRLSVQTHKVLGIP

SEQ ID NO: 30798 - protein, 214 aa, unidentified
  source 1..214: note = Inmirania thermothiophila
  REGION 1..214: note = tr|A0A3N1XX52|A0A3N1XX52_9GAMM 7-carboxy-7-deazaguanine synthase OS=Inmirania thermothiophila OX=1750597 GN=queE PE=3 SV=1
MAQLRVTEIFRSLQGEGLAAGLPTVFVRLTGCPLRCRYCDTAYAFSGGETMSVAAVVEAVRALPPAPAACVTGGEPLAQAGCRELLSRLCDAGYAVSLETSGALDIGGIDPRVTVVMDLKTPGSGESGRNRWANLGRLRPQDQVKLVLTDRADYEWAREVVVRHRLDARCTVLLAPAWGELEAATLAEWILADALPVRLQLQLHKLLWGEVRGR

SEQ ID NO: 30799 - protein, 210 aa, Inquilinus limosus
  REGION 1..210: note = tr|A0A0A0D148|A0A0A0D148_9PROT 7-carboxy-7-deazaguanine synthase OS=Inquilinus limosus MP06 OX=1398085 GN=queE PE=3 SV=1
MGYVVKEIFKTLQGEGRHAGRASVFCRFVGCNLWTGREQDRAEAVCRFCDTDFLGTDGPGGGRFDTAEALAATIEACWDGPAAERFVVFTGGEPLLQLDQALLDAIHARGFTAAVETNGTIEPPAELDWVCVSPKAGAPLAARRGDELKLVYPQPDLLPEAVAGLDFAHFWLQPMDGPDRIANTEAAVAYCLAHPQWRLSLQTHKLIGIP

SEQ ID NO: 30800 - protein, 210 aa, Inquilinus limosus
  REGION 1..210: note = tr|A0A211ZNM8|A0A211ZNM8_9PROT 7-carboxy-7-deazaguanine synthase OS=Inquilinus limosus; OX = 171674 GN=queE PE=3 SV=1
MGYVVKEIFKTLQGEGRHAGRASVFCRFVGCNLWTGREQDRAEAVCRFCDTDFLGTDGPGGGRFDSAEALAAAIEACWDGPAAERFVVFTGGEPLLQLDRALLDAIHARGFTAAIETNGTIEPPAELDWVCVSPKAGAPLAARRGDELKLVYPQPELMPEAVAGLDFTHFWLQPMDGPDRIANTEAAVAYCLSHPQWRLSLQTHKLIGIP

SEQ ID NO: 30801 - protein, 207 aa, Inquilinus sp.
  REGION 1..207: note = tr|A0A554SKK9|A0A554SKK9_9PROT 7-carboxy-7-deazaguanine synthase OS=Inquilinus sp. KBS0705 OX=2578108 GN=queE PE=3 SV=1
MAHQVPEDGTLLPLMEEFYTIQGEGFNTGKAAYFIRLGGCDVGCHWCDVKESWDAELHALTSADLIADNASQFPSKAVVVTGGEPLIYNLDYLTTKLQQKGIKTFIETSGAYPLSGSWDWICLSPKKFKAPMQNVADKADELKVIIFNKSDFEFAEHHSKLVGPNCKLYLQPEWSKNKEMTPLIVDYVMNNPKWEISLQTHKYLNIP

SEQ ID NO: 30802 - protein, 229 aa, Insolitispirillum peregrinum
  REGION 1..229: note = tr|A0A1N7MVR7|A0A1N7MVR7_9PROT 7-carboxy-7-deazaguanine synthase OS=Insolitispirillum peregrinum OX=80876 GN=queE PE=3 SV=1
MTLPDADPAAAGRTYTVKELFYTLQGEGLRAGRPAVFCRFTGCNLWTGRAEDRASADCTFCDTDFLGTDGPGGGRFAGPQALAEAIAACWPSMAGIPASEHGLPYVVFTGGEPTLQVDEALCRAVHQKGFEIAIETNGTRPVSPGVDWICVSPKAGTTLVQTTGDELKVVYPQSGQDLVALAALPFSHHLLQPLDDPQRADHTAAALRYCLSHPRWRLSLQTHKMLGIP

SEQ ID NO: 30803 - protein, 220 aa, unidentified
  source 1..220: note = Intestinibacter bartlettii
  REGION 1..220: note = tr|B0A669|B0A669_9FIRM 7-carboxy-7-deazaguanine synthase OS=Intestinibacter bartlettii DSM 16795 OX=445973; GN = queE PE=3 SV=1
MFNIIEKFVSIDGEGPTAGELATFIRFQGCNLRCSWCDTTYSFDKSEITEVLSAQEIYDYIKSTGVSNVTLTGGEPLFQENINEVLSLLNDDKNLVVHIETNGAIDILPFKEKYPNIIFILDYKLASSNMTHLMKLDNLNYVTNKDVYKFVLGSDEDLQEAYELITKFNLTNKCLVYFSPVFSAIKLEDIVEFMKEKNLNKVRLQVQLHKVIWDPNMKGV

SEQ ID NO: 30804 - protein, 214 aa, Iodobacter fluviatilis
  REGION 1..214: note = tr|A0A377STP0|A0A377STP0_9NEIS 7-carboxy-7-deazaguanine synthase OS=Iodobacter fluviatilis OX=537 GN=queE PE=3 SV=1
MKDALRITEIFCSLQGETTRMGLPTVFVRLTGCPLRCGYCDSAYAFTGGETQSFQTILDKIASFNTHHICVTGGEPLAQKGVHELMRLLCDAGYSLSLETSGALSIAEVDPRVSRILDIKTPGSGELSKMHWENLDYLSNTDEIKFVLCDRNDYEWARNLIRERRLETLAPVLMSPVWETLPPANLAAWVLEDHLPVRMQVQLHKILWGERPGV

SEQ ID NO: 30805 - protein, 214 aa, Iodobacter sp.
  REGION 1..214: note = tr|A0A3S8ZV59|A0A3S8ZV59_9NEIS 7-carboxy-7-deazaguanine synthase OS=Iodobacter sp. H11R3; OX = 2496266 GN=queE PE=3 SV=1
MKDALRITEIFCSLQGETTRMGLPTVFVRLTGCPLRCGYCDSTYAFTGGETQSFQTILDKIASFNTHHICVTGGEPLAQKGVHELMRLLCDAGYSLSLETSGALSIADVDPRVSRILDIKTPGSGELSKMHWKNLDYLSKQDEIKFVLCDRNDYEWARDLIRERRLETLAPVLMSPVWETLPPANLAAWVLEDHLPVRMQVQLHKILWGERPGV

SEQ ID NO: 30806 - protein, 214 aa, Iodobacter sp.
  REGION 1..214: note = tr|A0A2G3JFD1|A0A2G3JFD1_9NEIS 7-carboxy-7-deazaguanine synthase OS=Iodobacter sp. BJB302; OX = 1506510 GN=queE PE=3 SV=1
MKDALRITEIFCSLQGETTRMGLPTVFVRLTGCPLRCGYCDSAYAFTGGETQSFQTILDKIASFNTHHICVTGGEPLAQKGVHELMRLLCDAGYSLSLETSGALSIADVDPRVSRILDIKTPGSGELSKMHWENLDYVNKADEIKFVICDRSDYEWARDLIRERRLETLAPVLMSPVWETLPPANLAAWVLEDHLPVRMQVQLHKILWGERPGV

SEQ ID NO: 30807 - protein, 293 aa, Isosphaera pallida
  REGION 1..293: note = tr|E8R001|E8R001_ISOPI 7-carboxy-7-deazaguanine synthase OS=Isosphaera pallida (strain ATCC 43644 / DSM 9630 / IS1B) OX=575540 GN=queE PE=3 SV=1
MALGQHNVGLLDECRRRARMRSGGEDLTEGGVANDVDGEGLGLERELAETAGGSPIESAGPAARTRRLAPLRDKTPGQVRLHEVYRSIQGEGTWAGLPCVFVRLTACHLRCVYCDTPHAFVFREGGDFTIEAIVARVAELAEPGGLVEVTGGEPLLQPEALPLMTALADAGFEVLLETSGSLDIAPVDRRVHIIMDLKTPGSGEEAANLWTNLDHLKPTDNLKFVVTNRADFDWTLEIVRRHDLTARCPVLVSPAFDAVSPRDLAEWILKSRLPLRMQLQLHKLIWHPKARGV

SEQ ID NO: 30808 - protein, 248 aa, unidentified
  source 1..248: note = Isosphaeraceae bacterium
  REGION 1..248: note = tr|A0A432MH62|A0A432MH62_9BACT 7-carboxy-7-deazaguanine synthase OS=Isosphaeraceae bacterium GM2012 OX=2080755 GN=queE PE=3 SV=1
MPCPERPLSAPILPPVAPGRRDHRLKSILGRPSGVLVVHELYRSLQGEGTFAGLPCVFVRLTACHLRCSYCDTPHAFNHGEPIALRALLERILAIAAPGDLIEVTGGEPLLQDEALPLMSGLADAGRVVLLETSGACDIGPVDPRVRIILDLKTPGSGEEQANLWDNLAKLKPTDEVKVVVCDRPDFDWALERIREHRLVERCPVLVSPAHGRVDAAELAAWILESGLPLRLQVQLHKQLWGPDARGV

SEQ ID NO: 30809 - protein, 223 aa, unidentified
  source 1..223: note = Izhakiella australiensis
  REGION 1..223: note = tr|A0A1S8YKR1|A0A1S8YKR1_9ENTR 7-carboxy-7-deazaguanine synthase OS=Izhakiella australiensis OX=1926881 GN=queE PE=3 SV=1
MYYPINEMFQTLQGEGFYTGVPAIFIRLQGCPVGCSWCDTKHTWDKLADRETSLQQIVTKDAESDAWGNADETMLLKAIADKGWTARHVVITGGEPCIHDLHALTQALAQHGFGCQIETSGTHEVKCSEQCWVTVSPKVNMRGGYDVLDQALSRADEIKHPVARQRDVDALDALLARLQDDKKRIIALQPISQKAEATALCIETCIARNWRLSMQTHKYLNIA

SEQ ID NO: 30810 - protein, 223 aa, unidentified
  source 1..223: note = Izhakiella capsodis
  REGION 1..223: note = tr|A0A1I4W8V7|A0A1I4W8V7_9ENTR 7-carboxy-7-deazaguanine synthase OS=Izhakiella capsodis; OX = 1367852 GN=queE PE=3 SV=1
MDYPINEMFQTLQGEGFYTGVPAIFIRLQGCPVGCSWCDTKHTWDKLADRECSLQQILIKDAESDAWGNADETMLLNAIANKSWTAHHVVITGGEPCIHDLRGLTYALEQRDFSCQIETSGTHEIKCSEQSWVTVSPKVNMRGGYDVLDQALRRADEIKHPVARQRDIDALDALLATLDDDKKRIVALQPISQKAEATALCIETCIVRNWRLSMQTHKYLNIA

SEQ ID NO: 30811 - protein, 223 aa, unidentified
  source 1..223: note = Izhakiella sp.
  REGION 1..223: note = tr|A0A4V1G726|A0A4V1G726_9ENTR 7-carboxy-7-deazaguanine synthase OS=Izhakiella sp. KSNA2; OX = 2579935 GN=queE PE=3 SV=1
MQYPINEMFQTLQGEGYFTGVPAVFIRLQGCPVGCPWCDTKHTWEKLADREVSMFSIMAKTRESDKWGAAGVEDLLAIIQRQGYSARHVVITGGEPCIHDLTALTEGLKSQGFSCQIETSGTHEVRCSPGTWVTVSPKVNMRGGYDVLSQALQRADEIKHPVGRVRDIEALDELLETLDDEKARIIALQPISQKEEATRLCIETCIARNWRLSMQTHKYLNIA

SEQ ID NO: 30812 - protein, 211 aa, Janthinobacterium agaricidamnosum
  REGION 1..211: note = tr|A0A3G2E908|A0A3G2E908_9BURK 7-carboxy-7-deazaguanine synthase OS=Janthinobacterium agaricidamnosum OX=55508 GN=queE PE=3 SV=1
MTYSIKEIFYTLQGEGAHAGRPAVFCRFSGCNLWTGRESDRATAVCQFCDTDFVGTDGELGGKFKTPEELAALIDSLWPASYAPSKYVVFTGGEPLLQLDTALIDAMHAVGFTIAIETNGTLPVPAGVDWICVSPKMGSTLVVHKGNEIKVVIPQFQQDLAAYEGLDFENFFVQAMDGPLAAHNMKLAIETCKSNPKWKLSLQTHKLLQIP

SEQ ID NO: 30813 - protein, 211 aa, Janthinobacterium agaricidamnosum
  REGION 1..211: note = tr|W0V7R4|W0V7R4_9BURK 7-carboxy-7-deazaguanine synthase OS=Janthinobacterium agaricidamnosum NBRC 102515 = DSM 9628 OX=1349767 GN=nrdG PE=3 SV=1
MTYSIKEIFYTLQGEGAQAGRPAVFCRFSGCNLWTGRESDRAGAVCTFCDTDFVGTDGDGGGKFKTAEALAAAIDGLWPASYPASKYVVFTGGEPLLQLDTPLIDAMHRAGFTIAIETNGTLPVPPGVDWICVSPKMGSQLVVSKGSELKVVIPQTGQDLAAYEALDFDNFYVQAMDGPLAEFNTRLAIETCKRNPKWKLSLQTHKLLQIP

SEQ ID NO: 30814 - protein, 211 aa, Janthinobacterium lividum
  REGION 1..211: note = tr|A0A1E8PJU4|A0A1E8PJU4_9BURK 7-carboxy-7-deazaguanine synthase OS=Janthinobacterium lividum OX=29581 GN=queE PE=3 SV=1
MTYSIKEIFYTLQGEGAHAGRPAVFCRFSGCNLWSGRESERATAVCQFCDTDFVGTDGELGGKFKTPQELAALIDSLWPASYAPSKYVVFTGGEPLLQLDTALIDAMHAVGFTIAIETNGTLPVPAGVDWICVSPKMGSTLVVHKGNEIKVVIPQFQQDLAAYAGLDFENFFVQAMDGPLAAHNLQLAIETCKSNPQWKLSLQTHKLLQIP

SEQ ID NO: 30815 - protein, 211 aa, Janthinobacterium lividum
  REGION 1..211: note = tr|A0A377RX96|A0A377RX96_9BURK 7-carboxy-7-deazaguanine synthase OS=Janthinobacterium lividum OX=29581 GN=queE PE=3 SV=1
MTYSIKEIFYTLQGEGAHAGRPAVFCRFSGCNLWTGRESDRATAVCQFCDTDFVGTDGELGGKFKTPQELAALIDSLWPASYAPSKYVVFTGGEPLLQLDTALIDAMHAVGFTIAIETNGTLPVPAGVDWICVSPKMGSTLVVHKGNEIKVVIPQFQQDLAAYEQLDFENFFVQAMDGPLAAHNMKLAIETCKSNPKWKLSLQTHKLLQIP

SEQ ID NO: 30816 - protein, 211 aa, Janthinobacterium sp.
  REGION 1..211: note = tr|A0A1N6XS23|A0A1N6XS23_9BURK 7-carboxy-7-deazaguanine synthase OS=Janthinobacterium sp. TND4EL3 OX=1907311 GN=queE PE=3 SV=1
MTYSIKEIFYTLQGEGAHAGRPAVFCRFSGCNLWTGRESDRATAVCQFCDTDFVGTDGELGGKFKTPQELAALIDSLWPASYTASKYVVFTGGEPLLQLDTALIDAMHAVGFTIAIETNGTLPVPAGVDWICVSPKMGSTLVVHKGNEIKVVIPQFQQDLAAYEGLDFENFFVQAMDGPLAAHNMQLAIETCKSNPKWKLSLQTHKLLQIP

SEQ ID NO: 30817 - protein, 211 aa, Janthinobacterium sp.
  REGION 1..211: note = tr|A0A349KYF0|A0A349KYF0_9BURK 7-carboxy-7-deazaguanine synthase OS=Janthinobacterium sp.; OX = 1871054 GN=queE PE=3 SV=1
MTYSIKEIFYTLQGEGAHAGRPAVFCRFSGCNLWSGRESDRASAVCGFCDTDFVGTDGERGGKFSAAADLAGVIDSLWPASYPASKYVVFTGGEPLLQLDAALIDAMHAAGFEIAIETNGTLAVPPGVDWICVSPKMGSKLVVRKGNEIKVVIPQTGQDLAAYEGLEFDNFFVQAMDGPLAEHNTRLAIETCKRMPKWKLSLQTHKLLQIP

SEQ ID NO: 30818 - protein, 211 aa, unidentified
  source 1..211: note = Janthinobacterium svalbardensis
  REGION 1..211: note = tr|A0A290WXI7|A0A290WXI7_9BURK 7-carboxy-7-deazaguanine synthase OS=Janthinobacterium svalbardensis OX=368607 GN=queE PE=3 SV=1
MTYSIKEIFYTLQGEGAHAGRPAVFCRFSGCNLWTGRESDRATAVCQFCDTDFVGTDGELGGKFKTPEELAALIDSLWPVSYAPSKYVVFTGGEPLLQLDTALIAAMHAVGFTIAIETNGTLPVPAGVDWICVSPKMGSTLVVHKGNEIKVVIPQFQQDLAAYEQLDFENFFVQAMDGPLAARNMQLAIETCKSNPKWKLSLQTHKLLQIP

SEQ ID NO: 30819 - protein, 215 aa, Jejuia pallidilutea
  REGION 1..215: note = tr|A0A362X9T5|A0A362X9T5_9FLAO 7-carboxy-7-deazaguanine synthase OS=Jejuia pallidilutea; OX = 504487 GN=queE PE=3 SV=1
MYLCMLMKKEIQQLVDAGLMLPLMEEFYTIQGEGYHKGTAAYFVRIGGCDVGCHWCDVKESWNANLHPPTEIAKIVENAKKYSDTIVITGGEPLTWDMTALTSQLKAEGLQIHIETSGAYKLTGIWDWVCLSPKKMKLPTKEVYDKADELKVIVYNKDDFRFAEEQASKVNKNCILYLQPEWSKRDKVIPEIVDYVMKHPKWKVSLQTHKYLNIP

SEQ ID NO: 30820 - protein, 215 aa, Jejuia pallidilutea
  REGION 1..215: note = tr|A0A090WGA6|A0A090WGA6_9FLAO 7-carboxy-7-deazaguanine synthase OS=Jejuia pallidilutea; OX = 504487 GN=queE PE=3 SV=1
MYLCMLMKKEIQQLVDAGLMLPLMEEFYTIQGEGYHKGTAAYFVRIGGCDVGCHWCDVKESWNANLHPPTEIAKIVENAKKYSDTIVITGGEPLTWDMTALTSQLKAEGLQIHIETSGAYKLTGIWDWVCLSPKKMKLPTKEVYNKADELKVIVYNKDDFRFAEEQAAKVNKNCILYLQPEWSKRDKVIPEIVDYVMKHPKWKVSLQTHKYLNIP

SEQ ID NO: 30821 - protein, 215 aa, Jeongeupia sp.
  REGION 1..215: note = tr|A0A1D9BFC3|A0A1D9BFC3_9NEIS 7-carboxy-7-deazaguanine synthase OS=Jeongeupia sp. USM3; OX = 1906741 GN=queE PE=3 SV=1
MNPATLRITEIFYSLQGETSRLGLPTVFVRLTGCPLRCGYCDSAYAFHGGKTMGFDDILFEIARHGASTVCVTGGEPLAQKHSLAFLTALCDAGYSVSLETSGALPIENVDPRVSRILDIKTPGSGELARMHWANLDALRPGDEVKFVLCDRSDYEWARDLVRERKVNDLAPVLFSPVWETLPPADLAAWVLEDRLPVRMQVQLHKILWGEKPGV

SEQ ID NO: 30822 - protein, 244 aa, Jeotgalibacillus alimentarius
  REGION 1..244: note = tr|A0A0C2S441|A0A0C2S441_9BACL 7-carboxy-7-deazaguanine synthase OS=Jeotgalibacillus alimentarius OX=135826 GN=queE PE=3 SV=1
MEKANKKFPVLEIFGPTVQGEGMVIGQKTMFVRTAGCDYSCSWCDSAFTWDGSAKDEIRRLTAEEILDELKAAGGNLFEHVTISGGNPALLKNLSELVDLLHSEGIKVALETQGSIWQDWFMDIDDLTLSPKPPSSGMKPNMGILDDIIEKLSKSQYDHSLKVVIFDKEDLKFAEDLHTRYPKVPFYLQTGNDQVHEEKDERLIPNLIARYEWLIDQVMENSRLNQVRVLPQLHTYVWGNKRGV

SEQ ID NO: 30823 - protein, 247 aa, Jeotgalibacillus campisalis
  REGION 1..247: note = tr|A0A0C2RC50|A0A0C2RC50_9BACL 7-carboxy-7-deazaguanine synthase OS=Jeotgalibacillus campisalis OX=220754 GN=queE PE=3 SV=1
MMQQTKEKKIPVLEIFGPTVQGEGMVIGQKTMFIRTAGCDYSCAWCDSAFTWDGSAKDEIRQMSSSSIIEELFKTGGNAFSHVTISGGNPALIKHMGVLVTALQELGIDVALETQGSIWQDWFMSIDDLTISPKPPSSKMKPNLGILDDILDRLKSRPNSTYSLKVVVFDENDLDFAEMLHSRYPTVPFYIQTGNEQVTETNDTRLVSDLISKYEWLIDCVMKREALNRVRVLPQLHTYVWGNKRGV

SEQ ID NO: 30824 - protein, 244 aa, unidentified
  source 1..244: note = Jeotgalibacillus malaysiensis
  REGION 1..244: note = tr|A0A0B5ALL1|A0A0B5ALL1_9BACL 7-carboxy-7-deazaguanine synthase OS=Jeotgalibacillus malaysiensis OX=1508404 GN=queE PE=3 SV=1
MEQTKKKFPVLEIFGPTVQGEGMVIGQKTMFVRTAGCDYSCSWCDSAFTWDGSAKDEINKMTAEEIYHELKATGGNLFNHVTISGGNPALLKNLSELVDLLHENDIQVALETQGSIWQDWFWNIDDLTLSPKPPSSGMKPNMGILDDIIEKLRKGSHDYSLKVVIFDELDLTFAEELHQRYPGVPFYLQVGNDQVHEEKDEKLIPNLISRYEWLIDQVMESSSLNQVRVLPQLHTYVWGNKRGV

SEQ ID NO: 30825 - protein, 243 aa, Jeotgalibacillus marinus
  REGION 1..243: note = tr|A0A0M0L2E4|A0A0M0L2E4_9BACL 7-carboxy-7-deazaguanine synthase OS=Jeotgalibacillus marinus OX=86667 GN=queE PE=3 SV=1
MAKGIPVLEIFGPTIQGEGMVIGQKTMFVRTAGCDYSCSWCDSAFTWDGSAKKDIRWLTAEEIFAELKDIGGDAFSHVTISGGNPALLKQLDAFIELLKENNIRAALETQGTVYQDWFTLIDDLTISPKPPSSKMVTNFQKLDHILTSLKENNRQHACSLKVVIFNDEDLEFAKTVHKRYPGIPFYLQVGNDDVHTTDDQSLIAHLLGKYEALVDKVAVDAELNLVRVLPQLHTLLWGNKRGV

SEQ ID NO: 30826 - protein, 246 aa, unidentified
  source 1..246: note = Jeotgalibacillus proteolyticus
  REGION 1..246: note = tr|A0A2S5GFX9|A0A2S5GFX9_9BACL 7-carboxy-7-deazaguanine synthase OS=Jeotgalibacillus proteolyticus OX=2082395 GN=queE PE=3 SV=1
MQQVKEKKFPVLEIFGPTVQGEGMVIGQKTMFVRTAGCDYSCAWCDSAFTWDGSAKEDIRQMTAEDIVNELRHTGGASFSHVTISGGNPALLKNLGALVEALHNQQVEVALETQGSIWQEWFLEIDDLTISPKPPSSKMKPNLHVLDDILERLQNRPKSAYSLKVVIFDEGDLEFAEKLHHRYPNVAFYVQTGNDQVQEENNERLVSDLIGRYEWLIEKVMERDTLNRVRVLPQLHTYVWGNKRGV

SEQ ID NO: 30827 - protein, 244 aa, Jeotgalibacillus salarius
  REGION 1..244: note = tr|A0A4Y8LND4|A0A4Y8LND4_9BACL 7-carboxy-7-deazaguanine synthase OS=Jeotgalibacillus salarius OX=546023 GN=queE PE=3 SV=1
MEKREKKFPVLEIFGPTVQGEGMVIGQKTMFVRTAGCDYSCSWCDSAFTWDGSAKDEINRMTAEEILEELRETGGDLFEHVTISGGNPALLKHLSELVDLLHQEGIKVALETQGSIWQDWFMDIDDLTLSPKPPSSGMKPNMGILDDIMKKLSESHHAYSLKIVIFDDNDLNFAEDLHHRYPDVPFYLQTGNDQVHEEKDEQLIPNLISRYEWLIDKVMENNRLNHVRVLPQLHTYVWGNKRGV

SEQ ID NO: 30828 - protein, 246 aa, Jeotgalibacillus soli
  REGION 1..246: note = tr|A0A0C2VLK9|A0A0C2VLK9_9BACL 7-carboxy-7-deazaguanine synthase OS=Jeotgalibacillus soli; OX = 889306 GN=queE PE=3 SV=1
MNTKKEKMIPVMEIFGPTVQGEGMVIGQKTMFVRTAGCDYQCAWCDSAFTWDGSAKDEIRRLTAREIVNELKATGGDAFSHVTISGGNPALIRHMGELVEHLHEQNIDVALETQGSIWQDWFLSIDDLTLSPKPPSSKMKPNLQILDDIISRLKDQPSNNYSLKVVVFNDEDLDFAESIHKRYPNVLFFVQTGNNQVHEENDKRLVSDLISRYEWLIDRVMERAALNRVRVLPQLHTYVWGNKRGV

SEQ ID NO: 30829 - protein, 244 aa, Jeotgalibacillus sp.
  REGION 1..244: note = tr|A0A4Y8LK29|A0A4Y8LK29_9BACL 7-carboxy-7-deazaguanine synthase OS=Jeotgalibacillus sp. R-1-5s-1 OX=2555897 GN=queE PE=3 SV=1
MTQRERKFPVLEIFGPTVQGEGMVIGQKTMFVRTAGCDYSCSWCDSAFTWDGSAKDEIRQLTALDIFNELKKTGGDHFNHVTISGGNPALLKHLSELVQLLHENNMQVALETQGSIWQDWFLSIDDLTLSPKPPSSGMKPNLPILDDIVSKLIAGKSDFSLKVVIFDDEDLAFAEMLHQRYPDVPFYLQTGNDQVHEQKDEKLIPNLIARYEWLIDKVMVNSKLNQVRVLPQLHTYVWGNKRGV

SEQ ID NO: 30830 - protein, 246 aa, Jeotgalibacillus sp.
  REGION 1..246: note = tr|A0A4R5XTA6|A0A4R5XTA6_9BACL 7-carboxy-7-deazaguanine synthase OS=Jeotgalibacillus sp. S-D1 OX=2552189 GN=queE PE=3 SV=1
MKQVTREKKIPVMEIFGPTVQGEGMVIGQKTMFIRTAGCDYSCAWCDSAFTWDGTAKDEIRQLTVSAILQELIETGGESFSHVTISGGNPALIRHIGLLIDALHDKKIDVALETQGSLWQDWFLNIDELTLSPKPPSSKMKPNMGILDDIIDRLSEASSNFSLKVVIFDEEDLNFAQMLHERYPQAPFYIQTGNDQVQEADNQRLVTDLINRYEWLIDRVMERPALNRVRVLPQLHTFVWGNKRGV

SEQ ID NO: 30831 - protein, 206 aa, unidentified
  source 1..206: note = Jiulongibacter sediminis
  REGION 1..206: note = tr|A0A0N8HA88|A0A0N8HA88_9BACT 7-carboxy-7-deazaguanine synthase OS=Jiulongibacter sediminis OX=1605367 GN=queE PE=3 SV=1
MTVKTTKNTDLPIMESFYTIQGEGFHSGKAAYFIRLGGCDVGCVWCDVKESWNAEDHPFQTLEEIVAGAEEQTGKMVVITGGEPLMYDMRPLTSALKSRGFQTNIETSGAYPMTGEWDWVCFSPKKFKEAHESIFPVADELKVIIFNKSDFKFAEKYAALVSENCQLMLQPEWDKQEQMLPLIIDYVKENPQWKISLQTHKWMGVP

SEQ ID NO: 30832 - protein, 210 aa, Joostella marina
  REGION 1..210: note = tr|I3C7L9|I3C7L9_9FLAO 7-carboxy-7-deazaguanine synthase OS=Joostella marina DSM 19592 OX=926559 GN=queE; PE = 3 SV=1
MTKEAILAKVNAGEMLPLMEEFYTIQGEGFYKGTAAYFIRIGGCDVGCHWCDVKESWNAETHPPTAVATIVENAAKYSDTIVITGGEPLTWDMTFITSELKKRGLKTHIETSGAYELTGEWDWICLSPKKMKLPTAKVYEKANELKCIVYNKNDFEFAEAQAEKVGKDCILYLQPEWSKRDKMIPEIVEYVMKNPKWKVSLQTHKYLNIP

SEQ ID NO: 30833 - protein, 223 aa, unidentified
  source 1..223: note = Kalamiella piersonii
  REGION 1..223: note = tr|A0A3A9IV03|A0A3A9IV03_9GAMM 7-carboxy-7-deazaguanine synthase OS=Kalamiella piersonii; OX = 2364647 GN=queE PE=3 SV=1
MQYPINEMFQTLQGEGFYTGVPAIFIRLQGCPVGCSWCDTKHTWEKRADRETALGDILVKTVESDAWGNADATLLLETIQRQGWTARHVVITGGEPSIYDLRPLTTALEAQGFQCQIETSGTHEVRCSERTWVTVSPKVNMRGGYDVLAQALQRADEIKHPVARERDVEALDELLATLSDSKQRIIALQPISRKEAATKLCIETCIARNWRLSMQTHKYLNIA

SEQ ID NO: 30834 - protein, 219 aa, Kandleria vitulina
  REGION 1..219: note = tr|A0A0R2HC16|A0A0R2HC16_9FIRM 7-carboxy-7-deazaguanine synthase OS=Kandleria vitulina DSM 20405 OX=1410657 GN=queE PE=3 SV=1
MFKVVEMFESINGEGYKAGQLAYFVRFQGCNMNCVYCDTKWANKKDAPYQLMSAQDIVSKVNEAHIKNVTLTGGEPMLQEEIEELIRLLYENGHEVEIETNGSIDISSYDHCDYRPSFTLDYKCPDSGMEKFVDVMNYDHIQEKDTIKFVCSSRIDLKKAYEIIEKYALNKKAHVYLSPVFGKIDPQEMVAFMLEKNMNDVNLQLQMHKFIWDPEERGV

SEQ ID NO: 30835 - protein, 219 aa, Kandleria vitulina; identical to SEQ ID NO: 30834
  REGION 1..219: note = tr|A0A1H2QAC0|A0A1H2QAC0_9FIRM 7-carboxy-7-deazaguanine synthase OS=Kandleria vitulina; OX = 1630 GN=queE PE=3 SV=1

SEQ ID NO: 30836 - protein, 213 aa, Kangiella geojedonensis
  REGION 1..213: note = tr|A0A0F6RCK0|A0A0F6RCK0_9GAMM 7-carboxy-7-deazaguanine synthase OS=Kangiella geojedonensis OX=914150 GN=queE PE=3 SV=1
MSKLRITEIFHSLQGESLTVGLPTVFVRLTGCPLRCTYCDTDYAFGGGEWMTYEEILADIEQYNCQHICMTGGEPLAQKRAYEFYQLLCEKGYKVSTETGGAHDISVLDKRVMVVMDLKTPDSGEMSRNLYENIEHLKPTDQVKFVICSRKDYDWCKMTVDKYNLTDKCEVLFSPSYGQVEYADLAEWILKDRLKVRMQVQLHKIIWGEKQGV

SEQ ID NO: 30837 - protein, 213 aa, Kangiella koreensis
  REGION 1..213: note = tr|C7R5T3|C7R5T3_KANKD 7-carboxy-7-deazaguanine synthase OS=Kangiella koreensis (strain DSM 16069 / KCTC 12182 / SW-125) OX=523791 GN=queE PE=3 SV=1
MSKLRITEIFHSLQGESLTVGVPTVFVRLTGCPLRCVYCDTDYAFGGGEWMRFEEILAEIKQYGCEHVCITGGEPLAQKRVFEFFKLLGDEGYKVSTETGGAHDISPVDKRVMVVMDLKTPDSQEMARNLYSNIELLKPTDQVKFVICSRKDYEWCKMTVEQYDITSKCEVLFSPSYGQVEYADLAEWILKDRLKVRMQVQLHKIIWGEKTGV

SEQ ID NO: 30838 - protein, 213 aa, unidentified
  source 1..213: note = Kangiella profundi
  REGION 1..213: note = tr|A0A2K9AW16|A0A2K9AW16_9GAMM 7-carboxy-7-deazaguanine synthase OS=Kangiella profundi; OX = 1561924 GN=queE PE=3 SV=1
MSKLRITEIFHSLQGESLTVGVPTVFVRLTGCPLRCVYCDTDYAFGGGKWMTFEEILAEVKQYGCEHVCVTGGEPLAQKRVFEFFKLLCDEGFKVSTETGGAHDISELDSRVMIVMDLKTPDSQEMARNLYSNIEHLKPTDQVKFVICSRKDYEWCKMTVEQYDITSKCEVLFSPSYGQVEYADLAEWILKDRLKVRMQVQLHKLIWGERTGV

SEQ ID NO: 30839 - protein, 213 aa, unidentified
  source 1..213: note = Kangiella sediminilitoris
  REGION 1..213: note = tr|A0A1B3BBY5|A0A1B3BBY5_9GAMM 7-carboxy-7-deazaguanine synthase OS=Kangiella sediminilitoris OX=1144748 GN=queE PE=3 SV=1
MSKLRITEIFHSLQGESLTVGLPTVFVRLTGCPLRCTYCDTDYAFGGGEWMSFEEILAQIESYNCPNICMTGGEPLAQKRAYDFYKLLCDKGYQVSTETGGAHDISVLDKRVMVVMDLKTPDSGEMSRNLYENIDHLKPTDQVKFVICSRKDYDWCKMTLDKYDLTNKCEVLFSPSYGQVEYADLAEWILKDRLRVRMQVQLHKIIWGERTGV

SEQ ID NO: 30840 - protein, 213 aa, Kangiella sp.
  REGION 1..213: note = tr|A0A3D8UPT7|A0A3D8UPT7_9GAMM 7-carboxy-7-deazaguanine synthase OS=Kangiella sp. HD9-110m-PIT-SAG07 OX=2283595 GN=queE PE=3 SV=1
MSKLRITEIFHSLQGESLTVGLPTVFVRLTGCPLRCTYCDTDYAFGGGEWMTFEEILVDIEQYNCQHICMTGGEPLAQKRAYEFYELLCEKGYNVSTETGGAHDISVLDKRVMVVMDLKTPDSGEMARNLYENIDHLKPTDQVKFVICSRKDYDWCKMTVDKYNITDKCEVLFSPSYGQVEYETLAGWILKDRLRVRMQVQLHKVIWGERTGV

SEQ ID NO: 30841 - protein, 214 aa, Kangiella sp.
  REGION 1..214: note = tr|A0A2G2KXT5|A0A2G2KXT5_9GAMM 7-carboxy-7-deazaguanine synthase OS=Kangiella sp.; OX = 1920245 GN=queE PE=3 SV=1
MTRLRISEIFYSLQGESSSIGKPTLFVRLTGCPLRCVWCDTEYAFTGGDYWAFDDLIEKIVSYSPQNICITGGEPMAQKDPCQKLMFRLCELGYSVSLETSGSIDLKEVDSRVTKVMDLKAPDSGEMAKNHYKNIQYLDKTDEVKFVVMSRKDYDWTKMQIDQYQLSVKTNVIISPCFGEIDERQLAEWIIEDNLPVRFQIQMHKILWNDAKGH

SEQ ID NO: 30842 - protein, 213 aa, Kangiella spongicola
  REGION 1..213: note = tr|A0A318D8G8|A0A318D8G8_9GAMM 7-carboxy-7-deazaguanine synthase OS=Kangiella spongicola; OX = 796379 GN=queE PE=3 SV=1
MSKLRITEIFHSLQGESLTVGLPTVFVRLTGCPLRCTYCDTDYAFGGGEWMSYDEILAEIEQYNCQHICMTGGEPLAQKRAYEFYHLLCEKGYKVSTETGGAHDISVLDKRVMVVMDLKTPDSGEMSRNLYENIDRLKPTDQVKFVICSRKDYDWCKMTIDKYNLTEKCEVLFSPSYGQVEYADLAEWILKDRLRVRMQVQLHKVIWGERTGV

SEQ ID NO: 30843 - protein, 214 aa, unidentified
  source 1..214: note = Ketobacter alkanivorans
  REGION 1..214: note = tr|A0A2K9LQQ5|A0A2K9LQQ5_9GAMM 7-carboxy-7-deazaguanine synthase OS=Ketobacter alkanivorans OX=1917421 GN=queE PE=3 SV=1
MTQLRITEIFYSLQGEARTIGLPTVFVRLTGCPLRCQYCDTAYAFSGGEMRSIDQILAEVASYQPRYITVTGGEPLAQPNCQQLLTALCDAGYQVSLETSGALDIAGVDPRVSVVMDLKTPDSGESHRNLMANIPHLKPDDQIKFVICSRQDYQWARLKLDELQLAERVGDVLFSPSFNQIRPSELADWIVEDRLPVRFQLQLHKLLWADEPGH

SEQ ID NO: 30844 - protein, 214 aa, unidentified
  source 1..214: note = Ketobacter sp.
  REGION 1..214: note = tr|A0A3L8BYM5|A0A3L8BYM5_9GAMM 7-carboxy-7-deazaguanine synthase OS=Ketobacter sp.; OX = 2083498 GN=queE PE=3 SV=1
MTQLRITEIFNSLQGEARTIGRPTVFVRLTGCPLRCQYCDTTYAFSGGDMWALEDILQEVASYSPRYVTVTGGEPLAQPGCRTLLTALCDAGYQVSLETSGALDIAGLDSRVSVVLDLKTPDSGESHRNLMENIPHLKPLDQVKFVICSRQDYQWARMKVDELGLAQRVDDVLFSPSHGQISVVELADWIVEDRLPVRFQLQLHKVLWADEPGR

SEQ ID NO: 30845 - protein, 216 aa, unidentified
  source 1..216: note = Ketobacter sp.
  REGION 1..216: note = tr|A0A3F2V9Q8|A0A3F2V9Q8_9GAMM 7-carboxy-7-deazaguanine synthase OS=Ketobacter sp.; OX = 2083498 GN=queE PE=3 SV=1
MSVSQLRITEIFYSLQGEARTIGLPTVFVRLTGCPLRCQYCDTEYAFSGGEMRSLQQILDQVNSYSPRYVTVTGGEPLAQPNCIPLLSQLCDLGLEVSLETSGALDVSEVDSRVSIVLDLKTPGSGEMHRNLYSNLEHLKPKDQIKFVICGRQDYQWAKMQLSQLKLDLLVGDVLFSPSHQAIEPADLANWIVEDNLPVRFQLQLHKILWADQPGY

SEQ ID NO: 30846 - protein, 255 aa, unidentified
  source 1..255: note = Kibdelosporangium phytohabitans
  REGION 1..255: note = tr|A0A0N9I2J1|A0A0N9I2J1_9PSEU 7-carboxy-7-deazaguanine synthase OS=Kibdelosporangium phytohabitans OX=860235 GN=queE PE=3 SV=1
MITDTPVAAGRARRGQTLPLSEVFGPTFQGEGPFTGYRARFVRLGGCNLSCGAGAAPMVCDTEYTWNSAKFDLAVECPETRTTAILEHAGRISAPITVLTGGEPMTHQRKPAFTELLTGLRDLGQVHVETNGTIPPAADAHDLVDHFTVSPKLTNTGDPAGKRLKPRALAAFAAEAPGKAVFKFVVATPDELTEVDRLVDEYSIPHPAVWIMPEGRTAARVLACHRSLADAILTRGYNTTTRLHMLLWPEEDRGR

SEQ ID NO: 30847 - protein, 248 aa, unidentified
  source 1..248: note = Kiloniella litopenaei
  REGION 1..248: note = tr|A0A0M2RCC2|A0A0M2RCC2_9PROT 7-carboxy-7-deazaguanine synthase OS=Kiloniella litopenaei; OX = 1549748 GN=queE PE=3 SV=1
MFADAPPNARTIKVSEIFGPTIQGEGALTGLPTVFVRMGGCDYRCSWCDTLYAVDSSFRDQWKPMSPAAIMSEVASLSGGKPLLVSLSGGNPAIQPLGALIDLGHEQGYRFALETQGSVVKDWFSKLDNLTLSPKPPSSDMETDWDLLANCVATAGSDTETIMKVVVFDDRDYAYAKEVHRRFPGLRMYLQPGNHTPGTVEETEPTIDMSGVMDRMRWLIDKVVDDEWYDATVLPQLHVLIWGNERGV

SEQ ID NO: 30848 - protein, 250 aa, unidentified
  source 1..250: note = Kiloniella spongiae
  REGION 1..250: note = tr|A0A0H2MJR3|A0A0H2MJR3_9PROT 7-carboxy-7-deazaguanine synthase OS=Kiloniella spongiae; OX = 1489064 GN=queE PE=3 SV=1
MKVFSDVPPNARTIKVSEIFGPTIQGEGALTGLPTVFVRMGGCDYRCSWCDTLYAVDSSFRDQWKPMSPTAIMTEVASLSGGKPLLVSLSGGNPAIQPLGALIDLGHEQGYRFALETQGSVVKDWFSKLDNLTLSPKPPSSEMETDWDLLAGCVAAAGSDTETIMKVVVFDDRDYAYAKEVHRRFPGLRMYLQPGNHTPGTVEETEPTIDLSGVMNRMRWLIDKVVEDEWYDATVLPQLHVLIWGNERGV

SEQ ID NO: 30849 - protein, 237 aa, Kineococcus radiotolerans
  REGION 1..237: note = tr|A6WGA5|A6WGA5_KINRD 7-carboxy-7-deazaguanine synthase OS=Kineococcus radiotolerans (strain ATCC BAA-149 / DSM 14245 / SRS30216) OX=266940 GN=queE PE=3 SV=1
MTYLLKEIFYTLQGEGTHAGRPAVFCRFSRCNLWTGREKDRARAICTFCDTDFVGTDGVGGGRFATADDLAAAVDASWPAAGLTDDFTDGSAITAESDSSAHSHAPHGAQRKFVVCTGGEPLLQLDDAAVQALHQRGFEVAVETNGTRTPPPGIDWLCVSPKIGADLVVSRGDELKLVYPQAGGDPAQFAELDFTSFRLQPMDGPDVQAHTRAAIDYCLTHPQWSLSMQTHKYLGIA

SEQ ID NO: 30850 - protein, 206 aa, Kingella kingae
  REGION 1..206: note = tr|F5S5X1|F5S5X1_9NEIS 7-carboxy-7-deazaguanine synthase OS=Kingella kingae ATCC 23330 OX=887327 GN=nrdG; PE = 3 SV=1
MTNEPTFRIVEIFETLQGEGYNTGMPSVFIRFGKCNLACHWCDTNYNEFGMMTLSQIMVKVHEFLAKNIIITGGEPTIQPHLVALLDCLKSEGYFLAMETNGLKDVPKQIDFVATSPKRLYTEAYEKRCLKRADEVRIVVDNVDVFDFCELIEQKIESPRYYLSPCEQQGEMNILQTITLLGKLNARVGKPHWQLSIQTHKLCGIE

SEQ ID NO: 30851 - protein, 206 aa, unidentified
  source 1..206: note = Kingella negevensis
  REGION 1..206: note = tr|A0A238HHT0|A0A238HHT0_9NEIS 7-carboxy-7-deazaguanine synthase OS=Kingella negevensis; OX = 1522312 GN=queE PE=3 SV=1
MTHQPTYRIVEIFETLQGEGYNTGMPSIFIRFGKCNLACHWCDTNYNEFGTMSLSHILDKVHGFTAKNIIITGGEPTIQPQIETLLDQLKAENYYIAIETNGLKDVPPQIDYIATSPKRLYAQAYEKNCIKKAHEVRIVVDSEETETFCHQVEQKIQADRYYLSPCEINGKMNLLETITLLGKLNERSNTPHWQLSIQTHKLCGIE

SEQ ID NO: 30852 - protein, 212 aa, Kingella potus
  REGION 1..212: note = tr|A0A377QYX8|A0A377QYX8_9NEIS 7-carboxy-7-deazaguanine synthase OS=Kingella potus; OX = 265175 GN=queE PE=3 SV=1
MTEIKFAPADPQYRIVEIFESLQGEGWNTGMPAIFVRLGKCNLACSWCDTDYLKFGMMSLSDILGRLKTYTARNVIITGGEPTIQPHLDTLLDALKAEGYFLCIETNGLKPAPPQIDYVAASPKACYAAKYEKSCIETADEVRIVADGDVTAFCETMEQKIRARRYYLSPCEQNGVMNIYDTIRQIGILNSRPDAPVHWQLSVQTHKWAGIE

SEQ ID NO: 30853 - protein, 212 aa, Kinneretia asaccharophila
  REGION 1..212: note = tr|A0A4R6NB07|A0A4R6NB07_9BURK 7-carboxy-7-deazaguanine synthase OS=Kinneretia asaccharophila OX=582607 GN=queE PE=3 SV=1
MTYAVKEMFYTLQGEGAQAGRPAVFCRFAGCNLWSGREQDRAEAVCSFCDTDFVGTDGQGGGKFATAAELAAAVAAKWAGGPGGKPYVVCTGGEPLLQLDEPLIEALHAQGFEVAVETNGTQPAPAGLDWICVSPKADAEIVLTRGHELKLVWPQPLARPERFAGLDFQHFYLQPMDTPLLQKQHAREAIEYCLAHPQWKLSVQMHKVVGID

SEQ ID NO: 30854 - protein, 259 aa, unidentified
  source 1..259: note = Kiritimatiella glycovorans
  REGION 1..259: note = tr|A0A0G3EG43|A0A0G3EG43_9BACT 7-carboxy-7-deazaguanine synthase OS=Kiritimatiella glycovorans OX=1307763 GN=queE_1 PE=3 SV=1
MNETDAVAPRGAAPTAELIEIFSSIQGEGLCVGERHLFVRFAGCHRRCAYCDTPVKAGSTFRVESPAGSGHFRTVANPVEPQRLIDEIDTLKRPSGLHAAVALTGGEPLLQTDFLSLLLPLLKSEGLRVLLETAGDHPDELERIAPWVDSVALDAKLPQATDESTDWERVGRCVKLCAEKIETAFVKAVIAASTDETELAELAEAVGDRLPLVLQPVTRVKHGPEPPSARRLLELQAFLAQNALEVRIIPQCHHTLGMI

SEQ ID NO: 30855 - protein, 234 aa, unidentified
  source 1..234: note = Kiritimatiella glycovorans
  REGION 1..234: note = tr|A0A0G3EK70|A0A0G3EK70_9BACT 7-carboxy-7-deazaguanine synthase OS=Kiritimatiella glycovorans OX=1307763 GN=queE_2 PE=4 SV=1
MAASPVYAFRRQPTMVDYPGRIAAIFFTSGCNFSCGFCHNATLMGAPRPGLSWERMDEVCADFRRNWTDAAVISGGEPTLAAGLPELIRFYKRHGFAVKLDTNGSNPEMLEACLPDLDYVAMDVKTALEDYPSLTGWSRPDRLRRSVELLRSGGVRHEFRTTVIPGHHNADRMRRIGIELNGSNRLVLQPFVPDESLPGETFRTLPRTPPEQLEELRSTVTEFVHEVVVRGGGG

SEQ ID NO: 30856 - protein, 249 aa, unidentified
  source 1..249: note = Kiritimatiellaceae bacterium
  REGION 1..249: note = tr|A0A2E1U3J0|A0A2E1U3J0_9BACT 7-carboxy-7-deazaguanine synthase OS=Kiritimatiellaceae bacterium OX=2026752 GN=queE PE=3 SV=1
  VARIANT 149: note = Xaa can be any naturally occurring amino acid
  VARIANT 175: note = Xaa can be any naturally occurring amino acid
MKSYLSELFSSIQGEGPYVGERQLFMRFCGCHRDCVYCDTNTQRTEAVVVERIAGSGIFESIPNPLSVDDLLEWVRILDHKKNNRHISLTGGAPLLQVKFLGELLPRLENEGHRNYLETAGDLPQQLEAIIEYLDVVAMDVKLSSVTHXKNTFPAHWQFLSCLRTYNVDSFVKLXVSDETDEAELMEAVKGIHKSGGKNTIVILQALSATERVSNVPSVQQLMRWQEKISGVLPQVRVIPQTHKMMGML

SEQ ID NO: 30857 - protein, 249 aa, unidentified
  source 1..249: note = Kiritimatiellaceae bacterium
  REGION 1..249: note = tr|A0A2D7D696|A0A2D7D696_9BACT 7-carboxy-7-deazaguanine synthase OS=Kiritimatiellaceae bacterium OX=2026752 GN=queE PE=3 SV=1
  VARIANT 84: note = Xaa can be any naturally occurring amino acid
  VARIANT 123: note = Xaa can be any naturally occurring amino acid
  VARIANT 158: note = Xaa can be any naturally occurring amino acid
  VARIANT 242: note = Xaa can be any naturally occurring amino acid
MKSYLSELFSSIQGEGPMVGERHLFMRFCGCHRDCVYCDTNTQRTETVMVERVAGSGEVESVPNPLSVDDLLEWVRVLDVGRVXDRISVTGGAPLLQAKFFGALFPRLVDAEHRIYLETAGDXPQQLEMVIEYLDVVAMDVKLASVTHEKSSFPAHWXFLSCLRKYEVESFVKLVVSDETHEGELMEAVKGIRKTGGVDTRVILQPLSPTERVSNVPTVAQLLYWQEKVGKLLPDVRVIPQXHKMMGML

SEQ ID NO: 30858 - protein, 244 aa, unidentified
  source 1..244: note = Kitasatospora aureofaciens
  REGION 1..244: note = tr|A0A0L8PKY9|A0A0L8PKY9_KITAU 7-carboxy-7-deazaguanine synthase OS=Kitasatospora aureofaciens OX=1894 GN=queE PE=3 SV=1
MRARGTGSDRKIVVNEIFGPTIQGEGPSMGRSCSFVRLGGCNLTCTWCDTPYTWDWAGRSDAGTAYDPKAELHAMNVAEVAERLLVTDVRLVVVSGGEPLQQQRTVARLCRLLGESGVSVEIETNGTLSPSPELVAARPRFNVSPTLRHSGMGPEQTVVPEALRALNATRGAAFTFVCRDPGDLDEVADIVARYGLESVWIMPEGQDQETLSDRLALLADAVVARRWNISTRIHVHAWGNRRGV

SEQ ID NO: 30859 - protein, 244 aa, unidentified
  source 1..244: note = Kitasatospora aureofaciens
  REGION 1..244: note = tr|A0A0L8P6U7|A0A0L8P6U7_KITAU 7-carboxy-7-deazaguanine synthase OS=Kitasatospora aureofaciens OX=1894 GN=queE PE=3 SV=1
MSRQETTRGRKIVVNEIFGPTIQGEGPSMGRICSFVRLGGCNLTCTWCDTPYTWDWTGQSNEGTAYDPKAELHAMHVVDVADRLRAMDVRLVVISGGEPLQQQQTVTLLCHMLKESGVSVEIETNGTIAPSPALTATQARFNVSPKLRHSGMGPERTVVPVALRALNATGGAAFKFVCRGPADLEEVDAIVARHGLESVWIMPEGQDQETLTRHMSSLADAVVARRWNMSTRIHVQAWGNRRGV

SEQ ID NO: 30860 - protein, 243 aa, Kitasatospora cineracea
  REGION 1..243: note = tr|A0A3N1YW51|A0A3N1YW51_9ACTN 7-carboxy-7-deazaguanine synthase OS=Kitasatospora cineracea OX=88074 GN=queE PE=3 SV=1
MSALVAPASLPVAEVFGPTIQGEGPSVGQNALFIRLGACNLACTWCDTPYTWDGKRFDLREEIRRVPVVDLAETTAEHPHALVVITGGEPLLHQSTDAWRSLMAVLRHTTRRVEIETNGTLAPQPVTLGVPRLVFNVSPKLANSGMPQDRRIKPEALEAFTALASTGRARFKFVAASSDDLEEIAALTDRFRIPPHATWVMPEGVTPEQTIAVGRALAEDVIGRHWNLTLRQHVLLWPGERER

SEQ ID NO: 30861 - protein, 211 aa, Kitasatospora niigatensis
  REGION 1..211: note = tr|A0A3N4RKU9|A0A3N4RKU9_9ACTN 7-carboxy-7-deazaguanine synthase OS=Kitasatospora niigatensis OX=88075 GN=queE PE=3 SV=1
MAYLVKEIFYTLQGEGSHAGRPAVFCRFSRCNLWTGLEKDRERAICKFCDTDFVGTDGEGGGRFTTPEALAAAVEQAWPSAAADHRFVVCTGGEPLLQLDEAALEALHARGFEVAVETNGTRIPPKGIDWLCVSPKIGSELVVTRGDELKLVYPQLGGDPSQFEHLDYKHFRLQPMDGLEREANTQAAISYCMKNPRWTLSLQTHKYLGIQ

SEQ ID NO: 30862 - protein, 223 aa, Kitasatospora sp.
  REGION 1..223: note = tr|A0A540WF51|A0A540WF51_9ACTN 7-carboxy-7-deazaguanine synthase OS=Kitasatospora sp. MMS16-CNU292 OX=2567942 GN=queE PE=3 SV=1
MIAETFGPTFQGEGPTAGRQALFIRLSRCNLHCPRCDTPYTWDWTRFDPSEVSTRHSVEDVAAWVTDRLTARVVVTGGEPLIQQRELLRLVQLLPDRRVEIETNGTIVPLPELVGLVEGFNVSPKLAGFAALDDQAVNGAALRVLAASGKARFKFVVRQVAELEEIAALVDEFDLTEVWVMPEGTSSGAVLAGMRALADAVLARGWNLSNRLHVLLWEDERGR

SEQ ID NO: 30863 - protein, 223 aa, unidentified
  source 1..223: note = Kitasatospora xanthocidica
  REGION 1..223: note = tr|A0A373A528|A0A373A528_9ACTN 7-carboxy-7-deazaguanine synthase OS=Kitasatospora xanthocidica OX=83382 GN=queE PE=3 SV=1
MVAECFGPTFQGEGPSVGQQSLFVRLSRCNLSCPGCDTPETWDWSRFDPREVSTRHGVEDLAAWVMARSPRLVVVTGGEPLLQQPQLVDLVQVLSGRRVEVETNGTVVPMPELVESVSGFNVSPKLAAFAAPGDRRIVPEALEALAACGKARFKFVVHEAGQLDEVASLVEEFSLPDVWVMPEGANSAVVLRTMRELADQVLGRGWNLTPRLHTLLWEAERGR

SEQ ID NO: 30864 - protein, 244 aa, unidentified
  source 1..244: note = Kitasatospora xanthocidica
  REGION 1..244: note = tr|A0A373A309|A0A373A309_9ACTN 7-carboxy-7-deazaguanine synthase OS=Kitasatospora xanthocidica OX=83382 GN=queE PE=3 SV=1
MSALVLPDAGLPVAETFGPTIQGEGPTAGQRALFLRLGGCNLACDWCDTPYTWDGKRYDLRKEIGRVPVVELAEWAAGHPHAIIVITGGEPLLHQRTDAWRSLMAVLRYTTRRVEIETNGTLAPQPVSLGVPRLTFNVSAKLANSNMPEERRIKSDTLEVFADLAHRGRARFKFVAAGPDDLEEIAALVERFRLPPHATWVMPEGTTAERTIEVARALADDVIARNWNLTMRQHVLLWPGERNR

SEQ ID NO: 30865 - protein, 223 aa, unidentified
  source 1..223: note = Klebsiella aerogenes
  REGION 1..223: note = tr|A0A447W648|A0A447W648_KLEAE 7-carboxy-7-deazaguanine synthase OS=Klebsiella aerogenes; OX = 548 GN=ygcF PE=3 SV=1
MQYPINEMFQTLQGEGYFTGVPAIFIRLQGCPVGCAWCDTKHTWDKLADREVSLFSILAKTKESDKWGPASSEDLLAIIGRQGWTARHVVITGGEPCIHDLTPLTSLLEQNGFSCQIETSGTHEVRCSPNTWVTVSPKVNMRGGYDVLSQALQRADEIKHPVGRVRDIEALDELLETLSDDKPRIIALQPISQKEDATRLCIDTCIARNWRLSMQTHKYLNIA

SEQ ID NO: 30866 - protein, 223 aa, unidentified; identical to SEQ ID NO: 29897
  source 1..223: note = Klebsiella aerogenes
  REGION 1..223: note = tr|A0A155IHG9|A0A155IHG9_KLEAE 7-carboxy-7-deazaguanine synthase OS=Klebsiella aerogenes; OX = 548 GN=ygcF PE=3 SV=1

SEQ ID NO: 30867 - protein, 223 aa, unidentified
  source 1..223: note = Klebsiella grimontii
  REGION 1..223: note = tr|A0A285AXR2|A0A285AXR2_9ENTR 7-carboxy-7-deazaguanine synthase OS=Klebsiella grimontii; OX = 2058152 GN=ygcF PE=3 SV=1
MQYPINEMFQTLQGEGYFTGVPAIFIRLQGCPVGCAWCDTKHTWDKLADREVSLFSILAKTKESDKWGPASSEDLLAIIGRQGWTARHVVITGGEPCIHDLTPLTSLLEQNGFSCQIETSGTHEVRCTPHTWVTVSPKVNMRGGYDVLSQALQRADEIKHPVGRVRDIEALDELLATLADEKPRIIALQPISQKDDATRLCIETCIARNWRLSMQTHKYLNIA

SEQ ID NO: 30868 - protein, 223 aa, unidentified
  source 1..223: note = Klebsiella michiganensis
  REGION 1..223: note = tr|A0A564LTL8|A0A564LTL8_9ENTR 7-carboxy-7-deazaguanine synthase OS=Klebsiella michiganensis OX=1134687 GN=queE PE=3 SV=1
MQYPINEMFQTLQGEGYFTGVPAIFIRLQGCPVGCAWCDTKHTWDKLADREVSLFSILAKTKESDKWGPASSEDLLAIIGRQGWTARHVVITGGEPCIHDLTPLTSLLEQNGFSCQIETSGTHEVRCTPHTWVTVSPKVNMRGGYDVLSQALERANEIKHPVGRVRDIEALDELLATLSDDKPRIIALQPISQKDDATRLCIDTCIARNWRLSMQTHKYLNIA

SEQ ID NO: 30869 - protein, 223 aa, unidentified; identical to SEQ ID NO: 30867
  source 1..223: note = Klebsiella michiganensis
  REGION 1..223: note = tr|H3N1X3|H3N1X3_9ENTR 7-carboxy-7-deazaguanine synthase OS=Klebsiella michiganensis OX=1134687 GN=queE; PE = 3 SV=1

SEQ ID NO: 30870 - protein, 223 aa, Klebsiella oxytoca
  REGION 1..223: note = tr|A0A5F2FF55|A0A5F2FF55_KLEOX 7-carboxy-7-deazaguanine synthase OS=Klebsiella oxytoca; OX = 571 GN=queE PE=3 SV=1
MQYPINEMFQTLQGEGYFTGVPAIFIRLQGCPVGCAWCDTKHTWDKLADREVSLFSILAKTKESDKWGPASSEDLLAIIGRQGWTARHVVITGGEPCIHDLTPLTSLLEQNGFSCQIETSGTHEVRCTPHTWVTVSPKVNMRGGYDVLSQALQRADEIKHPVGRVRDIEALEELLETLADDKPRIIALQPISQKEDATRLCIETCIARNWRLSMQTHKYLNIA

SEQ ID NO: 30871 - protein, 223 aa, Klebsiella oxytoca
  REGION 1..223: note = tr|A0A2U4EBM9|A0A2U4EBM9_KLEOX 7-carboxy-7-deazaguanine synthase OS=Klebsiella oxytoca; OX = 571 GN=queE PE=3 SV=1
MQYPINEMFQTLQGEGYFTGVPAIFIRLQGCPVGCAWCDTKHTWDKLADREVSLFSILAKTKESDKWGPASSEDLLAIIGRQGWTARHVVITGGEPCIHDLTPLTLLLEQNGFSCQIETSGTHEVRCTPHTWVTVSPKVNMRGGYDVLSQALQRADEIKHPVGRVRDIEALDELLETLADDKPRIIALQPISQKEDATRLCIETCIARNWRLSMQTHKYLNIA

SEQ ID NO: 30872 - protein, 223 aa, Klebsiella pneumoniae; identical to SEQ ID NO: 29939
  REGION 1..223: note = tr|A0A4V0G2M5|A0A4V0G2M5_KLEPN 7-carboxy-7-deazaguanine synthase OS=Klebsiella pneumoniae; OX = 573 GN=queE_1 PE=3 SV=1

SEQ ID NO: 30873 - protein, 223 aa, Klebsiella pneumoniae
  REGION 1..223: note = tr|A0A5E1CER6|A0A5E1CER6_KLEPN 7-carboxy-7-deazaguanine synthase OS=Klebsiella pneumoniae; OX = 573 GN=queE PE=3 SV=1
MQYPINEMFQTLQGEGYFTGVPAIFIRLQGCPVGCAWCDTKHTWDKLADREVSLFSILAKTKESDKWGPASSEDLLAIIGRQGWTARHVVITGGEPCIHDLTPLTSLLEQNGFSCQIETSGTHEVRCSPNTWVTVSPKVNMRGGYDVLSQALQRADEIKHPVGRVRDIEALDELLETLSDDKQRIIALQPISQKEDATRLCIDTCIARNWRLSMQTHKYLNIA

SEQ ID NO: 30874 - protein, 223 aa, unidentified; identical to SEQ ID NO: 29918
  source 1..223: note = Klebsiella quasipneumoniae
  REGION 1..223: note = tr|A0A2A5MNH0|A0A2A5MNH0_9ENTR 7-carboxy-7-deazaguanine synthase OS=Klebsiella quasipneumoniae OX=1463165 GN=queE PE=3 SV=1

SEQ ID NO: 30875 - protein, 223 aa, unidentified; identical to SEQ ID NO: 29918
  source 1..223: note = Klebsiella quasipneumoniae
  REGION 1..223: note = tr|A0A5C6IIV8|A0A5C6IIV8_9ENTR 7-carboxy-7-deazaguanine synthase OS=Klebsiella quasipneumoniae subsp. similipneumoniae OX=1463164 GN=queE; PE = 3 SV=1

SEQ ID NO: 30876 - protein, 223 aa, unidentified; identical to SEQ ID NO: 29918
  source 1..223: note = Klebsiella quasivariicola
  REGION 1..223: note = tr|A0A223U763|A0A223U763_9ENTR 7-carboxy-7-deazaguanine synthase OS=Klebsiella quasivariicola OX=2026240 GN=queE PE=3 SV=1

SEQ ID NO: 30877 - protein, 223 aa, Klebsiella sp.
  REGION 1..223: note = tr|A0A3G5CYL1|A0A3G5CYL1_9ENTR 7-carboxy-7-deazaguanine synthase OS=Klebsiella sp. P1CD1; OX = 2267618 GN=queE PE=3 SV=1
MQYPINEMFQTLQGEGYFTGVPAIFIRLQGCPVGCAWCDTKHTWDKLADREVSLFSILAKTKESDKWGPASSEDLLAIIGRQGWTARHVVITGGEPCIHDLTPLTSLLEQNGFSCQIETSGTHEVRCSHNTWVTVSPKVNMRGGYDVLSQALQRADEIKHPVGRVRDIEALDELLETLSDDKPRIIALQPISQKEDATRLCIDTCIARNWRLSMQTHKYLNIA

SEQ ID NO: 30878 - protein, 225 aa, Klebsiella sp.
  REGION 1..225: note = tr|J8VYC7|J8VYC7_9ENTR 7-carboxy-7-deazaguanine synthase OS=Klebsiella sp. OBRC7 OX=936565 GN=queE PE=3; SV = 1
MIMQYPINEMFQTLQGEGYFTGVPAIFIRLQGCPVGCAWCDTKHTWDKLADREVSLFSILAKTKESDKWGPANSEDLLAIIGRQGWTARHVVITGGEPCIHDLTPLTSLLEQNGFSCQIETSGTHEVRCTPHTWVTVSPKVNMRGGYDVLSQALQRADEIKHPVGRVRDIEALDELLATLADEKPRIIALQPISQKDDATRLCIETCIARNWRLSMQTHKYLNIA

SEQ ID NO: 30879 - protein, 215 aa, Klebsiella variicola
  REGION 1..215: note = tr|A0A2N4Z1P1|A0A2N4Z1P1_KLEVA 7-carboxy-7-deazaguanine synthase QueE (Fragment); OS = Klebsiella variicola OX=244366 GN=CWN47_13625 PE=3 SV=1
MQYPINEMFQTLQGEGYFTGVPAIFIRLQGCPVGCAWCDTKHTWDKLADREVSLFSILAKTKESDKWGPASSEDLLAIIGRQGWTARHVVITGGEPCIHDLTPLTSLLEQNGFSCQIETSGTHEVRCSHNTWVTVSPKVNMRGGYDVLSQALQRADEIKHPVGRVRDIEALDELLETLSDDKPRIIALQPISQKEDATRLCIDTCIARNWRLSMQ

SEQ ID NO: 30880 - protein, 223 aa, Klebsiella variicola; identical to SEQ ID NO: 30877
  REGION 1..223: note = tr|A0A087FV52|A0A087FV52_KLEVA 7-carboxy-7-deazaguanine synthase OS=Klebsiella variicola; OX = 244366 GN=ygcF PE=3 SV=1

SEQ ID NO: 30881 - protein, 223 aa, Kluyvera ascorbata
  REGION 1..223: note = tr|A0A2T2Y400|A0A2T2Y400_9ENTR 7-carboxy-7-deazaguanine synthase OS=Kluyvera ascorbata; OX = 51288 GN=queE PE=3 SV=1
MQYPINEMFQTLQGEGYFTGVPAIFIRLQGCPVGCAWCDTKHTWEKLEDREVSLFSILAKTKESDKWGAASSEDLLAIIGRQGWTARHVVITGGEPCIHDLTPLTTMLEQNGFSCQIETSGTHEVRCSHSTWVTVSPKVNMRGGFDVLSQALARADEIKHPVGRVRDIEALDELLETLSDDKPRIIALQPISQKEDATRLCIETCIARNWRLSMQTHKYLNIA

SEQ ID NO: 30882 - protein, 223 aa, Kluyvera ascorbata
  REGION 1..223: note = tr|A0A378GM09|A0A378GM09_9ENTR 7-carboxy-7-deazaguanine synthase OS=Kluyvera ascorbata; OX = 51288 GN=queE PE=3 SV=1
MQYPINEMFQTLQGEGYFTGVPAIFIRLQGCPVGCAWCDTKHTWEKLSDREVSLFSILAKTKESDKWGAASSEDLLAIIGRQGWTARHVVITGGEPCIHDLTPLTALLEQNGYSCQIETSGTHEVRCTPGTWVTVSPKVNMRGGYDVLSQALERADEIKHPVGRVRDIEALDELLETLSDDKPRIIALQPISQKDDATRLCIETCIARNWRLSMQTHKYLNIA

SEQ ID NO: 30883 - protein, 223 aa, Kluyvera cryocrescens
  REGION 1..223: note = tr|A0A2X3ECP1|A0A2X3ECP1_KLUCR 7-carboxy-7-deazaguanine synthase OS=Kluyvera cryocrescens; OX = 580 GN=queE PE=3 SV=1
MQYPINEMFQTLQGEGYFTGVPAIFIRLQGCPVGCAWCDTKHTWEKLSDREVSLFSILAKTKESDKWGAASSEDLLAIIGRQGWTARHVVITGGEPCIHDLIPLTELLEQNGYSCQIETSGTHEVRCSHNTWVTVSPKVNMRGGYDVLSQALLRADEIKHPVGRVRDIEALDELLETLSDDKPRIIALQPISQKDDATRLCIETCIARNWRLSMQTHKYLNIA

SEQ ID NO: 30884 - protein, 65 aa, Kluyvera cryocrescens
  REGION 1..65: note = tr|A0A485B3Z3|A0A485B3Z3_KLUCR 7-carboxy-7-deazaguanine synthase OS=Kluyvera cryocrescens; OX = 580 GN=queE_1 PE=4 SV=1
MFQTLQGEGYFTGVPAIFIRLQGCPVGCAWCDTKHTWEKLSDREVSLFSILAKTKESDKWGAASK

SEQ ID NO: 30885 - protein, 224 aa, Kluyvera georgiana
  REGION 1..224: note = tr|A0A1B7K5E4|A0A1B7K5E4_9ENTR 7-carboxy-7-deazaguanine synthase OS=Kluyvera georgiana ATCC 51603 OX=1354264 GN=queE PE=3 SV=1
MMQYPINEMFQTLQGEGYFTGVPAIFIRLQGCPVGCAWCDTKHTWDKLEDREVSLFSILAKTKESDKWGAASSDDLLAIIGRQGWTARHVVITGGEPCIHDLTALTALLEQNGFSCQIETSGTHEVRCTPNTWVTVSPKVNMRGGYDVLSQALERADEIKHPVGRVRDIEALDELLETLSDDKQRIIALQPISQKDDATRLCIETCIARNWRLSMQTHKYLNIA

SEQ ID NO: 30886 - protein, 223 aa, Kluyvera intermedia; identical to SEQ ID NO: 30456
  REGION 1..223: note = tr|A0A1X0X784|A0A1X0X784_KLUIN 7-carboxy-7-deazaguanine synthase OS=Kluyvera intermedia; OX = 61648 GN=queE PE=3 SV=1

SEQ ID NO: 30887 - protein, 223 aa, Kluyvera intermedia
  REGION 1..223: note = tr|A0A3S4F8B7|A0A3S4F8B7_KLUIN 7-carboxy-7-deazaguanine synthase OS=Kluyvera intermedia; OX = 61648 GN=queE PE=3 SV=1
MQYPINEMFQTLQGEGYFTGVPAIFIRLQGCPVGCAWCDTKHTWEKLEDREISLFSILAKTKESDKWGAASSEDLLAIIGRQGWTARHVVITGGEPCIHDLTPLTTLLEQNGYSCQIETSGTHEVLCSHNTWVTVSPKVNMRGGYDVLSQALVRADEIKHPVGRMRDIEALDELLETLSDDKPRIIALQPISQKEDATRLCIETCIARNWRLSMQTHKYLNIA

SEQ ID NO: 30888 - protein, 223 aa, Kluyvera sp.; identical to SEQ ID NO: 30456
  REGION 1..223: note = tr|A0A2T3XA53|A0A2T3XA53_9ENTR 7-carboxy-7-deazaguanine synthase OS=Kluyvera sp. Nf5; OX = 2116543 GN=queE PE=3 SV=1

SEQ ID NO: 30889 - protein, 211 aa, unidentified
  source 1..211: note = Komagataeibacter cocois
  REGION 1..211: note = tr|A0A365YZS0|A0A365YZS0_9PROT 7-carboxy-7-deazaguanine synthase OS=Komagataeibacter cocois OX=1747507 GN=queE PE=3 SV=1
MSYTVKEIFLTLQGEGGQAGRAAVFCRFAGCNLWSGREEDRDGAICRFCDTDFIGTDGPGGGRFASADALADAVAAAWTATSRDEAFVVFTGGEPLLQLDSALIAAMHERGFSIAVETNGTVRAPDGIDWICVSPKAGAPLVQTSGQELKLVFPQDDLMPEQVAGLDFRQYWLQPMDGPARVANTARAVEYCMAHPRWRLSLQTHKLIGIP

SEQ ID NO: 30890 - protein, 225 aa, unidentified
  source 1..225: note = Komagataeibacter europaeus
  REGION 1..225: note = tr|A0A0M0ELL6|A0A0M0ELL6_KOMEU 7-carboxy-7-deazaguanine synthase OS=Komagataeibacter europaeus OX=33995 GN=queE PE=3 SV=1
MVPFSGRVHYEIWNMSYTVKEIFPTLQGEGAQAGRTAVFCRFAGCNLWSGLERDRDRATCRFCDTDFIGTDGPGGGRFADADQLADTIAAQWPTADRTGAFVVLTGGEPLLQLDDALIAALHARGFEIAVETNGTVAAPDGIDWICVSPKAGAALVQTRGHELKLVYPQPDLLPDQVAGLDFQQFWLQPMDNANRVRNTTDAVTYCMQHPQWRLSLQTHKLIGIP

SEQ ID NO: 30891 - protein, 225 aa, unidentified
  source 1..225: note = Komagataeibacter europaeus
  REGION 1..225: note = tr|A0A0D6PVV1|A0A0D6PVV1_KOMEU 7-carboxy-7-deazaguanine synthase OS=Komagataeibacter europaeus NBRC 3261 OX=1234669 GN=queE PE=3 SV=1
MVPFSGRVHYEIWNMSYTVKEIFPTLQGEGAQAGRTAVFCRFAGCNLWSGLERDRDRATCRFCDTDFIGTDGPGGGRFADADQLADTIAAQWPAADRTGAFVVLTGGEPLLQLDDALIAALHARGFEIAVETNGTVAAPDGIDWICVSPKAGAALVQTRGHELKLVYPQPDLLPDQVAGLDFQQFWLQPMDNADRVRNTTDAVTYCMQHPQWRLSLQTHKLIGIP

SEQ ID NO: 30892 - protein, 211 aa, unidentified
  source 1..211: note = Komagataeibacter hansenii
  REGION 1..211: note = tr|D5QDE3|D5QDE3_KOMHA 7-carboxy-7-deazaguanine synthase OS=Komagataeibacter hansenii ATCC 23769 OX=714995; GN = queE PE=3 SV=1
MSYTVKEIFPTLQGEGSQAGRAAVFCRFAGCNLWSGREIDRDDATCRFCDTDFIGTDGMGGGRFADAASLADAIAAAWPAASRRDAFVVFTGGEPLLQLDAALVAAMHARGFFIAVETNGTIRAPDGIDWICMSPKAGAPLVQTSGHELKLVFPQPDLMPEQVAGLDFAQFWLQPMDGPERVSNTSHAVEYCMAHPQWRLSLQTHKLIGIP

SEQ ID NO: 30893 - protein, 211 aa, unidentified
  source 1..211: note = Komagataeibacter hansenii
  REGION 1..211: note = tr|A0A318PY97|A0A318PY97_KOMHA 7-carboxy-7-deazaguanine synthase OS=Komagataeibacter hansenii OX=436 GN=queE PE=3 SV=1
MSYTVKEIFPTLQGEGSQAGRAAVFCRFAGCNLWSGREIDRDDATCRFCDTDFIGTDGMGGGRFADAASLADAIAAAWPAASRKDAFVVFTGGEPLLQLDAALVAAMHARGFFIAVETNGTIRAPDGIDWICMSPKAGAPLVQTSGHELKLVFPQPDLMPEQVAGLDFAQFWLQPMDGPERVSNTSRAVEYCMAHPQWRLSLQTHKLIGIP

SEQ ID NO: 30894 - protein, 250 aa, unidentified
  source 1..250: note = Komagataeibacter intermedius
  REGION 1..250: note = tr|A0A0N1N4F3|A0A0N1N4F3_9PROT 7-carboxy-7-deazaguanine synthase OS=Komagataeibacter intermedius AF2 OX=1458464 GN=queE PE=3 SV=1
MACIHHTDRAEPDAAGRGTGWGSSHARPAAGRVQYEIWNMSYTVKEIFPTLQGEGAQAGRTAVFCRFTGCNLWSGLERDRDRATCRFCDTDFIGTDGAGGGRFASPDDLADAIAQQWPTPDRNAAFVVFTGGEPLLQLDDALIAALHARGFEIAVETNGTLPAPDGIDWICVSPKAGAPLVQTRGHELKLVFPQPDLMPDQVAGLDFRQFWLQPMDNARRAQNTDDAVTYCMHHPQWRLSLQTHKLIGIP

SEQ ID NO: 30895 - protein, 211 aa, unidentified
  source 1..211: note = Komagataeibacter maltaceti
  REGION 1..211: note = tr|A0A2S3W553|A0A2S3W553_9PROT 7-carboxy-7-deazaguanine synthase OS=Komagataeibacter maltaceti OX=1203393 GN=queE PE=3 SV=1
MSYTVKEIFPTLQGEGGQAGRAAVFCRFAGCNLWSGREEDRSGAACRFCDTDFIGTDGEGGGRFADAASLADAIAAAWPASSRARAFVVFTGGEPLLQLDAALIDAMHARGFFIAVETNGTVPAPAGIDWVCVSPKAGTALVQESGQELKLVFPQPDLMPEQVAGLAFSQFWLQPMDGPDRVANTARAVEYCMAHPQWRLSLQTHKLIGIP

SEQ ID NO: 30896 - protein, 211 aa, unidentified
  source 1..211: note = Komagataeibacter medellinensis
  REGION 1..211: note = tr|G2I226|G2I226_KOMMN 7-carboxy-7-deazaguanine synthase OS=Komagataeibacter medellinensis (strain NBRC 3288 / BCRC 11682 / LMG 1693 / Kondo 51) OX=634177 GN=queE; PE = 3 SV=1
MSYTVKEIFPTLQGEGAHAGRTAVFCRFAGCNLWSGLERDRAQAACRFCDTDFIGTDGPGGGRFTTADTLADAIATHWPAPDRKAAFVVFTGGEPLLQLDGALVAAMHARGFEIAVETNGTLPAPAGIDWICVSPKAGTPLVQTHGHELKLVYPQPDLLPEQVAGLDFRQFWLQPMDNAARDYNTRATVDYCLHHPQWRLSLQTHKLIGIP

SEQ ID NO: 30897 - protein, 211 aa, unidentified
  source 1..211: note = Komagataeibacter nataicola
  REGION 1..211: note = tr|A0A1U9RNK5|A0A1U9RNK5_9PROT 7-carboxy-7-deazaguanine synthase OS=Komagataeibacter nataicola OX=265960 GN=queE PE=3 SV=1
MSYTVKEIFPTLQGEGAQTGRTAVFCRFAGCNLWSGLERDRAQATCQFCDTDFIGTDGTGGGRFADAGALADAIAAQWPGPDAARAFVVFTGGEPLLQLDATLIAAVQARGFEVAVETNGTLPAPAGIDWLCVSPKAGAKLVQKSGHELKLVYPQPDLQPADVAGLDFEQFWLQPMDDARRNQNTAAAVDYCMRHPQWRLSLQTHKLIGIP

SEQ ID NO: 30898 - protein, 211 aa, unidentified
  source 1..211: note = Komagataeibacter oboediens
  REGION 1..211: note = tr|A0A318QWN2|A0A318QWN2_9PROT 7-carboxy-7-deazaguanine synthase OS=Komagataeibacter oboediens OX=65958 GN=queE PE=3 SV=1
MSYTVKEIFPTLQGEGAQAGRTAVFCRFTGCNLWSGLERDRERATCRFCDTDFIGTDGAGGGRFATPDDLADAIAQQWPAPDRDAAFVVFTGGEPLLQLDDALVAAVHARGFEIAVETNGTLPAPDGIDWICVSPKSGAPLVQTRGHELKLVFPQPDLMPDLVAGLDFRQFWLQPMDNARSTQNTVDAVTYCMHHPQWRLSLQTHKLIGIP

SEQ ID NO: 30899 - protein, 211 aa, unidentified
  source 1..211: note = Komagataeibacter pomaceti
  REGION 1..211: note = tr|A0A318QAJ8|A0A318QAJ8_9PROT 7-carboxy-7-deazaguanine synthase OS=Komagataeibacter pomaceti OX=2021998 GN=queE PE=3 SV=1
MSYTVKEIFPTLQGEGGQAGRAAVFCRFAGCNLWSGREEDRDGATCRFCDTDFIGTDGTGGGRFASADALADAIAAAWTATSRDEAFVVFTGGEPLLQLDAALIAAMHERGFSIAVETNGTVPAPDGIDWICVSPKAGAPLVQTSGHELKLVFPQDGLMPEQVAGLDFRQYWLQPMDGPARVENTARAVEYCMAHPRWRLSLQTHKLIGIP

SEQ ID NO: 30900 - protein, 211 aa, unidentified; identical to SEQ ID NO: 30409
  source 1..211: note = Komagataeibacter rhaeticus
  REGION 1..211: note = tr|A0A181C965|A0A181C965_9PROT 7-carboxy-7-deazaguanine synthase OS=Komagataeibacter rhaeticus OX=215221 GN=queE PE=3 SV=1

SEQ ID NO: 30901 - protein, 211 aa, unidentified
  source 1..211: note = Komagataeibacter rhaeticus
  REGION 1..211: note = tr|A0A070AA30|A0A070AA30_9PROT 7-carboxy-7-deazaguanine synthase OS=Komagataeibacter rhaeticus AF1 OX=1432055 GN=queE PE=3 SV=1
MSYTVKEIFPTLQGEGAHAGRTAVFCRFTGCNLWSGLERDRARATCRFCDTDFIGTDGAGGGRFASAGLLADAIAAHWPTPDRKAAFVVFTGGEPLLQLDDALITAVHARGFEIAVETNGTLRAPGGIDWICVSPKAGAPLVQTSGHELKLVYPQPDLLPGQVAGLDFSQFWLQPMDNAARDHNTRAAVDYCLHHPQWRLSLQTHKLIGIP

SEQ ID NO: 30902 - protein, 211 aa, unidentified
  source 1..211: note = Komagataeibacter saccharivorans
  REGION 1..211: note = tr|A0A347W802|A0A347W802_9PROT 7-carboxy-7-deazaguanine synthase OS=Komagataeibacter saccharivorans OX=265959 GN=queE PE=3 SV=1
MSYTVKEIFPTLQGEGAQAGRTAVFCRFAGCNLWSGLERDRAQATCRFCDTDFIGTDGVNGGRFADAAQLADAISRAWPVPDTGPAFVVFTGGEPLLQLDDALIAAMHARGFEIAVETNGTLPAPTGIDWVCVSPKAGAPLVQKSGDELKLVYPQPDLLPEQVADLNFRQFWLQPMDNAERNHNTAAAVDYCMHHPQWRLSLQTHKLIGIP

SEQ ID NO: 30903 - protein, 211 aa, unidentified
  source 1..211: note = Komagataeibacter sp.
  REGION 1..211: note = tr|A0A4P5NUS5|A0A4P5NUS5_9PROT 7-carboxy-7-deazaguanine synthase OS=Komagataeibacter sp. MSKU15 OX=1932664 GN=queE PE=3 SV=1
MSYTVKEIFPTLQGEGAQAGRTAVFCRFTGCNLWSGLERDRDRATCRFCDTDFIGTDGPGGGRFADADHLADAIAAQWPARDRKGAFVVLTGGEPLLQLDDALIAALHARGFEIAVETNGTMAAPDGIDWICVSPKAGADLVQTHGHELKLVYPQPDLLPDQVAGLDFQQFWLQPMDNANRARNTTDAVTYCMYHPQWRLSLQTHKLIGIP

SEQ ID NO: 30904 - protein, 211 aa, unidentified; identical to SEQ ID NO: 30903
  source 1..211: note = Komagataeibacter sp.
  REGION 1..211: note = tr|A0A4P5NKB1|A0A4P5NKB1_9PROT 7-carboxy-7-deazaguanine synthase OS=Komagataeibacter sp. MSKU9 OX=1932662 GN=queE PE=3 SV=1

SEQ ID NO: 30905 - protein, 211 aa, unidentified
  source 1..211: note = Komagataeibacter sucrofermentans
  REGION 1..211: note = tr|A0A318QHY8|A0A318QHY8_9PROT 7-carboxy-7-deazaguanine synthase OS=Komagataeibacter sucrofermentans OX=1053551 GN=queE PE=3 SV=1
MSYTVKEIFPTLQGEGAQAGRTAVFCRFAGCNLWSGLERDRAKAICQFCDTDFIGTDGTGGGRFADADALADAIAAQWPGPDAARAFVVFTGGEPLLQLDAALIAAVQARGFEVAVETNGTLPAPAGIDWLCVSPKAGAVLVQKSGHELKLVYPQPDLHPADVAGLDFRQFWLQPMDDARRNHNTAAAVDYCMRHPQWRLSLQTHKLIGIP

SEQ ID NO: 30906 - protein, 211 aa, unidentified
  source 1..211: note = Komagataeibacter swingsii
  REGION 1..211: note = tr|A0A2V4RLM3|A0A2V4RLM3_9PROT 7-carboxy-7-deazaguanine synthase OS=Komagataeibacter swingsii OX=215220 GN=queE PE=3 SV=1
MSYTVKEIFPTLQGEGAQAGRTAVFCRFAGCNLWSGLERDRERATCRFCDTDFIGTDGPGGGRFADADQLADAIAARWPGPDRKAAFVVLTGGEPLLQLDDALVAALHARGFEIAVETNGTVAAPEGIDWICVSPKAGADLVQTRGHELKLVYPQPDLPPDQVAGLDFQQFWLQPMDNADRARNTADAVTYCMRHPQWRLSLQTHKLIGIP

SEQ ID NO: 30907 - protein, 211 aa, unidentified; identical to SEQ ID NO: 30409
  source 1..211: note = Komagataeibacter xylinus
  REGION 1..211: note = tr|A0A2D3HCI4|A0A2D3HCI4_KOMXY 7-carboxy-7-deazaguanine synthase OS=Komagataeibacter xylinus OX=28448 GN=queE PE=3 SV=1

SEQ ID NO: 30908 - protein, 211 aa, unidentified
  source 1..211: note = Komagataeibacter xylinus
  REGION 1..211: note = tr|A0A143WGN8|A0A143WGN8_KOMXY 7-carboxy-7-deazaguanine synthase OS=Komagataeibacter xylinus OX=28448 GN=queE PE=3 SV=1
MSYTVKEIFPTLQGEGSQAGRAAVFCRFAGCNLWSGREIDRDDATCRFCDTDFIGTDGMGGGRFADAASLADAIAAAWPAASRRDAFVVFTGGEPLLQLDAALVAAMHARGFFIAVETNGTIRAPDGIDWICMSPKAGAPLVQTSGHELKLVFPQPDLMPEQVAGLDFAQFWLQPMDGPERVSNTSRAVEYCMAHPQWRLSLQTHKLIGIP

SEQ ID NO: 30909 - protein, 253 aa, Kordia algicida
  REGION 1..253: note = tr|A9DMX1|A9DMX1_9FLAO 7-carboxy-7-deazaguanine synthase OS=Kordia algicida OT-1 OX=391587 GN=obgE PE=3; SV = 1
MTKLKIANLNGKPEIFHSIQGEGKNLGQPSVFIRTSLCNLHCIWCDTDYTWNWEKTRFAHVKDSDPLYEKYKMDEMIISLTLEEIYNEVAKSGCKNIVLTGGEPMMQLQELSALMKFFNTKATDYFFEIETNGTLLPDATFDALIDQYNVSPKLANSNNPKKLREKPEAYQYFSKNEKAVFKFVISSENDLTEVLEICKNYNIPKQKVYLMPEGTNPEALQKKQQWLIEICKKYQFNYTDRLHVHIYGDKRGV

SEQ ID NO: 30910 - protein, 253 aa, Kordia periserrulae
  REGION 1..253: note = tr|A0A2T6C5L6|A0A2T6C5L6_9FLAO 7-carboxy-7-deazaguanine synthase OS=Kordia periserrulae; OX = 701523 GN=queE PE=3 SV=1
MVKLKIANLDGKPEIFHSIQGEGKNMGQPSVFIRTSLCNLHCIWCDTDYTWNWEKTRFTHVKDADPTYTKYKMDDMIISLTLEEIYAEVAKTGCKNIVLTGGEPMMQLQGISALMEYFNTKADDYFFEIETNGTLLPDATFEALIDQYNVSPKLENSNNPKKLREKPEVYQYFATNEKAVFKFVIASENDLTEVLTICKNYQIPNEKVYLMPEGTNPEALKQKQQWLIEVCKKYQFHYTDRLHVHIYGDKRGV

SEQ ID NO: 30911 - protein, 209 aa, Kordia sp.
  REGION 1..209: note = tr|A0A2G2KGX6|A0A2G2KGX6_9FLAO 7-carboxy-7-deazaguanine synthase OS=Kordia sp. OX=1965332; GN = queE PE=3 SV=1
MQKEIKELVGKGEMLPLMEEFYTIQGEGFYKGTAAYFIRIGGCDVGCHWCDVKESWDANLHPPTDTIQIANKAAEYSDTIVVTGGEPLMWNMKPLTDALKANGLKTHIETSGAYKLSGEWDWICLSPKKTKLPTQEVHDAAHELKVIIYNKSDFKFAEEQAAKVNDNCMLFMQPEWSKKDEMIPLMVDYVMKNPKWKMSLQTHKYMNIP

SEQ ID NO: 30912 - protein, 253 aa, Kordia sp.
  REGION 1..253: note = tr|A0A501I8Y5|A0A501I8Y5_9FLAO 7-carboxy-7-deazaguanine synthase OS=Kordia sp. TARA_039_SRF OX=2530203 GN=queE PE=3 SV=1
MVKLKIANLDGKPEIFHSIQGEGKNMGQPSVFIRTSLCNLHCIWCDTDYTWNWEKTRFAHVKDADPTYTKYKMDEMIISLTLEEIYVEVAKTGCKNIVLTGGEPMMQLQELSALIEYFNTKADDYFFEIETNGTLLPDTTFEALIDQYNVSPKLENSNNPKKLREKPEVYRYFAANEKAVFKFVIASENDLTEVLTICKNYQIPNEKVYLMPEGTNPEALQQKQQWLIEVCKKHQFNYTDRLHVHIYGDKRGV

SEQ ID NO: 30913 - protein, 213 aa, unidentified
  source 1..213: note = Kordiimonadales bacterium
  REGION 1..213: note = tr|A0A5A7NCG4|A0A5A7NCG4_9PROT 7-carboxy-7-deazaguanine synthase OS=Kordiimonadales bacterium JCM 17846 OX=1236968 GN=queE PE=3 SV=1
MTYSVKEIFYTLQGEGANAGRAAVFCRFAGCNLWSGREADRDAAICRFCDTDFVGTDGPGGGKFKNAQDLAQQVALHWPHGVLPGVRPLVVCTGGEPLLQMDPPLIDALHQAGFEIAVETNGTLLPPDGIDWVCVSPKADAELLLRRGDELKLVYPQKGGMPDRYADLDFRHFFLQPMDCPQQAAHMKAAADYCMGHPQWRISLQTHKLIGIA

SEQ ID NO: 30914 - protein, 213 aa, unidentified
  source 1..213: note = Kordiimonadales bacterium
  REGION 1..213: note = tr|A0A5A7MRJ5|A0A5A7MRJ5_9PROT 7-carboxy-7-deazaguanine synthase OS=Kordiimonadales bacterium JCM 17844 OX=1236966 GN=queE PE=3 SV=1
MTYSVKEIFYTLQGEGANSGRAAVFCRFSGCNLWTGREKDRTNAICQFCDTDFVGTDGSGGGKFKTAQDLADAVAKTWPHQEQPNARPLVVCTGGEPLLQLDASLIDALHQAGFEIAVETNGTQAAPEGLDWICVSPKAGAELVLTTGDELKLVYPQSGAEPERYAGLSFQHFFLQPMDNPQREANTSAAVDYCMRHPQWRLCLQTHKYVGID

SEQ ID NO: 30915 - protein, 210 aa, Kordiimonas lacus
  REGION 1..210: note = tr|A0A1G6VPK1|A0A1G6VPK1_9PROT 7-carboxy-7-deazaguanine synthase OS=Kordiimonas lacus; OX = 637679 GN=queE PE=3 SV=1
MVYTVKEMFYTLQGEGAQAGRPAVFCRFAGCNLWTGLERDRAKAICQFCDTDFVGTDGEGGGKFKTAADLASAVKSLWLGKSGKPLVVCTGGEPLLQLDGAAVEAFHDAGFEIAVESNGTVEPPEGIDWLCISPKIGSEMIVKGGQELKLVYPQEGGDPAQFEGLDFEHFFLQPMDCDVQAENTAKAVDYCKAHPQWRLSLQTHKFIDIP

SEQ ID NO: 30916 - protein, 222 aa, Kordiimonas sp.
  REGION 1..222: note = tr|A0A2E1CXS5|A0A2E1CXS5_9PROT 7-carboxy-7-deazaguanine synthase OS=Kordiimonas sp.; OX = 1970157 GN=queE PE=3 SV=1
MNNHNSYSIKEAFYTLQGEGAQSGRAAVFCRFSGCNLWSGRHEDRKNAICQFCDTDFVGTDGLNGGKYTAERLSQLIQDIWLQHTHNDTGKPYVVFTGGEPLLQLDDTLINQCKKLGFEIAIESNGTCPVPVGVDWVCISPKAGTDLVVFRGDELKLVYPQSDALPELYADLDFKHFFLQPKAPLNDDADIAAPHTKEALEYCLAHPQWRLSLQTHKLLDIP

SEQ ID NO: 30917 - protein, 226 aa, unidentified
  source 1..226: note = Koribacter versatilis
  REGION 1..226: note = sp|Q1IHK7|QUEE_KORVE 7-carboxy-7-deazaguanine synthase OS=Koribacter versatilis (strain Ellin345); OX = 204669 GN=queE PE=3 SV=1
MQITEIYRSLQGESSYTGIPCIFVRLTACNLRCAWCDSEYTFKGGRKMSEDEIFAEVQKLAPGGLVEITGGEPLLQERELVPFMERLVASGYKVLIETSGERPLANVPQDVVKIVDVKCPASGEGGSFRIENLDALTPHDEIKFVISDRADYEFAREFTRQHGLENKVSSVIFSPAFRKDARGTRDASHCLVDPQDLANWVLEDQLDVRLGLQTHKFIWTPETKGV

SEQ ID NO: 30918 - protein, 223 aa, unidentified
  source 1..223: note = Kosakonia arachidis
  REGION 1..223: note = tr|A0A1I6XKF4|A0A1I6XKF4_9ENTR 7-carboxy-7-deazaguanine synthase OS=Kosakonia arachidis; OX = 551989 GN=queE PE=3 SV=1
MQYPINEMFQTLQGEGYFTGVPAIFIRLQGCPVGCAWCDTKHTWDKLADREVSLFSILAKTKESDKWGAASSEDLLAIIARQGWTARHVVITGGEPCIHDLTSLTSLLELNGFSCQIETSGTHEVRASHSTWVTVSPKVNMRGGYDVLLQALERADEIKHPVGRMRDIEALDELLAQLTDDKPRVIALQPISQKEDATRLCIETCIARNWRLSMQTHKYLNIA

SEQ ID NO: 30919 - protein, 223 aa, unidentified
  source 1..223: note = Kosakonia cowanii
  REGION 1..223: note = tr|A0A3R5YT90|A0A3R5YT90_9ENTR 7-carboxy-7-deazaguanine synthase OS=Kosakonia cowanii; OX = 208223 GN=queE PE=3 SV=1
MQYPINEMFQTLQGEGYFTGVPAIFVRLQGCPVGCAWCDTKHTWDKLADREVSLYSILGKTKESDKWGAASSEDLLAIIERQGWTARHVVITGGEPCIHDLIPLTALLEKHGFSCQIETSGTHEVRTSHSTWVTVSPKVNMRGGYDVLQQALERADEIKHPVGRMRDIEALDELLAQLHDQKQRVIALQPISQKEDATRLCIETCIARNWRLSMQTHKYLNIA

SEQ ID NO: 30920 - protein, 223 aa, unidentified
  source 1..223: note = Kosakonia oryzae
  REGION 1..223: note = tr|A0A1T5G1T6|A0A1T5G1T6_9ENTR 7-carboxy-7-deazaguanine synthase OS=Kosakonia oryzae; OX = 497725 GN=queE PE=3 SV=1
MQYPINEMFQTLQGEGYFTGVPAIFIRLQGCPVGCAWCDTKHTWDKLADREVSLFSILAKTKESDKWGAASSEDLLAIIARQGWTARHVVITGGEPCIHDLTPLTSLLELNGFSCQIETSGTHEVRASHSTWVTVSPKVNMRGGYDVLLSALERADEIKHPVGRMRDIEALDELLAQLTDDKPRVIALQPISQKEDATRLCIETCIARNWRLSMQTHKYLNIA

SEQ ID NO: 30921 - protein, 223 aa, unidentified
  source 1..223: note = Kosakonia oryzendophytica
  REGION 1..223: note = tr|A0A1C4AVC8|A0A1C4AVC8_9ENTR 7-carboxy-7-deazaguanine synthase OS=Kosakonia oryzendophytica OX=1005665 GN=queE PE=3 SV=1
MQYPINEMFQTLQGEGYFTGVPAIFIRLQGCPVGCAWCDTKHTWDKLADREVSLFSILAKTKESDKWGAANSEDLLAIIQRQGWTARHVVITGGEPCIHDLIPLTATLEKNGFSCQIETSGTHEVRASHTTWVTVSPKVNMRGGYEVLQQALERADEIKHPVGRLRDIEALDTLLSQLADDKHRVIALQPISQKEDATRLCIETCIARNWRLSMQTHKYLNIA

SEQ ID NO: 30922 - protein, 223 aa, unidentified
  source 1..223: note = Kosakonia oryziphila
  REGION 1..223: note = tr|A0A1C4DTF4|A0A1C4DTF4_9ENTR 7-carboxy-7-deazaguanine synthase OS=Kosakonia oryziphila; OX = 1005667 GN=queE PE=3 SV=1
MQYPINEMFQTLQGEGYFTGVPAIFIRLQGCPVGCAWCDTKHTWDKLADREVSLFSILAKTKESDKWGAASSEDLLAIIARQGWTARHVVITGGEPCIHDLTSLTSLLELNGFSCQIETSGTHEVRVSHSAWVTVSPKVNMRGGYDVLLQALERADEIKHPVGRMRDIEALDELLAKLTDDKLRVIALQPISQKEDATRLCIETCIARNWRLSMQTHKYLNIA

SEQ ID NO: 30923 - protein, 223 aa, unidentified; identical to SEQ ID NO: 30920
  source 1..223: note = Kosakonia radicincitans
  REGION 1..223: note = tr|A0A1V0LIL1|A0A1V0LIL1_9ENTR 7-carboxy-7-deazaguanine synthase OS=Kosakonia radicincitans DSM 16656 OX=1177180 GN=queE PE=3 SV=1

SEQ ID NO: 30924 - protein, 223 aa, unidentified; identical to SEQ ID NO: 30920
  source 1..223: note = Kosakonia radicincitans
  REGION 1..223: note = tr|A0A5E8BFZ9|A0A5E8BFZ9_9ENTR 7-carboxy-7-deazaguanine synthase OS=Kosakonia radicincitans OX=283686 GN=queE PE=3 SV=1

SEQ ID NO: 30925 - protein, 223 aa, unidentified
  source 1..223: note = Kosakonia sp.
  REGION 1..223: note = tr|A0A3G9BXS0|A0A3G9BXS0_9ENTR 7-carboxy-7-deazaguanine synthase OS=Kosakonia sp. CCTCC M2018092 OX=2492396 GN=queE PE=3 SV=1
MQYPINEMFQTLQGEGYFTGVPAIFVRLQGCPVGCAWCDTKHTWDKLADREVSLYSILAKTKESDKWGAASSEDLLAIIERQGWTARHVVITGGEPCIHDLIPLTALLEKHGFSCQIETSGTHEVRTSHSTWVTVSPKVNMRGGYDVLQQALERADEIKHPVGRMRDIEALDELLAQLHDQKQRVIALQPISQKEDATRLCIETCIARNWRLSMQTHKYLNIA

SEQ ID NO: 30926 - protein, 223 aa, unidentified
  source 1..223: note = Kosakonia sp.
  REGION 1..223: note = tr|A0A4R0H796|A0A4R0H796_9ENTR 7-carboxy-7-deazaguanine synthase OS=Kosakonia sp. WCHEs120001 OX=2529380 GN=queE PE=3 SV=1
MQYPINEMFQTLQGEGYFTGVPAIFIRLQGCPVGCAWCDTKHTWDKLEDREVSLYSILAKTKESDKWGAASSEDLLAIIQRQGWTARHVVITGGEPCIHDLTPLTMLLEHNGFSCQIETSGTHDVRTSHATWVTVSPKVNMRGGYDVLQQALERADEIKHPVGRLRDIEALDELLAQLHDDKQRVIALQPISQKEDATRLCIETCIARNWRLSMQTHKYLNIA

SEQ ID NO: 30927 - protein, 213 aa, Kozakia baliensis
  REGION 1..213: note = tr|A0A1D8UXF1|A0A1D8UXF1_9PROT 7-carboxy-7-deazaguanine synthase OS=Kozakia baliensis; OX = 153496 GN=queE PE=3 SV=1
MSYAVKEMFATLQGEGAQTGRASVFCRFAGCNLWSGREQDRATASCTFCDTDFVGTDGEGGGKFATAQELADAIAATWRAQAGDAPHRYVVFTGGEPLLQLDETLIDAVHEASFEVAVETNGTVLAPLGVDWVCVSPKPNSEIVQRHGQELKLVYPQPELPPEMFESYDFEHFWLQPMDGPERVSHTQAAVEYCLRHPRWRLSLQTHKLIGIP

SEQ ID NO: 30928 - protein, 216 aa, Kozakia baliensis
  REGION 1..216: note = tr|A0A511GP24|A0A511GP24_9PROT 7-carboxy-7-deazaguanine synthase OS=Kozakia baliensis; OX = 153496 GN=queE PE=3 SV=1
MRGMSYAVKEMFATLQGEGAQTGRASVFCRFAGCNLWSGREQDRATASCTFCDTDFVGTDGEGGGKFATAQELADAIAATWRAQAGDAPHRYVVFTGGEPLLQLDETLIDAVHEASFEVAVETNGTVLAPLGVDWVCVSPKPNSEIVQRHGQELKLVYPQPELPPEMFESYDFEHFWLQPMDGPERVSHTQAAVEYCLRHPRWRLSLQTHKLIGIP

SEQ ID NO: 30929 - protein, 264 aa, Krasilnikovia cinnamomea
  REGION 1..264: note = tr|A0A4Q7ZKA6|A0A4Q7ZKA6_9ACTN 7-carboxy-7-deazaguanine synthase OS=Krasilnikovia cinnamomea OX=349313 GN=queE PE=3 SV=1
MMVTTKSELNLAVLDGGPEIFYTVQGEGASVGRPALFVRTSGCNLECSWCDTPYTWVFSSAKAAVHADGQLYSRRASQTRIAPADLAERIGSTGSTRIVLTGGEPMLQQKSLTEMLVNLKSTHPGVIVEVETNGTIEPRMYSILGRRTGMEVLVDQWNVSPKLSGARNSPGRALNPAALSRFGGLPNAVFKFVIAGEKDEADLLRLVGPANLGLQPARIWIMPEGRTPEEIRARLPRLAELCKVHRFNLTTRLHIEIWGDKQGV

SEQ ID NO: 30930 - protein, 211 aa, unidentified
  source 1..211: note = Krasilnikoviella flava
  REGION 1..211: note = tr|A0A1T5KRE3|A0A1T5KRE3_9MICO 7-carboxy-7-deazaguanine synthase OS=Krasilnikoviella flava OX=526729 GN=queE PE=3 SV=1
MSYKVKEIFYTLQGEGTHAGRPAVFCRFASCNLWTGHEKDRARAICQFCDTDFVGTDGPGGGKFVTPAELAAAVADKWPLESRANRMVVCTGGEPLLQLDEAAVDALHAEGFYVAVETNGTQAPPPGIDWLCVSPKIGAPLVIDGGHELKLVYPQDGGDPAQFEHLAFESFRLQPMDSPDVAENTKAAVGYCMAHPNWNLSMQTHKYLGIR

SEQ ID NO: 30931 - protein, 211 aa, Kribbella flavida
  REGION 1..211: note = tr|D2PYU3|D2PYU3_KRIFD 7-carboxy-7-deazaguanine synthase OS=Kribbella flavida (strain DSM 17836 / JCM 10339 / NBRC 14399) OX=479435 GN=queE PE=3 SV=1
MSYKVKEIFYTLQGEGSHAGRPAVFCRFASCNLWTGREKDRARAICSFCDTDFVGTDGPGGGKFASAEDLARAVEDAWPHDGHDQRMVVCTGGEPLLQLDADAVSALHERGFYVAVETNGTQIPPQGLDWLCVSPKIGAELIVTSGDELKLVYPQAGGDPAQFEHLEFEHFRLQPMDSPDRQQNTAAAVEYCLKHPRWQLSLQTHKYLGIP

SEQ ID NO: 30932 - protein, 210 aa, Kribbella sp.
  REGION 1..210: note = tr|A0A4R0IRA6|A0A4R0IRA6_9ACTN 7-carboxy-7-deazaguanine synthase OS=Kribbella sp. YM55; OX = 1572660 GN=queE PE=3 SV=1
MYRVKEIFYTLQGEGAHAGRPAVFCRFTGCNLWTGHEKDRGRAVCTFCDTDFVGTDGSGGGRFRTAADLAAAVAAFWPPAGGGERYVVCTGGEPLLQLDRAAVDALHDVGFTVAVETNGTRAAPPGIDWICVSPKSTAELVLTSGDELKLVYPQLDAPPERYESLDFRRFSLQPMDGPDTTGNTRLALEYCLTHPRWRLSLQTHKIVGIR

SEQ ID NO: 30933 - protein, 211 aa, Kribbella sp.
  REGION 1..211: note = tr|A0A4U3M135|A0A4U3M135_9ACTN 7-carboxy-7-deazaguanine synthase OS=Kribbella sp. NEAU-THZ 27 OX=2575441 GN=queE PE=3 SV=1
MTYKVKEIFYTLQGEGTHAGRPAVFCRFSSCNLWTGREKDRDRAICKFCDTDFVGTDGEGGGKFRDADSLAEAISSKWPSVSGGQPMVVFTGGEPLLQLDDVAVEALKTRGFYVAVETNGTINPPNGIDWLCVSPKIGSELVVHRGQELKFVIPQADVDPISFEHLDFTSFRVQPMDGPDLAVNTELAVKFCMENPRWQLSLQTHKYLGIP

SEQ ID NO: 30934 - protein, 232 aa, Kriegella aquimaris
  REGION 1..232: note = tr|A0A1G9W228|A0A1G9W228_9FLAO 7-carboxy-7-deazaguanine synthase OS=Kriegella aquimaris; OX = 192904 GN=queE PE=3 SV=1
MHRIELAGWNLKFVLCTTYLCAMVKEDVLTLVDKGVMLPLMEEFYTIQGEGFHKGTAAYFVRIGGCDVGCHWCDVKESWNAETHPPTAVENIVENAAKYSDTIVITGGEPLTWDMGPLTSALKAKNLKIHIETSGAYALTGIWDWICLSPKKNKLPEGKIYDKAHELKVIVYNKHDLIFAEEQAAKVNGDCILYLQPEWSVRDKVTPLIVDYVMQNPKWKVSLQTHKYLNIP

SEQ ID NO: 30935 - protein, 242 aa, Kroppenstedtia eburnea
  REGION 1..242: note = tr|A0A1N7Q3D8|A0A1N7Q3D8_9BACL 7-carboxy-7-deazaguanine synthase OS=Kroppenstedtia eburnea OX=714067 GN=queE PE=3 SV=1
MNNWELPQPAEYRAWKLPMVEIFETVEGEGNGAGYPTVFIRVFHCNLRCTWCDTPYSYAPARPEFEATIEEILEWVRRYPSRRICLTGGEPLMHREKSAALLAALADLNQVEDVHVETNGAIDLAPFDRLRKEGGKQREKIRFIMDYKLPASGEEHRMVRDNFRVLTDRDEVKFVIGDQEDFRAAVRVMQECHREGQILFSPVFETLPPRKLVEWVLAEPLPQVKVSLQLHKWIWDPAERGV

SEQ ID NO: 30936 - protein, 247 aa, Ktedonobacter racemifer
  REGION 1..247: note = tr|D6TZN1|D6TZN1_9CHLR 7-carboxy-7-deazaguanine synthase OS=Ktedonobacter racemifer DSM 44963 OX=485913; GN = queE PE=3 SV=1
MSAKDHIQISELFGCTIQGEGALIGKPTVFVRTGGCDYRCQRCDTLYAVLPEHRGEWQQMTTQEVFAQVRELAHNRPILVTLSGGNPAMQPLEELLDLGHTEGYTFAIETQGSIAQPWFAKLDYLTLSPKAPGMQNPQPTNWERLDRCIAYARTGHNGKQPAICLKIVIFDEEDYQYAKHVAERYSDIPLYLQAGNHTPPHLANEIDINGILSRMDWLIQRVVEDQWYEVTILPQLHTLLWGNKRGV

SEQ ID NO: 30937 - protein, 231 aa, Ktedonobacter sp.
  REGION 1..231: note = tr|A0A1Q6YYW7|A0A1Q6YYW7_9CHLR 7-carboxy-7-deazaguanine synthase OS=Ktedonobacter sp. 13_2_20CM_53_11 OX=1805233 GN=queE PE=3 SV=1
MNVMEIYRSVQGEGTLMGVPTTFVRFFACNLRCSWCDTKYSWSVREGGTWESIPAQKLAERVHVLGAQHVVLTGGEPTLQKDLAQLARLLQEQGHHLTIETNTTIFPEEVVPLINLWSLSPKLPSAGENYLRHPVIERFLATLRPEQQQWKFVIRDDQDEQRLRSLLRRYPLFAEHKLPIILQPEGDTAIIDYPAALERLAERVHDPFWNTYHVRILPQLHVIIWGRRRWV

SEQ ID NO: 30938 - protein, 87 aa, Ktedonobacter sp.
  REGION 1..87: note = tr|A0A352XW29|A0A352XW29_9CHLR 7-carboxy-7-deazaguanine synthase QueE (Fragment); OS = Ktedonobacter sp. OX=1932716 GN=DDW33_11135 PE=4 SV=1
MNVMEIYRSVQGEGTLMGVPTTFVRFFACNLRCSWCDTKYSWSVSEGGTWESIPVQEVTERVQALGARHVVLTGGEPTLQKELAKLA

SEQ ID NO: 30939 - protein, 248 aa, unidentified
  source 1..248: note = Ktedonobacterales bacterium
  REGION 1..248: note = tr|A0A4P6K4N2|A0A4P6K4N2_9CHLR 7-carboxy-7-deazaguanine synthase OS=Ktedonobacterales bacterium SCAWS-G2 OX=2509675 GN=queE PE=3 SV=1
MKQAAAARLIPISEIFGPTIQGEGALIGRPTVFVRTGGCDYRCSWCDTLYAVLPQYRDEWQPMSSEAILTRVQHLSGGHPLLVTLSGGNPAMQPLAPLLEQGHAQGYTFALETQGSIAQPWFADLEVLTLSPKPPSSGQEMRWERLERCLTAACAGSGNAGPQICLKIVVFDEADYTYAREVAARYPELPLYLQAGNHTPPHLAQEIDTAGILSRLQWLMERVMADQWYEVRVLPQLHTLLWGNRRGV

SEQ ID NO: 30940 - protein, 211 aa, unidentified
  source 1..211: note = Kuenenia stuttgartiensis
  REGION 1..211: note = tr|Q1Q0J9|Q1Q0J9_KUEST 7-carboxy-7-deazaguanine synthase OS=Kuenenia stuttgartiensis OX=174633 GN=queE; PE = 3 SV=1
MLINEIFRSIQGETSFTGLPFVFVRLTGCNLRCSYCDTQYAYDEGNEMPISSIIDKIDSFGLKSVCVTGGEPLSNHNTPVLVRELLNRNYTVLVETNGSYDVSVLPEGTIRILDVKCPDSGMSHKMCWHNISHLTKKDEVKFVLSSRNDYEWARSMISKYHLTEIAHILMNPVYGMIQPSLIASWILEDHINVRLQLQMHKYIWGPETRGV

SEQ ID NO: 30941 - protein, 238 aa, Kurthia sp.
  REGION 1..238: note = tr|A0A433RYN3|A0A433RYN3_9BACL 7-carboxy-7-deazaguanine synthase OS=Kurthia sp. 3B1D; OX = 1562256 GN=queE PE=3 SV=1
MAKKVPVMEIFGPTIQGEGIVTGRKTMFVRTGGCDYSCAWCDSAFTWDGSERGQLMTGEMIWSKLMEIGTVDGIRNFNHITITGGNPALYNEPIAELITYAHAAGVEVGLETQGSRWQDWFLDVDDLTISPKPPSSTMRTDWVVLDSIIERLPNYSLKVVVFDEADFDYAEVVNARYKPSELYLSVGNDNSSEAGSIAERLLEKLEWLWQKVIATPSMNNAKPLPQLHALVWANKRGV

SEQ ID NO: 30942 - protein, 214 aa, Kushneria avicenniae
  REGION 1..214: note = tr|A0A1I1FQN1|A0A1I1FQN1_9GAMM 7-carboxy-7-deazaguanine synthase OS=Kushneria avicenniae; OX = 402385 GN=queE PE=3 SV=1
MYSVKEAFYTLQGEGGQAGRASVFCRFTGCNLWSGREQDRTNSICRFCDTDFIGTDGQNGGKFRQASELATHLEALWPAQAAYARPYVVFTGGEPLLQLDAVLINAMHARGFEIAVETNGTLPAPDGIDWLCVSPKGRADIKQRSGNELKLVYPQEDAMPERFMALEFDHFFLQPMDLAPRGEAGNTTARTVAYCMANPQWRLSLQTHKIAGID

SEQ ID NO: 30943 - protein, 214 aa, Kushneria indalinina
  REGION 1..214: note = tr|A0A3D9E0Z7|A0A3D9E0Z7_9GAMM 7-carboxy-7-deazaguanine synthase OS=Kushneria indalinina DSM 14324 OX=1122140 GN=queE PE=3 SV=1
MYSVKEAFYTLQGEGGQAGRASVFCRFTGCNLWSGREKDRANSICRFCDTDFIGTDGQNGGRFRQASDLAEHIKALWPQQTDHARPYVVFTGGEPLLQLDAALIEAVHERGFEIAVETNGTLPAPEGIDWLCVSPKGRAELKQLSGNELKLVYPQEDALPERFKALEFDHFFLQPMDLAPRGETGNTMADTVGYCMANPQWRLSLQTHKIAGID

SEQ ID NO: 30944 - protein, 214 aa, unidentified
  source 1..214: note = Kushneria konosiri
  REGION 1..214: note = tr|A0A2Z2HK24|A0A2Z2HK24_9GAMM 7-carboxy-7-deazaguanine synthase OS=Kushneria konosiri; OX = 698828 GN=queE PE=3 SV=1
MYSVKEAFYTLQGEGGQAGRASVFCRFTGCNLWSGREKDRDNSICRFCDTDFIGTDGQNGGRFQTAAELAEHIAALWPRQTDSARPYVVFTGGEPLLQLDSHLIDAMHERGFEIAVETNGTLPAPAGIDWLCVSPKGRAELKQLSGNELKLVYPQSEALPERFKALEFDHFFLQPMDLAPRGQTGNTMADTVAYCMENPQWRLSLQTHKIAGID

SEQ ID NO: 30945 - protein, 214 aa, Kushneria marisflavi
  REGION 1..214: note = tr|A0A240UL38|A0A240UL38_9GAMM 7-carboxy-7-deazaguanine synthase OS=Kushneria marisflavi; OX = 157779 GN=queE PE=3 SV=1
MYSVKEAFYTLQGEGGQAGRASVFCRFTGCNLWSGREKDRDNSICRFCDTDFIGTDGQNGGRFRTAIELAEHIAALWPRQTDSARPYVVFTGGEPLLQLDRRLIDAVHERGFEIAVETNGTLPAPEGIDWLCVSPKGRAELKQLSGNELKLVYPQSDALPERFKTLEFDHFFLQPMDLAPRGQTGNTMADTVAYCMENPQWRLSLQTHKIAGID

SEQ ID NO: 30946 - protein, 214 aa, unidentified
  source 1..214: note = Kushneria phyllosphaerae
  REGION 1..214: note = tr|A0A2R8CP50|A0A2R8CP50_9GAMM 7-carboxy-7-deazaguanine synthase OS=Kushneria phyllosphaerae OX=2100822 GN=queE PE=3 SV=1
MYSVKEAFYTLQGEGGQAGRASVFCRFTGCNLWSGREKDRASSICRFCDTDFIGTDGQNGGRFRTASDLADHIAALWPQSDDHARPYVVFTGGEPLLQLDSALIEVIHERGFEIAVETNGTLPAPEGIDWLCVSPKGRAELKQLSGNELKLVYPQADALPERFRALEFDHFFLQPMDLAPRGETGNTMADTVAYCMTNPQWRLSLQTHKIAGID

SEQ ID NO: 30947 - protein, 217 aa, Kushneria sinocarnis
  REGION 1..217: note = tr|A0A420WYH6|A0A420WYH6_9GAMM 7-carboxy-7-deazaguanine synthase OS=Kushneria sinocarnis; OX = 595502 GN=queE PE=3 SV=1
MYAIKEAFYTLQGEGAQAGRPSAFCRFAGCNLWSGREKDRERSICRFCDTDFVGTDGQNGGRFDTARALAEHLLALWPEARPDYTGGTPYVVFTGGEPLLQLDPDLIEAMHACGFEIGVETNGTLTAPEGIDWLCVSPKGVAELKQQSGQELKLVYPQEEAHPSRFEHLDFEHFYLQPMDLAPRGEQGNTMAATVDYCMTHPQWRLSLQIHKIAGID

SEQ ID NO: 30948 - protein, 217 aa, Kushneria sp.
  REGION 1..217: note = tr|A0A1S1NWV4|A0A1S1NWV4_9GAMM 7-carboxy-7-deazaguanine synthase OS=Kushneria sp. YCWA18; OX = 657387 GN=queE PE=3 SV=1
MYSVKEAFYTLQGEGAQAGRPSVFCRFAGCNLWSGREKDRERSICRFCDTDFVGIDGQNGGRFYSASALAEHLQALWPDDQPDRARGKPYVVFTGGEPLLQLDIDLIEAMHLCGFEIGVETNGTLPAPEGIDWLCVSPKGSARLRQLSGQELKLVYPQSDATPAQFEQLDFEHFYLQPMDLTPRGEQGETMAATVSYCMTHPQWRLSLQMHKIAGID

SEQ ID NO: 30949 - protein, 202 aa, Kutzneria albida
  REGION 1..202: note = tr|W5W9J8|W5W9J8_9PSEU 7-carboxy-7-deazaguanine synthase OS=Kutzneria albida DSM 43870 OX=1449976 GN=queE; PE = 3 SV=1
MSCRWCDTPYTWDWTGVGDSGIAHSPRAELHPMAWRAVLERLSGYAVPLVVISGGEPLSQQNRLLPLLHALTGTGHRVEIETNGTIEPLSELAALGVRFNVSPKLAHSGDPAARRLVPRALAALAAMPGTAFKFVCRSPEDLAEVADVVEHYGTTPVWIMPEGRTPEELSLRLAALGDAVIARGWNLTTRLHVAVWGDRRGK

SEQ ID NO: 30950 - protein, 235 aa, unidentified
  source 1..235: note = Kutzneria buriramensis
  REGION 1..235: note = tr|A0A3E0HK63|A0A3E0HK63_9PSEU 7-carboxy-7-deazaguanine synthase OS=Kutzneria buriramensis OX=1045776 GN=queE PE=3 SV=1
MDLVVNEIFGPTVQGEGRSLGRRCAFLRLGGCNLSCSWCDTPYTWDWTGAGDSGVAHDPRKELHRRSVEDVLAELVEFDTDLIVISGGEPLGQQERLIPLVTALVGRGKEIEIETNGTHAAHPELVAAGVRFNVSPKLSHSGDTRKRRIVPAALTSLSAVSGSTFKFVCRNTRDLDEVAELVSEFGLRSVWIMPIGRTADDVTKHMTELADAVVERGWNLTTRLHTLLWDDKRAV

SEQ ID NO: 30951 - protein, 218 aa, unidentified
  source 1..218: note = Kyrpidia spormannii
  REGION 1..218: note = tr|A0A2K8N447|A0A2K8N447_9BACL 7-carboxy-7-deazaguanine synthase OS=Kyrpidia spormannii; OX = 2055160 GN=queE PE=3 SV=1
MKLNELFFSIQGESSSMGLPTVFVRFTGCNLRCSYCDTTYAYFEGTRTTPEEIFRRIEEYGVRRVCLTGGEPLIQPREELQQLLDLLGGNNYEVSIETDGSIDIERVKLRPKQRFVLDIKVPSSDMHTYMDFDNLKRVVPERDEIKFVVGNEEDYLWSKEIIRRYEISPERGYRLLFSPVYGVLEPRTLAEWILQDEWDVRLQVQLHKWLWEPGKRGV

SEQ ID NO: 30952 - protein, 218 aa, unidentified
  source 1..218: note = Kyrpidia tusciae
  REGION 1..218: note = tr|D5WTQ6|D5WTQ6_KYRT2 7-carboxy-7-deazaguanine synthase OS=Kyrpidia tusciae (strain DSM 2912 / NBRC 15312 / T2) OX=562970 GN=queE PE=3 SV=1
MKLNELFFSIQGESSSMGLPTVFVRFTGCNLRCSYCDTTYAYFEGTRTTPEEIFRQIQEYGVRRVCLTGGEPLIQPREELQQLLDLLGGNNYEVSIETDGSIDIERVKLRPKQRFILDIKVPSSDMHTYMDFDNLKRIVPERDEIKFVVGNEEDYLWSKEIIRRYEISPERGYRLLFSPVYGVLEPRTLAEWILQDEWDVRLQVQLHKWLWEPEKRGV

SEQ ID NO: 30953 - protein, 217 aa, unidentified
  source 1..217: note = Labilibaculum antarcticum
  REGION 1..217: note = tr|A0A1Y1CF12|A0A1Y1CF12_9BACT 7-carboxy-7-deazaguanine synthase OS=Labilibaculum antarcticum OX=1717717 GN=queE PE=3 SV=1
MVKKNDLKDKYKEIFDKGTDLPLVEDFYTIQGEGYHTGKPAYFIRIGGCDIGCQWCDSKISWNPAEHRLISVEEVVRKAVESPAKAVVVTGGEPSLYNLEPLCTELKKHNIENFLETSGAYEISGEWDWICLSPKRNKLPVPTSYQKANELKVIVFDLEKDFEWAEELSKNVGDDCLLYLQSEWSQYVHNVKPIVEYVKNNPKWNISLQAHKFMRIP

SEQ ID NO: 30954 - protein, 211 aa, unidentified
  source 1..211: note = Labilibaculum filiforme
  REGION 1..211: note = tr|A0A2N3HZ29|A0A2N3HZ29_9BACT 7-carboxy-7-deazaguanine synthase OS=Labilibaculum filiforme OX=1940526 GN=queE PE=3 SV=1
MKDKYKEIFDKGTDLPLVEDFYTIQGEGYHTGKPAYFIRIGGCDIGCQWCDSKISWNPAEHRLISVEEVVRKAVESPAKAVVVTGGEPSLYNLEPLCTELKKHNIENFLETSGAYEITGEWDWICLSPKRNKLPVPSSYQKANELKVIIYDLEKDLEWAEELSKNVGDDCLLYLQSEWSRYVHNIKPVVEYVKNNPKWNISLQAHKFMRIP

SEQ ID NO: 30955 - protein, 211 aa, unidentified
  source 1..211: note = Labilibaculum manganireducens
  REGION 1..211: note = tr|A0A2N3ICM9|A0A2N3ICM9_9BACT 7-carboxy-7-deazaguanine synthase OS=Labilibaculum manganireducens OX=1940525 GN=queE PE=3 SV=1
MKDKYKEIFDKGTDLPLVEDFYTIQGEGYHTGKPAYFIRIGGCDIGCRWCDSKISWNPAEHRLISVEEVVRKAVESPAKAVVVTGGEPSLYNLEPLCTELKKHNIENFLETSGAYEISGEWDWICLSPKRNKLPVPSSYEKANELKVIIFDLEKDFEWAEELSKNVGDDCLLYLQSEWSQYVHNIKPIVEYVKNNPKWNISLQSHKFMRIP

SEQ ID NO: 30956 - protein, 225 aa, unidentified
  source 1..225: note = Labilithrix luteola
  REGION 1..225: note = tr|A0A0K1PUT3|A0A0K1PUT3_9DELT 7-carboxy-7-deazaguanine synthase OS=Labilithrix luteola; OX = 1391654 GN=queE PE=3 SV=1
MCYMQRALSKEDTLVIHEIYASIQGESTFAGLPCTFVRTTGCNLRCSWCDTTQAFYGGTRMPRTDVLAKALATGTKLVELTGGEPLLQPAVFRLMTELCDAGRTVLVETSGEADVSQVDPRVHKIMDLKAPGSGESKRNRWSNLEHIGPRDEIKFVLASREDYEWMRDAIRSRELPSRTPNLLASTVFGKLLPKQLVTWVLEDALPVRVQLQMHKYIWAPDTQGV

SEQ ID NO: 30957 - protein, 242 aa, Labrenzia aggregata
  REGION 1..242: note = tr|A0NZ71|A0NZ71_LABAI 7-carboxy-7-deazaguanine synthase OS=Labrenzia aggregata (strain ATCC 25650 / DSM 13394 / JCM 20685 / NBRC 16684 / NCIMB 2208 / IAM 12614); OX = 384765 GN=queE PE=3 SV=1
MSIEQIRVSEIFGPTIQGEGALIGQPTVFVRTGGCDYRCSWCDTLHAVDSAHRDEWCPMTPQAILMQVEILSGGNPLTVSLSGGNPAIQPLGGLITLGRKEGYRFALETQGSLAKDWFADLDVLTLSPKPPSSGMTTDWQRLAECVEAAGPETQTVLKVVVFDEADYAFARDVSDRYPHLSCFLQPGNHTPPAATDTDATIDMTGIMERMRWLVDRVTSDKWYAATVLPQLHTMIWGNLRGV

SEQ ID NO: 30958 - protein, 242 aa, Labrenzia aggregata
  REGION 1..242: note = tr|A0A0M6YA63|A0A0M6YA63_9RHOB 7-carboxy-7-deazaguanine synthase OS=Labrenzia aggregata; OX = 187304 GN=queE PE=3 SV=1
MSIEQIRVSEIFGPTIQGEGALIGQPTVFVRTGGCDYRCSWCDTLHAVDSAHRDEWCPMTPEAILMQVEILSGGNPLTVSLSGGNPAIQPLGGLIELGRKEGYRFALETQGSLAKDWFADLDVLTLSPKPPSSGMTTDWQRLAECVEAAGPETQTVLKVVVFDEADYAFARDVSDRYPHLSCFLQPGNHTPPAAADTDATIDMAGIMERMRWLVDRVTSDKWYAATVLPQLHTMIWGNLRGV

SEQ ID NO: 30959 - protein, 242 aa, Labrenzia alba
  REGION 1..242: note = tr|A0A0M6Z7C8|A0A0M6Z7C8_9RHOB 7-carboxy-7-deazaguanine synthase OS=Labrenzia alba; OX = 311410 GN=queE PE=3 SV=1
MNTQTIRVNEIFGPTIQGEGALIGQPTVFVRTGGCDYRCSWCDTLHAVDSAYRDDWHPMTPAAIMMQVEILSGHCPLTVSLSGGNPAIQPLGGLIDLGRKEGYRFALETQGSIARDWFRDLDVLTLSPKPPSSGMVTDWQKLAECVEAAGPSTQLALKVVIFDENDYAYAREIASRYPQQSLYLQPGNHTPPAPDQEDGVIDMAGIMDRMRWLIDRVTTDRLYSATVLPQLHTLIWGNLRGV

SEQ ID NO: 30960 - protein, 242 aa, Labrenzia alba
  REGION 1..242: note = tr|A0A0M6Z3C6|A0A0M6Z3C6_9RHOB 7-carboxy-7-deazaguanine synthase OS=Labrenzia alba; OX = 311410 GN=queE PE=3 SV=1
MTQNTIRVNEIFGPTIQGEGALIGQPTVFVRTGGCDYRCSWCDTLHAVESAYRDEWQPMTPEAIMMQVEILTGGRPLTVSLSGGNPAIQPLGYLIELGKNEGYRFALETQGSIARDWFEKLDVMTLSPKPPSSGMDMDWQRLADCVEAAGHKTKTVLKVVVFDDLDYVFARDVASRYPELQLFLQPGNHTPPSPEEENSTIDMAGVMDRMRWLVDKVTSDQLYSATVLPQLHTLIWGNLRGV

SEQ ID NO: 30961 - protein, 213 aa, Labrenzia alexandrii
  REGION 1..213: note = tr|A0A0M7AHF7|A0A0M7AHF7_9RHOB 7-carboxy-7-deazaguanine synthase OS=Labrenzia alexandrii; OX = 388408 GN=queE PE=3 SV=1
MRTGGCDYRCSWCDTLHAVDSAYRDDWHPMTPQAILMQIEILSGGKPLMVSLSGGNPAIQPLGSLIELGKREGYRFALETQGSIAKDWFAALDVLTLSPKPPSSGMDTDWQKLAECVEAAGSETQTVLKTVIFDDADYDYAKDLAARYPELPLYLQPGNHTPPSPATADAPIDMPGIMDRMRWLVDKVAGDRWYTPTVLPQLHTLIWGNLRGV

SEQ ID NO: 30962 - protein, 242 aa, Labrenzia alexandrii
  REGION 1..242: note = tr|A0A5E8H492|A0A5E8H492_LABAD 7-carboxy-7-deazaguanine synthase OS=Labrenzia alexandrii (strain DSM 17067 / NCIMB 14079 / DFL-11) OX=244592; GN = queE PE=3 SV=1
MSIGQIRVNEIFGPTIQGEGALIGQPTVFVRTGGCDYRCSWCDTLHAVDSAYRDDWHPMTPQAILMQIEILSGGKPLMVSLSGGNPAIQPLGSLIELGKREGYRFALETQGSIAKDWFAALDVLTLSPKPPSSGMDTDWQKLAECVEAAGSETQTVLKTVIFDDADYDYAKDLAARYPELPLYLQPGNHTPPSPATADAPIDMPGIMDRMRWLVDKVAGDRWYTPTVLPQLHTLIWGNLRGV

SEQ ID NO: 30963 - protein, 211 aa, Labrenzia marina
  REGION 1..211: note = tr|A0A2S3UYJ6|A0A2S3UYJ6_9RHOB 7-carboxy-7-deazaguanine synthase OS=Labrenzia marina; OX = 281252 GN=queE PE=3 SV=1
MTYSVKEIFYTLQGEGSNAGRAAVFCRFAGCNLWSGREADRASAICQFCDTDFVGVDGDGGGRFATANQLAASIAAKWVPTQNCRRFVVLTGGEPLLQVDALLIAALHEEGFEIAVETNGTVNPPEGIDWICVSPKAGTSLTLNYGNELKLVFPQTGVEPELFEALSFENFLLQPMDGPNLSENTQAAIAYCLANPRWQLSLQTHKQIGIP

SEQ ID NO: 30964 - protein, 242 aa, Labrenzia sp.
  REGION 1..242: note = tr|A0A222F875|A0A222F875_9RHOB 7-carboxy-7-deazaguanine synthase OS=Labrenzia sp. VG12; OX = 2021862 GN=queE PE=3 SV=1
MTQDLIRVNEIFGPTIQGEGALIGQPTVFVRTGGCDYRCAWCDTLHAVDSAYRDEWVPMSPQAILMQVEILSGGKPLMVSLSGGNPAIQPLGPLIEFGRREGYRFALETQGSLAREWFDRLDVLTLSPKPPSSGMATDWQKLAECVEAAGSDTQTVLKVVVFDEADYAFARDVSERYPELSCYLQPGNHTPSEAHETDSTIDMAGIMDRMRWLVDRVTTDKWYAATVLPQLHTMIWGNLRGV

SEQ ID NO: 30965 - protein, 235 aa, Labrenzia sp.
  REGION 1..235: note = tr|A0A163TYZ4|A0A163TYZ4_9RHOB 7-carboxy-7-deazaguanine synthase OS=Labrenzia sp. OB1; OX = 1561204 GN=queE PE=3 SV=1
MTLRIAEIFGPTIQGEGALIGEPTVFVRAGGCDYRCSWCDSPHAVESQYRHSWAPMEIDTVWAKVGKLSGGRPLTVSLSGGNPAIQNFGPLIAKGQAAGYRFACETQGSVARPWFSDLDTLVLSPKPPSSGELVDWEAFSSCRTMGTGARQQVMKIVIFDEIDYQWAREIHSQHSDLPLYLQPGNPEVDPATPVDLHVLAERLGWLTEKAMADGWFAPRILPQLHVLIWGNKRGV

SEQ ID NO: 30966 - protein, 255 aa, unidentified
  source 1..255: note = Labrenzia suaedae
  REGION 1..255: note = tr|A0A1M7N4M5|A0A1M7N4M5_9RHOB 7-carboxy-7-deazaguanine synthase OS=Labrenzia suaedae; OX = 735517 GN=queE PE=3 SV=1
MTALVLPAMHPVTLDATTIRISEIFGPTIQGEGALIGKPTVFVRTGGCDYRCSWCDTLHAVDSAYRHDWTPMTPEAIMMQVEILSGGQPITISLSGGNPAIQPLGDLIALGRQMGYRFALETQGSIAKDWFADLDILTLSPKPPSSGMETDLEALDACIAAAGINPRSVLKFVVFDDEDYAYARSIANRYRDLDVYLQPGNHTPPPPSETDALIDMDGIMTRMRWLIDKVGADRWFSATVLPQLHTLIWGNLRGV

SEQ ID NO: 30967 - protein, 211 aa, Labrys neptuniae
  REGION 1..211: note = tr|A0A5C1WIH6|A0A5C1WIH6_9RHIZ 7-carboxy-7-deazaguanine synthase OS=Labrys neptuniae; OX = 376174 GN=queE PE=3 SV=1
MTYAVKEIFYTLQGEGRNAGRAAVFCRFAGCNLWSGREADRATAICQFCDTDFVGMNGTGGGRFASAHDLACAISRTWTGGDDGQRLVVLTGGEPLLQVDADLVAALHEAGFEIAVETNGTLPPPPAIDWLCVSPKAGAPIVVGAGDELKFVYPQAGLEPGQFENLAFRHLLLQPMDGPEREANTAAAVAYCLANPRWRLTLQTHKMLGIP

SEQ ID NO: 30968 - protein, 238 aa, Laceyella sacchari
  REGION 1..238: note = tr|A0A4R4AHL1|A0A4R4AHL1_LACSH 7-carboxy-7-deazaguanine synthase OS=Laceyella sacchari; OX = 37482 GN=queE PE=3 SV=1
MPQAHQTIDEVKLPMVELFETVEGEGTQAGYPTTFVRVFNCNLRCTWCDTPYSYAPAKPEFFATIAEIVAEVKRYGHPRICLTGGEPLIHGEKSLMLIEALAQLEEVADIHIETNGAIHLAPFHAWREANPERGQKVRFVLDYKLPASGEQEKMIEENFTFLRDTDEVKFVIADDTDFDVAVEVVRQRMKRGVPLFSPVWESMPPARLVERMLAERLTQVKLNLQLHKVIWDPNARGV

SEQ ID NO: 30969 - protein, 224 aa, Laceyella sacchari
  REGION 1..224: note = tr|A0A2I7SXA6|A0A2I7SXA6_LACSH 7-carboxy-7-deazaguanine synthase OS=Laceyella sacchari; OX = 37482 GN=queE PE=3 SV=1
MVELFETVEGEGTQAGYPTTFVRVFNCNLRCTWCDTPYSYAPAKPEFFATIAEIVAEVKRYGHPRICLTGGEPLIYGEKSLLLIEALAQLEEVVDIHIETNGAIHLAPFHAWREANPEWGQKVRFVLDYKLPASGEQDKMIEENFTFLRDTDEVKFVIADDTDFDVAVEVVRRRMERGVPLFSPVWESMPPARLVERMLAERLTQVKLNLQLHKVIWDPNARGV

SEQ ID NO: 30970 - protein, 238 aa, Laceyella sediminis
  REGION 1..238: note = tr|A0A2T0YHX0|A0A2T0YHX0_9BACL 7-carboxy-7-deazaguanine synthase OS=Laceyella sediminis; OX = 573074 GN=queE PE=3 SV=1
MPQAHQTIDEVKIPMVELFETVEGEGTQAGYPTTFVRVFNCNLRCTWCDTPYSYAPAKPEFFATIAEIVAEVKRYGHPRICLTGGEPLIHGEKSLLLIEALAQLEEVADIHIETNGAIHLAPFHAWREANPEWGQKVRFVLDYKLPASGEQDKMIEENFTFLRDTDEVKFVIADDTDFDVAVEVVRQRIERGVPLFSPVWESMPPARLVERMLAERLTHVKLNLQLHKVIWDPNARGV

SEQ ID NO: 30971 - protein, 243 aa, Lachnobacterium bovis
  REGION 1..243: note = tr|A0A1H3LR26|A0A1H3LR26_9FIRM 7-carboxy-7-deazaguanine synthase OS=Lachnobacterium bovis DSM 14045 OX=1122142 GN=queE PE=3 SV=1
MENISSDIENITKEIKKEKSDTITYKVVEKFVSINGEGQKAGQLAIFIRFQGCNLNCVYCDTKWANQKEAKYHLMTAQQIIDYIKSTNVKNVTLTGGEPLRQENIMYLLEKLSLIENINVEIETNGSVSIAETKKIKNSPSITLDYKLPDSNMEKYMDLSNYDFLESKDTVKFVCSSINDLKKAKDIIEKYSLTSKCKVYLSSVFEKITPAEIVDFMKEHNMNDINLQLQMHKYIWDPNLKGV

SEQ ID NO: 30972 - protein, 234 aa, Lachnobacterium bovis
  REGION 1..234: note = tr|A0A1H9UM15|A0A1H9UM15_9FIRM 7-carboxy-7-deazaguanine synthase OS=Lachnobacterium bovis; OX = 140626 GN=queE PE=3 SV=1
MINNISSDVEVEKIKYKVVEKFVSINGEGQKAGQLAIFIRFQGCNLNCVYCDTKWANTNETKYELMSASQIVDYIKSTKVKNVTLTGGEPLRQENIIYLLKQLSLLENINVEIETNGSVNIAEVKKINNSPSITLDYKLPESTMEKYMDLTNYEYLEKKDTVKFVCSSIGDLNKAKEIIDKYNLTSKCKVYLSSVFEKITPAEIVEFMKENNMNDINLQLQMHKYIWDPNLKGV

SEQ ID NO: 30973 - protein, 218 aa, unidentified
  source 1..218: note = Lachnoclostridium sp.
  REGION 1..218: note = tr|A0A3B9K685|A0A3B9K685_9FIRM 7-carboxy-7-deazaguanine synthase OS=Lachnoclostridium sp.; OX = 2028282 GN=queE PE=3 SV=1
MRVVEKFVSINGEGQRAGEPAAFVRFQGCNLCCSWCDTKWANVPDCPYEEMSPAEVAAWADETGITNVTLTGGEPLLQKEMGELLPMLLADGKHRVEIETNGSVDIAPFCEKDRPAFTLDYKLPGSGCEARMNTANYGLLRSEDTVKFVIGSREDLERAKEIMEQYGLIGRCQVYLSPVFGQIEPAEMAEFLTEHRMNGVRMQIQIHKVIWDPEKRGV

SEQ ID NO: 30974 - protein, 227 aa, Lachnospira multipara
  REGION 1..227: note = tr|A0A1H5UG57|A0A1H5UG57_9FIRM 7-carboxy-7-deazaguanine synthase OS=Lachnospira multipara; OX = 28051 GN=queE PE=3 SV=1
MDINYESTFPLVEHFISINGEGRKAGQLALFIRLAGCNLDCSYCDTKWANKADVKFEKKTIREIVDIVKNSNCKNVTLTGGEPLLKKDVDQLIAAILELDDIRLEIETNGSQSIKKYDDWERRPVMTLDYKLASSGCEAAMNTENFNYLHKEDSVKFVSGSRADLERTLEIITKYDLTSKANCIISPVFGQIEPVEIVDFMKEHEMNDVFLQLQMHKIIWDPNKQGV

SEQ ID NO: 30975 - protein, 227 aa, Lachnospira pectinoschiza
  REGION 1..227: note = tr|A0A1G9WXS4|A0A1G9WXS4_9FIRM 7-carboxy-7-deazaguanine synthase OS=Lachnospira pectinoschiza OX=28052 GN=queE PE=3 SV=1
MDINYELTFPLVEHFISINGEGRRAGQLALFIRLAGCNLDCSYCDTKWANKADVKFEKKTIREIVDIVKNSNCKNVTLTGGEPLLKKDVDKLIAAILELDDIRLEIETNGSQPIKKYDDWKRRPVMTLDYKLASSGCEAAMDTENFNYLHKEDSVKFVSGSRADLERTLEIITKYDLTSKANCIISPVFGQIEPVEIVDFMKEHEMNDVFLQLQMHKIIWDPNKQGV

SEQ ID NO: 30976 - protein, 247 aa, Lachnospira pectinoschiza
  REGION 1..247: note = tr|A0A174G4E9|A0A174G4E9_9FIRM 7-carboxy-7-deazaguanine synthase OS=Lachnospira pectinoschiza OX=28052 GN=queE PE=3 SV=1
MSKQIFNVVEHFASINGEGVRAGELAVFVRFRGCNLDCSYCDTRWANDVNAKAAKMSVSDIVKAVEDAKIDNVTLTGGEPLIQAGIDELIAQLLISGRNVEIETNGSVDINKVRENVKDNLTTAMNGQVINDIYDKVNDEMERLSMTADYKLAGSNMEQYMKLDNFNNLQSQDTVKFVVSSEEDLKRALEIIRQYNLTEKCYVYFSPVFGKIEPVTIVDFMKDNLINGARVQLQLHKFIWSPDKKGV

SEQ ID NO: 30977 - protein, 222 aa, unidentified
  source 1..222: note = Lachnospiraceae bacterium
  REGION 1..222: note = tr|A0A1I2Q5A2|A0A1I2Q5A2_9FIRM 7-carboxy-7-deazaguanine synthase OS=Lachnospiraceae bacterium C7 OX=1792306 GN=queE PE=3 SV=1
MTKYKVVEKFVSINGEGQKAGQLAVFVRFCGCNLNCTYCDTKWANVPDAKFEYETADEIIKNIKDTKIKNVTLTGGEPLAQPGINELLEKLSEEKELSVEIETNGSKNIEELKKLKNTPSVTLDYKLAGSGMEKFMDVSNYEFLEQKDTVKFVCSNRVDLEKAKEIIDKYNLTSKCKVYLSAVFGKITPAEIVDFMKENTMNNVNLQLQMHKFIWDPNERGV

SEQ ID NO: 30978 - protein, 222 aa, unidentified
  source 1..222: note = Lachnospiraceae bacterium
  REGION 1..222: note = tr|A0A356DNG2|A0A356DNG2_9FIRM 7-carboxy-7-deazaguanine synthase OS=Lachnospiraceae bacterium OX=1898203 GN=queE PE=3 SV=1
MGKYKVVETFVSINGEATHAGELACFIRFAGCNLACGYCDTKWANEPQVPYKSMSAEEIYAYIKSCGVKNVTLTGGEPLIQPEIEWLITLLSADKALRVEIETNGSVDIAGYDARPENVCMTLDYKLPDSGMEQFMRTENYAWLKPQDAVKFVVSSTRDLETAKKIIETYDLCAKATVYLSSAFSAITPAQIVEYMIQENMKDVRLQLQMHKYIWDPEKKGV

SEQ ID NO: 30979 - protein, 222 aa, unidentified
  source 1..222: note = Lachnotalea glycerini
  REGION 1..222: note = tr|A0A255IRP1|A0A255IRP1_9FIRM 7-carboxy-7-deazaguanine synthase OS=Lachnotalea glycerini; OX = 1763509 GN=queE PE=3 SV=1
MSKYKVVEKFVSINGEGVLAGQLAVFIRFKGCNLNCSYCDTAWANQKDAAYTLMSDQQIYNYIKETGVKNVTLTGGEPLQNPNIIQLIQMLTKDTDLQVEIETNGSIDLSMFAAIDHAPSFTMDYKLASSMMESEMLVTNFKLLKKKDTVKFVVGNLQDLDRARDIITANQLMNQCHVYISTVYNKIDLVDVVNYMIKHSMNGVTLQLQMHKIIWEPNQRGV

SEQ ID NO: 30980 - protein, 214 aa, unidentified
  source 1..214: note = Lachnotalea sp.
  REGION 1..214: note = tr|A0A416EI84|A0A416EI84_9FIRM Peptidase C39 domain-containing protein OS=Lachnotalea sp. AF33-28; OX = 2292046 GN=DWZ56_12965 PE=4 SV=1
MVDKILYNLDQYPETLLRLLVKDEDTLDFVLGYPAKKGTVSANIDLTEEYKKGKIPLLLQWDQRWGYGEYGDGIIGLDGCGPVCLSMVAVGVLEDVSVTPDRVAQLAEKRGYIEDAGTSWDLMTEGARSLGLVAEELPLSENTVIETLKAGHPIICSMRKGDFTTTGHFIVLTGYEDGRITVNDPNSRKRSEKTWDFDTLQYQIKNLWSYTAGQ

SEQ ID NO: 30981 - protein, 64 aa, unidentified
  source 1..64: note = Lachnotalea sp.
  REGION 1..64: note = tr|A0A416ELS6|A0A416ELS6_9FIRM Uncharacterized protein OS=Lachnotalea sp. AF33-28 OX=2292046; GN = DWZ56_09710 PE=4 SV=1
MNKEPRTMQVADAVTASRAPENTPAMVKKIGKTTYKVHVHFSNTSTETMSDKIKRMLKNEIQQM

SEQ ID NO: 30982 - protein, 223 aa, Lacibacter cauensis
  REGION 1..223: note = tr|A0A562SCY8|A0A562SCY8_9BACT 7-carboxy-7-deazaguanine synthase OS=Lacibacter cauensis; OX = 510947 GN=queE PE=3 SV=1
MNELLIDTTQQVLPVMESFYTLQGEGFHQGRAAYFIRLGGCDVGCVWCDVKDSWDAAKHPKFSVGEIVAKLKEETTTKFQNPNPKFQNSNLPIVVITGGEPLMHNLDALTKAIHAAGFQTNIETSGSSPLSGEWDWICLSPKKFKAPLPEVVPHASELKVVIFNKSDFNWAETYAAQVSPNCKLYLQPEWDKAAQVTPLIIDYIKVNPQWELSLQVHKYINVP

SEQ ID NO: 30983 - protein, 211 aa, Lacibacter sp.
  REGION 1..211: note = tr|A0A4Q1CP16|A0A4Q1CP16_9BACT 7-carboxy-7-deazaguanine synthase OS=Lacibacter sp. TTM-7; OX = 2508719 GN=queE PE=3 SV=1
MESFYTLQGEGFHQGRAAYFIRLGGCDVGCVWCDVKDSWDATKHPKYSVEEIVEKMEKELGIRNRELGSNLQPLTSNLKPIVVITGGEPLMHNLDALTKAIHTAGYQTNIETSGSSPLSGEWDWICLSPKKFKAPLPEVVPHASELKVVIFNKSDFAWAETYAAQVSSNCKLYLQPEWDKAAQVTPLIIDYIKANPQWELSLQVHKYINVP

SEQ ID NO: 30984 - protein, 224 aa, unidentified
  source 1..224: note = Lacimicrobium alkaliphilum
  REGION 1..224: note = tr|A0A0U2ZFQ9|A0A0U2ZFQ9_9ALTE 7-carboxy-7-deazaguanine synthase OS=Lacimicrobium alkaliphilum OX=1526571 GN=queE PE=3 SV=1
MSVLKVNEMFETIQGEGFYTGLPAIFVRLQGCPVGCPWCDTKHTWTLDPAFQTDTQQVLAKTSDSEQYFSADEHKLLSLFEQQKYHARHVVITGGEPAMYDLTSLTSLLIDKGYSVQIETSGTFEIQAHPGTWITLSPKVNMKGGYKVLDQPLQKANEIKHPIAMQKHIDELDALLARTATNPKAMIYLQPISQQQRATDLAVATCIKKNWRLSLQTHKFIGIE

SEQ ID NO: 30985 - protein, 209 aa, Lacinutrix sp.
  REGION 1..209: note = tr|A0A4U0EZ57|A0A4U0EZ57_9FLAO 7-carboxy-7-deazaguanine synthase OS=Lacinutrix sp. CAU 1491 OX=2565367 GN=queE PE=3 SV=1
MNKEILELVSKGEMLPLMEEFYTIQGEGYHKGTAAYFVRIGGCDVGCHWCDVKESWNANLHPPTKTASIIENATKYSDTVVVTGGEPLTWNMTNLTEGLKAKGAMVHIETSGAYELTGTWDWICLSPKKMKLPTKEVYEKANELKVIVYNKDDFRFAEEQAAKVNEDCILYLQPEWSKRDKVIPLIVDYVMKHPKWKVSLQTHKYLNIP

SEQ ID NO: 30986 - protein, 209 aa, Lacinutrix sp.
  REGION 1..209: note = tr|A0A2K8XH75|A0A2K8XH75_9FLAO 7-carboxy-7-deazaguanine synthase OS=Lacinutrix sp. Bg11-31 OX=2057808 GN=queE PE=3 SV=1
MTQEVQDLVNQGKMLPLMEEFYTIQGEGFHKGTAAYFIRIGGCDVGCHWCDVKESWNAQLHPPTVIEDIVANAKKYSNTIVVTGGEPLMWDMTALTKQLKADGMSIHIETSGAYQLSGQWDWICLSPKKMKLPTQGVYDKANELKCIIFNKDDFRFAEEQAEKVNGDCILYLQPEWSKRDTMVPLIVDYVMANPKWKVSLQTHKYLNIP

SEQ ID NO: 30987 - protein, 209 aa, unidentified
  source 1..209: note = Lacinutrix venerupis
  REGION 1..209: note = tr|A0A420ZFB0|A0A420ZFB0_9FLAO 7-carboxy-7-deazaguanine synthase OS=Lacinutrix venerupis; OX = 1486034 GN=queE PE=3 SV=1
MTQEVQNLVNQGKMLPLMEEFYTIQGEGFHKGTAAYFVRIGGCDVGCHWCDVKESWIAQLHPPTETEKIVANAKQYSKTIVVTGGEPLTWDMTELTKQLKAEGMSIHIETSGAYELTGEWDWICLSPKKMKLPTQGVYDKANELKCIIYNKDDFRFAEEQAEKVNGDCILYLQPEWSKRDKVVPMIVDYVMANPKWKVSLQTHKYLNIP

SEQ ID NO: 30988 - protein, 286 aa, Lactobacillus animalis
  REGION 1..286: note = tr|A0A062X2Z6|A0A062X2Z6_9LACO 7-cyano-7-deazaguanosine (PreQ0) biosynthesis protein QueE, queE OS=Lactobacillus animalis OX=1605; GN = Lani381_0111 PE=4 SV=1
MKINKRGMGITLLVLLILFSLALPSFIWTRQNVKDLARWHNSRLSPVIMIPGSSATENRFDALIKKINSRSQKKHSLLKVKVYNDGTVKYSGKINAKDNEPFIVVGFENNKDGYSNILKQAKMFDKAFKQLSEQYEFNNFKAFGHSNGGLIYTAFLENYLPKYDIQAKVLMTVGTPYNFSETSLQRKTQMLADFIKNRKKLPTDLSVYTVAGTETYDSDGLVPERSVEAGKYIYQGIVKHFTQITVTGKDAQHSDLPQNDQIIELLDRYVLEPDQNQKTKKLKENS

SEQ ID NO: 30989 - protein, 72 aa, Lactobacillus parakefiri
  REGION 1..72: note = tr|A0A269XDT9|A0A269XDT9_9LACO 7-carboxy-7-deazaguanine synthase QueE (Fragment); OS = Lactobacillus parakefiri OX=152332 GN=B8W98_13470 PE=4; SV = 1
MAKIPVLEVFGPTIQGEGRVIGRKTMFVRTAGCDYRCSWCDSAFTWDGSAKEDIRLLSAEEIYEELREVRGD

SEQ ID NO: 30990 - protein, 130 aa, Lactobacillus reuteri
  REGION 1..130: note = tr|A0A1C1ZYZ6|A0A1C1ZYZ6_LACRE 7-cyano-7-deazaguanosine (PreQ0) biosynthesis protein QueE (Fragment) OS=Lactobacillus reuteri OX=1598 GN=BBP13_12570; PE = 4 SV=1
MAKIPVLEIFGPTIQGEGRVIGRKTMFVRTAGCDYRCSWCDSAFTWDGRAKEDIKLMTAEEIYEAVLERGGHRFNHVTISGGNPALIKGIQELVDLFEEKHIYTALETQGSRFQSWMTQIDDLTISPKPP

SEQ ID NO: 30991 - protein, 240 aa, Lactococcus lactis
  REGION 1..240: note = tr|A0A2A9IAE3|A0A2A9IAE3_9LACT 7-cyano-7-deazaguanosine (PreQ0) biosynthesis protein QueE, queE OS=Lactococcus lactis OX=1358 GN=AMHIJAGA_02728; PE = 4 SV=1
MLTKNRNKKFSIFSSHFPNLCSHLDIIVDMTYQVKIIYPKEEAAENNKLTERTFNEFIDGLELEEVITQYEQLLTKGYSISVNFAPPQLDDKGTEPDPFMIAGRLELAGIPYKATLKLKASGDYESMVKIAKMIEQQDYDYDISAKLQIRENSSVDFEKEGSWFDKDYTKYTILPKASSQDIADLKTLYDALVEEHQKVTINIKAKVKKDDDDSFANQLAAYPPETMIIFKLTDADIYGE

SEQ ID NO: 30992 - protein, 211 aa, Lactococcus lactis
  REGION 1..211: note = tr|A0A0M2ZRY9|A0A0M2ZRY9_LACLC 7-cyano-7-deazaguanosine (PreQ0) biosynthesis protein QueE, queE OS=Lactococcus lactis subsp. cremoris OX=1359; GN = yxcD PE=4 SV=1
MTYQVKIIYPKEEAAENNKLTERTFNEFIDGLELEEVITQYEQLLTKGYSISVNFAPPQLDDKGTEPDPFMIAGRLELAGIPYKATLKLKASGDYESMVKIAKMIEQQDYDYDISAKLQIRENSSVDFEKEGSWFDKDYTKYTILPKASSQDIADLKTLYDALVEEHQKVTINIKAKVKKDDDDSFANQLAAYPPETMVIFKLTDADIYGE

SEQ ID NO: 30993 - protein, 230 aa, unidentified
  source 1..230: note = Lacunisphaera limnophila
  REGION 1..230: note = tr|A0A1D8ASY2|A0A1D8ASY2_9BACT 7-carboxy-7-deazaguanine synthase OS=Lacunisphaera limnophila OX=1838286 GN=queE_1 PE=3 SV=1
MLISEIFYSLQGEGELMGVPSVFVRTSGCNLRCNWCDTPYASWQPEGTPMEVEAILAEVTRHPAKHVVLTGGEPMVAPGIHELAFQLQERGYHITIETAGTILPRGIACDLASISPKLKHSAPDARLDDTWRRKHEELRWQPAVVTAWMACQDYQLKFVVSSEADVTELEGMLRETDTAIPPSKVLLMPEGVTIEALRSRAGWLGEVCKARGYRYAPRLHIELYGNRRGT

SEQ ID NO: 30994 - protein, 226 aa, unidentified
  source 1..226: note = Lacunisphaera limnophila
  REGION 1..226: note = tr|A0A1D8AYX1|A0A1D8AYX1_9BACT 7-carboxy-7-deazaguanine synthase OS=Lacunisphaera limnophila OX=1838286 GN=queE_2 PE=3 SV=1
MSTLPIYETFYAWQGEGCHMGRAAFFIRTFGCPVKCPWCDSAGTWHPDWVPEKIERFSADELADRAVAHRAEFAVITGGEPTIHDLTELTAALHRRDLPTHLETSGSFPIKGDFDWITVSPKWAKLPLPENLRRANEIKLIIEDGESVEKWRAQVSPLTAGQVVWLHPEWSKREDPAVMNSISVTVKTQGHPFRAGYQLHRVYNVDSLDSGARPIIPLGGNLEIGY

SEQ ID NO: 30995 - protein, 231 aa, unidentified
  source 1..231: note = Lacunisphaera sp.
  REGION 1..231: note = tr|A0A4V1M668|A0A4V1M668_9BACT 7-carboxy-7-deazaguanine synthase OS=Lacunisphaera sp. TWA-58 OX=2508720 GN=queE PE=3 SV=1
MLISEIFYSLQGEGQLAGVPSVFVRTSGCNLRCNWCDTPYASWNPEGTPMEVEAILAEVKKHPTKHVVLTGGEPMVAPGIHELAFQLQERNYHITIETAATVRPRGIACDLASLSPKLAHSAPDTRLDDTWRRKHAELRWQPAVVADWMGSARDYQLKFVVSSEADVTELEDMLRETDCLIPPSKVLLMPEGVTVEALRAKAGWLGELCKARGYRYAPRLHIELYGNKRGT

SEQ ID NO: 30996 - protein, 210 aa, Lampropedia sp.
  REGION 1..210: note = tr|A0A4S5BP67|A0A4S5BP67_9BURK 7-carboxy-7-deazaguanine synthase OS=Lampropedia sp. YIM MLB12 OX=2562762 GN=queE PE=3 SV=1
MTYSVKEIFYTLQGEGLRAGRPAVFCRFSGCNLWTGREEDRLKATCQFCDTDFVGTDGTLGGKFGQAEALAAHIAALWPTGQAHRYVVLTGGEPLLQVDAALIEALHAQDFEIAVETNGTVAVPAGIDWICVSPKAGADWVQRSGDELKLVYPQPGLLPATITCVDFQFYLLQPMDGPLLRQNTRAAIDYCQNHTQWRLSVQTHKVLEIR

SEQ ID NO: 30997 - protein, 209 aa, Laribacter hongkongensis
  REGION 1..209: note = tr|A0A248LHS6|A0A248LHS6_9NEIS 7-carboxy-7-deazaguanine synthase OS=Laribacter hongkongensis OX=168471 GN=queE PE=3 SV=1
MTYTVKEIFHTLQGEGVHSGRAAVFCRFTGCNLWSGRETDRAQATCQFCDTDFVGTGPDGGKFVCAQELAGRIADSWAGTGGTPYVVFTGGEPLLQLDEELIEAMHARGFEVGVETNGTIPAPPRIDWLCVSPKAGSKWVQKQGDELKLVYPQPGLLPETVELTGFSRYWLQPMDGPEQTMHIKAAIGFCLLHPDWHLSLQNHKLAGIR

SEQ ID NO: 30998 - protein, 209 aa, Laribacter hongkongensis
  REGION 1..209: note = tr|C1D6K8|C1D6K8_LARHH 7-carboxy-7-deazaguanine synthase OS=Laribacter hongkongensis (strain HLHK9); OX = 557598 GN=queE PE=3 SV=1
MTYTVKEIFHTLQGEGVHSGRAAVFCRFTGCNLWSGRETDRAQATCQFCDTDFVGTGPDGGKFACARELAGRIADSWAGTGGTPYVVFTGGEPLLQLDEELIEAMHARGFEVGVETNGTIPAPPGIDWLCVSPKAGSGWVQKQGDELKLVYPQPGLLPETVELTGFSRYWLQPMDGPEQTMHIKAAIGFCLLHPDWHLSLQNHKLAGIR

SEQ ID NO: 30999 - protein, 193 aa, Larkinella arboricola
  REGION 1..193: note = tr|A0A327XA40|A0A327XA40_9BACT 7-carboxy-7-deazaguanine synthase OS=Larkinella arboricola; OX = 643671 GN=queE PE=3 SV=1
MESFYTLQGEGAHTGRAAYFIRLGGCDVGCHWCDVKESWDADAHPKYPIVEIVEGALQHPGRMAVITGGEPLMHDLTGLTLALKKAGFQTNIETSGVYPVSGVWDWICFSPKKFKQPHPGIFEQANELKVIIYNKSDFAFAESFVPLLQPHCKLFLQPEWSRSNEMLPLIVEYVKQHPQWQVSLQTHKYMDIP

SEQ ID NO: 31000 - protein, 193 aa, unidentified
  source 1..193: note = Larkinella knui
  REGION 1..193: note = tr|A0A3P1CYJ5|A0A3P1CYJ5_9BACT 7-carboxy-7-deazaguanine synthase OS=Larkinella knui; OX = 2025310 GN=queE PE=3 SV=1
MESFYTLQGEGAHTGRAAYFIRLGGCDVGCHWCDVKESWDVHAHPKYTIDALVEGALQYPGRLAVITGGEPLMHDLTELTLALKKAGFQTNIETSGVYPVNGIWDWICFSPKKFKEPNPDIFQKASELKVIIYNKSDFAFAESFVGSLQPHCKLFLQPEWSRSNEMLPLIVDYVKQHPQWQVSLQTHKFMDIP

SEQ ID NO: 31001 - protein, 193 aa, unidentified
  source 1..193: note = Larkinella rosea
  REGION 1..193: note = tr|A0A3P1C3P2|A0A3P1C3P2_9BACT 7-carboxy-7-deazaguanine synthase OS=Larkinella rosea; OX = 2025312 GN=queE PE=3 SV=1
MESFYTLQGEGAHTGKAAYFIRLGGCDVGCHWCDVKESWDVTAHPSYSIDDLVEGALQYPGRMAVITGGEPLMHDLSGLTAALKKAGFNTNIETSGVYPVSGSWDWICFSPKKFKEPHPDIFRKADELKAIIYHKSDFAFAESFVASLRSDCKLFLQPEWSRSNEMLPLIVEYVKQHPQWQVSLQTHKFMDIP

SEQ ID NO: 31002 - protein, 210 aa, Larkinella sp.
  REGION 1..210: note = tr|A0A4R8CZP2|A0A4R8CZP2_9BACT 7-carboxy-7-deazaguanine synthase OS=Larkinella sp. BK230; OX = 2512173 GN=queE PE=3 SV=1
MNQVLEQQTDTVQRLPVMESFYTLQGEGAHTGRAAYFIRLGGCDVGCHWCDVKESWDADAHPKFPIPAIVEGALQHPGRMAVITGGEPLMHDLTGLTLALKKAGFQTNIETSGVYPVSGVWDWICFSPKKFKQPHPGIFGQANELKMIIYNKSDFAFAESFVPLLQLHCKLFLQPEWSRSNEMLPLIVEYVKQHPQWQVSLQTHKYMDIP

SEQ ID NO: 31003 - protein, 193 aa, Larkinella sp.
  REGION 1..193: note = tr|A0A368JTM7|A0A368JTM7_9BACT 7-carboxy-7-deazaguanine synthase OS=Larkinella sp. ZZJ9; OX = 2315727 GN=queE PE=3 SV=1
MESFYTLQGEGAHTGKAAYFIRLGGCDVGCHWCDVKESWDVNAHPSYTIDELVDGALQYPGRMAVITGGEPLMHDLSGLTLALQNAGFQTNIETSGVYPVTGRWDWICFSPKKFKEPNPDIFSKANEMKAIIYNKSDFAFAESFVASLQPHCKLFLQPEWSRSNEMLPLIVEYVKQHPQWQVSLQTHKFMDIP

SEQ ID NO: 31004 - protein, 244 aa, Lautropia mirabilis
  REGION 1..244: note = tr|E7S060|E7S060_9BURK 7-carboxy-7-deazaguanine synthase OS=Lautropia mirabilis ATCC 51599 OX=887898; GN = queE PE=3 SV=1
MNSEQHMAAGMPVTPPHPVIPLSVETPVHTAIRRRPEPATGLDTPYRIVEIFETLQGEGFNTGMPSVFIRFGKCNLACPWCDTDYNRFGTMTLGDILAKVRTFSARNVIITGGEPTIQPHLERLLDSLKAEGHFLAIETNGLKPVPPQIDYIATSPKRLYQQAYQKRHIKFAHEVRIVVDGDVRDFCAQIEDSIQADRYYLSPCEVDGRMNMLETITQLGQLNQRPGRPRWQLSIQTHKLAGIE

SEQ ID NO: 31005 - protein, 260 aa, Lautropia sp.
  REGION 1..260: note = tr|A0A3R8NR46|A0A3R8NR46_9BURK 7-carboxy-7-deazaguanine synthase OS=Lautropia sp. KCOM 2505 OX=2490857 GN=queE PE=3 SV=1
MKTKHLEPLHARTNRAWAESPAGIRTASHETISTGSDTGKPTTQTPSVRPLHFRNPKQPPSYRIVEIFESLQGEGFNTGMPSIFIRFGKCNLACPWCDTNYNQYESRSLDEVLSVVHGYTARNIIITGGEPTIQPDLDPLLDTLKAEGYFLAIETNGLKPVPRQIDYIATSPKRLYEKAYRKKHIDFAHEVRIVVDGDVRDFCEQMESTIRAEHYYLSPCETDGRMNMLDTITQLGQLNARPGRPHWQLSIQTHKLANIE

SEQ ID NO: 31006 - protein, 212 aa, Lautropia sp.
  REGION 1..212: note = tr|A0A1D2TNP9|A0A1D2TNP9_9BURK 7-carboxy-7-deazaguanine synthase OS=Lautropia sp. SCN 70-15 OX=1660105 GN=queE PE=3 SV=1
MTYSIKEMFYTLQGEGAQAGRPAVFCRFSGCNLWSGREEDRADAVCTFCDTDFVGTDGQGGGKFRTAAELARAIAAKWPADDDSGRRYVVCTGGEPLLQLDEPLIDALHAEGFEMAVETNGTQPAPKGLDWICVSPKAGAPVVLTEGDELKLVYPQPLAMPERFESLGFTHFFLQPMDGPDQEANTRAAIAYCLAHPRWRLSLQTHKIVGID

SEQ ID NO: 31007 - protein, 255 aa, unidentified
  source 1..255: note = Lawsonella clevelandensis
  REGION 1..255: note = tr|A0A0M4LZF7|A0A0M4LZF7_9ACTN 7-carboxy-7-deazaguanine synthase OS=Lawsonella clevelandensis OX=1528099 GN=queE PE=4 SV=1
MATATTPTRVYLTRRQLASADSLTVAGLVRLSTVDWPGRMVSTIFLQGCPWNCIYCHNPDLIDCRTSGIMAWADVETFLQRRQGLLDGVVFTGGEPTRQRGLMDAMERAHTLGFQVGLHTMGAYPTLLRPLLPLIDWVGFDIKAAPTHYGSIIATDVRSSIGTVGSRHAMESLDMLLDAGIEVQARTTLHPDSVAITDLPAIVELLQCKGVGSYRLQQARAEGARQELPDGRTLSYDRPGWDAEFEALKARYDFG

SEQ ID NO: 31008 - protein, 212 aa, Lawsonia intracellularis
  REGION 1..212: note = tr|Q1MQ74|Q1MQ74_LAWIP 7-carboxy-7-deazaguanine synthase OS=Lawsonia intracellularis (strain PHE/MN1-00); OX = 363253 GN=queE PE=3 SV=1
MSFYIKELFYTIQGEGVQTGRPAVFCRFSGCNLWSGKEKDRAIAKCQFCDTDFLNADFGILDSEEQLVANILQTFPQNNYTHPSYKPYVVFTGGEPSLQLNQVIINLLHKYHIEIAIETNGTIPLPKHIDWITVSPKEGNELVTTVGNELKLVWPQQNCDPEKYLTLEFDNFILQPKDDKNLSNNIQICIEYCMKHPYWKLGLQSHKWIGIR

SEQ ID NO: 31009 - protein, 202 aa, Leadbetterella byssophila
  REGION 1..202: note = tr|E4RTI8|E4RTI8_LEAB4 7-carboxy-7-deazaguanine synthase OS=Leadbetterella byssophila (strain DSM 17132 / KACC 11308 / 4M15) OX=649349 GN=queE PE=3 SV=1
MNLELGLPVMESFYTLQGEGFHSGKAAYFIRLGGCDVGCVWCDVKESWDAEAHPQFRVEDIVNGALEYPGRLAVITGGEPLMYDLNELTAELKQKGFQTNIETSGAHPLSGDWDWICFSPKKFKAPLEEFYAVANELKVIVYNSSDFDFAEIHAAKVNPDCKLFLQVEWDRRERMMPSIVEYVKANPQWRVSIQTHKYMNIP

SEQ ID NO: 31010 - protein, 235 aa, unidentified
  source 1..235: note = Lebetimonas natsushimae
  REGION 1..235: note = tr|A0A292YF81|A0A292YF81_9PROT 7-carboxy-7-deazaguanine synthase OS=Lebetimonas natsushimae OX=1936991 GN=queE PE=3 SV=1
MKKNLYVVEIFRSIQGEGKYAGRISVFLRLGGCNLRCPGFGEKGCDSYYAVDKKYKNEWEKLNIDEIIKRIESLKQKNEDLVITGGEPTLYYREIYPLIESYSGQITIETNATIDINFKKYPKYKDVIFAMSVKLSNSGEEYKKRVKKEVIKNIAKNAEKSFFKFVINKENLNLQLKEILDITTGIDLDIYCMPMGESPEKLEENAKSVFNFCLENSFCYSDRIHIRIFGKKKGI

SEQ ID NO: 31011 - protein, 234 aa, Lechevalieria deserti
  REGION 1..234: note = tr|A0A316HVA8|A0A316HVA8_9PSEU 7-carboxy-7-deazaguanine synthase OS=Lechevalieria deserti; OX = 531939 GN=queE PE=3 SV=1
MNTPTLAPERVEGSAILTEKFESFQGEGPWTGQRCVFVRFSRCNLRCGFCDTPESWDWSRYNPAEVSDRVPVAELVSWVRERGVDMMVITGGEPMLQQPAMTALARGLANVRVQVETNGTVAPTPELASLVDLWVVSPKLANSGMTYSTRIKPDALSALVATDRAVFKFVVTEPDRDLDEIAQLVEEHRLAPVWVMPEGTTREKVLAGMDALYDRAAERGWNVSTRLHILTGAR

SEQ ID NO: 31012 - protein, 65 aa, Leclercia adecarboxylata
  REGION 1..65: note = tr|A0A4V6JL55|A0A4V6JL55_9ENTR 7-carboxy-7-deazaguanine synthase OS=Leclercia adecarboxylata OX=83655 GN=queE_3 PE=4 SV=1
MQYPINEMFQTLQGEGYFTGVPAIFIRLQGCPVGCAWCDTKHTWGNAGGSGSVTVQHSGQNERER

SEQ ID NO: 31013 - protein, 52 aa, Leclercia adecarboxylata
  REGION 1..52: note = tr|A0A4V6YY76|A0A4V6YY76_9ENTR 7-carboxy-7-deazaguanine synthase OS=Leclercia adecarboxylata OX=83655 GN=queE_1 PE=4 SV=1
MISKRWMKLLVTLTDDKQRVIALQPISQKEDATRLCIETCIARNWRLVDANA

SEQ ID NO: 31014 - protein, 223 aa, Leclercia sp.
  REGION 1..223: note = tr|A0A3D3PVK8|A0A3D3PVK8_9ENTR 7-carboxy-7-deazaguanine synthase OS=Leclercia sp.; OX = 1898428 GN=queE PE=3 SV=1
MQYPINEMFQTLQGEGYFTGVPAIFIRLQGCPVGCAWCDTKHTWETLSDREVSLFSILAKTKESDKWGAANPEDLLAIIGRQGWTARHVVITGGEPCIHDLLPLTTLLEKNGFSCQIETSGTHEVRCSHTTWVTVSPKVNMRGGYEVLSQALERADEIKHPVGRVRDIEALDELLATLTDDKQRVIALQPISQKEDATRLCIETCIARNWRLSMQTHKYLNIA

SEQ ID NO: 31015 - protein, 223 aa, Leclercia sp.; identical to SEQ ID NO: 29914
  REGION 1..223: note = tr|A0A0J6MHX7|A0A0J6MHX7_9ENTR 7-carboxy-7-deazaguanine synthase OS=Leclercia sp. LK8; OX = 1628210 GN=queE PE=3 SV=1

SEQ ID NO: 31016 - protein, 210 aa, Leeuwenhoekiella aequorea
  REGION 1..210: note = tr|A0A4Q0P7G7|A0A4Q0P7G7_9FLAO 7-carboxy-7-deazaguanine synthase OS=Leeuwenhoekiella aequorea OX=283736 GN=queE PE=3 SV=1
MTKEATANRVKLGELLPLMEEFYTIQGEGAHTGTPAYFIRVGGCDVGCHWCDVKESWDAAIHPPTEATAIVANAVKYSKTIVITGGEPLMWDMRHLTSLLKAEGLKVHIETSGAYELSGEWDWICLSPKKRMLPKPRIYKEAHELKVIIFNKSDFAFAEEHAAMINEDCELYLQSEWSVRDKMTPLIVDYVMANPKWKISLQTHKYLNIP

SEQ ID NO: 31017 - protein, 213 aa, Leeuwenhoekiella blandensis
  REGION 1..213: note = tr|A3XJR9|A3XJR9_LEEBM 7-carboxy-7-deazaguanine synthase OS=Leeuwenhoekiella blandensis (strain CECT 7118 / CCUG 51940 / MED217) OX=398720 GN=queE PE=3 SV=1
MRPMTKEATATRVELGELLPLMEEFYTIQGEGYHTGTPAYFIRVGGCDVGCHWCDVKESWDAAIHPPTEAAAIVANAKKYSKTIVITGGEPLMWDMNHLTSMLKAEGLQVHIETSGAYELSGHWDWICLSPKKRMLPKPRIYEEAHELKVIIYNKSDFAFAEEHAAKVNGNCQLFLQPEWSVREKMTPLIVDYVMANPKWKVSLQTHKYLNIP

SEQ ID NO: 31018 - protein, 210 aa, Leeuwenhoekiella marinoflava
  REGION 1..210: note = tr|A0A4Q0PJN1|A0A4Q0PJN1_9FLAO 7-carboxy-7-deazaguanine synthase OS=Leeuwenhoekiella marinoflava OX=988 GN=queE PE=3 SV=1
MTKEAIANRVELGELLPLMEEFYTIQGEGAHTGTPAYFIRVGGCDVGCHWCDVKESWDAAIHPPTEAAAIVANAKKYSKTIVITGGEPLMWDMNHLTRMLKAEGLNVHIETSGAYELSGHWDWICLSPKKRMLPKPRIYEEAHELKVIIYNKNDFAFAEEHAEKVNGKCELFLQPEWSVREKMTPFIVEYVMANPKWKVSLQTHKYLNIP

SEQ ID NO: 31019 - protein, 210 aa, unidentified
  source 1..210: note = Leeuwenhoekiella nanhaiensis
  REGION 1..210: note = tr|A0A2G1VSU9|A0A2G1VSU9_9FLAO 7-carboxy-7-deazaguanine synthase OS=Leeuwenhoekiella nanhaiensis OX=1655491 GN=queE PE=3 SV=1
MTKEAIASRVELGELLPLMEEFYTIQGEGHHTGTAAYFIRVGGCDVGCHWCDVKESWDAAIHPPTEAAAIVANAKKYSKTIVVTGGEPLMWDMEHLTGLLKAEGMQVHIETSGAYELTGNWDWICLSPKKRMLPKPRIYKEANELKVIIYNKSDFAFAEEHAAKVNEACELYLQPEWSVREKMTPLIVDYVMANPQWKISLQTHKYLNIP

SEQ ID NO: 31020 - protein, 210 aa, Leeuwenhoekiella palythoae
  REGION 1..210: note = tr|A0A1M5Z937|A0A1M5Z937_9FLAO 7-carboxy-7-deazaguanine synthase OS=Leeuwenhoekiella palythoae OX=573501 GN=queE PE=3 SV=1
MTKEATATRVELGELLPLMEEFYTIQGEGYHTGTPAYFIRVGGCDVGCHWCDVKESWDAAIHPPTEAAAIVANAKKYSKTIVITGGEPLMWDMNHLTGMLKDEGLQVHIETSGAYELTGHWDWICLSPKKRMLPKPRIYEEAHELKVIIYNKSDFAFAEEHAAKVNGNCKLFLQPEWSVREKMTPLIVDYVMANPKWRVSLQTHKYLNIP

SEQ ID NO: 31021 - protein, 238 aa, unidentified
  source 1..238: note = Leeuwenhoekiella polynyae
  REGION 1..238: note = tr|A0A4Q0NTW9|A0A4Q0NTW9_9FLAO 7-carboxy-7-deazaguanine synthase OS=Leeuwenhoekiella polynyae OX=1550906 GN=queE PE=3 SV=1
MSCVLVSSIENKVAKLWQRFYCGVSLHLMTKEATASRVELGELLPLMEEFYTIQGEGAHTGTPAYFIRVGGCDVGCHWCDVKESWDAAIHPPTEAAAIVANAKKYSKTIVITGGEPLMWDMNHLTSMLKAEGLNVHIETSGAYELSGHWDWICLSPKKRMLPKPRIYDEAHELKVIIYNKNDFAFAEEHASKVNGKCELFLQPEWSVREKMTPLIVDYVMANPKWKVSLQTHKYLNIP

SEQ ID NO: 31022 - protein, 210 aa, Leeuwenhoekiella sp.; identical to SEQ ID NO: 31020
  REGION 1..210: note = tr|A0A2E5GLY0|A0A2E5GLY0_9FLAO 7-carboxy-7-deazaguanine synthase OS=Leeuwenhoekiella sp.; OX = 1977054 GN=queE PE=3 SV=1

SEQ ID NO: 31023 - protein, 210 aa, Leeuwenhoekiella sp.
  REGION 1..210: note = tr|A0A4Q0NRV0|A0A4Q0NRV0_9FLAO 7-carboxy-7-deazaguanine synthase OS=Leeuwenhoekiella sp. R-50232 OX=2249425 GN=queE PE=3 SV=1
MTKEATASRVELGELLPLMEEFYTIQGEGAHTGTPAYFIRVGGCDVGCHWCDVKESWDAAIHPPTEAAAIVANAKKYSKTIVITGGEPLMWDMNHLTSMLKAEGLNVHIETSGAYELSGHWDWICLSPKKRMLPKPRIYDEAHELKVIIYNKNDFAFAEEHAAKVNDKCELFLQPEWSVREKMTPLIVDYVMANPKWKVSLQTHKYLNIP

SEQ ID NO: 31024 - protein, 217 aa, Legionella adelaidensis
  REGION 1..217: note = tr|A0A0W0R077|A0A0W0R077_9GAMM 7-carboxy-7-deazaguanine synthase OS=Legionella adelaidensis OX=45056 GN=nrdG PE=3 SV=1
MKSFQNRLRITEIFHSIQGESNTVGWPTVFVRLTGCPLRCQYCDTAYAFSGGEMYSLESILEKVKSFHCPYVCITGGEPLAQPACITLLTMLCDAGCKVSLETSGARDISQVDPRVMIVMDIKTPDSLECEKNMWTNLAYLKSSDQIKFVICSQQDYEWAKQIIIEKNLAEKCDLLFSPSWEQINPTDLANWIVNDRLPVRFQLQLHKILWNDTPGH

SEQ ID NO: 31025 - protein, 291 aa, Legionella anisa
  REGION 1..291: note = tr|A0A2Z3KS09|A0A2Z3KS09_9GAMM 7-carboxy-7-deazaguanine synthase OS=Legionella anisa; OX = 28082 GN=queE PE=3 SV=1
MFGMNDSVGKAFFKEAKPDELFITSRFFTLQGEGPFRGHPAYFIRLAKCNLACSFCDTYFDAGEWRSFNSLLEEADSVIAAFFQTRNLPTPSWAKGLAKKMVLVITGGEPSLQQNLSSFLEEAKSYFQYTQIESNGISILADLPKSTTLVVSPKCLEKDGHVIRYLKPNAKMLERADCLKFVMSAPEENKYAPYSEIPAWAHKWAEKTKKQVFVSPMNRYRKEPQRVSAIRDKGRDLTLEERSEINEVVSFWETDLLDMEKNQRNHEYAAEYCMKYGFILNLQIHLFASLP

SEQ ID NO: 31026 - protein, 217 aa, Legionella beliardensis
  REGION 1..217: note = tr|A0A378I3Q3|A0A378I3Q3_9GAMM 7-carboxy-7-deazaguanine synthase OS=Legionella beliardensis OX=91822 GN=nrdG PE=3 SV=1
MNVRSTKLRITEIFHSIQGESNTVGLPTVFVRLTGCPLRCQYCDTAYAFSGGELIDIETILAQVSAFECPFVCVTGGEPLAQPNCLALLEKLCDAGFNVSLETSGARDIANVDQRVTIVMDLKTPDSKECSKNLISNLAYLKKTDQIKFVLCSRSDYEWACHMLKEYQLPEKAFILFSPSWQELDATSLANWIIKDCLPVRFQLQLHKILWNDAPGH

SEQ ID NO: 31027 - protein, 217 aa, Legionella birminghamensis
  REGION 1..217: note = tr|A0A378I7J5|A0A378I7J5_9GAMM 7-carboxy-7-deazaguanine synthase OS=Legionella birminghamensis OX=28083 GN=nrdG PE=3 SV=1
MTKLNNQLRITEIFHSLQGESTTVGLPTVFIRLTGCPLRCQYCDTAYAFSGGELHEISAILEKVASFGCTHVCVTGGEPLAQPGCLPLMQQLCDAGYHVSLETSGARDIKEVDQRVMIVMDLKTPDSGECGKNLLSNLDHLKPSDQIKFVLCSRNDYEWANQLLMEYRLHERTQILYSPSWKELPATTLADWIVADRLPVRFQIQLHKILWNDVPGH

SEQ ID NO: 31028 - protein, 218 aa, Legionella brunensis
  REGION 1..218: note = tr|A0A0W0SP87|A0A0W0SP87_9GAMM 7-carboxy-7-deazaguanine synthase OS=Legionella brunensis; OX = 29422 GN=queE PE=3 SV=1
MKQSSTQQLRITEIFHSLQGESVTVGLPTVFVRLTGCPLRCQYCDTAYAFSGGEILAINAILEKIASYDCNYVCVTGGEPLAQPGCITLLHELCDAGYNVSLETSGARDLSQVDKRVMIVMDLKTPDSGEASKNLFSNLTYLKATDQIKFVLCSREDYEWACQIMTEYNLSQRTQILFSPSWNQLNPTALADWIVVDKLPVRFQLQLHKILWNDTPGH

SEQ ID NO: 31029 - protein, 217 aa, Legionella busanensis
  REGION 1..217: note = tr|A0A378JRJ6|A0A378JRJ6_9GAMM 7-carboxy-7-deazaguanine synthase OS=Legionella busanensis; OX = 190655 GN=nrdG PE=3 SV=1
MMSTNNKLRITEIFHSLQGESNTVGLPTVFVRLTGCPLRCQYCDTAYAFNGGELMEMDTILARTLSFECPYVCVTGGEPLAQPNCFHLLKSLCDAGLYVSLETSGARPIANVDQRVNIVMDLKTPDSGECDKNLLDNLNFLKKTDQIKFVLCSQKDYEWACNLLKEFQLPEKAQILFSPSWQELDATLLANWIIRDRLPVRFQIQLHKVLWNDMPGH

SEQ ID NO: 31030 - protein, 291 aa, Legionella cherrii
  REGION 1..291: note = tr|A0A0W0S5M8|A0A0W0S5M8_9GAMM 7-carboxy-7-deazaguanine synthase OS=Legionella cherrii; OX = 28084 GN=queE PE=3 SV=1
MFGLNDKVGKSFFKDAKSDELFVTSRFFTLQGEGPFRGHPAYFIRLAKCNLACSFCDTYFDAGEWLDFNSLLEEADTVIHAFFQKRNLATPSWAQGLDKKMILVITGGEPSLQQNLSAFLEKAQPYFQHTQIESNGISILPDLPRCTTLVVSPKCLEKEGKIIRYLKPHSKMLERADYLKFVVSAPDDNQYTPYSEIPKWAHEWAEKTKKQVFVSPMNRYLKEPQRAQAIRDKGRDLTLAERSEINEVVSFWEPGLLNLEKNQRNHEYAAEYCMKYGFILNLQIHLFASLP

SEQ ID NO: 31031 - protein, 291 aa, Legionella cincinnatiensis
  REGION 1..291: note = tr|A0A378INV6|A0A378INV6_9GAMM 7-carboxy-7-deazaguanine synthase OS=Legionella cincinnatiensis OX=28085 GN=nrdG PE=3 SV=1
MFGFNDKVGKAFFNKAKHDELLVTSRFFTLQGEGPYRGHPAYFIRLAKCNLACSFCDTYFDSGEWRNFTSLLKEAEQVIDDFFKNRSLSTPPWAQGLAKKMVLVITGGEPSLQQNLSAFLEMAQAYFQSTQIESNGIAVLADLPKSTTLVVSPKCLEKEGNVIRYLKPNPKMLARADCLKFVISAPEDNQYAPYSDIPLWAHEWAKQMNKQIFISPMNIYQKEPQRVKVIRDEGRDLTMTERSEINEVISFWEPGLLDLKKNQRNHEYAAEYCMKYGFILNLQIHLYAGLP

SEQ ID NO: 31032 - protein, 217 aa, unidentified
  source 1..217: note = Legionella clemsonensis
  REGION 1..217: note = tr|A0A222P026|A0A222P026_9GAMM 7-carboxy-7-deazaguanine synthase OS=Legionella clemsonensis OX=1867846 GN=queE PE=3 SV=1
MKHSSTQLRITEIFHSLQGESVTVGLPTVFVRLTGCPLRCHYCDTTYAFSGGKMASLSAILEKVASYQCSHVCVTGGEPLAQPGCIPLLKELCDAGYHVSLETSGARDLSQIDKRVMIVMDLKTPDSGEADKNLFDNLAFLKPTDQIKFVLCSHNDYKWACQIMAEYHLPKKVQILFSPSWHQLNPTELANWIVEDKLPVRFQLQLHKILWNDAPGH

SEQ ID NO: 31033 - protein, 217 aa, unidentified
  source 1..217: note = Legionella donaldsonii
  REGION 1..217: note = tr|A0A378IZW4|A0A378IZW4_9GAMM 7-carboxy-7-deazaguanine synthase OS=Legionella donaldsonii OX=45060 GN=nrdG PE=3 SV=1
MKQVSTQLRITEIFYSLQGESVTVGLPTVFIRLTGCPLRCQYCDTAYAFSGGEMQSLTSILEKVTSYNCKQVCVTGGEPLAQPGCIDLLRQLCDAGFNVSLETSGARDIAQVDKRVMVIMDLKTPGSGESKKNLFANLAHLKQSDQIKFVLCSREDYDWACQIIIEHNLSEHVQILFSPSWNQLNSTLLADWIVTDRLPVRFQLQLHKILWNDAPGH

SEQ ID NO: 31034 - protein, 291 aa, Legionella drancourtii
  REGION 1..291: note = tr|G9ELS6|G9ELS6_9GAMM 7-carboxy-7-deazaguanine synthase OS=Legionella drancourtii LLAP12 OX=658187; GN = queE PE=3 SV=1
MFGVNKIVGKAFFKQAKHDELLVTSRFFTLQGEGPYRGHPAYFIRLAKCNLACSFCDTYFDSGEWRSFSSLLVEADVVIAEFFKQRNLPIPAWGQGVAKKIVLVITGGEPSLQNNVSAFLAEAQRYFQYTQIESNGTSVLSDLPPSTTLVVSPKCLEKNGAAVRYLEPNVKMLARADYLKFVMSAPEVEPYLPYSEIPVWAHQWAAQTNKQVFISPMNCYQQEPQRVKMIRNEGRDLTMAERSEINEVISFWEPELLDLQKNQRNHEYAAEYCMKHGFIFNLQIHLFANLP

SEQ ID NO: 31035 - protein, 217 aa, Legionella drozanskii
  REGION 1..217: note = tr|A0A0W0SVX2|A0A0W0SVX2_9GAMM 7-carboxy-7-deazaguanine synthase OS=Legionella drozanskii LLAP-1 OX=1212489 GN=queE PE=3 SV=1
MKQVSNSLRITEIFHSLQGESTTVGLPTVFIRLTGCPLRCQYCDTAYAFNGGEITEVRSILDKISAYQCKQVCVTGGEPLAQPGCIFLLQELCDQGYQVSLETSGARDIAQVDKRVMVVMDLKTPDSGESEKNLFSNLEHLKQSDQIKFVLCSREDYDWACQMMQEYRLTERAHILFSPSWNELNPTKLADWIVKDKLAVRFQLQLHKILWNDAPGY

SEQ ID NO: 31036 - protein, 217 aa, Legionella erythra
  REGION 1..217: note = tr|A0A0W0TNK7|A0A0W0TNK7_LEGER 7-carboxy-7-deazaguanine synthase OS=Legionella erythra; OX = 448 GN=queE PE=3 SV=1
MTRVANQLRITEIFHSLQGESTTVGLPTVFIRLTGCPLRCQYCDTAYAFSGGELKTLEDILGEVSRYRCRHVCVTGGEPLAQPGCIALLTHLCDAGYQVSLETSGARDIAEVDPRVMVVMDLKTPDSRECSKNRFENIPYLKVTDQIKFVICSRKDYLWACEIIEKYQLTEKVHVLFSPSWKEMDPTTLADWIIQDQLPVRFQIQLHKILWNDAPGH

SEQ ID NO: 31037 - protein, 217 aa, Legionella fallonii
  REGION 1..217: note = tr|A0A098G6M3|A0A098G6M3_9GAMM 7-carboxy-7-deazaguanine synthase OS=Legionella fallonii LLAP-10 OX=1212491 GN=queE PE=3 SV=1
MKQFNNQLRITEIFHSLQGESVTVGLPTVFVRLTGCPLRCQYCDTAYAFSGGAIQEMDDVLNTVASYQCKYVCVTGGEPLAQPGCIELLKRLCDAGYFVSIETSGARDISAIDKRVMVVMDLKTPDSMESDKNLLANLDYLKPDDQIKFVLCSRSDYEWACNIINDYRLSERVQLLFSPSWNQLAPAELANWIVQDKLSVRFQLQLHKILWNDAPGH

SEQ ID NO: 31038 - protein, 217 aa, Legionella feeleii
  REGION 1..217: note = tr|A0A378IWS4|A0A378IWS4_9GAMM 7-carboxy-7-deazaguanine synthase OS=Legionella feeleii; OX = 453 GN=nrdG PE=3 SV=1
MKQVSTQLRITEIFYSLQGESVTVGLPTVFIRLTGCPLRCQYCDTAYAFSGGQMQSLTSILEKVTSYNCKQVCVTGGEPLAQPGCIDLLRQLCDAGFNVSLETSGARDIAQVDQRVMVIMDLKTPDSGESKKNLFANLAHLKQSDQIKFVLCSREDYDWACQIIIEHNLSERVQILFSPSWNELNSTTLADWIVTDRLPVRFQLQLHKILWNDAPGH

SEQ ID NO: 31039 - protein, 217 aa, Legionella feeleii
  REGION 1..217: note = tr|A0A0W0THJ4|A0A0W0THJ4_9GAMM 7-carboxy-7-deazaguanine synthase OS=Legionella feeleii; OX = 453 GN=nrdG PE=3 SV=1
MKQVSSQLRITEIFYSLQGESVTVGLPTVFIRLTGCPLRCQYCDTAYAFSGGEMQSLTSILEKVTSYNCKQVCVTGGEPLAQPGCIDLLRQLCDAGFSVSLETSGARDIAQVDKRVMVIMDLKTPDSGESKKNLFANLAHLKQSDQIKFVLCSREDYDWACQIIIEHNLSERVQILFSPSWNELNSTTLADWIVTDRLPVRFQLQLHKILWNDAPGH

SEQ ID NO: 31040 - protein, 212 aa, Legionella geestiana
  REGION 1..212: note = tr|A0A0W0TGM5|A0A0W0TGM5_9GAMM 7-carboxy-7-deazaguanine synthase OS=Legionella geestiana; OX = 45065 GN=queE PE=3 SV=1
MVLRITEIFHSLQGESTTVGLPTVFVRLTGCPLRCGYCDTAYAFKGGTRLTLQDILDKVRSYGCMRVCVTGGEPLAQPGCIDLLRLLCDEGFAVSLETSGALDIAEVDPRVLVVMDLKTPDSGECAKNRMENLAVLKPSDQIKFVLCSRADYEWARACLKEHTLETRFHVLFSPSWNELNPAMLAEWILEDRLSVRFQLQLHKILWNDAAGR

SEQ ID NO: 31041 - protein, 291 aa, Legionella gratiana
  REGION 1..291: note = tr|A0A378JDP7|A0A378JDP7_9GAMM 7-carboxy-7-deazaguanine synthase OS=Legionella gratiana; OX = 45066 GN=nrdG PE=3 SV=1
MFGLNDRVGKTFFNEALHDELLVTSRFFTLQGEGPYRGHPAYFIRLAKCNLACSFCDTYFDSGEWRNFASLLQETDLIITDFFKKRNLSTPSWAQGFAKKMVLVITGGEPTLQQNLSAFLEIAQPYFQSTQIESNGISVLPKLPKSTTLVVSPKCLEKEGKVIRYLKPNPKTLERADCLKFVISAPENNQYAPYSDIPLWAHEWAKQTNKQVFISPMNIYQKESQRVKAIRDEGRDLTMTERSELNEVISFWEPGLLDLKTNQRNHEYAAEYCMKYGFILNLQIHLYASLP

SEQ ID NO: 31042 - protein, 217 aa, Legionella hackeliae
  REGION 1..217: note = tr|A0A0A8USI6|A0A0A8USI6_LEGHA 7-carboxy-7-deazaguanine synthase OS=Legionella hackeliae; OX = 449 GN=queE PE=3 SV=1
MKHSSTQLRITEIFHSLQGESVTVGLPTVFIRLTGCPLRCQYCDTAYAFSGGNITPVSTILDQVASYECNYVCVTGGEPLAQPGCITLLRELCDAGYNVSLETSGARDLSQVDERVVIVMDLKTPDSKESDKNLFNNLIYLKPNDQIKFVLCSREDYEWACQIMKEYNLSQRVQILFSPSWHQLNPTQLADWIVKDKLPVRFQLQLHKILWNDAPGH

SEQ ID NO: 31043 - protein, 217 aa, Legionella israelensis
  REGION 1..217: note = tr|A0A0W0WNG6|A0A0W0WNG6_9GAMM 7-carboxy-7-deazaguanine synthase OS=Legionella israelensis OX=454 GN=queE PE=3 SV=1
MKRLHHQLRITEIFYSLQGESTTTGLPTVFIRLTGCPLRCQYCDTAYAFSGGILQDIEDVLNHVASFDCLYVCVTGGEPLAQPGCLELLKQLCDSGYRVSLETSGARDISKVDKRVMIVMDLKTPDSKEHEKNQMSNLDYLKPDDQIKFVLCSRADYEWACTLIKTFKLNERAHLLFSPSWNQLNATSLAEWIIEDHLPVRFQIQIHKILWNDAPGH

SEQ ID NO: 31044 - protein, 217 aa, Legionella israelensis
  REGION 1..217: note = tr|A0A516N2T1|A0A516N2T1_9GAMM 7-carboxy-7-deazaguanine synthase OS=Legionella israelensis OX=454 GN=queE PE=3 SV=1
MKRLHHQLRITEIFYSLQGESTTTGLPTVFIRLTGCPLRCQYCDTAYAFSGGILQDIEDVLNQVASFDCLYVCVTGGEPLAQPGCLELLKQLCDSGYRVSLETSGARDISKVDKRVMIVMDLKTPDSKEHEKNQMSNLDYLKPDDQIKFVLCSRADYEWACTLIKTFKLNERAHLLFSPSWNQLNATSLAEWIIEDHLPVRFQIQIHKILWNDAPGH

SEQ ID NO: 31045 - protein, 217 aa, Legionella jamestowniensis
  REGION 1..217: note = tr|A0A0W0UYQ5|A0A0W0UYQ5_9GAMM 7-carboxy-7-deazaguanine synthase OS=Legionella jamestowniensis OX=455 GN=queE PE=3 SV=1
MKHSSTQLRITEIFHSLQGESVTVGLPTVFIRLTGCPLRCQYCDTTYAFSGGKITPISTILEKVASYQCSYVCVTGGEPLAQPGCISLLKELCDAGYNVSLETSGARDLSEVDKRVMIVMDLKTPDSGEADKNLFDNLVFLKPTDQIKFVLCSHDDYQWACQIIDEYNLSKKAQILFSPSWHQLNPTELANWIVEDKLPVRFQLQLHKILWNDAPGY

SEQ ID NO: 31046 - protein, 217 aa, Legionella jordanis
  REGION 1..217: note = tr|A0A0W0VBH2|A0A0W0VBH2_9GAMM 7-carboxy-7-deazaguanine synthase OS=Legionella jordanis; OX = 456 GN=queE PE=3 SV=1
MKQSSNHLRITEIFHSLQGESVTVGLPTVFIRLTGCPLRCHYCDTAYAFSGGKMLSIADILEQLSAYQCEQVCVTGGEPLAQPSCINLLTELCDAGYKVSLETSGARDLSQVDNRVMIVMDLKTPDSGEEQKNLFSNLDWLKPSDQIKFVLCSREDYEWACLIVKEHNLTARLQVLFSPSWNQLNPTTLADWIVEDKLAVRFQLQLHKILWGDIPGH

SEQ ID NO: 31047 - protein, 216 aa, Legionella lansingensis
  REGION 1..216: note = tr|A0A0W0VSV4|A0A0W0VSV4_9GAMM 7-carboxy-7-deazaguanine synthase OS=Legionella lansingensis OX=45067 GN=queE PE=3 SV=1
MISSKQLRITEIFHSLQGESTTVGLPTVFIRLTGCPLRCQYCDTAYAFSGGEIHSIDAILSQVATYHSKHVCVTGGEPLAQPGCLTLLNELCNAGYNVSLETSGARDISQVNQRVMIVMDLKTPGSGECEKNLFDNLVHLKSSDQIKFVLCDRKDYEWACQIMAEYHLPKRVQVLFSPSWGELNPTTLAEWIIKDKLAVRFQLQLHKILWGDVPGH

SEQ ID NO: 31048 - protein, 217 aa, Legionella londiniensis
  REGION 1..217: note = tr|A0A0W0VP67|A0A0W0VP67_9GAMM 7-carboxy-7-deazaguanine synthase OS=Legionella londiniensis OX=45068 GN=queE PE=3 SV=1
MNKLAKQLRITEIFHSLQGESTSIGLPTVFVRLTGCPLRCQYCDTAYAFNGGQIMALDEILLQIASYHCRYVCVTGGEPLAQPGCFALLTELCNRGYLVSLETSGARDISSVDKRVMIVMDLKTPHSGECDRNRLENLACLKKTDQIKFVICNRQDYDWACAMIAEHHLEKIAHILFSPSWGQLEAPLLADWIVQDNLPVRFQLQLHKILWKDTPGR

SEQ ID NO: 31049 - protein, 218 aa, Legionella longbeachae
  REGION 1..218: note = tr|A0A378L5G8|A0A378L5G8_LEGLO 7-carboxy-7-deazaguanine synthase OS=Legionella longbeachae OX=450 GN=nrdG PE=3 SV=1
MKKRLPNQLRITEIFHSLQGESTTIGLPTTFIRLTGCPLRCQYCDTAYAFHGGELIHIEEIISRVVSFECQHVCITGGEPLAQPGCLHLLKQLCDTGYNVSLETSGARDISTVDERVMIVMDLKTPDSGECAKNKLSNLDHLKKTDQIKFVLCSHDDYQWACTMINKHQLTARTQILFSPSWGQLNPTTLANWIVKDRLKVRFQLQLHKILWNDVPGH

SEQ ID NO: 31050 - protein, 291 aa, Legionella longbeachae
  REGION 1..291: note = tr|D3HQ97|D3HQ97_LEGLN 7-carboxy-7-deazaguanine synthase OS=Legionella longbeachae serogroup 1 (strain NSW150) OX=661367 GN=queE PE=3 SV=1
MFGLNDRVGKTFFNAAKHDELLVTSRFFTLQGEGPFRGHPAYFIRLAKCNLACSFCDTYFDSGEWRNFTSLLEEADQVIEDFFKNRNLPPPSWAQGLTKKMVLVITGGEPSLQQNLSAFLDIAQPYFQSTQIESNGICVLSDLPKSTTLVVSPKCLEKEGKVIRYLKPNPKMLERADCLKFVISAPEDNQYAPYSDIPLWAHEWAKKRNKKIFISPMNIYQKEPQRVQVIRDEGRDLTMAERSEINEVVSFWEPGLLDLKRNQRNHEYAAEYCMKYGFILNLQIHLYASLP

SEQ ID NO: 31051 - protein, 217 aa, unidentified
  source 1..217: note = Legionella maceachernii
  REGION 1..217: note = tr|A0A0W0VZI3|A0A0W0VZI3_9GAMM 7-carboxy-7-deazaguanine synthase OS=Legionella maceachernii OX=466 GN=queE PE=3 SV=1
MKQVSNQLRITEIFHSLQGESTTVGLPTVFIRLTGCPLRCQYCDTAYAFNGGELTQVSDVLTKIAAYECSYVCVTGGEPLAQPGCIPLLQQLCDKGYQVSLETSGARDISQVDKRVMVVMDLKTPDSGESAKNLLSNLDHLKQSDQIKFVLCSRGDYEWACQMMKEYRLSGRAQILFSPSWNELNPTTLADWIVNDKLPVRFQLQLHKILWNDAPGH

SEQ ID NO: 31052 - protein, 217 aa, unidentified
  source 1..217: note = Legionella massiliensis
  REGION 1..217: note = tr|A0A078L1C3|A0A078L1C3_9GAMM 7-carboxy-7-deazaguanine synthase OS=Legionella massiliensis OX=1034943 GN=queE PE=3 SV=1
MKQFSNQLRITEIFHSLQGESITVGLPTVFVRLTGCPLRCQYCDTAYAFSGGEIVDIARVLEQVASYDCQHVCVTGGEPLAQPGCLTLMEQLCDAGYKVSLETSGARDISEVDKRVMIVMDLKTPDSGESTKNLFANLDYLKPSDQIKFVLCSRKDYDWARQIMAEFGLADRTQILFSPSWNELNPTHLADWIVQDKLPVRFQLQLHKILWNDAPGH

SEQ ID NO: 31053 - protein, 217 aa, Legionella moravica
  REGION 1..217: note = tr|A0A378JU78|A0A378JU78_9GAMM 7-carboxy-7-deazaguanine synthase OS=Legionella moravica; OX = 39962 GN=nrdG PE=3 SV=1
MKRLNNQLRITEIFHSLQGESVTVGLPTVFVRLTGCPLRCQYCDTAYAFNGGSVQEMDDILETIASYKCNRVCVTGGEPLAQPGCLSLIERLCEKDYQVSIETSGARDISEVDSRVMIVMDLKTPDSLEVDKNLFANLDYLKPTDQIKFVLCSRKDYEWACDLIKEHRLAERVQLLFSPSWNQLNPTDLANWIVEDNLPVRFQLQLHKILWNDAPGH

SEQ ID NO: 31054 - protein, 217 aa, Legionella nautarum
  REGION 1..217: note = tr|A0A0W0WM58|A0A0W0WM58_9GAMM 7-carboxy-7-deazaguanine synthase OS=Legionella nautarum; OX = 45070 GN=queE PE=3 SV=1
MKQVSNSLRITEIFHSLQGESITVGLPTVFIRLTGCPLRCQYCDTAYAFNGGKMTDIPSILDEISAYQCQQVCVTGGEPLAQPGCISLLQELCDQGYQVSLETSGARDIAQVDKRVMVVMDLKTPASGECEKNLFSNLEHLKQSDQIKFVLCDREDYDWACKMMHEHRLSERAQILFSPSWNELNPTELADWIVKDKLAVRFQLQLHKILWNDAPGH

SEQ ID NO: 31055 - protein, 217 aa, unidentified
  source 1..217: note = Legionella norrlandica
  REGION 1..217: note = tr|A0A0A2SVI9|A0A0A2SVI9_9GAMM 7-carboxy-7-deazaguanine synthase OS=Legionella norrlandica OX=1498499 GN=queE PE=3 SV=1
MKRFNEQLRITEIFHSLQGESVTIGLPTVFIRLTGCPLRCQYCDTAYAFSGGEVREIKDILDTVALYQCQYVCVTGGEPLAQPGCITLLSKLCDAGYFVSLETSGARDIAQVDQRVMIVMDLKTPDSQEVDKNLLSNLAFLKPTDQIKLVLCSRNDYEWACSILNEYQLAERVQLLFSPSWNQLNPTDLANWIIQDKLPVRFQLQLHKILWNDVPGH

SEQ ID NO: 31056 - protein, 218 aa, Legionella oakridgensis; identical to SEQ ID NO: 31049
  REGION 1..218: note = tr|A0A0W0X4W5|A0A0W0X4W5_9GAMM 7-carboxy-7-deazaguanine synthase OS=Legionella oakridgensis OX=29423 GN=queE PE=3 SV=1

SEQ ID NO: 31057 - protein, 218 aa, Legionella oakridgensis; identical to SEQ ID NO: 31049
  REGION 1..218: note = tr|W0BHS0|W0BHS0_9GAMM 7-carboxy-7-deazaguanine synthase OS=Legionella oakridgensis ATCC 33761 = DSM 21215; OX = 1268635 GN=queE PE=3 SV=1

SEQ ID NO: 31058 - protein, 291 aa, Legionella parisiensis
  REGION 1..291: note = tr|A0A1E5JQ59|A0A1E5JQ59_9GAMM 7-carboxy-7-deazaguanine synthase OS=Legionella parisiensis OX=45071 GN=queE PE=3 SV=1
MFGLNKKVGKSFFKTAKPDELFITSRFFTLQGEGPFRGHPAYFIRLAKCNLACSFCDTYFDTGEWRSFNSLLEEANSVIAAFFQSRNLPTPSWAKGLEKKMILVITGGEPSLQQNLSAFLEEAKPYFQYIQIESNGISLLPDLPQNTTLVVSPKCLEKDAKAIRYLKPNAKMLERADCLKFVMSAPEEDRYVPYSEIPAWAHEWAEKTNKQVFVSPMNKYRKEPQRVNAIRDEGQELTLAERSEINEVVSFWEAGLLDMEKNQRNHEYAAEYCMKYGFILNLQIHLFASLP

SEQ ID NO: 31059 - protein, 217 aa, Legionella pneumophila
  REGION 1..217: note = tr|Q5ZTW7|Q5ZTW7_LEGPH 7-carboxy-7-deazaguanine synthase OS=Legionella pneumophila subsp. pneumophila (strain Philadelphia 1 / ATCC 33152 / DSM 7513) OX=272624; GN = qu eE PE=3 SV=1
MKRFNEQLRITEIFHSLQGESVTVGLPTVFVRLTGCPLRCQYCDTAYAFSGGEVVEIDDILNKVASYQCQHVCVTGGEPLAQPGCILLLSKLCDAGYSVSLETSGARDIASVDQRVMIVMDLKTPDSREADKNLLSNLSFLKPTDQIKFVLCSRTDYEWACSMLSEYQLAERVQLLFSPSWNQLNPTNLANWIIQDKLPVRFQLQLHKILWNDAPGH

SEQ ID NO: 31060 - protein, 217 aa, Legionella pneumophila
  REGION 1..217: note = tr|A0A4Q5NBF9|A0A4Q5NBF9_LEGPN 7-carboxy-7-deazaguanine synthase OS=Legionella pneumophila OX=446 GN=queE PE=3 SV=1
MKRFNEQLRITEIFHSLQGESVTVGLPTVFVRLTGCPLRCQYCDTAYAFSGGEVVEIDDILNKVASYQCQHVCVTGGEPLAQPGCIPLLSKLCDAGYSVSLETSGARDIASVDQRVMIVMDLKTPDSREADKNLLSNLSFLKPTDQIKFVLCSRTDYEWACSMLSEYQLAERVQLLFSPSWNQLNPTDLANWIIQDKLPVRFQLQLHKILWNDAPGH

SEQ ID NO: 31061 - protein, 217 aa, Legionella quateirensis
  REGION 1..217: note = tr|A0A378KV55|A0A378KV55_9GAMM 7-carboxy-7-deazaguanine synthase OS=Legionella quateirensis OX=45072 GN=nrdG PE=3 SV=1
MKPFNNQLRITEVFHSLQGESVTVGLPTVFVRLTGCPLRCQYCDTAYAFNGGTVQEIDEILETIASFNCKRVCVTGGEPLAQPGCISLLERLCDDHYQVSIETSGARDISEVDSRVMIVMDLKTPDSLEVDKNLFANLECLKPSDQIKFVLCSRSDYEWACALIKEHRLAERVQLLFSPSWNQLNPTDLANWILEDNVPVRFQLQLHKILWNDAPGH

SEQ ID NO: 31062 - protein, 217 aa, Legionella quinlivanii
  REGION 1..217: note = tr|A0A0W0Y0E4|A0A0W0Y0E4_9GAMM 7-carboxy-7-deazaguanine synthase OS=Legionella quinlivanii OX=45073 GN=queE PE=3 SV=1
MTKLNNQLRITEIFHSLQGESTTVGLPTVFIRLTGCPLRCQYCDTAYAFSGGENTEIAAILEKVASFECAHVCVTGGEPLAQPGCLPLMQQLCDAGYQVSLETSGARDIENVDKRVMIVMDLKTPDSGECAKNLFSNIDYLKPSDQIKFVLCSRNDYEWANQLLLEHRLHERTQILYSPSWNQLPATTLADWIVADRLPVRFQIQLHKILWNDAPGH

SEQ ID NO: 31063 - protein, 217 aa, Legionella quinlivanii
  REGION 1..217: note = tr|A0A364LHA2|A0A364LHA2_9GAMM 7-carboxy-7-deazaguanine synthase OS=Legionella quinlivanii OX=45073 GN=queE PE=3 SV=1
MTKLNNQLRITEIFHSLQGESTTVGLPTVFIRLTGCPLRCQYCDTAYAFNGGENTEIAAILEKVASFECSHVCVTGGEPLAQPGCLTLMQQLCDAGYQVSLETSGARNIENVDKRVMIVMDLKTPDSGECAKNLFSNIDYLKPTDQIKFVLCSRKDYEWANQLLREQRLHERTQILYSPSWNQLPATTLADWIVADRLPVRFQIQLHKILWNDAPGH

SEQ ID NO: 31064 - protein, 217 aa, Legionella rubrilucens
  REGION 1..217: note = tr|A0A0W0XZS3|A0A0W0XZS3_9GAMM 7-carboxy-7-deazaguanine synthase OS=Legionella rubrilucens OX=458 GN=queE PE=3 SV=1
MTRAASQLRITEIFHSLQGESTTVGLPTVFIRLTGCPLRCQYCDTAYAFSGGELKPITAIVDEISRFRCRYVCVTGGEPLAQPGCIPLLTNLCDAGYQVSLETSGARDIAEVDPRVMVVMDLKTPDSNECDKNRFDNIPYLKATDQIKFVICSREDYLWACEIIKKYQLIEKVQILFSPSWNQMNPTTLADWIIQDQLPVRFQIQLHKILWNDAKGH

SEQ ID NO: 31065 - protein, 291 aa, Legionella sainthelensi
  REGION 1..291: note = tr|A0A0W0YCM7|A0A0W0YCM7_9GAMM 7-carboxy-7-deazaguanine synthase OS=Legionella sainthelensi OX=28087 GN=queE PE=3 SV=1
MFGLNHRVGKAFFNTAKHNELLVTSRFFTLQGEGPYRGHPAYFIRLAKCNLACSFCDTYFDSGEWRNFNSLLEEADQVIEDFFKNRSLSIPSWAQGLTKKMVLVITGGEPSLQQNLSAFLEMAQLYFQSTQIESNGISALPALPESTTLVVSPKCLEKAGKVIRYLKPNPKMLERADCLKFVISAPEDNQYAPYSDIPLWAHEWAKKTHKQIFISPMNIYQKEPQRVKAMRDEGRDLTMAERSEINEVVSFWESGLLDLKRNQRNHEYAAEYCMRYGFILNLQIHLYAGLP

SEQ ID NO: 31066 - protein, 291 aa, Legionella sainthelensi
  REGION 1..291: note = tr|A0A2H5FKE7|A0A2H5FKE7_9GAMM 7-carboxy-7-deazaguanine synthase OS=Legionella sainthelensi OX=28087 GN=queE PE=3 SV=1
MFGLNHRVGKAFFNTAEHDELLVTSRFFTLQGEGPYRGHPAYFIRLAKCNLACSFCDTYFDSGEWRNFTSLLEEADQVIEAFFKNRSLSIPSWAQGLTKKMVLVITGGEPSLQQNLSAFLEMAQLYFQSTQIESNGISALSDLPESTTLVVSPKCLEKAGKVIRYLKPNLKMLERADCLKFVISAPEDNQYAPYSDIPLWAHEWAKKTNKQIFISPMNIYQKEPQRVKAMRDEGRDLTMAERSEINEVVSFWESGLLDLKRNQRNHEYAAEYCMRYGFILNLQIHLYAGLP

SEQ ID NO: 31067 - protein, 291 aa, Legionella santicrucis
  REGION 1..291: note = tr|A0A0W0YAQ2|A0A0W0YAQ2_9GAMM 7-carboxy-7-deazaguanine synthase OS=Legionella santicrucis OX=45074 GN=queE PE=3 SV=1
MFGFNDKVGKAFFNDAKHNELLVTSRFFTLQGEGPYRGHPAYFIRLAKCNLACSFCDTYFDSGEWRNFTSLLKETDQVIDDFFKNRRLATPSWAQGLAKKMVLVITGGEPSLQQNLSAFLETAQLYFQSTQIESNGISVLSDLPKNTTLVVSPKCLEKAGKVIRYLKPNPKMLERADCLKFVISAPENNQYAPYSDIPLWAHEWAKQTSKQIFISPMNIYQKEPQRVKVMRDEGRYLTMAERSEINEVVSFWEPDLLDLKTNQRNHEYAAEYCMKYGFILNLQIHLYAGLP

SEQ ID NO: 31068 - protein, 291 aa, Legionella shakespearei
  REGION 1..291: note = tr|A0A0W0YLB1|A0A0W0YLB1_9GAMM 7-carboxy-7-deazaguanine synthase OS=Legionella shakespearei DSM 23087 OX=1122169 GN=queE PE=3 SV=1
MFGLNTIVGKSFFKEAKEDELLVTSRFFTLQGEGPYRGQPAYFIRLAKCNLACSFCDTYFDSGDWRSFTSLLDEATQVINDFFTKRDLPIPAWAEKERRNIVLVITGGEPSLQNNVSAFLDKAQHYFRNTQIESNGISVLEDMPAGTTLVVSPKCLEKKGKVVRYLEPNKDMLERADCLKFVMSAPEDDYYSPYSEVPQWAHDWAQKTGKPVFVSPMNIYKKEPQRVKRIRDEGRDLTLEERSDINEVVSFWEPELLDLKKNQRNHEYAAEYCMKHGFTLNLQIHLFASLP

SEQ ID NO: 31069 - protein, 217 aa, Legionella sp.
  REGION 1..217: note = tr|A0A433JLE6|A0A433JLE6_9GAMM 7-carboxy-7-deazaguanine synthase OS=Legionella sp. km714; OX = 2498110 GN=queE PE=3 SV=1
MNRRANQLRITEIFHSLQGESVTMGLPTVFVRLTGCPLRCQYCDTAYAFHGGQLRNIRDILADVAAFNCSHVCVTGGEPLAQPGCIDLLQQLCDNGYHVSLETSGARELAGVDPRVMIVMDLKTPDSGECEKNKYTNLSYLKATDQIKFVLCSREDYLWACAIISEYKLTERVHILFSPSWGQLHPTELANWIIEDKLSVRFQLQLHKILWNDAPGH

SEQ ID NO: 31070 - protein, 291 aa, Legionella sp.
  REGION 1..291: note = tr|A0A1Q3UCG2|A0A1Q3UCG2_9GAMM 7-carboxy-7-deazaguanine synthase OS=Legionella sp. 39-23; OX = 1895902 GN=queE PE=3 SV=1
MFGLNDKVGRSFFKDAKSDALFVTSRFFTLQGEGPFRGHPAYFIRLAKCNLACSFCDTYFDTGEWLDFTSLLEEADTVIAAFFQKRNLPTPAWAQGLAKKMVLVITGGEPSLQRNLSAFLEKAQPYFQQTQIESNGSSILPDLPENTTLVVSPKCLEKDGAIIRYLKPNIKMLERADYLKFVMSAPEDNHYTPYSEIPTWAHEWAEKTKKQVFVSPMNRYLREPQRVQKIRDKGRDLTLEERSEINEVVSFWEPGLLDLKKNQRNHEYAAEYCMKHGLILNLQIHLFASLP

SEQ ID NO: 31071 - protein, 217 aa, Legionella spiritensis
  REGION 1..217: note = tr|A0A0W0Z5I5|A0A0W0Z5I5_LEGSP 7-carboxy-7-deazaguanine synthase OS=Legionella spiritensis OX=452 GN=queE PE=3 SV=1
MTRILQQLRITEIFHSLQGESTTVGLPTVFIRLTGCPLRCQYCDTAYAFSGGTVLTFEAILTRVAGYECSHVCVTGGEPLAQPGCIPLLEELCNAGYQVSLETSGARDIALVDPRVMIVMDLKTPGSQECDKNLFGNLARLKRTDQIKFVICNREDYDWACQIILTHQLTEITQVLFSPSWTELNPTLLANWIIQDRLQVRFQLQLHKILWNDAPGH

SEQ ID NO: 31072 - protein, 291 aa, unidentified
  source 1..291: note = Legionella steelei
  REGION 1..291: note = tr|A0A0W0ZCU2|A0A0W0ZCU2_9GAMM 7-carboxy-7-deazaguanine synthase OS=Legionella steelei; OX = 947033 GN=queE PE=3 SV=1
MFGLNDKVGRSFFKDAKSDALFVTSRFFTLQGEGPFRGHPAYFIRLAKCNLACSFCDTYFDTGEWLDFTSLLEEADTVIAAFFQKRNLPTPAWAQGLAKKMVLVITGGEPSLQRNLSAFLEKAQPYFQQTQIESNGSSILPDLPENTTLVVSPKCLEKDGAIIRYLKPNIKMLERADYLKFVMSAPEDNHYTPYSEIPTWAHEWTEKTKKQVFVSPMNRYLREPQRAQTIRDKGRDLTLEERSEINEVVSFWEPGLLDLKKNQRNHEYTAEYCMKHGLILNLQIHLFASLP

SEQ ID NO: 31073 - protein, 291 aa, Legionella steigerwaltii
  REGION 1..291: note = tr|A0A378LI69|A0A378LI69_9GAMM 7-carboxy-7-deazaguanine synthase OS=Legionella steigerwaltii OX=460 GN=nrdG PE=3 SV=1
MFGLNDKVGKSFFKEAKSDELFVTSRFFTLQGEGPFRGHPAYFIRLAKCNLACSFCDTYFDTGEWLDFNSLLEEADTVIQAFFQKRNLPTPSWAQGFAKKMVLVITGGEPSLQENLSAFLEKAQPYFQNTQIESNGISILPDLPKNTTLVVSPKCLEKEGKTIRYLEPNTKMLERADYLKFVMSAPEDNQYTPYSEIPTWAHEWAEKTKKHVFVSPMNRYQKEPQRVKAIRDNGRDLNLEERSEINEVVSFWEPGLLNLEKNQRNHEYAAEYCMKYGFILNLQIHLFASLP

SEQ ID NO: 31074 - protein, 217 aa, Legionella taurinensis
  REGION 1..217: note = tr|A0A3A5LH85|A0A3A5LH85_9GAMM 7-carboxy-7-deazaguanine synthase OS=Legionella taurinensis OX=70611 GN=queE PE=3 SV=1
MSRTASQLRITEIFHSLQGESTTVGLPTVFIRLTGCPLRCQYCDTAYAFSGGELKPITGILDEISRYRCRHVCVTGGEPLAQPGCIPLLTHLCDAGYQVSLETSGARDIAEVDSRVMVVMDLKTPDSNECTKNRFDNIPYLKATDQIKFVICSREDYLWACEIIKKYQLTEKVQILFSPSWEEMNPTTLADWIIQDQLPVRFQIQLHKILWNDAKGH

SEQ ID NO: 31075 - protein, 217 aa, Legionella taurinensis
  REGION 1..217: note = tr|A0A4T0XUG9|A0A4T0XUG9_9GAMM 7-carboxy-7-deazaguanine synthase OS=Legionella taurinensis OX=70611 GN=queE PE=3 SV=1
MSRTASQLRITEIFHSLQGESTTVGLPTVFIRLTGCPLRCQYCDTAYAFSGGELKPITGILDEISRYRCRHVCVTGGEPLAQPGCIPLLTHLCDAGYQVSLETSGARDIAEVDSRVMVVMDLKTPDSNECTKNRFENIPYLKATDQIKFVICSREDYLWACEIIKKYQLTEKVQILFSPSWEEMNPTTLADWIIQDQLPVRFQIQLHKILWNDAKGH

SEQ ID NO: 31076 - protein, 291 aa, Legionella tucsonensis
  REGION 1..291: note = tr|A0A0W0ZUS5|A0A0W0ZUS5_9GAMM 7-carboxy-7-deazaguanine synthase OS=Legionella tucsonensis OX=40335 GN=queE PE=3 SV=1
MFGLNDKVGKSFFKKAKPDELFITSRFFTLQGEGPFRGHPAYFIRLAKCNLACSFCDTYFDVGEWRSFNSLLEETDSVIAAFFQRCNLPTPSWAKGLAKKMVLVITGGEPSLQQNLSAFLEKAKPYFQYTQIESNGITLLPNLPQNITLVVSPKCLEKDGKAIRYLKPNTKILERADCLKFVMSAPEEDRYIPYSEIPAWAHEWAEKTNKQVFVSPMNRYQKEPQRVSAIRDKGRDLTLAERSEINEVVSFWEADLLDMEKNQRNHEYAAEYCMKYGFILNLQIHLFASLP

SEQ ID NO: 31077 - protein, 291 aa, Legionella wadsworthii
  REGION 1..291: note = tr|A0A378LNK7|A0A378LNK7_9GAMM 7-carboxy-7-deazaguanine synthase OS=Legionella wadsworthii OX=28088 GN=nrdG PE=3 SV=1
MFGLNDKVGQSFFKTANADELFVTSRFFTLQGEGPFRGQPAYFIRLAKCNLACSFCDTYFDAGEWRSFTSLLDESEQVISAFFQSRNLPVPSWAQGFSKKIVLVITGGEPLLQRNLSVFLEKAKPYFQMIQIESNGTSILNDLPQSTTLVVSPKCLEKNGKAIRYLKPHLKMLERADYLKFVLSAPEEHRYTPYSAIPEWAHEWAEKTNKQVFVSPMNRYQKEPQQVLSMREKGNELGLAERSEINEVVSFWEPNLLDLKKNQRNHEYAAEYCMKYGFILNLQIHLFASLP

SEQ ID NO: 31078 - protein, 217 aa, Legionella waltersii
  REGION 1..217: note = tr|A0A0W1APB0|A0A0W1APB0_9GAMM 7-carboxy-7-deazaguanine synthase OS=Legionella waltersii; OX = 66969 GN=queE PE=3 SV=1
MSRFSHQLRITEIFHSLQGESITVGLPTVFIRLTGCPLRCQYCDTAYAFTGGEIKTIDEIVSTVDSYNCQYVCVTGGEPLAQPACINLLQQLCDKGYSVSLETSGARDISQVDRRVMVVMDLKTPDSLELDKNLFANLDYLKSSDQIKFVLCSRQDYEWACRIMQEHRLSERVQLLFSPSWNQLNPTELANWIVEDKLSVRFQIQLHKILWNDAPGH

SEQ ID NO: 31079 - protein, 217 aa, Legionella worsleiensis
  REGION 1..217: note = tr|A0A0W1AIS4|A0A0W1AIS4_9GAMM 7-carboxy-7-deazaguanine synthase OS=Legionella worsleiensis OX=45076 GN=queE PE=3 SV=1
MKILGNQLRITEIFHSLQGESVTVGLPTVFVRLTGCPLRCQYCDTAYAFSGGTVRELDEVLATIASFNCKRVCVTGGEPLAQPGCLTLMERLCDENYQVSIETSGARDISKIDSRVMIVMDLKTPDSLEVDKNLFANLDYLKPSDQIKFVLCSRNDYEWACALVKEHGLADRVQLLFSPSWNQLNPTDLANWIVEDNISVRFQLQLHKILWNDAPGH

SEQ ID NO: 31080 - protein, 215 aa, unidentified
  source 1..215: note = Legionellaceae bacterium
  REGION 1..215: note = tr|A0A2E5Y7V1|A0A2E5Y7V1_9GAMM 7-carboxy-7-deazaguanine synthase OS=Legionellaceae bacterium OX=2026753 GN=queE PE=3 SV=1
MIEHTLRITEIFYSLQGESSTVGLPTVFVRLTGCPLRCQYCDTAYAFNGGQLLSISTILTKIASFHPKYVCVTGGEPLAQPKCLNLLTALSDEQYHVSLETSGARDIAPVDARTMIVMDLKTPASGESDKNLWSNLKHLKKTDQIKFVLCDRADYDWAVAMLHQHQLDQLSHVLFSPSWQQLDPSTLADWIIQDNLPVRFQLQLHKILWQDTPGK

SEQ ID NO: 31081 - protein, 215 aa, unidentified
  source 1..215: note = Legionellales bacterium
  REGION 1..215: note = tr|A0A1G0WYR4|A0A1G0WYR4_9GAMM 7-carboxy-7-deazaguanine synthase OS=Legionellales bacterium RIFCSPHIGHO2_12_FULL_37_14 OX=1798568 GN=queE; PE = 3 SV=1
MLKQDVRLTEIFYSIQGESLFSGCPTVFVRLTGCPLRCQYCDTAYAFTGGKLHSIAGILSLVDAYQPKYVCVTGGEPLAQKSCLPLLKALCDKYPYVSLETSGALSIENVDSRVNIVMDIKTPGSLESAKNLTANLSYLKPTDQIKFVLCNRADYAFAKDYIALNNLSQKCELLFSPSWHDLDPAHLAEWILQDKLAVRLQMQLHKVLWNDEPGR

SEQ ID NO: 31082 - protein, 226 aa, unidentified
  source 1..226: note = Legionellales bacterium
  REGION 1..226: note = tr|A0A2E0PYP7|A0A2E0PYP7_9GAMM 7-carboxy-7-deazaguanine synthase OS=Legionellales bacterium OX=2026754 GN=queE PE=3 SV=1
MRLVKNPFSSIQEEIEVVVNEIFYSLQGESSRVGLPTIFIRLTGCPLRCQYCDTEYAFTNGEKVSLKAILNKIKKFPTKYITVTGGEPLAQKSCYKLLTKLCDIGYEVSLETSGAINISDVDKRVKKIVDIKTPGSSEVEKNNFKNLQYLTTKDEIKFVICDKADYVWAKKEIIEKNMDGICEICFSPVYKTLMPSKLANWILKDQLNVRMQIQLHKHLWGDTPGK

SEQ ID NO: 31083 - protein, 236 aa, Leifsonia aquatica
  REGION 1..236: note = tr|U2RDC0|U2RDC0_LEIAQ 7-carboxy-7-deazaguanine synthase OS=Leifsonia aquatica ATCC 14665 OX=1358026; GN = queE PE=3 SV=1
MTKTALHLNEMFVSIQGEGPHAGEPALFVRTALCNLSCEWCDTAYTWDWARYDRASEVRTVDVEQASRLVLSELPAHVRLVILTGGEPLLQQLALTELISEVQEERPDVRFEVETNGTRAPSPGLSALVALFVVSPKLAHSGISSGRRIRPAALNAFPPGRSVLKVVIRDGADFAELHTVVEACGFDRDAVWVMPEGTDPALLHARMAELVPLCIEHGYKVTGRLHVTLWGDKRGK

SEQ ID NO: 31084 - protein, 211 aa, unidentified
  source 1..211: note = Leifsonia flava
  REGION 1..211: note = tr|A0A4Y9QTG9|A0A4Y9QTG9_9MICO 7-carboxy-7-deazaguanine synthase OS=Leifsonia flava; OX = 2561933 GN=queE PE=3 SV=1
MSYKIKEIFYTLQGEGAHAGRPAVFCRFSLCNLWTGRERDRPRAICQFCDTDFVGTDGPGGGKFATADDLADAVEAAWPVGWESNRMVVCTGGEPLLQLDEAVVEALHRRGFYVAVETNGTRLPPPGVDWLCVSPKVGAELVVKRGDELKFVYPQKGVDPASFQHLDFGTFRVQPMDGPDAVANTALAVEYCLNHPTWQLSLQTHKYLGIA

SEQ ID NO: 31085 - protein, 233 aa, Leifsonia xyli
  REGION 1..233: note = tr|A0A2W5SWM7|A0A2W5SWM7_9MICO 7-carboxy-7-deazaguanine synthase OS=Leifsonia xyli; OX = 1575 GN=queE PE=3 SV=1
MKPNSQIPEKKDYQSTLEVHSIFSTIQGEGPFCGRPAVFVRLAGCNLQCPGCDTEYTQGRARMPYLAILKSIHNQLISTNSSANLIVISGGEPFRQKIAPFVDYLIEHDFDVQIETNGSMQIPLELSSMATVVCSPKTAKLHPSALHRANAFKYVMKAGNVRADDGLPLQALDHRATPFIARPHKSFRGKIYLQPMDEQDAGYNADNVAAVLASAMKHNYTVQLQIHKLLNVE

SEQ ID NO: 31086 - protein, 236 aa, unidentified
  source 1..236: note = Leisingera aquaemixtae
  REGION 1..236: note = tr|A0A0P1HPE0|A0A0P1HPE0_9RHOB 7-carboxy-7-deazaguanine synthase OS=Leisingera aquaemixtae OX=1396826 GN=queE PE=3 SV=1
MTTLRIAEIFGPTIQGEGALIGEPTVFVRAGGCDYRCSWCDSMHAVDSAYRHDWAVMSPEDVMAEVRRLSGGKPLTVSISGGNPAIQDFAPVIAYGKAESYRFACETQGSVSKPWFADLDMLVLSPKPPSSGETVDWKAFDRCLEAAEGCGQAVMKIVIFDDKDYAWAKAVAERHPELPLYLQPGNPEVDPEQPVDLNQATDRLLWLIEKVTGDGWFTPRVLPQLHVLVWGNKRGV

SEQ ID NO: 31087 - protein, 235 aa, Leisingera methylohalidivorans
  REGION 1..235: note = tr|V9VT23|V9VT23_9RHOB 7-carboxy-7-deazaguanine synthase OS=Leisingera methylohalidivorans DSM 14336; OX = 999552 GN=queE PE=3 SV=1
MTLRIAEIFGPTIQGEGALIGEPTVFVRAGGCDYRCSWCDSLHAVDSAYRHDWAVMAPEQVMAEVRRLSGGRPLTVSISGGNPAIQDFAPVIAYGKAEGYRFACETQGSVSKPWFADLDTLVLSPKPPSSGETVDWKAFDQCLEAARGCGQAVMKIVIFDDEDYAWAKAAAERHPELPLYLQPGNPEVDPALPVDLSQATDRLLWLIEKVTGDGWFTPRVLPQLHVLVWGNKRGV

SEQ ID NO: 31088 - protein, 236 aa, Leisingera sp.
  REGION 1..236: note = tr|A0A0C1G9E1|A0A0C1G9E1_9RHOB 7-carboxy-7-deazaguanine synthase OS=Leisingera sp. ANG-M7; OX = 1577902 GN=queE PE=3 SV=1
MTTLRIAEIFGPTIQGEGALIGEPTVFVRAGGCDYRCFWCDSMHAVDSANRHDWAVMAPEQVMSEVRRLSGGKPLTVSISGGNPAIQDFAPVIAYGKAEGYRFACETQGSVSKPWFADLDTLVLSPKPPSSGETVDWKAFDQCLKAAKGCGQAVMKIVIFDDKDYAWAKAAAERHPELPLYLQPGNPEVDPELPVDLNQATDRLLWLIEKVTGDGWFTPRVLPQLHVLVWGNKRGV

SEQ ID NO: 31089 - protein, 236 aa, Leisingera sp.
  REGION 1..236: note = tr|A0A481PJW1|A0A481PJW1_9RHOB 7-carboxy-7-deazaguanine synthase OS=Leisingera sp. NJS204; OX = 2508307 GN=queE PE=3 SV=1
MTSLRIAEIFGPTIQGEGALIGEPTVFVRAGGCDYRCSWCDSMHAVDSANRHDWAVMTPEEVMGEVRRLSGGKPLTVSISGGNPAIQDFAPVIAYGKTEGYRFACETQGSVSKPWFGDLDTLVLSPKPPSSGERVDWKAFDLCLEAAKGCGQTVIKIVIFDDKDYAWAKAAAERHPGLPLYLQPGNPEVDPSLPVDLNQATDRLLWLIEKVTGDRWFTPRVLPQLHVLVWGNKRGV

SEQ ID NO: 31090 - protein, 223 aa, unidentified
  source 1..223: note = Lelliottia amnigena
  REGION 1..223: note = tr|A0A1A9FIF1|A0A1A9FIF1_LELAM 7-carboxy-7-deazaguanine synthase OS=Lelliottia amnigena; OX = 61646 GN=queE PE=3 SV=1
MQYPINEMFQTLQGEGYFTGVPAIFIRLQGCPVGCAWCDTKHTWDKLADREVSLFSILAKTKESDKWGAGSAEDLLAIIGRQGWTARHVVITGGEPCIHDLMSLTDLLEKNGFSCQIETSGTHEVRCTPSTWVTVSPKVNMRGGYDVLSQALERADEIKHPVGRVRDIEALDELLETLSDEKQRIIALQPISQKEDATRLCIETCIARNWRLSMQTHKYLNIA

SEQ ID NO: 31091 - protein, 223 aa, unidentified
  source 1..223: note = Lelliottia amnigena
  REGION 1..223: note = tr|A0A3S5XSF9|A0A3S5XSF9_LELAM 7-carboxy-7-deazaguanine synthase OS=Lelliottia amnigena; OX = 61646 GN=queE PE=3 SV=1
MQYPINEMFQTLQGEGYFTGVPAIFIRLQGCPVGCAWCDTKHTWDKLADREVSLFSILAKTKESDKWGAGSAEDLLAIIGRQGWTARHVVITGGEPCIHDLMSLTDLLEKNGYSCQIETSGTHEVRCSHTTWVTVSPKVNMRGGYDVLSQALERADEIKHPVGRVRDIEALDELLATLTDEKQRIIALQPISQKDDATRLCIETCIARNWRLSMQTHKYLNIA

SEQ ID NO: 31092 - protein, 223 aa, unidentified
  source 1..223: note = Lelliottia nimipressuralis
  REGION 1..223: note = tr|A0A4Y8IWY4|A0A4Y8IWY4_9ENTR 7-carboxy-7-deazaguanine synthase OS=Lelliottia nimipressuralis OX=69220 GN=queE PE=3 SV=1
MQYPINEMFQTLQGEGYFTGVPAIFIRLQGCPVGCAWCDTKHTWDKLADREVSLFSILAKTKESDKWGAGSSEDLLAIIGRQGWTARHVVITGGEPCIHDLTPLTELLEKNGYSCQIETSGTHEVRCSHATWVTVSPKVNMRGGYDVLSQALERADEIKHPVGRVRDIEALDELLATLADEKQRVIALQPISQKEDATRLCIETCIARNWRLSMQTHKYLNIA

SEQ ID NO: 31093 - protein, 223 aa, unidentified; identical to SEQ ID NO: 29041
  source 1..223: note = Lelliottia nimipressuralis
  REGION 1..223: note = tr|A0A4Q0WED3|A0A4Q0WED3_9ENTR 7-carboxy-7-deazaguanine synthase OS=Lelliottia nimipressuralis OX=69220 GN=queE PE=3 SV=1

SEQ ID NO: 31094 - protein, 223 aa, unidentified
  source 1..223: note = Lelliottia sp.
  REGION 1..223: note = tr|A0A2S5C9M5|A0A2S5C9M5_9ENTR 7-carboxy-7-deazaguanine synthase OS=Lelliottia sp. 7254-16 OX=2080842 GN=queE PE=3 SV=1
MQYPINEMFQTLQGEGYFTGVPAIFIRLQGCPVGCAWCDTKHTWDKLADREVSLFSILAKTKESDKWGAGSAEDLLAIIGRQGWTARHVVITGGEPCIHDLTSLTELLEKNGYSCQIETSGTHEVRCSHSTWVTVSPKVNMRGGYDVLSQALERADEIKHPVGRVRDIEALDELLATLTDEKQRIIALQPISQKDDATRLCIETCIARNWRLSMQTHKYLNIA

SEQ ID NO: 31095 - protein, 242 aa, Lentibacillus sp.
  REGION 1..242: note = tr|A0A4Q3X7Y6|A0A4Q3X7Y6_9BACI 7-carboxy-7-deazaguanine synthase OS=Lentibacillus sp. SSKP1-9 OX=2510307 GN=queE PE=3 SV=1
MSKIPVMEIFGPTIQGEGMVIGQKTMFVRTAGCDYSCSWCDSAFTWDGSEKDKIKQMDAEEIWEELRALGGDGFSFVTISGGNPALLKNLRYLIDLLKKNNIRVGLETQGSKWQDWFLDINQLTISPKPPSSGMVTDFDVLDNIIERLKDADPSYNTSLKVVVFDDEDYNYAKKVHFRYPHIPFFLQVGNDDSKTANDQQLVSQLLHKYEKLVDKTIEDNEFKDVKILPQLHTYIWGNKRGV

SEQ ID NO: 31096 - protein, 209 aa, unidentified
  source 1..209: note = Lentimicrobiaceae bacterium
  REGION 1..209: note = tr|A0A2E2XWG0|A0A2E2XWG0_9BACT 7-carboxy-7-deazaguanine synthase OS=Lentimicrobiaceae bacterium OX=2026756 GN=queE PE=3 SV=1
MAKDSDILKGGKILPIMEEFYTLQGEGYNMGRAAYFVRLGGCDVGCSWCDIKESWNEDLFPPKDVASVILNIKANSADTVVVTGGEPSLYPLDYFTNKLKENDILTMIETSGAHPLSGSWDWICLSPKKYSPPKGNIYERAHELKVIIQHKGDLEWAERNAELVNNDALLFLQPEWSVADDIMPILTEYIMNNPQWRMSLQSHKYMGIP

SEQ ID NO: 31097 - protein, 212 aa, Lentisphaera araneosa
  REGION 1..212: note = tr|A6DHQ9|A6DHQ9_9BACT 7-carboxy-7-deazaguanine synthase OS=Lentisphaera araneosa HTCC2155 OX=313628; GN = queE PE=3 SV=1
MLYITEIYKSLQGESTWSGLACIFIRLSGCNLRCSWCDTEYSFTSGDKLSIDNILDRVEQLNCDLVEVTGGEPLAQDKVGELVQKLLDLGKTVLVETGGHMDINLVSKESIRIMDIKCPASKMSHKNDLKNIAKLTPKDEVKFVIQNKEDFLWAEKTIREYKLEKKCTVIMSTVFGLMDREELAGLILQSGLNIRMQIQLHKLIWSEDTKGV

SEQ ID NO: 31098 - protein, 217 aa, unidentified
  source 1..217: note = Lentisphaerae bacterium
  REGION 1..217: note = tr|A0A1G0WFG0|A0A1G0WFG0_9BACT 7-carboxy-7-deazaguanine synthase OS=Lentisphaerae bacterium GWF2_38_69 OX=1798570 GN=queE PE=3 SV=1
MKTLQICETFTSIQGETTHIGKPCFFIRLSKCNLNCRWCDTKYAFSDLDSKEIKIDELIEMAILSGVKLVNVTGGEPLLQENTIELLNKLIKKGFTVLLETNGSIPIKKVPDKVIIILDFKCPSSGYSEKMFLENYQMLKKMDEVKFVIENEKDYRFALNKIEELNLQTKTQNILFSPVLSKLAPRFLANWMIKDKTPAILQVQLHKFIWPDIERGV

SEQ ID NO: 31099 - protein, 212 aa, unidentified
  source 1..212: note = Lentisphaerae bacterium
  REGION 1..212: note = tr|A0A1V5GUT1|A0A1V5GUT1_9BACT 7-carboxy-7-deazaguanine synthase OS=Lentisphaerae bacterium ADurb.BinA184 OX=1852901 GN=queE PE=3 SV=1
MLHVSEVFRSIQGESTFAGLPCVFIRLAGCNLNCRYCDTRHARQPDRTVPWRGLVDEALALGGGIVEVTGGEPLLQPRTPQLLDALAESGRTVLLETNGSLGLPGKRRYHVIMDMKCPASGEAAAFYEPNIGRLTGRDELKFVVSSRDDFDWACQQIERHGLAGRGFPLLFAPAYGACKPAELAEWVLASGLPLRMQVQLHKVIWPHAKRGV

SEQ ID NO: 31100 - protein, 214 aa, unidentified
  source 1..214: note = Lentisphaeria bacterium
  REGION 1..214: note = tr|A0A355M977|A0A355M977_9BACT 7-carboxy-7-deazaguanine synthase OS=Lentisphaeria bacterium OX=2053569 GN=queE PE=3 SV=1
MQICETFTSIQGETTHIGKPCFFIRLSKCNLNCRWCDTKYAFSDLDSKEIKIDELIEMAILSGVKLVNVTGGEPLLQENTIELLNKLIKKGFTVLLETNGSIPIKKVPDKVIIILDFKCPSSGYSEKMFLENYQMLKKMDEVKFVIENEKDYRFALNKIEELNLQTKTQNILFSPVLSKLAPRFLANWMIKDKTPAILQVQLHKFIWPDIERGV

SEQ ID NO: 31101 - protein, 269 aa, unidentified
  source 1..269: note = Lentisphaeria bacterium
  REGION 1..269: note = tr|A0A348XGS0|A0A348XGS0_9BACT 7-carboxy-7-deazaguanine synthase OS=Lentisphaeria bacterium OX=2053569 GN=queE PE=3 SV=1
MPATAPLVESAKAAKQASVHVSEIFSSIQGEGTELGKAHLFVRLYGCHLQCRFCDTPETVTGLQPPKFRPPSFRFLEADERIENPCSAEQLYTLIQKAEVEHGPHDAVAITGGEPLIQAQFLTRLLPLIREGGQRIYLETSGDLVGALAVVQPWIDIIAMDLKLPSSAGQRPRWRLHRDFLAKALEGTASLTIKVVVNNTTTDADICEARNLVAEFAPDIPFVLQPMTAISGAKDVPEMADLQRWRELVRERLSDVRIIPQMHHFMGLR

SEQ ID NO: 31102 - protein, 211 aa, unidentified
  source 1..211: note = Lentzea aerocolonigenes
  REGION 1..211: note = tr|A0A0F0H9P8|A0A0F0H9P8_LENAE 7-carboxy-7-deazaguanine synthase OS=Lentzea aerocolonigenes OX=68170 GN=queE PE=3 SV=1
MTYFVKEIFYTLQGEGRHAGRPAVFCRFSRCNLWTGLEKDRHRAVCQFCDTDFVGADGINGGKFTTAEELANAVANVWEGDTDEERFVVCTGGEPLLQLDIAAIDALHDRGFEISVETNGTQVPPPGIDWLCVSPKLGSTLVATSGHELKLVFPQVDGEPERFEHLRFESFRLQPMDGPDVAANTAAAIAYCKRNPKWSLSVQTHKYLGIA

SEQ ID NO: 31103 - protein, 229 aa, unidentified
  source 1..229: note = Lentzea guizhouensis
  REGION 1..229: note = tr|A0A1B2HE91|A0A1B2HE91_9PSEU 7-carboxy-7-deazaguanine synthase OS=Lentzea guizhouensis; OX = 1586287 GN=queE PE=3 SV=1
MPPGRVEGSAILTEKFESFQGEGPWTGQRCVFVRFSRCNLRCSYCDTPESWDWNRYNPAEVSDRVPVTELVSWVRERGVDMMVITGGEPMLQQPAMIALARGLADVRVQVETNGTIAPTPELASVVDLWVVSPKLANSGMTYSTRIKADALSALVATGRAVFKFVVTEPGRDLDEIAQLVEEHRLAPVWVMPEGTTQEKVLAGMDALYGPATERGWNVSTRLHILTGAR

SEQ ID NO: 31104 - protein, 203 aa, unidentified
  source 1..203: note = Leptolyngbya boryana
  REGION 1..203: note = tr|A0A1Z4JPM7|A0A1Z4JPM7_LEPBY 7-carboxy-7-deazaguanine synthase OS=Leptolyngbya boryana NIES-2135 OX=1973484 GN=queE PE=3 SV=1
MIRTEAQTLPIVETFHSVQGEGAWTGTSALFIRLGGCDVGCWFCDTKESWVAKRHPRQSIQELVNLAIEVNSAIVVITGGEPLMHDLTELTKALKDEGLRLHLETSGAHPFSGTFDWVTLSPKQFKPPHESVYAHVDELKVVIAQAADFEWAEQQSQQVSDRAVRYLQPEWSSQESTSLIFEYVKQQPKWRMGLQTHKLLGVN

SEQ ID NO: 31105 - protein, 213 aa, unidentified
  source 1..213: note = Leptolyngbya foveolarum
  REGION 1..213: note = tr|A0A2W4WJY7|A0A2W4WJY7_9CYAN 7-carboxy-7-deazaguanine synthase OS=Leptolyngbya foveolarum OX=47253 GN=queE PE=3 SV=1
MVLLSAQSPVAKIDSKTALPVVETFHSVQGEGFWTGVSAFFIRLAGCDVGCSWCDTKHSWPMQSHPKREILALVAEAIAANPFMVVITGGEPLMHDLTRLTQALKASGLRVHLETSGSHPLSGEFDWISLSPKQFKPPLAEIYPLASELKVVIDGESDLAWAKKNAEKVSAQVVKLLQPQWESPVGQQLVMDYVLTHSEWRVGLQTHKFLGVR

SEQ ID NO: 31106 - protein, 212 aa, Leptolyngbya sp.
  REGION 1..212: note = tr|K9F2X0|K9F2X0_9CYAN 7-carboxy-7-deazaguanine synthase OS=Leptolyngbya sp. PCC 7375 OX=102129 GN=queE; PE = 3 SV=1
MLSELTLSPTADIAETTYPIVETFHSVQGEGTWTGASAFFIRLAGCDVGCPWCDTKISWSTQPHPQQAMGDLVKQAHTAQPFMVVVTGGEPLMHDLAPLTQALRQAGLRIHLETSGAHPFSGEFDWVSLSPKRFKPPQSSIYAQADELKVVISTEDDLIWAQEQAAQVPVTTIKLLQPEWTSEHSQQLVFDYVKRHSDWRMSLQTHKFLGVR

SEQ ID NO: 31107 - protein, 200 aa, Leptolyngbya sp.
  REGION 1..200: note = tr|A0A0S3U9X5|A0A0S3U9X5_9CYAN 7-carboxy-7-deazaguanine synthase OS=Leptolyngbya sp. NIES-3755 OX=1752064 GN=queE PE=3 SV=1
MIEQLFPVVETFHSVQGEGAWTGTSAFFIRLALCDVGCWFCDTKESWSAKRHPQKSIDELVKSAIEAKSAIVVITGGEPLMHDLTELTKALHQAGLRLHLETSGAHPYSGEFDWVTLSPKLSKLPHESVYAHADELKIVISEESDLEWAERESEKVSDRVIHYLQPEWSHKQSLDLIFEYVKQHPKWRISLQTHKLLGVE

SEQ ID NO: 31108 - protein, 231 aa, unidentified
  source 1..231: note = Leptolyngbya valderiana
  REGION 1..231: note = tr|A0A166W9N9|A0A166W9N9_9CYAN 7-carboxy-7-deazaguanine synthase OS=Leptolyngbya valderiana BDU 20041 OX=322866 GN=queE PE=3 SV=1
MPIAETFVSIQGEGKLTGMPSWFVRVAGCNLRCGWCDTPYASWEPKGDRRTIDELLREARDRRIGHAVLTGGEPMIFEPIADLARGLTDLGVHVTIETAGTVHRPVHCDLLSLSPKLANSTPHDDRRDPSGAIAVRHERQRLDLHALNALLADHPQRQLKFVVASETDLPEIEQLLSQLRGVESGDVLLMPEGVASPDPASLGWLVDACVARGWRYCHRLHIELFGNTRGT

SEQ ID NO: 31109 - protein, 217 aa, Leptonema illini
  REGION 1..217: note = tr|H2CLA2|H2CLA2_9LEPT 7-carboxy-7-deazaguanine synthase OS=Leptonema illini DSM 21528 OX=929563 GN=queE; PE = 3 SV=1
MAVLTDTLRLTETFLSLQGEGEHAGLLCYFIRTAGCDLRCRWCDTDYSWTGGVKHSLDDIVAGIPEGVTLVQITGGEPLLQKEAVIELIKRLSAEYAVLLETGGHRSIEGLPPATHIVLDIKLPGSNEAHHNFADNLPFLKSSDEIKFVIADRRDYEAARSWINEHRLHQLCKLLVSPVFGEIAPSDLAQWVIEDRLPVRMQLQQHKLIWDPNRRGV

SEQ ID NO: 31110 - protein, 237 aa, unidentified
  source 1..237: note = Leptospira adleri
  REGION 1..237: note = tr|A0A2M9YQ03|A0A2M9YQ03_9LEPT 7-carboxy-7-deazaguanine synthase OS=Leptospira adleri; OX = 2023186 GN=queE PE=3 SV=1
MNNLKTSVHEIYLSLSGEGISTGLPTVFVRMAGCSLRCGMAVGRKLWCDTPYALSPNAGEESDLEQVLKQIQELSPVDTQILLTGGEPLEGRNRDFSVALGNEIFRARKQSGSYPRPRVETNGAESIEGLDSFVFTLDYKLPGSGMEERMLLKNLEIYKDRKNNLDEIKFVIRDRIDFDRCIEVIQEFRLSGNLLASPVQSELSPDLLSEWIKSSLGSGLRLSLQTHKYIWGDQRGV

SEQ ID NO: 31111 - protein, 259 aa, Leptospira alexanderi
  REGION 1..259: note = tr|V6I0C3|V6I0C3_9LEPT 7-carboxy-7-deazaguanine synthase OS=Leptospira alexanderi serovar Manhao 3 str. L 60 OX=1049759 GN=queE PE=3 SV=1
MPFYFFTILLFTRRKTLYLKEPMDNLKTSVHEIYLSLSGEGISTGIPTVFVRMAGCSLRCGMVTGRKLWCDTPYALSPSAGEEMDLKRVLNRIQELSPVYTQVLLTGGEPLEGRNRDFSLVLGNEIFRTRKSSNIYPRPRVETNGAESIEGLDQFVFTLDYKLPGSGMENRMNLKNLEIYNKRKNELDEIKFVIRDKNDFKRCLEVIETHRLSGNLLASPVQGELSPEILSEWLKSSLSSGLRLSLQTHKYIWGDKRGV

SEQ ID NO: 31112 - protein, 237 aa, unidentified
  source 1..237: note = Leptospira alstonii
  REGION 1..237: note = tr|T0FZ74|T0FZ74_9LEPT 7-carboxy-7-deazaguanine synthase OS=Leptospira alstonii serovar Pingchang str. 80-412 OX=1218564 GN=queE PE=3 SV=1
MDNLKTSVHEIYLSLSGEGISTGVPTVFVRMAGCSLRCGMVTGRKLWCDTPYALSPNAGEEWNLNRVLDKIQNLSPVNTQVLLTGGEPLEGRNRDFSVALGKEIFRTRKSSGLYPRPRVETNGAESIEGLDQFVFTLDYKLPGSGMEDRMSLRNLEIYNKRKNDLDEIKFVIRDRNDFERCLEVIENHRLSGNLLASPVQGELSPEVLAEWMKSSLGSGLRLSLQTHKYIWGDKRGV

SEQ ID NO: 31113 - protein, 237 aa, unidentified; identical to SEQ ID NO: 31112
  source 1..237: note = Leptospira alstonii
  REGION 1..237: note = tr|M6DGG9|M6DGG9_9LEPT 7-carboxy-7-deazaguanine synthase OS=Leptospira alstonii serovar Sichuan str. 79601; OX = 1218565 GN=queE PE=3 SV=1

SEQ ID NO: 31114 - protein, 234 aa, unidentified
  source 1..234: note = Leptospira andrefontaineae
  REGION 1..234: note = tr|A0A4R9H428|A0A4R9H428_9LEPT 7-carboxy-7-deazaguanine synthase OS=Leptospira andrefontaineae OX=2484976 GN=queE PE=3 SV=1
MKSVVHEIYLSVSGEGISTGLPTIFVRFAGCSLRCGMDGSRKLWCDTPYALSPNAGKEIELEDVISEIGSISSSPTQILLTGGEPLENSNRIFSQTLAQKLKLSRQVSGLYTRVRVETNGAEPIRDLENMVFTLDYKLPGSGMENKMVLDNLEFVRDRNDNLDEIKFVIRDRKDFDRTLEVIDGFKLKGNLLASPVFGELAPEILVDWIKENNRTDLRLSLQTHKYIWGEKRGV

SEQ ID NO: 31115 - protein, 236 aa, unidentified
  source 1..236: note = Leptospira bandrabouensis
  REGION 1..236: note = tr|A0A4Z1AYV6|A0A4Z1AYV6_9LEPT 7-carboxy-7-deazaguanine synthase OS=Leptospira bandrabouensis OX=2484903 GN=queE PE=3 SV=1
MFGKIHEIYSSISGEGISQGIPTVFIRFAGCSLRCGKTESRSLWCDTAYALGPNQGEEKSLESIWSELENLDPHHGYQVLLSGGEPLEGKNRDLSISIANKIYKHRTEAGLPYPAARVETNGSERITEDVFFIFTMDYKLPGSGMEDRMDLENFRILEKRHNSLDEIKFVVRDRIDFDRSIEVILEQKIQTNILYSPVHGEVDAKELVEWIKVDNPPKCRLSLQIHKVLWGNQKGV

SEQ ID NO: 31116 - protein, 237 aa, unidentified
  source 1..237: note = Leptospira barantonii
  REGION 1..237: note = tr|A0A2M9Z043|A0A2M9Z043_9LEPT 7-carboxy-7-deazaguanine synthase OS=Leptospira barantonii; OX = 2023184 GN=queE PE=3 SV=1
MDNLKTSVHEIYLSLSGEGISTGIPTVFVRMAGCSLRCGMAVGRKLWCDTPYALSPNAGEESNLNQVLDKIQELSPVNTQILLTGGEPLEGKNRDFSIALGNEIFRTRNSSGLYPRPRVETNGAESIEGLDRFVFTLDYKLPGSGMEDRMDLKNLEIYKQRNDVLDEIKFVIRDRNDFERCIEVIENHKLSGNLLASPVQGELSPEVLAEWMKSFLGSGLRLSLQTHKYIWGDQRGV

SEQ ID NO: 31117 - protein, 236 aa, Leptospira biflexa
  REGION 1..236: note = tr|B0SRW5|B0SRW5_LEPBP 7-carboxy-7-deazaguanine synthase OS=Leptospira biflexa serovar Patoc (strain Patoc 1 / ATCC 23582 / Paris) OX=456481 GN=queE PE=3 SV=1
MYGKIHEIYSSISGEGISQGIPTVFVRFAGCSLRCGKTDTRSLWCDTPYALGPNQGETKPLSTIMDEIVALDPTHGYQILLTGGEPLEGKNRDLSISIAESIHSFRTHNDKPYPSSRVETNGSEKITLDPFFIFTMDYKLPGSGMEGRMDLENFQILEKRHNSLDEIKFVVRDRIDFERSIEVIREQKIQTNILYSPVHGEVDAKELVEWIKIDNPPKGRLSLQIHKVLWGNQKGV

SEQ ID NO: 31118 - protein, 236 aa, Leptospira biflexa
  REGION 1..236: note = tr|A0A5F2CFP2|A0A5F2CFP2_LEPBI 7-carboxy-7-deazaguanine synthase OS=Leptospira biflexa; OX = 172 GN=queE PE=3 SV=1
MHGKIHEIYSSISGEGISQGIPTVFVRFAGCSLRCGKTDTRSLWCDTPYALGPNQGETKPLSTIMDEIVALDPTHGYQILLTGGEPLEGKNRDLSISIAQSIHSFRTHNDKPYPSSRVETNGSEKITLDPFFIFTMDYKLPGSGMEGRMDLENFQILEKRHNSLDEIKFVVRDRIDFERSIEVIREQKIQTNILYSPVHGEVDAKELVEWIKIDNPPKCRLSLQIHKVLWGNQKGV

SEQ ID NO: 31119 - protein, 241 aa, Leptospira borgpetersenii
  REGION 1..241: note = tr|M6BL64|M6BL64_LEPBO 7-carboxy-7-deazaguanine synthase OS=Leptospira borgpetersenii serovar Hardjo-bovis str. Sponselee OX=1303729 GN=queE PE=3 SV=1
MKEPMDNLKTSVHEIYLSLSGEGISTGIPTVFVRMAGCSLRCGMAIGKKLWCDTPYALSPSAGEEMDLKRVLNRIQELSPVYTQVLLTGGEPLEGGNRDFSLALGNEIFRTRKFSNSYPRARVETNGAESIEGLDQFVFTLDYKLPGSGMENRMNLENLEIYNKRKNELDEIKFVIRDRNDFERCLEVIKVHELSGNLLASPVQGELSPEILSEWLKSSLGSRLRLSLQTHKYIWGDKRGI

SEQ ID NO: 31120 - protein, 259 aa, Leptospira borgpetersenii
  REGION 1..259: note = tr|M6WS77|M6WS77_LEPBO 7-carboxy-7-deazaguanine synthase OS=Leptospira borgpetersenii serovar Pomona str. 200901868 OX=1192866 GN=queE PE=3 SV=1
MPFYFFTVLLFAQRKTLYLKEPMDNLKTSVHEIYLSLSGEGISTGIPTVFVRMAGCSLRCGMAIGKKLWCDTPYALSPSAGEEMDLKRVLNRIQELSPVYTQVLLTGGEPLEGRNRDFSLALGNEIFITRKFSNSYPRARVETNGAESIEGLDQFVFTLDYKLPGSGMENRMNLENLEIYNKRKNELDEIKFVIRDRNDFERCLEVIKVHELSGNLLASPVQGELSPEILSEWLKSSLGSRLRLSLQTHKYIWGDKRGV

SEQ ID NO: 31121 - protein, 236 aa, unidentified
  source 1..236: note = Leptospira bourretii
  REGION 1..236: note = tr|A0A4R9IPB3|A0A4R9IPB3_9LEPT 7-carboxy-7-deazaguanine synthase OS=Leptospira bourretii; OX = 2484962 GN=queE PE=3 SV=1
MFGKIHEVYSSISGEGISQGIPTVFIRFAGCSLRCGKTDSRALWCDTAYALGPNQGTEKSLDFIWAELENLDPHHGYQVLLTGGEPLEGKNRDLSLLIANKIYQYRTNAGLPYPASRVETNGSERITEDAFFIFTMDYKLPGSGMEDRMDQENFRILEKRHNSLDEIKFVVRDRIDFERSIEVIREKKIHTNILYSPVHGEVDAKELVEWIKVDNPPKCRLSLQIHKVLWGNQKGV

SEQ ID NO: 31122 - protein, 236 aa, unidentified
  source 1..236: note = Leptospira bouyouniensis
  REGION 1..236: note = tr|A0A4R9HL31|A0A4R9HL31_9LEPT 7-carboxy-7-deazaguanine synthase OS=Leptospira bouyouniensis OX=2484911 GN=queE PE=3 SV=1
MFGKIHEIYSSISGEGISQGVPTVFVRFAGCSLRCGKTESKSLWCDTPYALGPNQGETKTVSNIMDEIETLDKNHGYQILLTGGEPLEGKNRDLSITIAQTIFSYRTKHGKPYPTSRVETNGSEKITLDPFFIFTMDYKLPGSGMENRMDSENFQILEKRHNSLDEIKFVVRDRIDFERSIEVIREQKIQTNILYSPVHGEVDAKELVEWIKIDNPPKCRLSLQIHKVLWGNQKGV

SEQ ID NO: 31123 - protein, 236 aa, unidentified
  source 1..236: note = Leptospira brenneri
  REGION 1..236: note = tr|A0A2M9Y5T0|A0A2M9Y5T0_9LEPT 7-carboxy-7-deazaguanine synthase OS=Leptospira brenneri; OX = 2023182 GN=queE PE=3 SV=1
MFGKIHEVYSSISGEGISQGIPTVFIRFAGCSLRCGRTETRALWCDTAYALGPNQGEEKSLDSIWKELEKLDPHHGYQVLLTGGEPLEGKNRDLSLAIANKIYNHRISTELPYPASRVETNGSERITEDPFFIFTMDYKLPGSGMEEKMDQENFRILEKRHNSLDEIKFVVRDRIDFERSLEVVREQKIQTNILYSPVHGEVDAKELVEWIKVDNPPKCRLSLQIHKVLWGNQKGV

SEQ ID NO: 31124 - protein, 234 aa, Leptospira broomii
  REGION 1..234: note = tr|T0GDU5|T0GDU5_9LEPT 7-carboxy-7-deazaguanine synthase OS=Leptospira broomii serovar Hurstbridge str. 5399 OX=1049789 GN=queE PE=3 SV=1
MKSVIHEIYLSVSGEGISTGLPTIFVRFAGCSLRCGMTGSKKLWCDTPYALSPNAGREMNIDEVVSEIRNLSATSTQVLLTGGEPLESGNKEFSKILANRLREERKSSGNFLKVRVETNGAESIQDLADMVFTLDYKLPGSGMEDRMRVENFEILRDRNDSLDELKFVVRDREDFERAMHIVDRFQLEGNLLLSPVFNELSPELLVEWIKESGKSNLRLSLQTHKYIWGDKRGV

SEQ ID NO: 31125 - protein, 236 aa, unidentified
  source 1..236: note = Leptospira congkakensis
  REGION 1..236: note = tr|A0A4Z1AAX6|A0A4Z1AAX6_9LEPT 7-carboxy-7-deazaguanine synthase OS=Leptospira congkakensis OX=2484932 GN=queE PE=3 SV=1
MFGKIHEVYSSISGEGISQGIPTVFIRFAGCSLRCGKTDSRALWCDTAYALGPNQGTEKSLDSIWSELESLDPHHGYQILLTGGEPLEGKNRDLSVTIANKVFQHRTSIGLPYPASRVETNGSERITEDPFFIFTMDYKLPGSGMEDRMDPENFRILEKRHNSLDEIKFVVRDRIDFERSIEVIREQKIHTNILYSPVHGEVDAKELVEWIKVDNPPKCRLSLQIHKVLWGNQKGV

SEQ ID NO: 31126 - protein, 237 aa, unidentified
  source 1..237: note = Leptospira dzianensis
  REGION 1..237: note = tr|A0A5F2EAS3|A0A5F2EAS3_9LEPT 7-carboxy-7-deazaguanine synthase OS=Leptospira dzianensis; OX = 2484905 GN=queE PE=3 SV=1
MDNLKTSVHEIYLSLSGEGISTGIPTVFVRMAGCSLRCGMTIGRRLWCDTPYALSPSAGEEMSLNQVLDRIQELSPVQTQILLTGGEPLEGKNRDFSVALGEEIFRIRNTNGSYPRPRVETNGAESIEGLDHFVFTLDYKLPGSGMEDRMNLKNLEIYKERKNELDEIKFVIRDRIDFERCLEVIENRKLSGNLLASPVQGELSAELLAEWMKSSLGSGLRLSLQTHKYIWGDKRGV

SEQ ID NO: 31127 - protein, 237 aa, unidentified
  source 1..237: note = Leptospira dzianensis
  REGION 1..237: note = tr|A0A5F2AWI4|A0A5F2AWI4_9LEPT 7-carboxy-7-deazaguanine synthase OS=Leptospira dzianensis; OX = 2484905 GN=queE PE=3 SV=1
MDNLKTSVHEIYLSLSGEGISTGIPTVFVRMAGCSLRCGMTIGRRLWCDTPYALSPSAGEEMSLNQVLDRIQELSPVQTQILLTGGEPLEGKNKDFSVALGEEIFRIRNTNGSYPRPRVETNGAESIEGLDHFVFTLDYKLPGSGMEDRMNLKNLEIYKERKNELDEIKFVIRDRIDFERCLEVIENRKLSGNLLASPVQGELSAELLAEWMKSSLGSGLRLSLQTHKYIWGDKRGV

SEQ ID NO: 31128 - protein, 234 aa, unidentified
  source 1..234: note = Leptospira dzoumogneensis
  REGION 1..234: note = tr|A0A4Z1AB13|A0A4Z1AB13_9LEPT 7-carboxy-7-deazaguanine synthase OS=Leptospira dzoumogneensis OX=2484904 GN=queE PE=3 SV=1
MKSVVHEIYLSVSGEGISTGLPTIFVRFAGCSLRCGMDGNRKLWCDTPYALSPNAGKQMELEDVISEIGSISSSPTQILLTGGEPLENSNRIFSQTLAEKLKQSRQVSGMYTRVRVETNGAEPISDLENMVFTLDYKLPGSGMENKMILDNLEFVRDRNDNLDEIKFVIRDRKDFDRTLEVIDGFKLRGNLLASPVFGELSPEILVNWIKENNRTDLRLSLQTHKYIWGEKRGV

SEQ ID NO: 31129 - protein, 236 aa, unidentified
  source 1..236: note = Leptospira ellinghausenii
  REGION 1..236: note = tr|A0A2P2DFP2|A0A2P2DFP2_9LEPT 7-carboxy-7-deazaguanine synthase OS=Leptospira ellinghausenii OX=1917822 GN=queE PE=3 SV=1
MHGKIHEIYSSISGEGISQGIPTVFVRFAGCSLRCGKTDSRTLWCDTPYALGPNQGESKPFVSIIEEIEQFDKDHGFQILLTGGEPLEGQNRDLSISIAEHIFTYRTQKGKPYPASRVETNGSERISLDPFFIYTMDYKLPGSGMENRMDSENFKILEKRHNSLDEIKFVVRDRIDFDRSIEVIREQKIQTNILYSPVHGEVDAKELVEWIKIDNPPKCRLSLQIHKVLWGNQKGV

SEQ ID NO: 31130 - protein, 237 aa, unidentified
  source 1..237: note = Leptospira elllisii
  REGION 1..237: note = tr|A0A2N0BNM0|A0A2N0BNM0_9LEPT 7-carboxy-7-deazaguanine synthase OS=Leptospira elllisii; OX = 2023197 GN=queE PE=3 SV=1
MDNLKTSVHEIYLSLSGEGISTGIPTVFVRMAGCSLRCGMVTGRKLWCDTPYALSPNAGESMNVEQTLRRIRELSPTDTQILLTGGEPLEGKNREFSVALGNEIFEIRNSSGFFPRARVETNGAESIEGLDRFVFTLDYKLPGSGMEDRMNLRNLEIYRDRKNDLDEIKFVIRDRTDFDRCLEVIETFELRGNLLASPVQGELSAQLLAEWIKSSLKHGLRLSLQTHKYIWGDQRGV

SEQ ID NO: 31131 - protein, 243 aa, Leptospira fainei
  REGION 1..243: note = tr|S3V8Y8|S3V8Y8_9LEPT 7-carboxy-7-deazaguanine synthase OS=Leptospira fainei serovar Hurstbridge str. BUT 6 OX=1193011 GN=queE PE=3 SV=1
MYERAVRYNMKSVIHEIYLSVSGEGISTGLPTIFVRFAGCSLRCGMTGSKKLWCDTAYALSPNAGREMSVEEVVFEIRSLSAVSTQVLLTGGEPLEAGNGKFSKILANRLREERKSSGNFPRARVETNGAELIQDLPDMVFTLDYKLPGSGMEDRMRVENFEIIRDRNDPLDEIKFVVRDRQDFERTIDVVDRFQLEGNLLVSPVFKELSPELLVEWIKEIGKSNLRLSLQTHKYIWGDKRGV

SEQ ID NO: 31132 - protein, 234 aa, unidentified
  source 1..234: note = Leptospira fletcheri
  REGION 1..234: note = tr|A0A4R9GFS2|A0A4R9GFS2_9LEPT 7-carboxy-7-deazaguanine synthase OS=Leptospira fletcheri; OX = 2484981 GN=queE PE=3 SV=1
MNSVIHEIYLSVSGEGISTGLPTIFVRFAGCSLRCGMDGSRKLWCDTPYALSPNAGEKMDIESVLSEIRKLSADPVQVLFTGGEPLEGGNRNFSRVLAARLKEERRRHGRFLRVRIETNGAEPISDLEDMIFTLDYKLPGSGMEEKMLHENLHFLNERRDPLDELKFVIRDERDFVRCLEIVERFELQGNLLASPVFGELSPETLVDWIQKSGASKLRLSLQTHKYIWGDKRGV

SEQ ID NO: 31133 - protein, 234 aa, unidentified
  source 1..234: note = Leptospira fluminis
  REGION 1..234: note = tr|A0A4V3JEG2|A0A4V3JEG2_9LEPT 7-carboxy-7-deazaguanine synthase OS=Leptospira fluminis; OX = 2484979 GN=queE PE=3 SV=1
MNSVIHEIYLSVSGEGISTGLPTIFVRFAGCSLRCGMDGSRKLWCDTPYALSPNAGEKMDIESVLSEIRRLSADPVQVLFTGGEPLEGHNRNFSTVLAARLREDRVRYGRFLRTRIETNGAESIADLEDMVFTLDYKLPGSGMEERMLQENLRFLNERKDPLDEVKFVIRDERDFVRCLEIVEHFELQGNLLASPVFGELSPETLVDWIKERGAGKLRLSLQTHKYIWGDKRGV

SEQ ID NO: 31134 - protein, 237 aa, unidentified
  source 1..237: note = Leptospira gomenensis
  REGION 1..237: note = tr|A0A5F1YAW0|A0A5F1YAW0_9LEPT 7-carboxy-7-deazaguanine synthase OS=Leptospira gomenensis; OX = 2484974 GN=queE PE=3 SV=1
MDNLKTSVHEIYLSLSGEGISTGIPTVFVRMAGCSLRCGMVSGRKLWCDTPYALSPNAGESMNVQQTLRRIRELSPNDTQILLTGGEPLEGKNRDFSIALGNEIFETRKASGFFPRARVETNGAESIEGLDRFVFTLDYKLPGSGMEDRMNVKNLEIYRERKNDLDEIKFVIRDRADFDRCLEVIETFQLKGNLLASPVQGELSPRLLAEWIKSSLVYGLRLSLQTHKYIWGDQRGV

SEQ ID NO: 31135 - protein, 234 aa, unidentified
  source 1..234: note = Leptospira haakeii
  REGION 1..234: note = tr|A0A2N0C123|A0A2N0C123_9LEPT 7-carboxy-7-deazaguanine synthase OS=Leptospira haakeii; OX = 2023198 GN=queE PE=3 SV=1
MKSVVHEIYLSVSGEGISTGLPTIFVRFAGCSLRCGMDGSRKLWCDTPYALSPNAGKEMELEDVISEIGSISSSPTQILLTGGEPLENSNRIFSQTLAEKLKQSRHISGLYTRVRVETNGAEPISNLENMVFTLDYKLPGSGMENKMISENLEFVRDRNDNLDEIKFVIRDRKDFDRTLEVVDGFKLKGNLLASPVFGELAPEILVDWIKENNRTDLRLSLQTHKYIWGEKRGV

SEQ ID NO: 31136 - protein, 236 aa, unidentified
  source 1..236: note = Leptospira harrisiae
  REGION 1..236: note = tr|A0A2N0AGR9|A0A2N0AGR9_9LEPT 7-carboxy-7-deazaguanine synthase OS=Leptospira harrisiae; OX = 2023189 GN=queE PE=3 SV=1
MFGKIHEVYSSISGEGISQGIPTVFIRFAGCSLRCGKTDSRALWCDTAYALGPNQGIEKSLESIWLELENLDPHHGYQVLLTGGEPLEGKNRDLSITIANKIYKHRTSAGLPYPAARVETNGSEKITEDPYFIFTMDYKLPGSGMEDRMDQENFRILEKRHNSLDEIKFVVRDRIDFDRSIEVIREQKIHTNILYSPVHGEVDAKELVEWIKVDNPPKCRLSLQIHKVLWGNQKGV

SEQ ID NO: 31137 - protein, 234 aa, unidentified
  source 1..234: note = Leptospira hartskeerlii
  REGION 1..234: note = tr|A0A2M9X8W9|A0A2M9X8W9_9LEPT 7-carboxy-7-deazaguanine synthase OS=Leptospira hartskeerlii OX=2023177 GN=queE PE=3 SV=1
MKSVVHEIYLSVSGEGISTGLPTIFVRFAGCSLRCGMDGNRKLWCDTPYALSPNAGKQMELEDVISEIGSISSSPTQILLTGGEPLENSNRIFSQTMAEKLKQSRQVSGLYTRVRVETNGAEPISNLENMVFTLDYKLPGSGMENKMITENLEFVRDRNDNLDEIKFVIRDRKDFDRTLEVIDGFKLKGNLLASPVFGELAPEILVDWMKENNRTDLRLSLQTHKYIWGEKRGV

SEQ ID NO: 31138 - protein, 236 aa, unidentified
  source 1..236: note = Leptospira idonii
  REGION 1..236: note = tr|A0A4R9M309|A0A4R9M309_9LEPT 7-carboxy-7-deazaguanine synthase OS=Leptospira idonii; OX = 1193500 GN=queE PE=3 SV=1
MLGNIHEIYYSVSGEGISQGIPTVFVRFAGCSLRCGKTEDRKLWCDTAYALGPNQGKSISISEIFKEIQALDPKSSAQILLTGGEPLEGKNGEHTDTICRTLFHERSESNHPYPAPRIETNGKETLSLDADRVFTMDYKLPGSGMEEKMNLENFEILKKRHNSLDEIKFVVRDRYDFQRSLEILHEKKPNTNILYSPVHDELDAKELVDWIKIENPPKARLSLQIHKVLWGNKKGV

SEQ ID NO: 31139 - protein, 236 aa, unidentified
  source 1..236: note = Leptospira ilyithenensis
  REGION 1..236: note = tr|A0A4R9LU51|A0A4R9LU51_9LEPT 7-carboxy-7-deazaguanine synthase OS=Leptospira ilyithenensis OX=2484901 GN=queE PE=3 SV=1
MLGNVHEIYHSVSGEGISQGIPTIFIRFAGCSLRCGKTENKKLWCDTPYALGPNQGNSMDLDSIIKEVETIDPFGTSQILLTGGEPLEGKNGEMSSLICKYIFQTRIHTNKPYPAPRIETNGKETITDETDRVYTMDYKLPGSGMEERMEKENFSVLRKRHNILDEIKFVVRDRYDFERSLEVLREFSPDTNILYSPVFGEMDANELVEWIKKENPPKARLSLQIHKVLWGNKKGV

SEQ ID NO: 31140 - protein, 234 aa, Leptospira inadai
  REGION 1..234: note = tr|V6HHA0|V6HHA0_9LEPT 7-carboxy-7-deazaguanine synthase OS=Leptospira inadai serovar Lyme str. 10; OX = 1049790 GN=queE PE=3 SV=1
MKSVIHEIYLSVSGEGISTGLPTIFVRFAGCSLRCGMTGSKKLWCDTPYALSPNAGREMSIDEVVFEIRSLSHTSTQVLLTGGEPLENGKKDFSKILANRLREERNSSGNFPRVRVETNGAESIQDLADMVFTLDYKLPGSGMEDKMRVENFEFLRDRNDSLDEIKFVVRDREDFERAIDVVDRFQLKGNLLVSPVFNELSPELLVEWIKESGKRDLRLSLQTHKYIWGDKRGV

SEQ ID NO: 31141 - protein, 237 aa, Leptospira interrogans
  REGION 1..237: note = sp|Q8EZ24|QUEE_LEPIN 7-carboxy-7-deazaguanine synthase OS=Leptospira interrogans serogroup Icterohaemorrhagiae serovar Lai (strain 56601) OX=189518; GN = queE PE=3 SV=2
MDNLKTSVHEIYLSLSGEGISTGIPTIFVRMAGCSLRCGMTVGRKLWCDTPYALSPKAGEEMSVNQVLDKIQELSAVNIQILLTGGEPLEGRNREFSITLGNEIFRIRNSSGFYPRPRVETNGAESIEGMDQFVFTLDYKLPGSGMEDRMNLKNLEIYKERKNPLDEIKFVIRDKNDFERCLEIIEKHALVGNLLASPVQGELSPEILAEWIKYSLGSGLRLSIQTHKYIWGDQRGV

SEQ ID NO: 31142 - protein, 237 aa, Leptospira interrogans
  REGION 1..237: note = tr|A0A0E2D8B7|A0A0E2D8B7_LEPIR 7-carboxy-7-deazaguanine synthase OS=Leptospira interrogans str. UI 12758 OX=1049938 GN=queE PE=3 SV=1
MDNLKTSVHEIYLSLSGEGISTGIPTIFVRMAGCSLRCGMTVGRKLWCDTPYALSSKAGEEMSVNQVLDKIQELSAVNIQILLTGGEPLEGRNREFSITLGNEIFRTRNSSGFYPRPRVETNGAESIEGMDQFVFTLDYKLPGSGMEDRMNLKNLEIYKERKNPLDEIKFVIRDKNDFERCLEIIEKHALVGNLLASPVQGELSPEILAEWIKYSLGSGLRLSIQTHKYIWGDQRGV

SEQ ID NO: 31143 - protein, 236 aa, unidentified
  source 1..236: note = Leptospira jelokensis
  REGION 1..236: note = tr|A0A5F2B910|A0A5F2B910_9LEPT 7-carboxy-7-deazaguanine synthase OS=Leptospira jelokensis; OX = 2484931 GN=queE PE=3 SV=1
MFGKIHEIYSSISGEGISQGIPTVFVRFAGCSLRCGKTETKSLWCDTPYALGPNQGETKTLPAILDEIKALDKDHGFQILLTGGEPLEGENRTLSISIAESIYSFRKEHNQPYPASRVETNGSERITMDPFFIFTMDYKLPGSGMENRMDLENFQILEKRHNSLDEIKFVVRDRIDFERSVEVIREQKIQTNILYSPVHGEVDAKELVEWIKIDNPPKSRLSLQIHKVLWGNQKGV

SEQ ID NO: 31144 - protein, 236 aa, unidentified
  source 1..236: note = Leptospira jelokensis
  REGION 1..236: note = tr|A0A4Z0ZZI3|A0A4Z0ZZI3_9LEPT 7-carboxy-7-deazaguanine synthase OS=Leptospira jelokensis; OX = 2484931 GN=queE PE=3 SV=1
MFGKIHEIYSSISGEGISQGIPTVFVRFAGCSLRCGKTETKSLWCDTPYALGPNQGETKTLPAILDEIKALDKDHGFQILLTGGEPLEGENRTLSISIAESIYSFRKEHNQPYPASRVETNGSEKITMDPFFIFTMDYKLPGSGMENRMDLENFQILEKRHNSLDEIKFVVRDRIDFERSVEVIREQKIQTNILYSPVHGEVDAKELVEWIKIDNPPKSRLSLQIHKVLWGNQKGV

SEQ ID NO: 31145 - protein, 198 aa, unidentified
  source 1..198: note = Leptospira johnsonii
  REGION 1..198: note = tr|A0A2P2D5T3|A0A2P2D5T3_9LEPT 7-carboxy-7-deazaguanine synthase OS=Leptospira johnsonii; OX = 1917820 GN=queE PE=3 SV=1
MDGDRKLWCDTPYALSPNAGKQMELEDVISEIGSISSSPTQILLTGGEPLENSNRIFSQTLAEKLKQSRQVSGLYTRVRVETNGAEPIRDLENMVFTLDYKLPGSGMENKMILDNLEFVRDRNDNLDEIKFVIRDRKDFDRTLEVIDGFKLKGNLLASPVFGELAPEILVDWIKENNRTDLRLSLQTHKYIWGEKRGV

SEQ ID NO: 31146 - protein, 236 aa, unidentified
  source 1..236: note = Leptospira kanakyensis
  REGION 1..236: note = tr|A0A4R9HNK3|A0A4R9HNK3_9LEPT 7-carboxy-7-deazaguanine synthase OS=Leptospira kanakyensis OX=2484968 GN=queE PE=3 SV=1
MFGKIHEVYSSISGEGISQGIPTVFIRFAGCSLRCGKTDSRALWCDTAYALGPNQGTEKSLDSLWSELESLDSHHGYQVLLTGGEPLEGKNRDLSTALAKRIYHFRTDQNLPYPASRVETNGSERITEDPFFIFTMDYKLPGSGMEDRMDQENFRILEKRHNSLDEIKFVVRDRIDFERSIEVIREKKIHTNILYSPVHGEVDAKELVEWIKVDNPPKCRLSLQIHKVLWGNQKGV

SEQ ID NO: 31147 - protein, 236 aa, unidentified
  source 1..236: note = Leptospira kemamanensis
  REGION 1..236: note = tr|A0A4R9JMM7|A0A4R9JMM7_9LEPT 7-carboxy-7-deazaguanine synthase OS=Leptospira kemamanensis OX=2484942 GN=queE PE=3 SV=1
MYGKIHEIYSSISGEGISQGIPTVFVRFAGCSLRCGKTETKQLWCDTPYALGPNQGETKPLASIIEEIEALDKDHGFQILLTGGEPLEGQNRDLSKSIAEFLFSYRTKENKPYPASRVETNGSEKITLDPYFIFTMDYKLPGSGMEDRMDLENFQILEKRHNSLDEIKFVVRDRIDFERSIEVIREQKIQTNILYSPVHGEVDAKELVEWIKIDNPPKCRLSLQIHKVLWGNQKGV

SEQ ID NO: 31148 - protein, 237 aa, Leptospira kirschneri
  REGION 1..237: note = tr|M6F2D9|M6F2D9_9LEPT 7-carboxy-7-deazaguanine synthase OS=Leptospira kirschneri serovar Bulgarica str. Nikolaevo OX=1240687 GN=queE PE=3 SV=1
MDNLKTSVHEIYLSLSGEGISTGVPTIFVRMAGCSLRCGMVVGRKLWCDTPYALSSNAGEEMSVNQVLEKIQELSAVNIQILLTGGEPLEGRNREFSIALGNEIFRTRNSSGFYPRPRVETNGAESIEGMNQFVFTMDYKLPGSGMENRMCLKNLEIYKERKNPLDEIKFVIRDRKDFERCLEIIEKHALDGNLLASPVQGELSPEILSEWIKSSLGSGLRLSLQTHKYIWGDQRGV

SEQ ID NO: 31149 - protein, 237 aa, Leptospira kirschneri
  REGION 1..237: note = tr|M6IFM7|M6IFM7_9LEPT 7-carboxy-7-deazaguanine synthase OS=Leptospira kirschneri serovar Bim str. 1051; OX = 1049941 GN=queE PE=3 SV=1
MDNLKTSVHEIYLSLSGEGISTGVPTIFVRMAGCSLRCGMVVGRKLWCDTPYALSSNAGEEMSVNQVLEKIQELSAVNIQILLTGGEPLEGRNREFSITLGNEIFRTRNSSGFYPRPRVETNGAESIEGMNQFVFTMDYKLPGSGMENRMCLKNLEIYKERKNPLDEIKFVIRDRKDFERCLEIIEKHALDGNLLASPVQGELSPEILSEWIKSSLGSGLRLSLQTHKYIWGDQRGV

SEQ ID NO: 31150 - protein, 237 aa, Leptospira kmetyi
  REGION 1..237: note = tr|A0A2M9XRN7|A0A2M9XRN7_9LEPT 7-carboxy-7-deazaguanine synthase OS=Leptospira kmetyi; OX = 408139 GN=queE PE=3 SV=1
MDNLKTSVHEIYLSLSGEGISTGIPTVFVRMAGCSLRCGMAVGRKLWCDTPYALSPNAGEESNLNQVLDKIQELSPVNTQILLTGGEPLEGKNRDFSIALGNEIFRTRNSSGLYPRPRVETNGAESIKGLDRFVFTLDYKLPGSGMEDRMNLKNLEIYKQRNEVLDEIKFVIRDRTDFERCIEVIETYKLSGNLLASPVQGELSPEVLAEWMKSFLGSGLRLSLQTHKYIWGDRRGV

SEQ ID NO: 31151 - protein, 236 aa, unidentified
  source 1..236: note = Leptospira kobayashii
  REGION 1..236: note = tr|A0A2P2DSN5|A0A2P2DSN5_9LEPT 7-carboxy-7-deazaguanine synthase OS=Leptospira kobayashii; OX = 1917830 GN=queE PE=3 SV=1
MLGNVHEIYHSVSGEGISQGIPTIFIRFAGCSLRCGKTENKKLWCDTPYALGPNQGKSMDLDSIIKEMETIDPFHASQILLTGGEPLEGKNGEMSSLLCKHIYQTRIHANKPYPAPRIETNGKERINDEINRVYTMDYKLPGSGMEDQMEKENFSVLRKRHNILDEIKFVVRDRYDFERSLEVLREFSPDTNILYSPVFGEMDANELVEWIKKENPPKARLSLQIHKVLWGNKKGV

SEQ ID NO: 31152 - protein, 234 aa, unidentified
  source 1..234: note = Leptospira koniamboensis
  REGION 1..234: note = tr|A0A4R9J8L8|A0A4R9J8L8_9LEPT 7-carboxy-7-deazaguanine synthase OS=Leptospira koniamboensis OX=2484950 GN=queE PE=3 SV=1
MKSVVHEIYLSVSGEGISTGLPTIFVRFAGCSLRCGMDGNRKLWCDTPYALSPNAGKELELEDVISEIGSISSSPTQILLTGGEPLENSNRIFSQTLAKKFQQSRQVSGLYTRVRVETNGAEPISNLENMVFTLDYKLPGSGMENKMITENLEFVRDRNDNLDEIKFVIRDRKDFDRTLEVIDGFKLKGNLLASPVFGELAPEILVDWIKENNRTDLRLSLQTHKYIWGEKRGV

SEQ ID NO: 31153 - protein, 234 aa, unidentified
  source 1..234: note = Leptospira langatensis
  REGION 1..234: note = tr|A0A5F1ZTC2|A0A5F1ZTC2_9LEPT 7-carboxy-7-deazaguanine synthase OS=Leptospira langatensis OX=2484983 GN=queE PE=3 SV=1
MKTVVHEIYLSVSGEGISTGLPTIFVRFAGCSLRCGMDGTRRLWCDTPYALSPNAGKEMDLDEALAEIRLISKTPTQILLTGGEPLEDLNRVFSISLAKELRRDRESLGTYTRVRVETNGAQPIRDLEDMVFTLDYKLPGSGMEDRMIADNVKYIRDRKDALDEIKFVIRDRVDFDRTLQVIDTYSLQGNLLASPVFGELHPETLVDWIKEGGRTDLRLSLQTHKYIWGDKRGV

SEQ ID NO: 31154 - protein, 236 aa, unidentified
  source 1..236: note = Leptospira levettii
  REGION 1..236: note = tr|A0A5F2D8K2|A0A5F2D8K2_9LEPT 7-carboxy-7-deazaguanine synthase OS=Leptospira levettii; OX = 2023178 GN=queE PE=3 SV=1
MYGKIHEIYSSISGEGISQGIPTVFVRFAGCSLRCGKTDTRTLWCDTPYALGPNQGESKSFVSIMEEIEQYDKDHGFQILLTGGEPLEGQNRDLSINIAEHIFTYRTKNGKPYPASRVETNGSEKITLDPFFIFTMDYKLPGSGMENRMDSENFKILEKRHNSLDEIKFVVRDRIDFDRSIEVIREQKIQTNILYSPVHGEVDAKELVEWIKIDNPPKCRLSLQIHKVLWGNQKGV

SEQ ID NO: 31155 - protein, 236 aa, unidentified
  source 1..236: note = Leptospira levettii
  REGION 1..236: note = tr|A0A5F2AJH1|A0A5F2AJH1_9LEPT 7-carboxy-7-deazaguanine synthase OS=Leptospira levettii; OX = 2023178 GN=queE PE=3 SV=1
MYGKIHEIYSSISGEGISQGIPTVFVRFAGCSLRCGKTDTRTLWCDTPYALGPNQGESKSFVSIMEEIEQYDKDHGFQILLTGGEPLEGQNRDLSINIAEHIFTYRTKNGKPYPASRVETNGSEKITLDPYFIFTMDYKLPGSGMENRMDSENFKILEKRHNSLDEIKFVVRDRIDFDRSIEVIREQKIQTNILYSPVHGEVDAKELVEWIKIDNPPKCRLSLQIHKVLWGNQKGV

SEQ ID NO: 31156 - protein, 234 aa, Leptospira licerasiae
  REGION 1..234: note = tr|A0A5F2DY09|A0A5F2DY09_9LEPT 7-carboxy-7-deazaguanine synthase OS=Leptospira licerasiae; OX = 447106 GN=queE PE=3 SV=1
MKSVVHEIYLSVSGEGISTGLPTIFVRFAGCSLRCGMDGNRKLWCDTPYALSPNAGKQMELEEVIAEIGSISSSPTQILLTGGEPLENSNRIFSQTLAEKLKQSRQVSGMYTRVRVETNGAEPISNLENMVFTLDYKLPGSGMENKMILENLEFVRDRNDNLDEIKFVIRDRKDFDRTLEVIDRFKLKGNLLASPVFGELAPEILVDWIKENNRTDLRLSLQTHKYIWGEKRGV

SEQ ID NO: 31157 - protein, 234 aa, Leptospira licerasiae
  REGION 1..234: note = tr|I0XTY3|I0XTY3_9LEPT 7-carboxy-7-deazaguanine synthase OS=Leptospira licerasiae serovar Varillal str. VAR 010 OX=1049972 GN=queE PE=3 SV=1
MKSVVHEIYLSVSGEGISTGLPTIFVRFAGCSLRCGMDGNRKLWCDTPYALSPNAGKQMELEEVISKIGSISSSPTQILLTGGEPLENSNRIFSQTLAEKLKQSRQVSGMYTRVRVETNGAEPISNLENMVFTLDYKLPGSGMENKMILENLEFVRDRNDNLDEIKFVIRDRKDFDRTLEVIDRFKLKGNLLASPVFGELAPEILVDWIKENNRTDLRLSLQTHKYIWGEKRGV

SEQ ID NO: 31158 - protein, 236 aa, unidentified; identical to SEQ ID NO: 31154
  source 1..236: note = Leptospira macculloughii
  REGION 1..236: note = tr|A0A2N0CIM9|A0A2N0CIM9_9LEPT 7-carboxy-7-deazaguanine synthase OS=Leptospira macculloughii OX=2023202 GN=queE PE=3 SV=1

SEQ ID NO: 31159 - protein, 236 aa, unidentified
  source 1..236: note = Leptospira macculloughii
  REGION 1..236: note = tr|A0A2N0C993|A0A2N0C993_9LEPT 7-carboxy-7-deazaguanine synthase OS=Leptospira macculloughii OX=2023202 GN=queE PE=3 SV=1
MFGKIHEVYSSISGEGISQGIPTVFIRFAGCSLRCGKTESRALWCDTAYALGPNQGTEKNLDSIWNELESLDPHHGYQVLLTGGEPLEGKNRDLSLSIANKIYQYRTKTGLPYPASRIETNGSERITEDAFFIFTMDYKLPGSGMEDRMDEENFQILEKRHNSLDEIKFVVRDRIDFERSIEVIREKKIHTNILYSPVHGEVDAKELVEWIKVDNPPKCRLSLQIHKVLWGNQKGV

SEQ ID NO: 31160 - protein, 241 aa, unidentified
  source 1..241: note = Leptospira mayottensis
  REGION 1..241: note = tr|A0A3Q9DSK2|A0A3Q9DSK2_9LEPT 7-carboxy-7-deazaguanine synthase OS=Leptospira mayottensis 200901116 OX=1192864 GN=queE PE=3 SV=1
MKEPMDNLKTSVHEIYLSLSGEGISTGIPTVFVRMAGCSLRCGMATERKLWCDTPYALSARAGEEMDLKRVLNRIQELSPIYTQVLLTGGEPLEGRNRDFSFVLGNEIFKTRQSSNLYPRPRVETNGAESIEGLDQFVFTLDYKLPGSGMENRMNLKNLEIYNKRKNKLDEIKFVIRDRNDFERCLEVIKTHQLSGNLLASPVQGELSPEILSEWLKSSLSSGLRLSLQTHKYIWGDKRGV

SEQ ID NO: 31161 - protein, 241 aa, unidentified; identical to SEQ ID NO: 31160
  source 1..241: note = Leptospira mayottensis
  REGION 1..241: note = tr|A0A5F2EG81|A0A5F2EG81_9LEPT 7-carboxy-7-deazaguanine synthase OS=Leptospira mayottensis OX=1137606 GN=queE PE=3 SV=1

SEQ ID NO: 31162 - protein, 236 aa, Leptospira meyeri
  REGION 1..236: note = tr|A0A5F2D7L3|A0A5F2D7L3_LEPME 7-carboxy-7-deazaguanine synthase OS=Leptospira meyeri; OX = 29508 GN=queE PE=3 SV=1
MFGKIHEVYSSISGEGISQGIPTVFIRFAGCSLRCGKTETRALWCDTAYALGPNQGTEKNLDSIWNELESLDPHHGYQVLLTGGEPLEGKNRDLSLSIANKIYQFRTNAGLPYPASRVETNGSERITEDAFFIFTMDYKLPGSGMEDRMDEENFQILEKRHNSLDEIKFVVRDRIDFERSIEVIREKKIHTNILYSPVHGEVDAKELVEWIKVDNPPKCRLSLQIHKVLWGNQKGV

SEQ ID NO: 31163 - protein, 236 aa, Leptospira meyeri
  REGION 1..236: note = tr|A0A5F1ZKZ1|A0A5F1ZKZ1_LEPME 7-carboxy-7-deazaguanine synthase OS=Leptospira meyeri; OX = 29508 GN=queE PE=3 SV=1
MFGKIHEVYSSISGEGISQGIPTVFIRFAGCSLRCGKTESRALWCDTAYALGPNQGTEKNLDSIWNELESLDPHHGYQVLLTGGEPLEGKNRDLSISIANKIYQYRTNAGLPYPASRVETNGSERITEDTFFIFTMDYKLPGSGMEERMDEENFQILEKRHNSLDEIKFVVRDRIDFERSIEVIREKKIHTNILYSPVHGEVDAKELIEWIKVDNPPKCRLSLQIHKVLWGNQKGV

SEQ ID NO: 31164 - protein, 236 aa, unidentified
  source 1..236: note = Leptospira montravelensis
  REGION 1..236: note = tr|A0A4Z0ZPS2|A0A4Z0ZPS2_9LEPT 7-carboxy-7-deazaguanine synthase OS=Leptospira montravelensis OX=2484961 GN=queE PE=3 SV=1
MFGKIHEIYSSISGEGISQGIPTVFIRFAGCSLRCGKTESRSLWCDTAYALGPNQGEEKSLESIWMDLENLDPHHGYQVLLSGGEPLEGKNRDLSISIANKIYKHRTEAGLPYPAARVETNGSERITEDAFFIFTMDYKLPGSGMEDRMDLENFRILEKRHNSLDEIKFVVRDRIDFDRSIEVIREQKIHTNILYSPVHGEVDAKELVEWIKVDNPPKCRLSLQIHKVLWGNQKGV

SEQ ID NO: 31165 - protein, 236 aa, unidentified
  source 1..236: note = Leptospira mtsangambouensis
  REGION 1..236: note = tr|A0A5F2DE37|A0A5F2DE37_9LEPT 7-carboxy-7-deazaguanine synthase OS=Leptospira mtsangambouensis OX=2484912 GN=queE PE=3 SV=1
MFGKIHEVYSSISGEGISQGIPTVFIRFAGCSLRCGKTESRTLWCDTAYALGPNQGSEKSLDSIWAELENLDPHHGYQVLLTGGEPLEGKNRDLSLSIANKIYQYRTNAGLPYPASRVETNGSERITEDPFFIFTMDYKLPGSGMEDRMDEENFQILEKRHNSLDEIKFVVRDRIDFERSIEVIREKKIHTNILYSPVHGEVDAKELVEWIKVDNPPKCRLSLQIHKVLWGNQKGV

SEQ ID NO: 31166 - protein, 234 aa, unidentified
  source 1..234: note = Leptospira neocaledonica
  REGION 1..234: note = tr|A0A2N0A0J6|A0A2N0A0J6_9LEPT 7-carboxy-7-deazaguanine synthase OS=Leptospira neocaledonica OX=2023192 GN=queE PE=3 SV=1
MKSVVHEIYLSVSGEGISTGLPTIFVRFAGCSLRCGMDGNRKLWCDTPYALSPNAGKHMELEDVISEIGSISSSPTQILLTGGEPLENSNRIFSQTLAEKLKQSRQVSGLYTRVRVETNGAEPISGLENMVFTLDYKLPGSGMENKMILDNLKFVRDRNDNLDEIKFVIRDRKDFDRTLEVINDFKLKGNLLASPVFGELAPEILIDWIKENNRTDLRLSLQTHKYIWGEKRGV

SEQ ID NO: 31167 - protein, 237 aa, Leptospira noguchii
  REGION 1..237: note = tr|M6YEL0|M6YEL0_9LEPT 7-carboxy-7-deazaguanine synthase OS=Leptospira noguchii str. 2001034031 OX=1193053; GN = queE PE=3 SV=1
MDNLKTSIHEIYLSLSGEGISTGIPTIFVRMAGCSLRCGMAVGRKLWCDTPYALSPKAGEEMSVNQVLDKIQELSVVNIQILLTGGEPLEGRNREFSITLGNEIFRTRNSSGPYPRPRVETNGAESIEGMDQFVFTMDYKLPGSGMEDRMNLKNLEIYKERKNPLDEIKFVIRDKKDFERCLEIIEKHALVGNLLASPVQGELPPEILSEWMKSSLGSGLRLSLQTHKYIWGDQRGV

SEQ ID NO: 31168 - protein, 237 aa, Leptospira noguchii
  REGION 1..237: note = tr|T0FPX3|T0FPX3_9LEPT 7-carboxy-7-deazaguanine synthase OS=Leptospira noguchii serovar Panama str. CZ214; OX = 1001595 GN=queE PE=3 SV=1
MDNLKTSIHEIYLSLSGEGISTGIPTIFVRMAGCSLRCGMVVGRKLWCDTPYALSPKAGEEMSVNQVLDKIQELSVVNIQILLTGGEPLEGRNREFSITLGNEIFRTRNSSSPYPRPRVETNGAELIEGMDQFVFTMDYKLPGSGMEDRMNLKNLEIYKERKNPLDEIKFVIRDKKDFERCLEIIEKHALVGNLLASPVQGELSPEILSEWMKSSLGSGLRLSLQTHKYIWGDQRGV

SEQ ID NO: 31169 - protein, 236 aa, unidentified
  source 1..236: note = Leptospira noumeaensis
  REGION 1..236: note = tr|A0A4R9I6U3|A0A4R9I6U3_9LEPT 7-carboxy-7-deazaguanine synthase OS=Leptospira noumeaensis OX=2484964 GN=queE PE=3 SV=1
MFGKIHEVYSSISGEGISQGIPTVFIRFAGCSLRCGKTESKALWCDTAYALGPNQGTEKSLDSLWLELESLDPHHGYQVLLTGGEPLEGKNRDLSISLANKIYEHRTKASLPYPAARVETNGSERISEDPFFIFTMDYKLPGSGMEDRMDQENFRILEKRHNSLDEIKFVVRDRIDFERSIEVIREQKIHTNILYSPVHGEVDAKELVEWIKVDNPPKCRLSLQIHKVLWGNQKGV

SEQ ID NO: 31170 - protein, 236 aa, unidentified
  source 1..236: note = Leptospira ognonensis
  REGION 1..236: note = tr|A0A4R9KAR0|A0A4R9KAR0_9LEPT 7-carboxy-7-deazaguanine synthase OS=Leptospira ognonensis; OX = 2484945 GN=queE PE=3 SV=1
MFGKIHEIYDSISGEGISQGIPTQFIRFAGCSLRCGKVGDKKLWCDTPYALGPEQGEHKSLEEILAQLLQNDPHHQKQIIITGGEPLEGKNGLLTRSLSDHIYRFRIQEQFPYPASRIETNGKEEIDEKPSRVFTMDYKLPGSGMESEMHIENFEILKKRHNSLDEIKFVIRDRIDFQRSLEILHEKKPDTNILFSPVHEDLDAKELVEWLKVANPPKSRLSLQIHKFLWGNKKGV

SEQ ID NO: 31171 - protein, 236 aa, unidentified
  source 1..236: note = Leptospira perdikensis
  REGION 1..236: note = tr|A0A4R9JI89|A0A4R9JI89_9LEPT 7-carboxy-7-deazaguanine synthase OS=Leptospira perdikensis OX=2484948 GN=queE PE=3 SV=1
MFGKIHEVYSSISGEGISQGIPTVFIRFAGCSLRCGKTETRALWCDTAYALGPNQGEEKTLDTIWTELETLDSHHGYQVLLTGGEPLEGKNRDLSTSLANRIYNHRISHNLPYPASRVETNGSERITEDSFFIFTMDYKLPGSGMEERMDQENFRILEKRHNSLDEIKFVVRDRIDFDRSIEVIREQKIQTNILYSPVHGEVDAKELVEWIKVDNPPKCRLSLQIHKVLWGNQKGV

SEQ ID NO: 31172 - protein, 234 aa, unidentified
  source 1..234: note = Leptospira perolatii
  REGION 1..234: note = tr|A0A2M9ZKW5|A0A2M9ZKW5_9LEPT 7-carboxy-7-deazaguanine synthase OS=Leptospira perolatii; OX = 2023191 GN=queE PE=3 SV=1
MKSSVYEIYLSISGEGISAGIPTVFVRFAGCSLRCGMVGDRKLWCDTPYALSPNSGKEKDLAEVLNEIEGFSEAPTQVLLTGGEPLEGSNRGFSQALATSLSESRKALDLYRRVRVETNGAEALRGLENMVFTMDYKLPGSGMEDRMLLDNLRYLKERNDPLDEIKFVIRDRSDFERTLEVINQYELSGNLLASPVYGELDAETLIDWIKESSKKNLRLSLQVHKFIWGERRGV

SEQ ID NO: 31173 - protein, 237 aa, unidentified
  source 1..237: note = Leptospira putramalaysiae
  REGION 1..237: note = tr|A0A4R9LBB9|A0A4R9LBB9_9LEPT 7-carboxy-7-deazaguanine synthase OS=Leptospira putramalaysiae OX=2484984 GN=queE PE=3 SV=1
MDNLKTSVHEIYLSLSGEGISTGLPTVFVRMAGCSLRCGMAMGRKLWCDTPYALSPNAGEELDLQEVLKRIRELSPVDTQILLTGGEPLEGRNRDFSVAFGNEIFRTRNLSGSFPKPRVETNGAESIEGLDSFVFTLDYKLPGSGMEDRMLLKNLEIYKDRKNSLDEIKFVIRDRMDFDRCVEVIQNFGLTGNLLASPVQNELSPELLSEWIKSSLSSGLRLSLQTHKYIWGDQRGV

SEQ ID NO: 31174 - protein, 236 aa, unidentified
  source 1..236: note = Leptospira ryugenii
  REGION 1..236: note = tr|A0A2P2E3H1|A0A2P2E3H1_9LEPT 7-carboxy-7-deazaguanine synthase OS=Leptospira ryugenii; OX = 1917863 GN=queE PE=3 SV=1
MLGYVHEIYESISGEGISQGIPTIFVRFAGCSLRCGLTKEKKLWCDTPYALGPKQGKELGIEQILESLSQFPQADKKQILITGGEPLEGENGTKTRALSERIYSYRTSHSLPYPASRIETNGKELIDFSESRVYTLDYKLPGSGMESEMHRENFEILKKRHNILDEIKFVVRDRYDFQRSLEIIGETNTDANILFSAVFEDLDPKELVEWLKIANPPKARLSLQIHKFLWGNQKGV

SEQ ID NO: 31175 - protein, 234 aa, unidentified
  source 1..234: note = Leptospira saintgironsiae
  REGION 1..234: note = tr|A0A2M9YFI2|A0A2M9YFI2_9LEPT 7-carboxy-7-deazaguanine synthase OS=Leptospira saintgironsiae OX=2023183 GN=queE PE=3 SV=1
MKSVVHEIYLSVSGEGISTGLPTIFVRFAGCSLRCGMDGNRKLWCDTPYALSPNAGKELELEDVISEIGSISSSPTQILLTGGEPLENSNRIFSQTLAEKLKQSRQVSGLYTRVRVETNGAEPISNLENMVFTLDYKLPGSGMENKMITENLEFVRDRNDNLDEIKFVIRDRKDFDRTLEVIDGFKLKGNLLASPVFGELAPEILVNWIKENNRTDLRLSLQTHKYIWGEKRGV

SEQ ID NO: 31176 - protein, 243 aa, Leptospira santarosai
  REGION 1..243: note = tr|M6Z384|M6Z384_9LEPT 7-carboxy-7-deazaguanine synthase OS=Leptospira santarosai str. 200702252; OX = 1049977 GN=queE PE=3 SV=1
MYLKELVDNLKTSVHEIYLSLSGEGISTGIPTVFVRMAGCSLRCGMSAGRKLWCDTPYALSSSAGEEMDLKRVLNRIRELSPIYTQILLTGGEPLEGRNRDFSLALGNEIFRTRQSSGLYPRPRVETNGAESIEGLDRFVFTLDYKLPGSGMEKRMNLENLEIYNKRKNELDEIKFVIRDRDDFERCLEVIKTHRLSGNLLASPVQGELSPEILAEWLKSSLGSGLRLSLQTHKYIWGDKRGV

SEQ ID NO: 31177 - protein, 241 aa, Leptospira santarosai
  REGION 1..241: note = tr|A0A1V2ER31|A0A1V2ER31_9LEPT 7-carboxy-7-deazaguanine synthase OS=Leptospira santarosai; OX = 28183 GN=queE PE=3 SV=1
MKEPVDNLKTSVHEIYLSLSGEGISTGIPTVFVRMAGCSLRCGMSAGRKLWCDTPYALSSSAGEEMDLKRVLNRIRELSPIYTQILLTGGEPLEGRNRDFSLALGNEIFRTRQSSGLYPRPRVETNGAESIEGLDRFVFTLDYKLPGSGMEKRMNLENLEIYNKRKNELDEIKFVIRDRDDFERCLEVIKTHRLSGNLLASPVQGELSPEILAEWLKSSLGSGLRLSLQTHKYIWGDKRGV

SEQ ID NO: 31178 - protein, 234 aa, unidentified
  source 1..234: note = Leptospira sarikeiensis
  REGION 1..234: note = tr|A0A4V3JRM3|A0A4V3JRM3_9LEPT 7-carboxy-7-deazaguanine synthase OS=Leptospira sarikeiensis OX=2484943 GN=queE PE=3 SV=1
MKSVVHEIYLSVSGEGISTGLPTIFVRFAGCSLRCGMDGNRKLWCDTPYALSSKAGKSMDLEEVISEIGNLSRTPVQILLTGGEPLENSNRIFSLALAEKLKQARETSGIYTRVRVETNGAEPIGDLDNMVFTLDYKLPGSGMEDKMISDNLKFVRDRKEPLDEVKFVIRDRKDFERTLEVVDTFGLKGNLLASPVFGELHPETLVDWIKENNRTDLRLSLQTHKYIWGEKRGV

SEQ ID NO: 31179 - protein, 234 aa, unidentified
  source 1..234: note = Leptospira selangorensis
  REGION 1..234: note = tr|A0A4R9GCC4|A0A4R9GCC4_9LEPT 7-carboxy-7-deazaguanine synthase OS=Leptospira selangorensis OX=2484982 GN=queE PE=3 SV=1
MKSVVHEIYLSVSGEGISTGLPTIFVRFAGCSLRCGMDGSRKLWCDTPYALSPNAGKEMELEDVISEIGSISSTPIQILLTGGEPLENSNRIFSQTLAEKLKQSRQVSGLYTRVRVETNGAEPISNLENMVFTLDYKLPGSGMENKMILENLEFVRDRRDNLDEIKFVIRDRKDFDRTLEVIDGFKLKGNLLASPVFGELTPEILVDWIKENNRTDLRLSLQTHKYIWGEKRGV

SEQ ID NO: 31180 - protein, 234 aa, unidentified
  source 1..234: note = Leptospira semungkisensis
  REGION 1..234: note = tr|A0A4R9G7Y7|A0A4R9G7Y7_9LEPT 7-carboxy-7-deazaguanine synthase OS=Leptospira semungkisensis OX=2484985 GN=queE PE=3 SV=1
MKTVVHEIYLSVSGEGISTGLPTIFVRFAGCSLRCGMDGSRKLWCDTPYALSSKAGKEMDLDEVLAEIHLISKTPTQVLLTGGEPLEDLNGVFSQSLAKELKRERENLGIYTRVRVETNGAESIRNLEDMVFTLDYKLPGSGMESRMIADNVEFIRDRKDPLDEIKFVIRDRADFDRTLQIVDRFSLQGNLLASPVFGELHPETLVDWLKEEGRTDLRLSLQTHKYIWGEKRGV

SEQ ID NO: 31181 - protein, 243 aa, Leptospira sp.
  REGION 1..243: note = tr|M5V4X2|M5V4X2_9LEPT 7-carboxy-7-deazaguanine synthase OS=Leptospira sp. Fiocruz LV4135 OX=1193013; GN = queE PE=3 SV=1
MYLKEPVDNLKTSVHEIYLSLSGEGISTGIPTVFVRMAGCSLRCGMSAGRKLWCDTPYALSSSAGGEMDLKRVLNRIRELSPIYTQILLTGGEPLEGRNRDFSLALGNEIFRTRQSSGLYPRPRVETNGAESIEGLDRFVFTLDYKLPGSGMEKRMNLENLEIYNKRKNELDEIKFVIRDRDDFERCLEVIKTHRLSGNLLASPVQGELSPGILAEWLKSSLGSGLRLSLQTHKYIWGDKRGV

SEQ ID NO: 31182 - protein, 259 aa, Leptospira sp.
  REGION 1..259: note = tr|M6EE94|M6EE94_9LEPT 7-carboxy-7-deazaguanine synthase OS=Leptospira sp. serovar Kenya str. Sh9; OX = 1242991 GN=queE PE=3 SV=1
MPFYFFTVLLFAQRKTLYLKEPMDNLKTSVHEIYLSLSGEGISTGIPTVFVRMAGCSLRCGMAIGKKLWCDTPYALSPSAGEEMDLKRVLNRIQELSPIYTQVLLTGGEPLEGRNRDFSLALGNEIFRTRKFSNSYPRARVETNGAESIEGLDQFVFTLDYKLPGSGMENRMNLENLEIYNKRKNELDEIKFVIRDRNDFERCLEVIKVHELSGNLLASPVQGELSPEILSEWLKSSLGSRLRLSLQTHKYIWGDKRGI

SEQ ID NO: 31183 - protein, 237 aa, unidentified
  source 1..237: note = Leptospira stimsonii
  REGION 1..237: note = tr|A0A396Z8L6|A0A396Z8L6_9LEPT 7-carboxy-7-deazaguanine synthase OS=Leptospira stimsonii; OX = 2202203 GN=queE PE=3 SV=1
MNNLKTSVHEIYLSLSGEGISTGLPTVFVRMAGCSLRCGMAVGRKLWCDTPYALSPNAGEELDLEEVLKRIRELSPVDTQILLTGGEPLEGRNRNFSVALGNEILRTRNHSGSYPRPRVETNGAESIEGLDSFVFTLDYKLPGSGMEDRMLLKNLEIYKDRKNSLDEIKFVIRDRMDFDRCVEVIQNFGLTGNLLASPVQSELSPELLSEWIKSSLRSGLRLSLQTHKYIWGDQRGV

SEQ ID NO: 31184 - protein, 237 aa, unidentified; identical to SEQ ID NO: 31173
  source 1..237: note = Leptospira stimsonii
  REGION 1..237: note = tr|A0A5E8TS63|A0A5E8TS63_9LEPT 7-carboxy-7-deazaguanine synthase OS=Leptospira stimsonii; OX = 2202203 GN=queE PE=3 SV=1

SEQ ID NO: 31185 - protein, 236 aa, unidentified
  source 1..236: note = Leptospira terpstrae
  REGION 1..236: note = tr|N1VS42|N1VS42_9LEPT 7-carboxy-7-deazaguanine synthase OS=Leptospira terpstrae serovar Hualin str. LT 11-33 = ATCC 700639 OX=1257025 GN=queE PE=3 SV=1
MFGKIHEVYSSISGEGISQGIPTVFIRFAGCSLRCGKTETRALWCDTAYALGPNQGEEKSLETVWNELVTLDSHHGYQVLLTGGEPLEGKNRDLSVAIAKRIYEHRMNFGRPYPAPRVETNGSEQITDDSFFVFTMDYKLPGSGMEDRMNQENFRILEKRHNSLDEIKFVVRDRIDFDRSIEVIREQKIQTNILYSPVHGEVDAKELVEWIKVDNPPKCRLSLQIHKVLWGNQKGV

SEQ ID NO: 31186 - protein, 237 aa, unidentified
  source 1..237: note = Leptospira tipperaryensis
  REGION 1..237: note = tr|A0A1D7USS6|A0A1D7USS6_9LEPT 7-carboxy-7-deazaguanine synthase OS=Leptospira tipperaryensis OX=2564040 GN=queE PE=3 SV=1
MNNLKTSVHEIYLSLSGEGISTGLPTVFVRMAGCSLRCGMTTGRKLWCDTPYALSPNAGEELDLEQVLKQVRELSPVDTQILLTGGEPLEGRNRDFSVAFGNEIFRTRNQSGSYPRPRVETNGAESIEGLDSFVFTLDYKLPGSGMEDRMLLKNLEIYKDRKNDLDEIKFVIRDRMDFDRCVEVIQEFRLFGNLLASPVQGELSPELLSEWIKSSLGSGLRLSLQTHKYIWGDQRGV

SEQ ID NO: 31187 - protein, 236 aa, unidentified
  source 1..236: note = Leptospira vanthielii
  REGION 1..236: note = tr|N1WEE4|N1WEE4_9LEPT 7-carboxy-7-deazaguanine synthase OS=Leptospira vanthielii serovar Holland str. Waz; Holland = ATCC 700522 OX=1218591 GN=queE PE=3 SV=1
MFGKIHEVYSSISGEGISQGIPTVFIRFAGCSLRCGKTETRALWCDTAYALGPNQGEEKTLDSVWNDLEKLDPRHGYQVLLTGGEPLEGKNRDLSVALAKRIYEHRMNFGRPYPASRVETNGSERITEDSFFIFTMDYKLPGSGMENRMDQENFRILEKRHNSLDEIKFVVRDRIDFERSIEVIREQKIQTNILYSPVHGEVDAKELVEWIKVDNPPKCRLSLQIHKVLWGNQKGV

SEQ ID NO: 31188 - protein, 236 aa, unidentified; identical to SEQ ID NO: 31187
  source 1..236: note = Leptospira vanthielii
  REGION 1..236: note = tr|A0A4R9LCW4|A0A4R9LCW4_9LEPT 7-carboxy-7-deazaguanine synthase OS=Leptospira vanthielii; OX = 293085 GN=queE PE=3 SV=1

SEQ ID NO: 31189 - protein, 243 aa, Leptospira weilii
  REGION 1..243: note = tr|M6G187|M6G187_9LEPT 7-carboxy-7-deazaguanine synthase OS=Leptospira weilii str. 2006001855 OX=996804; GN = queE PE=3 SV=1
MYLKEPMDNLKTSVHEIYLSLSGEGISTGIPTVFVRMAGCSLRCGMVTGKKLWCDTPYALSPSAGEEMDLKRVLNRIQELSPICTQVLLTGGEPLEGRNRDFSLALGDEIFRTRKSSNSYPRPRVETNGAESIEGLDQFVFTLDYKLPGSGMESRMNLRNLEIYNKRKNELDEIKFVIRDRNDFERCLEVIEAHRLSGNLLASPVQGELSPEILSEWLKSSLSSGLRLSLQTHKYIWGDKRGV

SEQ ID NO: 31190 - protein, 259 aa, Leptospira weilii
  REGION 1..259: note = tr|M6LIP0|M6LIP0_9LEPT 7-carboxy-7-deazaguanine synthase OS=Leptospira weilii str. LNT 1234 OX=1088541; GN = queE PE=3 SV=1
MSFYFFTILLFARRKTLYLKEPMDNLKTSVHEIYLSLSGEGISTGIPTVFVRMAGCSLRCGMVTGKKLWCDTPYALSPSAGEEMDLKRVLNRIQELSPICTQVLLTGGEPLEGRNRDFSLALGDEIFRTRKSSNSYPRPRVETNGAESIEGLDQFVFTLDYKLPGSGMESRMNLRNLEIYNKRKNELDEIKFVIRDRNDFERCLEVIEAHRLSGNLLASPVQGELSPEILSEWLKSSLSSGLRLSLQTHKYIWGDKRGV

SEQ ID NO: 31191 - protein, 236 aa, Leptospira wolbachii
  REGION 1..236: note = tr|R9A2D7|R9A2D7_9LEPT 7-carboxy-7-deazaguanine synthase OS=Leptospira wolbachii serovar Codice str. CDC; OX = 1218599 GN=queE PE=3 SV=1
MFGKIHEVYSSISGEGISQGIPTVFIRFAGCSLRCGKTETRALWCDTAYALGPNQGEEKTLESVWNDLEKLDPHHGYQVLLTGGEPLEGKNRDLSTALAKQIYEHRMNVGRPYPASRVETNGSERITEDSFFIFTMDYKLPGSGMEDRMDQENFRILEKRHNSLDEIKFVVRDRIDFDRSIEVIREQKIQTNILYSPVHGEVDAKELVEWIKVDNPPKCRLSLQIHKVLWGNQKGV

SEQ ID NO: 31192 - protein, 244 aa, Leptospira wolffii
  REGION 1..244: note = tr|S3ULZ2|S3ULZ2_9LEPT 7-carboxy-7-deazaguanine synthase OS=Leptospira wolffii serovar Khorat str. Khorat-H2 OX=1193069 GN=queE PE=3 SV=1
MYQGDLLPIMKTVVHEIYLSVSGEGISTGLPTVFVRFAGCSLRCGMDGTRKLWCDTPYALSHKAGTEMSLEEVLAQVERLSLAPTQVLLTGGEPLEKSNRDFSQALATELFERRKKIGKFTRVRVETNGAEPIRGLEHMIFTLDYKLPGSGMESKMISENLNDLREKGDDLDEVKFVIRDKNDFDRTLEVVDAFSLSGANLLVSPVFGELSPETLVDWMKESSRMDLRLSLQTHKYVWGEKRGV

SEQ ID NO: 31193 - protein, 235 aa, Leptospira wolffii
  REGION 1..235: note = tr|A0A2M9ZFF5|A0A2M9ZFF5_9LEPT 7-carboxy-7-deazaguanine synthase OS=Leptospira wolffii; OX = 409998 GN=queE PE=3 SV=1
MKTVVHEIYLSVSGEGISTGLPTVFVRFAGCSLRCGMDGTRKLWCDTPYALSHKAGTEMSLEEVLAQVEKLSLAPTQVLLTGGEPLEKSNRDFSQALATELFERRKKIGKFTRVRVETNGAEPIRGLEHMIFTLDYKLPGSGMESKMISENLNDLREKGDDLDEVKFVIRDKKDFDRTLEVVDAFSLSGVNLLVSPVFGELSPETLVDWIKESSRTDLRLSLQTHKYVWGEKRGV

SEQ ID NO: 31194 - protein, 236 aa, unidentified
  source 1..236: note = Leptospira yanagawae
  REGION 1..236: note = tr|A0A4R9IZ55|A0A4R9IZ55_9LEPT 7-carboxy-7-deazaguanine synthase OS=Leptospira yanagawae; OX = 293069 GN=queE PE=3 SV=1
MFGKIHEIYSSISGEGISQGIPTVFVRFAGCSLRCGKTETKSLWCDTPYALGPNQGETKTVSAILDEIKALDQGHGFQILLTGGEPLEGENRTLSIAIAESLYSFRTEHNKPYPASRVETNGSEKITLDPFFIFTMDYKLPGSGMENRMDLENFQILEKRHNSLDEIKFVVRDRIDFERSIEVIREQKIQTNILYSPVHGEVDAKELVEWIKIDNPPKSRLSLQIHKVLWGNQKGV

SEQ ID NO: 31195 - protein, 236 aa, unidentified; identical to SEQ ID NO: 31194
  source 1..236: note = Leptospira yanagawae
  REGION 1..236: note = tr|A0A5E8HCW7|A0A5E8HCW7_9LEPT 7-carboxy-7-deazaguanine synthase OS=Leptospira yanagawae serovar Saopaulo str. Sao Paulo = ATCC 700523 OX=1249483; GN = queE PE=3 SV=1

SEQ ID NO: 31196 - protein, 237 aa, unidentified; identical to SEQ ID NO: 31126
  source 1..237: note = Leptospira yasudae
  REGION 1..237: note = tr|A0A418ADE0|A0A418ADE0_9LEPT 7-carboxy-7-deazaguanine synthase OS=Leptospira yasudae; OX = 2202201 GN=queE PE=3 SV=1

SEQ ID NO: 31197 - protein, 262 aa, unidentified
  source 1..262: note = Leptospiraceae bacterium
  REGION 1..262: note = tr|A0A357J1D5|A0A357J1D5_9LEPT 7-carboxy-7-deazaguanine synthase OS=Leptospiraceae bacterium OX=2026757 GN=queE PE=3 SV=1
MDDIPVAPSWKFLQVQAFFMIEPKKPSDTALADELSRESSGETIDELSTPKFLKISETYSTLQGEGSHSGLPCYFIRLAVCDIRCSWCDTPDSWTGGEWQSLQELLSDVPEHIELVQITGGEPLLQIKRLSVLMDRLNNMGKKILLETGGHRSLENVPSYVHVVMDIKLPSSGETGHDFEANFIHLKKSDEIKFVVAGESDFLAALDWVQRFDLSHRFQILISPVAGLDLKKLAQWMLDSKLTMRLQLQLHKYIWGPDARMV

SEQ ID NO: 31198 - protein, 269 aa, unidentified
  source 1..269: note = Leptospiraceae bacterium
  REGION 1..269: note = tr|A0A2E5S0S7|A0A2E5S0S7_9LEPT 7-carboxy-7-deazaguanine synthase OS=Leptospiraceae bacterium OX=2026757 GN=queE PE=3 SV=1
MDMPVAPSWRFIQVQAFFMIESKKHTDNADSGADQGIEPSVRAKALQQDEPGSAEAGKFLKISETYSTLQGEGSHSGLPCYFIRLAVCDIRCSWCDTPDSWTGGQWNSLEEIMEDVPEHIGLVQITGGEPLLQIKRLSILMHRLHEMGKKILLETGGHRSLESVPAFVHIVMDIKLPSSGETAHDFASNLSYLKPDDEIKFVIADETDFQAALGWIQRYDLTRRFQVLISPLAGLDLKKLAQWVLDSKLTMRLQLQLHKYIWGPDARMV

SEQ ID NO: 31199 - protein, 212 aa, Leptospirillum ferriphilum
  REGION 1..212: note = tr|J9Z823|J9Z823_LEPFM 7-carboxy-7-deazaguanine synthase OS=Leptospirillum ferriphilum (strain ML-04); OX = 1048260 GN=queE PE=3 SV=1
MKITETFRSIQGESRYSGWPCFFIRTTGCPLRCRWCDTTYSFYGGEERTVDSLVGEAVSSGTSLVEITGGEPFVQPELPELCQKLLDLGKTVLIETSGGFPVPSGLNRECRLIVDLKPPGSGMEAWMKAENFAELGTEDEIKAVLTGREDFDWSVQKLEEWGIWGRVPVTFSPVFGECDPRELARWVLDSGLPVRVQIQLHKILFDPQLRGV

SEQ ID NO: 31200 - protein, 212 aa, Leptospirillum ferriphilum
  REGION 1..212: note = tr|A0A094YHM7|A0A094YHM7_9BACT 7-carboxy-7-deazaguanine synthase OS=Leptospirillum ferriphilum OX=178606 GN=queE PE=3 SV=1
MKITETFRSIQGESRYSGWPCFFIRTTGCPLRCRWCDTTYSFYGGEERTVDSLVGEAVSSGTSLVEITGGEPFVQPELPALCQKLLDRGKTVLIETSGGFSVPSGLNRQCRLIVDLKPPGSGMEAWMKAENFAELGGEDEIKAVLAGRDDFDWSVQKLEEWGVWGRVPVTFSPVFGECDPRELARWVLDSGLPIRIQVQLHKILFDPQLRGV

SEQ ID NO: 31201 - protein, 213 aa, unidentified
  source 1..213: note = Leptospirillum ferrodiazotrophum
  REGION 1..213: note = tr|C6HYH5|C6HYH5_9BACT 7-carboxy-7-deazaguanine synthase OS=Leptospirillum ferrodiazotrophum OX=412449; GN = queE PE=3 SV=1
MMRINETFFSIQGESTFAGWPCFFIRTTGCPLRCRWCDTTYSFYEGEERTLDSLVDEALSHPAPLVEVTGGEPFSAPELPRLVEKLLDAGKTVLIETSGALPVPQGLDRRCHLVMDIKPPGSGMAHLMAEETFRALRPGDEIKAVIADRGDFDFCLDFLDRLALPREIPVTFSPVFGECSPGELAEWVLSSGREIRVGIQLHKILFDPERRGV

SEQ ID NO: 31202 - protein, 212 aa, Leptospirillum ferrooxidans
  REGION 1..212: note = tr|I0IKD8|I0IKD8_LEPFC 7-carboxy-7-deazaguanine synthase OS=Leptospirillum ferrooxidans (strain C2-3); OX = 1162668 GN=queE PE=3 SV=1
MKITELFRSIQGESLYSGWPCFFIRTSGCPLRCTWCDTTYSFYGGTDMTVDEILLETGKSETNLVEITGGEPFVQTDFVELSNRLRREGYEVLIETSGGFPIPEGLDRSCHVIMDIKPPGSGMSQWMNPDHFRSLTSNDEIKAVCQSREDFDWVVSTLDDWRLPAEIPVTVSPVFDLVDPKELGQWVLESRRRFRIQIQLHKILFDPKAKGV

SEQ ID NO: 31203 - protein, 212 aa, Leptospirillum sp.
  REGION 1..212: note = tr|A0A0K0WJN1|A0A0K0WJN1_9BACT 7-carboxy-7-deazaguanine synthase OS=Leptospirillum sp. Group II 'CF-1' OX=1660083 GN=queE PE=3 SV=1
MKITETFRSIQGESRYSGWPCFFIRTTGCPLRCRWCDTTYSFYGGEERTVDSLVGEAVSSGTSLVEITGGEPFVQPELPELCQKLLDLGKTVLIETSGGFPVPSGLNRECRLIVDLKPPGSGMEDWMKAENFAELGTEDEIKAVLTGREDFDWSVQKLEEWGIWGRVPVTFSPVFGECDPRELARWVLDSGLPVRVQIQLHKILFDPQLRGV

SEQ ID NO: 31204 - protein, 212 aa, Leptospirillum sp.; identical to SEQ ID NO: 31203
  REGION 1..212: note = tr|B6AN33|B6AN33_9BACT 7-carboxy-7-deazaguanine synthase OS=Leptospirillum sp. Group II '5-way CG'; OX = 419541 GN=queE PE=3 SV=1

SEQ ID NO: 31205 - protein, 232 aa, unidentified
  source 1..232: note = Leucothrix pacifica
  REGION 1..232: note = tr|A0A317C3R8|A0A317C3R8_9GAMM 7-carboxy-7-deazaguanine synthase OS=Leucothrix pacifica; OX = 1247513 GN=queE PE=3 SV=1
MSQLIISEVFGPTIQGEGALVGKPTVFVRSGGCDYRCSWCDTLYAVEKKYKNEWHTLSTEEVWSQIQALSPTPILITLSGGNPALQDFAKLIEIGHKAGYTFAMETQGSLSKPWFKQIDYLTLSPKPPSSGMETKWDAFEKSVSLAKSPEAISIKLVVADDIDFKWAHEVQQRYPQFDYYLQPCNLQADEVTLEQGLQSTRELIDQVVAVGWHQATVLPQLHNILWGNQRGV

SEQ ID NO: 31206 - protein, 232 aa, Leucothrix sp.
  REGION 1..232: note = tr|A0A317CCY2|A0A317CCY2_9GAMM 7-carboxy-7-deazaguanine synthase OS=Leucothrix sp. IMCC9719 OX=1481894 GN=queE PE=3 SV=1
MSTLIISEVFGPTVQGEGALVGKPTVFVRSGGCDYRCSWCDTLYAVDKKYKNEWHTLSTEEVWGQIQALSPTPILITLSGGNPALQDFAELIRIGHEAGYTFAMETQGSISKPWFNQVDYLTLSPKPPSSEMETRWDNFDKCLDVARNHEAVSIKIVVANDEDFSWAREVQARYPSYPFYLQPCNLDAEEVTLEQGLQSTRELIDRVVSVGWHDATVLPQLHNILWGTQRGV

SEQ ID NO: 31207 - protein, 213 aa, Lewinella agarilytica
  REGION 1..213: note = tr|A0A1H9GWC0|A0A1H9GWC0_9BACT 7-carboxy-7-deazaguanine synthase OS=Lewinella agarilytica; OX = 478744 GN=queE PE=3 SV=1
MSRQRTYKIKECFYTLQGEGAQAGRAAVFLRFTGCNLWSGREEDRHEAVCKFCDTDFIGTDGQNGGRYTQVQCGDLVQSLWPGGGRPYVVCTGGEPLLQLDEPLIGELQSRGFEVAVETNGTVPVPESIDWVCVSPKANADLIVTRGDELKLVFPQSEAEAQPEQFTQLDFEHFFLQPKDEADADHTPATVAYCMAHPQWRISLQTHKLMGID

SEQ ID NO: 31208 - protein, 211 aa, Lewinella marina
  REGION 1..211: note = tr|A0A2G0CHH2|A0A2G0CHH2_9BACT 7-carboxy-7-deazaguanine synthase OS=Lewinella marina; OX = 438751 GN=queE PE=3 SV=1
MSRTYKIKECFYTLQGEGAQAGRAAVFLRFTGCNLWSGREEDRHAAVCKFCDTDFIGTDGTNGGRYTLVQCVELVASLWPGGGRPYVVCTGGEPLLQLDVPLIEAFQAAGFEVAVETNGTLPVPEQIDWVCVSPKADATLAVSVGDELKLVYPQTEPSAHPSRFAELAFSHFFLQPKDEAGQNHLSATVAYCLSHPQWRVSLQTHKIMGIE

SEQ ID NO: 31209 - protein, 209 aa, Lewinella nigricans
  REGION 1..209: note = tr|A0A2D0MZL2|A0A2D0MZL2_9BACT 7-carboxy-7-deazaguanine synthase OS=Lewinella nigricans DSM 23189 = NBRC 102662 OX=1122177 GN=queE PE=3 SV=1
MYKIKEIYYTLQGEGAHTGRPAVFCRFTGCNLWSGREEDRHKAICQFCDTDFWGTDGVLGGRYTAEELAGLVKSCWPDDEFGQPYVVCTGGEPLLQLDEPLIEAFHRQGLEVGVETNGTIEPPAGLDWICVSPKAGAELVIKAANEIKLVFPQPGAEPERYLDLDFENFFLQPMDGPAAEKNTKLTLEYCLKNPRWRLSLQTHKLLNIP

SEQ ID NO: 31210 - protein, 211 aa, Lewinella sp.
  REGION 1..211: note = tr|A0A4S4NIZ4|A0A4S4NIZ4_9BACT 7-carboxy-7-deazaguanine synthase OS=Lewinella sp. HSMS-39; OX = 2562452 GN=queE PE=3 SV=1
MPHTYKIKECFYTLQGEGAQAGRAAVFLRFTGCNLWSGREEDRHSAVCKFCDTDFVGTDGTNGGRYTLVQCVELATALWPGGGRPYIVCTGGEPLLQLDVPLIEALQAAGFEVAVETNGTLPVPAQIDWVCVSPKADAQLAVSGGDELKLVYPQSEPTARPERFESLAFTHFFLQPKDEVGQNHLPATVAYCLQHPRWRVSLQTHKIMGIE

SEQ ID NO: 31211 - protein, 211 aa, Lewinella sp.
  REGION 1..211: note = tr|A0A180ET38|A0A180ET38_9BACT 7-carboxy-7-deazaguanine synthase OS=Lewinella sp. 4G2; OX = 1803372 GN=queE PE=3 SV=1
MARTYKIKESFYTLQGEGAQAGRAAVFLRFTGCNLWSGREEDRTEAVCKFCDTDFIGTDGQNGGRYDLEACANLVASLWPGGGKPYVVCTGGEPLLQLDEPLIEALHLRGFEVAVETNGTVAVPESIDWVCVSPKANAELVVTKGDELKLVYPQPEVGAQPEQFVNLNFTHFFLQPKDERGHDHTPATVAYCMEHPQWRISLQTHKLMGID

SEQ ID NO: 31212 - protein, 211 aa, unidentified
  source 1..211: note = Lewinella xylanilytica
  REGION 1..211: note = tr|A0A2S6I2P3|A0A2S6I2P3_9BACT 7-carboxy-7-deazaguanine synthase OS=Lewinella xylanilytica OX=1514080 GN=queE PE=3 SV=1
MPRSYKIKECFYTLQGEGAQSGRAAVFLRFTGCNLWSGREEDRHAAVCKFCDTDFIGTDGTNGGRYTQEQCVQLVQSQWPGGGQPYVVCTGGEPLLQLDAPLIEAMQEAGFEVAVETNGTQPVPEQIDWVCVSPKADAPLVVTGGDEMKLVYPQSEASAQPERFAALAFRHFFLQPKDEPGHNHTPAAVDYCLRHPQWRISLQTHKIMGIE

SEQ ID NO: 31213 - protein, 215 aa, unidentified
  source 1..215: note = Lewinellaceae bacterium
  REGION 1..215: note = tr|A0A2C6CSS1|A0A2C6CSS1_9BACT 7-carboxy-7-deazaguanine synthase OS=Lewinellaceae bacterium SD302 OX=2014804 GN=queE PE=3 SV=1
MIERTYKVKEVFYTLQGEGGQAGRAAVFLRFTGCNLWSGREEDRPKAICKFCDTDFVGTDGENGGRYSASSLADKVAMLWPSPRSGKPYVVCTGGEPLLQLDESLIKALHEKGFEIAVETNGTIPAPASIDWICVSPKAGSEVVQRSGHELKLVYPQKEVEAQPELFADLDFEHFYLQPLDGPNTAQNTVACVEYCLANPQWKVSLQTHKILDIP

SEQ ID NO: 31214 - protein, 211 aa, unidentified
  source 1..211: note = Liberibacter asiaticus
  REGION 1..211: note = tr|C6XHD2|C6XHD2_LIBAP 7-carboxy-7-deazaguanine synthase OS=Liberibacter asiaticus (strain psy62); OX = 537021 GN=queE PE=3 SV=1
MKLYSIKEIFLTLQGEGGHAGRVAVFCRFSGCNLWSGREQDRLSAQCRFCDTDFVGIQGTKGGRYNVDQLADLIEEQWITGEKEGRYCVLTGGEPLLQVDVPLIQALNKRGFEIAVETNGTIEPPQGIDWICVSPKAGCDLKIKGGQELKLVFPQVNVSPENYIGFDFERFSLQPMDGPFLEENTNLAISYCFQNPKWRLSVQTHKFIGIR

SEQ ID NO: 31215 - protein, 210 aa, unidentified
  source 1..210: note = Liberibacter crescens
  REGION 1..210: note = tr|L0ET36|L0ET36_LIBCB 7-carboxy-7-deazaguanine synthase OS=Liberibacter crescens (strain BT-1) OX=1215343; GN = queE PE=3 SV=1
MKSYSVKEIFLTLQGEGTYAGRAAVFCRFSGCNLWSGREQDRITAQCYFCDTDFVGIDGSKGGKYSAEGLADAILSEWKGGESERFCVLTGGEPLLQVDVPLIKALNQRNFEIAVETNGTVEAPDGLDWICVSPKGNYDLKIKKGQELKLVFPQKESPPERYLSLDFKRFLLQPMDGPDIHKNTELAIDYCLSHPKWRLSVQTHKFLGIR

SEQ ID NO: 31216 - protein, 211 aa, unidentified
  source 1..211: note = Liberibacter solanacearum
  REGION 1..211: note = tr|E4UDF2|E4UDF2_LIBSC 7-carboxy-7-deazaguanine synthase OS=Liberibacter solanacearum (strain CLso-ZC1); OX = 658172 GN=queE PE=3 SV=1
MKLYSVKEIFLTLQGEGAQVGRVAVFCRFSGCNLWSGREKDRLFAQCRFCDTDFVGTKGTMGGRYSAEQLADLIASAWIPEEKEERYCVLTGGEPLLQVDSALIKALNKRNFTISVETNGTIKPPEGIDWICVSPKAGCDLKVKNGQELKLVFPQVDAPPENYIDFDFDIFSLQPMDGSFLKENTNLAISYCFKNPKWRVSLQTHKFIGIR

SEQ ID NO: 31217 - protein, 268 aa, unidentified
  source 1..268: note = Lihuaxuella thermophila
  REGION 1..268: note = tr|A0A1H8C1W5|A0A1H8C1W5_9BACL 7-carboxy-7-deazaguanine synthase OS=Lihuaxuella thermophila OX=1173111 GN=queE PE=3 SV=1
MVCSDHQECGSIRNTPTRPAIFQDRKEVKHLQEALEQLDDPKLPMVEVFQTVEGEGTRAGFPTTFVRVFNCNLRCTWCDTPYSYAPAKPEYLAAVSEIVEQVRQYPNKHICLTGGEPLMHGHKSLVLIKALADIDYVEDIHIETNGAIHLGPFHRLRENDERVGKKVRFILDYKLPASGETEKMLPENFAYLRDSDEIKFVIANEEDFHHAVDILGRLVQKGIPLFSPVWETMRPEKLVSLILEHRLTNVKLSLQIHKVIWEPDARGV

SEQ ID NO: 31218 - protein, 239 aa, unidentified
  source 1..239: note = Limimaricola cinnabarinus
  REGION 1..239: note = tr|U3ACP6|U3ACP6_9RHOB 7-carboxy-7-deazaguanine synthase OS=Limimaricola cinnabarinus LL-001 OX=1337093; GN = queE PE=3 SV=1
MSLLRISEIFGPTIQGEGALIGQATVFVRLGGCDYRCSWCDSLHAVESEYRHTWAAMETEAVWERITALSGGRPLTVTISGGNPAIQDCGPLIERGRASGYRFALETQGSVARNWFSRLEPLVLSPKPPSSGETPDWDRFDDCLKAAGEAEAILKIVVFDETDYLWARDVAACYPALPVYLQPGNHTPPPPEAEDAEIDMDGITDRMDWLVSRTLADGWFEARVLPQLHVLIWGNKRGV

SEQ ID NO: 31219 - protein, 249 aa, unidentified
  source 1..249: note = Limimaricola cinnabarinus
  REGION 1..249: note = tr|A0A2G1MH38|A0A2G1MH38_9RHOB 7-carboxy-7-deazaguanine synthase OS=Limimaricola cinnabarinus OX=1125964 GN=queE PE=3 SV=1
MGRIPAPERGMSTLRVSEIFGPTIQGEGALIGQATVFVRLGGCDYRCSWCDSLHSVESEYRHTWAAMETDEVWAKVAELSGGRPLTVTISGGNPAIQDCGPLIEKGRALGYGFALETQGSVARDWFSRLEPLVLSPKPPSSGETPDWDRFDDCLKAAGKAEAILKIVVFDETDYLWARGVAARYPDLPVYLQPGNHTPPPPEAEDAEIDMDGITDRMDWLVSRTLADGWFAARVLPQLHVLIWGNKRGV

SEQ ID NO: 31220 - protein, 239 aa, unidentified
  source 1..239: note = Limimaricola hongkongensis
  REGION 1..239: note = tr|A0A017HDA7|A0A017HDA7_9RHOB 7-carboxy-7-deazaguanine synthase OS=Limimaricola hongkongensis DSM 17492 OX=1122180 GN=queE PE=3 SV=1
MSMLRVSEIFGPTIQGEGALIGQATVFVRLGGCDYRCSWCDSLHSVDSEYRHTWAPMETEEVWAKVAELSGGRPLTVTISGGNPAIQDCGPLIERGRALGYGFALETQGSVARDWFSRLAPLVLSPKPPSSGETPDWDRFDDCLAAAGQAEAILKIVVFDETDYAWARDVAARYPQLPVYLQPGNHTPPPADAEDAVIDMDGITDRMDWLVNRTLADGWFAARVLPQLHVLIWGNKRGV

SEQ ID NO: 31221 - protein, 239 aa, unidentified
  source 1..239: note = Limimaricola soesokkakensis
  REGION 1..239: note = tr|A0A1X6YYP3|A0A1X6YYP3_9RHOB 7-carboxy-7-deazaguanine synthase OS=Limimaricola soesokkakensis OX=1343159 GN=queE PE=3 SV=1
MTTLRVSEIFGPTIQGEGALIGQATVFVRLGGCDYRCSWCDSLHAVESEYRHTWAAMETGAVWDRIVELSGGRPLTVTISGGNPAIQDCGPLIERGRALGYRFALETQGSVARDWFSRLEPLVLSPKPPSSGETPDWARFDECLAAAGDAEAILKIVVFDETDYLWARDVASRYPQLPVYLQPGNHTPPPPEAEDAEIDMDGITDRMDWLVSRTLADGWFEARVLPQLHVLIWGNKRGV

SEQ ID NO: 31222 - protein, 210 aa, unidentified
  source 1..210: note = Limimonas halophila
  REGION 1..210: note = tr|A0A1G7R6L2|A0A1G7R6L2_9PROT 7-carboxy-7-deazaguanine synthase OS=Limimonas halophila; OX = 1082479 GN=queE PE=3 SV=1
MAYSAKEIFYTLQGEGAHAGRPAVFCRFAGCNLWSGLERDRAHAVCQFCDTDFVGTDGPGGGKFRDADALAEAVADKWPNEQGAPFVVCTGGEPLLQLDAAAVAAFHARGFAVAIETNGTRVPPAGVDWVCMSPKAGAPLTLTEGDELKLIYPQHGAPPEAYADLAFRYFYLQPMDGPELQANTEAAVAYCMANPQWRLSLQTHKMLGIR

SEQ ID NO: 31223 - protein, 208 aa, Limnobacter sp.
  REGION 1..208: note = tr|A0A151QKQ4|A0A151QKQ4_9BURK 7-carboxy-7-deazaguanine synthase OS=Limnobacter sp. CACIAM 66H1 OX=1813033 GN=queE PE=3 SV=1
MFYTLQGEGAQAGRAAVFCRFSGCNLWTGREEDRATAVCKFCDTDFVGTDGVGGGKFKDAVTLARAIAETYLGGQGTAKPYVVFTGGEPTLQLDTALIDAVHANGFEIAIETNGTLPVPLGVDWICVSPKFGSELVQTSGNELKVVVPQLGQDLNALGRLQFDHYFVQAMDDSDPQKKTRNMQVAIQTCLDKPQWRLSVQTHKVIGMP

SEQ ID NO: 31224 - protein, 208 aa, Limnobacter sp.
  REGION 1..208: note = tr|A0A520TCC2|A0A520TCC2_9BURK 7-carboxy-7-deazaguanine synthase OS=Limnobacter sp.; OX = 2003368 GN=queE PE=3 SV=1
MFYTLQGEGAQAGRAAVFCRFAGCNLWTGREEDRATAVCKFCDTDFVGIDGVGGGKFKDAVALAQAIANTYQGEHGTGKPYVVFTGGEPTLQLDTALIDAVHANGFEIAIETNGTLAVPSGVDWICVSPKFGSELVQTNGHELKVVVPQLGQDLNALGRLQFEHYFVQAMDDSDPVKKSRNLQVAIQTCLNKPQWRLSVQTHKVIGIP

SEQ ID NO: 31225 - protein, 223 aa, unidentified
  source 1..223: note = Limnobaculum parvum
  REGION 1..223: note = tr|A0A2Y9TW70|A0A2Y9TW70_9ENTR 7-carboxy-7-deazaguanine synthase OS=Limnobaculum parvum; OX = 2172103 GN=queE PE=3 SV=1
MSYPVNELFQTLQGEGFFTGVPAIFIRLQACPVGCSWCDTKHTWEKIADRQQSMDDILTKTQESDSWAEASAPQLLAILQQPHYTARHVVITGGEPCLYDLLPLTGLLEQHGFQCQIETSGTQPVMCSTETWVTVSPKVDMRGGLNVISQALVRADEIKHPVARERDIEQLDILLATLSDDKKRVIALQPISQNPRATELCIKTCIERNWRLSMQTHKYLGIE

SEQ ID NO: 31226 - protein, 211 aa, Limnohabitans curvus
  REGION 1..211: note = tr|A0A315ERC4|A0A315ERC4_9BURK 7-carboxy-7-deazaguanine synthase OS=Limnohabitans curvus; OX = 323423 GN=queE PE=3 SV=1
MTYSVKEMFYTLQGEGANAGQPAVFCRFAGCNLWSGREVDRSSAICQFCDTDFVGTDGTHGGKFDSAQALAAAIASFWPATDTAHRFVVLTGGEPLLQVDEALVDALHALHFTIAVETNGTVQPPKGIDWLCMSPKAGSQRVVEAGQELKLVFPQVGAEPALYESLNFENFYLQPMDGPNAAANTAAAVAYCQAHPRWRLSVQTHKLIGIR

SEQ ID NO: 31227 - protein, 212 aa, Limnohabitans sp.
  REGION 1..212: note = tr|A0A315BYP7|A0A315BYP7_9BURK 7-carboxy-7-deazaguanine synthase OS=Limnohabitans sp. MMS-10A-160 OX=1835766 GN=queE PE=3 SV=1
MTYSVKEIFYTLQGEGAQTGMPAVFCRFAGCNLWSGREEDRADAVCRFCDTDFVGTDGTLGGKFAQADELAALIAAQWPAGDDAHRLTVLTGGEPLLQVDEALVDALHARGFRIAVETNGTVAAPPGIDWLCVSPKASAPWVQRQGQELKLVWPQPGLDLQAIARTGQFTHRFLQPMDGPAQAANTATCIAACLRDPVWRLSLQTHKISGIR

SEQ ID NO: 31228 - protein, 210 aa, Limnohabitans sp.
  REGION 1..210: note = tr|A0A315C0A7|A0A315C0A7_9BURK 7-carboxy-7-deazaguanine synthase OS=Limnohabitans sp. JirII-29 OX=1835756 GN=queE PE=3 SV=1
MTYSVKEMFYTLQGEGANAGRPSVFCRFAGCNLWSGREEDRSSAICQFCDTDFVGTDGDGGGKFATAQDLALAIAAFWPKGQAHRLVVLTGGEPLLQVDAALVQALHDQNFTIAVETNGTVLPPDGIDWLCVSPKAGSALVVRSGQELKLVYPQAGNHPEEFEQLHFEHHYLQPMDGPLAAANTAAAIAYCQSHPQWRLSVQTHKLIGIR

SEQ ID NO: 31229 - protein, 204 aa, unidentified
  source 1..204: note = Limnoraphis robusta
  REGION 1..204: note = tr|A0A0F5YFG3|A0A0F5YFG3_9CYAN 7-carboxy-7-deazaguanine synthase OS=Limnoraphis robusta CS-951 OX=1637645 GN=queE PE=3 SV=1
MNEIAIHETFQNTIQGEGYWAGTPVDFIRLAGCPVRCHYCDTGYANGGVGLPRNVRSFNELIAELRSPRVVISGGEPFIYPQLPDLVQCIEATDRTVSIETSGSFWQAISSSVWVTLSPKEHISPQYPVVAQMWERASEIKLVIETGLEVKYYAQYLPKKPQIPVFLQPEWTQRDYTLPLVLDLLKQYPYYRLSLQLHKYVGVD

SEQ ID NO: 31230 - protein, 204 aa, unidentified
  source 1..204: note = Limnospira indica
  REGION 1..204: note = tr|H1W9Y1|H1W9Y1_9CYAN 7-carboxy-7-deazaguanine synthase OS=Limnospira indica PCC 8005 OX=376219 GN=queE; PE = 3 SV=1
MITIPVHETFQQTIQGEGYWAGTPVDFIRLAGCPVGCPWCDTGYADGGKGLPRNMRSFDELLAELVSPRVVISGGEPFIYPQLPDLVRVLEETGRQVSIETSGAFWQDVSDLCWITLSPKEHISPRYPVVSQMWRRASEIKLVIDVGDELEFYRCRLAENSTIPVFLQPQWTDIDRTLPLVLAKLKQFPGYRLSVQLHKYIGVE

SEQ ID NO: 31231 - protein, 219 aa, unidentified
  source 1..219: note = Limnothrix rosea
  REGION 1..219: note = tr|A0A1Q4QZQ9|A0A1Q4QZQ9_9CYAN 7-carboxy-7-deazaguanine synthase OS=Limnothrix rosea IAM M-220 OX=454133 GN=queE PE=3 SV=1
MAIAANAVSSSVLVSPTDLLETKTYPIVETFHSLQGEGQWFGVSAFFIRLAGCDVGCPWCDTKISWNPKRHPPVAIAALVKQVREAKPRIIVVTGGEPLMHDLQPLTDALKPLDIPLHLETSGSHALSGQFDWITLSPKTFKPPLPDIYAHVDELKVVIDNKTDLDWAEAEANKINPTAPKYLQPQWENPASQDLIFQYILQHPDWRLGLQTHKFLGVR

SEQ ID NO: 31232 - protein, 262 aa, unidentified
  source 1..262: note = Limnothrix sp.
  REGION 1..262: note = tr|A0A372DRM6|A0A372DRM6_9CYAN 7-carboxy-7-deazaguanine synthase OS=Limnothrix sp. CACIAM 69d OX=1890733 GN=queE PE=3 SV=1
MSDRVATARLIEVFSAIQGEGPIVGTRQLFIRFAQCDLRCDYCDSDRTWVAPDHCDIEQTPGLRDFVTVANPVSQSQLLDWVQQLDRPHLHDSISITGGEPLLHSRFLQDFLPALKTVSSLPVYLETGGHRPQQLTPLLPWLDWIGMDLKLPSVSGETHWEAHGEFLRLAVEAQKWVFVKAIVSEATTLADLTRSAELVAAIDPHLVYVMQPVSPLPAPIKPDRQPPKPPQPEQVLAWQQHLKQWLPQVIVIPQTHKAIGQL

SEQ ID NO: 31233 - protein, 262 aa, unidentified
  source 1..262: note = Limnothrix sp.
  REGION 1..262: note = tr|A0A1C0V7S2|A0A1C0V7S2_9CYAN 7-carboxy-7-deazaguanine synthase OS=Limnothrix sp. P13C2; OX = 1880902 GN=queE PE=3 SV=1
MSDRVATARLIEVFSAIQGEGPIVGTRQLFIRFAQCDLRCDYCDSDRTWVAPDHCDIEQTPGLRDFVTVANPVSQSQLLDWVQQLDRPHLHDSISITGGEPLLHSRFLQDFLPALKTVSSLPVYLETGGHRPQQLEPLLPWLDWIGMDLKLPSVSGETHWEAHGEFLRLAVAAQKWVFVKAIVSEATTLADLTRSAELVAAIDPHLVYVMQPVSPLPAPIKPDRQPPQPPQPEQVLAWQQHLKQWLPQVIVIPQTHKAIGQL

SEQ ID NO: 31234 - protein, 202 aa, Lishizhenia tianjinensis
  REGION 1..202: note = tr|A0A1I7AGI8|A0A1I7AGI8_9FLAO 7-carboxy-7-deazaguanine synthase OS=Lishizhenia tianjinensis OX=477690 GN=queE PE=3 SV=1
MEVVKSFPVMEEFYTIQGEGSYSGRAAYFVRLGGCDVGCVWCDVKESWDAEKHPETPVAALLEKITATKTDFVVITGGEPAMYDLSYFVDELHKLGIEVAIETSGCYPLKGDIDWYCFSPKKFKAPVEDAYAKAKELKVVIFNKSDFQWAEDHAAKVNDACKLYLQPEWSKEAKMLPLIIDYVKENPQWRISLQTHKYMQIP

SEQ ID NO: 31235 - protein, 204 aa, unidentified
  source 1..204: note = Listeria booriae
  REGION 1..204: note = tr|A0A099WDD7|A0A099WDD7_9LIST 7-carboxy-7-deazaguanine synthase OS=Listeria booriae; OX = 1552123 GN=queE PE=3 SV=1
MMHREYRIVEIFETMQGEGYNTGMPSVFIRFGRCNLDCPWCDTNYNEFVMMTGEQILAEVHKYEARNIVITGGEPTIQRGIEELLQVLKAEGYYLAIETNGLKDVPVEIDYVATSPKRLYSNMYEKRHLSQADEVRIVVDGDVQAFCAQIEALIPAKRYYLSPCEVDGDFNMLETIRQLGQLNATRGENKWALSIQTHKLAGIE

SEQ ID NO: 31236 - protein, 204 aa, unidentified
  source 1..204: note = Listeria cornellensis
  REGION 1..204: note = tr|W7C3F8|W7C3F8_9LIST 7-carboxy-7-deazaguanine synthase OS=Listeria cornellensis FSL F6-0969 OX=1265820; GN = queE PE=3 SV=1
MMDHEYRIVEIFETMQGEGYNTGMPSVFIRFGRCNLDCPWCDTNYNEFEMMTGQQILDEVHKYTARNIVITGGEPTIQRGIEELLQVLKAEGYYLAIETNGLKEVPAEIDYVATSPKRLYSKMYEKRHLSRADEVRIVVDGDIQEFCAQIEALIPAKRYYLSPCEVDGGFNMLETISQLGKLNAERSENKWSLSIQTHKLAGIE

SEQ ID NO: 31237 - protein, 204 aa, Listeria rocourtiae
  REGION 1..204: note = tr|A0A4R6ZL47|A0A4R6ZL47_9LIST 7-carboxy-7-deazaguanine synthase OS=Listeria rocourtiae; OX = 647910 GN=queE PE=3 SV=1
MTEREYRIVEIFETMQGEGYNTGMPSIFIRFGRCNLDCPWCDTNYNEFEMMTGQQILDEVHKYTARNIVITGGEPTIQRGIEELLQALKIEGYYLAIETNGLKEVPVEIDYVATSPKRLYSEMYEKRHLSRADEVRIVVDGDIQEFCAQIEALIPAKRYYLSPCEEEGAFNMLETISQLGKLNTGRGENKWSLSIQTHKLAGIE

SEQ ID NO: 31238 - protein, 204 aa, Listeria sp.
  REGION 1..204: note = tr|A0A3N9TU52|A0A3N9TU52_9LIST 7-carboxy-7-deazaguanine synthase OS=Listeria sp. SHR_NRA_18 OX=2269046 GN=queE PE=3 SV=1
MMDREYRIVEIFETMQGEGYNTGMPSVFIRFGRCNLDCPWCDTNYNEFEMMTGQQILDEVHKYTARNIVITGGEPTIQRGIEELLQVLKAEGYYLAIETNGLKEVPVEIDYVATSPKRLYSKMYEKRHLSRADEVRIVVDGDIQEFCAQIEVLIPAKRYYLSPCEEDGGFNMLETISQLGKLNAERGEDKWSLSIQTHKLAGIE

SEQ ID NO: 31239 - protein, 204 aa, unidentified; identical to SEQ ID NO: 31238
  source 1..204: note = Listeriaceae bacterium
  REGION 1..204: note = tr|A0A099W8A5|A0A099W8A5_9LIST 7-carboxy-7-deazaguanine synthase OS=Listeriaceae bacterium FSL A5-0209 OX=1497679 GN=queE PE=3 SV=1

SEQ ID NO: 31240 - protein, 92 aa, unidentified
  source 1..92: note = Litoricolaceae bacterium
  REGION 1..92: note = tr|A0A520S806|A0A520S806_9GAMM 7-carboxy-7-deazaguanine synthase QueE (Fragment); OS = Litoricolaceae bacterium OX=2510333 GN=EVA60_05645 PE=4; SV = 1
SGESSKNLVSNLTRLQSKDQIKVVVTSADDFRWFELFCDEHPEVVHAGAIWISPSYGEMDLKILADLIVQSRHPFRMQLQLHKQIWGEESGR

SEQ ID NO: 31241 - protein, 225 aa, unidentified
  source 1..225: note = Litorilituus sediminis
  REGION 1..225: note = tr|A0A4V0ZFN5|A0A4V0ZFN5_9GAMM 7-carboxy-7-deazaguanine synthase OS=Litorilituus sediminis OX=718192 GN=queE PE=3 SV=1
MNTVEYKINELFETIQGEGAFTGQPSIFIRLQGCPVACSWCDTKHTWEIELEDKVTKEQIIAKTQETSQWASFSPEQILSLFKVQGFKAKHIVITGGEPCMVDLTPLCQTLEKAGYSCQIETSGTFDVRTTKDCWVTVSPKVNMRGGYEILASAMKRANEIKHPVATEQHVDDLKSLLAKHKVTNTPVYLQPISQKQRATELAIATCIENNWRLSVQVHKYIGIE

SEQ ID NO: 31242 - protein, 225 aa, unidentified
  source 1..225: note = Litorilituus sp.
  REGION 1..225: note = tr|A0A502KMR3|A0A502KMR3_9GAMM 7-carboxy-7-deazaguanine synthase OS=Litorilituus sp. RZ04; OX = 2491017 GN=queE PE=3 SV=1
MNLTNYKINEFFQTIQGEGSYTGQPSIFIRLQGCPVACSWCDTKHTWDIEPSLEISADKLLAKSAETEQWSDLSVDQILTLIVQQKFKAKHVVITGGEPCMVDLTPLCQGLEQAGFSTQIETSGTFEIRTTDSCWVTVSPKVNMRGGYEILSSAMKRANEIKHPVATEQHIDDLKSLLLQHKVTTTPVYLQPISQKQRATELAIASCIENDWRLSIQVHKYIGIE

SEQ ID NO: 31243 - protein, 213 aa, Litorimonas taeanensis
  REGION 1..213: note = tr|A0A420WJM9|A0A420WJM9_9RHOB 7-carboxy-7-deazaguanine synthase OS=Litorimonas taeanensis OX=568099 GN=queE PE=3 SV=1
MSYAVKECYLTVQGEGAQAGITAVFLRFSGCNLWTGREKDRAKAVCQFCDTDFIGTDGPGGGRFDNAKELARHVASFWPQSDEDKAHAWVICTGGEPALQLDESLIQAFHEAGFKVAIETNGTLKLPQGLDWICVSPKADAPLVQRAGHELKLVYPQIENKPSDFVELDFEVFSLQPLDDSEQAAHSQAAFEYCLAHPKWRLSVQTHKYIGVP

SEQ ID NO: 31244 - protein, 236 aa, Loktanella sp.
  REGION 1..236: note = tr|A0A1H9HE15|A0A1H9HE15_9RHOB 7-carboxy-7-deazaguanine synthase OS=Loktanella sp. DSM 29012 OX=1881056 GN=queE PE=3 SV=1
MTRLRIVEIFGPTVQGEGALIGEPTVFVRSGGCDYRCSWCDSMHAVDPAFRASWAAMDTAEVWAKVQRLSGGQPLTVSLSGGNPAIQDFAPLIALGQAQGYRFACETQGSIAKPWFADLDTLVLSPKPPSSGETVDWDAFDTCCQAARGAAAVVMKIVIFDDTDYAWARAAADRYPHLPLYLQPGNPEVDPDRAVDPQRLSDRLLWLVDKTMNDNWFAPRILPQLHVLLWGNKRGV

SEQ ID NO: 31245 - protein, 235 aa, Loktanella sp.
  REGION 1..235: note = tr|A0A0F4RKJ0|A0A0F4RKJ0_9RHOB 7-carboxy-7-deazaguanine synthase OS=Loktanella sp. S4079; OX = 579483 GN=queE PE=3 SV=1
MTLRIAEIFGPTIQGEGALIGEPTVFVRAGGCDYRCTWCDSMHAVDSANRHSWDALTTAQVWEQVTDLSGGQPLTVSISGGNPAIQDFGPMIALGQSQGYRFACETQGSIAKPWFADLDTLVLSPKPPSSGETVDWAAFDKCLAAAGTQPNVVMKIVIFDDIDYAWAREAAAKYPDLPLYLQPGNAEVDPELPVDLNAAIDRLHWLIEKVTADRWFTPRVLPQLHVLVWGNKRGV

SEQ ID NO: 31246 - protein, 212 aa, Lonepinella koalarum
  REGION 1..212: note = tr|A0A5D1ZR41|A0A5D1ZR41_9PAST 7-carboxy-7-deazaguanine synthase OS=Lonepinella koalarum; OX = 53417 GN=queE PE=3 SV=1
MVVQLINEPKFPIVEIFESLQGEGANTGMPSIFVRFGKCNLACPWCDTNYNQFEQWSLSQILQKVRSFSVKNIIITGGEPTIQVGIALLLDRLKADGYFLAIETNGLKAIPSQIDYIATSPKAMYAKKYENRCIPFAHEVRIVVDEQDENVQDFCQLIESKIQANDYYLSPCEINGKMNLLQTITHLGLLNQRQNKPKWQLSIQTHKLIGIA

SEQ ID NO: 31247 - protein, 212 aa, Lonepinella koalarum
  REGION 1..212: note = tr|A0A5F0NB62|A0A5F0NB62_9PAST 7-carboxy-7-deazaguanine synthase OS=Lonepinella koalarum; OX = 53417 GN=queE PE=3 SV=1
MVVQLINEPKFPIVEIFESLQGEGANTGMPSIFVRFGKCNLACPWCDTNYNQFEQWSLSQILQKVRSFSVKNIIITGGEPTIQVGIALLLDRLKADGYFLAIETNGLKAIPSQIDYIATSPKAMYAKKYENRCIPFAHEVRIVVDEQDENVQDFCQLIESKIQANGYYLSPCEINGKMNLLQTITHLGLLNQRQNKPKWQLSIQTHKLIGIE

SEQ ID NO: 31248 - protein, 263 aa, unidentified
  source 1..263: note = Longibacter salinarum
  REGION 1..263: note = tr|A0A2A8CZY1|A0A2A8CZY1_9BACT 7-carboxy-7-deazaguanine synthase OS=Longibacter salinarum; OX = 1850348 GN=queE PE=3 SV=1
MIDSPSSDGSRPSSPASLDERHPNSSSGSQDPVYRVKEIFRTVQGEGFWAGRPAVFVRMVGCNMWTGYEEDRARDAERTGADCPTWCDTDFTKEGSESLEAAEVVDRMKTTGGPIDFCVVTGGEPFLQLDATLVRAMQDAGYEVACETNGTIKIEETFWDDKEQRVVMPDWIVCSPKLPEDELVLERFDELKLVVPDYHPDAYGDFAERATRHEIGPGLRRLLWLQPEDGPRLEEAKDSAINLALQHPAWRVSVQTHKVLGVE

SEQ ID NO: 31249 - protein, 245 aa, unidentified
  source 1..245: note = Longimonas halophila
  REGION 1..245: note = tr|A0A2H3NN65|A0A2H3NN65_9BACT 7-carboxy-7-deazaguanine synthase OS=Longimonas halophila; OX = 1469170 GN=queE PE=3 SV=1
MPDATRVSSPETESTYRVKNVFPTVQGEGFWAGRPAVFVRLVGCNMWSGYEADRERDAQRTGADCPRWCDTDFTKEGSTSYTAVELTQQMRDLGGPIDFCVLTGGEPFLQADAALIEAMHAAGYTVAIETNGTVALAEAFAGPENDEISAPDWITCSPKLPEEHLTLERFDELKLVVPDYRPAHYERFARRGTRHTIAGETRRCLYVQPEDGPRLQEAQKEAVALAAQHPEWSVSTQTHKVLDVE

SEQ ID NO: 31250 - protein, 223 aa, unidentified
  source 1..223: note = Lonsdalea britannica
  REGION 1..223: note = tr|A0A1X3RM29|A0A1X3RM29_9GAMM 7-carboxy-7-deazaguanine synthase OS=Lonsdalea britannica; OX = 1082704 GN=queE PE=3 SV=1
MQYPINEMFQTLQGEGYFTGVPAVFIRLQGCPVGCSWCDTKHTWEKRPEREIPLKQIVDKTTESDAWGSASVEDIVGHMTRLGYTARHVVITGGEPCIHDLTTLTQRLEALGFSTQIETSGTHEIRCSTHCWVTVSPKVNMRGGMVVIDQALQRADEIKHPVARERDIETLDTLLNRLDDDKARVIALQPISQKEEATRLCIATCIARNWRLSMQTHKYLNIA

SEQ ID NO: 31251 - protein, 223 aa, unidentified
  source 1..223: note = Lonsdalea iberica
  REGION 1..223: note = tr|A0A1X3S1D3|A0A1X3S1D3_9GAMM 7-carboxy-7-deazaguanine synthase OS=Lonsdalea iberica; OX = 1082703 GN=queE PE=3 SV=1
MQYPINEMFQTLQGEGYFTGVPAVFIRLQGCPVGCSWCDTKHTWEKRPEREIPLKQIVDKTTESDAWGQASVDDIVGHMTQLGYTARHVVITGGEPCIHDLTALTQRLEALGFSTQIETSGTHEIRCSTDCWVTVSPKVNMRGGMVVIDQALQRSDEIKHPVARERDIETLDALLNRLDDDKARVIALQPISQKEEATRLCIATCIARNWRLSMQTHKYLNIA

SEQ ID NO: 31252 - protein, 223 aa, unidentified
  source 1..223: note = Lonsdalea populi
  REGION 1..223: note = tr|A0A3N0URG3|A0A3N0URG3_9GAMM 7-carboxy-7-deazaguanine synthase OS=Lonsdalea populi; OX = 1172565 GN=queE PE=3 SV=1
MQYPINEMFQTLQGEGYYTGVPAVFIRLQGCPVGCSWCDTKHTWEKRPEREIPLKQIVEKTAESDAWGAASVEDIVGHMTQLGFTARHVVITGGEPCIHDLTTLTQRLEALGFSTQIETSGTHEIRCSTHSWVTVSPKVNMRGGMVVIDQALQRADEIKHPVARERDIETLDTLLNRLDDDKARVIALQPISQKEEATRLCIATCIARNWRLSMQTHKYLNIA

SEQ ID NO: 31253 - protein, 223 aa, unidentified
  source 1..223: note = Lonsdalea quercina
  REGION 1..223: note = tr|A0A1H4AG80|A0A1H4AG80_9GAMM 7-carboxy-7-deazaguanine synthase OS=Lonsdalea quercina; OX = 71657 GN=queE PE=3 SV=1
MQYPINEMFQTLQGEGYFTGVPAVFIRLQGCPVGCSWCDTKHTWEKRPEREIPLKQIVDKTTESDAWGSASVEDIVGHMMRLGYTARHVVITGGEPCIHDLTTLTQRLEALGFSTQIETSGTHEIRCSTDCWVTVSPKVNMRGGMVVIDQALQRSDEIKHPVARERDIETLDALLNRLDDDKARVIALQPISQKEEATRLCIATCIARNWRLSMQTHKYLNIA

SEQ ID NO: 31254 - protein, 197 aa, unidentified
  source 1..197: note = Lucifera butyrica
  REGION 1..197: note = tr|A0A498R625|A0A498R625_9FIRM 7-carboxy-7-deazaguanine synthase OS=Lucifera butyrica; OX = 1351585 GN=queE PE=3 SV=1
MPEVKYPVVQIFTSIQGEGLHMGLPVTFIRLAGCNLRCTWCDTPQAFDSSQARWQTAEEIVAQAIPTRLVVITGGEPTLHDLGSLVEALKKRHKYVAIETNGTNEIPAAWGIDWITASPKPASGYILRCVPNELKYVVDDAFNLEVIAWQAVPKGNILLQVESGRPESAAKAYRLVLERPDWELRLGIQLHKVIAVE

SEQ ID NO: 31255 - protein, 233 aa, unidentified
  source 1..233: note = Lujinxingia litoralis
  REGION 1..233: note = tr|A0A328C0W6|A0A328C0W6_9DELT 7-carboxy-7-deazaguanine synthase OS=Lujinxingia litoralis; OX = 2211119 GN=queE PE=3 SV=1
MASTTPAERAADHAIERGRPEREERSWLRLTEIFFSIQGESSFAGLPCTFVRLSRCNLRCTWCDTTYSFKGGERTEIDAIIARLDEIGCKVVEITGGEPLLQRPVHTLMTRLCDLGYTVLIETSGSLDISPIDPRVHVIMDLKAPGSGEVDKNLYANIAHLKASDEVKIVLQDRADFDWAIATLEEHDVLNHAHVIFSPVHGELNSHELANWILESGQQIRLGLQIHKFLDVE

SEQ ID NO: 31256 - protein, 217 aa, unidentified
  source 1..217: note = Luminiphilus syltensis
  REGION 1..217: note = tr|B8KS57|B8KS57_9GAMM 7-carboxy-7-deazaguanine synthase OS=Luminiphilus syltensis NOR5-1B OX=565045; GN = queE PE=3 SV=1
MAVATTLRITEIFHSLQGEARTVGLPTVFVRLTGCPLRCVYCDTAYAFSGGELTTLDDILERVAGFSCTRVCVTGGEPLAQPECLSLLTALCDRGYDVSLETSGAMPIAGADTRVSRVLDLKTPDSGECHRNDWSNIEQLTPHDQIKFVVCSRTDYEWARFKLDEFKLPTRVSDVLFSPSYGVVEPAELAQWLLDDRLAARLQLQLHKLLWNDAPGH

SEQ ID NO: 31257 - protein, 208 aa, unidentified
  source 1..208: note = Lunatimonas lonarensis
  REGION 1..208: note = tr|R7ZTY1|R7ZTY1_9BACT 7-carboxy-7-deazaguanine synthase OS=Lunatimonas lonarensis OX=1232681 GN=queE PE=3; SV = 1
MQESELLKQGLALPLMEAFYTIQGEGRYTGHSAYFIRLGGCDVGCVWCDVKDSWDVSRWPLVRIEDMVEEALQYPGRLVVITGGEPLMHELGPLTKLLRAKGFQVNLETSGAHPFSGEFDWVCLSPKKFKAPHPDIYQRANELKVVVYHRSDFAFAEQHAARVSENCVKLLQPEWSKSSEILEKIITYAKNHPVWQISLQTHKFMNIP

SEQ ID NO: 31258 - protein, 230 aa, unidentified
  source 1..230: note = Luteibacter pinisoli
  REGION 1..230: note = tr|A0A4Y5Z6I6|A0A4Y5Z6I6_9GAMM 7-carboxy-7-deazaguanine synthase OS=Luteibacter pinisoli; OX = 2589080 GN=queE PE=3 SV=1
MNGSTAIPADVPPAAPVRERLRLTEIFHSVQGEADAIGWPTVFVRLTGCPLRCVWCDTEYSFHGGQWHDIDAIVEQVASYGARHVCVTGGEPLAQKRCLILLRKLCDAGFEVSLETSGALDVSNVDPRVRKVMDLKAPDSGESARNLWSNLDHLLPHDQVKFVIASRGDFEWSRDAVREHAIDSKAMVLFSPVWGNVEPRELAEWILADRLPVRFQLQLHKLLWNDAVGH

SEQ ID NO: 31259 - protein, 230 aa, Luteibacter rhizovicinus
  REGION 1..230: note = tr|A0A4R3YMA3|A0A4R3YMA3_9GAMM 7-carboxy-7-deazaguanine synthase OS=Luteibacter rhizovicinus OX=242606 GN=queE PE=3 SV=1
MSGSTVIPADAAPAAPVAERLRITEIFHSIQGEADAIGWPTVFVRLTGCPLRCVWCDTEYSFHGGQWHDIDAILAEVASHGARHVCVTGGEPLAQKRCLILLRKLCDAGYEVSLETSGALDVAAVDPRVRKVMDLKPPDSGESARNLWSNLDHLLPHDQVKFVIASRADFEWSRDAFAEHRLVSRCMVLFSPVHGKVEPRELAEWILAERLPVRFQMQLHKLLWNDAAGH

SEQ ID NO: 31260 - protein, 230 aa, Luteibacter rhizovicinus
  REGION 1..230: note = tr|A0A1L3EPS7|A0A1L3EPS7_9GAMM 7-carboxy-7-deazaguanine synthase OS=Luteibacter rhizovicinus DSM 16549 OX=1440763 GN=queE PE=3 SV=1
MNGNTATPADVPPVAPVADRLRITEIFHSVQGEADAIGWPTVFVRLTGCPLRCVWCDTEYSFHGGQWHDIDTIVAHVASFVAKHVCVTGGEPLAQKRCLALLRKLCDAGHEVSLETSGALDVSGVDPRVRKVMDLKAPDSGESARNLWSNLDHLLPHDQVKFVIASRGDFEWARDVVREHALDQRVMPLFSPVWSKVQPRELAEWILAERLPVRFQLQLHKLLWNDAAGH

SEQ ID NO: 31261 - protein, 230 aa, Luteibacter sp.
  REGION 1..230: note = tr|A0A1K1QAP0|A0A1K1QAP0_9GAMM 7-carboxy-7-deazaguanine synthase OS=Luteibacter sp. UNCMF366Tsu5.1 OX=1502758 GN=queE PE=3 SV=1
MNGNTATPADVSPASPVAERLRITEIFHSVQGEADAIGWPTVFVRLTGCPLRCVWCDTEYSFHGGQWHDIDAILAEVARHGAHHVCVTGGEPLAQKRCLILLRKLCDAGYEVSLETSGALDVSDVDPRVRKVMDLKAPDSGESARNLWSNLDHLLPHDQVKFVIASRADFEWARDVVREHSLDRKTMVLFSPVWSKVEPRDLAEWILAERLPVRFQLQLHKLLWNDAAGH

SEQ ID NO: 31262 - protein, 230 aa, Luteibacter sp.
  REGION 1..230: note = tr|A0A1I0NU95|A0A1I0NU95_9GAMM 7-carboxy-7-deazaguanine synthase OS=Luteibacter sp. 329MFSha OX=1798239 GN=queE PE=3 SV=1
MTGNTATPADVSPASPVAERLRITEIFHSVQGEADAIGWPTVFVRLTGCPLRCVWCDTEYSFHGGQWHDIDAILAEVASHGARHVCVTGGEPLSQKRCLILLRKLCDAGYEVSLETSGALDVSAVDPRVRKVMDLKAPDSGESARNRWANLDHLLPHDQVKFVIASRADFEWSRDVVAEHALDRKVMVLFSPVWSKVQPRELAEWILAERLPVRFQLQLHKLLWNDAAGH

SEQ ID NO: 31263 - protein, 230 aa, Luteibacter yeojuensis
  REGION 1..230: note = tr|A0A0F3KHL4|A0A0F3KHL4_9GAMM 7-carboxy-7-deazaguanine synthase OS=Luteibacter yeojuensis OX=345309 GN=queE PE=3 SV=1
MNGNTATPADVSPAAPVRERLRITEIFHSVQGEADAIGWPTVFVRLTGCPLRCVWCDTEYSFHGGQWHDIDAIVAEVASHGAKHVCVTGGEPLSQKRCHILLRKLCDAGHEVSLETSGALDVSQVDPRVRKVMDLKAPDSGESARNLWSNLDHLLPHDQVKFVIASRGDFEWSRDVVREHGLAEKSMVLFSPVWGKVEPRALAEWILAERLPVRFQLQLHKLLWNDAQGH

SEQ ID NO: 31264 - protein, 230 aa, Luteibacter yeojuensis
  REGION 1..230: note = tr|A0A561GZA9|A0A561GZA9_9GAMM 7-carboxy-7-deazaguanine synthase OS=Luteibacter yeojuensis OX=345309 GN=queE PE=3 SV=1
MNGNTATPADVPPVAPVRERLRITEIFHSVQGEADAIGWPTVFVRLTGCPLRCVWCDTEYSFHGGQWHDIDAIVTQVASYGARHVCVTGGEPLSQKRCLILLRKLCDAGHEVSLETSGAIDVGPVDPRVRKVMDLKAPDSGESARNLWSNLDHLLPHDQVKFVIASRGDFEWSRDVVREHALDTKAMVLFSPVWGKVGPRELAEWILDERLPVRFQLQLHKLLWNDAAGH

SEQ ID NO: 31265 - protein, 196 aa, unidentified
  source 1..196: note = Luteibaculum oceani
  REGION 1..196: note = tr|A0A5C6VC55|A0A5C6VC55_9FLAO 7-carboxy-7-deazaguanine synthase OS=Luteibaculum oceani; OX = 1294296 GN=queE PE=3 SV=1
MERFLTLQGEGRYSGYNAYFIRLAGCDVGCVWCDVKESWEVSENQWVSYNTISNWLKEESTGEIVVVTGGEPLMYDLKTLTKTLRERNKRCHIETSGAYKISGDWDWITFSPKKFKAPLPEIYEHCDELKVVVYNKSDLNWAVEHQKKLANPNSVHLLLQPEWSKRDKVTPLIIDFIHKNPEWSLSLQTHKYIGIE

SEQ ID NO: 31266 - protein, 226 aa, Luteimonas aestuarii
  REGION 1..226: note = tr|A0A4V3ALA9|A0A4V3ALA9_9GAMM 7-carboxy-7-deazaguanine synthase OS=Luteimonas aestuarii; OX = 453837 GN=queE PE=3 SV=1
MTAVSPDAAAASNADRLKLTEIFLSLQGEARDAGWPTVFVRLTGCPLRCQYCDTAYAFHGGEWWSIDAIVEHVRSFGVRHVCVTGGEPLAQKRCLELLSRLCDAGLAVSLETSGAIDVSAVDARVSRVVDIKTPGSQEAHRNRWENLPLLTAHDQVKFVICGRDDYAWARDRVREHRLDARCDVLFSPSKSEVSPTDLADWIVADRLPVRFQLQLHKLLWNDEPGR

SEQ ID NO: 31267 - protein, 227 aa, unidentified
  source 1..227: note = Luteimonas cucumeris
  REGION 1..227: note = tr|A0A562L535|A0A562L535_9GAMM 7-carboxy-7-deazaguanine synthase OS=Luteimonas cucumeris; OX = 985012 GN=queE PE=3 SV=1
MNAVSAPPDAAAASADRLRITEIFLSLQGEARDAGWPTVFVRLTGCPLRCQYCDTAYAFHGGEWWTIDAILEEVARHGVRHVCVTGGEPLSQKRCLGLLSRLCDAGYIVSLETSGAIDIAAVDPRVSRVLDIKTPGSAEVARNHWPNLPLLTARDQVKFVLCGREDYEWARDVLVEHRLAERCDVLFSPSKSDLAARDLADWIVADRLPVRFQMQLHKLLWNDEPGR

SEQ ID NO: 31268 - protein, 226 aa, Luteimonas marina
  REGION 1..226: note = tr|A0A5C5U3E2|A0A5C5U3E2_9GAMM 7-carboxy-7-deazaguanine synthase OS=Luteimonas marina; OX = 488485 GN=queE PE=3 SV=1
MHAVAPDATAASTADRLRITEIFLSLQGEARDAGWPTVFVRLTGCPLRCGYCDTTYAFHGGEWWSIDGILAEVARHGVRHVCVTGGEPLAQKRCLGLLSRLCDAGHVVSLETSGAIDIAGVDARVSRVLDVKTPASGEVARNRWENIPLLTPHDQVKFVVCSRADYEWAREVVHARALHARCDVLFSPSKSELSPTDLADWIVADRLPVKFQMQLHKLLWNDEPGR

SEQ ID NO: 31269 - protein, 229 aa, Luteimonas sp.
  REGION 1..229: note = tr|A0A1B3W565|A0A1B3W565_9GAMM 7-carboxy-7-deazaguanine synthase OS=Luteimonas sp. JM171; OX = 1896164 GN=queE PE=3 SV=1
MNAAVPHAAGTDAASAADRLRITEIFLSLQGEARDAGWPTVFVRLTGCPLRCQYCDTAYAFQGGEWWTIDGILAEVARHGVRHVCVTGGEPLAQKRCAELLRRLCDAGYAVSLETSGAIDIGQADPRVSRVLDIKTPASGEAHRNLWENIALLTPHDQVKFVLCGREDYDWARGVVARHRITTRCDVLFSPSKDQLGARELADWIVADRLPVRFQLQLHKILWNDEPGR

SEQ ID NO: 31270 - protein, 226 aa, Luteimonas sp.
  REGION 1..226: note = tr|A0A0H1AN60|A0A0H1AN60_9GAMM 7-carboxy-7-deazaguanine synthase OS=Luteimonas sp. FCS-9; OX = 1547516 GN=queE PE=3 SV=1
MTAVAPDAVAASAADRLKLTEIFLSLQGEARDAGWPTVFVRLTGCPLRCSYCDTAYAFHGGDWWTIDAILDEVARHGVRHVCVTGGEPLAQKRCIGLLQRLCDAGYQVSLETSGALDVSAVDPRVSRVVDIKTPGSDEAHRNLWDNLALLTAHDQIKCVICSRADYEWARDLVLERGLHQRCDVLFSPSKGEISARDLADWIVADRLPVKFQMQLHKLLWNDEPGR

SEQ ID NO: 31271 - protein, 226 aa, unidentified
  source 1..226: note = Luteimonas terrae
  REGION 1..226: note = tr|A0A4R5U741|A0A4R5U741_9GAMM 7-carboxy-7-deazaguanine synthase OS=Luteimonas terrae; OX = 1530191 GN=queE PE=3 SV=1
MTAVAPDAVAASAADRLKLTEVFLSLQGEARDAGWPTVFVRLTGCPLRCTYCDTAYAFHGGQWWTIDDILAEVARHGVRHVCVTGGEPLAQKRCVGLLRRLCDAGYQVSLETSGAIDIAAVDTRVSRVLDIKTPASNEAHRNRWENLALLTPHDQIKFVVCSRADYEWARDIVLTKGLQHLCDVLFSPSKGEITGRELADWIVADRLPVKFQMQLHKLLWNDEPGR

SEQ ID NO: 31272 - protein, 216 aa, unidentified
  source 1..216: note = Luteitalea pratensis
  REGION 1..216: note = tr|A0A143PFY6|A0A143PFY6_9BACT 7-carboxy-7-deazaguanine synthase OS=Luteitalea pratensis; OX = 1855912 GN=queE PE=3 SV=1
MSLALTITEIYASIQGESSFAGQPCTFVRLTACDLRCTWCDTVYAFTEGRKQLLDDILAEVRQLGVPLVEITGGEPLLQKNVLPLMQRLLDEAHTVLLETGGHVSIADVPVGVHRIVDVKCPGSGESGRMHWANLDLLTPRDEVKFVIADRDDFEYAREVTATHDLAHRCGAVHFSPAWNRVAPADLAAWILESRLPVRLQLQQHKYIWEPAARRV

SEQ ID NO: 31273 - protein, 210 aa, unidentified
  source 1..210: note = Lutibacter agarilyticus
  REGION 1..210: note = tr|A0A238YZT4|A0A238YZT4_9FLAO 7-carboxy-7-deazaguanine synthase OS=Lutibacter agarilyticus OX=1109740 GN=queE PE=3 SV=1
MINEETQQLINKGEMLPLMEEFYTIQGEGFHTGKAAYFIRIGGCDVGCHWCDVKESWNADLHPPTLTDIIIDNAKKEANTVVITGGEPLMWSLDYITTKLQSNNLRTHIETSGAYPLSGIWNWICLSPKKTKLPLEGIYPEAHELKIIISNKHDFKFAEEQAAKVADTCELFLQPEWSKREKMTPSIVEYVMKNPQWKISLQTHKYLNIP

SEQ ID NO: 31274 - protein, 210 aa, unidentified
  source 1..210: note = Lutibacter flavus
  REGION 1..210: note = tr|A0A238W0R1|A0A238W0R1_9FLAO 7-carboxy-7-deazaguanine synthase OS=Lutibacter flavus; OX = 691689 GN=queE PE=3 SV=1
MINEEIQKQISKGKMLPLMEEFYTIQGEGFHTGKAAYFIRIGGCDVGCHWCDVKESWNANLHPPTNTDNIVNNVIKYANTVVVTGGEPLMWSLDFITSQLKKNNIRTHIETSGAYQLSGEWDWICLSPKKTKLPLEPIYLKTNELKVIIYNKNDFKFAVEQASKVSDTCELYLQPEWSNKEKMTPLIVDFVMKNPQWKISLQTHKYLNIP

SEQ ID NO: 31275 - protein, 215 aa, Lutibacter maritimus
  REGION 1..215: note = tr|A0A1I6SM63|A0A1I6SM63_9FLAO 7-carboxy-7-deazaguanine synthase OS=Lutibacter maritimus; OX = 593133 GN=queE PE=3 SV=1
MYICSMINKEIQQLINKGEMLPLMEEFYTIQGEGFYTGKAAYFIRIGGCDVGCHWCDVKESWNAKLHPPTKTDLIVKNAAENANTVVVTGGEPLMWSLDYLTKMLQKNNLKTHIETSGAYPLSGFWNWICLSPKKTKLPLAPIYSEAHELKMIIYNKNDFKFAEEQASKVNENCELFLQPEWSNREKMTPLIVDYVMKNPKWKISLQTHKYLNIP

SEQ ID NO: 31276 - protein, 210 aa, unidentified
  source 1..210: note = Lutibacter oceani
  REGION 1..210: note = tr|A0A3D9RXM2|A0A3D9RXM2_9FLAO 7-carboxy-7-deazaguanine synthase OS=Lutibacter oceani; OX = 1853311 GN=queE PE=3 SV=1
MIEEHIQQQINKGEMLPLMEDFYTIQGEGFHTGKAAYFIRIGGCDVGCHWCDVKESWNADLHPPTSTDVIVENAIKFANTVVITGGEPLMWSLDYITKKLQLNNIKTHIETSGAYKLTGTWDWICLSPKKTKLPLEEIYLKTNELKVIVYNKNDFKFAEEQAKKVSENCELFLQPEWSNKEKMTPLIVDYVMKNPKWKISLQTHKYINIP

SEQ ID NO: 31277 - protein, 210 aa, unidentified
  source 1..210: note = Lutibacter oricola
  REGION 1..210: note = tr|A0A1H3ERY3|A0A1H3ERY3_9FLAO 7-carboxy-7-deazaguanine synthase OS=Lutibacter oricola; OX = 762486 GN=queE PE=3 SV=1
MIDNKVQQLIDKGEMLPLMEEFYTIQGEGSHTGKAAYFIRIGGCDVGCHWCDVKESWNAKLHPPTKTDLIVENAGKYANTVVITGGEPLMWSLDYITRKLQNSSIKTHIETSGAYPLSGKWDWICLSPKKTKLPLKGIYSEAHELKIIISNKHDFIFAEEQASKVSDTCELYLQPEWSKRDKMTEQIVEYVMNNPKWKISLQTHKYLNIP

SEQ ID NO: 31278 - protein, 209 aa, unidentified
  source 1..209: note = Lutibacter profundi
  REGION 1..209: note = tr|A0A109RPA2|A0A109RPA2_9FLAO 7-carboxy-7-deazaguanine synthase OS=Lutibacter profundi; OX = 1622118 GN=queE PE=3 SV=1
MDKNTQQLIDKGEMLPLMEEFYTIQGEGFHSGKAAYFIRIGGCDVGCHWCDVKESWDANLHPPTKTNLIINNATSQANTVVVTGGEPLMWNLDYLTDTLKNNNIKTHIETSGSYKLSGTWDWICLSPKKMKLPLNEIYKITDELKIIIVNKQDFKFAEEQASKVSKNCKLFLQPEWSKRALMTPQIVDYVMKNPKWKISLQIHKYLNIP

SEQ ID NO: 31279 - protein, 209 aa, Lutibacter sp.
  REGION 1..209: note = tr|A0A559S4B2|A0A559S4B2_9FLAO 7-carboxy-7-deazaguanine synthase OS=Lutibacter sp. Hel_I_33_5 OX=1566289 GN=queE PE=3 SV=1
MDKKTKELVDLGKMLPLMEEFYTIQGEGFHTGTAAYFVRIGGCDVGCHWCDVKESWNADLHPPTSVDSIVESTKKHAKTVVVTGGEPLMWSMDYLTQQLQKQNIKTHIETSGAYSFSGVWDWFCLSPKKTKLPLEEVYKEADELKMIIHNTSDFKFAEEQAEKVGDNCELFLQPEWSKKEKMTEQIVEYVMKNPKWKISLQTHKYLNIP

SEQ ID NO: 31280 - protein, 210 aa, Lutibacter sp.
  REGION 1..210: note = tr|A0A1D8P3X1|A0A1D8P3X1_9FLAO 7-carboxy-7-deazaguanine synthase OS=Lutibacter sp. LPB0138 OX=1850246 GN=queE PE=3 SV=1
MVDTKTKQLIKEGKMLPLMEEFYTIQGEGSHTGTASYFIRIGGCDVGCHWCDVKESWNAELHPPTNTDLIVQNAKKYAKTVVITGGEPLMWDMSFLTQRLQEQNLKTHIETSGAYNLTGVWDWICLSPKKNKLPLKEVSDNANELKVIIFNKDDFKFAEAQASKVNSNCQLFLQPEWSNREKMTPMIVDYVMNNPQWKISLQTHKYLNIP

SEQ ID NO: 31281 - protein, 204 aa, Lyngbya aestuarii
  REGION 1..204: note = tr|U7QP66|U7QP66_9CYAN 7-carboxy-7-deazaguanine synthase OS=Lyngbya aestuarii BL J OX=1348334 GN=queE PE=3; SV = 1
MNEIAIHETFQNTIQGEGFWAGTPVDFIRLAGCPVQCHYCDTGYANGGEGLPRNLRSFEALIAELRSPKVVISGGEPFIYPQLPDLVKCIEATNRTVSIETSGSFWQPISSSAWITLSPKEHLNSHYPVVAQMWERASEIKLVIETGSELKYYDQYLSLKPQIPIFLQPEWTQRDYTLPLVLNLLQQYPKYRLSLQLHKYLGVD

SEQ ID NO: 31282 - protein, 204 aa, Lyngbya sp.
  REGION 1..204: note = tr|A0YYS9|A0YYS9_LYNSP 7-carboxy-7-deazaguanine synthase OS=Lyngbya sp. (strain PCC 8106) OX=313612; GN = queE PE=3 SV=1
MNEIAIHETFQNTIQGEGFWAGTPVDFIRLAGCPVQCHYCDTGYANGGEGLPRNVRSFEALIAELRSPKVVISGGEPFIYPQLPDLVKCIEATNRTVFIETSGCFWQPISSSVWITLSPKEHLNPHYPVVDQMWERASEIKLVIETGSELKYYDQYLSLKPQIPVFLQPEWTQRDYTLPLVLELLQQYPDYRLSLQLHKYVGVD

SEQ ID NO: 31283 - protein, 242 aa, Lysinibacillus boronitolerans
  REGION 1..242: note = tr|A0A0A3IKG4|A0A0A3IKG4_9BACI 7-carboxy-7-deazaguanine synthase OS=Lysinibacillus boronitolerans JCM 21713 = 10a = NBRC 103108 OX=1294264; GN = queE PE=3 SV=1
MSKIPVIEIFGPTIQGEGMVVGQKTMFVRTAGCDYSCSWCDSAFTWDGSGKHLIVQMTAEEIWAELKQLGGNGFSFVTISGGNPALNPNLAELIAILKENGIKIGVETQGSRWQKWMYEIDELTISPKPPSSGMTTDYSVLSYIFEKLKDRNNNHHVSLKIVVFNQEDYDYAKQIHHRYPMIPFYLQVGNDDLATTDNSQLMMHLLDKYHALIDRVMKDEDLRDVKVLPQLHAFVWGNKRGV

SEQ ID NO: 31284 - protein, 242 aa, unidentified
  source 1..242: note = Lysinibacillus chungkukjangi
  REGION 1..242: note = tr|A0A318TS72|A0A318TS72_9BACI 7-carboxy-7-deazaguanine synthase OS=Lysinibacillus chungkukjangi OX=1202712 GN=queE PE=3 SV=1
MSKIPVMEIFGPTIQGEGMVVGQKTMFVRTAGCDYSCSWCDSAFTWDGSGKHLISQLTAEEIWAELKRLGGNGFSFVTISGGNPVLLRNLEGLVNRLKENNIKIGVETQGSKWQEWLYEVDELTISPKPPSSGMVTNYSMLTEIIEKLNSKNSNQNISLKIVIFSEVDYAYAKDIHLRYPEIPFYLQVGNDDISESDNEKLVSRLLEKYEVLVDKVVADEELRNVRVLPQLHTLIWGNKRGV

SEQ ID NO: 31285 - protein, 242 aa, unidentified
  source 1..242: note = Lysinibacillus composti
  REGION 1..242: note = tr|A0A3N9ULF2|A0A3N9ULF2_9BACI 7-carboxy-7-deazaguanine synthase OS=Lysinibacillus composti OX=720633 GN=queE PE=3 SV=1
MSKIPVMEIFGPTIQGEGMVVGQKTMFVRTAGCDYSCSWCDSAFTWDGSGKNLITQMTAEEIWAELKRLGGDGFSFVTISGGNPVLLRNLDALVAILKENGIQIGVETQGSKWQEWLYEIDELTISPKPPSSGMKTNYSVLTDILEKLKKRNSHQHISLKIVVFNEEDYNYAKQVHLRYPTIPFYLQIGNDDIATTDNSQLVSKLLARYEALIDQVMADEELKDVKVLPQLHTLIWGNKRGV

SEQ ID NO: 31286 - protein, 242 aa, Lysinibacillus fusiformis
  REGION 1..242: note = tr|A0A4Y4IL33|A0A4Y4IL33_9BACI 7-carboxy-7-deazaguanine synthase OS=Lysinibacillus fusiformis OX=28031 GN=queE PE=3 SV=1
MSKVPVIEIFGPTIQGEGMVVGQKTMFVRTAGCDYSCSWCDSAFTWDGSGKHLIVQMTAGEIWSELKRLGGHGFSFVTISGGNPALYPNLEALIAILKENGIKIGVETQGSRWQNWMYDIDELTISPKPPSSGMTIDHSVLADILDKLKRGNRNHNISLKIVVFNQEDYDFAKQIHHRFPRIPFYLQVGNDDLTTIDNSRLINDLLEKYHALIGRVMKDDELKDVKVLPQLHALVWGNKRGV

SEQ ID NO: 31287 - protein, 242 aa, Lysinibacillus fusiformis
  REGION 1..242: note = tr|D7WZD0|D7WZD0_9BACI 7-carboxy-7-deazaguanine synthase OS=Lysinibacillus fusiformis ZC1 OX=714961; GN = queE PE=3 SV=1
MSKVPVIEIFGPTIQGEGMVVGQKTMFVRTAGCDYSCSWCDSSFTWDGSGKHLIVQMTAEEIWSELKRLGGNGFSFVTISGGNPALNPNLAELIAILKENDIKIGVETQGSRWQKWMYEIDELTISPKPPSSGMTTDYSVLSYIFEKLKDRNSNHHVSLKIVVFNQEDYDYAKQIHHRYPMIPFYLQVGNDDLTATDNSQLMMNLLDKYRALIDRVMKDEDLRDVKVLPQLHALVWGNKRGV

SEQ ID NO: 31288 - protein, 242 aa, unidentified
  source 1..242: note = Lysinibacillus halotolerans
  REGION 1..242: note = tr|A0A3M8H8Y0|A0A3M8H8Y0_9BACI 7-carboxy-7-deazaguanine synthase OS=Lysinibacillus halotolerans OX=1368476 GN=queE PE=3 SV=1
MSKLPIIEIFGPTIQGEGMVVGQKTMFVRTAGCDYSCSWCDSAFTWDGTGKHLIVQMTAQEVWAELKRLGGNGFSFVTISGGNPALLRNLDALVALLKENNIKIGVETQGSKWQDWLYDIDELTISPKPPSSKMMTDFSMLSTILERLRGRNSNQHISLKVVIFNQEDYDYAKEVHRRYPTIPFYLQVGNDDITSIDNTRLVSHLLEKYQMLINQVMMDEELKNVKVLPQLHTLIWGNKRGV

SEQ ID NO: 31289 - protein, 242 aa, unidentified
  source 1..242: note = Lysinibacillus odysseyi
  REGION 1..242: note = tr|A0A0A3JEI8|A0A0A3JEI8_9BACI 7-carboxy-7-deazaguanine synthase OS=Lysinibacillus odysseyi 34hs-1 = NBRC 100172 OX=1220589 GN=queE PE=3 SV=1
MSKVPVIEIFGPTIQGEGMVVGQKTMFVRTAGCDYSCSWCDSSFTWDGSGKHLIVQLTAEEIWAELKRLGGNGFSFVTISGGNPALLRHLDALVVLLKENNIKIGVETQGSKWQDWLYDIDELTISPKPPSSGMSTDFSMPTEILGKLRDRNSNQHISLKIVVFNQEDYAYAKQVHLRYPTIPFYLQVGNDDIASMDNTRLVSHLLEKYQALIDQVMMDEELKNVKVLPQLHTLVWGNKRGV

SEQ ID NO: 31290 - protein, 236 aa, unidentified
  source 1..236: note = Lysinibacillus saudimassiliensis
  REGION 1..236: note = tr|A0A078MHT0|A0A078MHT0_9BACI 7-carboxy-7-deazaguanine synthase OS=Lysinibacillus saudimassiliensis OX=1461583 GN=queE_1 PE=3 SV=1
MRKVPVLEIFGPTIQGEGMTIGRKTLFVRTAGCDYSCSWCDSAFTWDGSQRPTMMTAPEIMERLMALGLARTMHVTLSGGNPLLHASLGELVEALKAMGVTLTVETQASIWQDWLLRIDDVTLSPKPPSSGMTTDLAVLDCWVERLQTHSFSMKIVVFDDADYAFVKLLYVRYPNVTFYVQPGNADTTAQDEQATAMALLKRYEWLIDKVNTCDVLKKIYVLPQLHTLVWGNRQGV

SEQ ID NO: 31291 - protein, 367 aa, unidentified
  source 1..367: note = Lysinibacillus saudimassiliensis
  REGION 1..367: note = tr|A0A078MI78|A0A078MI78_9BACI 7-carboxy-7-deazaguanine synthase OS=Lysinibacillus saudimassiliensis OX=1461583 GN=queE_2 PE=4 SV=1
MQTVVRPIDPWEPYADIDKYGKLTLSNIEFTTTNLCNMRCAHCAVGYTLQTKEDDALPVEQMIKALDEVESLRVMSFTGGEPLMTKRGIRDNLLPLLQYAKSRGIRTQINSNLTLPMAHYEMVAPYLDVMHISHNWSDEREFVETGFAMMDKKPSVAQRVTLYRNILDNARVLANGGMFVSAETMLNRNTVPHLAKIHNEVANEMLCRRHEIHPMYPSDFASDLETISLDEYRDVVNELLDIRNEDVWMLFGTLPFYPCSTDERDRAVLARIKAARNTTIRNDVDGRSRMNLNIFTGDVSVSDFADDGAALGNIKTQSLTTIYDEWLATHISDSINCHCPAVKCLGPNILVKNMYYPSHNFVSGTVK

SEQ ID NO: 31292 - protein, 242 aa, Lysinibacillus sp.
  REGION 1..242: note = tr|A0A0B1XVV2|A0A0B1XVV2_9BACI 7-carboxy-7-deazaguanine synthase OS=Lysinibacillus sp. A1; OX = 1571920 GN=queE PE=3 SV=1
MSKVPVIEIFGPTIQGEGMVVGQKTMFVRTAGCDYSCSWCDSAFTWNGSGKHLIVQMTAEEIWSELKRLGGHGFSFVTISGGNPALYPNLEALIAILKENDIKIGVETQGSRWQNWMSDIDELTISPKPPSSGMTTDHSVLADILDKLKRQNSKHNISLKIVVFNQLDYDFAKQIHHLFPMIPFYLQVGNDNLTTIDNSRLINDLLEKYHALIDKVMKDDELKDVKVLPQLHALVWGNKRGV

SEQ ID NO: 31293 - protein, 242 aa, Lysinibacillus sp.
  REGION 1..242: note = tr|A0A4R7U4X4|A0A4R7U4X4_9BACI 7-carboxy-7-deazaguanine synthase OS=Lysinibacillus sp. YR326 OX=1855296 GN=queE PE=3 SV=1
MNKIPVIEIFGPTIQGEGMVVGQKTMFVRTAGCDYSCSWCDSSFTWDGSGKHLIVHMTAEEIWSELKRLGGNGFSFVTISGGNPALIRNLEELIAILKENDIKVGVETQGSRWQKWMYEIDELTISPKPPSSGMKTDYSVLSDIFEKLNNQNSNHHTSLKIVVFNQEDYDYAKQIHHRYPMIPFYLQVGNDDLTTTDNSRLIIDLLDKYHALIDRVIKDEELRDVKVLPQLHALVWGNKRGV

SEQ ID NO: 31294 - protein, 240 aa, Lysinibacillus sphaericus
  REGION 1..240: note = tr|A0A1D8JFL3|A0A1D8JFL3_LYSSH 7-carboxy-7-deazaguanine synthase OS=Lysinibacillus sphaericus OX=1421 GN=queE PE=3 SV=1
MTIPVLEIFGPTIQGEGMVIGQKTMFVRTAGCDYSCSWCDSKFTWDGSEKNNIRKMNAKEILDALIEEGGDRFGHVTISGGNPGLLPQLNNLVDLLHLHGVKVALETQGSKWQSWFTKINELTLSPKPPSSGMQTDFSVLDKIIESLSIEQKGTFSLKIVVFDDADLGYARKVHQRYPTVELFIQVGNDDLEKANEAELLAHLLERYEQLIDQVMADKELKHVRVLPQLHTYLWGNKRGV

SEQ ID NO: 31295 - protein, 242 aa, Lysinibacillus sphaericus; identical to SEQ ID NO: 31286
  REGION 1..242: note = tr|A0A410MN97|A0A410MN97_LYSSH 7-carboxy-7-deazaguanine synthase OS=Lysinibacillus sphaericus OX=1421 GN=queE PE=3 SV=1

SEQ ID NO: 31296 - protein, 242 aa, Lysinibacillus xylanilyticus
  REGION 1..242: note = tr|A0A0K9FCM3|A0A0K9FCM3_9BACI 7-carboxy-7-deazaguanine synthase OS=Lysinibacillus xylanilyticus OX=582475 GN=queE PE=3 SV=1
MSKIPVIEIFGPTIQGEGMVVGQKTMFVRTAGCDYSCSWCDSSFTWDGSGKHLIVQMTAEEIWSELKRLGGNGFSFVTISGGNPALIRNLEELIAILKENDIKVGVETQGSRWQKWMYEIDELTISPKPPSSGMTTDYSVLSDIFEKLKNQNSNYHISLKIVVFNQDDYDYAKQIHHLYPKIPFYLQVGNDDLTTTNNSRLIIDLLDKYHALIDRVIMDEELRDVKVLPQLHALVWGNKRGV

SEQ ID NO: 31297 - protein, 242 aa, Lysinibacillus xylanilyticus
  REGION 1..242: note = tr|A0A2M9Q9L4|A0A2M9Q9L4_9BACI 7-carboxy-7-deazaguanine synthase OS=Lysinibacillus xylanilyticus OX=582475 GN=queE PE=3 SV=1
MSKIPVIEIFGPTIQGEGMVVGQKTMFVRTAGCDYSCSWCDSSFTWDGSGKHLIAHMTAEEIWSELKRLGGNGFSFVTISGGNPALIRNLEELIAILKENDIKVGVETQGSRWQNWMYEIDELTISPKPPSSGMTTDYSVLSDIFEKLKNQNRNHNISLKIVVFNQEDYDYAKQIHHRYPMIPFYLQVGNDDMTTTNNSRLIIDLLDKYHALIDRVIKDEELRDVKVLPQLHALVWGNKRGV

SEQ ID NO: 31298 - protein, 225 aa, unidentified
  source 1..225: note = Lysobacter aestuarii
  REGION 1..225: note = tr|A0A508AM60|A0A508AM60_9GAMM 7-carboxy-7-deazaguanine synthase OS=Lysobacter aestuarii; OX = 1706195 GN=queE PE=3 SV=1
MNAVNADAAAVSPDRLRITEIFLSLQGESRSIGWPTVFVRLTGCPLRCQYCDTAYAFHGGEWWDIDAILAEVARLGARHVCVTGGEPLAQKRCIGLLERLCDAGLEVSLETSGAIDIAAVDPRVSRVLDIKTPDSAEAHRNLWSNLPLLTAHDQVKFVVCSRADYEWAREVVAEHRLVDTCDVLFSPSFTQVKPRDLADWIVEDRLPVRFQLQLHKILWDDAPGR

SEQ ID NO: 31299 - protein, 225 aa, Lysobacter antibioticus
  REGION 1..225: note = tr|A0A0S2F786|A0A0S2F786_9GAMM 7-carboxy-7-deazaguanine synthase OS=Lysobacter antibioticus OX=84531 GN=queE PE=3 SV=1
MTAVATETAAASSERLRLTEIFLSLQGESNSIGWPTVFVRLTGCPLRCQYCDTAYAFHGGEWWEFDAILAEVAQHGARHVCVTGGEPLAQKRCIALLQKLCDAGYEVSLETSGAIDIGPVDPRVSRVLDIKTPDSREAHRNLWSNLPLLTARDQIKFVICSREDYEWSKGIVAEHGLTQICDVLFSPSFTQVKPSDLADWIVADRLQVRFQLQLHKILWNDEPGR

SEQ ID NO: 31300 - protein, 225 aa, unidentified
  source 1..225: note = Lysobacter arseniciresistens
  REGION 1..225: note = tr|A0A0A0F214|A0A0A0F214_9GAMM 7-carboxy-7-deazaguanine synthase OS=Lysobacter arseniciresistens ZS79 OX=913325 GN=queE PE=3 SV=1
MNAVTPESAATSPDRLRLTEIFLSLQGESRSIGWPTVFVRLTGCPLRCQYCDTAYAFHGGQWWDYDGILAEVAGHGVRHVCVTGGEPLAQKRCIGLLQRLCDAGYEVSLETSGAMDIAEVDPRVSRVLDIKTPGSAEVERNLWSNIALLTAHDQVKFVICSREDYDWAKAMVAEHRLVERCEVLFSPSFSQVRPRELADWIVADRLPVRFQLQLHKILWDDEPGR

SEQ ID NO: 31301 - protein, 225 aa, Lysobacter capsici
  REGION 1..225: note = tr|A0A120AHW0|A0A120AHW0_9GAMM 7-carboxy-7-deazaguanine synthase OS=Lysobacter capsici AZ78 OX=1444315 GN=queE PE=3 SV=1
MNAVVTPTADAPSERLRLTEIFLSLQGESNSIGWPTVFVRLTGCPLRCQYCDTAYAFHGGQWWDFDAILAEVAQHGARHVCVTGGEPLSQKRCIQLLEKLCDAGYEVSLETSGAIDIGPVDPRVSRIVDIKTPDSKEVHRNLWSNLPLLTAHDQIKFVICSREDYEWSKAIVAEHGLTAICDVLFSPSFTQIKPSDLADWIVADRLPVRFQLQLHKILWNDEPGR

SEQ ID NO: 31302 - protein, 225 aa, Lysobacter capsici
  REGION 1..225: note = tr|A0A291A4R9|A0A291A4R9_9GAMM 7-carboxy-7-deazaguanine synthase OS=Lysobacter capsici; OX = 435897 GN=queE PE=3 SV=1
MNAVVTPTADAPSERLRLTEIFLSLQGESNSIGWPTVFVRLTGCPLRCQYCDTAYAFHGGQWWDFDAILAEVAQHGARHVCVTGGEPLSQKRCIQLLEKLCDAGYEVSLETSGAIDIGPVDPRVSRIVDIKTPDSKEVHRNLWSNLSLLTAHDQIKFVICSREDYEWSKAIVVEHGLTAICDVLFSPSFTQIKPSDLADWIVADRLPVRFQLQLHKILWNDEPGR

SEQ ID NO: 31303 - protein, 225 aa, Lysobacter concretionis
  REGION 1..225: note = tr|A0A0A0ESE5|A0A0A0ESE5_9GAMM 7-carboxy-7-deazaguanine synthase OS=Lysobacter concretionis Ko07 = DSM 16239 OX=1122185 GN=queE PE=3 SV=1
MNVALPEAAPLSPDRLRLTEIFLSLQGESRSIGWPTVFVRLTGCPLRCQYCDTAYAFHGGQWWDVDGILAEVARHGARHVCVTGGEPLAQKRCIGLLERLCDAGYEVSLETSGALDIGEVDPRVSRVLDIKTPGSAEVARNLWSNIALLTPHDQVKFVICSREDYDWARGIVEEHRLTDRCDVMFSPSFSQIRPRELADWIIADHLPVRFQLQLHKILWDDEPGR

SEQ ID NO: 31304 - protein, 225 aa, Lysobacter daejeonensis
  REGION 1..225: note = tr|A0A0A0EX47|A0A0A0EX47_9GAMM 7-carboxy-7-deazaguanine synthase OS=Lysobacter daejeonensis GH1-9 OX=1385517 GN=queE PE=3 SV=1
MSTVSPEAAAASPERLRLTEIFLSLQGESRSIGWPTVFVRLTGCPLRCQYCDTAYAFHGGQWWDFDTILAEVAQHGARHVCVTGGEPLAQKRCVELLRRLCDEGYDVSLETSGAIDIGPVDPRVSRVLDIKTPGSGEVARNLWSNLPLLTAHDQVKFVICSRGDYDWAKAIVAEHKLTQTCDVLFSPSFSQVDPSALADWIVADRLPVRFQLQLHKILWNDEPGR

SEQ ID NO: 31305 - protein, 225 aa, Lysobacter defluvii
  REGION 1..225: note = tr|A0A0A0M4G2|A0A0A0M4G2_9GAMM 7-carboxy-7-deazaguanine synthase OS=Lysobacter defluvii IMMIB APB-9 = DSM 18482 OX=1385515 GN=queE PE=3 SV=1
MNAVDHPAAAASPERLRLTEIFLSLQGESRTIGLPTVFVRLTGCPLRCQYCDTAYAFHGGEWWDYDGILTEVARHGVRHVCVTGGEPLAQKRCPELLRRLCDAGYAVSLETSGAMDIGVVDTRVSRVLDIKTPGSGEVARNLWDNLGKLTAHDQVKFVVCSREDYEWARAVLAEHRLADTCEVLFSPSFGQVDATALADWIVADRLPVRFQVQLHKLLWNDEPGR

SEQ ID NO: 31306 - protein, 231 aa, Lysobacter dokdonensis
  REGION 1..231: note = tr|A0A0A2WF29|A0A0A2WF29_9GAMM 7-carboxy-7-deazaguanine synthase OS=Lysobacter dokdonensis DS-58 OX=1300345 GN=queE PE=3 SV=1
MAPMSAVHPATQAAPAATADRLKLTEIFLSLQGEARDAGWPTVFVRLTGCPLRCQYCDTTYAFFGGQWWDIEAILAEVAKHGVRHVCVTGGEPLSQKRVIGLLSKLCDAGYVVSLETSGAIDIADVDTRVSRIVDIKTPGSGEVERNRWDNIPLLTPHDQVKFVVCSRADFEWARDVLFEHKLHERCDVLFSPSANEVPARELADWIVEARLPVRFQTQLHKALWGEEPGR

SEQ ID NO: 31307 - protein, 226 aa, Lysobacter enzymogenes
  REGION 1..226: note = tr|A0A3N2RJC5|A0A3N2RJC5_LYSEN 7-carboxy-7-deazaguanine synthase OS=Lysobacter enzymogenes OX=69 GN=queE PE=3 SV=1
MNAVVSETAAAPSSERLRLTEIFLSLQGESDSIGWPTVFVRLTGCPLRCQYCDTAYAFHGGEWWTYESILAEVARHGARHVCVTGGEPLAQKRCIELLKRLCDAGYEVSLETSGAIDIGPVDARVSRVLDIKTPDSKEAHRNLWSNLALLSARDQIKFVICSREDYEWSKVIVAEHGLTAVCAVMFSPSFHQVRPRDLADWIVADRLPVRFQLQLHKILWDDEPGR

SEQ ID NO: 31308 - protein, 227 aa, Lysobacter enzymogenes
  REGION 1..227: note = tr|A0A0S2DM67|A0A0S2DM67_LYSEN 7-carboxy-7-deazaguanine synthase OS=Lysobacter enzymogenes OX=69 GN=queE PE=3 SV=1
MNAAVVSETAAAPSSERLRLTEIFLSLQGESDSIGWPTVFVRLTGCPLRCQYCDTAYAFHGGEWWTYESILAEVASHGARHVCVTGGEPLAQKRCIELLKRLCDAGYEVSLETSGAIDIGPVDPRVSRVLDIKTPDSKEAHRNLWSNLALLSARDQIKFVICSREDYEWSKAIVAEHGLTAVCAVMFSPSFHQIRPRDLADWIVADRLPVRFQLQLHKILWDDEPGR

SEQ ID NO: 31309 - protein, 225 aa, Lysobacter gummosus
  REGION 1..225: note = tr|A0A0S2GBM6|A0A0S2GBM6_9GAMM 7-carboxy-7-deazaguanine synthase OS=Lysobacter gummosus; OX = 262324 GN=queE PE=3 SV=1
MNAVVTQTAEAPSERLRLTEIFLSLQGESNSIGWPTVFVRLTGCPLRCQYCDTAYAFHGGEWWEFDAILAEVAKHGARHVCVTGGEPLAQKRCIQLLQKLCDAGYEVSLETSGAIDIGPVDPRVSRVLDIKTPDSLEAHRNLWSNLPLLTAHDQIKFVICSREDYEWSKAIVAEHGLTAICDVLFSPSFTQIKPSDLADWIVADRLPVRFQLQLHKILWNDEPGR

SEQ ID NO: 31310 - protein, 230 aa, unidentified
  source 1..230: note = Lysobacter lycopersici
  REGION 1..230: note = tr|A0A516V7P9|A0A516V7P9_9GAMM 7-carboxy-7-deazaguanine synthase OS=Lysobacter lycopersici OX=1324796 GN=queE PE=3 SV=1
MNVVAPDAAAASAVAKPQDRLKITEVFLSLQGEARDAGWPTVFVRLTGCPLRCQYCDTAYAFHGGQWWEIDAILAEVARHGARHVCVTGGEPLAQKRCIALLSKLCEAGYSVSLETSGAIDIDGVDARVSRVLDIKTPGSGEAGRNLWSNLPLLTARDQVKFVICSRADFDWAKDVVSEHRLHETCDVLFSPSHAQVSPRELADWIVEEKLPVRFQLQLHKILWGEEPGR

SEQ ID NO: 31311 - protein, 225 aa, unidentified
  source 1..225: note = Lysobacter maris
  REGION 1..225: note = tr|A0A2U9TBE7|A0A2U9TBE7_9GAMM 7-carboxy-7-deazaguanine synthase OS=Lysobacter maris; OX = 1605891 GN=queE PE=3 SV=1
MSTVTADAAAASPDRLRITEIFLSLQGESRSIGWPTVFVRLTGCPLRCQYCDTAYAFHGGEWRTIDAILDEVAGHGARHVCVTGGEPLAQKRCIGLLERLCDAGYEVSLETSGALDIGAVDPRVSRVLDIKTPGSAEVGRNLWSNLALLTAHDQVKFVICSREDYDWARGIVAEHDLSARCDVLFSPSFSQVDASALADWIVADRLPVRFQLQLHKLLWNDEPGR

SEQ ID NO: 31312 - protein, 223 aa, unidentified
  source 1..223: note = Lysobacter pythonis
  REGION 1..223: note = tr|A0A3M2I3G6|A0A3M2I3G6_9GAMM 7-carboxy-7-deazaguanine synthase OS=Lysobacter pythonis; OX = 2483112 GN=queE PE=3 SV=1
MNSSTPEPAVADRLRITEIFCSLQGESRSAGCPTVFVRLTGCPLRCGYCDTAYAFHGGEWREINAIVREVEGHGVRHVCVTGGEPLAQKRCIALLAKLCDAGFEVSLETAGALDIAGVDPRVARVVDIKTPGSGEAARNRWTNLALLTPRDQVKLVICSRADYDWAKAMLAEHRLAERCEVLFSPSYTELRPRELAEWIVADRLPVRFQMQLHKQLWGEEQGR

SEQ ID NO: 31313 - protein, 225 aa, Lysobacter ruishenii
  REGION 1..225: note = tr|A0A562M2N0|A0A562M2N0_9GAMM 7-carboxy-7-deazaguanine synthase OS=Lysobacter ruishenii; OX = 686800 GN=queE PE=3 SV=1
MSTVSPEAAAASPERLRLTEIFLSLQGESRSIGWPTVFVRLTGCPLRCQYCDTAYAFHGGQWWDFDAILDEVARYGARHVCVTGGEPLAQKRCVELLRRLCDEGYEVSLETSGAIDIGAVDLRVSRVLDIKTPGSGEVERNLWSNLPLLTAHDQVKFVICSREDYEWAKGVVASQRLAETCDVLFSPSFSQVDPSALADWIVADRVPVRFQLQLHKILWNDEPGR

SEQ ID NO: 31314 - protein, 229 aa, unidentified
  source 1..229: note = Lysobacter silvestris
  REGION 1..229: note = tr|A0A2K1Q2U0|A0A2K1Q2U0_9GAMM 7-carboxy-7-deazaguanine synthase OS=Lysobacter silvestris; OX = 1645665 GN=queE PE=3 SV=1
MNAVVATAIEPSSEPTSERLRITEIFLSLQGEARDAGWPTVFVRLTGCPLRCLYCDTAYAFHGGEWVGIDDIVATVAGHGVRHVCVTGGEPLSQKRCIQLLKKLCDEGWIVSLETSGAIDIGDVDARVSRVVDIKTPGSGEVERNRWENIALLTAHDQVKFVICSREDFDWARAVVKEHALDTRCDVLFSPSHGQITPRELADWIVAEHLPVRFQMQLHKQLWGEEPGR

SEQ ID NO: 31315 - protein, 225 aa, Lysobacter soli
  REGION 1..225: note = tr|A0A3D8V9P5|A0A3D8V9P5_9GAMM 7-carboxy-7-deazaguanine synthase OS=Lysobacter soli; OX = 453783 GN=queE PE=3 SV=1
MNAVPPDAAVASSDRLRITEIFLSLQGEARAIGWPTVFVRLTGCPLRCQYCDTAYAFHGGEWWQIDDILAEVARHGARHVCVTGGEPLSQKRCISLLKRLCDEGYDVSLETSGAIDIADVDPRVSRVLDIKTPGSMEVHRNLWSNLPLLTPHDQVKFVICSREDFDWAKDVVAEHRLTDVCDVLFSPSFAQIKPSDLADWIVAERLPVRFQLQLHKILWNDEPGR

SEQ ID NO: 31316 - protein, 228 aa, Lysobacter sp.
  REGION 1..228: note = tr|A0A5C8KQF3|A0A5C8KQF3_9GAMM 7-carboxy-7-deazaguanine synthase OS=Lysobacter sp. Alg18-2.2 OX=2603204 GN=queE PE=3 SV=1
MATDIDTAPEAEADASSRLKLTEIFLSLQGEARDAGWPTVFVRLTGCPLRCVYCDTAYAFHGGQWWDIDAILEEVARHGARHVCVTGGEPLAQKRCAVLLRRLCDAGYVVSLETSGALDISVADTRVSRIVDLKTPDSGECERNLWDNLAQLTAHDQVKFVICSRQDYEWAVQQVRERGLDRLCTVWFSPSFAQVAPRELADWILADHLPVRFQVQLHKQLWGDEPGR

SEQ ID NO: 31317 - protein, 225 aa, Lysobacter sp.
  REGION 1..225: note = tr|A0A0D0R7Q6|A0A0D0R7Q6_9GAMM 7-carboxy-7-deazaguanine synthase OS=Lysobacter sp. A03; OX = 1199154 GN=queE PE=3 SV=1
MNPVTSEAGALSPDRLRLTEIFLSLQGESRSIGWPTVFVRLTGCPLRCQYCDTAYAFHGGQWWDIDAILAEVARHGVRHVCVTGGEPLAQKRCIGLLERLCDAGYEVSLETSGSIDISPVDTRVSRVLDLKTPGSAEVGRNLWSNIGQLTANDQVKFVICSREDYDWAREIVEQHGLTAICDVMFSPSFKQISARDLADWIVADRLPVRFQLQLHKILWDDEPGR

SEQ ID NO: 31318 - protein, 225 aa, Lysobacter spongiicola
  REGION 1..225: note = tr|A0A1T4QXL0|A0A1T4QXL0_9GAMM 7-carboxy-7-deazaguanine synthase OS=Lysobacter spongiicola DSM 21749 OX=1122188 GN=queE PE=3 SV=1
MNAVTQEAAAASPERLRLTEIFLSLQGESRSIGWPTVFVRLTGCPLRCQYCDTAYAFHGGEWWDFDSILAEVARHGVRHVCVTGGEPLAQRRCVALLERLCDAGYEVSLETSGAIDIGPVDTRVSRVLDIKTPGSAEAHRNLWSNLPLLTAHDQVKFVICSREDYDWAKAVVAEHGLVDTCDVLFSPSFSQIQPRDLADWIVADRLPVRFQLQLHKILWDDAPGR

SEQ ID NO: 31319 - protein, 224 aa, unidentified
  source 1..224: note = Lysobacter tolerans
  REGION 1..224: note = tr|A0A1N6NHY0|A0A1N6NHY0_9GAMM 7-carboxy-7-deazaguanine synthase OS=Lysobacter tolerans; OX = 1604334 GN=queE PE=3 SV=1
MNLIDDTSAPVADRLRITEIFCSLQGEARAAGWPTVFVRLTGCPLRCSYCDTAYAFHGGEWRDIDAIVEEVQSHGVRHVCVTGGEPLAQKRCITLLSKLCDAGFEVSLETSGAIDISEVDVRVSRVVDIKTPGSLEVARNRWENLPLLTPHDQVKFVICSREDYDWAKDVVAEHGLAHRCDVLFSPSYTQVAPRELADWIVEDRLPVKFQMQLHKQLWGEEQGR

SEQ ID NO: 31320 - protein, 236 aa, unidentified
  source 1..236: note = Macrococcus bohemicus
  REGION 1..236: note = tr|A0A4R5Y3G2|A0A4R5Y3G2_9STAP 7-carboxy-7-deazaguanine synthase OS=Macrococcus bohemicus; OX = 1903056 GN=queE PE=3 SV=1
MKIPVLEIFGPTIQGEGAVIGRKTMFVRTAGCDFKCDWCDSKFTWDGSAKDDIEMLTADIIFERLQQLAPNNFNHVTISGGNPALIKNIAALVEFLHIHNIEVSLETQGSKFQPWMTDVDQLTISPKPPSSKMHQDMHQLDFVINQLEYNKVSLKVVIFNDDDYKFAQMIHHRYPNIKFYLQVGNPYLDETVNDHTEKLLARYEAVIDKVMQDNTMNDCYVLPQLHTLLWSNKKGV

SEQ ID NO: 31321 - protein, 236 aa, unidentified
  source 1..236: note = Macrococcus bohemicus
  REGION 1..236: note = tr|A0A328A5A6|A0A328A5A6_9STAP 7-carboxy-7-deazaguanine synthase OS=Macrococcus bohemicus; OX = 1903056 GN=queE PE=3 SV=1
MKIPVLEIFGPTIQGEGAVIGRKTMFVRTAGCDFKCDWCDSKFTWDGSAKDDIEMLTADIIFERLQQLAPNNFNHVTISGGNPALIKNIAALVDFLHAHNIEVALETQGSKFQPWMTDIDQLTISPKPPSSKMHQDMHQLDFVINQLEYNKVSLKVVIFNDDDYKFAQMIHHRYPNIKFYLQVGNPYLDETVNDHTEKLLARYEALIDKVMQDNTMNDCYVLPQLHTLLWSNKKGV

SEQ ID NO: 31322 - protein, 235 aa, Macrococcus bovicus
  REGION 1..235: note = tr|A0A4V3BFK5|A0A4V3BFK5_9STAP 7-carboxy-7-deazaguanine synthase OS=Macrococcus bovicus; OX = 69968 GN=queE PE=3 SV=1
MIPVMEIFGPTIQGEGKVIGRKTMFVRTAGCDFRCSWCDSKFTWDGSMKEAIRMMTAEAIYAELREIGGPSFNHVTISGGNPALIKAIGTLVDLLHAEGCEVALETQGSKFQTWMRDIDQLTLSPKPPSSNMQQNLTLLDEDISQLDPSKINLKVVVFDEADYQFAKQIHHRYLGLPFYIQVGNPYLEDDVNDHTAKLLERYEELIARVMQDAEMNNVYVTPQLHTLLWSNRKGV

SEQ ID NO: 31323 - protein, 235 aa, Macrococcus brunensis
  REGION 1..235: note = tr|A0A4R6BGK7|A0A4R6BGK7_9STAP 7-carboxy-7-deazaguanine synthase OS=Macrococcus brunensis; OX = 198483 GN=queE PE=3 SV=1
MIPVMEIFGPTIQGEGIVIGRKTMFVRTAGCDFRCSWCDSKFTWDGSMKEDIRMMTTEDIYRELREIGGQSFNHVTISGGNPALIKDIGTLVDLLHAESCQVALETQGSKFQTWMRDIDQLTISPKPPSSGMNQNLTILDDVISQLDATKINLKVVVFDEADYQFAKQMHHRYLNLPFYVQVGNPYLEDEVNAHTSKLLARYEEVIDRVMQDDDMNHVYVTPQLHTLLWSNKKGV

SEQ ID NO: 31324 - protein, 236 aa, unidentified
  source 1..236: note = Macrococcus canis
  REGION 1..236: note = tr|A0A1W7A9L5|A0A1W7A9L5_9STAP 7-carboxy-7-deazaguanine synthase OS=Macrococcus canis; OX = 1855823 GN=queE_1 PE=3 SV=1
MKIPVLEIFGPTIQGEGAVIGRKTMFVRTAGCDFSCVWCDSKFTWDGTMKDEIEMLTPETIYERLQAIAPNQFNHVTISGGNPALIKNLAGLVSLLHDNGMEVALETQGTRFQQWMTEIDQLTISPKPPSSTMTHDLEQLDSVIDQLDKDKITLKVVIFNDEDYAFSKMIHKRYPHITLYLQVGNPYLDDSVENHTERLLSHYEALIDKVMPDVEMNDVYVTPQLHTLLWSNKKGV

SEQ ID NO: 31325 - protein, 375 aa, unidentified
  source 1..375: note = Macrococcus canis
  REGION 1..375: note = tr|A0A1W7ADI3|A0A1W7ADI3_9STAP 7-carboxy-7-deazaguanine synthase OS=Macrococcus canis; OX = 1855823 GN=queE_2 PE=4 SV=1
MIALKDKISIHNDPWEAYNDVEKFGETKLSNIEFTTTTLCNMRCAHCAVGYTLQLKDPETIDMTTILKRLDEVEHLSTLSITGGEPMFSKKSIKETVTPILEYAKSRGIYTQMNSNLTINYDRYEPLIDLIDVMHISHNWGTIDEFAEVGFHVMDKKPPLKMRYKLYEQIIENARRLSEAGMFVSAETMLNKSTLPYLEKIHKEIVNDMKCARHEVHPMYPSDFASDLNVLTIEETKAAIRQLLSFRDEDTWMLFGTLPILPCSMNADDLSFLDEVHSAKNVTVRNDPDGRSRLNVNVFTGDVIVTDFGDETGTIENIIDTPLQDVYDKWKQSALNQTINCHCPKVKCLGPNLLVKNMYYPEVDFKVNEKRMNNK

SEQ ID NO: 31326 - protein, 235 aa, Macrococcus carouselicus
  REGION 1..235: note = tr|A0A4R6BP51|A0A4R6BP51_9STAP 7-carboxy-7-deazaguanine synthase OS=Macrococcus carouselicus OX=69969 GN=queE PE=3 SV=1
MIPVMEIFGPTIQGEGIVIGRKTMFVRTAGCDFRCSWCDSRFTWDGTMKDDIRMMSAAEIYHELREIGGQSFNHVTISGGNPALIKDMGVLVDLLHKENCQVAMETQGSKFQNWMRDIDQLTISPKPPSSHMNQNLDILDTVIAELMPQKINLKVVVFDEADYQFARQIHHRYPAIAFYVQVGNPYLDDTVDKHTEKLLSRYEQLIDRVMTDDTMNNVYVTPQLHTLIWSNKKGV

SEQ ID NO: 31327 - protein, 237 aa, Macrococcus caseolyticus
  REGION 1..237: note = tr|A0A3B0EZL4|A0A3B0EZL4_9STAP 7-carboxy-7-deazaguanine synthase OS=Macrococcus caseolyticus OX=69966 GN=queE PE=3 SV=1
MMKIPVLEIFGPTIQGEGAVIGRKTMFVRTAGCDFSCAWCDSKFTWDGTMKDEIEMLTPETIYERLQAIAPNQFNHVTISGGNPALIKNLAGLVSLLHDNGIEVALETQGTRFQQWMTEIDQLTISPKPPSSAMTHNLKQLDRIIDQLDKDKVTLKVVIFNDEDYAFSKLIHKRYPHNTLYLQVGNPYLDDSVENHTERLLSHYEALIDKVMPDVEMNDVYVTPQLHTLLWSNKKGV

SEQ ID NO: 31328 - protein, 236 aa, Macrococcus caseolyticus
  REGION 1..236: note = tr|B9EAA9|B9EAA9_MACCJ 7-carboxy-7-deazaguanine synthase OS=Macrococcus caseolyticus (strain JCSC5402); OX = 458233 GN=queE PE=3 SV=1
MKIPVLEIFGPTIQGEGAVIGRKTMFVRTAGCDFSCAWCDSKFTWDGTMKDEIEMLLPETIYERLQSIAPNQFNHVTISGGNPALIKNLAGFVSLLQDKGIEVALETQGTKFQSWMTEIDQLTISPKPPSSTMTHDLDQLDAVLHELDSDKVTLKVVIFNDEDYHFSKMIHKRYPHITMYLQVGNPYLDDTVEDHTSRLLSHYETLIDKVMPDSEMNDVYITPQLHTLLWSNKKGV

SEQ ID NO: 31329 - protein, 236 aa, unidentified
  source 1..236: note = Macrococcus epidermidis
  REGION 1..236: note = tr|A0A327ZVJ8|A0A327ZVJ8_9STAP 7-carboxy-7-deazaguanine synthase OS=Macrococcus epidermidis OX=1902580 GN=queE PE=3 SV=1
MKIPVLEIFGPTIQGEGAVIGRKTMFVRTAGCDFKCDWCDSKFTWDGSAKDDIEMLTADIIFERLQQLAPNNFNHVTISGGNPALIKNIAALVELLHAHNIEVALETQGSKFQPWMTEIDQLTLSPKPPSSKMQQDINQLDFVINQLEYNKVSLKIVIFNDDDYKFAQMIHHRYPNIKFYLQVGNPYLDETVNDHTEKLLARYEALIDKVMQDNTMNDCYVLPQLHTLLWSNKKGV

SEQ ID NO: 31330 - protein, 236 aa, unidentified
  source 1..236: note = Macrococcus goetzii
  REGION 1..236: note = tr|A0A4R6CFC1|A0A4R6CFC1_9STAP 7-carboxy-7-deazaguanine synthase OS=Macrococcus goetzii; OX = 1891097 GN=queE PE=3 SV=1
MKIPVLEIFGPTIQGEGAVIGRKTMFVRTAGCDFKCDWCDSKFTWDGSAKDDIEMLTADIIFERLQQLAPNNFNHVTISGGNPALIKNIAALVKLLHAHNIEVALETQGSKFQLWMTDIDQLTLSPKPPSSKMKQDMHQLDFVINQLEYNKVSLKIVIFNDDDYKFAQMIHHRYPNIKFYLQVGNPYLDETVNDHTEKLLARYEALIDKVMQDNTMNDCYVLPQLHTLLWSNKKGV

SEQ ID NO: 31331 - protein, 236 aa, unidentified
  source 1..236: note = Macrococcus goetzii
  REGION 1..236: note = tr|A0A395G8Y4|A0A395G8Y4_9STAP 7-carboxy-7-deazaguanine synthase OS=Macrococcus goetzii; OX = 1891097 GN=queE PE=3 SV=1
MKIPVLEIFGPTIQGEGAVIGRKTMFVRTAGCDFKCDWCDSKFTWDGSAKDDIEMLTADIIFERLQQLAPNNFNHVTISGGNPALIKNIATLVELLHAHNIEVALETQGSKFQSWMTDIDQLTLSPKPPSSKMKQDMHQLDFVINQLEYNKVSLKIVIFNDDDYKFAQMIHHRYPNIKFYLQVGNPYLDETVNDHTEKLLARYEALIDKVMQDNTMNDCYVLPQLHTLLWSNKKGV

SEQ ID NO: 31332 - protein, 235 aa, Macrococcus hajekii
  REGION 1..235: note = tr|A0A4R6BIN9|A0A4R6BIN9_9STAP 7-carboxy-7-deazaguanine synthase OS=Macrococcus hajekii; OX = 198482 GN=queE PE=3 SV=1
MIPVMEIFGPTIQGEGIVIGRKTMFVRTAGCDFRCSWCDSKFTWDGTMKDEIRMMTAEEIYGELRAAGGQSFNHVTLSGGNPALIKDLGQLIDLLHLEGCQVALETQGSKYQDWMNRIDQLTISPKPPSSTMNQDLDKLDDIISQLDTDKINLKVVVFEETDYQFAKKIHHCYPQLPFYIQVGNPYLDDSVDNHTEKLLHRYEALIDRVMADDEMNNVYVTPQLHTLLWSNQKGV

SEQ ID NO: 31333 - protein, 236 aa, Macrococcus lamae
  REGION 1..236: note = tr|A0A4R6BVM0|A0A4R6BVM0_9STAP 7-carboxy-7-deazaguanine synthase OS=Macrococcus lamae; OX = 198484 GN=queE PE=3 SV=1
MKIPVLEVFGPTIQGEGAVIGRKTMFVRTAGCDFRCSWCDSKFTWDGTAKDDIRMMTAEDIFSELQAVGGNRFNHVTISGGNPALIKGIGSLVSLIHEHGFEVALETQGSKFQNWMTDIDQLTISPKPPSSQMIQDLTILDEVIQQLPQENISLKVVTFDETDYQFAKMIHQRYPDIKFYLQVGNPYLDDTVSHHTEKLLNHYERLIDRVMTDDTMNQVFVTPQLHTLLWSNKKGV

SEQ ID NO: 31334 - protein, 239 aa, Macrococcus sp.
  REGION 1..239: note = tr|A0A4Q1AZD9|A0A4Q1AZD9_9STAP 7-carboxy-7-deazaguanine synthase OS=Macrococcus sp. DPC7161 OX=2507060 GN=queE PE=3 SV=1
MSKKIPVLEIFGPTIQGEGMVIGRKTMFVRTAGCDFSCSWCDSKFTWDGSAKEDIRMMEAEAIYDKLIKIGKSFDHVTISGGNPALIKNMNTLIDFLHENNIKVALETQGSRWQDWMINIDDLTISPKPPSSSMKQDLNVLDEVIQNLDLSKQQVSLKVVIFNDEDYQFAKMIHKRYPNIPFYLQVGNPYLDETVENHTILLLERYENLINQVMDDVEMNACYVTPQLHTLIWSNKKGV

SEQ ID NO: 31335 - protein, 204 aa, unidentified
  source 1..204: note = Magnetococcus marinus
  REGION 1..204: note = tr|A0L5B2|A0L5B2_MAGMM 7-carboxy-7-deazaguanine synthase OS=Magnetococcus marinus (strain ATCC BAA-1437 / JCM 17883 / MC-1) OX=156889 GN=queE PE=3 SV=1
MSDTYAICDIFHSIQGEATHTGLPMVFIRFSGCPLRCSWCDEPLHRQADKAEHLTLTQLRSRILELAPHTTNLLLTGGEPLMAPHLDRLVDYFKDQGYWIAMETCGEGGEIPAEVDWVTLSPKNQLPQSLYERADEVKLVLGADADQSDKERLTQCHHPNLWLQPRALPTGPDPMAVALCYRWALESGGAWRLSLQTHKYIGVP

SEQ ID NO: 31336 - protein, 209 aa, unidentified
  source 1..209: note = Magnetococcus massalia
  REGION 1..209: note = tr|A0A1S7LJF8|A0A1S7LJF8_MAGMO 7-carboxy-7-deazaguanine synthase OS=Magnetococcus massalia (strain MO-1) OX=451514 GN=queE PE=3 SV=1
MSVGDPTYAICELFHSVQGEATWMGRPMLFVRFSGCPLSCSWCDEPLHRDPAKAESLTAEQLLARLHALSADTPFVLLTGGEPLAVPQLGELVAFLQQHGYWVAMETSGVGGTIPDSLDWVTLSPKTVLDEALYQRADEIKYVVPAQGQPQLQAELMQRARTHGRVWLQPRAHGDGPDPVATARCFQWVLESAGKLRLSLQTHRYIGVD

SEQ ID NO: 31337 - protein, 179 aa, unidentified
  source 1..179: note = Magnetofaba australis
  REGION 1..179: note = tr|A0A1Y2K2T9|A0A1Y2K2T9_9PROT 7-carboxy-7-deazaguanine synthase OS=Magnetofaba australis IT-1 OX=1434232 GN=queE PE=3 SV=1
MRFSGCPLACPWCDEPKHRDPALAEQVTVEELSQRIQALAPLCRNLLLTGGEPLAVANLQTFIDHFKQAGYWIAMESSGVGGPVPEGLDWLTLSPKTALDEELLMRANELKFIGGTDMSDAQWSRIEALGAQHPLVWLQPRAIGDKPDPAAARACIQRIQSSSGNVRLSIQSHKYLGIQ

SEQ ID NO: 31338 - protein, 202 aa, unidentified
  source 1..202: note = Magnetospirillum caucaseum
  REGION 1..202: note = tr|M3AGG4|M3AGG4_9PROT 7-carboxy-7-deazaguanine synthase OS=Magnetospirillum caucaseum OX=1244869 GN=queE; PE = 3 SV=1
MPYTVREIFHSLQGEGVQAGRPAVFLRFSGCNLWSGREEDRAAAACRFCDTDFVGGEKYPDAQALAGAVRNVGGATRTVVVTGGEPGLQLDAALVAALHGLGFEVAVETNGTVDLPPGIDWVCVSPKAGTTLKVTRGDELKLVFPQAGAAPETFEHLDFTHFLVQPMDGPERDANTRAAIAHCLTRPRWRLSLQTHKIVGIP

SEQ ID NO: 31339 - protein, 210 aa, Magnetospirillum gryphiswaldense
  REGION 1..210: note = tr|V6F8P2|V6F8P2_MAGGM 7-carboxy-7-deazaguanine synthase OS=Magnetospirillum gryphiswaldense (strain DSM 6361 / JCM 21280 / NBRC 15271 / MSR-1) OX=431944 GN=queE; PE = 3 SV=1
MAYKVKELFYTLQGEGGQAGRAAIFLRFAGCNLWSGREADRATAQCPFCDTDFVGGDKYADADALAGAVAALWPKGGGGQPLVVITGGEPGLQLDEALIQALHFWGLEIAVETNGTISLPPGIDWVCVSPKAGQDLETVAGDEIKLVWPQDGIDPTRFEKMPFRHYFLQPKDVPGDSAAQAAHLQACVAYCLTHPRWRLSLQTHKILGIP

SEQ ID NO: 31340 - protein, 210 aa, Magnetospirillum gryphiswaldense
  REGION 1..210: note = tr|A4TYV8|A4TYV8_9PROT 7-carboxy-7-deazaguanine synthase OS=Magnetospirillum gryphiswaldense OX=55518; GN = queE PE=3 SV=1
MAYKVKELFYTLQGEGGQAGRAAIFLRFAGCNLWSGREADRATAQCPFCDTDFVGGDKYADADALAGAVAALWPKGGGGQPLVVITGGEPGLQLDEALIQALHFWGLEIAVETNGTIALPPGIDWVCVSPKAGQDLETIAGDEIKLVWPQDGIDPTRFEKMPFRHYFLQPKDVPGDSAAQAAHLQACVAYCLTHPRWRLSLQTHKILGIP

SEQ ID NO: 31341 - protein, 205 aa, unidentified
  source 1..205: note = Magnetospirillum kuznetsovii
  REGION 1..205: note = tr|A0A364NXE8|A0A364NXE8_9PROT 7-carboxy-7-deazaguanine synthase OS=Magnetospirillum kuznetsovii OX=2053833 GN=queE PE=3 SV=1
MPYTVKEVFLTLQGEGAQAGCAAVFLRFAACNLWNGREEDRATAACRFCDTDFVGGEKFPDAETLTERVAGLWPVGQGSRLVVITGGEPALQLDQVLVDALHDRGFRVAIETNGTLALPDGIDWVCVSPKAGTQLVVTQGDELKLVFPQPGLDPAGFEYLGFSHLLLQPMDGPERDANTQAAIRHCLTHPRWRLSLQTHKIIGIA

SEQ ID NO: 31342 - protein, 202 aa, unidentified
  source 1..202: note = Magnetospirillum magneticum
  REGION 1..202: note = tr|Q2WAS4|Q2WAS4_MAGSA 7-carboxy-7-deazaguanine synthase OS=Magnetospirillum magneticum (strain AMB-1 / ATCC 700264) OX=342108 GN=queE PE=3 SV=1
MSYTVREIFHSLQGEGVQAGRPAVFLRFAGCNLWSGREADRETATCRFCDTDFVGGEKYPDAQGLAEAVKAVGGATRYVVVTGGEPGLQLDGALVEALHGLGFEVAIETNGTVELPSGLDWVCVSPKAGTTLKVTRGDELKLVFPQAGAMPGDFEHLDFAYFLLQPMDGPERDAHTRAAIGHCLTHPRWRLSLQTHKIVGIP

SEQ ID NO: 31343 - protein, 202 aa, Magnetospirillum magnetotacticum
  REGION 1..202: note = tr|A0A0C2U9G0|A0A0C2U9G0_MAGMG 7-carboxy-7-deazaguanine synthase OS=Magnetospirillum magnetotacticum MS-1 OX=272627 GN=queE PE=3 SV=1
MSYTVREIFHSLQGEGVQAGRAAVFLRFSGCNLWSGRQEDRAKAVCRFCDTDFVGGVKYSDAQSLAEAVKAVGGSTRYVVVTGGEPGLQLDETLIHALHGLGFSVAVETNGTLGLPSGLDWVCVSPKAGTELMVTRGDELKLVFPQDGAAPEAFEHLDFAHFLLQPMDGPDRAANTAAAIAHCLTHPRWRLSLQTHKIVGIP

SEQ ID NO: 31344 - protein, 205 aa, unidentified
  source 1..205: note = Magnetospirillum marisnigri
  REGION 1..205: note = tr|A0A178MS25|A0A178MS25_9PROT 7-carboxy-7-deazaguanine synthase OS=Magnetospirillum marisnigri OX=1285242 GN=queE PE=3 SV=1
MPYTVKEIFPSLQGEGIQAGRAAIFLRFAACNLWNGREEDRAKAACGFCDTDFVGGEKFPDAETLAERVAGLWPVGQGNRYVVVTGGEPALQLDAVLVAALHDRGFQVAIETNGTLALASGIDWVCVSPKAGCDLVVTSGDELKLVYPQAGAPPEAFERLGFTHFLLQPMDGPDREANTREALRHCLTHPRWRLSLQTHKIIGIP

SEQ ID NO: 31345 - protein, 204 aa, unidentified
  source 1..204: note = Magnetospirillum marisnigri
  REGION 1..204: note = tr|A0A178MHE8|A0A178MHE8_9PROT 7-carboxy-7-deazaguanine synthase OS=Magnetospirillum marisnigri OX=1285242 GN=queE PE=3 SV=1
MSYQVKEIFYSLQGEGAHSGRPAIFCRFSNCNLWSGKDEDRASAICKFCDTDFVGGDEYTLDCLVQAIAAKWPGGGKPYVICTGGEPLLQVDIPLVDALHNAGFEVAVETNGTVGKHDVAAKLDWVCVSPKADARVKLDQGHELKLVYPQAENHPSDFERMGFKHFFLQPCDGVEGSMKMAIDYCLAHPHWSLSLQTHKIGGFE

SEQ ID NO: 31346 - protein, 202 aa, unidentified
  source 1..202: note = Magnetospirillum moscoviense
  REGION 1..202: note = tr|A0A178MQV6|A0A178MQV6_9PROT 7-carboxy-7-deazaguanine synthase OS=Magnetospirillum moscoviense OX=1437059 GN=queE PE=3 SV=1
MAYTVKELFYTLQGEGGQAGRAAIFIRLAGCNLWSGREEDRDAAACRFCDTDFVGGERYGDAVALARAAADLWPGGGFPLAVVTGGEPGLQLDDALVRALHDHGFEVAVETNGTIALPAGLDWVCVSPKAGTELKVAAGEEIKLVWPQDGIDPDALLRLPFRHFFLQPRDGVAGSVQECVSYCLTHPGWRLSLQTHKLLGIP

SEQ ID NO: 31347 - protein, 202 aa, Magnetospirillum sp.
  REGION 1..202: note = tr|A0A0U5ME91|A0A0U5ME91_9PROT 7-carboxy-7-deazaguanine synthase OS=Magnetospirillum sp. XM-1 OX=1663591 GN=queE PE=3 SV=1
MSYTVREIFHTLQGEGVQAGRPAVFLRFAGCNLWSGREEDRADATCRFCDTDFVGGEKFADAAALADAVLAAGGDTRYVVVTGGEPGLQLDTALVRALHARGFQIAIETNGTVDLPGGIDWVCVSPKAGTGLKTTRGDELKLVFPQAGAAPEDFESLDFAHFLLQPMDGPDREANTQAAIAHCLTHPRWRLSLQTHKLLGIP

SEQ ID NO: 31348 - protein, 206 aa, Magnetospirillum sp.
  REGION 1..206: note = tr|A0A1M3LJB9|A0A1M3LJB9_9PROT 7-carboxy-7-deazaguanine synthase OS=Magnetospirillum sp. 64-120 OX=1895778 GN=queE PE=3 SV=1
MAYTVKEIFYTLQGEGGQAGRAAVFLRFSGCNLWSGREEDRETAQCRFCDTDFVGGDKFADAESLAQTVASHWPKGAGGHPLVVVTGGEPGLQLDDALVLALHQQGFEIAVESNGTVELPAGIDWVCVSPKAGTTLKVLAGEEIKLVWPQDGVDLGVLERLPFRHYFIQPMDGPDQAAHIQAAISFCLTHPRWRLSLQTHKLLGIP

SEQ ID NO: 31349 - protein, 211 aa, unidentified
  source 1..211: note = Magnetovibrio blakemorei
  REGION 1..211: note = tr|A0A1E5QC00|A0A1E5QC00_9PROT 7-carboxy-7-deazaguanine synthase OS=Magnetovibrio blakemorei OX=28181 GN=queE PE=3 SV=1
MTYQVKELFYSLQGEGANSGRASVFCRFAGCNLWSGREADRSAAACDFCDTDFVGGDKYPDAETLAAAILQLWPTHVEHKGGAEHKFVILTGGEPGLQVDAALIDALHGHGFEIAIESNGTQVLPDGLDWIAISPKAGAALVVTAGDELKVVYPQAGLDLDSFAALDFAHFYVQPKDGPDAAQNVVLAIDYCRAHPQWRLSLQTHKVLNIR

SEQ ID NO: 31350 - protein, 209 aa, unidentified
  source 1..209: note = Magnetovibrio sp.
  REGION 1..209: note = tr|A0A2E3P6H0|A0A2E3P6H0_9PROT 7-carboxy-7-deazaguanine synthase OS=Magnetovibrio sp.; OX = 2024836 GN=queE PE=3 SV=1
MAYSVKEIYFTLQGEGAQTGRPAVFLRFAGCNLWSGREQDRATAQCRFCDTDFIGTDGPSGGSFKDANALAAAAAESWPGGGAPLVVCTGGEPLLQLDEPLIDALHDVGFRVAVETNGTLNAPDGLDWICVSPKAGTEVVQRRGDELKLVFPQAGAEPDRFEDWDFANFLLQPMDGPDRAANTVAAVAYCLAHPKWRLSLQTHKMLGIP

SEQ ID NO: 31351 - protein, 209 aa, unidentified
  source 1..209: note = Magnetovibrio sp.
  REGION 1..209: note = tr|A0A2D8YU80|A0A2D8YU80_9PROT 7-carboxy-7-deazaguanine synthase OS=Magnetovibrio sp.; OX = 2024836 GN=queE PE=3 SV=1
MTYSVKEIYFTLQGEGAQTGRPAVFLRFAGCNLWSGREQDRATAQCRFCDTDFVGTDGPGGGAFKDADSLAAAVAAAWPGGGDPLVVCTGGEPLLQVDGTLIAALHDADFRVAVETNGTLSAPDGLDWICVSPKAGTEVVQRRGNELKLVFPQAGAAPEAFADWAFDNFLLQPMDGPERDANTQAAVDYCLAHPKWRLSLQTHKLLGIP

SEQ ID NO: 31352 - protein, 210 aa, Malikia granosa
  REGION 1..210: note = tr|A0A2S9K2F9|A0A2S9K2F9_9BURK 7-carboxy-7-deazaguanine synthase OS=Malikia granosa; OX = 263067 GN=queE PE=3 SV=1
MTYSVKEIFYTLQGEGLRAGRSAVFCRFAGCNLWSGREQDRSSAICRFCDTDFVGTDGTLGGKFAQAAELAERIAAQWPQGQGQRYVVLTGGEPLLQVDAALIDALHAQGFEVAVETNGSIEAPAGIDWICVSPKAGAPLLQTQGQELKLVWPQPGLDPEQLGQLDFEHFLLQPMDNPAQADNTQACIAYCQAHPQWRLSLQTHKILEIR

SEQ ID NO: 31353 - protein, 210 aa, Malikia spinosa
  REGION 1..210: note = tr|A0A2S9KCR7|A0A2S9KCR7_9BURK 7-carboxy-7-deazaguanine synthase OS=Malikia spinosa; OX = 86180 GN=queE PE=3 SV=1
MTYSVKEIFYTLQGEGLRAGRSAVFCRFAGCNLWSGREQDRASAICRFCDTDFVGTDGTLGGKFAEAAELAARIATLWPEGRGQRYVVLTGGEPLLQVDSALIDALHAQGFEVAVETNGSIEAPTGIDWICVSPKAGAPLLQTSGQELKLVWPQPGLDPAELGRLDFEHFLLQPMDNPAQAANTQACIAYCQAHPQWRLSLQTHKILEIR

SEQ ID NO: 31354 - protein, 251 aa, Malonomonas rubra
  REGION 1..251: note = tr|A0A1M6K8T7|A0A1M6K8T7_MALRU 7-carboxy-7-deazaguanine synthase OS=Malonomonas rubra DSM 5091 OX=1122189 GN=queE PE=3 SV=1
MPAIPQIDLPLIEAFSSIQGEGLLVGCRQIFLRLPNCNLNCNYCDTPFASTKSCLLENPPGSGTIIELENPVSLPRLMETFSDWCAKAPGVHHSFSLTGGEPLLHADLLQECLPVLRKLLPIYLETNGTLPDQLETLISQIDWVSMDIKLESMSGEKTDWELQRCFLEIANRTQCYVKIVVGRETTDAELQKAAEIVSSVSENISLILQPVTIEAKPGMGTQHLLKMQDVVAAINPNVRIIPQTHVYLGLL

SEQ ID NO: 31355 - protein, 236 aa, Mameliella alba
  REGION 1..236: note = tr|A0A0B3REM3|A0A0B3REM3_9RHOB 7-carboxy-7-deazaguanine synthase OS=Mameliella alba; OX = 561184 GN=queE PE=3 SV=1
MTTLRIAEIFGPTIQGEGALIGEPTLFVRAGGCDYRCVWCDSMHAVDSAYRHTWTAMKPEAVWAELRRLSGDRPVTVSLSGGNPAIQDFGPLIALGRAAGYRFACETQGSVARPWFSDLDTLVLSPKPPSSGERVDWGTFADCVEAGRGARSTVMKIVVFDGADYAWAKEAHARHPELPLYLQPGNPEVDPQTPVDSQALADRLGWLTETAMADRWFAPRILPQLHVLIWGNRRGV

SEQ ID NO: 31356 - protein, 223 aa, unidentified
  source 1..223: note = Mangrovibacter phragmitis
  REGION 1..223: note = tr|A0A1B7KZB5|A0A1B7KZB5_9ENTR 7-carboxy-7-deazaguanine synthase OS=Mangrovibacter phragmitis OX=1691903 GN=queE PE=3 SV=1
MQYPINEIFQTLQGEGYFTGVPAIFIRLQGCPVGCAWCDTKHTWDKLAEREVSLFSVMAKTKESDKWAASTPEELLAVINRQGYTARHVVITGGEPCIHDLTPLTQLLEQHGYQCQIETSGTHEVQATANTWVTVSPKVNMRGGYDVLGQALVRADEIKHPVGRVRDIEALDALLATLTDEKPRIIALQPISQKEDATRLCIETCIARNWRLSMQTHKYLNIA

SEQ ID NO: 31357 - protein, 223 aa, Mangrovibacter plantisponsor
  REGION 1..223: note = tr|A0A317QCH9|A0A317QCH9_9ENTR 7-carboxy-7-deazaguanine synthase OS=Mangrovibacter plantisponsor OX=451513 GN=queE PE=3 SV=1
MQYPINEIFQTLQGEGYFTGVPAIFIRLQGCPVGCAWCDTKHTWDKLAEREVSLFSVMAKTKESDKWAASTPEELLAVVNRQGYTARHVVITGGEPCIHDLTPLTQLLEQHGYQCQIETSGTHEVLATANTWVTVSPKVNMRGGYDVLGQALVRADEIKHPVGRVRDIEALDALLATLTDEKPRIIALQPISQKEDATRLCIETCIERNWRLSMQTHKYLNIA

SEQ ID NO: 31358 - protein, 223 aa, Mangrovibacter sp.
  REGION 1..223: note = tr|A0A071MD27|A0A071MD27_9ENTR 7-carboxy-7-deazaguanine synthase OS=Mangrovibacter sp. MFB070 OX=1224318 GN=queE PE=3 SV=1
MQYPINEIFQTLQGEGYFTGVPAIFIRLQGCPVGCAWCDTKHTWDKLAEREVSLFSVMAKTKESDKWAASTPEELLAVANRQGYTARHVVITGGEPCIHDLTPLTQLLEQHGYQCQIETSGTHEVLATANTWVTVSPKVNMRGGYDVLGQALVRADEIKHPVGRVRDIEALDALLATLSDEKPRIIALQPISQKEDATRLCIETCIERNWRLSMQTHKYLNIA

SEQ ID NO: 31359 - protein, 201 aa, unidentified
  source 1..201: note = Mangrovibacterium diazotrophicum
  REGION 1..201: note = tr|A0A419W460|A0A419W460_9BACT 7-carboxy-7-deazaguanine synthase OS=Mangrovibacterium diazotrophicum OX=1261403 GN=queE PE=3 SV=1
MSVNLTVNEIFYSLQGEGSRAGIPNIFIRLSKCNLNCWFCDTEFESGESYSLEQLLDEISQFPCKNIIWTGGEPALQLTEEIVGFFKERGYYQAIETNGTKPLPSNLDFVTCSPKQVTAEQLKRNFPNGVSEMKCIFNENPEYAIEELPEAQHYFLSPVFLGKEKERMDMDKNILQRCIDYILANPGWQLSIQQHKVWNIR

SEQ ID NO: 31360 - protein, 201 aa, unidentified
  source 1..201: note = Mangrovibacterium marinum
  REGION 1..201: note = tr|A0A2T5BZU1|A0A2T5BZU1_9BACT 7-carboxy-7-deazaguanine synthase OS=Mangrovibacterium marinum OX=1639118 GN=queE PE=3 SV=1
MSVNLTVNEIFYSLQGEGSRAGTPNIFIRLSNCNLNCWFCDTEFESGESYSLQQLLEEISQFPCKNIIWTGGEPALQLTDEIVAFFKEHGYYQAIETNGTKPLPSKLDFISCSPKQVTAARLRENFPDGVSEIKCLFQQAPDYDLHELPKAEHYLLSPIFLGKEKERMELDREILQRCIDYILKNPDWQLSIQQHKVWNIR

SEQ ID NO: 31361 - protein, 209 aa, unidentified
  source 1..209: note = Mangrovimonas sp.
  REGION 1..209: note = tr|A0A1V1ZDY7|A0A1V1ZDY7_9FLAO 7-carboxy-7-deazaguanine synthase OS=Mangrovimonas sp. DI 80 OX=1779330 GN=queE PE=3 SV=1
MKQDVQTLVDKGLMLPLMEEFYTIQGEGFYKGTAAYFIRVGGCDVGCHWCDVKESWNAEIHPPTETSKIVENAAKYSDTIVVTGGEPLTWDMTELTRQLKEKGLKVHIETSGAYELSGTWDWICLSPKKMKLPTQKVYENANELKVIVYNMDDFRFAEEQAAQVNKDCILYLQPEWSKREKMIPEIVDYVMKNPKWKVSLQTHKYLNIP

SEQ ID NO: 31362 - protein, 209 aa, unidentified
  source 1..209: note = Mangrovimonas sp.
  REGION 1..209: note = tr|A0A428K2Y5|A0A428K2Y5_9FLAO 7-carboxy-7-deazaguanine synthase OS=Mangrovimonas sp. HN-E26 OX=2494697 GN=queE PE=3 SV=1
MKEDVQKLVDKGEMLPLMEEFYTIQGEGFHKGTAAYFIRVGGCDVGCHWCDVKESWNAEIHPPTETPKIVENASQYSDTIVVTGGEPLMWDMTPLTNQLKEKGLQIHIETSGAYPLTGTWDWICLSPKKMKLPTDEVYAKANELKVIVYNKDDFRFAEEQAAKVNNDCILYLQPEWSKRDKMMPQIVDYVMKHPKWKVSLQTHKYLNIP

SEQ ID NO: 31363 - protein, 209 aa, unidentified
  source 1..209: note = Mangrovimonas yunxiaonensis
  REGION 1..209: note = tr|A0A084TIV6|A0A084TIV6_9FLAO 7-carboxy-7-deazaguanine synthase OS=Mangrovimonas yunxiaonensis OX=1197477 GN=queE PE=3 SV=1
MKKDVQEMVDRGEMLPLMEEFYTIQGEGFHKGTAAYFIRVGGCDVGCHWCDVKESWNAEIHPPTLTSEIVENARKYSDTIVVTGGEPLTWDMGPLTNRLKANGLNVHIETSGAYPLTGTWDWICLSPKKMKLPTDEVYAKANELKVIVYNKDDFRFAEEQAAKVGDACILYLQPEWSKRDKVVPLIVDYVMANPKWKVSLQTHKYLNIP

SEQ ID NO: 31364 - protein, 208 aa, Mannheimia granulomatis
  REGION 1..208: note = tr|A0A011MKT3|A0A011MKT3_9PAST 7-carboxy-7-deazaguanine synthase OS=Mannheimia granulomatis OX=85402 GN=queE PE=3 SV=1
MGMLISNPSFPIVEIFESLQGEGFNTGMPAIFVRFGKCNLTCPWCDTNYNQFELWTLGDILAKVRGHSAKNIIITGGEPTIQPNLSLLLDQLKQEGYFLAIETNGLKEIPPQIDYIATSPKRMYQEKYQRRCIAFANEVRVVVDGEVQEFCEQLENKIKAEHYYLSPCEVEGKMNLLDTITQLGLLNQRPNKPKWQLSIQTHKMVGIE

SEQ ID NO: 31365 - protein, 208 aa, Mannheimia haemolytica
  REGION 1..208: note = tr|A0A3S4Z6N8|A0A3S4Z6N8_MANHA 7-carboxy-7-deazaguanine synthase OS=Mannheimia haemolytica OX=75985 GN=queE PE=3 SV=1
MAELISNPRFPIVEIFESLQGEGFNTGMPAIFVRFGKCNLTCPWCDTNYNQFEQWTLSDILAKVRGYSAKNVIITGGEPTIQPNFSLLLNQLKKEGYFLVIETNGLKEVPAQIDYIATSPKRMYQEKYQRRCIEFANEVRIVVDGEVQGFCEQIESQIKAEHYYLSPCEVEGKMNLLETITQLGLLNQRSNKPKWQLSIQTHKIVGIE

SEQ ID NO: 31366 - protein, 208 aa, Mannheimia haemolytica
  REGION 1..208: note = tr|A0A248ZYB7|A0A248ZYB7_MANHA 7-carboxy-7-deazaguanine synthase OS=Mannheimia haemolytica OX=75985 GN=queE PE=3 SV=1
MAELISNPRFPIVEIFESLQGEGFNTGMPAIFVRFGKCNLTCPWCDTNYNQFEQWTLSDILAKVRSYSAKNVIITGGEPTIQPNLSLLLEQFKKEGYFLAIETNGLKEVPAQIDYIATSPKRMYQEKYQRRCIEFANEVRIVVDGEVQGFCEQIESQIKAEHYYLSPCEVEGKMNLLETITQIGLLNQRPNKPKWQLSIQTHKIVGIE

SEQ ID NO: 31367 - protein, 208 aa, Mannheimia sp.
  REGION 1..208: note = tr|W0Q1E0|W0Q1E0_9PAST 7-carboxy-7-deazaguanine synthase OS=Mannheimia sp. USDA-ARS-USMARC-1261 OX=1432056; GN = queE PE=3 SV=1
MAELISNPSFPIVEIFESLQGEGFNTGMPSIFVRFGKCNLTCPWCDTNYNQFEQWTLNEILAKVRSYSAKNIIITGGEPTIQPNLSLLLNQLKKEGYFLAIETNGLKEIPPQIDYIATSPKRMYQEKYQRRCIEFANEVRVVVDGEVQTFCEQLENKIKAEHYYLSPCEKEGKMNLLETITQIGLLNQRPNKPKWQLSIQTHKIVGIE

SEQ ID NO: 31368 - protein, 224 aa, unidentified
  source 1..224: note = Mannheimia succiniciproducens
  REGION 1..224: note = tr|Q65RE6|Q65RE6_MANSM 7-carboxy-7-deazaguanine synthase OS=Mannheimia succiniciproducens (strain MBEL55E); OX = 221988 GN=nrdG PE=3 SV=1
MGNADLFLRISGITAVENLLISNPRYPIVEIFESLQGEGFNTGMPCIFVRFGKCNLACPWCDTDYERFEYRTLQQIVEKVRSFSAKNIIITGGEPTIQPNISLLLAQFKRDGYFLAIETNGLRAVPPQIDYISASPKAMYAEKYRRRCIDFAHEVRIVMDADAENFCQQIEQKIRAERYYLSPCEIEGKMNLLETIALLGKLNQRPNKPKWQLSIQTHKLAGIE

SEQ ID NO: 31369 - protein, 208 aa, Mannheimia varigena
  REGION 1..208: note = tr|W0QB13|W0QB13_9PAST 7-carboxy-7-deazaguanine synthase OS=Mannheimia varigena USDA-ARS-USMARC-1296; OX = 1433287 GN=queE PE=3 SV=1
MVALISNPTFPIVEIFESLQGEGFNTGMPAIFVRFGKCNLTCPWCDTNYNQFEAWTLSEILAKVKSYSAKNVIITGGEPTIQPNLSLLLEQLKQADYFLAIETNGLKEIPSQIDYIATSPKRMYKEKYQHRCIEFANEVRIVVDGEVQEFCEQLETQIKADHYYLSPCEVDGKMNLLETITQLGLLNQRANKPKWQLSIQTHKIVGIE

SEQ ID NO: 31370 - protein, 210 aa, Maribacter aquivivus
  REGION 1..210: note = tr|A0A1M6MBN8|A0A1M6MBN8_9FLAO 7-carboxy-7-deazaguanine synthase OS=Maribacter aquivivus; OX = 228958 GN=queE PE=3 SV=1
MKNEEVLEKVNKGVYLPLMEEFYTIQGEGFHKGTAAYFIRVGGCDVGCHWCDVKESWNAETHPPTAIEQIVDNAAKYSDTIVITGGEPLMWDMDPITKALKDKGLKTHIETSGAYTLSGDWDWICLSPKKNKLPEGRIYDEAHELKVIVYNKHDLIFAEEQAAKTNTDCILYLQPEWSVRDKVVPMIVDYVMKNPKWKVSLQTHKYLNIP

SEQ ID NO: 31371 - protein, 210 aa, Maribacter arcticus
  REGION 1..210: note = tr|A0A1T4ZQM7|A0A1T4ZQM7_9FLAO 7-carboxy-7-deazaguanine synthase OS=Maribacter arcticus; OX = 561365 GN=queE PE=3 SV=1
MKNVEVLEKVSQGVFLPLMEEFYTIQGEGFHKGTAAYFIRVGGCDVGCHWCDVKESWNAETHPPTDIVKIVTNAAKYSDTIVVTGGEPLMWDMNPLTKALKEKGLKTHIETSGAYALTGDWDWICLSPKKNKLPEGRIYDEAHELKVIVFNKHDLIFAEEQSAKTNANCILYLQPEWSVRDKVVPMIVDYVMKNPKWKVSLQTHKYLNIP

SEQ ID NO: 31372 - protein, 210 aa, unidentified
  source 1..210: note = Maribacter caenipelagi
  REGION 1..210: note = tr|A0A4R7DBW5|A0A4R7DBW5_9FLAO 7-carboxy-7-deazaguanine synthase OS=Maribacter caenipelagi OX=1447781 GN=queE PE=3 SV=1
MKNEEVLEKVNKGVYLPLMEEFYTIQGEGFHKGTAAYFIRVGGCDVGCHWCDVKESWNAETHPPTAIKQIVDNAAKYSDTIVITGGEPLMWDMTPITTALKNKGLKTHIETSGAYTLSGDWDWICLSPKKNKLPEGRIYDEAHELKVIVYNKHDLIFAEEQAAQTNANCILYLQPEWSVRDKVVPMIVDYVMNNPKWKVSLQTHKYLNIP

SEQ ID NO: 31373 - protein, 210 aa, unidentified
  source 1..210: note = Maribacter cobaltidurans
  REGION 1..210: note = tr|A0A223V1T3|A0A223V1T3_9FLAO 7-carboxy-7-deazaguanine synthase OS=Maribacter cobaltidurans OX=1178778 GN=queE PE=3 SV=1
MEKKDTMALVDKGLLLPLMEEFYTIQGEGFHKGTAAYFIRVGGCDVGCHWCDVKESWNAETHPPTNIELIVENAAKYSDTIVVTGGEPLTWDMGPLTDRLKSKNLKTHIETSGAYPLTGDWDWICLSPKKNKLPVGRIYDEAHELKVIVYNKHDLIFAEEQAALTNNNCILYLQPEWSVRDKVTPMIVDYVMKNPKWKVSLQTHKYLNIP

SEQ ID NO: 31374 - protein, 210 aa, Maribacter dokdonensis
  REGION 1..210: note = tr|A0A1H4NFS0|A0A1H4NFS0_9FLAO 7-carboxy-7-deazaguanine synthase OS=Maribacter dokdonensis OX=320912 GN=queE PE=3 SV=1
MKNEEVLEKVNKGVYLPLMEEFYTIQGEGFHKGTAAYFIRVGGCDVGCHWCDVKESWNAETHPPTAIEHIVDNAAKYSDTIVITGGEPLMWDMNPITKALREKGLKTHIETSGAYTLSGEWDWICLSPKKNKLPEGRIYDEAHELKVIVYNKHDLIFAEEQAAKTNANCILYLQPEWSVRDKVVPMIVDYVMNNPKWKVSLQTHKYLNIP

SEQ ID NO: 31375 - protein, 210 aa, unidentified
  source 1..210: note = Maribacter flavus
  REGION 1..210: note = tr|A0A5B2TVH1|A0A5B2TVH1_9FLAO 7-carboxy-7-deazaguanine synthase OS=Maribacter flavus; OX = 1658664 GN=queE PE=3 SV=1
MQENNVLELVDKGFYLPLMEEFYTIQGEGFHKGTAAYFIRVGGCDVGCHWCDVKESWNAETHPPTDIDHIVENAAKYSDTIVVTGGEPLTWDMGPLTEKLKARNLKTHIETSGAYTLTGTWDWICLSPKKNKLPEGRIYDEAHELKVIVYNKHDLIFAEEQAAQTNKECILYLQPEWSVREKVTPLIVEYVMKNPKWKVSLQTHKYLNIP

SEQ ID NO: 31376 - protein, 210 aa, Maribacter orientalis
  REGION 1..210: note = tr|A0A1H7N5Q6|A0A1H7N5Q6_9FLAO 7-carboxy-7-deazaguanine synthase OS=Maribacter orientalis; OX = 228957 GN=queE PE=3 SV=1
MKNVEVLEKVNQGVFLPLMEEFYTIQGEGFHKGTAAYFIRVGGCDVGCHWCDVKESWNAETHPPTDIENIVANAAKYSDTIVVTGGEPLMWNMNPLTSALKEKGLKTHIETSGAYALTGEWDWICLSPKKNKLPEGRIYDEAHELKVIVFNKHDLIFAEEQAAKTNTNCILYLQPEWSVRDKVVPMIVDYVMKNPKWKVSLQTHKYLNIP

SEQ ID NO: 31377 - protein, 210 aa, Maribacter polysiphoniae
  REGION 1..210: note = tr|A0A316E643|A0A316E643_9FLAO 7-carboxy-7-deazaguanine synthase OS=Maribacter polysiphoniae OX=429344 GN=queE PE=3 SV=1
MMKDEVLELVNKGLMLPLMEEFYTIQGEGFHKGTAAYFIRVGGCDVGCHWCDVKESWNAETHPPTDITSIVEKAVAHSDTIVVTGGEPLTWDMGPLTKALKAKHVKTHIETSGAHPLSGTWDWICLSPKKNKLPTGIIYEKAHELKVIVFNKHDFIFAEEQAAKVNKDCILYLQPEWSVRDRMMPMIVDFVMKNPKWKVSLQTHKYLNIP

SEQ ID NO: 31378 - protein, 103 aa, Maribacter sp.
  REGION 1..103: note = tr|A0A3C0GKY1|A0A3C0GKY1_9FLAO 7-carboxy-7-deazaguanine synthase QueE (Fragment); OS = Maribacter sp. OX=1897614 GN=DCM40_44145 PE=4 SV=1
TVSGEKTEKAIKPENVAEYTECSDRGQLKFVVGSADREWDEMESTVEKFRNAGVNWPVWIMPTGAREEEQTATAGKVAEKAFKKGYNVAARVHVYLFGNAIGT

SEQ ID NO: 31379 - protein, 210 aa, Maribacter sp.
  REGION 1..210: note = tr|A0A559NU50|A0A559NU50_9FLAO 7-carboxy-7-deazaguanine synthase OS=Maribacter sp. MAR_2009_72 OX=1250050 GN=queE PE=3 SV=1
MKNVEVLEKVNKGVYLPLMEEFYTIQGEGFYKGTAAYFIRVGGCDVGCHWCDVKESWNAETHPPTDIEHIVANAATYSDTIVVTGGEPLMWNMEPLTTALKNKGLKTHIETSGAYTLTGNWDWICLSPKKNKLPEGVIYDKAHELKVIVYNKHDLIFAEEQAAKTNADCILYLQPEWSVRDKVVPMIVDYVMKNPKWKVSLQTHKYLNIP

SEQ ID NO: 31380 - protein, 210 aa, unidentified
  source 1..210: note = Maribacter spongiicola
  REGION 1..210: note = tr|A0A4R7K857|A0A4R7K857_9FLAO 7-carboxy-7-deazaguanine synthase OS=Maribacter spongiicola OX=1206753 GN=queE PE=3 SV=1
MKNEEVLEKVNKGVYLPLMEEFYTIQGEGFHKGTAAYFIRVGGCDVGCHWCDVKESWNAETHPPTAIEQIVDNAAKYSDTIVITGGEPLMWDMNPITKALKEKGLKTHIETSGAYTLSGDWDWICLSPKKNKLPEGRIYEEAHELKVIVYNKHDLIFAEEQAAKTNTNCILYLQPEWSVRDKVVPMIVDYVMNNPKWKVSLQTHKYLNIP

SEQ ID NO: 31381 - protein, 210 aa, Maribacter stanieri
  REGION 1..210: note = tr|A0A1I6IDZ8|A0A1I6IDZ8_9FLAO 7-carboxy-7-deazaguanine synthase OS=Maribacter stanieri; OX = 440514 GN=queE PE=3 SV=1
MKNEEVLEKVNKGLYLPLMEEFYTIQGEGFHKGTAAYFIRVGGCDVGCHWCDVKESWNAETHPPTAIEKIVDNAATYSDTIVITGGEPLMWDMNPITNALKAKGLKTHIETSGAYTLSGDWDWICLSPKKNKLPEGRIYDEAHELKVIVYNKHDLIFAEEQAAKTNANCILYLQPEWSVRDKVVPMIVDYVMKNPKWKVSLQTHKYLNIP

SEQ ID NO: 31382 - protein, 210 aa, Maribacter ulvicola
  REGION 1..210: note = tr|A0A1N6RJ13|A0A1N6RJ13_9FLAO 7-carboxy-7-deazaguanine synthase OS=Maribacter ulvicola; OX = 228959 GN=queE PE=3 SV=1
MKNEEVLEKVNKGTYLPLMEEFYTIQGEGFHKGTAAYFIRVGGCDVGCHWCDVKESWNAETHPPTAIEQIVDNAAKYSDTIVITGGEPLMWDMNPITKALKDKGLKTHIETSGAYTLSGDWDWICLSPKKNKLPEGRIYDEAHELKVIVYNKHDLIFAEEQAAKTNADCILYLQPEWSVSDKVVPMIVDYVMNNPKWKVSLQTHKYLNIP

SEQ ID NO: 31383 - protein, 210 aa, unidentified
  source 1..210: note = Maribacter vaceletii
  REGION 1..210: note = tr|A0A495E690|A0A495E690_9FLAO 7-carboxy-7-deazaguanine synthase OS=Maribacter vaceletii; OX = 1206816 GN=queE PE=3 SV=1
MVNEDVLALVNKGEMLPLMEEFYTIQGEGFHKGTAAYFIRVGGCDVGCHWCDVKESWNAETHPPTKIDGIAEKAAKYSDTIVVTGGEPLTWDMGPITKALKAKNLQTHIETSGAYKLSGEWDWICLSPKKNKLPFGEIYDKAHELKVIVYNKHDLIFAEEQATLTNKDCILYLQPEWSVKDKVVPLIVDYVMQNPKWKVSLQTHKYLNIP

SEQ ID NO: 31384 - protein, 209 aa, Maricaulis maris
  REGION 1..209: note = tr|A0A495DMD8|A0A495DMD8_9RHOB 7-carboxy-7-deazaguanine synthase OS=Maricaulis maris; OX = 74318 GN=queE PE=3 SV=1
MTYSVKERFLTVQGEGGQAGRPAVFLRFAGCNLWSGREQDRHKAVCNFCDTDFVGMDGPGGGRFKTAEALVEAVAELWPGGGVPLVVCTGGEPLLQLDTPLIDALHARGFEIAVETNGTVKAPDGIDWITVSPKGKAPVVQTSGHELKLVYPQPELDPATFEAWDFKRFSLQPMDGPQMMENAQAAFDYCLAHPKWSLSLQTHKWIGAP

SEQ ID NO: 31385 - protein, 209 aa, Maricaulis maris
  REGION 1..209: note = tr|Q0ARS6|Q0ARS6_MARMM 7-carboxy-7-deazaguanine synthase OS=Maricaulis maris (strain MCS10) OX=394221; GN = queE PE=3 SV=1
MSYSVKERFLTVQGEGAQAGRPAVFLRFSGCNLWSGREQDRHKAVCNFCDTDFVGMDGPGGGRFKTAVSLVDAVAELWPGGGRPLVVCTGGEPLLQLDTSLIDALHARGFEIAVETNGTVRAPDGIDWITVSPKGTAPVVQTSGHELKLVYPQPELDPTAFEDWDFKRFSLQPMDGPQMMENAQAAFDYCLAHPQWSLSLQTHKWIGAP

SEQ ID NO: 31386 - protein, 209 aa, Maricaulis salignorans
  REGION 1..209: note = tr|A0A1G9MWY9|A0A1G9MWY9_9RHOB 7-carboxy-7-deazaguanine synthase OS=Maricaulis salignorans OX=144026 GN=queE PE=3 SV=1
MKYSVKEIFMTVQGEGGQTGRPAVFLRFAGCNLWSGREQDRASAVCNFCDTDFIGMDGPGGGRFETPDDLVAAVAAMWPGGGRPLVVCTGGEPLLQLDARLIDALHAAGFDIAVETNGTLAAPDGIDWITVSPKGKAPVVQRSGHELKLVFPQPGLDPADYLGWDFKRFSLQPMDGPSMMENAQAAFEYCITHPQWTLSLQTHKWIGAP

SEQ ID NO: 31387 - protein, 210 aa, Maricaulis sp.
  REGION 1..210: note = tr|A0A2D7Y1E5|A0A2D7Y1E5_9RHOB 7-carboxy-7-deazaguanine synthase OS=Maricaulis sp.; OX = 1486257 GN=queE PE=3 SV=1
MSYSVKEAFLTVQGEGAQAGRPAVFLRFAGCNLWNGLERDRDNAVCNFCDTDFVGMDGPGGGRFTTPQDLVEHVQAYWPDAPGRKLVVCTGGEPLLQLDTPLIEALHAAGFEIAVETNGTIAAPDGIDWITVSPKGSAKVVQTSGDELKLVYPQPGLDPEDYTGWNFRRFSLQPMDGPDMMANAQAAFEYCLANPTWALSLQTHKWIGVD

SEQ ID NO: 31388 - protein, 209 aa, Maricaulis sp.
  REGION 1..209: note = tr|A0A1Q8FWP2|A0A1Q8FWP2_9RHOB 7-carboxy-7-deazaguanine synthase OS=Maricaulis sp. W15; OX = 1772333 GN=queE PE=3 SV=1
MTYSVKERFLTVQGEGAQAGRPAVFLRFAGCNLWSGREQDRHKAVCNFCDTDFVGMDGPGGGRFKTAEALVEAVAELWPGGGAPLVVCTGGEPLLQLDTPLIDALHARGFEIAVETNGTVKAPDGIDWITVSPKGKAPVVQTSGHELKLVYPQPELDPTAFEAWDFKRFSLQPMDGPQMMENAQAAFDYCLAHPKWSLSLQTHKWIGAP

SEQ ID NO: 31389 - protein, 213 aa, Marichromatium gracile
  REGION 1..213: note = tr|A0A4R4AGS6|A0A4R4AGS6_MARGR 7-carboxy-7-deazaguanine synthase OS=Marichromatium gracile OX=1048 GN=queE PE=3 SV=1
MSYAVKEVFYTLQGEGAQAGRAAVFCRFAGCNLWSGLERDRATARCRFCDTDFRGTDGAGGGYFVDAERLAAHIAACWPRDADPQAIPYVVCTGGEPALQLDAALIAALHAHGFEVGVESNGTLALPAGIDWVCISPKAGTELMVRRGDELKLVYPQPGAEPERYVGLAFEHRILQPLDDAERAAHTEAAAAHCLADPRWRLGIQMHKLVGLP

SEQ ID NO: 31390 - protein, 213 aa, Marichromatium purpuratum
  REGION 1..213: note = tr|W0E6C0|W0E6C0_MARPU 7-carboxy-7-deazaguanine synthase OS=Marichromatium purpuratum 984 OX=765910; GN = queE PE=3 SV=1
MSYAVKEVFYTLQGEGAQAGRAAVFCRFAGCNLWSGLERDRATARCRFCDTDFRGTDGEGGGHFADAEQLAAAIVACWPRAAALGATPYVVCTGGEPALQLDDVLVAALHARGFEVGVETNGTLALPGGIDWVCVSPKAGAELVVRRGDELKLIYPQPGAEPERYIALDFDHHVLQPLDDAERAVHTEAAAAYCLADPRWRLGIQMHKLVGLP

SEQ ID NO: 31391 - protein, 250 aa, unidentified
  source 1..250: note = Unknown
  REGION 1..250: note = tr|A0A1Q3GIV1|A0A1Q3GIV1_9BACT 7-carboxy-7-deazaguanine synthase OS=marine bacterium AO1-C OX=1905359 GN=queE PE=3 SV=1
MKIAKFNGKGEIFYTIQGEGKSLGKPTVFVRSSLCNLHCIWCDTDYTWNWDNTPHPHIFDDIPGYQKYRKEEQIIELTTTELIAEVTQYPCKNLVLTGGEPLLQQKEWIALMSQLRKLDANYWFEVETNGTLLPNQDFDKFIDQYNVSPKLENSNNPVKLREKPAVYEFFAQSPKAWFKFVIAEEQDLNEVLGLIDKYHIPAHKIYIMPEGTTPEKLNAKQQWLVEKCKQFGFNYTDRLHIHIYGSKRGV

SEQ ID NO: 31392 - protein, 219 aa, unidentified
  source 1..219: note = Unknown
  REGION 1..219: note = tr|A0Z4X6|A0Z4X6_9GAMM 7-carboxy-7-deazaguanine synthase OS=marine gamma proteobacterium HTCC2080; OX = 247639 GN=queE PE=3 SV=1
MTASTDPELRITEIFHSLQGEARSVGLPTVFVRLTGCPLRCVWCDTEYAFSGGKILALTQILQQIKSFSCPRVCVTGGEPLAQPESLPLLKQLCDEGYEVSLETSGALPIADVDRRVSRVMDLKAPDSGESHRNLWDNIAELTPHDQIKFVISSRRDYDWARFKVDELALAGRVGDILFSPTHGELQPRELAEWLLQDRVPGRFQLQLHKLLWNDAPGH

SEQ ID NO: 31393 - protein, 214 aa, unidentified
  source 1..214: note = Unknown
  REGION 1..214: note = tr|A0YEK3|A0YEK3_9GAMM 7-carboxy-7-deazaguanine synthase OS=marine gamma proteobacterium HTCC2143; OX = 247633 GN=queE PE=3 SV=1
MTDLRLTEIFYSLQGETRTVGLPTVFVRLTGCPLRCAYCDTEYAFHGGEKWSLQAIQEKVASYHPRYVTVTGGEPLAQPNCWPLLTALCDQGYEVSLETSGAISLLGVDSRVVKVMDLKTPASNEMSRNLYENIELLSPQDQIKFVICDRKDYEWARFKLDEHRLVDRVDEVLFSPSFGQIESAELAEWILADNLPVRFQVQLHKLLWNDAAGH

SEQ ID NO: 31394 - protein, 245 aa, unidentified
  source 1..245: note = Mariniblastus fucicola
  REGION 1..245: note = tr|A0A5B9PIA6|A0A5B9PIA6_9PLAN 7-carboxy-7-deazaguanine synthase OS=Mariniblastus fucicola OX=980251 GN=queE PE=3 SV=1
MLISEIYLSRQGEGRLTGTPSVFVRTSGCNLRCDFCDTPFTSWKPEGTQQSVSEVVDSVAQAASGPLPSRSGIEDQFDGPAAHVVLTGGEPMLAKEIESLCAALADATFHITIETAGTLDRMVDCDLMSISPKLSNSKPTEQRAGQWAAKHEATRYRPDVVASLVARHDYQLKFVVACETDVLEIESFLAEVGEIDRTKVLLMPEGIDAATLADRAQWLEPLCNDRGFSFCPRQHIFWYGNKRAT

SEQ ID NO: 31395 - protein, 209 aa, unidentified
  source 1..209: note = Marinicauda algicola
  REGION 1..209: note = tr|A0A4V3RYJ5|A0A4V3RYJ5_9RHOB 7-carboxy-7-deazaguanine synthase OS=Marinicauda algicola; OX = 2029849 GN=queE PE=3 SV=1
MTYSVKEAFLTVQGEGGQAGRPAVFLRFAGCNLWSGLERDRASAVCNFCDTDFVGTDGQNGGRFRTADALADHVASLWPGGGRPLVVCTGGEPLLQLDRAAIDALHAAGFEIAVETNGTLEAPEGIDWICVSPKSTAPLKQTSGQELKLVYPQPDAPPEAFEHLDFETFRLQPMDGPNRMENAKAAFEYCLRHPRWHLSLQTHKWIGVD

SEQ ID NO: 31396 - protein, 209 aa, unidentified
  source 1..209: note = Marinicauda pacifica
  REGION 1..209: note = tr|A0A4S2HB95|A0A4S2HB95_9RHOB 7-carboxy-7-deazaguanine synthase OS=Marinicauda pacifica; OX = 1133559 GN=queE PE=3 SV=1
MTYSVKEAFLTVQGEGGQTGRPAVFLRFAGCNLWTGLERDRETAICRFCDTDFVGTDGQNGGKFKTAEALAEHVLSFWPGGGRPLVVCTGGEPLLQLDPALIDALHARGFEVAVETNGTIAAPAGLDWICVSPKSTAPLVQTRGHELKLVFPQADAPPEAFEHLDFETFRLQPMDGPEQMANAKQAFEYCLRHPKWALSLQTHKWIGVD

SEQ ID NO: 31397 - protein, 209 aa, unidentified
  source 1..209: note = Marinicauda sp.
  REGION 1..209: note = tr|A0A2U2BRW6|A0A2U2BRW6_9RHOB 7-carboxy-7-deazaguanine synthase OS=Marinicauda sp. WD6-1; OX = 2135793 GN=queE PE=3 SV=1
MTYSVKEMFLTVQGEGGQAGRPAVFLRFAGCNLWSGLERDRASAVCDFCDTDFVGTDGPGGGKFVDAEALANAVAEKWPGGGEPLVVCTGGEPLLQLDPGLIDALHGEGFEIAVETNGTIEAPAGLDWICVSPKSTAPLKQTTGDELKLVYPQADAPPEAFEHLDFRTFRLQPMDGHDRDTNAQAAYEYCLAHPKWRLSLQTHKWIGAP

SEQ ID NO: 31398 - protein, 209 aa, unidentified
  source 1..209: note = Marinicaulis flavus
  REGION 1..209: note = tr|A0A2S7KA11|A0A2S7KA11_9PROT 7-carboxy-7-deazaguanine synthase OS=Marinicaulis flavus; OX = 2058213 GN=queE PE=3 SV=1
MSYAVKELFYTLQGEGAQAGRPAVFLRFAGCNLWSGLERDRADAVCTFCDTDFIGVDGPGGGKFADAEALAAAVAKAWPGGGRPYVVCTGGEPLLQLDAALIETLHDEGFEIGVETNGTLAAPGGVDWLCVSPKSTAPLVQTSGNELKLVYRQKDAPPEAFEDLAFDFFFLQPMDGPSRAAETAAAVEYCRRHPQWRLSLQTHKIVGIP

SEQ ID NO: 31399 - protein, 218 aa, Marinicella litoralis
  REGION 1..218: note = tr|A0A4R6XUB9|A0A4R6XUB9_9GAMM 7-carboxy-7-deazaguanine synthase OS=Marinicella litoralis; OX = 644220 GN=queE PE=3 SV=1
MKPNRDQQLKIFEIFHSLQGESHFVGLPTVFVRLTGCPLRCTWCDTEYAFFGGQWMTFDDIIKQVKQHNTPYVCVTGGEPLAQKRVFPLMDRLVAEGLTVSLETAGSLSVEKVNPAVHKVLDLKAPGSGEVSKNLYENLALLTPKDQVKFVIADEADYLWSKQTMDKYKLNEQCQILMSPVADVLPAKQLAEWILADQLNVRFQIQLHKHLWGDIPGT

SEQ ID NO: 31400 - protein, 211 aa, unidentified
  source 1..211: note = Marinifilaceae bacterium
  REGION 1..211: note = tr|A0A434AFA4|A0A434AFA4_9BACT 7-carboxy-7-deazaguanine synthase OS=Marinifilaceae bacterium T3-2 S1-C OX=2487017 GN=queE PE=3 SV=1
MKDKYKEIFDKGTDLPLVEDFYTIQGEGFHTGKPAYFIRIGGCDIGCRWCDSKISWNPAEHRLISVEEVVRKAVESPAKAVVVTGGEPSLYNLEPLCTELKKHNIENFLETSGAYEISGEWDWICLSPKRNKLPEKSSYQKANELKVIIYDLEKDFEWAEELSKHVSDDCLLYLQSEWSQYVHNVKPIVEYVKNNPKWNISLQAHKFMRIP

SEQ ID NO: 31401 - protein, 211 aa, unidentified
  source 1..211: note = Marinifilum breve
  REGION 1..211: note = tr|A0A2V3ZUJ5|A0A2V3ZUJ5_9BACT 7-carboxy-7-deazaguanine synthase OS=Marinifilum breve; OX = 2184082 GN=queE PE=3 SV=1
MKDKYKEIFDKGTDLPLVEDFYTIQGEGYHTGKPAYFIRIGGCDIGCRWCDSKISWNPAEHRLISVEEVVRKAVESPAKSVVVTGGEPSLYNLEPLCTELKKHNIENFLETSGAYEISGEWDWICLSPKRNKLPVPSSYQKANELKVIIYDLEKDFEWAEELAKNVGDDCLLYLQSEWSQYVHNVKPIVEYVKNNPKWNISLQSHKFMRIP

SEQ ID NO: 31402 - protein, 228 aa, unidentified
  source 1..228: note = Marinifilum flexuosum
  REGION 1..228: note = tr|A0A419X972|A0A419X972_9BACT 7-carboxy-7-deazaguanine synthase OS=Marinifilum flexuosum; OX = 1117708 GN=queE PE=3 SV=1
MLNSHSFKIVLQEKKKVLKDKYKEIFDKGTDLPLVEDFYTIQGEGYHTGKPAYFIRIGGCDIGCRWCDSKISWNPAEHRLISVEEVVRKAVESPAKSVVVTGGEPSLYNLEPLCTELKKHNIENFLETSGAYEISGEWDWICLSPKRNKLPVPSSYQKANELKVIIYDLEKDFEWAEELAENVGDDCLLYLQSEWSQYVHNVKPIVEYVKNNPKWNISLQSHKFMRIP

SEQ ID NO: 31403 - protein, 209 aa, Mariniflexile fucanivorans
  REGION 1..209: note = tr|A0A4R1RMA7|A0A4R1RMA7_9FLAO 7-carboxy-7-deazaguanine synthase OS=Mariniflexile fucanivorans OX=264023 GN=queE PE=3 SV=1
MNKDIQSLVDKGDMLPLMEEFYTIQGEGFHKGTAAYFVRIGGCDVGCHWCDVKESWNANLHPPTDISKIVENAKKYSKTIVITGGEPLTWNMTPLTTKLKAEGLQIHIETSGAYKLTGIWDWICLSPKKMKLPTKEVYEKAHELKVIVYNKDDFRFAEEQSAKVNKDCILYLQPEWSKRDKVIPEIVDYVMANPQWKVSLQTHKYLNIP

SEQ ID NO: 31404 - protein, 209 aa, Mariniflexile sp.
  REGION 1..209: note = tr|A0A385BL62|A0A385BL62_9FLAO 7-carboxy-7-deazaguanine synthase OS=Mariniflexile sp. TRM1-10 OX=2027857 GN=queE PE=3 SV=1
MNKEIKKLVDTGNMLPLMEEFYTIQGEGFHKGTAAYFVRIGGCDVGCHWCDVKESWNANLHPPTDILKIVENAKKYSNTIVVTGGEPLTWDMTPLTTKLKAEGLQIHIETSGAYKLTGIWDWICLSPKKIKLPTKEVYAKAHELKVIVYNKDDFRFAEEQAAKVNKDCILYLQPEWSKRDKVIPEIVDYVMANPKWKVSLQTHKYLNIP

SEQ ID NO: 31405 - protein, 285 aa, Marinilabilia salmonicolor
  REGION 1..285: note = tr|A0A2T0XPT1|A0A2T0XPT1_9BACT 7-carboxy-7-deazaguanine synthase OS=Marinilabilia salmonicolor OX=989 GN=queE PE=3 SV=1
MNKIVLANEGVFPITKDKHGKPLKSIPATGMKTSGTIQGEGKLAGVPSLFIRLAGCNLRCMWSLPDGSFCRCDTPYASFEAEQELQLSQEDIFTLVQHNIGNLNHVVLTGGEPMLQHRHLAMLSARLKEELQLHLSIETNGTIFAEDVAQHIDLFSISPKLKNSNPSAQKLAAYGLKPNGPLTYHAEKRRNIEVLQKYIDFCNASGKELQLKFVVGQPNDYIEIKEEFLAHLNNWNPADILLMPLGATPEELKTTSAMVAEMAISNGWRYAPRLHIDLFGSKAGV

SEQ ID NO: 31406 - protein, 285 aa, Marinilabilia salmonicolor
  REGION 1..285: note = tr|A0A368USG9|A0A368USG9_9BACT 7-carboxy-7-deazaguanine synthase OS=Marinilabilia salmonicolor OX=989 GN=queE PE=3 SV=1
MSKIVLANEGVFPITKDKHDNPLKSIPATGMKTSGTIQGEGKLAGVPSLFIRLAGCNLRCMWSLPDGSFCRCDTPYASFEAEQELQLSQEDIFTLVQHNIGNLNHVVLTGGEPMLQHRHLAMLSGRLKEELQLHLSIETNGTIFAEDVAQHIDLFSISPKLKNSNPSAQKLAAYGLKPNGPLTYHAEKRRNIEVLQKYIDFCNASGKELQLKFVVGQPNDYIEIKEEFLAHLNNWNPADILLMPLGATPEELKTTSVMVAEMAISNGWRYAPRLHIDLFGSKAGV

SEQ ID NO: 31407 - protein, 285 aa, Marinilabilia sp.
  REGION 1..285: note = tr|A0A2U2BCK1|A0A2U2BCK1_9BACT 7-carboxy-7-deazaguanine synthase OS=Marinilabilia sp. WTE; OX = 2162893 GN=queE PE=3 SV=1
MSKLVLANEGVFPITKDQNGQALKDCPATGLSISGTIQGEGKLAGVPSLFIRLASCNLRCMWELPDGSLCRCDTPYASFEAEQDLQLDTEAVFNLVKNNIGDLKHVVLTGGEPMLQHKALSTLAGRLKEELRLHLSIETNGTIFAEDVAKYIDLFSISPKLSNSDPNPGKLDHYELKQSGPLNYHPQKRKNIAVLQKFIAYCKDNGKEMQLKFVVGKHDDHQEIKEEFIAPLNDLPPTDVMLMPLGATKEELALTSKMVLEMAIKNGWRYAPRLHIDLFGPKAGV

SEQ ID NO: 31408 - protein, 286 aa, unidentified
  source 1..286: note = Marinilabiliaceae bacterium
  REGION 1..286: note = tr|A0A359FZK1|A0A359FZK1_9BACT 7-carboxy-7-deazaguanine synthase OS=Marinilabiliaceae bacterium OX=2053574 GN=queE PE=3 SV=1
MKNIISLAEEALFPIVKDIEGNTIEQAPATGFSIAGTIQGEGKLAGVPSLFIRFSSCNLRCIWKLPEGGLSRCDTPYASFDNHRVKHLSPEELLMLVKQNLGQIRHIVISGGEPLLQKDALFDLSALLKSELGLHITLETNGTIFNREACEHIDLFSISPKLENSTPDPSKLAALGLNPSGPLNYHGSNRLNLKALQSFLDLCNSSGKELQLKFVVARPEEEKEIIEDYLQKLSGWHASDVLLMPLGATVEELKQTTLMAMEMAVRNGWRYSPRIHIDLFGSKPGV

SEQ ID NO: 31409 - protein, 150 aa, unidentified
  source 1..150: note = Marinilabiliaceae bacterium
  REGION 1..150: note = tr|A0A353U3C2|A0A353U3C2_9BACT 7-carboxy-7-deazaguanine synthase QueE (Fragment); OS = Marinilabiliaceae bacterium OX=2053574 GN=DDW62_13290; PE = 4 SV=1
NSSGKELLFNREACEHIDLFSISPKLENSTPDPSKLAALGLNPSGPLNYHGSNRLNLKALQSFLDLCNSSGKELQLKFVVARPEEEKEIIEDYLQKLSGWHASDVLLMPLGATVEELKQTTLMAMEMAVRNGWRYSPRIHIDLFGSKPGV

SEQ ID NO: 31410 - protein, 193 aa, unidentified
  source 1..193: note = Marinilabiliales bacterium
  REGION 1..193: note = tr|A0A2J6HKT7|A0A2J6HKT7_9BACT 7-carboxy-7-deazaguanine synthase OS=Marinilabiliales bacterium OX=2053303 GN=queE PE=3 SV=1
MEDFYTLQGEGYNMGKAAYFVRIGGCDVGCSWCDTKQSWNARLFPPVAIEDIISKATNMPAKTIVVTGGEPSLYPLDYFTDRLRREGVKTMVETSGAYELTGTWDWVCLSPKKQSPPLQQNLDRADELKVIIQKEEDLRWAEANASKVNPECLLFLQPEWSKRDEIMDTLTNYVMANTQWSISLQAHKYMRIP

SEQ ID NO: 31411 - protein, 210 aa, unidentified
  source 1..210: note = Marinilabiliales bacterium
  REGION 1..210: note = tr|A0A351HJ95|A0A351HJ95_9BACT 7-carboxy-7-deazaguanine synthase OS=Marinilabiliales bacterium OX=2053303 GN=queE PE=3 SV=1
MKREELPGRGEGNVLPLVEQFYTLQGEGFHTGKAAYFIRIGGCDIGCRWCDSKVSWSPGIHQLVPVEDIVAKVLETPARAVVVTGGEPSLYNLNPLCDALKKHSIETFLETSGAYPLTGTWDWICLSPKRNMHPKPAIYQAADELKMIIYEPDDYLWAEECAKRIRLNCLRFLQPEWSRFSINIGPIVEYAKTHPDWMVSLQSHKFMRIP

SEQ ID NO: 31412 - protein, 200 aa, unidentified
  source 1..200: note = Marinimicrobia bacterium
  REGION 1..200: note = tr|A0A101IAI2|A0A101IAI2_9BACT 7-carboxy-7-deazaguanine synthase OS=Marinimicrobia bacterium 46_43 OX=1635280 GN=queE PE=3 SV=1
MGNTHKQSCAYPVNDIFSSIQGEGFWTGLPVTFIRFAGCNLACDFCDTDYSMKEILTADEILRRLESWPAPTVVLTGGEPLIHPLKPLLKRLQSAHYRIHLETNGTFSVPEGFFDWIAVSPKTDMPVLRECNELRVLLKKGEVPRDFNIRAEHYFVSPLNPSLNNPQKFDHDNLCYCLEYVLGHPKWRLNVQLHKYLDIP

SEQ ID NO: 31413 - protein, 200 aa, unidentified; identical to SEQ ID NO: 31412
  source 1..200: note = Marinimicrobia bacterium
  REGION 1..200: note = tr|A0A117LL90|A0A117LL90_9BACT 7-carboxy-7-deazaguanine synthase OS=Marinimicrobia bacterium 46_47 OX=1635279 GN=queE PE=3 SV=1

SEQ ID NO: 31414 - protein, 216 aa, Marinimicrobium koreense
  REGION 1..216: note = tr|A0A3N1NTK6|A0A3N1NTK6_9GAMM 7-carboxy-7-deazaguanine synthase OS=Marinimicrobium koreense OX=306545 GN=queE PE=3 SV=1
MTDDSLRITEIFYSLQGEARTLGRPTVFVRLTGCPLRCHYCDSEYAFHGGERMTLASILEQVAGYQPQYICVTGGEPLAQPNCLPLLTQLCDAGYSVSLETSGAMPLDEADTRVSRVMDLKTPDSGELDKNRWENIPLLQPHDQVKFVLCSRGDYEWAKFKLDEYRLAERVDDVLFSPSFGQLEPRQLADWIVEDNLPVRFQIQIHKLLWGDAPGY

SEQ ID NO: 31415 - protein, 216 aa, Marinimicrobium sp.
  REGION 1..216: note = tr|A0A2D8WNQ7|A0A2D8WNQ7_9GAMM 7-carboxy-7-deazaguanine synthase OS=Marinimicrobium sp.; OX = 2024837 GN=queE PE=3 SV=1
MTDDSLRITEIFYSLQGEARTLGRPTVFVRLTGCPLRCHYCDSEYAFHGGERMTLASILEQVAGYQPQYICVTGGEPLAQPNCLPLLTQLCDAGYSVSLETSGAMPLDEVDTRVSRVMDLKTPDSGELDKNRWENIPLLQPHDQVKFVLCSRGDYEWAKFKLDEYRLAERVDDVLFSPSFGQLEPRQLADWIVEDNLPVRFQIQIHKLLWGDAPGY

SEQ ID NO: 31416 - protein, 242 aa, unidentified
  source 1..242: note = Marininema halotolerans
  REGION 1..242: note = tr|A0A1I6SML0|A0A1I6SML0_9BACL 7-carboxy-7-deazaguanine synthase OS=Marininema halotolerans OX=1155944 GN=queE PE=3 SV=1
MSNGWDLSNPDHYEKWKLPMVEVFETVEGEGSGAGFPTIFVRVFHCNLRCTWCDTPYSYAPAKPEYEATVKEIAAFAHRFASRRICFTGGEPLMHREKSAALLKALALPQKIDDVHIETNGAIDLIPFHDLRQQEPWGEKVRFVMDYKLPASGEADKMIHRNFNCLKERDEVKFVIGNQTDFLKAVDVIKSYHKQGQVLFSPVFEKLSPRKLVEWVLAHSLSNVRVSLQLHKFIWDPAERGV

SEQ ID NO: 31417 - protein, 242 aa, Marininema mesophilum
  REGION 1..242: note = tr|A0A1H3BA36|A0A1H3BA36_9BACL 7-carboxy-7-deazaguanine synthase OS=Marininema mesophilum; OX = 1048340 GN=queE PE=3 SV=1
MSKGWDLSKPDIYEQWKLPMVEVFETVEGEGSGAGFPTIFVRVFHCNLRCTWCDTPYSYAPAKPEYEASVKEIAASAHRFASQRICFTGGEPLMHQEKSAALLMALAMPNHIQDVHIETNGAIDLTPYDALRKQQPWGEKVRFVMDYKLPASGEAEKMVQSNFDRLTDRDEIKFVIGNEEDFRIAVDVIRRFHKRGQILFSPVFETLPPRKLVEWVLAHSLSKVRVSLQLHKFIWNPAERGV

SEQ ID NO: 31418 - protein, 209 aa, unidentified
  source 1..209: note = Mariniradius saccharolyticus
  REGION 1..209: note = tr|M7X9C8|M7X9C8_9BACT 7-carboxy-7-deazaguanine synthase OS=Mariniradius saccharolyticus AK6 OX=1239962; GN = queE PE=3 SV=1
MDELKNKVNEGLALPVMEAFYTIQGEGTHVGTAAYFIRLGGCDVGCVWCDVKESWDAGKWPILAIEEIVKGALEYPGRMVVITGGEPLMYPLGPLTKLLKAQGFRVHLETSGAHPFSGEFDWVCFSPKKFKKPHPSIYEKADELKVVVYHNSDFEFAETHAKNVADTCKKILQPEWGKQDQFLGKIIDYVKSHPIWKISLQTHKFMDIP

SEQ ID NO: 31419 - protein, 209 aa, unidentified
  source 1..209: note = Marinirhabdus gelatinilytica
  REGION 1..209: note = tr|A0A370QLW9|A0A370QLW9_9FLAO 7-carboxy-7-deazaguanine synthase OS=Marinirhabdus gelatinilytica OX=1703343 GN=queE PE=3 SV=1
MKTEVQESVEKGTMLPLMEEFYTIQGEGYHKGTAAYFIRVGGCDVGCHWCDVKESWNPNIHPPTDIVSIAENASKYAKTIVITGGEPLTWDMGPLTSLLKEKGMDTHIETSGAYKLSGTWDWVCLSPKKMKLPTPEVYAAANELKVIIYNNDDFRFAEEQAAKVSNDCKLYLQPEWSKRDKVIPKIVDYVMQHPKWVVSLQTHKYLNIP

SEQ ID NO: 31420 - protein, 220 aa, unidentified
  source 1..220: note = Marinisporobacter balticus
  REGION 1..220: note = tr|A0A4R2KGH7|A0A4R2KGH7_9CLOT 7-carboxy-7-deazaguanine synthase OS=Marinisporobacter balticus OX=2018667 GN=queE PE=3 SV=1
MYKVVEKFVSINGEGRRAGQLAVFIRFANCNLDCSYCDTAWANEDDVAYTLMTKEEIVEAIKATDVKNVTLTGGEPLLQDEIFELIDYLSKDQELFIEIETNGSVSIKEFSKITNRPLFTMDYKLPSSNMEEKMLIDNFHHIKKQDIVKFVVGSSSDLERARDIIDQYQLTKKSNVYISPVYGKIDLDAMVEFMKKYKMNEVTMQVQLHKIIWGAEAKGV

SEQ ID NO: 31421 - protein, 247 aa, unidentified
  source 1..247: note = Marinitenerispora sediminis
  REGION 1..247: note = tr|A0A368T2F1|A0A368T2F1_9ACTN 7-carboxy-7-deazaguanine synthase OS=Marinitenerispora sediminis OX=1931232 GN=queE PE=3 SV=1
MSAGSPTAAAAAAGPATLPLAEAFGPTLQGEGPAAGRTAWFVRFGGCNLSCSWCDSAYTWDASRYQLREEIRHTPVADIAAGVPDGALVVLTGGEPLLQQDSAAWLELLSGLRARGCTLHVETNGTIAPNADTRALVATFVVSPKLGNAGRHRGHQNPALHPGWAEAAGDGQAHLKVVCASDADVETAVGIARAHAWPSRQVWVMPEGTTVEALNARWPAVADAAARHGINASHRLHVLAWGDKRGH

SEQ ID NO: 31422 - protein, 199 aa, Marinithermus hydrothermalis
  REGION 1..199: note = tr|F2NQ96|F2NQ96_MARHT 7-carboxy-7-deazaguanine synthase OS=Marinithermus hydrothermalis (strain DSM 14884 / JCM 11576 / T1) OX=869210 GN=queE PE=3 SV=1
MRKGYPVVETFHSVQGEGHWTGTSAFFIRLAGCDVGCWFCDTKESWDMSQHPWRSVDALVAEAQAASPAIVVVTGGEPLMHDLTPLSRALRAAGLRAHLETSGAHPFSGAWDWVTLSPKKFRPPHPSVYPHVHELKVVVVNQSDLAWAETHAARVPPTALKYLQPEWSTEKSRQLILEYVLQHPEWRVSLQTHKVLGVR

SEQ ID NO: 31423 - protein, 218 aa, Marinobacter adhaerens
  REGION 1..218: note = tr|E4PIY1|E4PIY1_MARAH 7-carboxy-7-deazaguanine synthase OS=Marinobacter adhaerens (strain DSM 23420 / HP15) OX=225937 GN=queE PE=3 SV=1
MYRVKEAFYTLQGEGAQAGRAAVFCRFSKCNLWTGREKDRATAVCNFCDTDFVGTDGQNGGRFETPEELARHIRNLWPEAPGKPYVVCTGGEPLLQLDAPLIEALHREGFEVGVETNGTLPAPEGIDWLCVSPKADAPVVLEACDELKLVYPQPLAMPERFLGIRASHYFLSPMASPSIPETAVDEIKQSNTRRATDYCLAHPQWRLTLQMHKIIGID

SEQ ID NO: 31424 - protein, 218 aa, Marinobacter adhaerens; identical to SEQ ID NO: 31423
  REGION 1..218: note = tr|A0A353LAF6|A0A353LAF6_9ALTE 7-carboxy-7-deazaguanine synthase OS=Marinobacter adhaerens OX=1033846 GN=queE PE=3 SV=1

SEQ ID NO: 31425 - protein, 218 aa, Marinobacter algicola
  REGION 1..218: note = tr|A6F334|A6F334_9ALTE 7-carboxy-7-deazaguanine synthase OS=Marinobacter algicola DG893 OX=443152 GN=queE; PE = 3 SV=1
MYRVKEAFYTLQGEGAQAGRAAVFCRFSKCNLWTGREKDRANAVCSFCDTDFVGTDGQNGGQFETADALAAHIRRLWPDAPGRPYVVCTGGEPLLQLDDQLVDAFHRAGFEVGVETNGTLPAPSGIDWLCVSPKADAPVVLRQCDELKVVYPQPLAMPERFTDIQASHYFLSPMASPTVSEGEPDPIKQSNTRKATDYCLTHPRWRLTLQMHKIIGID

SEQ ID NO: 31426 - protein, 218 aa, unidentified
  source 1..218: note = Marinobacter antarcticus
  REGION 1..218: note = tr|A0A1M6PS26|A0A1M6PS26_9ALTE 7-carboxy-7-deazaguanine synthase OS=Marinobacter antarcticus OX=564117 GN=queE PE=3 SV=1
MYRVKEAFYTLQGEGAQAGRAAVFCRFSKCNLWTGREKDRATAVCDFCDTDFLGTDGQNGGAFETAEALSAHIRRLWPDAPGAPYVVCTGGEPLLQLDEKLIDAFHQQGFEVGVETNGTLPAPAGIDWLCVSPKANAPVVIEACDELKLVYPQPKAMPERFTHINARHFFLSPMASPSAPDNDTDPVKQSNTRKATDYCLAHPRWRLTLQMHKIIGID

SEQ ID NO: 31427 - protein, 218 aa, unidentified
  source 1..218: note = Marinobacter confluentis
  REGION 1..218: note = tr|A0A4Z1C8Q2|A0A4Z1C8Q2_9ALTE 7-carboxy-7-deazaguanine synthase OS=Marinobacter confluentis OX=1697557 GN=queE PE=3 SV=1
MYRVKEAFYTLQGEGAQAGRAAVFCRFSKCNLWTGREKDRAGSVCDFCDTDFVGTDGQNGGRFETAALLAAHIRNLWPDQPGAPYVVCTGGEPLLQLDKALIDAFHDSGFEVGVETNGTLPAPPGIDWLCVSPKADAPVVIDQCDELKLVYPQPLAMPERFTDMNARHFFLSPMASPTLVEGDSDPVKQSNTRKATDYCLANPRWRLTLQMHKIIGID

SEQ ID NO: 31428 - protein, 225 aa, Marinobacter daqiaonensis
  REGION 1..225: note = tr|A0A1I6IHJ8|A0A1I6IHJ8_9ALTE 7-carboxy-7-deazaguanine synthase OS=Marinobacter daqiaonensis OX=650891 GN=queE PE=3 SV=1
MYRVKEAFYTLQGEGAQAGRAAVFCRFSKCNLWTGREADRASAVCNFCDTDFVGTDGQNGGRFATAAELAGHVAALWPGDPMADVETGIRPYVVCTGGEPLLQLDEALIRAFHEQGFEVGVETNGTLPAPAGIDWLCVSPKADATVVIRECDELKLVYPQPLALPERFLEIQAQHYFLSPMASPSLPEDGRDPVKASNTRKAVDYCLKHPRWRLTLQMHKIVGID

SEQ ID NO: 31429 - protein, 218 aa, Marinobacter excellens
  REGION 1..218: note = tr|A0A0P7ZMX5|A0A0P7ZMX5_9ALTE 7-carboxy-7-deazaguanine synthase OS=Marinobacter excellens HL-55 OX=1305731 GN=queE PE=3 SV=1
MYRVKEAFYTLQGEGAQAGRAAVFCRFSKCNLWTGREKDRAGAVCDFCDTDFVGTDGQNGGRFESAAALAAHVRNLWPDKPGTPYVVCTGGEPLLQLDKPLIDALHTAGFEIGVETNGTLAAPDGIDWLCVSPKADAEVVITKCDELKLVYPQPLALPERFLGIRARHYFLSPMASPSAPEQSADPIKQSNTRKATEYCLAHPQWRLTLQMHKILGID

SEQ ID NO: 31430 - protein, 218 aa, Marinobacter excellens
  REGION 1..218: note = tr|A0A137SG92|A0A137SG92_9ALTE 7-carboxy-7-deazaguanine synthase OS=Marinobacter excellens LAMA 842 OX=1306954 GN=queE PE=3 SV=1
MYRVKEAFYTLQGEGAQAGRAAVFCRFSKCNLWTGREKDRAGAVCNFCDTDFVGTDGQNGGRFETAVELAEHIRKLWPDAPGRPYVVCTGGEPLLQLDKPLIDAFHASGFEVGVETNGTLPAPEGIDWLCVSPKADAEVVITECDELKLVYPQPLAQPERFLGIRARHYFLSPMASPSVPDQNDDPVKRSNTRKATEYCLAHPQWRLTLQMHKILGID

SEQ ID NO: 31431 - protein, 218 aa, Marinobacter flavimaris; identical to SEQ ID NO: 31423
  REGION 1..218: note = tr|A0A3D8H4D2|A0A3D8H4D2_9ALTE 7-carboxy-7-deazaguanine synthase OS=Marinobacter flavimaris OX=262076 GN=queE PE=3 SV=1

SEQ ID NO: 31432 - protein, 218 aa, unidentified
  source 1..218: note = Marinobacter fuscus
  REGION 1..218: note = tr|A0A2T1KTN1|A0A2T1KTN1_9ALTE 7-carboxy-7-deazaguanine synthase OS=Marinobacter fuscus; OX = 2109942 GN=queE PE=3 SV=1
MYRVKEAFYTLQGEGAQAGRAAVFCRFSKCNLWNGREKDRASAVCNFCDTDFVGTDGQNGGCFDSPQALAAHILALWPDAPGAPYVVCTGGEPLLQLDEPLIQALHEVGFEVGVETNGTLPAPEGIDWLCVSPKADAPVVITDCDELKLVYPQPLAPPERFLSVRAKHYFLSPMASPAVPDHEPDAIKQSNTRKATDYCLAHPQWRLTLQMHKILGID

SEQ ID NO: 31433 - protein, 218 aa, Marinobacter gudaonensis
  REGION 1..218: note = tr|A0A1I6H2Y8|A0A1I6H2Y8_9ALTE 7-carboxy-7-deazaguanine synthase OS=Marinobacter gudaonensis OX=375760 GN=queE PE=3 SV=1
MYRVKEAFYTLQGEGAQAGRAAVFCRFSKCNLWTGREKDRAGAVCNFCDTDFVGTDGQNGGRFETAEALALHIRGLWPHAGGRPYVVCTGGEPLLQLDGALIDAFHRQGLEVGVETNGTLPAPEGIDWLCVSPKADAEVVIRRCDEVKLVYPQPLALPERFLSISAQHYFLSPMASPSAPASGQDEIKQSNTRLATDYCLAHPQWRLTLQMHKIVGID

SEQ ID NO: 31434 - protein, 218 aa, Marinobacter guineae
  REGION 1..218: note = tr|A0A2G1VDN7|A0A2G1VDN7_9ALTE 7-carboxy-7-deazaguanine synthase OS=Marinobacter guineae; OX = 432303 GN=queE PE=3 SV=1
MYRVKEAFYTLQGEGAQAGRAAVFCRFSKCNLWTGREKDRASAVCNFCDTDFVGTDGQNGGRFESPEALARHVRSLWPNAPGKPYVVCTGGEPLLQLDTALIEAFHREGFEVGVETNGTLPAPAGIDWLCVSPKADAPVVVEACDELKLVYPQPLAMPERFLHIRASHYFLSPMASPSAPEGSVDGVKQSNTHLATEYCLAHPQWRLTLQMHKIIGID

SEQ ID NO: 31435 - protein, 218 aa, unidentified
  source 1..218: note = Marinobacter halophilus
  REGION 1..218: note = tr|A0A2T1KIU2|A0A2T1KIU2_9ALTE 7-carboxy-7-deazaguanine synthase OS=Marinobacter halophilus OX=1323740 GN=queE PE=3 SV=1
MYRVKEAFYTLQGEGAQAGRAAVFCRFSKCNLWTGREKDRAGAVCDFCDTDFVGTDGQNGGRFETPEALATHIHNLWPAAPGTPYVVCTGGEPLLQLDKLLIDAFHGAGFEIGVETNGTLAAPDGIDWLCVSPKADAEVVITECDELKLVYPQPLAPPEQFLGIRARHYFLSPMASPSVPEQGDDPVKRSNTRKATDYCLAHPQWRLTLQMHKILGID

SEQ ID NO: 31436 - protein, 218 aa, Marinobacter hydrocarbonoclasticus
  REGION 1..218: note = tr|A0A506TXI0|A0A506TXI0_MARHY 7-carboxy-7-deazaguanine synthase OS=Marinobacter hydrocarbonoclasticus OX=2743 GN=queE PE=3 SV=1
MYRVKEAFYTLQGEGAQAGRAAVFCRFSKCNLWTGREKDRANAVCNFCDTDFVGTDGQNGGRFATPDALAAHIRSLWPDAPGRPYVVCTGGEPLLQLDEPLITAFHRAGFEVGVETNGTLPAPEGIDWLCVSPKADAEVVIAECDELKLVYPQPLAPPERFLHIRARHYFLSPMASPSVPEGGPDAIKQSNTRKATDYCLSHPQWRLTLQMHKILGID

SEQ ID NO: 31437 - protein, 218 aa, Marinobacter hydrocarbonoclasticus; identical to SEQ ID NO: 31430
  REGION 1..218: note = tr|A0A455W7X8|A0A455W7X8_MARHY 7-carboxy-7-deazaguanine synthase OS=Marinobacter hydrocarbonoclasticus OX=2743 GN=queE PE=3 SV=1

SEQ ID NO: 31438 - protein, 218 aa, Marinobacter lipolyticus
  REGION 1..218: note = tr|R8B0M2|R8B0M2_9ALTE 7-carboxy-7-deazaguanine synthase OS=Marinobacter lipolyticus SM19 OX=1318628; GN = queE PE=3 SV=1
MYRVKEAFYTLQGEGAQAGRAAVFCRFSKCNLWTGREKDRAGSVCDFCDTDFVGTDGQNGGTFATAAALASHIRSLWPDAPGRPYVVCTGGEPLLQLDTDLIAAFHDQGFEIGVETNGTLPAPEGIDWLCVSPKADAPVVIERCDELKLVYPQPKAMPERFGHIQAQHYFLSPMASPSAPETGVDPLKQSNTRKATEYCLAHPQWRLTLQMHKIVGID

SEQ ID NO: 31439 - protein, 219 aa, Marinobacter litoralis
  REGION 1..219: note = tr|A0A3M2RCS8|A0A3M2RCS8_9ALTE 7-carboxy-7-deazaguanine synthase OS=Marinobacter litoralis OX=187981 GN=queE PE=3 SV=1
MYRVKEAFYTLQGEGAQAGRAAVFCRFSKCNLWNGRERDRANAVCNFCDTDFVGTDGQNGGVFETAEALAAHIRALWPEGLGKPYVVCTGGEPLLQLDTELIAAFHDANFEVGVETNGTLPAPEGIDWLCVSPKADAEVVITRCDELKLVYPQPLAMPERFIGVIQANHYFLSPMASPSLPEQAADPVKQSNTRKATDYCLANPQWRLTLQMHKIIGID

SEQ ID NO: 31440 - protein, 218 aa, Marinobacter lutaoensis
  REGION 1..218: note = tr|A0A1V2DVJ9|A0A1V2DVJ9_9ALTE 7-carboxy-7-deazaguanine synthase OS=Marinobacter lutaoensis OX=135739 GN=queE PE=3 SV=1
MYRVKEAFYTLQGEGAQAGRAAVFCRFSKCNLWNGRERDRARAVCSFCDTDFVGTDGQNGGVFETAEALADHLWRLWPSAPGRPYVVCTGGEPLLQLDDALVAALHRRGFEVGVETNGTLSPPAGIDWLCVSPKADAPVVVDRCDELKLVFPQPLAMPERFEHIQARHYFLSPMASPAAPASGEDTVKLANTRKATEYCLAHPRWRLTLQMHKLIGID

SEQ ID NO: 31441 - protein, 218 aa, unidentified; identical to SEQ ID NO: 31423
  source 1..218: note = Marinobacter manganoxydans
  REGION 1..218: note = tr|G6YZ25|G6YZ25_9ALTE 7-carboxy-7-deazaguanine synthase OS=Marinobacter manganoxydans MnI7-9 OX=1094979; GN = queE PE=3 SV=1

SEQ ID NO: 31442 - protein, 218 aa, Marinobacter mobilis
  REGION 1..218: note = tr|A0A1H3CDB5|A0A1H3CDB5_9ALTE 7-carboxy-7-deazaguanine synthase OS=Marinobacter mobilis; OX = 488533 GN=queE PE=3 SV=1
MYRVKEAFYTLQGEGAQSGRAAVFCRFSKCNLWNGREQDRASAVCNFCDTDFVGTDGQNGGRFESAEALAAHIRRLWPGEQGRPYVVCTGGEPLLQLDEPLIAAFHQAGLEVGVETNGTLPAPAGIDWLCVSPKADAEVVIRRCNELKLVYPQPLALPDRFVDIEADHYFLSPMASPSLPEDGPDPVKQSNTRKATDYCLQHPRWRLTLQMHKIVGID

SEQ ID NO: 31443 - protein, 223 aa, unidentified
  source 1..223: note = Marinobacter nanhaiticus
  REGION 1..223: note = tr|N6X224|N6X224_9ALTE 7-carboxy-7-deazaguanine synthase OS=Marinobacter nanhaiticus D15-8W OX=626887; GN = queE PE=3 SV=1
MYRVKEAFYTLQGEGAQAGRAAVFCRFSKCNLWNGREADRAWAVCNFCDTDFVGTDGQNGGKFVDADALANHIAGLWPHDPAASGTLKPYVVCTGGEPLLQLDEPLIEAFHARGFEVGVETNGTLPAPVGLDWLCVSPKADAKVVIERCNELKLVYPQPLAMPERFAHIRADHYFLSPMASPSVPDDGADALKKSNTRRATDYCLAHPQWRLTLQMHKIVGID

SEQ ID NO: 31444 - protein, 218 aa, unidentified
  source 1..218: note = Marinobacter nitratireducens
  REGION 1..218: note = tr|A0A072MYR6|A0A072MYR6_9ALTE 7-carboxy-7-deazaguanine synthase OS=Marinobacter nitratireducens OX=1137280 GN=queE PE=3 SV=1
MYRVKEAFYTLQGEGAQAGRAAVFCRFSKCNLWNGREKDRADAVCNFCDTDFVGTDGQNGGQFETADALAAHIRSLWPEASGRPYVVCTGGEPLLQLDERLIEAFHQQGFEVGVETNGTLPAPAGIDWLCVSPKADAEVVIKSCNELKLVFPQPLAPPERFLDIRAEHYFLSPMASPTLPDDGLDSVKQSNTRRATDYCLSHPRWRLTLQMHKIVGID

SEQ ID NO: 31445 - protein, 218 aa, Marinobacter pelagius
  REGION 1..218: note = tr|A0A366GQI8|A0A366GQI8_9ALTE 7-carboxy-7-deazaguanine synthase OS=Marinobacter pelagius; OX = 379482 GN=queE PE=3 SV=1
MYRVKEAFYTLQGEGAQAGRAAVFCRFSKCNLWTGREKDRASAVCDFCDTDFVGTDGQNGGRFETADDLARHIRSLWPEAPGCPYVVCTGGEPLLQLDEALIDALHRAGFEVGVETNGTLPAPAGIDWLCVSPKADAPVVIEACDELKLVYPQPLAMPERFEHIRARHYFLSPMASPSLPATGDDPVKQSNTRKATDYCLAHPRWRLTLQMHKIIGID

SEQ ID NO: 31446 - protein, 218 aa, Marinobacter pelagius
  REGION 1..218: note = tr|A0A1I4RU56|A0A1I4RU56_9ALTE 7-carboxy-7-deazaguanine synthase OS=Marinobacter pelagius; OX = 379482 GN=queE PE=3 SV=1
MYRVKEAFYTLQGEGAQAGRAAVFCRFSKCNLWTGREKDRVSAVCDFCDTDFVGTDGQNGGRFETADELARHIRSLWPEAPGRPYVVCTGGEPLLQLDEALIDAFHRAGFEVGVETNGTLPAPAGIDWLCVSPKADAPVVIEACDELKLVYPQPLAMPERFEHIRARHYFLSPMASPSLPATGDDPVKQSNTRKATDYCLAHPRWRLTLQMHKIIGID

SEQ ID NO: 31447 - protein, 218 aa, unidentified
  source 1..218: note = Marinobacter persicus
  REGION 1..218: note = tr|A0A2S6GAA7|A0A2S6GAA7_9ALTE 7-carboxy-7-deazaguanine synthase OS=Marinobacter persicus; OX = 930118 GN=queE PE=3 SV=1
MYRVKEAFYTLQGEGAQAGRAAVFCRFSKCNLWTGREKDRASAVCNFCDTDFVGTDGQNGGRFDTPEQLAEHIRKLWPDAPGNPYVVCTGGEPLLQLDEPLIKAFQQAGFEVGVETNGTLPAPAGIDWLCVSPKADAPVVITECDELKLVYPQPLAPPERFEHIHARHYFLSPMAAPSVPEQGDDPVRQSNTRKATDYCLAHPRWRLTLQMHKIIGID

SEQ ID NO: 31448 - protein, 219 aa, unidentified
  source 1..219: note = Marinobacter persicus
  REGION 1..219: note = tr|A0A1I3VB80|A0A1I3VB80_9ALTE 7-carboxy-7-deazaguanine synthase OS=Marinobacter persicus; OX = 930118 GN=queE PE=3 SV=1
MYRVKEAFYTLQGEGAQAGRAAVFCRFSKCNLWTGREKDRASAVCTFCDTDFVGTDGQNGGQFETARALAEHIRGLWPHAEGKPYVVCTGGEPLLQLDAPLIEALHEAGFEIGVETNGTLPAPAGIDWLCVSPKADAEVVIAECDELKLVYPQSLAPPERFEHIRARHYFLSPMASPSAPDGESTDPVRQSNTAKATAYCLAHPRWRLTLQMHKIIGID

SEQ ID NO: 31449 - protein, 218 aa, Marinobacter psychrophilus
  REGION 1..218: note = tr|A0A0H4HWR4|A0A0H4HWR4_9ALTE 7-carboxy-7-deazaguanine synthase OS=Marinobacter psychrophilus OX=330734 GN=queE PE=3 SV=1
MYRVKEAFYTLQGEGAQAGRAAVFCRFSKCNLWTGREKDRATSVCDFCDTDFVGTDGQNGGVFATPEALAAHIAGLWPVAPGKPYVVCTGGEPLLQLDSPLINALHQAGFEIGVETNGTLPAPAGIDWLCVSPKADAPVVIERCNELKLVYPQPKATPELFLHIQADHFFLSPMASPSAPETSTDVIKQSNTRKATDYCLANPRWRLTLQMHKIIGID

SEQ ID NO: 31450 - protein, 218 aa, unidentified
  source 1..218: note = Marinobacter salarius
  REGION 1..218: note = tr|W5YNZ3|W5YNZ3_9ALTE 7-carboxy-7-deazaguanine synthase OS=Marinobacter salarius OX=1420917 GN=queE PE=3; SV = 1
MYRVKEAFYTLQGEGAQAGRAAVFCRFSKCNLWTGREKDRANAVCSFCDTDFVGTDGQNGGQFETADALAAHIRRLWPDAPGQPYVVCTGGEPLLQLDDKLVDAFHRAGFEVGVETNGTLPAPSGIDWLCVSPKADAPVVLRQCDELKVVYPQPLAMPERFTDINASHYFLSPMASPTVSEGEPDPVKQSNTRKATDYCLTHPQWRLTLQMHKIIGID

SEQ ID NO: 31451 - protein, 218 aa, unidentified
  source 1..218: note = Marinobacter salarius
  REGION 1..218: note = tr|A0A1W6K487|A0A1W6K487_9ALTE 7-carboxy-7-deazaguanine synthase OS=Marinobacter salarius; OX = 1420917 GN=queE PE=3 SV=1
MYRVKEAFYTLQGEGAQAGRAAVFCRFSKCNLWTGREKDRANAVCSFCDTDFVGTDGQNGGQFETADALAAHIRRLWPDAPGQPYVVCTGGEPLLQLDDKLVDAFHRAGFEVGVETNGTLPAPSGIDWLCVSPKADAPVVLRQCDELKVVYPQPLAMPERFTDINASHYFLSPMASPTVSEGETDPVKQSNTRKATDYCLTHPQWRLTLQMHKIIGID

SEQ ID NO: 31452 - protein, 218 aa, unidentified
  source 1..218: note = Marinobacter salinus
  REGION 1..218: note = tr|A0A1D9GP87|A0A1D9GP87_9ALTE 7-carboxy-7-deazaguanine synthase OS=Marinobacter salinus; OX = 1874317 GN=queE PE=3 SV=1
MYRVKEAFYTLQGEGAQAGRAAVFCRFSKCNLWSGREKDRASAVCNFCDTNFVGTDGQNGGRFETPTALAAHIRRLWPDAPGQPYVVCTGGEPLLQLDEPLIEAFHREGFEIGVETNGTLPAPKGIDWLCVSPKADAAVVIETCDELKLVYPQPQAMPERFLAIRARHYFLSPMASPVAEESGGDPVQLSNTRKATDYCLAHPRWRLTLQMHKIIGID

SEQ ID NO: 31453 - protein, 218 aa, Marinobacter santoriniensis
  REGION 1..218: note = tr|M7CNB3|M7CNB3_9ALTE 7-carboxy-7-deazaguanine synthase OS=Marinobacter santoriniensis NKSG1 OX=1288826; GN = queE PE=3 SV=1
MYRVKEAFYTLQGEGAQAGRAAVFCRFSKCNLWTGREKDRANAVCNFCDTDFVGTDGQNGGRFETAEAMADHIQRLWPDAAGRPYVVCTGGEPLLQLDEPLIAALHHRGFEVGVETNGTLPAPAGIDWLCVSPKADAEVVIESCDELKLVYPQPLAMPERFEHIHAHHYFLSPMASPSAPAAGDDPVKQSNTRKATDYCLAHPRWRLTLQMHKIIGID

SEQ ID NO: 31454 - protein, 225 aa, Marinobacter segnicrescens
  REGION 1..225: note = tr|A0A1I0I2D8|A0A1I0I2D8_9ALTE 7-carboxy-7-deazaguanine synthase OS=Marinobacter segnicrescens OX=430453 GN=queE PE=3 SV=1
MYRVKEAFYTLQGEGAQAGRAAVFCRFSKCNLWNGREADRADAVCNFCDTDFVGTDGQNGGQFETAEALVEHVASLWPFDIAEGRQQGVVPYVVCTGGEPLLQLDAPLIAAFHDQGFEVGVETNGTLPAPLGIDWLCVSPKADAKVVIRECDELKLVYPQPLAMPERFLSIRARHYFLSPMASPAMPESGADPVKASNTRKAVDYCLRHPRWRLTIQMHKVVGID

SEQ ID NO: 31455 - protein, 218 aa, unidentified
  source 1..218: note = Marinobacter shengliensis
  REGION 1..218: note = tr|A0A2T1KU89|A0A2T1KU89_9ALTE 7-carboxy-7-deazaguanine synthase OS=Marinobacter shengliensis OX=1389223 GN=queE PE=3 SV=1
MYRVKEAFYTLQGEGAQAGRAAVFCRFSKCNLWTGREKDRAAAVCNFCDTDFVGTDGQNGGRFETAVELAEHIRKLWPGAPGQPYVVCTGGEPLLQLDQPLIDAFHAAGFEVGVETNGTLPAPEGIDWLCVSPKADAEVVITQCDELKLVYPQPLAQPERFLGIRARHYFLSPMASPSVPDQGDDPVKRSNTQKATEYCLAHPQWRLTLQMHKILGID

SEQ ID NO: 31456 - protein, 220 aa, Marinobacter sp.
  REGION 1..220: note = tr|A0A1E7PWI3|A0A1E7PWI3_9ALTE 7-carboxy-7-deazaguanine synthase OS=Marinobacter sp. X15-166B OX=1897620 GN=queE PE=3 SV=1
MYRVKEAFYTLQGEGAQAGRAAVFCRFSKCNLWTGRERDRATAVCNFCDTDFVGTDGQNGGRFASAEALAEHLRALWPASSPGGRPYVVCTGGEPLLQLDEPLIAALHARGFEVGVETNGTLPAPAGIDWLCVSPKAAAEVVIEQCDELKLVYPQPLAMPERFTGIAARHYFLSPMASPSVPDQGEDPVKQSNTRKATEYCLAHPQWRLTLQMHKIIGID

SEQ ID NO: 31457 - protein, 218 aa, Marinobacter sp.; identical to SEQ ID NO: 31423
  REGION 1..218: note = tr|A0A3N1R0Y1|A0A3N1R0Y1_9ALTE 7-carboxy-7-deazaguanine synthase OS=Marinobacter sp. 3-2; OX = 2485141 GN=queE PE=3 SV=1

SEQ ID NO: 31458 - protein, 218 aa, unidentified
  source 1..218: note = Marinobacter subterrani
  REGION 1..218: note = tr|A0A0J7J3Z7|A0A0J7J3Z7_9ALTE 7-carboxy-7-deazaguanine synthase OS=Marinobacter subterrani OX=1658765 GN=queE PE=3 SV=1
MYRVKEAFYTLQGEGAQAGRAAVFCRFSKCNLWTGREKDRASAICNFCDTDFVGTDGQNGGRFDSPDALARHIRALWPDAPGKPYVVCTGGEPLLQLDTALIEAFHRAGLEVGVETNGTLPAPEGIDWLCVSPKADAPVVIDTCDELKLVYPQPLAMPERFLGIRASHYFLSPMASPAVPETAVDEIKQSNTRRATDYCLAHPQWRLTLQMHKIIGID

SEQ ID NO: 31459 - protein, 218 aa, Marinobacter vinifirmus
  REGION 1..218: note = tr|A0A558BI36|A0A558BI36_9ALTE 7-carboxy-7-deazaguanine synthase OS=Marinobacter vinifirmus OX=355591 GN=queE PE=3 SV=1
MYRVKEAFYTLQGEGAQAGRAAVFCRFSKCNLWNGREQDRATAVCNFCDTDFVGTDGQNGGRFETAEALAAHIRSLWPDAPGKPYVVCTGGEPLLQLDEPLLAAFHAEGFEVGVETNGTLPAPDGIDWLCVSPKADAGVVITECDELKLVFPQPLAPPERFLGIRARHYFLSPMASPSVPDQGNDPVKQSNTRKATDYCLAHPQWRLTLQMHKILGID

SEQ ID NO: 31460 - protein, 218 aa, Marinobacter zhejiangensis
  REGION 1..218: note = tr|A0A1I4LY38|A0A1I4LY38_9ALTE 7-carboxy-7-deazaguanine synthase OS=Marinobacter zhejiangensis OX=488535 GN=queE PE=3 SV=1
MYRVKEAFYTLQGEGAQSGRAAVFCRFSKCNLWNGREQDRAAAVCNFCDTDFVGTDGQNGGRFETADALANHIRQLWPAGEGRPYVVCTGGEPLLQLDEALIAAFHQAGFEVGVETNGTLPAPAGIDWLCVSPKADAEVVIRECNEVKLVYPQPLALPERFTDIQAEHYFLSPMASPSLLEGGLDPVKQSNTRKATDYCLKHPRWRLTLQMHKIVGID

SEQ ID NO: 31461 - protein, 210 aa, unidentified
  source 1..210: note = Marinobacterium aestuarii
  REGION 1..210: note = tr|A0A1A9F0Q0|A0A1A9F0Q0_9GAMM 7-carboxy-7-deazaguanine synthase OS=Marinobacterium aestuarii OX=1821621 GN=queE PE=3 SV=1
MYSVKEMFYTLQGEGAQAGRPAVFCRFAGCNLWSGREQDRSSAICDFCDTDFVGTDGQNGGKFATAQALAEATLALWPDPAQGTPYLVCTGGEPALQLDTALIEAFKAVGFEIAVETNGTKPLPEGIDWICLSPKANTDLVLSAGQELKLVYPQLLAPPERFTSLAFEHFYLQPLDGPDAAAHLRLCVQYCLDHPQWKLSLQTHKILGID

SEQ ID NO: 31462 - protein, 210 aa, Marinobacterium georgiense
  REGION 1..210: note = tr|A0A1H3ZRN7|A0A1H3ZRN7_9GAMM 7-carboxy-7-deazaguanine synthase OS=Marinobacterium georgiense DSM 11526 OX=1122198 GN=queE PE=3 SV=1
MYSVKEIFYTLQGEGAQAGRAAVFCRFAGCNLWSGREQDRSKAICDFCDTDFVGVDGQNGGKFASAAKLAQRVRSFWPDAPDGKPYVVCTGGEPALQLDSDLIDALHGEGFEIAIETNGTCPLPEGIDWICVSPKAGSELVVHSGNELKLVYPQPLAQPERFTEMHFDHFYLQPMDGPLQTTNIRRCIDYCMAHPQWKLGLQTHKITGID

SEQ ID NO: 31463 - protein, 210 aa, Marinobacterium halophilum
  REGION 1..210: note = tr|A0A2P8EZF4|A0A2P8EZF4_9GAMM 7-carboxy-7-deazaguanine synthase OS=Marinobacterium halophilum OX=267374 GN=queE PE=3 SV=1
MYSVKEIFYTLQGEGAQTGRASVFCRFTGCNLWSGREQDRAEAVCDFCDTDFIGTDGQNGGKFKDAEALAERIDSFWPQDAGGRRYVVCTGGEPALQLDAALVNALHARGFEVAIETNGTKPLPAGLDWICVSPKSGSEVIITHGDELKLVYPQSLAPPERFADADFTHFYLQPMDGPLQNDYTRRCIDYCMAHPQWQLSLQTHKMLGID

SEQ ID NO: 31464 - protein, 210 aa, Marinobacterium lutimaris
  REGION 1..210: note = tr|A0A1H5UKZ0|A0A1H5UKZ0_9GAMM 7-carboxy-7-deazaguanine synthase OS=Marinobacterium lutimaris OX=568106 GN=queE PE=3 SV=1
MYSVYEMFYTLQGEGAQSGRPAVFCRFSGCNLWSGREKDRASAICDFCDTAFVGTGGQGGGKFADASALAERIASLWPDLGQGNPYVVCTGGEPALQLDRALIDELHRLGFEIAIETNGTRPLPEGIDWICVSPKADTEIVVTQGNELKLVYPQSLAPPERFEELDFEHFYLQPMDGPLQETNTRRCVDYCMAHPRWYLSMQTHKYLGID

SEQ ID NO: 31465 - protein, 210 aa, unidentified
  source 1..210: note = Marinobacterium mangrovicola
  REGION 1..210: note = tr|A0A4R1GQ51|A0A4R1GQ51_9GAMM 7-carboxy-7-deazaguanine synthase OS=Marinobacterium mangrovicola OX=1476959 GN=queE PE=3 SV=1
MYSVYEMFYTLQGEGAQSGRPSVFCRFSGCNLWSGREKDRANAICDFCDTDFVGTGGQGGGKFANAAALAERIASLWPDLEQGRPYVVCTGGEPALQLDSSLIAALHELGFEIAIETNGTRPLPEGIDWICVSPKAGTEILITEGNELKLVYPQSLAPPERFEQLNFEHFYLQPMDGPLQDTNTRRCVEYCLAHPQWHLSMQTHKYLGID

SEQ ID NO: 31466 - protein, 210 aa, Marinobacterium sp.
  REGION 1..210: note = tr|A0A081FW70|A0A081FW70_9GAMM 7-carboxy-7-deazaguanine synthase OS=Marinobacterium sp. AK27 OX=1232683 GN=queE PE=3 SV=1
MYTVYEMFYTLQGEGAQTGRAAVFCRFSGCNLWSGREQDRSGAICDFCDTQFVGTDGQRGGKFKDANSLAAVIASLWPAGASGRPYVVCTGGEPALQLDAPLVDALHAHGFEIAIETNGTKPLPEGIDWICVSPKAGTELVVTQGNELKLVYPQPLAPPERFNTLPFDHFFLQPMDGPMQGSYTARCIEYCMAHPQWRLSLQTHKIIGID

SEQ ID NO: 31467 - protein, 210 aa, Marinobacterium stanieri
  REGION 1..210: note = tr|A0A1N6PXP9|A0A1N6PXP9_9GAMM 7-carboxy-7-deazaguanine synthase OS=Marinobacterium stanieri OX=49186 GN=queE PE=3 SV=1
MYSVKEIFYTLQGEGAQAGRPSVFCRFTGCNLWSGREQDRSKAVCDFCDTDFIGTDGQNGGKFATAAELAARIASFWPKQDSQRRYVVCTGGEPALQLDEALIDALHEEGFEIAIETNGTKPLPAGIDWICVSPKADAEVIITRGHELKLVYPQSLAPPERFADLEFDNFYLQPMDGPLQGQYTRRCIDYCLQHPRWQLSLQTHKMLGID

SEQ ID NO: 31468 - protein, 239 aa, Marinococcus halophilus
  REGION 1..239: note = tr|A0A510Y3V4|A0A510Y3V4_MARHA 7-carboxy-7-deazaguanine synthase OS=Marinococcus halophilus OX=1371 GN=queE PE=3 SV=1
MKATPVLEIFGPTIQGEGMVIGRKTMFVRTGGCDYRCSWCDSAFTWDGSQKAAAMSAEAIYDKLKETGGEAFNHVTISGGNPAMHPGLGDLVELLQQHGIETAIETQGSIWNEWVKEIDEVTVSPKPPSSLMKTDWPRLDRYMEELQPRRDKALSLKVVVFDENDLKYAIDVHERYPDVTMYLQVGNDDTATPQVEKLRDHLLAKYEWLTEKVLQEERLNGVRVLPQLHTLLWGNKQGV

SEQ ID NO: 31469 - protein, 239 aa, Marinococcus luteus
  REGION 1..239: note = tr|A0A1H2VFG3|A0A1H2VFG3_9BACI 7-carboxy-7-deazaguanine synthase OS=Marinococcus luteus; OX = 1122204 GN=queE PE=3 SV=1
MKPTPVLEIFGPTIQGEGMVIGRKTMFVRTGGCDYRCSWCDSAFTWDGSQKAVAMSAEAIYEKLKEAGGRSFNHVTISGGNPAMHPGLGELVALLQEQGIETAIETQGSIWNDWVKEIDEVTVSPKPPSSLMKTDWSRLDYYMEELRPRKEKEVSLKVVVFDESDLNYAMEVHERYPAVTMYLQVGNDDTVTPQVEKLRDHLLAKYEWLTEKVLQEERLNGVRVLPQLHTLLWGNKQGV

SEQ ID NO: 31470 - protein, 216 aa, Marinomonas alcarazii
  REGION 1..216: note = tr|A0A318V9D6|A0A318V9D6_9GAMM 7-carboxy-7-deazaguanine synthase OS=Marinomonas alcarazii; OX = 491949 GN=queE PE=3 SV=1
MYSIKEAFYSLQGEGAHAGRPALFCRFTGCNLWSGLEKTRAKSECQFCDTDFIGTDGQHGGKFQTAQQLRAHIDALWPAGQGHKYVVFTGGEPALQLDEKLIIEMKQHGYTIAIETNGTLPLPDGIDWVCVSPKTTKPLVVSKGNEIKLVYPQSHLSPDLFEDLDFQHFYLQPMDQSHLTADQIPLIDTQQATLHYCLSHPRWRLSLQTHKMLNID

SEQ ID NO: 31471 - protein, 216 aa, Marinomonas aquimarina
  REGION 1..216: note = tr|A0A1A8THG1|A0A1A8THG1_9GAMM 7-carboxy-7-deazaguanine synthase OS=Marinomonas aquimarina OX=295068 GN=queE PE=3 SV=1
MYSIKEAFYSLQGEGAHAGRPAIFCRFTGCNLWSGKEKHRASAQCQFCDTDFIGTDGQNGGKFKSAVDLISHLDNLWPVGTNHKYLIFTGGEPALQLDDELIAAAKASHYTLAIETNGTLPLPDGIDWICVSPKTAEPLVVNRGSELKLIFPQEHLPPNLFTDLEFEHFYLQPMDQSALPEGRERVDDAQAQTIRYCLQNPQWRLSLQTHKMLGID

SEQ ID NO: 31472 - protein, 237 aa, Marinomonas aquiplantarum
  REGION 1..237: note = tr|A0A366CYP0|A0A366CYP0_9GAMM 7-carboxy-7-deazaguanine synthase OS=Marinomonas aquiplantarum OX=491951 GN=queE PE=3 SV=1
MPKSLGDNPTSTVFRGAQGKHMYSIKEAFYSLQGEGAHAGRPALFCRFTGCNLWSGLEKTRAQSDCQFCDTDFIGTDGQNGGKFRSADLLLKHLDSLWPAQQGHKYVVFTGGEPALQLDEILINTMKRAGYTIAIETNGTLPLPKGIDWICVSPKTNKPLVVTKGNELKLVYPQHHLQPSLFETLAFDHFYLQPMDQSHLAEGQIPLQDTQAATLNYCLAYPRWRLSLQTHKMLNID

SEQ ID NO: 31473 - protein, 216 aa, Marinomonas balearica
  REGION 1..216: note = tr|A0A4R6MGS7|A0A4R6MGS7_9GAMM 7-carboxy-7-deazaguanine synthase OS=Marinomonas balearica; OX = 491947 GN=queE PE=3 SV=1
MYNIKESFYSLQGEGAHAGRPAIFCRFTGCNLWSGKEKHRLSASCQFCDTDFNGVDGQNGGRFQTADALAEHIAAQWPTNQGNKYVVFTGGEPALQLDEALITSMKNRGFTIAIETNGTLELPNGIDWVCVSPKTTEPLVVNSGNELKFVYPQINLHPKDYEDLEFEHFYLQPMDLSAVPQSNVIVSDTQSSTLKYCLENPLWRLSLQTHKMLNID

SEQ ID NO: 31474 - protein, 216 aa, Marinomonas communis
  REGION 1..216: note = tr|A0A4R6X7J5|A0A4R6X7J5_9GAMM 7-carboxy-7-deazaguanine synthase OS=Marinomonas communis; OX = 28254 GN=queE PE=3 SV=1
MYSIKEAFYSLQGEGAHAGRPAIFCRFTGCNLWTGKEKHRASAKCQFCDTDFIGTDGQNGGKFKTAEALIEHLDTLWPEQTSHKYLIFTGGEPALQLDEALIAAAKASHYTLAIETNGTLPLPDGIDWICVSPKTAEPLVVNQGSELKLIFPQDHLPPNLFSDLEFEHFYLQPMDQSALPEGHERINDAQAQTIRYCLQNPQWRLSLQTHKMLGID

SEQ ID NO: 31475 - protein, 216 aa, Marinomonas foliarum
  REGION 1..216: note = tr|A0A368ZK87|A0A368ZK87_9GAMM 7-carboxy-7-deazaguanine synthase OS=Marinomonas foliarum; OX = 491950 GN=queE PE=3 SV=1
MYSIKEAFYSLQGEGAHAGRPALFCRFTGCNLWSGLEKTRAKSECQFCDTDFIGTDGQNGGKFKTAQQLRSHIDALWPESQGHKYVVFTGGEPALQLDNELIAEMKRHDYTIAIETNGTMELPQGIDWICVSPKTAKPLIVSEGNELKLVYPQSHLSPELFENLDFQHFYLQPMDQSHLTADQIPLIDTQQATLHYCLSHPRWRLSLQTHKMLNID

SEQ ID NO: 31476 - protein, 216 aa, unidentified
  source 1..216: note = Marinomonas fungiae
  REGION 1..216: note = tr|A0A0K6IK76|A0A0K6IK76_9GAMM 7-carboxy-7-deazaguanine synthase OS=Marinomonas fungiae; OX = 1137284 GN=queE PE=3 SV=1
MYSIKEAFYSLQGEGAHAGRPAIFCRFTGCNLWTGKEKHRASAACQFCDTDFIGTDGQNGGKFHSAGALIQHLDKLWPTNTDHKYLIFTGGEPALQLDDALIATAKAANYTLAIETNGTLPLPDGIDWICVSPKTTDPLVVNRGSELKLIFPQDHLPPHLFTDLEFDHFYLQPMDQGALPEGRERIDDAQAQTIRYCLQNPQWRLSLQTHKMLGID

SEQ ID NO: 31477 - protein, 216 aa, unidentified
  source 1..216: note = Marinomonas gallaica
  REGION 1..216: note = tr|A0A1C3JUX8|A0A1C3JUX8_9GAMM 7-carboxy-7-deazaguanine synthase OS=Marinomonas gallaica; OX = 1806667 GN=queE PE=3 SV=1
MYSIKEAFYSLQGEGAHAGRPAIFCRFTGCNLWTGKEKHRATSQCQFCDTDFVGTDGQNGGKFHDADTLIAHLDTLWPENTQHKYLIFTGGEPALQLDDELIQAAKASSYTLAIETNGTLPLPVGIDWICVSPKTAEPLVVNGGSELKLIFPQQHLPPNLFTDLEFEHFYLQPMDQSALPAGQARIDDAQAQTIRYCLQNPQWRLSLQTHKMLGID

SEQ ID NO: 31478 - protein, 216 aa, unidentified
  source 1..216: note = Marinomonas hwangdonensis
  REGION 1..216: note = tr|A0A3M8Q2W7|A0A3M8Q2W7_9GAMM 7-carboxy-7-deazaguanine synthase OS=Marinomonas hwangdonensis OX=1053647 GN=queE PE=3 SV=1
MYSIKEAFYSLQGEGAHAGRPALFCRFTGCNLWSGLEKTRAKSECQFCDTDFIGTDGQHGGKFPTAAQLRAHIDSLWPTGQGHKYVVFTGGEPALQLDEALIVEMKQHGYTIAIETNGTIALPQGIDWVCVSPKTAKPLVVSKGDELKLVFPQSHLSPELFETLDFAHFYLQPMDQSHLTADQIPLIDTQQATLQYCLSHPRWRLSLQTHKMLNID

SEQ ID NO: 31479 - protein, 216 aa, Marinomonas mediterranea
  REGION 1..216: note = tr|F2JTJ0|F2JTJ0_MARM1 7-carboxy-7-deazaguanine synthase OS=Marinomonas mediterranea (strain ATCC 700492 / JCM 21426 / NBRC 103028 / MMB-1) OX=717774 GN=queE PE=3 SV =1
MYNVKESFYSLQGEGAHAGRPAIFCRFTGCNLWSGKEKHRLSADCQFCDTDFNGVNGQNGGRFKSADELAKHIANQWPQGHGNKYVVFTGGEPALQLDQALISAVKSYGFMVAIETNGTLRLPDNIDWICVSPKTTDPLVVNAGNELKFVYPQTNLNPKDYEGLEFEHFYLQPMDLSAVPKQNIIASDTQSATLKYCLENPLWRISLQTHKMLNID

SEQ ID NO: 31480 - protein, 216 aa, Marinomonas polaris
  REGION 1..216: note = tr|A0A1M5A0S7|A0A1M5A0S7_9GAMM 7-carboxy-7-deazaguanine synthase OS=Marinomonas polaris DSM 16579 OX=1122206 GN=queE PE=3 SV=1
MYSIKEAFYSLQGEGAHAGRPALFCRFTGCNLWSGSEKTRATSECQFCDTDFIGTNGQHGGKFKTAEQLRTHIDVLWPGGQGHKYVVFTGGEPALQLDDELIVEMKQHGYTIAIETNGTMALPDGIDWICVSPKTAKPLVVTKGDELKLVYPQSHISPDYFETLDFSHFYLQPMDQSHLTTDQIPLLDTQQATLHYCLSHPRWRLSLQTHKMLNID

SEQ ID NO: 31481 - protein, 216 aa, Marinomonas pollencensis
  REGION 1..216: note = tr|A0A3E0DS13|A0A3E0DS13_9GAMM 7-carboxy-7-deazaguanine synthase OS=Marinomonas pollencensis OX=491954 GN=queE PE=3 SV=1
MYSIKEAFYSLQGEGAHAGRPALFCRFTGCNLWSGQEKTRATSDCQFCDTDFIGTDGQHGGKFKTAQALRTHIDALWPAEQGHKYVVFTGGEPALQLDDELIAEMKSHGYTIAIETNGTLALPEGIDWICVSPKTTHPLKVTSGNELKLVFPQAHLPPARFESLSFDHFYLQPMDQSHLSKDQIPLTNTQQATLNFCLSHPQWRLSLQTHKMLNID

SEQ ID NO: 31482 - protein, 216 aa, Marinomonas posidonica
  REGION 1..216: note = tr|F6CRR7|F6CRR7_MARPP 7-carboxy-7-deazaguanine synthase OS=Marinomonas posidonica (strain CECT 7376 / NCIMB 14433 / IVIA-Po-181) OX=491952 GN=queE PE=3 SV=1
MYSVKEAFYSLQGEGAHAGRPALFCRFTGCNLWSGLEKTRSQSDCQFCDTDFIGTDGQNGGKFRSAELLLKHLDALWPAQQEYKYVVFTGGEPALQLDDALISTMKQAGYTIAIETNGTLPLPQGIDWICVSPKTNKPLVVTKGNELKLVYPQHHLLPNQFETLAFDHFYLQPMDQSHLTANQIPLQDTQAATLNYCLAHPRWRLSLQTHKMLNID

SEQ ID NO: 31483 - protein, 216 aa, Marinomonas primoryensis
  REGION 1..216: note = tr|A0A2Z4PV50|A0A2Z4PV50_9GAMM 7-carboxy-7-deazaguanine synthase OS=Marinomonas primoryensis OX=178399 GN=queE PE=3 SV=1
MYSIKEAFYSLQGEGAHAGRPALFCRFTGCNLWSGLEKTRSQSDCQFCDTDFIGTDGQNGGKFKTASQLRSHIDALWPSGHGHKYVVFTGGEPALQLDTSLIKEMKDHGYMIAIETNGTLALPDGIDWICVSPKTPKKLVITKGDELKLVYPQEQLDPEQFETLDFDNFYLQPMDQGHLSVDQIPLINTQEATLHYCLSHPRWRLSLQTHKMLNID

SEQ ID NO: 31484 - protein, 216 aa, unidentified
  source 1..216: note = Marinomonas profundimaris
  REGION 1..216: note = tr|W1RNM3|W1RNM3_9GAMM 7-carboxy-7-deazaguanine synthase OS=Marinomonas profundimaris OX=1208321 GN=queE; PE = 3 SV=1
MYSIKEAFYSLQGEGAHAGRPALFCRFTGCNLWSGLEKTRALSDCQFCDTDFIGTDGQNGGKFKTASQLRSHIDALWPFGQGHKYVVFTGGEPALQLDDNLIKEMKEHGYTIAIETNGTLALPEGIDWICVSPKTSKALIITKGDELKLVYPQEHLDPASFETLDFANFYLQPMDQGHLSSDQIPLINTQEATLHYCLSHPRWRLSLQTHKMLNID

SEQ ID NO: 31485 - protein, 216 aa, Marinomonas rhizomae
  REGION 1..216: note = tr|A0A366JE90|A0A366JE90_9GAMM 7-carboxy-7-deazaguanine synthase OS=Marinomonas rhizomae; OX = 491948 GN=queE PE=3 SV=1
MYSIKEAFYSLQGEGAHAGRPALFCRFTGCNLWSGLEKTRANSECQFCDTDFIGTDGQNGGKFKTAEQLRSHIDALWPDGQEYKYVVFTGGEPALQLDEKLIIEMKLHGYTIAIETNGTMALPQGIDWICVSPKTASPLTVTQGDELKLIYPQSHISPALFEKLDFSHFYLQPMDQSHLTVDQIPLIDTQQATLHYCLSHPRWRLSLQTHKMLNID

SEQ ID NO: 31486 - protein, 216 aa, Marinomonas sp.
  REGION 1..216: note = tr|A0A370UE09|A0A370UE09_9GAMM 7-carboxy-7-deazaguanine synthase OS=Marinomonas sp. YLB-05 OX=2213058 GN=queE PE=3 SV=1
MYKIKEAFYSLQGEGAHAGRPALFCRFTGCNLWSGKESQRMEAQCQFCDTDFVGTDGQNGGRFNTAAALMSHLDTLWPEGAAHKYIIFTGGEPALQLDDALIAAAKALQYTIAIETNGTRPLPSGIDWICVSPKVAAPLVVNEGHELKLVFPQEHLPPESFSHLSFDNFFLQPMDQSALPSDRIALEDTQTQTLRYCLQNPQWRLSLQTHKMLGID

SEQ ID NO: 31487 - protein, 216 aa, Marinomonas sp.
  REGION 1..216: note = tr|A3YGV0|A3YGV0_9GAMM 7-carboxy-7-deazaguanine synthase OS=Marinomonas sp. MED121 OX=314277 GN=queE PE=3; SV = 1
MYSIKEAFYSLQGEGAQAGRPSIFCRFSGCNLWNGKETHRFDSLCQFCDTDFIGVDGQNGGKFKQAKTLALHLDALWPNDQSDKYVVFTGGEPALQLDAALILAMKEMGYVIGIETNGTKPLPDGIDWICVSPKTADELVIQQGHELKLVYPQSHLNPNKYTHLDFDTFYLQPMDQSHLPKDRISPESTLKQTLNYCLANPKWRLSLQTHKILEID

SEQ ID NO: 31488 - protein, 216 aa, unidentified
  source 1..216: note = Marinomonas spartinae
  REGION 1..216: note = tr|A0A1A8TN52|A0A1A8TN52_9GAMM 7-carboxy-7-deazaguanine synthase OS=Marinomonas spartinae; OX = 1792290 GN=queE PE=3 SV=1
MYSIKEAFYSLQGEGAHAGRPALFCRFTGCNLWSGQEKTRAQSDCQFCDTDFIGTDGQNGGKFKTAEQLRKHIDALWPAGQAHKYVVFTGGEPALQLDEALITEMKQHGYTIAIETNGTLPLPNGIDWICVSPKTTKPLVVTKGSELKLVYPQSHITPDLFENLDFMHFYLQPMDQSHLTVDQIPLIDTQQATLHYCLAHPLWRLSLQTHKMLNID

SEQ ID NO: 31489 - protein, 208 aa, Marinoscillum furvescens
  REGION 1..208: note = tr|A0A3D9KWI2|A0A3D9KWI2_9BACT 7-carboxy-7-deazaguanine synthase OS=Marinoscillum furvescens DSM 4134 OX=1122208 GN=queE PE=3 SV=1
MKISTPKPFTDSLPVMESFLTVQGEGAFSGAAAYFIRLGGCDVGCVWCDVKESWDAAAHPHFTIEEIVAQAKSHGVEIVVITGGEPLMYDLTTLTKALKKAGLRTHVETSGAHAISGDWDWVCFSPKKFMAPKPDFYPAADELKIIVFNKSDFKWAEAHAAECPEKTRLFLQPEWSKKDQMTPLIVDYVKKNPQWRISLQTHKYLDIP

SEQ ID NO: 31490 - protein, 203 aa, Marinoscillum sp.
  REGION 1..203: note = tr|A0A2D7TGV5|A0A2D7TGV5_9BACT 7-carboxy-7-deazaguanine synthase OS=Marinoscillum sp.; OX = 2024838 GN=queE PE=3 SV=1
MKRGSKNLPVMESFYSIQGEGYHSGKPAYFVRLAGCDVKCSWCDVKDSWSNSADQFVHVQDIVKEINQYSTDLVIITGGEPFFHDLGPLTNLLKENGKMVHVETSGTEKFSGEFDWICLSPKRFKKPLENFYEISDELKVIIYQDSDFRWAERISSRMKKDTKRLLQPEWSVENIVNPKILNFIKENPQWRISLQTHKYLKVD

SEQ ID NO: 31491 - protein, 235 aa, Marinovum algicola
  REGION 1..235: note = tr|A0A0H4L3I8|A0A0H4L3I8_9RHOB 7-carboxy-7-deazaguanine synthase OS=Marinovum algicola DG 898 OX=988812 GN=queE PE=3 SV=1
MTLRIAEIFGPTIQGEGALIGEPTVFIRAGGCDYRCSWCDSLHAVESRYRHTWAPLSDVEIWDEVLRLSNGQPLTVSISGGNPAIQDFAPVIARGRAAGYRFACETQGSLARDWFAELDTLVLSPKPPSSGETVDWDAFDGCVSAGKPARQSVMKIVVFDETDYQWAKAAHARHPDLPLYLQPGNAEVDPDTPVDLRALGARLEWLTDTAMADGWFAPRILPQLHVLIWGNKRGV

SEQ ID NO: 31492 - protein, 256 aa, Marinovum sp.
  REGION 1..256: note = tr|A0A2E7WI10|A0A2E7WI10_9RHOB 7-carboxy-7-deazaguanine synthase OS=Marinovum sp.; OX = 2024839 GN=queE PE=3 SV=1
MTPARTHPTHEPTTASDAKIRVSEIFGPTIQGEGVLIGLPTVFVRTGGCDYRCSWCDSLHAVDPEYRHDWAAMTTGAVWDKITNLSGGQPLTVSLSGGNPAIQPFGALIRRGQAEGYRFALETQGSVAKDWFAEIDTLVLSPKPPSSDMDTDWSAFDKCLAAAGQSPQVVLKIVIFDDADYHYAKQTAARYPALAMYLQPGNHTPPPAEDDGVCVDQVGVMDRLHWLVDKVTKDRWFEARVLPQLHVLLWGNKRGV

SEQ ID NO: 31493 - protein, 210 aa, Marinovum sp.
  REGION 1..210: note = tr|A0A2D7ZBM8|A0A2D7ZBM8_9RHOB 7-carboxy-7-deazaguanine synthase OS=Marinovum sp.; OX = 2024839 GN=queE PE=3 SV=1
  VARIANT 59: note = Xaa can be any naturally occurring amino acid
  VARIANT 75: note = Xaa can be any naturally occurring amino acid
  VARIANT 136: note = Xaa can be any naturally occurring amino acid
  VARIANT 160: note = Xaa can be any naturally occurring amino acid
MYSIKEIFYTLQGEGANAGRAAIFCRFTGCNLWSGREKDRDRAICKFCDTDFVGTDGTXGGQYKTAEALVEAMQXLWPNNQKKNKFVVLTGGEPLLQVDSSLIKQLHEHDFEVAVETNGTIPLPSGIDWVCVSPKXGAKLRVTKGNEIKIVYPQIGLRLXEFENMSFDHFFLQPMDNVDRVGNTNLCVNACLENPKWRLSVQTHKEIGIR

SEQ ID NO: 31494 - protein, 196 aa, unidentified
  source 1..196: note = Mariprofundus aestuarium
  REGION 1..196: note = tr|A0A2K8KXW4|A0A2K8KXW4_9PROT 7-carboxy-7-deazaguanine synthase OS=Mariprofundus aestuarium OX=1921086 GN=queE PE=3 SV=1
MPCTFIRLAGCPLRCLYCDTTQAIPTDSGAWMDIDQIIDDVQQRGRPLVLVTGGEPLAQRNCIKLLERLLALGVEVQLETSGAYSVAGVPDGVRRIVDIKTPGSGEVERNQLDNLKLLRAGDEIKFVICNRSDYEWSRDFIRSHELGGDDVPPLLSTSWGEVSASDLCAWILEDHLPARMQLQLHKVIWGAEATGV

SEQ ID NO: 31495 - protein, 196 aa, unidentified
  source 1..196: note = Mariprofundus ferrinatatus
  REGION 1..196: note = tr|A0A2K8L7Q0|A0A2K8L7Q0_9PROT 7-carboxy-7-deazaguanine synthase OS=Mariprofundus ferrinatatus OX=1921087 GN=queE PE=3 SV=1
MPCTFIRLAGCPLRCLYCDTEQAIPTDSGSWMQIDAIVADVQKRGRPLVLVTGGEPLAQRNCIVLLQRLVELGVEVQLETSGAYSVASVPEGVRRIIDIKTPDSGEVERNQLDNLDLLRSGDELKFVICSRSDYEWSRDFIRAHKLGLGEVPPLLSSAWGSVSAEELCAWMLEDHLPARMQLQLHKVIWGAEAKGV

SEQ ID NO: 31496 - protein, 196 aa, Mariprofundus ferrooxydans
  REGION 1..196: note = tr|Q0F2M1|Q0F2M1_9PROT 7-carboxy-7-deazaguanine synthase OS=Mariprofundus ferrooxydans PV-1 OX=314345; GN = queE PE=3 SV=1
MACTFIRLAGCPLRCTYCDTPQAIPFDSGEWMQIDDIVTDVQKRNRPLVLVTGGEPLAQRHCSELLSELLALGCEVQLETSGAYPLASLPVGVRRIVDLKTPGSGEAERNRLDNLSCLCAGDEIKMVLTSRADYQWAAAMIEQHRLGQGDVPVLLSAAWGSLKAEELCQWMLDDRLPARLQLQLHKVIWGAEATGV

SEQ ID NO: 31497 - protein, 209 aa, Mariprofundus sp.
  REGION 1..209: note = tr|A0A498DMT6|A0A498DMT6_9PROT 7-carboxy-7-deazaguanine synthase OS=Mariprofundus sp. EBB-1 OX=2650971 GN=queE PE=3 SV=1
MYDSVQGESTLAGLPCTFIRLAGCPLRCSYCDTPKAIPTDSGQWINIDEIIHQVKQHNRPLVLLTGGEPLAQRHCNTLLKRLSELDCFVQLETSGAYSIASVPAGIRRIVDIKTPGSGEVQRNHLQNLQHLVAGDEIKIVLTDRSDYEWARDFIREHKLGLDDVPVLLSPAWGDISAADLCAWLLEDRLPARMQMQMHKVIWGSEAEGV

SEQ ID NO: 31498 - protein, 225 aa, unidentified
  source 1..225: note = Marisediminitalea aggregata
  REGION 1..225: note = tr|A0A1M5RES5|A0A1M5RES5_9ALTE 7-carboxy-7-deazaguanine synthase OS=Marisediminitalea aggregata OX=634436 GN=queE PE=3 SV=1
MTDQVLNINEMFETIQGEGVYTGVPAIFVRLQGCPVGCPWCDTKHTWTLDENLIDSVDAVINKSEESERFFGISDLGLLALFEQQGYNAKHVVITGGEPCMYDLTGITELLHERGFTSQIETSGTFEAKCAQQTWVTVSPKVNMKGGYDVLTSALQRANEIKHPIAMQKHVDELDALLAGIDLTDKVVCLQPISQQARATELAIKTCIDRNWRLSLQTHKYVGIA

SEQ ID NO: 31499 - protein, 235 aa, Maritalea myrionectae
  REGION 1..235: note = tr|A0A2R4MHS1|A0A2R4MHS1_9RHIZ 7-carboxy-7-deazaguanine synthase OS=Maritalea myrionectae; OX = 454601 GN=queE PE=3 SV=1
MTLRIAEIFGPTVQGEGALIGEPTVFIRAGGCDYRCSWCDSLHAVESQYRHDWAAMSDEAVWDEVLRLSDGQPLTVSLSGGNPAIQDFGPVIARGRAAGYRFACETQGSVARPWFAELDTLVLSPKPPSSGEVVNWPNFDECLKAGAAARQMVMKIVIFDQADYDWAKQVHGRYPDLPLYLQPGNPEVDPATPIDPQSLIDRLAWLTDTAMADRWFAPRILPQLHVLLWGNKRGV

SEQ ID NO: 31500 - protein, 245 aa, Maritimibacter sp.
  REGION 1..245: note = tr|A0A2U2CLG4|A0A2U2CLG4_9RHOB 7-carboxy-7-deazaguanine synthase OS=Maritimibacter sp. 55A14 OX=2174844 GN=queE PE=3 SV=1
MGRVPAMTRLRIAEIFGPTIQGEGALIGAPTVFVRAGGCDYRCTWCDSLHAVESRFRQDWAAMETGAVWAEVRRLSGGRPLTVTLSGGNPAIQDFGPLIANGKAEGYRFAMETQGSVAQDWFASLDMLVLSPKPPSSGEDVDWARFDDCLARAGDAECVLKIVIFDEADYLWAREAAARYPGLPLYLQPGNHTPPPAGAEDGPLDLDGITDRMTWLMERCLADGWFAPRILPQLHVMLWGNRRGV

SEQ ID NO: 31501 - protein, 207 aa, Marivirga sericea
  REGION 1..207: note = tr|A0A1X7JD36|A0A1X7JD36_9BACT 7-carboxy-7-deazaguanine synthase OS=Marivirga sericea; OX = 1028 GN=queE PE=3 SV=1
MDKNSFDPNIELPIMEAFYTIQGEGFHNGKPAYFIRLGGCDVGCVWCDVKDSWDADKWPLKKIDDIVDDAYQYESRLAVITGGEPFMYDMHGLTKRLLQKGFHVNVETSGAHPFSGMVDWVCLSPKKFKAPLDHWYERADELKIIVFNKSDFKWAEEHAEKVGTDCKLLLQPEWGKREEMMPLIVDYVKANPKWAISLQTHKYLQIP

SEQ ID NO: 31502 - protein, 207 aa, Marivirga tractuosa
  REGION 1..207: note = tr|E4TSD7|E4TSD7_MARTH 7-carboxy-7-deazaguanine synthase OS=Marivirga tractuosa (strain ATCC 23168 / DSM 4126 / NBRC 15989 / NCIMB 1408 / VKM B-1430 / H-43); OX = 64386 7 GN=queE PE=3 SV=1
MDKNSFDPNIELPLMESFYTIQGEGFHSGKAAYFIRLGGCDVGCVWCDVKDSWDADKWPLKKIDDIVDDAYQYESRLAVITGGEPFMYDMHGLTKRLLQKGFHVNVETSGAHPFTGMVDWVCLSPKKFKAPLEHWYDRADELKIIIFNKSDFKWAEEHAEKVGSDCKLMLQPEWSKREEMMPLIVEYVKENPNWGISLQTHKYLQIP

SEQ ID NO: 31503 - protein, 235 aa, unidentified
  source 1..235: note = Marivivens niveibacter
  REGION 1..235: note = tr|A0A251WXW6|A0A251WXW6_9RHOB 7-carboxy-7-deazaguanine synthase OS=Marivivens niveibacter OX=1930667 GN=queE PE=3 SV=1
MTLRIVEIFGPTIQGEGALIGEPTVFIRAGGCDYRCSWCDSLHAVDSEFRHTWKPLSDDQVWDQVTALTGGTPLTISISGGNPAIQDFSGVIARGKSEGYKFACETQGSLAKPWFGDLDTLVLSPKPPSSGETVDWDAFDACVTAGQSAGQTVMKIVIFDDTDYAWAKDAHARYPDMALYLQPGNPEVDPDVPVDPQGLADRLLWLTEKTMGDNWFAPRILPQLHVLIWGNKRGV

SEQ ID NO: 31504 - protein, 209 aa, Marixanthomonas ophiurae
  REGION 1..209: note = tr|A0A3E1Q8Z7|A0A3E1Q8Z7_9FLAO 7-carboxy-7-deazaguanine synthase OS=Marixanthomonas ophiurae OX=387659 GN=queE PE=3 SV=1
MQKETQELVNKGEMLPLMEEFYTIQGEGFHKGTAAYFIRIGGCDVGCHWCDVKESWNADIHPPTEINQIVDNADKYSKTIVITGGEPLTWDMGPLTKKLKDKGMQVHIETSGAYKLTGIWDWICLSPKKIKLPTPEIYEKAHELKVIIYNKNDFKFAEEQAEKVNNNCILYLQPEWSKRDKMMSQIVDYVMQNPKWKVSLQTHKYLNIP

SEQ ID NO: 31505 - protein, 209 aa, Marixanthomonas sp.
  REGION 1..209: note = tr|A0A2U0I531|A0A2U0I531_9FLAO 7-carboxy-7-deazaguanine synthase OS=Marixanthomonas sp. HN-E44 OX=2174845 GN=queE PE=3 SV=1
MQDENQDLVNKGEMLPLMEEFYTIQGEGFHKGTAAYFIRVGGCDVGCHWCDVKESWNADLHPPTAIDQIVENADKYSKTIVVTGGEPLTWNMNPLTQKLKEKGMQIHIETSGAYKLTGTWDWICLSPKKIKLPTPEVYKKADELKVIVYNKNDFKFAEEQAGKVGDNCILYLQPEWSKRDKMMPLIVDYVMQNPKWKVSLQTHKYLNIP

SEQ ID NO: 31506 - protein, 211 aa, Massilia albidiflava
  REGION 1..211: note = tr|A0A411WY85|A0A411WY85_9BURK 7-carboxy-7-deazaguanine synthase OS=Massilia albidiflava; OX = 321983 GN=queE PE=3 SV=1
MTYSIKEIFYTLQGEGAHAGRPAVFCRFAGCNLWTGRESDRASATCQFCDTDFVGTDGERGGKFATPQALAEVIDSLWPDTYPASKYVVFTGGEPLLQLDGPLIDAMHAAGFTIAIETNGTVAVPPGIDWVCVSPKVGAQLVVAKGNELKVVIPQANQDLRDYEHLDFDNFFVQPMDGPLAAFNTTLAIETCKRHPKWKLSLQTHKLLNIP

SEQ ID NO: 31507 - protein, 211 aa, unidentified
  source 1..211: note = Massilia armeniaca
  REGION 1..211: note = tr|A0A2R4CB67|A0A2R4CB67_9BURK 7-carboxy-7-deazaguanine synthase OS=Massilia armeniaca; OX = 2072590 GN=queE PE=3 SV=1
MTYSIKEIFYTLQGEGAHAGRPAVFCRFAGCNLWTGRESDRASAVCQFCDTDFVGTDGERGGKFATPAALAAVIDSLWPRSHAASKYVVFTGGEPLLQLDGPLIDAMHAAGFTIAIETNGTIAVPPGVDWICVSPKVGSTLVVSKGNELKVVIPQKDQRLADYEHLEFDNFFVQPMDGPLAAFNTTLAIDTCKANPKWKLSLQTHKLLNIP

SEQ ID NO: 31508 - protein, 211 aa, Massilia aurea
  REGION 1..211: note = tr|A0A422QNE2|A0A422QNE2_9BURK 7-carboxy-7-deazaguanine synthase OS=Massilia aurea; OX = 373040 GN=queE PE=3 SV=1
MTYSIKEIFYTLQGEGAHAGRPAVFCRFSGCNLWTGREADRLTSVCQFCDTDFVGTDGERGGKFKEADLLAAEIDSLWPATHPASKYVVFTGGEPLLQLDRPLIDAMHARGFTIAIETNGTLPVPEGVDWICVSPKMGSTLVVHKGSEIKVVIPQLGQDLAAYEGLDFEHFYLQAMDGPLAARNIQLAIETCRANPKWKLSLQTHKLLQIP

SEQ ID NO: 31509 - protein, 211 aa, unidentified
  source 1..211: note = Massilia eurypsychrophila
  REGION 1..211: note = tr|A0A2G8TGD0|A0A2G8TGD0_9BURK 7-carboxy-7-deazaguanine synthase OS=Massilia eurypsychrophila OX=1485217 GN=queE PE=3 SV=1
MTYSIKEIFYTLQGEGAHAGRPAVFCRFAGCNLWTGRESDRASAVCTFCDTDFVGTDGERGGKFPDPALLAAEIDTLWPSAYPASKYVVFTGGEPLLQLDDALIAAMHAVGFEIAIETNGTLPVPAGVDWICVSPKMGSTLVVTKGNEIKVVIPQSGQNLRAYEQLEFDNFFVQPMDGPLAAHNTRLAIETCKLHPHWKLSLQTHKLLQIP

SEQ ID NO: 31510 - protein, 211 aa, Massilia flava
  REGION 1..211: note = tr|A0A562PQ53|A0A562PQ53_9BURK 7-carboxy-7-deazaguanine synthase OS=Massilia flava; OX = 871742 GN=queE PE=3 SV=1
MTYSIKEIFYTLQGEGAHAGRPAVFCRFSGCNLWTGRESDRATATCQFCDTDFVGTDGERGGKFATADALVAVIDSLWPATYPASKYVVFTGGEPLLQLDAPLIDAMHAAGFTIAIETNGTLPVPPGVDWICVSPKVGSQLVVERGNEIKVVIPQANQELAAYEHLDFENFFVQPMDGPLAAFNTTLAIETCKRNPKWKLSLQTHKLLNIP

SEQ ID NO: 31511 - protein, 180 aa, unidentified
  source 1..180: note = Massilia glaciei
  REGION 1..180: note = tr|A0A2U2HJL9|A0A2U2HJL9_9BURK 7-carboxy-7-deazaguanine synthase (Fragment) OS=Massilia glaciei OX=1524097 GN=queE PE=3 SV=1
NLWTGRESDRAGAVCRFCDTDFVGTDGEGGGKFAQAVDLAARIDGLWPAAYPARKYAVFTGGEPLLQLDAALIAAMHAAGFTIAIETNGTLPVPAGVDWICVSPKMGSTLVVHKGDEIKVVIPQTGQDLRAYEHLDFEHFFVQPMDGPLAQFNTRLAIETCKRNPRWNLSLQTHKLLHIP

SEQ ID NO: 31512 - protein, 211 aa, unidentified
  source 1..211: note = Massilia lurida
  REGION 1..211: note = tr|A0A562RKR1|A0A562RKR1_9BURK 7-carboxy-7-deazaguanine synthase OS=Massilia lurida; OX = 1036180 GN=queE PE=3 SV=1
MTYSIKEIFYTLQGEGAHAGRPAVFCRFSGCNLWTGRESDRASATCQFCDTDFVGTDGERGGKFTTPLALADVIDSLWPDTHAASKYVVFTGGEPLLQLDAPLIDAMHAKGFTIAIETNGTLPVPSGVDWICVSPKVGSTLVVGKGSELKVVIPQAGQDLADYEGLDFDNFFVQPMDGPLAAFNTTLAIETCKRNPKWKLSLQTHKLLNIP

SEQ ID NO: 31513 - protein, 211 aa, Massilia lutea
  REGION 1..211: note = tr|A0A4P6L4E5|A0A4P6L4E5_9BURK 7-carboxy-7-deazaguanine synthase OS=Massilia lutea; OX = 321985 GN=queE PE=3 SV=1
MTYSIKEIFYTLQGEGAHAGRPAVFCRFAGCNLWTGRESDRATATCQFCDTDFVGTDGERGGKFASPEALVAVIDGLWPDTYPASKYVVFTGGEPLLQLDAPLIDAMHAAGFTIAIETNGTVAVPPGIDWVCVSPKVGSQLVVSKGNELKVVIPQANQDLADYEHLDFDNFFVQPMDGPLAAFNTTLAIETCKRNPKWKLSLQTHKLLNIP

SEQ ID NO: 31514 - protein, 211 aa, unidentified
  source 1..211: note = Massilia namucuonensis
  REGION 1..211: note = tr|A0A1I7M5L4|A0A1I7M5L4_9BURK 7-carboxy-7-deazaguanine synthase OS=Massilia namucuonensis OX=1035707 GN=queE PE=3 SV=1
MTYSIKEIFYTLQGEGAHAGRPAVFCRFSGCNLWTGRESDRATAVCQFCDTDFVGTDGERGGKFGTPEALAELIDSLWPQSYPASKYVVFTGGEPLLQLDAPLIAAMHRAGFEIAIETNGTLPVPPGVDWICVSPKMGSTLVVHKGNEIKVVIPQKDQDLAAYEGLDFENFFVQPMDGPLAGFNTTLAIETCKRNPKWKLSLQTHKLLQIP

SEQ ID NO: 31515 - protein, 211 aa, Massilia oculi
  REGION 1..211: note = tr|A0A2S2DQ55|A0A2S2DQ55_9BURK 7-carboxy-7-deazaguanine synthase OS=Massilia oculi; OX = 945844 GN=queE PE=3 SV=1
MTYSIKEIFYTLQGEGAHAGRPAVFCRFSGCNLWTGREADRSSAVCQFCDTDFVGTDGERGGKFKEADLLAAEIDSLWPTSYPASKYVVFTGGEPLLQLDRPLIDAMHARGFTIAIETNGTLPVPEGVDWICVSPKMGSTLVVHKGSEIKVVIPQLGQDLAAYEGLDFAHFYLQAMDGPLAARNLQLAIETCRANPKWKLSLQTHKLLQIP

SEQ ID NO: 31516 - protein, 211 aa, unidentified
  source 1..211: note = Massilia phosphatilytica
  REGION 1..211: note = tr|A0A2S8HB29|A0A2S8HB29_9BURK 7-carboxy-7-deazaguanine synthase OS=Massilia phosphatilytica OX=2026176 GN=queE PE=3 SV=1
MTYSIKEIFYTLQGEGAHAGRPAVFCRFSGCNLWTGRESDRATAVCQFCDTDFVGTDGERGGKFKDAASLAADINSLWPETYPASKYVVFTGGEPLLQLDAALIDAMHAAGFTIAIETNGTLPVPAGVDWICVSPKMGSTLVVDRGNELKVVIPQTGQDLAAYEHLDFDNFFVQPMDGPLAQFNTQLAIDTCRRNPKWKLSLQTHKLLNIP

SEQ ID NO: 31517 - protein, 211 aa, Massilia plicata
  REGION 1..211: note = tr|A0A4P7BCJ2|A0A4P7BCJ2_9BURK 7-carboxy-7-deazaguanine synthase OS=Massilia plicata; OX = 321984 GN=queE PE=3 SV=1
MTYSIKEIFYTLQGEGAHAGRPAVFCRFAGCNLWTGRESDRASAVCQFCDTDFVGTDGERGGKFATPEALAAVIDGLWPTTHTASKYVVFTGGEPLLQLDGALIDAMHAAGFTIAIETNGTIAVPPGVDWICVSPKAGSKLVVHKGSELKVVIPQKDQNLADYEGLDFDHFFVQPMDGPLAAFNTTLAIDTCKANPKWKLSLQTHKLLNIP

SEQ ID NO: 31518 - protein, 211 aa, unidentified
  source 1..211: note = Massilia psychrophila
  REGION 1..211: note = tr|A0A2G8T2D2|A0A2G8T2D2_9BURK 7-carboxy-7-deazaguanine synthase OS=Massilia psychrophila; OX = 1603353 GN=queE PE=3 SV=1
MTYSIKEIFYTLQGEGAHAGRPAVFCRFSGCNLWTGRESDRASAVCTFCDTDFVGTDGEEGGKFSRPGDLADKINSLWPARYPASKYVVFTGGEPLLQLDGALIDAMHVAGFEIAIETNGTLPVPAGVDWVCVSPKIGATLVVGRGNEIKVVIPQTGQDLAAYEQLGFDHFFVQPMDGPLAEYNTRLAIDTCKRHPQWKLSLQTHKLLQIP

SEQ ID NO: 31519 - protein, 211 aa, Massilia sp.
  REGION 1..211: note = tr|A0A0Q5HZ84|A0A0Q5HZ84_9BURK 7-carboxy-7-deazaguanine synthase OS=Massilia sp. Leaf139; OX = 1736272 GN=queE PE=3 SV=1
MTYSIKEIFYTLQGEGAHAGRPAVFCRFSGCNLWTGREQDRAASICTFCDTDFVGTDGERGGKFRDADSLAGEIDSLWPASHAPSKYVVFTGGEPLLQLDEALIAAMHARGFTIAIETNGTLPVPPGVDWICVSPKMGSKLVVEKGNEIKVVIPQAGQDLAAYEQLDFENFYVQPMDGILAAQNTRLAIETCRNNPKWKLSLQTHKLLQIP

SEQ ID NO: 31520 - protein, 211 aa, Massilia sp.
  REGION 1..211: note = tr|A0A344JCS6|A0A344JCS6_9BURK 7-carboxy-7-deazaguanine synthase OS=Massilia sp. YMA4; OX = 1593482 GN=queE PE=3 SV=1
MTYSIKEIFYTLQGEGAHAGRPAVFCRFAGCNLWTGRESDRAGAICQFCDTDFVGTDGERGGKFATPGELATVIDSLWPASHAASKYVVFTGGEPLLQLDGPLIDAMHAAGFTIAIETNGTIAVPPGVDWICVSPKVGSKLVVAKGNELKVVIPQKDQHLADYEHLEFDNFFVQPMDGPLAAFNTTLAIDTCKANPKWKLSLQTHKLLNIP

SEQ ID NO: 31521 - protein, 211 aa, Massilia timonae
  REGION 1..211: note = tr|A0A1S2NF34|A0A1S2NF34_9BURK 7-carboxy-7-deazaguanine synthase OS=Massilia timonae; OX = 47229 GN=queE PE=3 SV=1
MTYSIKEIFYTLQGEGAHAGRPAVFCRFSGCNLWTGREADRLNSVCQFCDTDFVGTDGERGGKFKEADLLAAEIDSLWPATYPASKYVVFTGGEPLLQLDRPLIDAMHARGFTIAIETNGTLPVPEGVDWICVSPKMGSTLAVHKGSEIKVVIPQVGQDLAAYEGLDFEHFYVQAMDGPLAARNLQLAIETCRANPKWKLSLQTHKLLQIP

SEQ ID NO: 31522 - protein, 211 aa, Massilia timonae
  REGION 1..211: note = tr|K9D5T3|K9D5T3_9BURK 7-carboxy-7-deazaguanine synthase OS=Massilia timonae CCUG 45783 OX=883126 GN=queE; PE = 3 SV=1
MTYSIKEIFYTLQGEGAHAGRPAVFCRFSGCNLWTGREADRSSSVCQFCDTDFVGTDGERGGKFKEADLLAAEIDSLWPATYPASKYVVFTGGEPLLQLDRPLIDAMHARGFTIAIETNGTLPVPEGVDWICVSPKMGSTLAVHKGSEIKVVIPQVGQDLAAYEGLDFEHFYVQAMDGPLAARNLQLAIETCRANPKWKLSLQTHKLLQIP

SEQ ID NO: 31523 - protein, 211 aa, unidentified
  source 1..211: note = Massilia umbonata
  REGION 1..211: note = tr|A0A4P8HNB3|A0A4P8HNB3_9BURK 7-carboxy-7-deazaguanine synthase OS=Massilia umbonata; OX = 864828 GN=queE PE=3 SV=1
MTYSIKEIFYTLQGEGAHAGRPAVFCRFAGCNLWTGRESDRATATCQFCDTDFVGTDGERGGKFATPQALAEVIDSLWPETYPASKYVVFTGGEPLLQLDAPLIDAMHAAGFTIAIETNGTVAVPPGIDWVCVSPKVGSQLVVSKGNELKVVIPQANQDLADYEHLDFENFFVQPMDGPLAAFNTTLAIETCKRHPKWKLSLQTHKLLNIP

SEQ ID NO: 31524 - protein, 211 aa, unidentified
  source 1..211: note = Massilia violaceinigra
  REGION 1..211: note = tr|A0A2D2DQ26|A0A2D2DQ26_9BURK 7-carboxy-7-deazaguanine synthase OS=Massilia violaceinigra OX=2045208 GN=queE PE=3 SV=1
MTYSIKEIFYTLQGEGAHAGRPAVFCRFSGCNLWTGRESDRASAVCTFCDTDFVGTDGERGGKFATGTALAALIDSLWPASYPHSKYVVFTGGEPLLQLDAPLIDAMHAAGFEIAIETNGTLPVPPGVDWICVSPKMGSKLVVEKGNELKVVIPQLNQDLGAYEGLDFENFFVQPMDGPLGEHNTRLAIETCKRHPKWKLSLQTHKLLQIP

SEQ ID NO: 31525 - protein, 211 aa, unidentified
  source 1..211: note = Massilia yuzhufengensis
  REGION 1..211: note = tr|A0A1I1R558|A0A1I1R558_9BURK 7-carboxy-7-deazaguanine synthase OS=Massilia yuzhufengensis OX=1164594 GN=queE PE=3 SV=1
MTYSIKEIFYTLQGEGAHAGRPAVFCRFSGCNLWTGREADRASAVCTFCDTDFVGTDGERGGKFRDAAALAAEIDGLWPATHAASKYVVFTGGEPLLQLDQALIDAMHAHGFTIAIETNGTLPVPEGVDWICVSPKMGAQLVVAKGNEIKVVIPQAGQDLAAYEHLDFENFYVQPMDGLLAARNTRLAIETCRRNPKWKLSLQTHKLLQIP

SEQ ID NO: 31526 - protein, 265 aa, Mastigocladus laminosus
  REGION 1..265: note = tr|A0A4D9CDM2|A0A4D9CDM2_MASLA 7-carboxy-7-deazaguanine synthase OS=Mastigocladus laminosus UU774 OX=1594576 GN=queE PE=3 SV=1
MTTKIGITPTARLVEVFSAIQGEGLNVGTRQIFIRFALCDLRCQFCDSAHTWNAPTTCRIERSPGKRDFEIYSNPVSLPILLEWIERQNIPCLHDSISLTGGEPLLHAGFLVEFLPQIRAITGLPIYLETGGHRPEQLAMILPYLDSVGMDLKLPSTSGENRWQEHSKFLQLCYESQIEVFVKIIISEQTNPAELERSALLVAQVSPSIPVFLQPVTPLPASEQLTANPVLAPSPEQVLMWQALIKRFVKQVRVIPQTHKMLNQL

SEQ ID NO: 31527 - protein, 264 aa, Mastigocoleus testarum
  REGION 1..264: note = tr|A0A0V7ZNP0|A0A0V7ZNP0_9CYAN 7-carboxy-7-deazaguanine synthase OS=Mastigocoleus testarum BC008 OX=371196 GN=queE PE=3 SV=1
MNIETIKSTARLIEIFSAIQGEGLNVGTRQIFIRFAFCDLRCHYCDSAHTWNAPDTCRIEKLPGSREFEIHPNPVSLPILIEWVKRQNIPRLHDSISLTGGEPLLHSNFLIDFLPKVRSVTSLPIYLETGGHRPEQLSKILPYLDSVGMDLKLPSTSGESHWQAHKQFLKICNRAQLEVFVKIVISQQTSWSDLEQAALLIKDINPKILVFLQPVTPLEPGKVFTSEQVFAPFPEQVLSWQASLKQLLDRVRVVPQTHKFIDQL

SEQ ID NO: 31528 - protein, 183 aa, unidentified
  source 1..183: note = Mediterranea sp.
  REGION 1..183: note = tr|A0A1Y4HMV6|A0A1Y4HMV6_9BACT 7-carboxy-7-deazaguanine synthase OS=Mediterranea sp. An20; OX = 1965586 GN=queE PE=3 SV=1
MKKKINEIFYSLQGEGCHTGTPAVFIRFSGCNLHCSFCDTQHEEGTPMTNEEIIKEACRYPARMVVLTGGEPALQIDKDLIDRLHREHRYICIETNGTTLLPPGIDWVTCSPKAESTVVIPRINELKVVYTGQDVETLREQLKADHYLLQPCSGQNISETVDYVMQHPHWRLSLQTHKFIGIR

SEQ ID NO: 31529 - protein, 246 aa, Megamonas funiformis
  REGION 1..246: note = tr|H3K496|H3K496_9FIRM 7-carboxy-7-deazaguanine synthase OS=Megamonas funiformis YIT 11815 OX=742816; GN = queE PE=3 SV=1
MQAGVSEIFSSIQGEGKYVGCRQLFIRLIGCNMDCPYCDTDKLAHSNLVPCVLEKCEGYEGDLELKNPLDLNDIMPYINYRLQQPHHSISITGGEPLLYPQIILELAKNLKPLSIPLFLETNGTLVKQLAQVIDEIDIISMDMKLPSDIGKAYWQEHEEFLKLASKKDVYVKIVVSNESTVEDFEKALSIIKNIDENILLVLQPITPLGGLHEAPPEKMLKWQTRAMQVLKNVRVIPQTHKMMNQL

SEQ ID NO: 31530 - protein, 246 aa, Megamonas hypermegale; identical to SEQ ID NO: 31529
  REGION 1..246: note = tr|A0A378NV23|A0A378NV23_9FIRM 7-carboxy-7-deazaguanine synthase OS=Megamonas hypermegale; OX = 158847 GN=queE PE=3 SV=1

SEQ ID NO: 31531 - protein, 246 aa, Megamonas hypermegale
  REGION 1..246: note = tr|A0A239TD31|A0A239TD31_9FIRM 7-carboxy-7-deazaguanine synthase OS=Megamonas hypermegale; OX = 158847 GN=queE PE=3 SV=1
MQAGVSEIFSSIQGEGKYVGCRQLFIRLIGCNMNCPYCDTNDVAHDKTVPCILEKAAGYQGDLKLDNPVDIEDLMPYINYRLQSPHHSISITGGEPLLFTDFIRDLAQKVKQFNVPLFLETNGTLPQQLEKVIDIIDIISMDMKLPSDVQKAYWQEHEQFLQVAKQKDVYVKIVVSAESTEEDFVKALDIIKNVDENILLVLQPITPMGGLHEAPPQKMLDWQSKAMQVLKNVRVIPQTHKMMNQL

SEQ ID NO: 31532 - protein, 246 aa, Megamonas rupellensis
  REGION 1..246: note = tr|A0A412CEP4|A0A412CEP4_9FIRM 7-carboxy-7-deazaguanine synthase OS=Megamonas rupellensis; OX = 491921 GN=queE PE=3 SV=1
MQAGVSEIFSSIQGEGKYVGCRQLFIRLIGCNMDCPYCDTDKLAHSNLVPCVLEKCEGYEGDLELKNPLDLNDIMPYINYRLQQPHHSISITGGEPLLYPQIILELAKNLKPLSISLFLETNGTLVKQLAQVIDEIDIISMDMKLPSDIGKAYWQEHEEFLKLASKKDVYVKIVVSKESTVEDFEKALSIIKNIDENILLVLQPITPLGGLHEAPPEKMLKWQTRAMQVLKNVRVIPQTHKMMNQL

SEQ ID NO: 31533 - protein, 246 aa, Megamonas rupellensis; identical to SEQ ID NO: 31529
  REGION 1..246: note = tr|A0A411ZYV4|A0A411ZYV4_9FIRM 7-carboxy-7-deazaguanine synthase OS=Megamonas rupellensis; OX = 491921 GN=queE PE=3 SV=1

SEQ ID NO: 31534 - protein, 246 aa, Megamonas sp.; identical to SEQ ID NO: 31529
  REGION 1..246: note = tr|A0A1H8FZ19|A0A1H8FZ19_9FIRM 7-carboxy-7-deazaguanine synthase OS=Megamonas sp. Calf98-2 OX=1855330 GN=queE PE=3 SV=1

SEQ ID NO: 31535 - protein, 210 aa, Megasphaera cerevisiae
  REGION 1..210: note = tr|A0A0J6WZX5|A0A0J6WZX5_9FIRM 7-carboxy-7-deazaguanine synthase OS=Megasphaera cerevisiae DSM 20462 OX=1122219 GN=queE PE=3 SV=1
MKNSLWVNEIFDSIDGEGKTAGQLASFIRLKGCNLRCAYCDTTYAFHEGYLMEAETIASKVSYPDITITGGEPLCQDLHGLLELLQDHSINIETNGSMDITPYFRYAGVWFTIDYKSLSSGMSNHMLLHNFRCLRPQDVLKFVVGTKDDLEQARFVCDTYRPGCPVYVGAVFGAISPGEIVEFMKEYELTDWHLQLQLHKFIWAPEARGV

SEQ ID NO: 31536 - protein, 210 aa, Megasphaera elsdenii
  REGION 1..210: note = tr|G0VPJ7|G0VPJ7_MEGEL 7-carboxy-7-deazaguanine synthase OS=Megasphaera elsdenii DSM 20460 OX=1064535; GN = queE PE=3 SV=1
MNYSLCVNEIFDSIDGEGKKAGQLATFIRLCGCNLRCSYCDTAYAFNEGQHMDIADIIAQVSYPNVTLTGGEPLCQDIHALLEGLKGHSVNIETNGSMDIEPYFKYDHVWFTVDYKSLSSDMANRMLPENFEKLRPQDVLKFVVGDEADLRQALGVYRLYRPKCAVYVGAVFGKIEPRRIVEFMKENRLTDWHMQLQLHKFIWNPDDRGV

SEQ ID NO: 31537 - protein, 210 aa, Megasphaera elsdenii
  REGION 1..210: note = tr|A0A269TH68|A0A269TH68_MEGEL 7-carboxy-7-deazaguanine synthase OS=Megasphaera elsdenii; OX = 907 GN=queE PE=3 SV=1
MNYSLCVNEIFDSIDGEGKKAGQLATFIRLCGCNLRCSYCDTAYAFNEGQHMDIADIIAQVSYPNVTLTGGEPLCQDIHALLAGLKGHSVNIETNGSMDIEPYFKYDHVWFTVDYKSLSSDMANRMLPENFEKLRPQDVLKFVVGDEADLRQALGVYRLYRPKCAVYVGAVFGKIEPRRIVEFMKENRLTDWHMQLQLHKFIWNPDDRGV

SEQ ID NO: 31538 - protein, 210 aa, unidentified
  source 1..210: note = Megasphaera genomosp.
  REGION 1..210: note = tr|A0A2J8BA31|A0A2J8BA31_9FIRM 7-carboxy-7-deazaguanine synthase OS=Megasphaera genomosp. type_2 OX=699193 GN=queE PE=3 SV=1
MKNKLYINEIFHSIDGEGRRAGELASFIRLCGCNLRCIYCDTTYAFAEGRSMDVEDIVAAVRYRNVTLTGGEPLLQPIHGLLQALSAQDVNIETNGSVDILPYMVYPHVWFTIDYKGPFSQMEEKMYAPNFRHLRSQDVLKFVVGSYQDLEVARILCEEVQPTCAIYVGAVFETLAPRDIVTYMERYSLTSWRLQLQMHKYIWPPDMRGV

SEQ ID NO: 31539 - protein, 210 aa, unidentified
  source 1..210: note = Megasphaera genomosp.
  REGION 1..210: note = tr|D3LT30|D3LT30_9FIRM 7-carboxy-7-deazaguanine synthase OS=Megasphaera genomosp. type_1 str. 28L; OX = 699218 GN=queE PE=3 SV=1
MKNKLYVNELFNSIDGEGRRAGELASFIRLCGCNLRCSYCDTTYAFTEGTPMAVEEILSQLQYRNITLTGGEPLLQDVHLLLQRLQDRDVNIETNGSVSIRPYLSYSHVWFTVDYKSISSGMTTAMKEENFQLLRPQDVLKFVVGTHADLEQARKICAYFNPSCPIYISAVFAAIEPKEIVAYMEAYRLMNWRLQLQLHKYIWPPTARGV

SEQ ID NO: 31540 - protein, 218 aa, unidentified
  source 1..218: note = Megasphaera hexanoica
  REGION 1..218: note = tr|A0A344MIY4|A0A344MIY4_9FIRM 7-carboxy-7-deazaguanine synthase OS=Megasphaera hexanoica; OX = 1675036 GN=queE PE=3 SV=1
MKVAEKFISINGEGNRAGELSVFVRFQGCNLRCSYCDTSWAYEADCPYEELTPDEIVEYVLSTGVHNVTLTGGEPLLSQGIAELIEKLLAQPKIRVEIETNGAVDLRPFCMPARPVFTMDYKLPSSGWERAMKVENFSVLEKQDTVKFVCGSQEDLQRAWEVIQEYRLTERCHVYLSPVFGSIEPVDMVAFMETHKMNDVRLQIQIHKVIWDPEKRGV

SEQ ID NO: 31541 - protein, 217 aa, Megasphaera micronuciformis
  REGION 1..217: note = tr|E2ZCX5|E2ZCX5_9FIRM 7-carboxy-7-deazaguanine synthase OS=Megasphaera micronuciformis F0359 OX=706434; GN = queE PE=3 SV=1
MRVVEKFVSINGEGQRAGELALFIRFQGCNLSCTYCDTAWANEADCPYEEESPQEIVDYACREGVTDITLTGGEPLLQEGIDELIDLLSKHGFHVEIETNGAVSLLPFCQKRRPSFTMDYKLPGSGCEKAMMTGNFAILTEKDTVKFVVSSTEDLQKAEEIATRYDLVNHCAVYISPVFGSIDPAQMVDFMKQRRLNGWRLQLQLHKFIWDPEKRGV

SEQ ID NO: 31542 - protein, 210 aa, Megasphaera sp.
  REGION 1..210: note = tr|S7J2L8|S7J2L8_9FIRM 7-carboxy-7-deazaguanine synthase OS=Megasphaera sp. NM10 OX=1273103 GN=queE PE=3; SV = 1
MNYSLCVNEIFDSIDGEGKKAGQLATFIRLCGCNLRCSYCDTAYAFNEGRHMDIADIIAQVSYPNVTLTGGEPLCQDIHALLEGLKGHSVNIETNGSMDIEPYFKYDHVWFTVDYKSLSSDMANRMLPENFEKLRPQDVLKFVVGDEADLRQALGVYQLYRPKCAVYVGAVFGKIEPRRIVEFMKEHRLTDWHMQLQLHKIIWNPDDRGV

SEQ ID NO: 31543 - protein, 217 aa, Megasphaera sp.
  REGION 1..217: note = tr|A0A3C1CNX2|A0A3C1CNX2_9FIRM 7-carboxy-7-deazaguanine synthase OS=Megasphaera sp.; OX = 2023260 GN=queE PE=3 SV=1
MTPEFRNTFLVNEIFDSIEGEGIRAGQLATFIRLSGCNLRCSYCDTAYAFEQGKTMAISDILSSVHYTNVTLTGGEPLQQPIGPLLEALSGHEVNVETNGSIDIRPYQAYYNTFFTIDYKCGSSGMGKAMFLPNFEHLRPLDVLKFVVGSVSDLVEAADFYDAFKSRLADVPIYVSPVFGKIEPKDIVAFMKERRLVHWRVQLQLHKFIWDPRMRGV

SEQ ID NO: 31544 - protein, 220 aa, unidentified
  source 1..220: note = Megasphaera stantonii
  REGION 1..220: note = tr|A0A346AZY2|A0A346AZY2_9FIRM 7-carboxy-7-deazaguanine synthase OS=Megasphaera stantonii; OX = 2144175 GN=queE PE=3 SV=1
MKYKFPVVEIFDSIEGEGKRTGYMSTFIRFAGCNLRCSYCDTAYALSADDAAAEYTADELAQLVQSKPWSRVTLTGGEPMLQPLQELTERLCRGGCEINIETNGAVLLPKERPAGLFYTMDWKSPSSGMSEAMKLENLQERLTPADVVKFVVATKDDLDDMAYTISHLLPAARPLLYVSPVWGEIEPAALVDFVKEKGLDDVCVQVQLHKIIYDPEARGV

SEQ ID NO: 31545 - protein, 212 aa, unidentified
  source 1..212: note = Mehylophilales bacterium
  REGION 1..212: note = tr|A0A258LHM2|A0A258LHM2_9PROT 7-carboxy-7-deazaguanine synthase OS=Mehylophilales bacterium 35-46-6 OX=1970535 GN=queE PE=3 SV=1
MKLKIHEIFYSLQGESSRVGLPTVFVRLTGCPMRCVYCDTAYAFSGGSNMEISEIMAKVAECGTKYVTVTGGEPLAQKGCFVLLKELCDAGYSVSLETGGAIDISPVDQRVSVILDVKTPESGEVENNVWSNLMHLKPADEVKFVLCSRADYDWAKQVLSQYHIADKCPVLFSPVYSQVSPTDLAEWVLADKLPVRMQVQLHKILWGEKPGV

SEQ ID NO: 31546 - protein, 212 aa, unidentified
  source 1..212: note = Melaminivora alkalimesophila
  REGION 1..212: note = tr|A0A317RD26|A0A317RD26_9BURK 7-carboxy-7-deazaguanine synthase OS=Melaminivora alkalimesophila OX=1165852 GN=queE PE=3 SV=1
MSYSVKEIFYTLQGEGGQAGMPAVFCRFAGCNLWSGREQDRASAICRFCDTDFVGTDGTLGGKFADAGALARQIAAQWPAQDRAHRLVVLTGGEPLLQVNGPLIDALHAEGFRIAVESNGTIAAPPGIDWLCISPKAGAEWVQREGQELKLVWPQSGLDLDTLETTGQFSHRFLQPMDGPDQAAHIALCIDLCMQRPAWRLSLQTHKLTGIR

SEQ ID NO: 31547 - protein, 245 aa, unidentified
  source 1..245: note = Melghirimyces algeriensis
  REGION 1..245: note = tr|A0A521DKW8|A0A521DKW8_9BACL 7-carboxy-7-deazaguanine synthase OS=Melghirimyces algeriensis OX=910412 GN=queE PE=3 SV=1
MIPMHDWGVLEADHYRKWTIPMVEIFETVEGEGTAAGYPTVFVRVFHCNLRCSWCDTPYSYAPARPEFEATIEEIVDRVNQYSSQRICLTGGEPLMHQEKSAALLLALADRDEVTDVHVETNGAIDLGPFHRLRQKQDHLREKIRFIMDYKLPASGEEHRMIHENFRFLTDRDEVKFVIGDQEDFQCAVRTLETFYQKGQILFSPVFETLSPSLLVKWMLETPLPQVRLNLQLHKWIWDPEKRGV

SEQ ID NO: 31548 - protein, 242 aa, unidentified
  source 1..242: note = Melghirimyces profundicolus
  REGION 1..242: note = tr|A0A2T6BW36|A0A2T6BW36_9BACL 7-carboxy-7-deazaguanine synthase OS=Melghirimyces profundicolus OX=1242148 GN=queE PE=3 SV=1
MNKWELPTPMEYRAWKLPMVEIFETVEGEGTAAGYPTVFVRVFHCNLRCAWCDTPYSYAPARPEFEATIGEILDQVKRYPSRRICLTGGEPLMHRGKSAALLAALADLDQVEDVHVETNGAIDLAPFDRLRRERAERREKIRFIMDYKLPASGEAHRMVRENFRVLTDRDEVKFVIGDREDFRSAVRVVKDWHREGQILFSPVFETLPPRRLVEWVLAEPLPQVKVNLQLHKWIWDPAERGV

SEQ ID NO: 31549 - protein, 242 aa, unidentified
  source 1..242: note = Melghirimyces thermohalophilus
  REGION 1..242: note = tr|A0A1G6K2H8|A0A1G6K2H8_9BACL 7-carboxy-7-deazaguanine synthase OS=Melghirimyces thermohalophilus OX=1236220 GN=queE PE=3 SV=1
MTKWELPSPEEYVNWKLPMVEIFETVEGEGRAAGFPTVFVRLFHCNLRCSWCDTPYSYAPARPEFEATIGEILDRVQSYSSRRICFTGGEPLMHREKSAALLAALADLDHVEDVHVETNGAIDLKPFDQLRRQDPSREEKIRFIMDYKLAASGEEHRMITDNFRLLTEQDEIKFVIGNREDFQAAIRTVEAHHRKGQVLFSPVFEMLPPRKLVKWMLAEPLPQVKLSLQLHKWIWDPSQRGV

SEQ ID NO: 31550 - protein, 212 aa, unidentified
  source 1..212: note = Melioribacter roseus
  REGION 1..212: note = tr|I6Z3S4|I6Z3S4_MELRP 7-carboxy-7-deazaguanine synthase OS=Melioribacter roseus (strain JCM 17771 / P3M-2) OX=1191523 GN=queE PE=3 SV=1
MLKVNEIYYSIQGESSRAGLPCVFVRLTYCNLRCSYCDTEYAFYDGIDMSKEEILEKVNEYGCKLVELTGGEPLVQKESLDLMKSLCDSGYEVMLETGGSLPIDNVDKRVMIIMDLKCPSSKMEKKNRYENIEFLKPGDEVKFVIGDRNDYEWSLNKIKEFELDKKCGVLFSTVFGKLEPVTLLNWILADKLNVRFQLQMHKYIWKPETKGV

SEQ ID NO: 31551 - protein, 212 aa, unidentified; identical to SEQ ID NO: 30784
  source 1..212: note = Melioribacter sp.
  REGION 1..212: note = tr|A0A1G1BFB0|A0A1G1BFB0_9BACT 7-carboxy-7-deazaguanine synthase OS=Melioribacter sp. GWF2_38_21 OX=1801612 GN=queE PE=3 SV=1

SEQ ID NO: 31552 - protein, 230 aa, Melittangium boletus
  REGION 1..230: note = tr|A0A250IHV7|A0A250IHV7_9DELT 7-carboxy-7-deazaguanine synthase OS=Melittangium boletus DSM 14713 OX=1294270 GN=queE PE=3 SV=1
MPLARPHIEPRRVPTADSVVVKEIYLSVQGESSHAGLLCSFVRLTGCHLRCTYCDSEFAFHGGARRQNADVVAEVKALGAQRVEVTGGEPLLQPGVYPLMEALLAEGMTVLLETSGAIDVRLVPPAVHKIVDMKTPSSGESDRNDYRNLQSMNANDELKFVIGGREDYEWSKRLIAEHRLLDKPYELLFSTVHGKLTPKDLAEWVIADRLPVRFQLQMHKYIWHPDERGV

SEQ ID NO: 31553 - protein, 230 aa, Melittangium boletus
  REGION 1..230: note = tr|A0A250IDH7|A0A250IDH7_9DELT 7-carboxy-7-deazaguanine synthase OS=Melittangium boletus DSM 14713 OX=1294270 GN=queE PE=3 SV=1
MYGNNPMRPQEDSDGQKLWVQEVFYTLQGEAIFAGQPAVFVRLGGCNLRCYWCDTDFESSTYNPSLDELVAHVESVRPAVCDLIVITGGEPLRQNINPFVTRLLEKGLRVQIETSGSLNLDLPEHPRLFFLCSPKTTKLHPGIAPRISAFKYVVALGETDPQDGLPVMSTQKRDMAARIARPVEGSRVYVMPRDDQDPERNRANMQECARIAMTFGYTLTLQTHKLLGIN

SEQ ID NO: 31554 - protein, 209 aa, Meridianimaribacter sp.
  REGION 1..209: note = tr|A0A4Q9RW54|A0A4Q9RW54_9FLAO 7-carboxy-7-deazaguanine synthase OS=Meridianimaribacter sp. CL38 OX=2213021 GN=queE PE=3 SV=1
MKTETQILVDKGEMLPLMEEFYTIQGEGYHKGTAAYFIRVGGCDVGCHWCDVKESWNADIHPPTETSKIVENAAKYSDTIVVTGGEPLTWDMTALTSQLKAKGLQVHIETSGAYKLTGTWDWICLSPKKLKLPTQEVYDNANELKVIVYNKDDFRFAEEQAAKVNKGCILYLQPEWSKRDKVVPEIVDYVMKNPKWKVSLQTHKYLNIP

SEQ ID NO: 31555 - protein, 261 aa, Merismopedia glauca
  REGION 1..261: note = tr|A0A2T1BZX3|A0A2T1BZX3_9CYAN 7-carboxy-7-deazaguanine synthase OS=Merismopedia glauca CCAP 1448/3 OX=1296344 GN=queE PE=3 SV=1
MSKLSKYKTANLIEVFSAIQGEGLNIGTRQIFIRFAMCDLRCHYCDSAHTWYSSDTCRIEQNPGKRDFATYPNPVTLDSLISWIRQQNQPGLHDSISLTGGEPLLHAAFLQEFLPQLHQETDLPIYLETGGHRPSQLKMILPYLDSIGMDIKLPSVSGELKWEAHQEFLQLCAEAKVEVFGKIIISEATNPQELEQAATLIAQINPQIPVFLQPVTPLASSDSKPINPPTPEQVLTWQTLMKKQIKQVRVIPQTHKMIDQL

SEQ ID NO: 31556 - protein, 209 aa, unidentified
  source 1..209: note = Mesocricetibacter intestinalis
  REGION 1..209: note = tr|A0A4R6VFG3|A0A4R6VFG3_9PAST 7-carboxy-7-deazaguanine synthase OS=Mesocricetibacter intestinalis OX=1521930 GN=queE PE=3 SV=1
MRSELISNPRYPIVEIFESLQGEGANTGMPSIFIRFGKCNLACPWCDTDYQRFEPMALAEILEKVRSFSAKNIIITGGEPTIQPKIVLLLDCLKAEGYFLAIETNGLKPVPPQIDYIAVSPKALYSRQYGRRCIGSADEVRIVADGDVIEFCRQIETKIKARHYYLSPCEKGGEMNLLETLTQLGILNQARQQPHWQLSIQTHKLIGIA

SEQ ID NO: 31557 - protein, 209 aa, unidentified
  source 1..209: note = Mesoflavibacter aestuarii
  REGION 1..209: note = tr|A0A2T1NGB8|A0A2T1NGB8_9FLAO 7-carboxy-7-deazaguanine synthase OS=Mesoflavibacter aestuarii OX=1266046 GN=queE PE=3 SV=1
MKATTQDLVNKGLLLPLMEEFYTIQGEGFHKGTAAYFIRVGGCDVGCHWCDVKESWNAELHPPTKTETIVANAKKYSDTIVVTGGEPLTWDMTVLTTLLKAEGMQVHIETSGAYELSGTWDWVCLSPKKLKLPTQSVYDKANELKVIVYNQDDFRFAEEQAAKVNKDCILYLQPEWSKRDKVVPEIVDYVMKNPKWKVSLQTHKYLNIP

SEQ ID NO: 31558 - protein, 209 aa, unidentified
  source 1..209: note = Mesoflavibacter sabulilitoris
  REGION 1..209: note = tr|A0A2T1NMD2|A0A2T1NMD2_9FLAO 7-carboxy-7-deazaguanine synthase OS=Mesoflavibacter sabulilitoris OX=1520893 GN=queE PE=3 SV=1
MKQEIQDLVNKGLMLPLMEEFYTIQGEGYHKGTAAYFVRIGGCDVGCHWCDVKESWIADLHPPTKTETIVANAKKYSDTVVVTGGEPLTWDMTELTRQLKEEGCKIHIETSGAYELTGQWDWICLSPKKMKLPTKKVYEKADELKVIIYNKDDFKFAEEQAAKVNDNCILYMQPEWSKRDKMIPLIVDYVMANPKWKVSLQTHKYLNIP

SEQ ID NO: 31559 - protein, 209 aa, Mesoflavibacter sp.
  REGION 1..209: note = tr|A0A2T1NQK6|A0A2T1NQK6_9FLAO 7-carboxy-7-deazaguanine synthase OS=Mesoflavibacter sp. HG96 OX=2109944 GN=queE PE=3 SV=1
MKKEIRELVDKGLMLPLMEEFYTIQGEGYFKGTAAYFIRIGGCDVGCHWCDVKESWIAELHPPTKTETIVANARKYSDTVVVTGGEPLTWDMTELTKQLKAVGCKTHIETSGAYELTGEWDWICLSPKKMKLPTQKVYDNANELKVIIYNKDDFKFAEEQASKVNANCILYMQPEWSKRDKMIPQIVDYVMANPKWKVSLQTHKYLNIP

SEQ ID NO: 31560 - protein, 210 aa, Mesonia algae
  REGION 1..210: note = tr|A0A2W7HUY1|A0A2W7HUY1_9FLAO 7-carboxy-7-deazaguanine synthase OS=Mesonia algae; OX = 213248 GN=queE PE=3 SV=1
MKKEEIEKLVEKGEMLPLMEEFYTIQGEGYHKGTAAYFIRIGGCDVGCHWCDVKESWDAEKHPPTATKTIVDNALKYSDTIVITGGEPLTWDMTTITKSLKEKGAKTHIETSGAYKLTGDWDWICLSPKKLKLPTAEVSKKAHELKVIVYNKSDFAFAEQQAEKVGENCILYLQPEWSVRDKIVPLIVEYVMKNPKWKVSLQTHKYLNIP

SEQ ID NO: 31561 - protein, 210 aa, Mesonia phycicola
  REGION 1..210: note = tr|A0A1M6AUP8|A0A1M6AUP8_9FLAO 7-carboxy-7-deazaguanine synthase OS=Mesonia phycicola; OX = 579105 GN=queE PE=3 SV=1
MKKEEIEQLVEQGKMLPLMEEFYTIQGEGYHKGTAAYFIRIGGCDVGCHWCDVKESWDAEKHPPTATETIVENAIKYSKTIVVTGGEPLTWDMTELTNQLKDKGAQTHIETSGAYELTGIWDWICLSPKKLKLPTQKVYDQANELKVIVFNKHDLKFAEEQATKVNKDCILYLQPEWSVRDKVVPMIVDYVMQNPQWKVSLQTHKYLNIP

SEQ ID NO: 31562 - protein, 210 aa, Mesonia sp.
  REGION 1..210: note = tr|A0A5C8LG14|A0A5C8LG14_9FLAO 7-carboxy-7-deazaguanine synthase OS=Mesonia sp. HuA40; OX = 2602761 GN=queE PE=3 SV=1
MTKKEQEKLVSTGEMLPLMEEFYTIQGEGFYKGTAAYFIRIGGCDVGCHWCDVKESWDAEKHPPSMTSTIVKKALDNSKTVVVTGGEPLMWNMSPITKAIKQGGGKTHIETSGAYEVTGDWDWFCLSPKKNKLPTLEAYKRANELKVIVYNKHDFKFAEEQASQVGENCILYLQPEWSVRDKMIPLMVDYVMQNPKWKISLQTHKYLNIP

SEQ ID NO: 31563 - protein, 210 aa, Mesonia sp.
  REGION 1..210: note = tr|A0A2W1KE37|A0A2W1KE37_9FLAO 7-carboxy-7-deazaguanine synthase OS=Mesonia sp. K7; OX = 2218606 GN=queE PE=3 SV=1
MDKKLVETLVNQGKMLPLMEEFYTIQGEGFHKGTAAYFIRVGGCDVGCHWCDVKESWDAEKHPPTVTEKIVENATKYSDTIVVTGGEPLTWNMSPLTTMLKQKGVQTHIETSGAYELTGEWDWICLSPKKLKLPTEEVYQKANELKVIVYNNNDFKFAEEQAAKVSGNCVLYLQPEWSVREKVIPKIVDYVMRNPKWKVSLQTHKYLNIP

SEQ ID NO: 31564 - protein, 211 aa, Mesorhizobium albiziae
  REGION 1..211: note = tr|A0A1I4DR03|A0A1I4DR03_9RHIZ 7-carboxy-7-deazaguanine synthase OS=Mesorhizobium albiziae OX=335020 GN=queE PE=3 SV=1
MAYAVKEIFYTLQGEGQNAGRAAVFCRFAGCNLWSGREADRSKAICQFCDTDFVGTNGDGGGRFATANDLAQAIAQKWSSGDTRRRFAVLTGGEPLLQLDTSLVEALHAEGFAIAVETNGTLTPPPGIDWICVSPKAGAPVKLTRGNELKLVFPQAGAEPERFEALEFDHFLLQPMDGSARIPNTQAALEFCLANPRWQLCLQTHKQLGIR

SEQ ID NO: 31565 - protein, 244 aa, Mesorhizobium albiziae
  REGION 1..244: note = tr|A0A1I4F2M1|A0A1I4F2M1_9RHIZ 7-carboxy-7-deazaguanine synthase OS=Mesorhizobium albiziae OX=335020 GN=queE PE=3 SV=1
MTGTHPAIRVSEIFGPTIQGEGVLIGLPTVFVRTGGCDYRCSWCDSLHAVDNQFRHEWEMMPIDAVWQTVVALSGGRPMMVSLSGGNPAIQPLGALIERGHDEGYRFALETQGSVVRDWFADLDVLVLSPKPPSSEMTTDWAAVQACVQAAQEKPQIVLKLVVFDESDYAYAKDAAARFPRLPVYLQPGNHTPPRPGNEDASVDLGGIMKRMEWLVERVTSDRWFEARVLPQLHVLLWGNKRGV

SEQ ID NO: 31566 - protein, 245 aa, Mesorhizobium amorphae
  REGION 1..245: note = tr|A0A212DP05|A0A212DP05_9RHIZ 7-carboxy-7-deazaguanine synthase OS=Mesorhizobium amorphae CCBAU 01583 OX=1449348 GN=queE PE=3 SV=1
MTCALQPGIRVSEIFGPTIQGEGMLIGLPTVFVRTGGCDYRCSWCDSLHAVDSRFRHDWEMMSADAVWQKVIALSGGQPVMVSLSGGNPAIQPLGPLIDRGHGEGYRFALETQGSVPKQWFADLDVLVLSPKPPSSEMTTDWAAFDTCVEAAQDRPRMALKLVVFDDDDYAYAKDAAARYPRLPVYLQPGNHTPPRPGNEDAFIDMAGVMKRMEWLVEKVTRDRWFEARVLPQLHVLLWGNKRGV

SEQ ID NO: 31567 - protein, 247 aa, Mesorhizobium amorphae
  REGION 1..247: note = tr|G6YIG1|G6YIG1_9RHIZ 7-carboxy-7-deazaguanine synthase OS=Mesorhizobium amorphae CCNWGS0123 OX=1082933; GN = queE PE=3 SV=1
MPAMTDTHPAIRVSEIFGPTIQGEGVLIGLPTVFVRTGGCDYRCSWCDSLHAVDNQFRHEWETMSIGAVWQNVLALSGGRPMMVSLSGGNPAIQPLGALIERGHGDGYRFALETQGSVVRDWFADLDVLVLSPKPPSSEMTTDWAALEACLQAAQGKPQIVLKLVVFDESDYAFAKDTAARFPRLPIYLQPGNHTPPRPGNEQAPVDLEGIVKRMEWLVDNVTRDRWFEARVLPQLHVMLWGNKRGV

SEQ ID NO: 31568 - protein, 244 aa, Mesorhizobium australicum
  REGION 1..244: note = tr|L0KV12|L0KV12_MESAW 7-carboxy-7-deazaguanine synthase OS=Mesorhizobium australicum (strain HAMBI 3006 / LMG 24608 / WSM2073) OX=754035 GN=queE PE=3 SV=1
MTDTRPAIRVSEIFGPTIQGEGVLIGLPTVFIRTGGCDYRCSWCDSLHAVDNQFRHEWKMMPVDAVWQSVVALSGARPVMVSLSGGNPAIQPFGGLIERGHAEGYRFALETQASVAKDWFAELDVLVLSPKPPSSEMRTDWVAFEACIEAAREKPQVVLKLVIFDESDYAFAKDAAARFPSLPVYLQPGNHTPPRRGEEDAAVDLAGIMRRMEWLIEKVTQDRWFEARVLPQLHVLLWGNKRAV

SEQ ID NO: 31569 - protein, 244 aa, Mesorhizobium ciceri
  REGION 1..244: note = tr|A0A143NH14|A0A143NH14_9RHIZ 7-carboxy-7-deazaguanine synthase OS=Mesorhizobium ciceri; OX = 39645 GN=queE PE=3 SV=1
MTDMHPAIRVSEIFGPTIQGEGVLIGLPTVFIRTGGCDYRCSWCDSLHAVDNQYRHEWLPMPIDAVWQTVHALSGGRPVMVSLSGGNPAIQPFGPLIERGHREGYRFALETQGSVVREWFADLDVLTLSPKPPSSEMTTRWAAFDACLEAAQEKPQIVLKLVVFDESDYAYAKEVAARYPHLPIYLQPGNHTPPLPGSEDASVDLDGIMMRMEWLVERVTSDRWFEARVLPQLHVLLWGNKRAV

SEQ ID NO: 31570 - protein, 244 aa, Mesorhizobium ciceri; identical to SEQ ID NO: 28237
  REGION 1..244: note = tr|A0A3G8FVJ6|A0A3G8FVJ6_9RHIZ 7-carboxy-7-deazaguanine synthase OS=Mesorhizobium ciceri; OX = 39645 GN=queE PE=3 SV=1

SEQ ID NO: 31571 - protein, 244 aa, unidentified
  source 1..244: note = Mesorhizobium delmotii
  REGION 1..244: note = tr|A0A2P9AT06|A0A2P9AT06_9RHIZ 7-carboxy-7-deazaguanine synthase OS=Mesorhizobium delmotii OX=1631247 GN=queE PE=3 SV=1
MTAPHTAIRVSEIFGPTIQGEGMLIGLPTVFVRTGGCDYRCSWCDSLYAVDSRFRHEWEMMSTDALWQKVVALSGGRPVMVSLSGGNPAIQPLGALLDRGHRDGYRFALETQGSVARNWFAELDVLVLSPKPPSSEMATDWAAFDACVEAARGRPQIALKLVVFDDTDYAYARDAAARYPRLPVYLQPGNHTPPRPGDENAPIDMNGVMKRMEWLVEEVTRDRWFDARVLPQLHVLLWGNKRGV

SEQ ID NO: 31572 - protein, 244 aa, unidentified
  source 1..244: note = Mesorhizobium delmotii
  REGION 1..244: note = tr|A0A2P9ALL2|A0A2P9ALL2_9RHIZ 7-carboxy-7-deazaguanine synthase OS=Mesorhizobium delmotii OX=1631247 GN=queE PE=3 SV=1
MTDTCPAIRVSEIFGPTIQGEGVLIGLPTVFIRTGGCDYRCSWCDSLHAVDSQFRHEWKMMPIDAVWQSVVGLSGGRPVMVSLSGGNPAIQPFGALIERGHGEGYRFALETQGSVVRDWFADLDVLVLSPKPPSSEMRTNWAAFGACIEAAQEKPQIVLKLVVFDENDYAYAKDAAARFPRLPVYLQPGNHTPPRPGNEDAPVDLDGIIKRMEWLVEKVTHDRWFEARVLPQLHVMLWGNRRGV

SEQ ID NO: 31573 - protein, 244 aa, unidentified
  source 1..244: note = Mesorhizobium erdmanii
  REGION 1..244: note = tr|A0A4Q1UUS9|A0A4Q1UUS9_9RHIZ 7-carboxy-7-deazaguanine synthase OS=Mesorhizobium erdmanii OX=1777866 GN=queE PE=3 SV=1
MTDTHPAIRVSEIFGPTIQGEGVLIGLPTVFIRTGGCDYRCSWCDSLHAVDNQFRHEWEMMPIDAVWQTVVTLSGGRPVMVSLSGGNPAIQPFRALIERGHGEGYRFALETQGSVVRDWFADLDVLVLSPKPPSSEMRTDWAVIEACVDAAQEKPQIVLKLVVFDESDYAYAKGAAERFPRLPVYLQPGNHTPPRPGNEDASVDLDGIMKRMQWLVERVTRDRWFEARVLPQLHVLLWGNKRAV

SEQ ID NO: 31574 - protein, 244 aa, unidentified
  source 1..244: note = Mesorhizobium hawassense
  REGION 1..244: note = tr|A0A330H9N5|A0A330H9N5_9RHIZ 7-carboxy-7-deazaguanine synthase OS=Mesorhizobium hawassense OX=1209954 GN=queE PE=3 SV=1
MTDTHPAIRVSEIFGPTIQGEGVLIGLPTVFVRTGGCDYRCSWCDSLHAVDRQFRHEWEMMSSDAVWQNVVALSGGRPLMVSLSGGNPAIQPLGALIKRGHDQGYRFALETQGSVVREWFAELDVLVVSPKPPSSEMRTDWATIEACFQAAQDKPQIVLKLVIFDETDYSFAKEAAARFPRLPVYLQPGNHTPPHPGNEHAPVDVDGIMKRMEWLVDSVTRDRWFEARVLPQLHVMLWGNKRGV

SEQ ID NO: 31575 - protein, 211 aa, unidentified
  source 1..211: note = Mesorhizobium helmanticense
  REGION 1..211: note = tr|A0A2T4ILA1|A0A2T4ILA1_9RHIZ 7-carboxy-7-deazaguanine synthase OS=Mesorhizobium helmanticense OX=1776423 GN=queE PE=3 SV=1
MSYAAKEIFYTLQGEGRNAGRAAVFCRFAGCNLWSGREGDRAKAFCGFCDTDLVGVDGPGGGHFDTPRELALAVEQAWRGSGTGQRLVVLTGGEPLLQIDEELLEALHSLAFEIAVETNGTIPTPAGIDWLCVSPKCNARLVVMAGDELKLVYPQIGAEPEHFEVLAFEHLLLQPMDGPEREANTAAAVAYCLANPRWRLSLQTHKFLGIP

SEQ ID NO: 31576 - protein, 245 aa, unidentified
  source 1..245: note = Mesorhizobium helmanticense
  REGION 1..245: note = tr|A0A2T4IN57|A0A2T4IN57_9RHIZ 7-carboxy-7-deazaguanine synthase OS=Mesorhizobium helmanticense OX=1776423 GN=queE PE=3 SV=1
MTCALHPGIRVSEIFGPTIQGEGVLIGLPTVFVRTGGCDYRCSWCDSLHAVDRRFRHDWEMMSPDAVWQKVIALSGGQPVMVSLSGGNPAIQPLGQLIDRGHGEGYRFALETQGSVSKQWFADLDVLVLSPKPPSSEMTTDWAAFDACLEAAQDKPQMALKLVVFDDDDYAYAKDAAARYPQLPVYLQPGNHTPPRPGDEDGFIDMAGVMRRMEWLVEKVTRDRWFEARVLPQLHVLLWGNKRGV

SEQ ID NO: 31577 - protein, 244 aa, Mesorhizobium huakuii
  REGION 1..244: note = tr|A0A068DP71|A0A068DP71_9RHIZ 7-carboxy-7-deazaguanine synthase OS=Mesorhizobium huakuii 7653R OX=763057 GN=queE PE=3 SV=1
MTDTHTAIRVSEIFGPTIQGEGVLIGLPTVFIRTGGCDYRCSWCDSLHAVDNQFRSEWEMMPINAVWQTVVTLSGGRPVMVSLSGGNPAIQPFRALIERGHREGYRFALETQGSVARDWFGDLDVLVLSPKPPSSEMMTDWAALEACVDAAQEKPQIVLKLVVFDESDYVYAKGAAERFPRLPVYLQPGNHTPPGPGNEDASVDMDGIMKRMEWLVEKVTGDRWFDARVLPQLHVLLWGNKRAV

SEQ ID NO: 31578 - protein, 245 aa, unidentified
  source 1..245: note = Mesorhizobium japonicum
  REGION 1..245: note = tr|Q98AZ2|Q98AZ2_RHILO 7-carboxy-7-deazaguanine synthase OS=Mesorhizobium japonicum (strain LMG 29417 / CECT 9101 / MAFF 303099) OX=266835 GN=queE PE=3 SV=1
MTCALHPGIRVSEIFGPTIQGEGVLIGLPTVFVRTGGCDYRCSWCDSLHAVDRRFRHDWEMMSSDAVWQKVIALSSGQPVMVSLSGGNPAIQPLGQLIDRGHGEGYRFALETQGSVSKQWFADLDVLVLSPKPPSSEMTTDWAAFDACLEAAQDKPQTALKLVVFDEDDYAYAKDAAARYPQLPVYLQPGNHTPPRPGNEDGFIDMAGVMRRMEWLVEKVTRDRWFEARVLPQLHVLLWGNKRGV

SEQ ID NO: 31579 - protein, 244 aa, unidentified; identical to SEQ ID NO: 31573
  source 1..244: note = Mesorhizobium japonicum
  REGION 1..244: note = tr|A0A3M9X4P3|A0A3M9X4P3_9RHIZ 7-carboxy-7-deazaguanine synthase OS=Mesorhizobium japonicum OX=2066070 GN=queE PE=3 SV=1

SEQ ID NO: 31580 - protein, 244 aa, unidentified
  source 1..244: note = Mesorhizobium kowhaii
  REGION 1..244: note = tr|A0A2W7BVY9|A0A2W7BVY9_9RHIZ 7-carboxy-7-deazaguanine synthase OS=Mesorhizobium kowhaii; OX = 1300272 GN=queE PE=3 SV=1
MTDTHAAIRVSEIFGPTIQGEGVLIGLPTVFIRTGGCDYRCSWCDSLHAVDNQFRSEWEMMPINAVWQTVVTLSGGRPVMVSLSGGNPAIQPFRALIERGHREGYRFALETQGSVARDWFADLDVLVLSPKPPSSEMRTDWAALEACVDAAQEKPQIVLKLVVFDESDYVYAKGAAERFPRLPVYLQPGNHTPPGPGNEDASVDMDGIMKRMEWLVEKVTGDRWFDARVLPQLHVLLWGNKRAV

SEQ ID NO: 31581 - protein, 244 aa, Mesorhizobium mediterraneum; identical to SEQ ID NO: 31569
  REGION 1..244: note = tr|A0A271KQE5|A0A271KQE5_9RHIZ 7-carboxy-7-deazaguanine synthase OS=Mesorhizobium mediterraneum OX=43617 GN=queE PE=3 SV=1

SEQ ID NO: 31582 - protein, 244 aa, Mesorhizobium metallidurans
  REGION 1..244: note = tr|M5ENN2|M5ENN2_9RHIZ 7-carboxy-7-deazaguanine synthase OS=Mesorhizobium metallidurans STM 2683; OX = 1297569 GN=queE PE=3 SV=1
MTDTCPAIRVSEIFGPTIQGEGVLIGLPTVFIRTGGCDYRCSWCDSLHAVDSQFRHEWEMMPIDAVWQSVVGLSGGRPVMVSLSGGNPAIQPFGALIERGHGEGYRFALETQGSVVRDWFADLDVLVLSPKPPSSEMRTDWAAFQACIEAAQQKPQIVLKLVVFDENDYAYAKDAAARFPRLPVYLQPGNHTPPRPGNEDAPVDLDGIIKRMEWLVEKVTHDRWFEARVLPQLHVMLWGNRRGV

SEQ ID NO: 31583 - protein, 244 aa, unidentified
  source 1..244: note = Mesorhizobium muleiense
  REGION 1..244: note = tr|A0A1G9GP39|A0A1G9GP39_9RHIZ 7-carboxy-7-deazaguanine synthase OS=Mesorhizobium muleiense OX=1004279 GN=queE PE=3 SV=1
MTDMHPVIRVSEIFGPTIQGEGVLIGLPTVFIRTGGCDYRCSWCDSLHAVDNQYRHEWLPMPIDAVWQTVHALSGGRPVMVSLSGGNPAIQPFGPLIERGHREGYRFALETQGSVVREWFADLDVLTLSPKPPSSEMTTRWAAFEACLEAAQEKPQIVLKLVVFDESDYAYAKEVAARYPHLPIYLQPGNHTPPHPGSEDTSVDLDGIMMRMEWLVERVTSDRWFEARVLPQLHVLLWGNKRAV

SEQ ID NO: 31584 - protein, 244 aa, Mesorhizobium opportunistum; identical to SEQ ID NO: 31568
  REGION 1..244: note = tr|F7Y1I5|F7Y1I5_MESOW 7-carboxy-7-deazaguanine synthase OS=Mesorhizobium opportunistum (strain LMG 24607 / HAMBI 3007 / WSM2075) OX=536019 GN=queE PE=3 SV=1

SEQ ID NO: 31585 - protein, 244 aa, Mesorhizobium plurifarium
  REGION 1..244: note = tr|A0A090EIN9|A0A090EIN9_MESPL 7-carboxy-7-deazaguanine synthase OS=Mesorhizobium plurifarium OX=69974 GN=queE PE=3 SV=1
MTDTQPAIRVSEIFGPTIQGEGVLIGLPTVFVRTGGCDYRCSWCDSLHAVDRQFRHEWEMMSSDAVWQNVVALSGGRPLMVSLSGGNPAIQPFGALIKRGHDEGYRFALETQGSVVRVWFAELDVLVLSPKPPSSEMRTDWATVEACFQAAQDKPQVVLKLVVFDKNDYAFAKEAAARFPRLPVYLQPGNHTPPHPGNEDAPVDVDGIMKRMEWLVDSVTRDRWFEARVLPQLHVMLWGNKRGV

SEQ ID NO: 31586 - protein, 244 aa, Mesorhizobium plurifarium
  REGION 1..244: note = tr|A0A090FYL3|A0A090FYL3_MESPL 7-carboxy-7-deazaguanine synthase OS=Mesorhizobium plurifarium OX=69974 GN=queE PE=3 SV=1
MTDMHPAIRVSEIFGPTIQGEGVLIGLPTVFVRTGGCDYRCSWCDSLHAVDRQFRDEWQMMSCDAVWQKIVALSGGRPLMVSLSGGNPAIQPFGALIKRGHDEGYRFALETQGSVVREWFAELDVLVLSPKPPSSEMRTDWAIIEACFQAAQDKPQVVLKLVVFDENDYAFAKEAAARFPRLPVYLQPGNHTPPHPGNEDAPVDVDGIMKRMEWLVDSVTGDRWFEARVLPQLHVMLWGNKRGV

SEQ ID NO: 31587 - protein, 244 aa, unidentified; identical to SEQ ID NO: 31582
  source 1..244: note = Mesorhizobium prunaredense
  REGION 1..244: note = tr|A0A1R3V4M2|A0A1R3V4M2_9RHIZ 7-carboxy-7-deazaguanine synthase OS=Mesorhizobium prunaredense OX=1631249 GN=queE PE=3 SV=1

SEQ ID NO: 31588 - protein, 244 aa, unidentified; identical to SEQ ID NO: 31577
  source 1..244: note = Mesorhizobium qingshengii
  REGION 1..244: note = tr|A0A1G5ZYW4|A0A1G5ZYW4_9RHIZ 7-carboxy-7-deazaguanine synthase OS=Mesorhizobium qingshengii OX=1165689 GN=queE PE=3 SV=1

SEQ ID NO: 31589 - protein, 245 aa, unidentified
  source 1..245: note = Mesorhizobium sanjuanii
  REGION 1..245: note = tr|A0A2A6FAK3|A0A2A6FAK3_9RHIZ 7-carboxy-7-deazaguanine synthase OS=Mesorhizobium sanjuanii OX=2037900 GN=queE PE=3 SV=1
MTNAMQPGIRVSEIFGPTIQGEGMLIGLPTVFVRTGGCDYRCSWCDSLHAVDRRFRRDWEMMSTDAVWQKVIALSGGQPLMVSLSGGNPAIQPLGGLIDRGHGEGYRFALETQGSVPKQWFADLDVLVLSPKPPSSEMTTDWAAFDTCVEAAQDKPRMALKLVVFDDDDYAYAKDAAARYPQLPVYLQPGNHTPPRPGNEGALIDMAGVMKRMEWLVEKVTRDRWFEARVLPQLHVLLWGNKRGV

SEQ ID NO: 31590 - protein, 211 aa, unidentified
  source 1..211: note = Mesorhizobium sanjuanii
  REGION 1..211: note = tr|A0A2A6FLT7|A0A2A6FLT7_9RHIZ 7-carboxy-7-deazaguanine synthase OS=Mesorhizobium sanjuanii OX=2037900 GN=queE PE=3 SV=1
MSYAVKEIVYTLQGEGRNAGRAAVFCRFAGCNLWSGREGDRAKAFCGFCDTDFVGVDGPGGGHFDTARQLALAIEQAWRGSGAGQRLVVLTGGEPLLQIDEELLEALHSLAFEIAVETNGTIPTPAGIDWLCVSPKCNARLVVMAGDELKLVYPQIGAEPEHFEVLAFEHLLLQPMDGPEREANTAAAVAYCLANPRWRLSLQTHKLLGIP

SEQ ID NO: 31591 - protein, 244 aa, Mesorhizobium sp.; identical to SEQ ID NO: 28237
  REGION 1..244: note = tr|A0A436I9F0|A0A436I9F0_9RHIZ 7-carboxy-7-deazaguanine synthase OS=Mesorhizobium sp. M7A.F.Ca.CA.001.06.1.1 OX=2496682 GN=queE PE=3 SV=1

SEQ ID NO: 31592 - protein, 244 aa, Mesorhizobium sp.; identical to SEQ ID NO: 31569
  REGION 1..244: note = tr|A0A547MY64|A0A547MY64_9RHIZ 7-carboxy-7-deazaguanine synthase OS=Mesorhizobium sp. WSM4303 OX=2589887 GN=queE PE=3 SV=1

SEQ ID NO: 31593 - protein, 244 aa, unidentified
  source 1..244: note = Mesorhizobium tamadayense
  REGION 1..244: note = tr|A0A3P3FS89|A0A3P3FS89_9RHIZ 7-carboxy-7-deazaguanine synthase OS=Mesorhizobium tamadayense OX=425306 GN=queE PE=3 SV=1
MTDTHPAIRVSEIFGPTIQGEGVLMGLPTVFIRTGGCDYRCSWCDSLHAVDNRFRHEWETMPIDAVWQSVVALSGGRPVMVSLSGGNPAIQPFGALIERGHDDGYRFALETQGSVARDWFADLDVLVLSPKPPSSEMRTDWAAFETCIESAQEKPQIVLKLVVFDEGDYAFAKGAAARFPRLLVYLQPGNHTPPRPGNEDAPVDLDGINKRMEWLVEKVTRDRWFEARVLPQLHVMLWGNKRGV

SEQ ID NO: 31594 - protein, 245 aa, Mesorhizobium temperatum
  REGION 1..245: note = tr|A0A271LS71|A0A271LS71_9RHIZ 7-carboxy-7-deazaguanine synthase OS=Mesorhizobium temperatum OX=241416 GN=queE PE=3 SV=1
MTSALYPGIRVSEIFGPTIQGEGMLIGLPTVFVRTGGCDYRCSWCDSLHAVDSRFRHDWEMMSADAVWQKVISLSGGQPVMVSLSGGNPAIQPLGPLIDRGHGEGYRFALETQGSVPTGWFADLDVLVLSPKPPSSDMTTDWAAFDACVKAAQDKPQMALKLVVFDDDDYAYAKDAAARYPQLPVYLQPGNHTPPRPGNEDASIDLAGVMKRMEWLVEKVARDRWFEARVLPQLHVLLWGNKRGV

SEQ ID NO: 31595 - protein, 159 aa, Mesorhizobium temperatum
  REGION 1..159: note = tr|A0A271LQ49|A0A271LQ49_9RHIZ 7-carboxy-7-deazaguanine synthase OS=Mesorhizobium temperatum OX=241416 GN=queE PE=4 SV=1
MSYAVKEMFYSLQGEGRHTGRPAVFCRFAGCNLWSGRERDRAKAPCNFCDTDFVGVNGIGGGRFNDASSLAIAIENMWGGGASERFVVLTGGEPLLQVGDAILSEFHDLRFEIALETNGTLAAPNTIDWITVSPKGATTLVQTAGNELKLVFPQAGLVS

SEQ ID NO: 31596 - protein, 244 aa, Mesorhizobium tianshanense
  REGION 1..244: note = tr|A0A562N4I4|A0A562N4I4_9RHIZ 7-carboxy-7-deazaguanine synthase OS=Mesorhizobium tianshanense OX=39844 GN=queE PE=3 SV=1
MTDTHPAIRVSEIFGPTIQGEGVLIGLPTVFIRTGGCDYRCSWCDSLHAVDNQFRHEWEMMSIGAVWQNVVALSGGRPVMVSLSGGNPAIQPFRALIERGHGEGYRFALETQGSVVRDWFGDLDVLVLSPKPPSSEMRTDWAALEACVDAAQEKPQIVLKLVVFDESDYVYAKDAAARFPRLPVYLQPGNHTPPRPGNEDASVDLDGIMKRMEWLVEKVTRDRWFEARVLPQLHVLLWGNKRAV

SEQ ID NO: 31597 - protein, 242 aa, unidentified
  source 1..242: note = Mesorhizobium waimense
  REGION 1..242: note = tr|A0A3A5K3G7|A0A3A5K3G7_9RHIZ 7-carboxy-7-deazaguanine synthase OS=Mesorhizobium waimense OX=1300307 GN=queE PE=3 SV=1
MTHPAIRVSEIFGPTIQGEGVLIGLPTVFVRTGGCDYRCSWCDSLHAVDNQYRHEWEMMSIDAVWQSVVGLSGGRPVMVSLSGGNPAIQPLGALIERGHREGYRFALETQGSVVRDWFAELDVLVLSPKPPSSEMTTDWAAFEACVQAANEKPQVVLKLVVFDESDYAYAKDAAARFPRLPIYLQPGNHTPPRPGNGDSAVDLDGITKRMEWLVESVTRDRWFEARVLPQLHVMLWGNKRGV

SEQ ID NO: 31598 - protein, 244 aa, unidentified
  source 1..244: note = Mesorhizobium wenxiniae
  REGION 1..244: note = tr|A0A271KR51|A0A271KR51_9RHIZ 7-carboxy-7-deazaguanine synthase OS=Mesorhizobium wenxiniae OX=2014805 GN=queE PE=3 SV=1
MTDMHPAIRVSEIFGPTIQGEGVLIGLPTVFIRTGGCDYRCSWCDSLHAVDNQYRNEWLPMPIDAVWQTVHALSGGRPVMVSLSGGNPAIQPFGPLIERGHRQGYRFALETQGSVVREWFADLDVLILSPKPPSSEMTTSWAAFEACLEAAQEKPQIVLKLVVFDESDYAYAKEVAARYPHLPIYLQPGNHTPPHPGSEDTSVDLDGIMMRMEWLVERVTSDRWFEARVLPQLHVLLWGNKRAV

SEQ ID NO: 31599 - protein, 226 aa, unidentified
  source 1..226: note = Mesosutterella multiformis
  REGION 1..226: note = tr|A0A388SD08|A0A388SD08_9BURK 7-carboxy-7-deazaguanine synthase OS=Mesosutterella multiformis OX=2259133 GN=queE PE=3 SV=1
MEEIRYSINEIFASVQGEGLLAGTPAVFVRLQGCPVHCPWCDTKYSWKEDGSGTAKIPLSEVLVKDSRPRSADATLDELVNLILERWPRIPLVVITGGEPAEQPIRPLTERLIAAGKRVSLETSGFLEIDVAPETFVTVSPKITVPGGRVLDSALERADEVKMVIGDESDLAALDAITDKIPESTPISLQPLSMEESAASLCFRTAVERGGRYRVSVQLHKVLRVR

SEQ ID NO: 31600 - protein, 223 aa, unidentified; identical to SEQ ID NO: 30456
  source 1..223: note = Metakosakonia sp.
  REGION 1..223: note = tr|A0A348D909|A0A348D909_9ENTR 7-carboxy-7-deazaguanine synthase OS=Metakosakonia sp. MRY16-398 OX=2487150 GN=queE PE=3 SV=1

SEQ ID NO: 31601 - protein, 223 aa, unidentified
  source 1..223: note = Metallibacterium scheffleri
  REGION 1..223: note = tr|A0A4S3KRL7|A0A4S3KRL7_9GAMM 7-carboxy-7-deazaguanine synthase OS=Metallibacterium scheffleri OX=993689 GN=queE PE=3 SV=1
MAAAAPGADVESRLRISEIFLSLQGEADAVGWPTVFVRLTGCPLRCRWCDTAYAFEGGQWLLVDEILAQVVRHGARHVCVTGGEPLAQKRCLRLLARLCDAGHEVSLETSGALDVAGVDARVHKVLDLKAPASGEQARNRWENLAHLRAQDQVKFVLADRDDYDWARGVVQQHALAARCMVLFSPVYGELVPADLAQWILDDKLDVRFQMQLHKILWGEQPGR

SEQ ID NO: 31602 - protein, 230 aa, unidentified
  source 1..230: note = Methylacidimicrobium cyclopophantes
  REGION 1..230: note = tr|A0A5E6MJF0|A0A5E6MJF0_9BACT 7-carboxy-7-deazaguanine synthase OS=Methylacidimicrobium cyclopophantes OX=1041766 GN=queE PE=3 SV=1
MTRTVDPSPSDAARREPAVVVNEIFWSIQGESTFAGEPCVFVRLTGCDLRCRWCDTQYAFFEGERMPLSRLLREVERFGCGLVELTGGEPLLQRNSRLLLQQLCDAGYTVLLETSGAHSIDGVDPRVHRIVDCKCPSSGESARNLSANLDLLGPRDELKFVIGTEADYQWARKRIDAASWAKRVRAIHFSPVFGELSLETLAGWILRDRLPVRLGFQLHKFIWDPNLRGV

SEQ ID NO: 31603 - protein, 226 aa, unidentified
  source 1..226: note = Methylacidimicrobium tartarophylax
  REGION 1..226: note = tr|A0A5E6MQ74|A0A5E6MQ74_9BACT 7-carboxy-7-deazaguanine synthase OS=Methylacidimicrobium tartarophylax OX=1041768 GN=queE PE=3 SV=1
MDELSSPSSRREPGVVVNEIFHSIQGESSFAGEPCVFIRLTGCDLRCRWCDTQYAFFEGKRMSLTQLLSAVEGLGCGLVEVTGGEPLLQKHTPLLLRQLCDGGYTVLLETSGAHSIAEVDPRVHRIVDCKCPSSGESSRNLPANLELLGLRDEVKFVIGTELDYEWARDLIRHAPWVKSVRAVHFSPVQGELSLETLAGWLLRDRVPVRLGFQLHKWIWDPDRRGV

SEQ ID NO: 31604 - protein, 229 aa, unidentified
  source 1..229: note = Methylacidiphilum fumariolicum
  REGION 1..229: note = tr|I0JYJ2|I0JYJ2_METFB 7-carboxy-7-deazaguanine synthase OS=Methylacidiphilum fumariolicum (strain SolV); OX = 1156937 GN=nrdG PE=3 SV=1
MDDITFLPREEVFKLKLVVNELFLSIQGESTFAGYPCAFIRLTGCNLRCRWCDTTYAFSEGKLLPIEAIINQIQKFNIPLVEVTGGEPLLQKNTLHLLRLLCDLGYQVLLETSGALSIRQVDPRVHRIVDLKCPSSGESEKNLLANLDWLREKDELKFVIGNNEDYQWAKTKLKEEKERLTKVKAITFSPVFGELEPSILSEWILADRLNVRLGLQIHKYIWHPEARGV

SEQ ID NO: 31605 - protein, 229 aa, unidentified; identical to SEQ ID NO: 31604
  source 1..229: note = Methylacidiphilum fumariolicum
  REGION 1..229: note = tr|A0A5F0I235|A0A5F0I235_9BACT 7-carboxy-7-deazaguanine synthase OS=Methylacidiphilum fumariolicum OX=591154 GN=queE PE=3 SV=1

SEQ ID NO: 31606 - protein, 233 aa, unidentified
  source 1..233: note = Methylacidiphilum infernorum
  REGION 1..233: note = tr|B3DVI9|B3DVI9_METI4 7-carboxy-7-deazaguanine synthase OS=Methylacidiphilum infernorum (isolate V4); OX = 481448 GN=nrdG PE=3 SV=1
MFFFGMNRVYLSAREILELKLLVNEMFLSIQGESTFAGYPCAFIRLTGCNLRCRWCDTTYAFSGGKLMPIRAVIDQVKAYDVPLVEITGGEPLLQKNSLYLLTLLCDLGYEVLLETSGSLPVDRVDSRVHRIVDLKCPSSGQSEHNLLSNLDWLGKRDELKFVIADRKDYEWAKNKLTQGKHWRDKVKAITFSPVFGEMDPQLLSQWILEDKLKVRLGLQIHKYIWGPDIKGV

SEQ ID NO: 31607 - protein, 229 aa, unidentified
  source 1..229: note = Methylacidiphilum sp.
  REGION 1..229: note = tr|A0A4Y8P874|A0A4Y8P874_9BACT 7-carboxy-7-deazaguanine synthase OS=Methylacidiphilum sp. Yel OX=1847730 GN=queE PE=3 SV=1
MDGITFLPREEVFKLKLVVNELFLSIQGESTFAGYPCAFIRLTGCNLRCRWCDTTYAFSEGKLLPIEAIINQIQKFNIPLVEVTGGEPLLQKNTLHLLRLLCDLGYQVLLETSGSLSIRQIDPRVHRIVDLKCPSSGESEKNLLANLDWLGEKDELKFVIGNNEDYQWAKTKLKEEKERLTKVKAITFSPVFGELEPRILSEWILADRLNVRLGLQIHKYIWHPEARGV

SEQ ID NO: 31608 - protein, 229 aa, unidentified
  source 1..229: note = Methylacidiphilum sp.
  REGION 1..229: note = tr|A0A4Y8P7N0|A0A4Y8P7N0_9BACT 7-carboxy-7-deazaguanine synthase OS=Methylacidiphilum sp. Phi OX=1847729 GN=queE PE=3 SV=1
MSTVAYLSVQEILELKLLVNEIFLSIQGESTFAGYPCSFVRLTGCNLRCRWCDTTYAFSGGKLMSIATILDQIKAYSVPLVEITGGEPLLQKNILYLLSFLCDLGYEVLLETSGSLPIDNVDPRVHRIVDLKCPSSGQSEHNLLANLKKLGERDELKFVIADKKDYEWAKAKLVEEKVWIEKIKAVSFSPVFGELEPQVLSQWILEDKLKVRLGLQIHKYIWDPSMRGV

SEQ ID NO: 31609 - protein, 235 aa, Methylarcula marina
  REGION 1..235: note = tr|A0A3R7M9I3|A0A3R7M9I3_9RHOB 7-carboxy-7-deazaguanine synthase OS=Methylarcula marina; OX = 72022 GN=queE PE=3 SV=1
MTLRIAEIFGPTIQGEGALIGEPTVFIRAGGCDYRCSWCDSLHAVDSSYRHDWMVMTPEAIWQEVRRLSGGRPLTISISGGNPAIQDFAPVIAMGKAEGYRFACETQGSIARPWFSALDTLVLSPKPPSSGESVDWAGFGRCLTAAEACPNVMMKIVIFDDEDYLWARAVAGKFPDLPLYLQPGNPEVDPDRPVDLQACTDRLLWLIEKVTGDGWFAPRVLPQLHVLVWGNKRGV

SEQ ID NO: 31610 - protein, 211 aa, Methylibium petroleiphilum
  REGION 1..211: note = tr|A2SD49|A2SD49_METPP 7-carboxy-7-deazaguanine synthase OS=Methylibium petroleiphilum (strain ATCC BAA-1232 / LMG 22953 / PM1) OX=420662 GN=queE PE=3 SV=1
MTYSVKEVFYTLQGEGSHAGRPAVFCRFAGCNLWSGREADRADAVCRFCDTEFVGTDGTGGGKFTIAESLASHVAAHWPAGDAGPRFVVLTGGEPLLQVDAPLIDALHAQRFEIAVETNGSVPAPPGIDWLCVSPKAGAPLLQRSGQELKVVVPQGGIDLGELDGLDFAQRRVQPMDGPDLAANTDWAVRWCLAHPRWQLSLQTHKLLGIR

SEQ ID NO: 31611 - protein, 211 aa, Methylibium sp.
  REGION 1..211: note = tr|A0A0Q7CRI8|A0A0Q7CRI8_9BURK 7-carboxy-7-deazaguanine synthase OS=Methylibium sp. Root1272 OX=1736441 GN=queE PE=3 SV=1
MTYAVKEVFYTLQGEGSHAGRPAVFCRFAGCNLWSGREADRADAVCRFCDTEFVGTDGTGGGKFTIAESLATHVAAHWPSDDAGRRFVVLTGGEPLLQVDASLIDALHAQGFEIAVETNGSVPAPPGIDWLCVSPKAGAPLLQRSGQELKVVVPQDGIDLGELDGLDFAQRRVQPMDGPDLAVNTDWAVRWCLAHPRWQLSLQTHKLLGIR

SEQ ID NO: 31612 - protein, 211 aa, Methylibium sp.
  REGION 1..211: note = tr|A0A4P6GVR2|A0A4P6GVR2_9BURK 7-carboxy-7-deazaguanine synthase OS=Methylibium sp. Pch-M; OX = 2082386 GN=queE PE=3 SV=1
MTYSVKEVFYTLQGEGSHAGRPAVFCRFAGCNLWSGREADRADAVCRFCDTEFVGTDGTGGGKFTIAESLASHVAAHWPAGVAGPRFVVLTGGEPLLQVDAALIDALHAQRFEIAVETNGSVQAPPGIDWLCVSPKAGAPLLQRSGQELKVVVPQDGIDLGELDALDFAQRRVQPMDGPDLAANTDWAVRWCLAHPRWQLSLQTHKLLGIR

SEQ ID NO: 31613 - protein, 212 aa, Methylobacillus flagellatus
  REGION 1..212: note = tr|Q1GYT4|Q1GYT4_METFK 7-carboxy-7-deazaguanine synthase OS=Methylobacillus flagellatus (strain KT / ATCC 51484 / DSM 6875) OX=265072 GN=queE PE=3 SV=1
MLRIHEIFHSLQGESSRVGLPTVFVRLTGCPMRCVYCDTEYAFKGGSNMTLDQIMEQVASYGARYVCVTGGEPLAQKKHCLELLRQLCDAGYEVSLETGGAIATDGVDERVAIILDIKTPDSGEVAKNHWDNLSRLKPNDEVKIVLCSRADYEWAKQLLAEHALNEKCAVIFSPVYSQVKPADLADWVLEDRLPVRMQVQLHKILWGETPGK

SEQ ID NO: 31614 - protein, 212 aa, unidentified
  source 1..212: note = Methylobacillus rhizosphaerae
  REGION 1..212: note = tr|A0A238XUS1|A0A238XUS1_9PROT 7-carboxy-7-deazaguanine synthase OS=Methylobacillus rhizosphaerae OX=551994 GN=queE PE=3 SV=1
MLRIHEIFHSLQGESSRVGLPTVFVRLTGCPMRCVYCDTEYAFKGGTNMSLDEIMAQVAGYGARYVCVTGGEPLAQKKGCLALLQRLCDEGYAVSLETGGAVATDGVDERVAVILDIKTPGSGELTNNKWENLQRLKPNDEIKFVLCSREDYDWAKQLLAEHALNEKCQVIFSPVFSQVKPTDLADWVLADKLPVRMQVQLHKILWGETPGK

SEQ ID NO: 31615 - protein, 211 aa, Methylobacillus sp.
  REGION 1..211: note = tr|A0A1A9NKK8|A0A1A9NKK8_9PROT 7-carboxy-7-deazaguanine synthase OS=Methylobacillus sp. MM3 OX=1848039 GN=queE PE=3 SV=1
MLKIHEIFHSLQGESTRVGLPTVFVRLTGCPLRCGYCDTAYAFQGGENMTLQQILERVASYGARYVTVTGGEPLAQKQCISLLKMLCDAGYDVSLETGGSLDTSHVDPRVSVILDIKTPGSGEVQKNLWTNLQHLKPTDEVKFVLCGREDYEWAKRVLADQGIAAKCTVLFSPVYSQLNPTELAEWVLQDRLPVRMQVQLHKILWGETPGK

SEQ ID NO: 31616 - protein, 215 aa, Methylobacter sp.
  REGION 1..215: note = tr|A0A522WXM3|A0A522WXM3_9GAMM 7-carboxy-7-deazaguanine synthase OS=Methylobacter sp.; OX = 2051955 GN=queE PE=3 SV=1
MTVSLLRITEIFYSLQGESNTVGLPTVFIRLTGCPLRCVYCDTAYAFSGGKKLAIDVIIAQAEQYETQYITVTGGEPLAQPGCLELMTTLLDKGYIVSLETSGALDISEVDPRVIKVMDLKTPGSGELSKNRYQNIEYLTPKDQVKFVIGNDEDYDWSKALLSEHDLPNRCEILFSPVMGQQNPTELAEKILKDRLPVRFQLQLHKILWDDAQGK

SEQ ID NO: 31617 - protein, 213 aa, Methylobacter sp.
  REGION 1..213: note = tr|A0A521X7R5|A0A521X7R5_9GAMM 7-carboxy-7-deazaguanine synthase OS=Methylobacter sp.; OX = 2051955 GN=queE PE=3 SV=1
MSLLRITEIFYSIQGESNTVGLPTVFVRLTGCPLRCVYCDTAYAFTGGKKIEIDAVIAEVEQYGARYITVTGGEPLAQPGCLELMTKLADKGYVVSLETSGALDVSKVDPRIVKVMDLKTPSSGELSRNFYQNIEYLTAKDQVKFVIGNDKDYDWSKSVLIEYDLPNRCEILFSPVMGQQNPTELAEKILKDRLPVRFQLQLHKLLWDDAQGK

SEQ ID NO: 31618 - protein, 213 aa, Methylobacter tundripaludum
  REGION 1..213: note = tr|A0A2S6GFL1|A0A2S6GFL1_9GAMM 7-carboxy-7-deazaguanine synthase OS=Methylobacter tundripaludum OX=173365 GN=queE PE=3 SV=1
MTLLRITEIFYSLQGESNTVGLPTVFIRLTGCPLRCVYCDTAYAFTGGKKIGIDAVMAEVKQYDTKYITVTGGEPLAQQGCIELMTKLLDKGYVVSLETSGALDVSEVDPRVVKVMDLKTPSSGELSRNRYQNIEHLTAKDQVKFVIGNDKDYDWSKGILAEYALSDRCDILFSPMMGRQNPTELAEKILKDRLPVRFQLQLHKILWDDAQGK

SEQ ID NO: 31619 - protein, 213 aa, Methylobacter tundripaludum
  REGION 1..213: note = tr|A0A2S6HB06|A0A2S6HB06_9GAMM 7-carboxy-7-deazaguanine synthase OS=Methylobacter tundripaludum OX=173365 GN=queE PE=3 SV=1
MSSLRITEIFHSLQGESNTVGLPTVFIRLTGCPLRCVYCDTAYAFTGGEKIGIDAIIAQAEQYGTPYITVTGGEPLAQPGCLELMTKLLDKGYVVSLETSGALDVSKVDQRVVKVMDLKTPSSGELSRNFYQNIEYLTAKDQVKFVIGNDSDYDWSKSILTEYDLPNLCEILFSPVMGQQNPTELAEKILKDRLPVRFQLQLHKILWDDAQGK

SEQ ID NO: 31620 - protein, 210 aa, Methylobacterium aquaticum
  REGION 1..210: note = tr|A0A0J6S9B6|A0A0J6S9B6_9RHIZ 7-carboxy-7-deazaguanine synthase OS=Methylobacterium aquaticum OX=270351 GN=queE PE=3 SV=1
MSYAVKEIFHTLQGEGAQAGRASVFCRFAGCNLWSGREVDRAQAVCRFCDTDFVGTDGVGGGRFSQAEDLAEAIERTWNGARGRRYVVFTGGEPLLQLDAALLAAVHARGFEAAVETNGTQDPPAGIDWICVSPKAGAPLRLSRGDELKLVYPQAGLDPDALADLDFRHLWLQPMDGPDRIANTQAAVAHCLRDARWRLSVQTHKLIGIP

SEQ ID NO: 31621 - protein, 210 aa, Methylobacterium aquaticum
  REGION 1..210: note = tr|A0A0C6FSA6|A0A0C6FSA6_9RHIZ 7-carboxy-7-deazaguanine synthase OS=Methylobacterium aquaticum OX=270351 GN=nrdG PE=3 SV=1
MSYAVKEIFHTLQGEGAQAGRASVFCRFSGCNLWSGREADRAQAACRFCDTDFVGTDGVGGGRFPDAEALAEAIERTWNGARGRRYVVFTGGEPLLQLDDALLAAVHARGFEVAVETNGTQAAPAGIDWICVSPKAGAPLRLTGGHELKLVYPQAGLDPDALAELDFRHHWLQPMDGPDRIANTQAAVAHCLRDARWRLSLQTHKLIGIP

SEQ ID NO: 31622 - protein, 210 aa, Methylobacterium brachiatum
  REGION 1..210: note = tr|A0A3G2VH05|A0A3G2VH05_9RHIZ 7-carboxy-7-deazaguanine synthase OS=Methylobacterium brachiatum OX=269660 GN=queE PE=3 SV=1
MAYAVKEIFHTLQGEGAQAGRAAVFCRFAGCNLWSGREADRAAAACRFCDTDFVGLDGEGGGRFADATALADAIARTWAGGPECRYVVFTGGEPLLQLDSALIDAVHGHGFEIAIETNGTLPAPPGIDWICVSPKGANPLAQTTGHELKLVYPQADADPADFVALAFRHRFLQPMDGPEQGASTQAAIAYCRQDARWRLSLQTHKMIGIP

SEQ ID NO: 31623 - protein, 224 aa, Methylobacterium brachiatum
  REGION 1..224: note = tr|A0A1I3NUL9|A0A1I3NUL9_9RHIZ 7-carboxy-7-deazaguanine synthase OS=Methylobacterium brachiatum OX=269660 GN=queE PE=3 SV=1
MCGITVERKGFGDTVAYAVKEIFHTLQGEGAQAGRAAVFCRFAGCNLWSGREADRAAAACRFCDTDFVGLDGEGGGRFADATALADAIARTWAGGPECRYVVFTGGEPLLQLDSALIDAVHGHGFEIAIETNGTLPAPPGIDWICVSPKGANPLAQTTGHELKLVYPQVDADPADFVGLAFRHRFLQPMDGPEQGASTQAAIAYCRQDARWRLSLQTHKMIGIP

SEQ ID NO: 31624 - protein, 210 aa, unidentified
  source 1..210: note = Methylobacterium currus
  REGION 1..210: note = tr|A0A2R4WSR7|A0A2R4WSR7_9RHIZ 7-carboxy-7-deazaguanine synthase OS=Methylobacterium currus OX=2051553 GN=queE PE=3 SV=1
MSYAVKEIFHTLQGEGAQAGRASVFCRFAGCNLWSGREADRAGAVCRFCDTDFVGTDGVGGGRFADAEALAAAIEACWGGARGRRYVVFTGGEPLLQLDEALLAAVHARGFEAAVETNGTQAAPAGIDWVCVSPKAGAPLRLTSGDELKLVYPQDGLDPDALAALDFRHLWLQPMDGPDRVAHTQAAVAHCLRDARWRLSLQTHKLIGIP

SEQ ID NO: 31625 - protein, 210 aa, unidentified
  source 1..210: note = Methylobacterium dankookense
  REGION 1..210: note = tr|A0A564FTW0|A0A564FTW0_9RHIZ 7-carboxy-7-deazaguanine synthase OS=Methylobacterium dankookense OX=560405 GN=queE PE=3 SV=1
MAYAVKELFHTLQGEGAQAGRAAVFCRFAGCNLWSGREEDRETAACRFCDTDFVGLDGPGGGRFADADRLAAAIAATWEGGAHNRYVVFTGGEPLLQLDAALIEAVHARGFEIAVETNGTIAAPAGIDWICVSPKAGNPLVQRSGSELKLVFPQAGLDPETFAGLDFRHRFLQPMDGPDRAAHTGAAVAYCRTDARWRLSLQTHKILDIP

SEQ ID NO: 31626 - protein, 210 aa, unidentified
  source 1..210: note = Methylobacterium frigidaeris
  REGION 1..210: note = tr|A0A2G8MBT2|A0A2G8MBT2_9RHIZ 7-carboxy-7-deazaguanine synthase OS=Methylobacterium frigidaeris OX=2038277 GN=queE PE=3 SV=1
MSYAVKEIFHTLQGEGAQAGRASVFCRFAGCNLWSGREADRAEAVCRFCDTDFVGTDGTGGGRFADAEALAEAIERTWNGARGRRYVVFTGGEPLLQLDEALLAAVHARGFEAAVETNGTQAAPAGIDWVCVSPKAGAPLRLTRGDELKLVYPQSGLDPDALAELDFRHLWLQPMDGPDRIANTGAAVAHCLRDARWRLSLQTHKLIGIP

SEQ ID NO: 31627 - protein, 210 aa, unidentified
  source 1..210: note = Methylobacterium gnaphalii
  REGION 1..210: note = tr|A0A512JJ17|A0A512JJ17_9RHIZ 7-carboxy-7-deazaguanine synthase OS=Methylobacterium gnaphalii OX=1010610 GN=queE PE=3 SV=1
MAYAVKEVFHTLQGEGAQAGRAAVFCRFAGCNLWSGREEDRAEAACRFCDTDFVGLNGEGGGRFATAADLAAAIAQTWEGGKTDRFVVFTGGEPLLQLDAALIDAVHARGFEIAVETNGTLAAPEGIDWICVSPKAGNPLVQTSGHELKLVFPQEGAEPERFADLAFTRRFLQPMDGPDRLAYTQAAIAYCRADARWRLSLQTHKILGIP

SEQ ID NO: 31628 - protein, 212 aa, Methylobacterium gossipiicola
  REGION 1..212: note = tr|A0A1I2R5U8|A0A1I2R5U8_9RHIZ 7-carboxy-7-deazaguanine synthase OS=Methylobacterium gossipiicola OX=582675 GN=queE PE=3 SV=1
MAYAVKELFHTLQGEGAQAGRAAVFCRFAGCNLWSGREEDRATAACRFCDTDFVGLDGEGGGRFATPEDLAEAIAAAWEGGPRNHYVVFTGGEPLLQLDPALIAAVHARGFEIAVETNGTLAAPEGIDWICVSPKAGNPLVQITGHELKLVYPQVEAEADPARFADLAFRHHWLQPMDGPERLANTQAAVAYCRSDARWRLSLQTHKIIGIP

SEQ ID NO: 31629 - protein, 210 aa, unidentified
  source 1..210: note = Methylobacterium haplocladii
  REGION 1..210: note = tr|A0A512IR19|A0A512IR19_9RHIZ 7-carboxy-7-deazaguanine synthase OS=Methylobacterium haplocladii OX=1176176 GN=queE PE=3 SV=1
MAYAVKELFHTLQGEGAQAGRAAVFCRFTGCNLWSGREEDRADAACRFCDTDFVGMNGDGGGRFPSAADLAAAIDAAWEGGEVDRFVVFTGGEPLLQLDTALIAAVHGHGFEIAVETNGTLPAPEGIDWICVSPKAGNPLVQTSGHELKLVFPQAGAEPERFADLAFLRRFLQPMDGPDRLANTQAAIAYCRGDARWRLSLQTHKILGIP

SEQ ID NO: 31630 - protein, 210 aa, unidentified
  source 1..210: note = Methylobacterium indicum
  REGION 1..210: note = tr|A0A0J6R5A4|A0A0J6R5A4_9RHIZ 7-carboxy-7-deazaguanine synthase OS=Methylobacterium indicum OX=1775910 GN=queE PE=3 SV=1
MSYAVKEIFHTLQGEGAQAGRASVFCRFAGCNLWSGREADRAQAVCRFCDTDFVGTDGLGGGRFPDAEALAEAIERTWNGARGRRYVVFTGGEPLLQLDAALLAAVHARGFEVAVETNGTQDAPAGIDWICVSPKAGAPLRLTRGHELKLVYPQAELDPDTLAELDFRHHWLQPMDGPDRIANTQAAVAHCLRDARWRLSLQTHKLIGIP

SEQ ID NO: 31631 - protein, 210 aa, unidentified
  source 1..210: note = Methylobacterium indicum
  REGION 1..210: note = tr|A0A147FRX4|A0A147FRX4_9RHIZ 7-carboxy-7-deazaguanine synthase OS=Methylobacterium indicum OX=1775910 GN=queE PE=3 SV=1
MSYAVKEIFHTLQGEGAQAGRASVFCRFAGCNLWSGREADRAQAVCRFCDTDFVGTDGLGGGRFPDAEALAEAIERTWNGARGRRYVVFTGGEPLLQLDAALLAAVHARGFEVAVETNGTQDAPAGIDWICVSPKAGAPLRLTHGHELKLVYPQAELDPDILAELDFRHLWLQPMDGPDRIANTQAAVAHCLRDARWRLSLQTHKLIGIP

SEQ ID NO: 31632 - protein, 210 aa, Methylobacterium mesophilicum
  REGION 1..210: note = tr|M7XXB2|M7XXB2_9RHIZ 7-carboxy-7-deazaguanine synthase OS=Methylobacterium mesophilicum SR1.6/6; OX = 908290 GN=queE PE=3 SV=1
MAYAVKEIFHTLQGEGAQAGRAAVFCRFAGCNLWSGREADRAAAACRFCDTDFVGMDGEGGGRFADAAALADAIAAAWAGGPNNRYVVFTGGEPLLQLDTPLIAAVHAQGFEIAIETNGTLPAPPGIDWICVSPKGRNALAQITGDELKLVYPQADADPSAFVGLDFRHRFLQPMDGPDQGASTQAAIAYCRRDARWRLSLQTHKMIGIP

SEQ ID NO: 31633 - protein, 210 aa, Methylobacterium nodulans
  REGION 1..210: note = tr|B8IG28|B8IG28_METNO 7-carboxy-7-deazaguanine synthase OS=Methylobacterium nodulans (strain LMG 21967 / CNCM I-2342 / ORS 2060) OX=460265 GN=queE PE=3 SV=1
MSYAVKEIFHTLQGEGAQAGRAAVFCRFAGCNLWSGREADRADAICRFCDTDFVGTDGEGGGRFADAEALAAAIAAAWGGGRDGRYVVFTGGEPLLQLDAPLLAAVHARGFATAVETNGTQDAPEGLDWICVSPKAGAPLRITRGDELKLVYPQAGLRPEDLVGLDFRHFWLQPMDGPDRLANTEAAVAYCLRDARWRLSLQTHKLIGIP

SEQ ID NO: 31634 - protein, 230 aa, Methylobacterium nodulans
  REGION 1..230: note = tr|B8IAL9|B8IAL9_METNO 7-carboxy-7-deazaguanine synthase OS=Methylobacterium nodulans (strain LMG 21967 / CNCM I-2342 / ORS 2060) OX=460265 GN=queE PE=3 SV=1
MTVFAVNEIFETFQGEAAFTGTPSVFVRLQGCPVGCAFCDTKMTWHVRPEHEIEVGAMIAKTEDAPTWARLHDEDLAMLVGEFRARHVVFTGGEPALYDLTEVSRRLIDQGRTVQLETSGTALIRIDPHAWVTVSPKIDMPGGLKVLPAAVARANEIKMPIGKPADIEKLQAFLAEHPAVGVAYTGSGPALLIWLQPLSQSEKATALCMEAAAANGWRLSLQTHKFVGVR

SEQ ID NO: 31635 - protein, 210 aa, Methylobacterium organophilum
  REGION 1..210: note = tr|A0A2U1ETH3|A0A2U1ETH3_METOR 7-carboxy-7-deazaguanine synthase OS=Methylobacterium organophilum OX=410 GN=queE PE=3 SV=1
MAYAVKEIFHTLQGEGAQAGRAAVFCRFAGCNLWSGREADRAAAACRFCDTDFVGMDGEGGGRFADAASLADAIAATWAGGAENRYVVFTGGEPLLQLDTPLIEAVHAAGFEIAIETNGTLPAPPGIDWICVSPKGSNALAQVSGHELKLVYPQADADPAAFVGLAFQHRFLQPMDGPDRAASTEAAIAYCRRDARWRLSLQTHKMIGIP

SEQ ID NO: 31636 - protein, 210 aa, Methylobacterium oryzae
  REGION 1..210: note = tr|A0A089Q7M0|A0A089Q7M0_9RHIZ 7-carboxy-7-deazaguanine synthase OS=Methylobacterium oryzae CBMB20 OX=693986 GN=queE PE=3 SV=1
MAYAVKEIFHTLQGEGAQAGRAAVFCRFAGCNLWSGREADRASAACRFCDTDFIGMDGEGGGRFTDAAALADAIAATWAGGAENRYVVFTGGEPLLQLDTPLIEAVHAAGFEIAIETNGTLPAPPGIDWICVSPKGSNALAQTSGHELKLVYPQADADPAAFVGLAFQHRFLQPMDGPDRAASTEAAIAYCRRDARWRLSLQTHKIIGIP

SEQ ID NO: 31637 - protein, 210 aa, unidentified
  source 1..210: note = Methylobacterium oxalidis
  REGION 1..210: note = tr|A0A512IWZ1|A0A512IWZ1_9RHIZ 7-carboxy-7-deazaguanine synthase OS=Methylobacterium oxalidis OX=944322 GN=queE PE=3 SV=1
MAYAVKELFHTLQGEGAQAGRAAVFCRFAGCNLWSGREEDRAGAACTFCDTDFVGMDGPGGGRFAGADDLAGRIAHTWEGGAHGRFVVFTGGEPLLQLDAALIAAVHARGFAIAVETNGTLAAPPGLDWICVSPKAGNALVQTSGHELKLVFPQAGLDPADLAGLDFPHRWLQPMDGPQAAANTRAAVAYCRSDARWRLSLQTHKMIGIP

SEQ ID NO: 31638 - protein, 210 aa, unidentified
  source 1..210: note = Methylobacterium phyllostachyos
  REGION 1..210: note = tr|A0A1H0G0R6|A0A1H0G0R6_9RHIZ 7-carboxy-7-deazaguanine synthase OS=Methylobacterium phyllostachyos OX=582672 GN=queE PE=3 SV=1
MTYAVKELFHTLQGEGAQAGRAAVFCRFAGCNLWSGREADRAAAACRFCDTDFIGLDGEGGGRFADADTLATAIAATWAGGPENRYVVFTGGEPLLQLDAPLIDAVHARGFEIAIETNGTLPAPPGIDWICVSPKGRNALAQTNGHELKLVYPQDDADPADFVGLDFRHRFLQPLDGSGRVASTEAAIAYCRRDARWRLSLQTHKMIGIP

SEQ ID NO: 31639 - protein, 210 aa, Methylobacterium platani
  REGION 1..210: note = tr|A0A179SAT6|A0A179SAT6_9RHIZ 7-carboxy-7-deazaguanine synthase OS=Methylobacterium platani OX=427683 GN=queE PE=3 SV=1
MSYAVKEIFHTLQGEGAQAGRASVFCRFAGCNLWSGREADRADAVCRFCDTDFVGTDGIGGGRFPDAEALAAAIAACWGEARGPRYVVFTGGEPLLQLDEALLAAVHARGFEAAVETNGTQVPPEGIDWVCVSPKAGAPLRLTRGHELKLVYPQAGLDPDALAELDFRHLWLQPMDGPDRIANTEAAVAHCLRDGRWRLSLQTHKLIGIP

SEQ ID NO: 31640 - protein, 210 aa, unidentified
  source 1..210: note = Methylobacterium pseudosasicola
  REGION 1..210: note = tr|A0A1I4LBI6|A0A1I4LBI6_9RHIZ 7-carboxy-7-deazaguanine synthase OS=Methylobacterium pseudosasicola OX=582667 GN=queE PE=3 SV=1
MSYAVKEIFHTLQGEGAQAGRAAVFCRFAGCNLWSGREADRAAAACRFCDTDFVGLDGEGGGRFADATALADAIARTWAGGPECRYVVFTGGEPLLQLDTPLIEAVHRHGFEIAIETNGTLPAPPGIDWICVSPKGANPLAQTSGHELKLVYPQMDADPADFVGLAFRHRFLQPMDGPEQSASTQAAIAYCRQDARWRLSLQTHKMIGIP

SEQ ID NO: 31641 - protein, 210 aa, Methylobacterium radiotolerans; identical to SEQ ID NO: 31635
  REGION 1..210: note = tr|A0A3S3DDU8|A0A3S3DDU8_9RHIZ 7-carboxy-7-deazaguanine synthase OS=Methylobacterium radiotolerans OX=31998 GN=queE PE=3 SV=1

SEQ ID NO: 31642 - protein, 210 aa, Methylobacterium radiotolerans; identical to SEQ ID NO: 31635
  REGION 1..210: note = tr|B1LYV6|B1LYV6_METRJ 7-carboxy-7-deazaguanine synthase OS=Methylobacterium radiotolerans (strain ATCC 27329 / DSM 1819 / JCM 2831 / NBRC 15690 / NCIMB 10815 / 0-1)OX=426355 GN=queE PE=3 SV=1

SEQ ID NO: 31643 - protein, 210 aa, Methylobacterium sp.
  REGION 1..210: note = tr|A0A0Q5YTL7|A0A0Q5YTL7_9RHIZ 7-carboxy-7-deazaguanine synthase OS=Methylobacterium sp. Leaf399 OX=1736364 GN=queE PE=3 SV=1
MSYAVKELFHTLQGEGAQAGRAAVFCRFSGCNLWSGREEDRADAACRFCDTDFIGMDGDGGGRFADADTLARAIAATWGGGDHHRYVVFTGGEPLLQLDAALIDAVHAAGFEIAVETNGTLAAPAGIDWICVSPKAGNPLVQASGHELKLVYPQAGFDLAALAALPFRHHWLQPMDGPDRIAHTRAAVEACRSDARWRLSLQTHKIIGIP

SEQ ID NO: 31644 - protein, 210 aa, Methylobacterium sp.
  REGION 1..210: note = tr|A0A4Z0NLA7|A0A4Z0NLA7_9RHIZ 7-carboxy-7-deazaguanine synthase OS=Methylobacterium sp. 6HR-1 OX=1141884 GN=queE PE=3 SV=1
MSYAVKEIFHTLQGEGAQAGRASVFCRFAGCNLWSGREADRAEAVCRFCDTDFVGTDGTGGGRFPDAEALADAIERCWGGARGRRYVVFTGGEPLLQLDAALLSAVRARGFECAVETNGTQDAPAGIDWVCVSPKAGAPLRLTRGDELKLVYPQAGLDPDALAELDFRHLWLQPMDGPDRIANTQAAVAHCLRDARWRLSLQTHKLIGIP

SEQ ID NO: 31645 - protein, 210 aa, unidentified
  source 1..210: note = Methylobacterium tarhaniae
  REGION 1..210: note = tr|A0A0J6SJS0|A0A0J6SJS0_9RHIZ 7-carboxy-7-deazaguanine synthase OS=Methylobacterium tarhaniae OX=1187852 GN=queE PE=3 SV=1
MSYAVKEIFHTLQGEGAQAGRASVFCRFAGCNLWSGREADRAEAVCRFCDTDFVGTDGVGGGRFADAVALADAIERSWGGARGRRYVVFTGGEPLLQLDEALLAAVHARGFEAAVETNGTQDAPAGIDWICVSPKAGAPLRLTRGDELKLVYPQAALDPDALAGLDFRHLWLQPMDGPDRIANTQAAVAHCLRDARWRLSLQTHKLIGIP

SEQ ID NO: 31646 - protein, 210 aa, Methylobacterium variabile
  REGION 1..210: note = tr|A0A0J6S787|A0A0J6S787_9RHIZ 7-carboxy-7-deazaguanine synthase OS=Methylobacterium variabile OX=298794 GN=queE PE=3 SV=1
MSYAVKEIFHTLQGEGAQAGRASVFCRFAGCNLWSGREADRAQAVCRFCDTDFVGTDGTGGGRFADAEALAEAIAACWGEARGRRYVVFTGGEPLLQLDAPLLAAVRARGFEAAVETNGTQEPPEGIDWVCVSPKAGAPLRLTRGDELKLVYPQAGLDPDALAELDFRHLWLQPMDGPDRIANTQAAVAHCLRDARWRLSLQTHKLIGIP

SEQ ID NO: 31647 - protein, 213 aa, unidentified
  source 1..213: note = Methylocaldum marinum
  REGION 1..213: note = tr|A0A250L0C6|A0A250L0C6_9GAMM 7-carboxy-7-deazaguanine synthase OS=Methylocaldum marinum; OX = 1432792 GN=queE PE=3 SV=1
MNQLRVTEIFYSLQGESRTVGLPTVFVRLTGCPLRCVYCDTAYAFTGGRKMSIDEILDEVGSYHPCYVTVTGGEPLAQRGCFTLLDALIEKGYEVSLETSGALDVSEVNPRVVKVLDLKTPSSGEASKNLYRNLDFLDRKDQLKLVIMNEEDYEWAKAAMKEYRLVDRCEVLFSPAMGAQNPTELAEKILRDRLPVRFQIQLHKILWGDAPGR

SEQ ID NO: 31648 - protein, 213 aa, Methylocaldum sp.
  REGION 1..213: note = tr|A0A4R7AHG4|A0A4R7AHG4_9GAMM 7-carboxy-7-deazaguanine synthase OS=Methylocaldum sp. 0917 OX=2485163 GN=queE PE=3 SV=1
MNQLRVTEIFYSLQGESRTVGLPTVFVRLTGCPLRCVYCDTAYAFTGGQKMSIDEIVAEVGTYHPGYVTVTGGEPLAQRGCLVLLDALVEKGYEVSLETSGALDVSDVNPKVVKVLDLKTPSSCEESRNLYRNLNYLDRKDQLKFVIMNDADYQWAKAKMEEYGLSDRCEVLFSPAMGTQDPAELADKILRDRLPVRFQVQLHKILWGDTPGR

SEQ ID NO: 31649 - protein, 248 aa, unidentified
  source 1..248: note = Methylocapsa palsarum
  REGION 1..248: note = tr|A0A1I3ZV89|A0A1I3ZV89_9RHIZ 7-carboxy-7-deazaguanine synthase OS=Methylocapsa palsarum; OX = 1612308 GN=queE PE=3 SV=1
MIKDLERGLFCFGRAPESGTRTSPIEIAALKELRGDPMRIYSVKEIFLTLQGEGAHAGRAAVFCRFSGCNLWSGHDKDRAGADCFFCDTDFVGTDGIGGGKFAHAGELALAIERTWDAGATDRFVVFTGGEPLLQLDAALIEAVHAHGFEIAVETNGTLPPPDGLDWICVSPKAGADLVARKGSELKLVFPQEGLGPEDVADLAFERFWLQPMDGANIAENTKAAVAYCLAHPHWRLSVQTHKMIGVP

SEQ ID NO: 31650 - protein, 211 aa, unidentified
  source 1..211: note = Methyloceanibacter caenitepidi
  REGION 1..211: note = tr|A0A0A8K3N7|A0A0A8K3N7_9RHIZ 7-carboxy-7-deazaguanine synthase OS=Methyloceanibacter caenitepidi OX=1384459 GN=queE PE=3 SV=1
MYAVKEIFYTLQGEGVQAGRPAVFCRFAGCNLWSGREKDREDAVCRFCDTEFVGTDGPGGGRFETAEDLVQACRAAWKGNSGAPEFVVLTGGEPMLQVDVPLIDAFHEAGFETAIETNGTLPVLDDIDWICVSPKAGAPIRQRSGDELKLVYPQPEIKPEDMLGLSFTHFLLQPLDDQSGGASNLEAAVDYCLRHPHWRLSLQTHKILGLP

SEQ ID NO: 31651 - protein, 226 aa, unidentified
  source 1..226: note = Methyloceanibacter marginalis
  REGION 1..226: note = tr|A0A1E3W431|A0A1E3W431_9RHIZ 7-carboxy-7-deazaguanine synthase OS=Methyloceanibacter marginalis OX=1774971 GN=queE PE=3 SV=1
MYAVKEIYYTLQGEGAQAGRPAVFCRFAGCNLWSGREQDRTEAVCNFCDTDFVGTDAPAVANTPTPIVWREPAARPGAAIPVRPPFVVLTGGEPMLQVDEALVDALHITGFEVAIETNGTLPVLPSIDWVCVSPKAGAPLKQRSGDELKLVYPQDRLWPEEVQGLDFTHFLLQPMDDGADSPANVRAAIDYCLAHPKWRLSLQTHKLLGLPYWCGVRPLAGARKIP

SEQ ID NO: 31652 - protein, 211 aa, unidentified
  source 1..211: note = Methyloceanibacter methanicus
  REGION 1..211: note = tr|A0A1E3W552|A0A1E3W552_9RHIZ 7-carboxy-7-deazaguanine synthase OS=Methyloceanibacter methanicus OX=1774968 GN=queE PE=3 SV=1
MYAVKEIYYTLQGEGAQAGRPAVFCRFAGCNLWSGRECDRADALCSFCDTDFAGLDGPGGGRFETAGDLVGACRSAWRGNSGAAQFVVLTGGEPMLQVDEDLIEAFHRDGFEIAIETNGTLPVSDEIDWICVSPKPGMPLRQRSGDELKLVYPQADIAPEEVLGLAFTHFLLQPLDDRAGGTANLQAAIDYCLRHPRWRLSLQTHKILGLP

SEQ ID NO: 31653 - protein, 211 aa, unidentified
  source 1..211: note = Methyloceanibacter sp.
  REGION 1..211: note = tr|A0A353IQZ8|A0A353IQZ8_9RHIZ 7-carboxy-7-deazaguanine synthase OS=Methyloceanibacter sp. OX=1965321 GN=queE PE=3 SV=1
MYAVKEIFYTLQGEGAQSGRPAVFCRFTGCNLWSGREADRADAICRFCDTDFIGTDGTGGGRFETAEDLVGACHTAWRGNSGAAPFVVLTGGEPMLQVDEVLIQAFHGYGFEIAIETNGSLPVSDEIDWICVSPKPGIPLRQQSGDELKLIYPQAEIAPDDVLGLAFTHFLLQPLDDRAGGTSNLQSALDYCLRHPRWRLSLQTHKILGLP

SEQ ID NO: 31654 - protein, 230 aa, unidentified
  source 1..230: note = Methyloceanibacter stevinii
  REGION 1..230: note = tr|A0A1E3VLG3|A0A1E3VLG3_9RHIZ 7-carboxy-7-deazaguanine synthase OS=Methyloceanibacter stevinii OX=1774970 GN=queE PE=3 SV=1
MASWTWGLSQGRFAPTYPLMYAVKEIYYTLQGEGAQAGRPAVFCRFAGCNLWSGREKDRADAICRFCDTEFVGTDGPGGGRFETAEDVVQACRAAWKGNSGAAEFVVLTGGEPMLQVDEALIDAFHQAGFETAIETNGTLPVLDEIDWICVSPKAGAPIRQRSGDELKLVYPQPDMEPEDVLGLSFTHFLLQPLDDRSGGTTNLEAALDYCLRHPQWRLSLQTHKILGLP

SEQ ID NO: 31655 - protein, 211 aa, unidentified
  source 1..211: note = Methyloceanibacter superfactus
  REGION 1..211: note = tr|A0A1E3VPB3|A0A1E3VPB3_9RHIZ 7-carboxy-7-deazaguanine synthase OS=Methyloceanibacter superfactus OX=1774969 GN=queE PE=3 SV=1
MYAVKEIYYTLQGEGAQAGRPAVFCRFAGCNLWSGREQDAADAVCNFCDTDFVGTDGPGGGKFADADALARACREAWRGNSGTPPFVVLTGGEPMLQVDEALVAALHTVGFEVAIETNGTLPVLPSIDWVCVSPKAGAPLRQRSGDELKLVYPQDRLWPDEVQTLDFTHFLLQPLDDGSGAPENVRAAIDYCLAHPKWRLSLQTHKLLGLP

SEQ ID NO: 31656 - protein, 211 aa, Methylocella silvestris
  REGION 1..211: note = tr|A0A2J7TJV3|A0A2J7TJV3_METSI 7-carboxy-7-deazaguanine synthase OS=Methylocella silvestris OX=199596 GN=queE PE=3 SV=1
MGRYAVKEIFPTLQGEGAQAGRAAVFCRFAGCNLWSGREQDRAAASCPFCDTDFIGTDGTGGGVFAGADDLAGVIEAAWLGGPGGRYVVFTGGEPLLQLDEPLIAAVHARGFEAAVETNGTLQPPAGVDWLCVSPKAGAPIVVTAGSELKLVYPQDDLLPDALSGLDFAHFWLQPMDGANVEANTKAAVAYCLAHPDWRLSLQTHKLIGIP

SEQ ID NO: 31657 - protein, 211 aa, Methylocella silvestris
  REGION 1..211: note = tr|B8ESP0|B8ESP0_METSB 7-carboxy-7-deazaguanine synthase OS=Methylocella silvestris (strain DSM 15510 / CIP 108128 / LMG 27833 / NCIMB 13906 / BL2) OX=395965; GN = queEPE=3 SV=1
MGRYAVKEIFPTLQGEGAQAGRAAVFCRFAGCNLWSGREKDRAAAACPFCDTDFIGTDGPGGGVFGGAEELAGAIEAAWLGGPAGRYVVFTGGEPLLQLDDALIAAVHARGFEAAVETNGTLEPPAGVDWLCVSPKAGAPIVVTAGSELKLVYPQDDLLPDALSGLQFAHFWLQPMDGANVDANTKAAVAYCLAHPDWRLSLQTHKLIGIP

SEQ ID NO: 31658 - protein, 210 aa, Methylocella tundrae
  REGION 1..210: note = tr|A0A4V6IMM0|A0A4V6IMM0_METTU 7-carboxy-7-deazaguanine synthase OS=Methylocella tundrae; OX = 227605 GN=queE PE=3 SV=1
MAYAVKELFLTLQGEGAQAGRAAVFCRFVGCNLWSGREKDRVEATCSFCDTDFVGTDGEGGGSFARPEALAAAIEAAWRGGTGDRFVVFTGGEPLLQLDEALIEAAHARGFEVAVETNGTLEPPRGVDWLCVSPKAGAALTVTRGSELKLVFPQADLPPDALSGLDFAHFWLQPMDGADVAANTAAAIAYCLSHPHWRLSVQTHKLIGIP

SEQ ID NO: 31659 - protein, 213 aa, unidentified
  source 1..213: note = Methylococcaceae bacterium
  REGION 1..213: note = tr|A0A1Z9UBY0|A0A1Z9UBY0_9GAMM 7-carboxy-7-deazaguanine synthase OS=Methylococcaceae bacterium TMED282 OX=1986758 GN=queE PE=3 SV=1
  VARIANT 26: note = Xaa can be any naturally occurring amino acid
  VARIANT 45..46: note = Xaa can be any naturally occurring amino acid
MSYSVKEIYLTLQGEGAQQGRAAVFXRFAGCNLWSGKEIDRSTAXXNFCDTDFVGTDGPGGAKYPDVESLVGAIELEWAKNIESNSDRLVVFTGGEPALQLTSELTRSLRNSGFKCAIETNGTLPIKAELDWITVSPKTTQKLEVFAGDELKLVYPQQNIKPELFEALDFHHFFLQPKDDKNFNKNLRKSIEYCLKHPRWRLSVQTHKYIGIA

SEQ ID NO: 31660 - protein, 213 aa, unidentified
  source 1..213: note = Methylococcaceae bacterium
  REGION 1..213: note = tr|A0A1Z8WQI1|A0A1Z8WQI1_9GAMM 7-carboxy-7-deazaguanine synthase OS=Methylococcaceae bacterium TMED69 OX=1986766 GN=queE PE=3 SV=1
MNFSVKEIYHTIQGEGARSGRAAVFCRFSGCNLWSGLEHQRKNAVCNFCDTDFNGTDGQNGGKFLTAEKLASTIERVWVDSTSDSDHRYIVFTGGEPGLQISAELVSSLQTKRFEVAIETNGTVALPENLDWVTVSPKTWNSFVVTKGSELKFVFPQKKLAPEEFKLLDFEHFYIQPKFDEQYDDNLLKSLDFCLKYPKWKLSLQTHKYVGIL

SEQ ID NO: 31661 - protein, 213 aa, unidentified
  source 1..213: note = Methylococcales bacterium
  REGION 1..213: note = tr|A0A418RGH8|A0A418RGH8_9GAMM 7-carboxy-7-deazaguanine synthase OS=Methylococcales bacterium OX=2304002 GN=queE PE=3 SV=1
MSSLRITEIFYSLQGESNTVGIPTVFIRLTGCPLRCVYCDTAYAFTGGKKISINEIIAEVEQYNTPYITVTGGEPLAQAACNELLVELVNKDFKVSLETSGAIEISNVNQRVIKVMDLKTPSSGELNKNLYTNIQYLNSKDQVKFVISNDEDYNWSKTILTEYELTNRCEVLFSPVMGIQNPTELAEKILRDRLPVRFQIQLHKLLWNDAQGK

SEQ ID NO: 31662 - protein, 213 aa, unidentified
  source 1..213: note = Methylococcales bacterium
  REGION 1..213: note = tr|A0A3A2ITP1|A0A3A2ITP1_9GAMM 7-carboxy-7-deazaguanine synthase OS=Methylococcales bacterium OX=2304002 GN=queE PE=3 SV=1
MSSLRITEIFYSLQGESNTVGIPTVFIRLTGCPLRCVYCDTAYAFTGGKKLSINDIITEAEQYNTPFITVTGGEPLAQPGCIELLTELLNKNFKVSLETSGAIDISNVDQRTVKVMDLKTPGSGELNKNLYENIQYLNSKDQVKFVIGTNEDYNWSKAILTEYALSDRCEILFSPVMGLQNPTELAEKILRDRLPVRFQIQLHKLLWDDAQGK

SEQ ID NO: 31663 - protein, 215 aa, Methylococcus capsulatus
  REGION 1..215: note = tr|Q609K1|Q609K1_METCA 7-carboxy-7-deazaguanine synthase OS=Methylococcus capsulatus (strain ATCC 33009 / NCIMB 11132 / Bath) OX=243233 GN=queE PE=3 SV=1
MTETLVRITEIFFSLQGETRTVGLPTVFVRLTGCPLRCSYCDTAYAFSGGERMSIAEIVERVGRYGARYVTVTGGEPLAQKACLPLLTALCDEGYQVSLETGGAHDISAVDPRVVRVVDLKTPGSGEASRNLYANVDALRQGDQVKFVIADRPDYDWAVAKLDEHRLAERCEILFSPVAGALQPAQLAEWILRDRLPVRFQLQLHKLLWGDTPGH

SEQ ID NO: 31664 - protein, 213 aa, Methylococcus sp.
  REGION 1..213: note = tr|A0A432RN31|A0A432RN31_9GAMM 7-carboxy-7-deazaguanine synthase OS=Methylococcus sp.; OX = 39769 GN=queE PE=3 SV=1
MEYLRITEIFYSIQGESSTTGLPTTFVRLTGCPLRCTYCDSEYAFTGGELMSLSDIVARVSEQPTRFVTVTGGEPLAQKNCSWLLEELIDRGFTVSLETSGAMDLASVDSRVVKVMDLKTPSSGEQHRNLYSNLEYLNHKDQVKFVIGSQEDYAWACDTVREFGLEERCQVLFSPVAGQMGATWLADNILRDGIQVRLQVQLHKLLWGDVAGK

SEQ ID NO: 31665 - protein, 215 aa, unidentified
  source 1..215: note = Methylocucumis oryzae
  REGION 1..215: note = tr|A0A0F3IGL5|A0A0F3IGL5_9GAMM 7-carboxy-7-deazaguanine synthase OS=Methylocucumis oryzae; OX = 1632867 GN=queE PE=3 SV=1
MMDSELRITEIFYSLQGESNTVGIPTAFIRLTGCPLRCSYCDTAYAFSGGQKMTIADILAEVQTYQCQYVTVTGGEPLAQPGCLTLMTHLADLGFYVSLETSGALDISAVDARIVKVMDLKTPSSGELSKNRYENLAFLTAKDQVKFVIGSQEDYEWSKAWLVEQRLHETCQILFSPVADQQNPTELAEHILRDRLPVRFQVQLHKLLWHDARGK

SEQ ID NO: 31666 - protein, 228 aa, unidentified
  source 1..228: note = Methylocystaceae bacterium
  REGION 1..228: note = tr|A0A395CXB2|A0A395CXB2_9RHIZ 7-carboxy-7-deazaguanine synthase OS=Methylocystaceae bacterium OX=2052174 GN=queE PE=3 SV=1
MFGKNPVRTQEAGDGQRLWIQEVFYTLQGEGPFSGQPAVFIRTAGCNLRCFWCDTDFESSEWRPDLSEITATVESLRPAHCDLIVITGGEPMRQNIVPLIRILLSKGYRVQIETNGTLWLDLPEHENLSIICSPKTPTISSDLVERIDAFKYVVLHTNMDSEDGLPSGSTQLADRPSRLFRPPDGATIYVSPCDERGQLEANIKAATESALKHGYRLSLQTHKIIGLP

SEQ ID NO: 31667 - protein, 210 aa, unidentified
  source 1..210: note = Methylocystaceae bacterium
  REGION 1..210: note = tr|A0A395CXL2|A0A395CXL2_9RHIZ 7-carboxy-7-deazaguanine synthase OS=Methylocystaceae bacterium OX=2052174 GN=queE PE=3 SV=1
MAYAVKEAFKTLQGEGRQAGRAAVFCRFAGCNLWSGREEDRAAATCRFCDTDFVGTDGENGGKFADAASLAGHIAALWGPEREHRFVVLTGGEPMLQVDAALVDALHAEDFEIAIETNGSSAVLSTIDWICVSPKAGAPLVQTSGDELKLVYPQEGAEPERFEGLAFEHFLLQPMDGPDILRNTRAAIEYCLAHPRWRFSHQTHKTIGVK

SEQ ID NO: 31668 - protein, 210 aa, unidentified
  source 1..210: note = Methylocystis bryophila
  REGION 1..210: note = tr|A0A1W6MRX5|A0A1W6MRX5_9RHIZ 7-carboxy-7-deazaguanine synthase OS=Methylocystis bryophila OX=655015 GN=queE PE=3 SV=1
MPYAVKEAFLTLQGEGLQAGRAAVFCRFAGCNLWSGREKDRGEADCRFCDTDFVGADGEGGGVFRTASGLAAHLAGLWGEARAHRFAVLTGGEPLLQLDLALIAALHEQGFEIAVETNGTFPAPEGLDWICVSPKAGTSLALRQGDELKLVFPQVGAEPERYENLEFREFLLQPMDGPEISRNTKAAIDYCLAHPRWRLSLQTHKIIGVK

SEQ ID NO: 31669 - protein, 210 aa, Methylocystis heyeri
  REGION 1..210: note = tr|A0A4S4MIY5|A0A4S4MIY5_9RHIZ 7-carboxy-7-deazaguanine synthase OS=Methylocystis heyeri; OX = 391905 GN=queE PE=3 SV=1
MAYAVKEAFYTLQGEGLQAGRPAVFCRFAGCNLWSGREDDRAAAGCRFCDTDFIGVDGENGGKFRTAEELAEMLARLWGPSRDRRFVVLTGGEPMLQTDAPLIDALHRQGFEIAMETNGTLPAPETIDWICVSPKAGAPLAQTRGQELKLVYPQPGAEPELFEGLDFAHFLIQPMDGPEILRNTKAAVDYCLAHPRWRLSVQTHKTIGVK

SEQ ID NO: 31670 - protein, 210 aa, Methylocystis hirsuta
  REGION 1..210: note = tr|A0A3M9XK26|A0A3M9XK26_9RHIZ 7-carboxy-7-deazaguanine synthase OS=Methylocystis hirsuta; OX = 369798 GN=queE PE=3 SV=1
MAYIVKEAFKTLQGEGVNAGRAAVFCRFAGCNLWSGREADRAAAQCRFCDTDFVGFEGEGGGKFADATALAGHLARLWGEGRAQRFAVLTGGEPMLQIDAALVAALHGQGFEIAIETNGTLPVVPEIDWICVSPKAGAPLAQTRGAELKLVFPQQGVDPAAYERLDFTHFLLQPMDGPDVSRNTDAAVSYCLAHPRWRLSLQTHKAIGVK

SEQ ID NO: 31671 - protein, 210 aa, Methylocystis rosea
  REGION 1..210: note = tr|A0A3G8M7N4|A0A3G8M7N4_9RHIZ 7-carboxy-7-deazaguanine synthase OS=Methylocystis rosea; OX = 173366 GN=queE PE=3 SV=1
MAYIVKEAFKTLQGEGVNAGRAAVFCRFAGCNLWSGREEDRAAAQCQFCDTDFVGFAGEGGGKFADASALADHLARLWGEGRERRFAVLTGGEPMLQIDEALVAALHGQGFEIAIETNGTLPVIFGIDWICVSPKGGAPLAQTRGAELKLVYPQQGVDPAAYERLDFAHFLLQPMDGPDVSRNTDAAVSYCLAHPRWRLSVQTHKAIGVK

SEQ ID NO: 31672 - protein, 210 aa, Methylocystis sp.
  REGION 1..210: note = tr|A0A2P5NTS7|A0A2P5NTS7_9RHIZ 7-carboxy-7-deazaguanine synthase OS=Methylocystis sp.; OX = 1911079 GN=queE PE=3 SV=1
MTYAVKEAFKTLQGEGRHMGRAAVFCRFAGCNLWSGREDDREKAVCRFCDTDFVGTDGEGGGKFGAASELAAHLAALWGPGRDGRFTVLTGGEPMLQIDPALVDALHAEGFEIAVETNGTLPATPGLDWICVSPKAGAALVQTSGDELKLIFPQAGAEPGLYEGLDFRHFLLQPMDGPEILRNTRAAVEYCLAHPRWRLSLQTHKMIGVK

SEQ ID NO: 31673 - protein, 210 aa, Methylocystis sp.
  REGION 1..210: note = tr|J7QQE4|J7QQE4_METSZ 7-carboxy-7-deazaguanine synthase OS=Methylocystis sp. (strain SC2) OX=187303; GN = queE PE=3 SV=1
MAYIVKEAFKTLQGEGVNAGRAAVFCRFAGCNLWSGREADRAGAQCQFCDTDFVGFEGEGGGKFPDAAALAGHLAGLWGEGRERRFTVLTGGEPMLQIDEALVAALHGQGFEIAIETNGTLPVLPEIDWICVSPKAGASLVQTRGAELKLVFPQQGVDPAAYERLDFEHFLLQPMDGPDVSRNTDAAVSYCLTHPRWRLSVQTHKAIGVK

SEQ ID NO: 31674 - protein, 213 aa, unidentified
  source 1..213: note = Methyloglobulus morosus
  REGION 1..213: note = tr|V5DZE9|V5DZE9_9GAMM 7-carboxy-7-deazaguanine synthase OS=Methyloglobulus morosus KoM1 OX=1116472; GN = queE PE=3 SV=1
MNSVRITEIFFSLQGESNTVGIPTVFIRLTGCPLRCGYCDTEYAFTGGQKKSISDIIAEVESFGSRYITVTGGEPLAQPTCLELMTKLLDLGYVVSLETSGALDISGVDSRAVKVMDIKTPSSGELSRNLFSNIRHLNKNDQVKFVIGNDEDYTWSKRILSEYQLADRCEILFSPVMGQQNPTELADKILQDKLPVRFQIQLHKLLWDDARGK

SEQ ID NO: 31675 - protein, 211 aa, unidentified
  source 1..211: note = Methyloligella halotolerans
  REGION 1..211: note = tr|A0A1E2S1Y2|A0A1E2S1Y2_9RHIZ 7-carboxy-7-deazaguanine synthase OS=Methyloligella halotolerans OX=1177755 GN=queE PE=3 SV=1
MTYAVKEIFYTLQGEGVQAGRPAVFCRFAGCNLWSGREEDRGEAVCQFCDTDFVGTDGTGGGKFREAEALAAACKAEWKGNGGTRPFIVLTGGEPMLQVDDALIDALHGVGFEIAIETNGTLPVPRSIDWICVSPKAGAPLQQRSGDELKLVYPQDSLRPEDLWDLDFAHHLLQPMDGPHKAENTHAVIDYCMAHPKWRLSVQSHKILGLR

SEQ ID NO: 31676 - protein, 213 aa, unidentified
  source 1..213: note = Methylomagnum ishizawai
  REGION 1..213: note = tr|A0A1Y6D7P5|A0A1Y6D7P5_9GAMM 7-carboxy-7-deazaguanine synthase OS=Methylomagnum ishizawai OX=1760988 GN=queE PE=3 SV=1
MAALRITEIFRSLQGESRSVGWPTVFVRLTGCPLRCVYCDTAYAFSGGERLELADILERVAGYGVRHVCVTGGEPLAQPACLELLDALVAVGYEVSLETSGALDVAQVNPKVVKVLDLKTPGSGEAARNLYANLDHLDAKDQVKFVIADEADYAWAKAKLAEYRLPERCEVLFSPVAGVQNPTELAGKILRDRLDVRFQLQLHKLLWGDQPGV

SEQ ID NO: 31677 - protein, 213 aa, Methylomicrobium album
  REGION 1..213: note = tr|H8GL32|H8GL32_METAL 7-carboxy-7-deazaguanine synthase OS=Methylomicrobium album BG8 OX=686340 GN=queE; PE = 3 SV=1
MSSLRITEIFYSLQGESNTVGLPTVFIRLTGCPLRCVYCDTEYAFSGGKKIPIDDILAQVEAYDTPYVTVTGGEPLAQPGCLDLMTRLLDKGYTVSLETSGALDISKVDPRVVKVMDLKTPSSGELDRNLYQNLQFLDRKDQIKFVIGNEEDYAWSKAALNEYQLPERCQILFSPVMGRQDPTDLAEKILADRLPVRFQIQLHKLLWADARGK

SEQ ID NO: 31678 - protein, 213 aa, Methylomicrobium alcaliphilum
  REGION 1..213: note = tr|G4ST28|G4ST28_META2 7-carboxy-7-deazaguanine synthase OS=Methylomicrobium alcaliphilum (strain DSM 19304 / NCIMB 14124 / VKM B-2133 / 20Z) OX=1091494 GN=queE; PE = 3SV=1
MSSLKITEIFYSLQGESNTVGLPTVFVRLTGCPLRCVYCDTAYAFSGGERMSIDEIINRVGQYRTKYITVTGGEPLAQSACLELMSRLADLGYQVSIETSGALDVSGVDDRVVKVMDLKTPSSGELHKNLFDNIAYLKANDQVKFVIGDDHDYQWSKAIINQYDLDQRCELLFSPTMGQQDPAELAEKILNDNLPVRFQIQLHKLLWNDAQGR

SEQ ID NO: 31679 - protein, 213 aa, Methylomicrobium buryatense
  REGION 1..213: note = tr|A0A4P9UQP7|A0A4P9UQP7_9GAMM 7-carboxy-7-deazaguanine synthase OS=Methylomicrobium buryatense OX=95641 GN=queE PE=3 SV=1
MSSLKITEIFYSLQGESNTVGLPTVFIRLTGCPLRCVYCDTAYAFSGGERMAIDEIINRVSQYRTKYITVTGGEPLAQSACLELMSRLADLGYQVSIETSGALDVSGVDDRVVKVMDLKTPSSGELHRNLFDNIAYLKANDQVKFVIGDDHDYQWSKSIIDQYNLDQRCDLLFSPTMGQQDPTELAEKILNDNLPVRFQIQLHKLLWNDAQGR

SEQ ID NO: 31680 - protein, 213 aa, Methylomicrobium kenyense
  REGION 1..213: note = tr|A0A543VDS1|A0A543VDS1_9GAMM 7-carboxy-7-deazaguanine synthase OS=Methylomicrobium kenyense OX=269709 GN=queE PE=3 SV=1
MTSLKITEIFYSLQGESNTVGLPTVFIRLTGCPLRCVYCDTAYAFNGGERMSIDEILERTGQYGAKYITVTGGEPLAQPACHELMSRLADEGYRVSIETSGALDVSAIDDRIVKVMDLKTPSSGELHRNLYGNIEYLKAGDQVKFVIGDDCDYQWSKEIIGQYDLDQRCELLFSPTMGRQDPTELAEKILNDRLPVRFQVQLHKLLWNDAQGR

SEQ ID NO: 31681 - protein, 214 aa, unidentified
  source 1..214: note = Methylomonas denitrificans
  REGION 1..214: note = tr|A0A126T6C3|A0A126T6C3_9GAMM 7-carboxy-7-deazaguanine synthase OS=Methylomonas denitrificans OX=1538553 GN=queE PE=3 SV=1
MDQTLRITEIFYSLQGEANTVGLPTVFIRLTGCPLRCSYCDTAYAFTGGEKLGIDDILLQVSRYKTRYVTVTGGEPLAQPACNPLMVRLLDAGYQVSLETSGALDVAAVDSRVSKVMDLKTPSSGELERNRYDNIQYLTLHDQVKFVIADAADYQWAKQQLELYRLVEHCEVLFSPVMDVMSPTELAERILTDQLQVRFQIQLHKFLWNDARGK

SEQ ID NO: 31682 - protein, 214 aa, unidentified
  source 1..214: note = Methylomonas koyamae
  REGION 1..214: note = tr|A0A291IFT1|A0A291IFT1_9GAMM 7-carboxy-7-deazaguanine synthase OS=Methylomonas koyamae; OX = 702114 GN=queE PE=3 SV=1
MDQQLRITEIFYSLQGETNTVGIPTVFVRLTGCPLRCSYCDTAYAFSGGEKRSIGEIIAEVGRYHTRFVTVTGGEPLAQPGCHPLMTGLLDAGYSVSLETSGALDVAAVDARVVKVVDLKTPSSGEMQRNLYRNLDFLLPHDQVKFVIADAADYEWSKQQLEHYRLAQRCEVLFSPVMGVMPPAALAERILADQLTVRFQIQLHKYLWNDARGK

SEQ ID NO: 31683 - protein, 219 aa, unidentified
  source 1..219: note = Methylomonas koyamae
  REGION 1..219: note = tr|A0A177NCW8|A0A177NCW8_9GAMM 7-carboxy-7-deazaguanine synthase OS=Methylomonas koyamae; OX = 702114 GN=queE PE=3 SV=1
MTDELAEPSLRITEIFYSLQGEADSVGWPTVFIRLTGCPLRCAYCDTAYAFSGGEKMPISAILQRVREYSTRYVTVTGGEPLAQPGCLSLLSALADSGYQVSLETSGALDVSGVDARIVKVMDLKTPASGEMARNRYENLDCLTPRDQIKFVIADSADYQWSKQQVNEHRLAERCQVLFSPVMGQMAPSELADRILADQLPVRFQIQLHKFLWDDARGK

SEQ ID NO: 31684 - protein, 214 aa, unidentified
  source 1..214: note = Methylomonas lenta
  REGION 1..214: note = tr|A0A177NJG7|A0A177NJG7_9GAMM 7-carboxy-7-deazaguanine synthase OS=Methylomonas lenta; OX = 980561 GN=queE PE=3 SV=1
MDASLRISEIFYSLQGESNTVGLPTVFIRLTGCPLRCNYCDTAYAFTGGEKRSLQQILDQVKTYSTSYITVTGGEPLAQPACIDLLLNLLDAGYQVSLETSGALDVSKVDSRVVKVMDLKTPSSQEMQRNLYGNIQYLTAQDQVKFVIANEEDYQWSKQQLSEHDLSGRCQVLFSPVMDVMPAKDLADKILQDQLPVRFQIQLHKYLWNDARGK

SEQ ID NO: 31685 - protein, 214 aa, Methylomonas methanica
  REGION 1..214: note = tr|F9ZZV1|F9ZZV1_METMM 7-carboxy-7-deazaguanine synthase OS=Methylomonas methanica (strain MC09) OX=857087; GN = queE PE=3 SV=1
MDLSLRITEIFYSLQGESSTVGLPTVFIRLTGCPLRCGYCDTAYAFNGGEKQTLPQIMSQVKSYATRYVTVTGGEPLAQPACNALMVELLDAGFQVSLETSGALDVSGVDPRVVKVMDLKTPGSGEMRRNLYNNISFLTAQDQVKFVIADEADYQWSKQQLTEHRLTDRCQVLFSPVMGTMPAVSLADWILADQLPVRFQIQLHKYLWDDARGK

SEQ ID NO: 31686 - protein, 214 aa, Methylomonas methanica
  REGION 1..214: note = tr|A0A177LWI6|A0A177LWI6_METMH 7-carboxy-7-deazaguanine synthase OS=Methylomonas methanica OX=421 GN=queE PE=3 SV=1
MDQTLRITEIFYSLQGEANTVGLPTVFIRLTGCPLRCNYCDTAYAFNGGEKLSIDDILQQVGHYKTRYVTVTGGEPLAQPACNSLMVRLLDAGYQVSLETSGALDVAAVDSRVSKVMDLKTPSSGELERNRYDNIQYLTAHDQVKFVIADAADYQWAKQQLELYRLVEHCQVLFSPVMDVMSPTELAERILADQLQVRFQIQLHKFLWNDARGK

SEQ ID NO: 31687 - protein, 219 aa, Methylomonas sp.
  REGION 1..219: note = tr|A0A1S1Y0X8|A0A1S1Y0X8_9GAMM 7-carboxy-7-deazaguanine synthase OS=Methylomonas sp. LWB; OX = 1905845 GN=queE PE=3 SV=1
MTDELAEPSLRITEIFYSLQGEADSVGWPTVFIRLTGCPLRCAYCDTTYAFSGGEKMPISAILQRVREYSTRYVTVTGGEPLAQPGCLSLLSALADSGYQVSLETSGALDVSGVDARIVKVMDLKTPASGEMARNRYENLDCLTPRDQIKFVIADSADYQWSKQQVNEHRLAERCQVLFSPVMGQMAPSELADRILADQLPVRFQIQLHKFLWDDARGK

SEQ ID NO: 31688 - protein, 214 aa, Methylomonas sp.
  REGION 1..214: note = tr|A0A172U4Y8|A0A172U4Y8_9GAMM 7-carboxy-7-deazaguanine synthase OS=Methylomonas sp. DH-1; OX = 1727196 GN=queE PE=3 SV=1
MDQQLRITEIFYSLQGETNTVGIPTVFVRLTGCPLRCSYCDTAYAFSGGEKRSIGEIIAEVGRYHTRYVTVTGGEPLAQPGCHPLMTGLLDAGYSVSLETSGALDIAAVDARVVKVVDLKTPSSGEMQRNLYCNLDFLLPHDQVKFVIADAADYEWSKQQLEHYRLVQRCEVLFSPVMGVMSPAELAERILADQLTVRFQIQLHKYLWNDARGK

SEQ ID NO: 31689 - protein, 251 aa, unidentified
  source 1..251: note = Methylomusa anaerophila
  REGION 1..251: note = tr|A0A348APR5|A0A348APR5_9FIRM 7-carboxy-7-deazaguanine synthase OS=Methylomusa anaerophila OX=1930071 GN=queE PE=3 SV=1
MTEKHMTGNNTINLVEVFSSIQGEGLYVGCRQLFVRLAGCNLACSYCDTQDSKIMPQQAKFEQFPGKRNFRAVNNPLNIEKLAEHLNCLLRLPHHSVSITGGEPLCQPVAISQLLPLLKAPIYLETNGTLTDNLALILPYIRIISMDIKLPSSTGKSYWQEHSSFLEIAKQREVFVKIVITSATMQSEMEQAVDLIASIDYSIPLVLQPVTPYNGYEAISPDDMLFFQEKALSKLADVRVIPQTHKFIGQM

SEQ ID NO: 31690 - protein, 189 aa, Methylophaga aminisulfidivorans
  REGION 1..189: note = tr|F5SXU3|F5SXU3_9GAMM 7-carboxy-7-deazaguanine synthase OS=Methylophaga aminisulfidivorans MP OX=1026882; GN = queE PE=3 SV=1
MFVRLTGCPLRCGYCDTEYAFHGGEKMDLDEIVAKVAAFNPRYVCVTGGEPLAQPNCIPLLTALCDRGYEVSLETSGAMDISKVDKRVSRVMDLKTPGSGEESKNRYENIELLNTHDQLKFVVCHRDDYDWAKQKLQQHQLNERCEVLFSPIHGQLQPAELAEWVVEDNLPVRMQIQMHKYLWGEEKGR

SEQ ID NO: 31691 - protein, 213 aa, unidentified
  source 1..213: note = Methylophaga frappieri
  REGION 1..213: note = tr|I1YIX3|I1YIX3_METFJ 7-carboxy-7-deazaguanine synthase OS=Methylophaga frappieri (strain ATCC BAA-2434 / DSM 25690 / JAM7) OX=754477 GN=queE PE=3 SV=1
MAQCRVTEIFYSLQGETRTVGLPTVFVRLTGCPLRCGYCDTEYAFYGGQKREISDIVAEVAAYQPRYITVSGGEPLAQSSCRQLLSELCDLGAEVSLETSGAMDISNIDPRVIRVMDLKTPGSGEEKRNRYQNLQLLTTHDQLKFVICHRQDYDWSVETIRTYQLQDRCELLFSPVHSELDPAELAEWIIADNLPVRMQVQLHKYLWQDAQGR

SEQ ID NO: 31692 - protein, 210 aa, unidentified
  source 1..210: note = Methylophaga lonarensis
  REGION 1..210: note = tr|M7P3V2|M7P3V2_9GAMM 7-carboxy-7-deazaguanine synthase OS=Methylophaga lonarensis MPL OX=1286106 GN=queE; PE = 3 SV=1
MSHHGNLYSLQGESRTVGLPTVFVRLTGCPLRCGYCDTEYAFHGGQKMDISDIVAEVAAYQPRYVTVTGGEPLAQSTCLELLTELCDLGLEVSLETSGAMDISKVDSRVSRVMDLKTPGSGEVSKNRYSNIELLNTHDQLKFVICDRSDYEWAVGKINEYDLAQRCELLFSPEHGNLAATDLAEWIIADNLPVRMQIQLHKYLWNDAQGH

SEQ ID NO: 31693 - protein, 213 aa, Methylophaga muralis
  REGION 1..213: note = tr|A0A1E3GXE5|A0A1E3GXE5_9GAMM 7-carboxy-7-deazaguanine synthase OS=Methylophaga muralis; OX = 291169 GN=queE PE=3 SV=1
MAQCRITEIFYSLQGETRTVGLPTVFVRLTGCPLRCDYCDTAYAFHGGKKMEISDIVAEVKSYNPRYVTVTGGEPLAQSTCRELLTALCDLGVEVSLETSGAMDISDIDPRVVRVVDIKTPASGEVSKNRYSNIDLLNHQDQVKFVICNRDDYDWAREQLAVFNLVSRCEILFSPVHGDLTPTDLAEWIIADNLPVRMQIQLHKYLWNDAQGR

SEQ ID NO: 31694 - protein, 213 aa, unidentified
  source 1..213: note = Methylophaga nitratireducenticrescens
  REGION 1..213: note = tr|I1XEP5|I1XEP5_METNJ 7-carboxy-7-deazaguanine synthase OS=Methylophaga nitratireducenticrescens; OX = 754476 GN=queE PE=3 SV=1
MAQCRITEIFYSLQGETRTVGLPTVFVRLTGCPLRCGYCDTAYAFHGGQKMEVSDIVAEVKSYNPRYVTVTGGEPLAQNTCRELLTALCDLDVEVSLETSGAMDIGNIDPRVVRVMDLKTPASGEVSKNLYSNVDQLNHQDQVKFVICNREDYDWAREQLSSLDLIDRCEILFSPVHGDLTPTDLAEWIIADNLPVRMQIQLHKYLWNDAQGR

SEQ ID NO: 31695 - protein, 213 aa, Methylophaga sp.
  REGION 1..213: note = tr|A0A1Z7WX91|A0A1Z7WX91_9GAMM 7-carboxy-7-deazaguanine synthase OS=Methylophaga sp. 42_25_T18 OX=1856285 GN=queE PE=3 SV=1
MAQCRITEIFYSLQGETRTVGLPTVFVRLTGCPLRCGYCDTAYAFTGGKKMEITDIVEQVSAFNPRYVTVTGGEPLAQQSCHELLAALCDLGVEVSLETSGAIDISTVDPRVVCVMDLKTPKSGEESKNIYANIDKLKSHDQLKFVICDRDDYDWACQKLVEYDLPTRCEILFSPIHGELNPTDLADWIVEDNLAVRMQVQLHKYLWNDEQGR

SEQ ID NO: 31696 - protein, 213 aa, Methylophaga sp.
  REGION 1..213: note = tr|A0A2G2ECY3|A0A2G2ECY3_9GAMM 7-carboxy-7-deazaguanine synthase OS=Methylophaga sp.; OX = 2024840 GN=queE PE=3 SV=1
MAQCRITEIFYSLQGETRTVGLPTVFVRLTGCPLRCGYCDTAYAFHGGQKMEISDIVAEVKSYNPRYVTVTGGEPLAQNTCRELLTALCDLDVEVSLETSGAMDISDIDPRVVRVMDLKTPASGEVSKNRYSNIDLLNHHDQIKFVICNREDYDWAREQLSSLELIDRCEILFSPVHGDLTPTDLAEWIIADNLPVRMQIQLHKYLWNDAQGR

SEQ ID NO: 31697 - protein, 213 aa, Methylophaga sulfidovorans
  REGION 1..213: note = tr|A0A1I3Y7L8|A0A1I3Y7L8_9GAMM 7-carboxy-7-deazaguanine synthase OS=Methylophaga sulfidovorans OX=45496 GN=queE PE=3 SV=1
MAQCRITEIFYSLQGESRTVGLPTVFVRLTGCPLRCGYCDTEYAFHGGQKMDIEEIVAKVAAFNPRYVCVTGGEPLAQPNCIPLLTTLCDRGYEVSLETSGAMDISQVDKRVSRVMDLKTPGSGEESKNRYENIELLNAHDQLKFVVCHRDDYDWAKEKLHQHQLNERCEVLFSPIHGQLQPAELAEWVVEDNLPVRMQIQMHKYLWGEEKGR

SEQ ID NO: 31698 - protein, 213 aa, Methylophaga thiooxydans
  REGION 1..213: note = tr|C0N2U1|C0N2U1_9GAMM 7-carboxy-7-deazaguanine synthase OS=Methylophaga thiooxydans DMS010 OX=637616; GN = queE PE=3 SV=1
MAQCRITEIFYSLQGESRTVGLPTVFVRLTGCPLRCGYCDTEYAFYGGQKMDISDIVEQVAAYKPRYVCVTGGEPLAQPNCIPLLTALCDLGVEVSIETSGAMDISKVDPRVIRVMDLKTPGSGEESKNRYENIALLESKDQLKFVICHREDYDWACETLAEYQLSDRCEVLFSPIHGELKPADLADWIVEDNLPVRMQLQLHKYLWGDEQGR

SEQ ID NO: 31699 - protein, 213 aa, Methylophaga thiooxydans
  REGION 1..213: note = tr|A0A0A0BGD1|A0A0A0BGD1_9GAMM 7-carboxy-7-deazaguanine synthase OS=Methylophaga thiooxydans OX=392484 GN=queE PE=3 SV=1
MAQCRITEIFYSLQGESRTVGLPTVFVRLTGCPLRCGYCDTEYAFYGGQKMDISDIVEQVAAYKPRYVCVTGGEPLAQPNCIPLLTALCDLGVEVSIETSGAMDISKIDPRVIRVMDLKTPGSGEESKNRYENIALLKSKDQLKFVICHRKDYDWACETLAEYQLSDRCEVLFSPIHGELKPADLADWIVEDNLPVRMQLQLHKYLWGDEQGR

SEQ ID NO: 31700 - protein, 212 aa, unidentified
  source 1..212: note = Methylophilaceae bacterium
  REGION 1..212: note = tr|Y0KJZ5|Y0KJZ5_9PROT 7-carboxy-7-deazaguanine synthase OS=Methylophilaceae bacterium 11 OX=1101195; GN = queE PE=3 SV=1
MALKIYEIFHSLQGETSRIGLPTVFVRLTGCPMRCTYCDTAYAFNGGSNMEIADIMQQVASYGAHYVTVTGGEPLAQKECRDLLQALCDAGYSVSIETGGAMDISVVDPRVSVILDIKTPASNESENNRWGNLAYLKAADEVKFVLCNRADYDWAKQKVQELKLNEKCPILFSPSYHELAATELAGWVLEDHLPVRMQVQLHKVLWGEKPGV

SEQ ID NO: 31701 - protein, 213 aa, unidentified
  source 1..213: note = Methylophilaceae bacterium
  REGION 1..213: note = tr|A0A4P5TXR2|A0A4P5TXR2_9PROT 7-carboxy-7-deazaguanine synthase OS=Methylophilaceae bacterium OX=2030816 GN=queE PE=3 SV=1
MTQLKIFEIFYSLQGESSRVGLPTIFIRLSGCPMRCHYCDTAYAFQGGSMMSIDVIMRSIQKYDTRYVTVTGGEPLAQKEVLSLLKVLADANYEVSLETGGGLSIQEVDSRIKIILDIKTPDSGEEKKNHWDNLNTINAKDEIKFVLCSREDYEWAKKIINQYQITQKCSVLFSPVYQTLQATDLGNWILEDQLPVRMQIQLHKLLWGEKQGV

SEQ ID NO: 31702 - protein, 212 aa, unidentified
  source 1..212: note = Methylophilales bacterium
  REGION 1..212: note = tr|A0A0H4J1N9|A0A0H4J1N9_9PROT 7-carboxy-7-deazaguanine synthase OS=Methylophilales bacterium MBRS-H7 OX=1623450 GN=queE PE=3 SV=1
MSTLRINEIFYSIQGESSRIGMPTVFVRLTGCPMRCTYCDTAYAFHEGQQQEIEEVIQEIKKFDTNYVTVTGGEPLAQKNCIDLMNQLCELGYQVSLETGGALDIKDVHAKVKIILDVKTPKSNEDKNNFWPNLANIRANDEIKFVIQDYEDFSWSIDIIEKYQLNQSQILFSPVHNVLANKQLAEWILKHQLNVRLQLQLHKILWGEKKGV

SEQ ID NO: 31703 - protein, 216 aa, unidentified
  source 1..216: note = Methylophilales bacterium
  REGION 1..216: note = tr|A0P5E2|A0P5E2_9PROT 7-carboxy-7-deazaguanine synthase OS=Methylophilales bacterium HTCC2181 OX=383631; GN = queE PE=3 SV=1
MVKSQTLKINEIFYSLQGESSRIGLPTIFIRLTGCPMRCNYCDTAYAFHEGKNLSIDAIIEEIKQYDTNFITVTGGEPLAQRNCYSLLDQLCSLGYNVSLETGGALSINEVHENVKIILDIKTPGSGESENNHWDNLPLIKQKDEIKMVITNQEDYEWSKNIIQEKGLYLNYDILFSPSFGQLEPSQLADWILQDNLKVRMQVQLHKIVWGEKKGV

SEQ ID NO: 31704 - protein, 213 aa, unidentified
  source 1..213: note = Methylophilus medardicus
  REGION 1..213: note = tr|A0A5B8CUQ0|A0A5B8CUQ0_9PROT 7-carboxy-7-deazaguanine synthase OS=Methylophilus medardicus OX=2588534 GN=queE PE=3 SV=1
MTSLRIFEIFYSLQGESSRVGLPTIFIRLVGCPLRCGYCDTEYAFKGGSVMPLEQIMAQIAVYDTPYVCVTGGEPLAQKACIELLTKLADTGYQVSLETSGAIDIAAVDKRVKVVMDIKTPGSGEVEKNRWENLPLLKAGDEVKWVICSREDYDWAKQVLQKETFPAGCDQLFSPSFHDVSGDTLASWILQDHLKVRMQLQLHKILWGEKQGV

SEQ ID NO: 31705 - protein, 213 aa, Methylophilus rhizosphaerae
  REGION 1..213: note = tr|A0A1G9CK80|A0A1G9CK80_9PROT 7-carboxy-7-deazaguanine synthase OS=Methylophilus rhizosphaerae OX=492660 GN=queE PE=3 SV=1
MTTLRIFEIFYSLQGESSRVGLPTIFIRLTGCPLRCVYCDTEYAFKGGGNMTLDEIMQQIATYGTRYVCVTGGEPLAQKGCSELLTRLCEQGYQVSLETSGAMDLTPVDARVKVIMDVKTPGSGEVEKNRWENLPLLKAGDEVKWVVCSREDYDWAKQMMAERAFPMNCDHLFSPSFHEVSGETLASWILEDHLQVRMQLQLHKILWGEKQGV

SEQ ID NO: 31706 - protein, 213 aa, Methylophilus sp.
  REGION 1..213: note = tr|A0A2S5NAY8|A0A2S5NAY8_9PROT 7-carboxy-7-deazaguanine synthase OS=Methylophilus sp.; OX = 29541 GN=queE PE=3 SV=1
MTTLRIFEIFYSLQGESSRVGLPTIFIRLTGCPLRCGYCDTEYAFKGGSNMTLDEIMQQIAAYDTRYVCVTGGEPLAQKPCIELLTRLSDAGYQVSLETSGAMDIADVDSRVKIIMDIKTPGSGEVEKNRWENLPLLKAGDEVKWVVCSRDDYDWAKRMLQTHPFPAHCDQLFSPSFHDVSGETLASWILQDHLKVRMQLQLHKILWGEKQGV

SEQ ID NO: 31707 - protein, 213 aa, Methylophilus sp.
  REGION 1..213: note = tr|A0A0Q6BA29|A0A0Q6BA29_9PROT 7-carboxy-7-deazaguanine synthase OS=Methylophilus sp. Leaf416 OX=1736373 GN=queE PE=3 SV=1
MTTLRIFEIFYSLQGESSRVGLPTVFIRLTGCPLRCAYCDTEYAFKGGSNMTLDEIMQQVEQYGTRYVCVTGGEPLAQKGCADLLTRLCDAGYRVSLETSGAMDLTPVDQRVKVIMDVKTPGSGEMLKNRWENLPLLKAGDEVKWVICSREDYDWTRQMMAEQPFPADCDHLFSPSFNQVSGETLAGWILQDQLHVRMQLQLHKILWGEKQGV

SEQ ID NO: 31708 - protein, 210 aa, Methylopila sp.
  REGION 1..210: note = tr|A0A2H6BFX2|A0A2H6BFX2_9RHIZ 7-carboxy-7-deazaguanine synthase OS=Methylopila sp. Yamaguchi OX=1437817 GN=queE PE=3 SV=1
MTYSVKEIFKTLQGEGAQAGRTSVFCRFAGCNLWTGREADRARAVCQFCDTDFIGTDGEGGGKFADADALADAIASAWGSASGPRYVVFTGGEPLLQLDAALTAACRARGFECAVETNGTQARPAGVDWLCVSPKAGAPLALDGGDELKLVYPQAGVDPEAFLGLEFRHFFLQPMDGPEGPANVQAAIAYCLAHPRWRLSLQTHKMIGIP

SEQ ID NO: 31709 - protein, 215 aa, unidentified
  source 1..215: note = Methyloprofundus sedimenti
  REGION 1..215: note = tr|A0A1V8M903|A0A1V8M903_9GAMM 7-carboxy-7-deazaguanine synthase OS=Methyloprofundus sedimenti OX=1420851 GN=queE PE=3 SV=1
MKSDDLRISEIFYSLQGESRSVGIPTVFIRLTGCPLRCQYCDTSYAFSGGEMRSLASIIDQVAQYNTRYITVTGGEPLAQRGCLELLKQLADKNYSVSLETSGAIDVSSVDVRIDKVMDLKTPASAEEHRNRYNNLQYLNSKDQIKFVICNAEDYAWSKAKMAEHELTQKCEILFSPSLGQQDPTELAEWILADQLPVRFQVQLHKFLWGDVAGK

SEQ ID NO: 31710 - protein, 212 aa, unidentified
  source 1..212: note = Methylorubrum extorquens
  REGION 1..212: note = tr|A9W217|A9W217_METEP 7-carboxy-7-deazaguanine synthase OS=Methylorubrum extorquens (strain PA1); OX = 419610 GN=queE PE=3 SV=1
MSYAVKELFHTLQGEGAQAGRAAVFCRFSGCNLWSGREEDRAGAACRFCDTDFVGMDGEGGGRFASAEILADAIAATWAGGTSNRYVVFTGGEPLLQLDEALIAAVHARGFEVAVETNGTLPAPPGIDWICVSPKAGNPLVQTSGDELKLVFPQAEAEAAPERFSDLPFRHHFLQPMDGPDAAAHTAAAVAYCRSNARWRLSLQTHKIIGIP

SEQ ID NO: 31711 - protein, 212 aa, unidentified
  source 1..212: note = Methylorubrum extorquens
  REGION 1..212: note = tr|B7KR58|B7KR58_METC4 7-carboxy-7-deazaguanine synthase OS=Methylorubrum extorquens (strain CM4 / NCIMB 13688) OX=440085 GN=queE PE=3 SV=1
MSYAVKELFHTLQGEGAQAGRAAVFCRFSGCNLWSGREEDRAGAACRFCDTDFVGMDGEGGGRFASAEILADAIAATWAGGTANRYVVFTGGEPLLQLDEALIAAVHARGFEVAVETNGTLPAPPGIDWICVSPKAGNPLVQTSGDELKLVFPQAEAEAAPERFSDLPFRHHFLQPMDGPDAAAHTAAAVAYCRSNARWRLSLQTHKIIGIP

SEQ ID NO: 31712 - protein, 210 aa, unidentified
  source 1..210: note = Methylorubrum populi
  REGION 1..210: note = tr|B1ZBZ0|B1ZBZ0_METPB 7-carboxy-7-deazaguanine synthase OS=Methylorubrum populi (strain ATCC BAA-705 / NCIMB 13946 / BJ001) OX=441620 GN=queE PE=3 SV=1
MSYAVKELFHTLQGEGAQAGRAAVFCRFAGCNLWSGREEDRAEAACRFCDTDFIGMDGEGGGRFSDAEALAEAIAATWGGGKANRYVVFTGGEPLLQLDEALIAAVHARGFEVAVETNGTLPAPPGIDWICVSPKAGNPLAQTSGDELKLVFPQAEALPERFADLPFRHHFLQPMDGPEAAANTAAAVAYCRSDARWRLSLQTHKIIGIP

SEQ ID NO: 31713 - protein, 210 aa, unidentified; identical to SEQ ID NO: 31712
  source 1..210: note = Methylorubrum populi
  REGION 1..210: note = tr|A0A177J9S5|A0A177J9S5_9RHIZ 7-carboxy-7-deazaguanine synthase OS=Methylorubrum populi; OX = 223967 GN=queE PE=3 SV=1

SEQ ID NO: 31714 - protein, 225 aa, unidentified
  source 1..225: note = Methylorubrum salsuginis
  REGION 1..225: note = tr|A0A1I3ZUF1|A0A1I3ZUF1_9RHIZ 7-carboxy-7-deazaguanine synthase OS=Methylorubrum salsuginis OX=414703 GN=queE PE=3 SV=1
MRACMGRASSSAIFAMSYAVKELFHTLQGEGAQAGRAAVFCRFAGCNLWSGREEDRAGAACTFCDTDFIGMDGEGGGRFADAAALAEAIAATWGGGASNRYVVFTGGEPLLQLDAALIEAVHARGFEVAVETNGTLPAPPGIDWICVSPKAGNPLAQTSGHELKLVFPQAEAPPERFAELAFRHRFLQPMDGPDAAANTAAAVAYCRSDARWRLSLQTHKIIGIP

SEQ ID NO: 31715 - protein, 212 aa, unidentified
  source 1..212: note = Methylorubrum sp.
  REGION 1..212: note = tr|A0A4Z0E7Y1|A0A4Z0E7Y1_9RHIZ 7-carboxy-7-deazaguanine synthase OS=Methylorubrum sp. Q1; OX = 2562453 GN=queE PE=3 SV=1
MSYAVKELFHTLQGEGAQAGRAAVFCRFSGCNLWSGREADRAGAACRFCDTDFVGMDGEGGGRFASAEILADAVAATWAGGAANRYVVFTGGEPLLQLDEALIAAVHARGFEVAVETNGTLPAPPGIDWICVSPKAGNPLVQTSGDELKLVFPQAEAEAAPERFSDLPFRHHFLQPMDGPEAAAHTAAAVAYCRSNARWRLSLQTHKIIGIP

SEQ ID NO: 31716 - protein, 210 aa, Methylosinus sp.
  REGION 1..210: note = tr|A0A177PMD1|A0A177PMD1_9RHIZ 7-carboxy-7-deazaguanine synthase OS=Methylosinus sp. R-45379 OX=980563 GN=queE PE=3 SV=1
MAYAVKEAFKTLQGEGRHSGRAAVFCRFAGCNLWSGREADRNAADCRFCDTDFVGVDGENGGKFVDAEALAAHLASLWGENRERRFVVLTGGEPMLQIDPALLDALHAEGFEIAIETNGTIPVPPAVDWICVSPKAGAPLVQTRGDELKLVYPQKGAEPELFEGLAFDHFLLQPMDGPESLRNTKAAIDYCLAHPRWRFSHQTHKAIGVK

SEQ ID NO: 31717 - protein, 210 aa, Methylosinus sp.
  REGION 1..210: note = tr|A0A1A6FG19|A0A1A6FG19_9RHIZ 7-carboxy-7-deazaguanine synthase OS=Methylosinus sp. 3S-1; OX = 1849840 GN=queE PE=3 SV=1
MAYAVKEAFKTLQGEGRHVGRAAVFCRFAGCNLWSGREIDRAEAVCRFCDTDFVGTNGEGGGRFETAAALAAHLAGLWGGERERRFVVLTGGEPMLQIDAALVDALHDAGFEIAIETNGTRAAPSEIDWICVSPKAGAPLVQSSGDELKLVYPQPGAEPELFEGLAFDHFLLQPMDGPEAAQNTRAAVDYCLAHPRWRFSLQTHKTIGVR

SEQ ID NO: 31718 - protein, 210 aa, Methylosinus sporium
  REGION 1..210: note = tr|A0A549SDC1|A0A549SDC1_METSR 7-carboxy-7-deazaguanine synthase OS=Methylosinus sporium; OX = 428 GN=queE PE=3 SV=1
MAYAVKEAFKTLQGEGRHSGRAAVFCRFAGCNLWSGREADRDAADCRFCDTDFVGVDGESGGKFAEAPALAAHLARLWGENRERRFVVLTGGEPLLQIDAALLDALHAEGFEIAVETNGTIPVPPAVDWICVSPKAGAPLVQTRGDELKLVYPQKGAEPELFEGLAFDHFLLQAMDGPDILRHTKAAIDYCLAHPRWRFSHQTHKAIGVK

SEQ ID NO: 31719 - protein, 210 aa, Methylosinus sporium
  REGION 1..210: note = tr|A0A2U1STF5|A0A2U1STF5_METSR 7-carboxy-7-deazaguanine synthase OS=Methylosinus sporium; OX = 428 GN=queE PE=3 SV=1
MAYAVKEAFKTLQGEGRHSGRAAVFCRFAGCNLWSGREADRDAADCRFCDTDFVGVDGESGGKFAEAPALAAHLARLWGENRERRFVVLTGGEPLLQIDAALLDALHAEGFEIAVETNGTIPVPPAVDWICVSPKAGAPLVQTRGDELKLVYPQKGAEPELFEGLAFDHFLLQAMDGPDILRNTKAAIDYCLAHPRWRFSHQTHKAIGVK

SEQ ID NO: 31720 - protein, 210 aa, Methylosinus trichosporium; identical to SEQ ID NO: 31717
  REGION 1..210: note = tr|A0A2D2D3T3|A0A2D2D3T3_METTR 7-carboxy-7-deazaguanine synthase OS=Methylosinus trichosporium OB3b OX=595536 GN=queE PE=3 SV=1

SEQ ID NO: 31721 - protein, 212 aa, Methylotenera mobilis
  REGION 1..212: note = tr|C6WZ30|C6WZ30_METML 7-carboxy-7-deazaguanine synthase OS=Methylotenera mobilis (strain JLW8 / ATCC BAA-1282 / DSM 17540) OX=583345 GN=queE PE=3 SV=1
MKLKIHEIFYSLQGESSRVGLPTVFVRLTGCPMRCVYCDTAYAFSGGSNMEVEDIITKVAEYATPYVTVTGGEPLAQKDCHVLLKALCDQGYSVSLETGGAIDIAPVDPRVSVILDVKTPDSGELKNNLWGNLAHLKKADEVKFVLCSRADYEWAKDFLAKEQLTAKCSVLFSPVYSQLAPADLADWVLADKLPVRMQLQLHKILWGEVPGK

SEQ ID NO: 31722 - protein, 119 aa, Methylotenera mobilis
  REGION 1..119: note = tr|A0A351RB46|A0A351RB46_9PROT 7-carboxy-7-deazaguanine synthase QueE (Fragment); OS = Methylotenera mobilis OX=359408 GN=DCW48_06690 PE=4 SV=1
SVSLETGGAIDIGPVDARVSVILDIKTPDSGELKNNLWANLTHLKKTDEVKFVLCSRADYDWAKDLLVKERLTDKCPVLFSPVYSQLMPSDLADWVLADKLPVRMQLQLHKILWGEVPG

SEQ ID NO: 31723 - protein, 212 aa, Methylotenera sp.; identical to SEQ ID NO: 31545
  REGION 1..212: note = tr|A0A258XJF8|A0A258XJF8_9PROT 7-carboxy-7-deazaguanine synthase OS=Methylotenera sp. 24-45-7 OX=1970397 GN=queE PE=3 SV=1

SEQ ID NO: 31724 - protein, 212 aa, Methylotenera sp.
  REGION 1..212: note = tr|A0A2S5NTE2|A0A2S5NTE2_9PROT 7-carboxy-7-deazaguanine synthase OS=Methylotenera sp.; OX = 2051956 GN=queE PE=3 SV=1
MALKIYEIFYSLQGETSRFGLPTVFIRLTGCPMRCTYCDTEYAFSGGNNMEIADILSKTAEFGTRYVTVTGGEPLAQKQSLTLLKALCDEGYNVSLETGGAMDIAPVDTRVSIILDIKTPASNEEKNMLWANLAHIKSSDEIKFVLCNRADYDWAKAKLSALKLTEKCPILFSPSYHELKAEELASWVLQDKLPVRMQIQLHKILWGEKQGV

SEQ ID NO: 31725 - protein, 212 aa, Methylotenera versatilis
  REGION 1..212: note = tr|D7DMT8|D7DMT8_METV0 7-carboxy-7-deazaguanine synthase OS=Methylotenera versatilis (strain 301); OX = 666681 GN=queE PE=3 SV=1
MKLKVHEIFYSIQGESSRVGLPTVFVRLTGCPMRCVYCDTAYAFSGGSNIEIADILAKVAEFGTKYVTVTGGEPLAQKDCHFLLKDLCDAGYSVSLETGGAIDISPVDKRVSVILDVKTPDSGELKNNVWSNLDHLKSSDEVKFVLCSREDYQWARDLLSTHKIAEKCPVLFSPVYSQVSPTDLAEWVLADKLPVRMQVQLHKILWGEKPGV

SEQ ID NO: 31726 - protein, 212 aa, unidentified
  source 1..212: note = Methylothermaceae bacteria
  REGION 1..212: note = tr|A0A148N747|A0A148N747_9GAMM 7-carboxy-7-deazaguanine synthase OS=Methylothermaceae bacteria B42 OX=1798802 GN=queE PE=3 SV=1
MSLKVTEIFLSLQGESRTLGLPTVFVRLTGCPLRCRWCDTAYAFHGGQRMALEDIVKAVEAFGVSHVTVTGGEPLAQPDCLSLLTVLADRGFAVSLETSGALDVSEVDTRVVKVVDLKPPGSGELEKNRYENLDYLSENDQVKFVISDREDYLWSKEMLDQYQLPTRCEILFSPVAGEQNPRQLAEWILEDRLPVRFQLQLHKLLWGDEPGR

SEQ ID NO: 31727 - protein, 236 aa, Methyloversatilis sp.
  REGION 1..236: note = tr|A0A1B3LL78|A0A1B3LL78_9PROT 7-carboxy-7-deazaguanine synthase OS=Methyloversatilis sp. RAC08 OX=1842540 GN=queE PE=3 SV=1
MNEGSNLEFGVGNPYPSAFTAATALAVTYQVKEIFYTLQGEGLNAGRAAVFCRFAGCNLWSGREADRASAQCRFCDTDFVGTDGTLGGRHEQADTLADAIAGCWAGAGGRRLVVLTGGEPLLQIDAALIDALHARDFEIAVETNGTLAAPDGIDWICVSPKAGNEVVQRHGHELKVVVPQPGLDLAAMESWDFRHFLVQPMDNAQAVDNRRWAIDWCMRHPRWRLSHQTHKALGIR

SEQ ID NO: 31728 - protein, 209 aa, Methyloversatilis universalis
  REGION 1..209: note = tr|F5RFB9|F5RFB9_METUF 7-carboxy-7-deazaguanine synthase OS=Methyloversatilis universalis (strain ATCC BAA-1314 / JCM 13912 / FAM5) OX=1000565 GN=queE PE=3 SV=1
MAYQVKEIFYTLQGEGLNAGRAAVFCRFAGCNLWSGREQDRASAQCRFCDTDFVGTDGTLGGRYDADALADTVAASWAGEGGARFVVLTGGEPLLQVDAPLIDALHARGFEIAVETNGTLPAPPGLDWVCVSPKAGNPVVQTRGQELKVVVPQAGLDLTAMEAWDFEHFLVQPMDNAASADNTRWAIEWCMQHPRWRLSFQTHKAVGIR

SEQ ID NO: 31729 - protein, 210 aa, Methylovirgula ligni
  REGION 1..210: note = tr|A0A3D9YWA6|A0A3D9YWA6_9RHIZ 7-carboxy-7-deazaguanine synthase OS=Methylovirgula ligni; OX = 569860 GN=queE PE=3 SV=1
MTYSVKEIYHTLQGEGAQAGRAAVFCRFAGCNLWSGREADRAAAQCDFCDTDFIGTDGPGGGKFAGPGELAEAIAAQWQGETAQALVVFTGGEPLLQLDAALLAALHAKGFSCAVETNGTLAPPEGLDWICVSPKAGTPLVLTSGDELKLVFPQAGQNPESFSGLAFRHFFLQPMDGPAQAANTAQAAAYCLAHPRWRLSLQTHKLIGLP

SEQ ID NO: 31730 - protein, 210 aa, Methylovirgula sp.
  REGION 1..210: note = tr|A0A371WTQ2|A0A371WTQ2_9RHIZ 7-carboxy-7-deazaguanine synthase OS=Methylovirgula sp. 4M-Z18 OX=2293567 GN=queE PE=3 SV=1
MSYAVKEIFLTLQGEGAHVGRPAVFCRFAGCNLWSGREEDRASAQCTFCDTDFVGMDGTKGARYADAEALAAAIAEEWTAGRAERFCVLTGGEPLLQVDAALIDALHRKGFEIAVETNGTVEPPRGLDWLCVSPKAADPLKIRSGHELKLVYPQPEAMPERFEDLAFQRFSLQPMDGPDVEENTAKAIAYCLAHPQWRLSVQTHKRIGIR

SEQ ID NO: 31731 - protein, 212 aa, unidentified
  source 1..212: note = Methylovorus glucosetrophus
  REGION 1..212: note = tr|C6XA92|C6XA92_METGS 7-carboxy-7-deazaguanine synthase OS=Methylovorus glucosetrophus (strain SIP3-4); OX = 582744 GN=queE PE=3 SV=1
MKLRIHEIFHSLQGESSRVGLPTVFVRLTGCPMRCVYCDTAYAFHGGSSMEIDDIMQKVAEYGAHYVTVTGGEPLAQRDCHVLLTRLCDAGYSVSLETGGAMDIANVDPRVSVILDIKTPGSGELEKNLWGNLAHLKAQDEVKFVLCDHADYLWAKELLDKQPLHRTCSVLFSPVYSQVNPTELAEWILADKLPVRMQVQLHKILWGERPGV

SEQ ID NO: 31732 - protein, 213 aa, Methylovorus sp.
  REGION 1..213: note = tr|A0A1A9T2M9|A0A1A9T2M9_9PROT 7-carboxy-7-deazaguanine synthase OS=Methylovorus sp. MM2; OX = 1848038 GN=queE PE=3 SV=1
MTLRIHEIFHSLQGESSRVGLPTVFVRLTGCPMRCVYCDTAYAFKGGSNMSLDDIMVEVESHGTKYVTVTGGEPLAQKEQCLNLLKRLCDAGYSVSLETGGAIDTMGVDARVSVILDIKTPDSGELKNNHWDNLQHLKPIDEIKFVLCSREDYDWAKQLLAEQALHEKCQVIFSPVFSQVNPTDLADWVLQDKLPVRMQVQLHKILWGETPGK

SEQ ID NO: 31733 - protein, 214 aa, unidentified
  source 1..214: note = Methylovulum psychrotolerans
  REGION 1..214: note = tr|A0A2S5CQY1|A0A2S5CQY1_9GAMM 7-carboxy-7-deazaguanine synthase OS=Methylovulum psychrotolerans OX=1704499 GN=queE PE=3 SV=1
MDTTLRITEIFHSLQGEANTVGLPTVFVRLTGCPLRCVYCDTAYAFTGGQKTTLSTILAQVAAYQCRHVTVTGGEPLAQPACLDLLRHLADQGYHVSLETSGALDVSGVDPRIVKVMDLKTPSSGELDKNLYSNIAHLTPQDQVKFVIGDDGDYQWSKAIMAEHALAERCQLLFSPIAGQQNPTELAEKILRDRLPVRFQIQLHKLLWNDAQGK

SEQ ID NO: 31734 - protein, 215 aa, unidentified
  source 1..215: note = Methylovulum psychrotolerans
  REGION 1..215: note = tr|A0A1Z4BVB5|A0A1Z4BVB5_9GAMM 7-carboxy-7-deazaguanine synthase OS=Methylovulum psychrotolerans OX=1704499 GN=queE PE=3 SV=1
MVDTTLRITEIFHSLQGEANTVGLPTVFVRLTGCPLRCVYCDTAYAFTGGQKTTLSTILEQVAAYQCRHVTVTGGEPLAQPACLDLLRHLADQGYHVSLETSGALDVSGVDPRIVKVMDLKTPSSGELDKNLYSNIAHLTPQDQVKFVIGDDGDYQWSKAIMAEHALADRCQLLFSPIAGQQNPTELAEKILRDRLPVRFQIQLHKLLWNDAQGK

SEQ ID NO: 31735 - protein, 214 aa, Methylovulum sp.
  REGION 1..214: note = tr|A0A522DIV4|A0A522DIV4_9GAMM 7-carboxy-7-deazaguanine synthase OS=Methylovulum sp.; OX = 1916980 GN=queE PE=3 SV=1
MLDSLRITEIFYSLQGESNTVGLPTVFIRLTGCPLRCVYCDTVYAFTGGKKARLDTIIREVRQYGCQYVTVTGGEPLAQPACLELMTQLLDDGYIVSLETSGAIDIAEVDPRVIKVMDLKTPSSGELSKNHYENIRYLNPKDQVKFVIGSAEDYEWSKAALTEYKLADRCEILFSPVMGQQNPTELAEKILQDRLPVRFQIQLHKLLWDDAQGK

SEQ ID NO: 31736 - protein, 239 aa, Micavibrio sp.
  REGION 1..239: note = tr|A0A1Z8PXK9|A0A1Z8PXK9_9PROT 7-carboxy-7-deazaguanine synthase OS=Micavibrio sp. TMED27; OX = 1986607 GN=queE PE=3 SV=1
MSENIRISEIFGPTIQGEGALIGRPTVFVRTGGCDYRCSWCDTLHAVDSEYRDEWTAMSAKDIMSKVEDLSGGKPLTITLSGGNPAIQPFDTLIQLGHEKGYEFAMETQGSVSKDWFSKLDVLILSPKPPSSGMDTDWIDFYQCLKKAGFEKSNGPDILLKFVIFDKEDYLYAKDASSRYPYLPVFLQPGNHQVDGDADQEGLMQKMRWLIDLTVKDQWYEVTILPQLHVMIWGNEKGV

SEQ ID NO: 31737 - protein, 234 aa, Micavibrio sp.
  REGION 1..234: note = tr|A0A2D5Y354|A0A2D5Y354_9PROT 7-carboxy-7-deazaguanine synthase OS=Micavibrio sp.; OX = 2024841 GN=queE PE=3 SV=1
MSDLIRISEIFGPTIQGEGALIGQPTVFVRTGGCDYRCSWCDTLYAVESKYRKDWVAMRAEEIFAQVEALSNGMPLMITLSGGNPAIQPMQGLLDLGHGRGYKFCMETQGSLAQDWFCDIDVLTLSPKPPSSGMDTDWDVFDACVAAGKGAQIVLKIVVFDAGDYEYARNAAAKYPDLPAYIQPGNHRADGDFDDEAVMARMRWLVETANNDNWYDVTILPQLHTLLWGNQRGV

SEQ ID NO: 31738 - protein, 246 aa, Microbacterium laevaniformans
  REGION 1..246: note = tr|A0A150HHY1|A0A150HHY1_9MICO 7-carboxy-7-deazaguanine synthase OS=Microbacterium laevaniformans OX=36807 GN=queE PE=4 SV=1
MVRTAAACELNIAGVTPFSTVDWPDMMTATVFLQGCPWSCFYCHNPALIDPRAEGAVSWADVTDLLCDRMGLLDGVVFSGGEPTLQHALVPAMQMVRSLGFRVGLHTAGAYPGLLAQALPFVDWVGLDIKATPDDYANVTGRAPSGAHAWRSLELVLGNRLLRAGSDHPLDYEVRTTVHPAAIDDAALRELGCRLADAGVDTWAVQRFRETGARQPLPRVSTTDAEAAPLRLDDLPVERFRSLVIR

SEQ ID NO: 31739 - protein, 234 aa, Microbacterium sp.
  REGION 1..234: note = tr|A0A2E9NFG3|A0A2E9NFG3_9MICO 7-carboxy-7-deazaguanine synthase OS=Microbacterium sp.; OX = 51671 GN=queE PE=3 SV=1
MSDLLPISEIFGPTLQGEGPYIGRRATFIRFGGCNLSCDWCDTGYTWDSTRFDLRESITARSVQSIVDDISTRDGLVVITGGEPMLYAHRPAFILLLGELKSAGRELHVESNGTIFPPEEVLSKLDVVVLSPKLSNAGSHQERTAAMATAWGDYQNAHEVHLKFVCVDESDVASAAAVARAHEWDRSRVWVMPEGTDSGTIVDRSKRIAEAALQQQLQMTTRLHILAWGDTRGK

SEQ ID NO: 31740 - protein, 240 aa, Microbacterium sp.
  REGION 1..240: note = tr|A0A542GTZ6|A0A542GTZ6_9BACI 7-carboxy-7-deazaguanine synthase OS=Microbacterium sp. SLBN-1 OX=1489561 GN=queE PE=3 SV=1
MRKIPVLEVFGPTIQGEGMVIGQKTMFVRTAGCDYSCAWCDSAFTWDGSAKDDIRLMAATEVWDKLKEIGGDRFSHVTISGGNPALLPQIGDLLEILKANGIGSALETQGSRWQDWFYDINDLTISPKPPSSTMETDYDRLDLIVSRLKENGSNFSLKVVVFDETDLEYAKGIHMRYEGVPFYIQTGNPEVSMEDTPRLVSNLLLDYERLIDVVCEQKELNDVRVLPQLHTLVWGNKRGV

SEQ ID NO: 31741 - protein, 212 aa, Microbispora rosea
  REGION 1..212: note = tr|A0A1N7HHK7|A0A1N7HHK7_9ACTN 7-carboxy-7-deazaguanine synthase OS=Microbispora rosea; OX = 58117 GN=queE PE=3 SV=1
MYRVKEIFYTLQGEGSHAGRPSVFCRFTSCNLWTGREKDRHRAICKFCDTDFVGTDGPGGGRFQTAADLAAAVAKTWQGRAHPRSRPYVVCTGGEPLLQLDAEAVDALHAEGFEIAIETNGTRSAPDGIDWICVSPKAGADLVLKTGHDLKLVYPQVGAGPERYEDLDFDRFMLQPMDGPDLAANTQAAIAYCLEHPQWHLSIQTHKTLGIR

SEQ ID NO: 31742 - protein, 212 aa, unidentified
  source 1..212: note = Microbispora triticiradicis
  REGION 1..212: note = tr|A0A372PCP9|A0A372PCP9_9ACTN 7-carboxy-7-deazaguanine synthase OS=Microbispora triticiradicis OX=2200763 GN=queE PE=3 SV=1
MYRVKEIFYTLQGEGSHVGRPSVFCRFTSCNLWTGREADRHRAICRFCDTDFVGTDGPGGGRFATAEDLASAVAKTWQGRPHPRSKPYVVCTGGEPLLQLDQAAVDAFHSKGFEVAIETNGTRPAPAGVDWICVSPKAGTNLILTKGDDLKLVFPQPMAEPKRFEHLAFTRFLLQPMDGPDLAVNTRAAIEYCLEHPQWELSVQTHKNLGIR

SEQ ID NO: 31743 - protein, 244 aa, unidentified
  source 1..244: note = Microbispora triticiradicis
  REGION 1..244: note = tr|A0A372PDL7|A0A372PDL7_9ACTN 7-carboxy-7-deazaguanine synthase OS=Microbispora triticiradicis OX=2200763 GN=queE PE=3 SV=1
MSEQSTAAISVRETGLIVAELFGPTFQGEGPSLGTRATFLRLSRCNLTCSGRMPCDTPYTWDIVRYDLRNESSRRSATEVGDELLLLNTPLVVITGGEPLIQQRQLVPLVRRLVEAGRRVEFETNGTFAPLSEILLDGVRFNVSPKLSNAGMPESMRIVPEALTALAESGRSAFKFVATDRSDLDEIEDLVQRYRLTPVYVMPEGTTPDAVISRARELADDVIARGWSMTQRLHVLLWGDKRGR

SEQ ID NO: 31744 - protein, 221 aa, Microbulbifer agarilyticus
  REGION 1..221: note = tr|A0A1Q2MAL7|A0A1Q2MAL7_9GAMM 7-carboxy-7-deazaguanine synthase OS=Microbulbifer agarilyticus OX=260552 GN=queE PE=3 SV=1
MGAVSLTEESLRISELFYSLQGEARDAGLPTVFVRLTGCPLRCTYCDSEYAFYGGERMSLAAILQKVQSYPARHVCVTGGEPLAQPNCIPLLRALCDAGYQVSLETSGAMPVDAVDARVSRVVDLKTPASGEQARNRMENIPLLTEKDQVKFVICDRGDYDWARFTLDQYRLSERVGEVLFSPSYEQLAPRQLAEWILEDGLPVRMQMQLHKLLWGDIPGV

SEQ ID NO: 31745 - protein, 219 aa, unidentified
  source 1..219: note = Microbulbifer aggregans
  REGION 1..219: note = tr|A0A1C9W3D3|A0A1C9W3D3_9GAMM 7-carboxy-7-deazaguanine synthase OS=Microbulbifer aggregans OX=1769779 GN=queE PE=3 SV=1
MTDLTAESLRISEIFYSLQGEARDSGLPTVFVRLTGCPLRCTYCDSEYAFYGGERMTLAAILDKVRSYPARYVCVTGGEPLAQPNCLPLLVALCDAGYRVSLETSGAMPVEAVDPRVSRVVDLKTPASGEQHRNRLENIAALTEHDQVKFVICDRGDYEWARFTVDQYSLTERVGEVLFSPSYEQLEARQLAEWILEDGLLVRMQLQTHKLLWGDIPGV

SEQ ID NO: 31746 - protein, 226 aa, Microbulbifer donghaiensis
  REGION 1..226: note = tr|A0A1M5CVS7|A0A1M5CVS7_9GAMM 7-carboxy-7-deazaguanine synthase OS=Microbulbifer donghaiensis OX=494016 GN=queE PE=3 SV=1
MTDLSSESNRLRGESLRISEIFYSLQGEARDSGLPTVFVRLTGCPLRCTYCDSEYAFYGGERMTLEQILQKVQSYPARYVCVTGGEPLAQPNCLPLLKALCDAGYSVSLETSGAMPIEDVDSRVSRVVDLKTPASGEQHRNRMENIAALTARDQIKFVICDRGDYDWARFTLDQYRLSEKVGEVLFSPSYEQLQPRQLAEWILDDGLPVRMQMQLHKLLWGDIPGV

SEQ ID NO: 31747 - protein, 226 aa, Microbulbifer marinus
  REGION 1..226: note = tr|A0A1H4AIW2|A0A1H4AIW2_9GAMM 7-carboxy-7-deazaguanine synthase OS=Microbulbifer marinus; OX = 658218 GN=queE PE=3 SV=1
MTDMNNESSRVRDDSLRISEIFYSLQGEARESGLPTVFVRLTGCPLRCTYCDSEYAFYGGERLTLEQIVQKVQSYPARHVCVTGGEPLAQPNCLPLLTALCDAGYAVSLETSGAMPIEEVDARVSRVVDLKTPASGEQHRNRMENIAALTERDQVKFVICDRGDYDWARFILDQYRLPERVGEVLFSPSYEQLQPRQLAEWILADGLPVRMQMQLHKLLWGDVPGV

SEQ ID NO: 31748 - protein, 219 aa, Microbulbifer sp.
  REGION 1..219: note = tr|A0A2S1JNK9|A0A2S1JNK9_9GAMM 7-carboxy-7-deazaguanine synthase OS=Microbulbifer sp. A4B17 OX=359370 GN=queE PE=3 SV=1
MTDLSKESLRISEIFYSLQGEARESGLPTVFVRLTGCPLRCTYCDSEYAFYGGERMTLEQILQQVQSHPARHVCVTGGEPLAQPNCFPLMKALCDAGYAVSLETSGAMPVDKVDERVSRVVDLKTPASGEQHRNRMENMQVLTRQDQIKFVICDRGDYDWARFTLDQYRIPERVGEVLFSPSYEQLQPRQLAEWILEDGLPVRMQMQMHKLLWGDIPGV

SEQ ID NO: 31749 - protein, 219 aa, Microbulbifer sp.
  REGION 1..219: note = tr|A0A510IP19|A0A510IP19_9GAMM 7-carboxy-7-deazaguanine synthase OS=Microbulbifer sp. GL-2 OX=2591606 GN=queE PE=3 SV=1
MSSLSKESLRISEIFYSLQGEARESGLPTVFVRLTGCPLRCTYCDSEYAFHGGERMTLEQILQQVKSHPARHVCVTGGEPLAQPNCLPLLQILCDEGYAVSLETSGAMLVDQVDPRVSRVVDLKTPASGEQHRNRMENMQVLTRDDQIKFVICDRGDYEWAKFTLDQYNLPERVGEVLFSPSYEQLQARQLAEWILADGLPVRMQMQLHKLLWGDIPGV

SEQ ID NO: 31750 - protein, 219 aa, Microbulbifer thermotolerans
  REGION 1..219: note = tr|A0A143HRD2|A0A143HRD2_9GAMM 7-carboxy-7-deazaguanine synthase OS=Microbulbifer thermotolerans OX=252514 GN=queE PE=3 SV=1
MPDLSTESLRISEIFYSLQGEARESGLPSVFVRLTGCPLRCTYCDSEYAFYGGERMTLEQILQKVDSYPARYVCVTGGEPLAQPNCLPLLSALCDAGYRVSLETSGAMPVEQVDKRVSRVVDLKTPASGEQQRNRMENIQALGRGDQIKFVICDRKDYEWARFTLDQYRLHERVGEVLFSPSYEQLQPRQLAEWILEDGLPVRMQLQLHKLLWGDIPGV

SEQ ID NO: 31751 - protein, 219 aa, Microbulbifer yueqingensis
  REGION 1..219: note = tr|A0A1G8VTM5|A0A1G8VTM5_9GAMM 7-carboxy-7-deazaguanine synthase OS=Microbulbifer yueqingensis OX=658219 GN=queE PE=3 SV=1
MTDLSKESLRISEIFYSLQGEARDSGLPSVFVRLTGCPLRCTYCDSEYAFYGGERMALAAILDKVASYPARHVCVTGGEPLAQPNCLPLLATLCDAGYQVSLETSGAMPVEEVDPRVSRVVDLKTPASGEQHRNRMANMDALTRHDQVKFVICDRKDYDWAKFTLDQYRLPERVGEVLFSPSYEQLPARQLAEWILEDGLPVRMQLQLHKLLWGDVPGV

SEQ ID NO: 31752 - protein, 235 aa, unidentified
  source 1..235: note = Micrococcales bacterium
  REGION 1..235: note = tr|A0A1Q4A053|A0A1Q4A053_9MICO 7-carboxy-7-deazaguanine synthase OS=Micrococcales bacterium 72-143 OX=1895790 GN=queE PE=3 SV=1
MSTLIPVVETFVSLQGEGPSAGEPALFLRLANCNLSCEWCDTRHSWDWDTFAKTEEVESVTSPELVERLLRELPPHVNLLVLTGGEPLLHQRAVVSVLAELRVQRPDLRIEVETNGTVPPTPPMRDLVHLFVVSPKLANSGIAEKRRVRISVLTEFATLPSVLKFVVEAPLEVVEAAAVAEAGGFDRKRVWLMPQTTSAAELGSLVAILAPAAINAGFKVSSRLHILAWGETRGT

SEQ ID NO: 31753 - protein, 236 aa, Micrococcus lylae; identical to SEQ ID NO: 31328
  REGION 1..236: note = tr|A0A378P0H6|A0A378P0H6_9MICC 7-carboxy-7-deazaguanine synthase OS=Micrococcus lylae; OX = 1273 GN=queE PE=3 SV=1

SEQ ID NO: 31754 - protein, 246 aa, Micrococcus sp.
  REGION 1..246: note = tr|A0A2J9IQB4|A0A2J9IQB4_9MICC 7-carboxy-7-deazaguanine synthase OS=Micrococcus sp. FDAARGOS_333 OX=1930558 GN=queE PE=3 SV=1
MSSKGGVESFAPQKGLLPISEIFGPTIQGEGPFAGRVCSFLRFGGCNLGCWWCDSAYTWDGRNYDLREEIVMRSAEEVLELVPMSPICVITGGEPLLYQRRPAFMELVRALVRRGQTVHFETNGTVEPLAELVGLAEAFVVSPKLPHARAQRGRVSPALHPGWGAIGRRGSAYLKVVVESESDVVATVRLADENQWDRGRVWVMPEGVDKGTLERKWREVCEWATALGVNASHRLHVLAWGEDRGR

SEQ ID NO: 31755 - protein, 208 aa, unidentified
  source 1..208: note = Microcoleaceae bacterium
  REGION 1..208: note = tr|A0A355CBZ4|A0A355CBZ4_9CYAN 7-carboxy-7-deazaguanine synthase OS=Microcoleaceae bacterium UBA10368 OX=2055793 GN=queE PE=3 SV=1
MSNLQVKLPIHETFQSTVQGEGYWTGTLVDFIRLAGCPVRCPWCDTGYENGGKDLPSVARSISELLAELQSPRVVITGGEPFIHRDLPELVQALLAADKQVSIETSGAYWLDVSPLAWITLSPKEHVNPKYRVQELFWTRANEIKLVVSTGEELEFYHNFLEKNVNIPVFLQPEWNSKESGIPIILELLKQNPSYRLSLQTHKLIGVQ

SEQ ID NO: 31756 - protein, 208 aa, unidentified; identical to SEQ ID NO: 31755
  source 1..208: note = Microcoleaceae bacterium
  REGION 1..208: note = tr|A0A3D5GA61|A0A3D5GA61_9CYAN 7-carboxy-7-deazaguanine synthase OS=Microcoleaceae bacterium UBA9251 OX=2055794 GN=queE PE=3 SV=1

SEQ ID NO: 31757 - protein, 259 aa, Microcoleus sp.
  REGION 1..259: note = tr|K9WHF9|K9WHF9_9CYAN 7-carboxy-7-deazaguanine synthase OS=Microcoleus sp. PCC 7113 OX=1173027 GN=queE; PE = 3 SV=1
MPLETKLTARLVEIFSAIQGEGLNVGTRQIFVRFAMCDLRCKFCDSAHTWGIPSQCRIERTPGERDFETHSNPVPGSLLLQWVERQNQPGLHDSLTLTGGEPLLHAPFLVEFLPLLQQFTPLPIYLETGGHRPEQLAMILPYLDSVGMDIKLKSVSGEEHWAAHTEFLQLCHNSSLELFVKLIVDHNTDPAELEQAAQLVAQVSPQIPVFLQPVTPLESSNQPLRVPAPEQVLAWQALMKGTLASVRVVPQTHKMMDQL

SEQ ID NO: 31758 - protein, 208 aa, Microcoleus vaginatus
  REGION 1..208: note = tr|F5UDJ8|F5UDJ8_9CYAN 7-carboxy-7-deazaguanine synthase OS=Microcoleus vaginatus FGP-2 OX=756067 GN=queE; PE = 3 SV=1
MSNLQLKLPIHETFQCTVQGEGYWTGTLVDFIRLAGCPVRCPWCDTGYENGGKGLPSVPQSIAQLLAQLQSPRVVITGGEPFIHRDLPELVEALLEADKQVSIETSGAYWQDVSPQAWITLSPKEHVNPKYPVQELFWTRANEIKLVISTGEEVEFYHKHLENNVNIPVFLQPEWNSKKLAIPIILELLKQNPSYRLSLQTHKFIGVQ

SEQ ID NO: 31759 - protein, 205 aa, Microcystis aeruginosa; identical to SEQ ID NO: 29152
  REGION 1..205: note = tr|A0A552DC49|A0A552DC49_MICAE 7-carboxy-7-deazaguanine synthase OS=Microcystis aeruginosa Ma_SC_T_19800800_S464 OX=2486257 GN=queE PE=3; SV = 1

SEQ ID NO: 31760 - protein, 193 aa, Microcystis aeruginosa
  REGION 1..193: note = tr|A0A5A5SFU2|A0A5A5SFU2_MICAE 7-carboxy-7-deazaguanine synthase OS=Microcystis aeruginosa NIES-2522 OX=2303984 GN=queE_2 PE=3 SV=1
MVETFHSVQGEGFWTGSNAFFLRLGGCDVYCPWCDQKESWNAHRYPQKSLGELVEMAKGANPAMVVITGGEPLMHNLDPLTKELKNQGLRVHLETSGAHPFTGVFDWVTFSPKTYKMPDPSIYTRVNELKIVVAHPEDLDWAAMQESKLSEGVIKYLQPEWNTVESKELVFNYVLQHPQWRLSLQTHKFLGVR

SEQ ID NO: 31761 - protein, 205 aa, Microcystis flosaquae
  REGION 1..205: note = tr|A0A552KL63|A0A552KL63_9CHRO 7-carboxy-7-deazaguanine synthase OS=Microcystis flos-aquae Mf_QC_C_20070823_S10D OX=2486236 GN=queE PE=3; SV = 1
MKTVSINHCTYPVVETFHSVQGEGFWTGSNAFFLRLGGCDVYCPWCDQKESWNAHRYPQQSLGELVEMAKGANPAMVVITGGEPLMHNLDPLTKELKNQGLRVHLETSGAHPFTGVFDWVTFSPKTYKMPDPSIYAQVNELKIVVANPEDLDWAAMQESKLSEGVIKYLQPEWNTVESKELVFNYVLRHPQWRLSLQTHKFLGVR

SEQ ID NO: 31762 - protein, 205 aa, Microcystis flosaquae
  REGION 1..205: note = tr|A0A552LDG9|A0A552LDG9_9CHRO 7-carboxy-7-deazaguanine synthase OS=Microcystis flos-aquae Mf_WU_F_19750830_S460 OX=2486237 GN=queE PE=3; SV = 1
MKTVSINHCTYPVVETFHSVQGEGFWTGSNAFFLRLGGCDVYCPWCDQKESWNAHRYPQQSLQELVEMAKGANPAMVVITGGEPLMHNLDPLTKELKNQGLRVHLETSGAHPFTGVFDWVTFSPKTYKMPDPSIYAQVNELKIVVANPEDLDWAAMQESKLSEGVIKYLQPEWNTVESKELVFNYVLQHPQWRLSLQTHKFLGVR

SEQ ID NO: 31763 - protein, 205 aa, unidentified
  source 1..205: note = Microcystis novacekii
  REGION 1..205: note = tr|A0A552J5T2|A0A552J5T2_9CHRO 7-carboxy-7-deazaguanine synthase OS=Microcystis novacekii Mn_MB_F_20050700_S1D OX=2486266 GN=queE PE=3 SV=1
MKTVSINHCTYPVVETFHSVQGEGFWTGSNAFFLRLGGCDVYCPWCDQKESWNAHRYPQKSLGELVEMAKGANPAMVVITGGEPLMHNLDPLTKELKNQGLRVHLETSGAHPFTGVFDWVTFSPKTYKMPDPSIYAQVNELKIVVANPEDLDWAAMQESKLSEGVIKYLQPEWNTVESKELVFNYVLHHPQWRLSLQTHKFLGVR

SEQ ID NO: 31764 - protein, 193 aa, unidentified
  source 1..193: note = Microcystis panniformis
  REGION 1..193: note = tr|A0A0K1S5I7|A0A0K1S5I7_9CHRO 7-carboxy-7-deazaguanine synthase OS=Microcystis panniformis FACHB-1757 OX=1638788 GN=queE PE=3 SV=1
MVETFHSVQGEGFWTGSNAFFLRLGGCDVYCPWCDQKESWNAHRYPQQSLGELVEMAKGANPAMVVITGGEPLMHNLDPLTKELKNQGLRVHLETSGAHPFTGVFDWVTFSPKTYKMPDPSIYARVNELKIVVANPEDLDWAAMQESKLSEGVIKYLQPEWNTVESKELVFNYVLRHPQWRLSLQTHKFLGVR

SEQ ID NO: 31765 - protein, 205 aa, unidentified
  source 1..205: note = Microcystis panniformis
  REGION 1..205: note = tr|A0A552QA76|A0A552QA76_9CHRO 7-carboxy-7-deazaguanine synthase OS=Microcystis panniformis Mp_MB_F_20051200_S9 OX=2486223 GN=queE PE=3; SV = 1
MKTVSINHCTYPVVETFHSVQGEGFWTGSNAFFLRLGGCDVYCPWCDQKESWNAHRYPQQSLGELVEMAKDANPAMVVITGGEPLMHNLDPLTKELKNQGLRVHLETSGAHPFTGVFDWVTFSPKTYKMPDPSIYAQVNELKIVVANPADLNWAAMQESKLSEGVIKYLQPEWNTVESKELVFNYVLRHPQWRLSLQTHKFLGVR

SEQ ID NO: 31766 - protein, 193 aa, Microcystis sp.
  REGION 1..193: note = tr|A0A2L2XMK7|A0A2L2XMK7_9CHRO 7-carboxy-7-deazaguanine synthase OS=Microcystis sp. 0824; OX = 1502726 GN=queE PE=3 SV=1
MVETFHSVQGEGFWTGSNAFFLRLGGCDVYCPWCDQKESWNAHRYPQQSLRELVEMAKGANPAMVVITGGEPLMHNLDPLTEELKNQGLRVHLETSGAHPFTGVFDWVTFSPKTYKMPDPTIYAQVNELKIVVANPEDLDWAAMQESKLSEGVIKYLQPEWNTVESKELVFNYVLRHPQWRLSLQTHKFLGVR

SEQ ID NO: 31767 - protein, 205 aa, Microcystis sp.
  REGION 1..205: note = tr|A0A552CJ79|A0A552CJ79_9CHRO 7-carboxy-7-deazaguanine synthase OS=Microcystis sp. Msp_OC_L_20101000_S702 OX=2486218 GN=queE PE=3 SV=1
MKTVSINHCTYPVVETFHSVQGEGFWTGSNAFFLRLGGCDVYCPWCDQKESWNAHRYPQKSLGELVEMAKGANPAMVVITGGEPLMHNLDPLTRELKNQGLRVHLETSGAHPFTGVFDWVTFSPKTYKMPDPSIYARVNELKIVVAHPEDLDWAAMQESKLSEGVIKYLQPEWNTAESKELVFNYVLRHPQWRLSLQTHKFLGVR

SEQ ID NO: 31768 - protein, 205 aa, unidentified
  source 1..205: note = Microcystis viridis
  REGION 1..205: note = tr|A0A552HL56|A0A552HL56_MICVR 7-carboxy-7-deazaguanine synthase OS=Microcystis viridis Mv_BB_P_19951000_S68D OX=2486270 GN=queE PE=3 SV=1
MKTVSINHCTYPVVETFHSVQGEGFWTGSNAFFLRLGGCDVYCPWCDQKESWNAHRYPQQSVRELVEMAKGANPAMVVITGGEPLMHNLDPLTKELKNQGLRVHLETSGAHPFTGVFDWVTFSPKTYKMPDHSIYARVNELKIVVANPRDLEWAAMQESKLSQGVIKYLQPEWNRVESKELVFNYVLHHPQWRLSLQTHKFLGVR

SEQ ID NO: 31769 - protein, 205 aa, unidentified
  source 1..205: note = Microcystis wesenbergii
  REGION 1..205: note = tr|A0A3E0LQW4|A0A3E0LQW4_9CHRO 7-carboxy-7-deazaguanine synthase OS=Microcystis wesenbergii TW10 OX=2060474 GN=queE PE=3 SV=1
MKTVSINHCTYPVVETFHSVQGEGFWTGSNAFFLRLGGCDVYCPWCDQKESWNAHRYPQKSVRELVEMAKGANPAMVVITGGEPLMHNLDPLTKELKNQGLRVHLETSGAHPFTGVFDWVTFSPKTYKMPDPSIYAQVNELKIVVANPEDLDWAAIQESKLSEGVIKYLQPEWNTVESKELVFNYVLRHPQWRLSLQTHKFLGVR

SEQ ID NO: 31770 - protein, 205 aa, unidentified
  source 1..205: note = Microcystis wesenbergii
  REGION 1..205: note = tr|A0A552JS08|A0A552JS08_9CHRO 7-carboxy-7-deazaguanine synthase OS=Microcystis wesenbergii Mw_QC_S_20081001_S30D OX=2486245 GN=queE PE=3; SV = 1
MKTVSINHCTYPVVETFHSVQGEGFWTGSNAFFLRLGGCDVYCPWCDQKESWNAHRYPQKSLGELVEMAKDANPAMVVITGGEPLMHNLDPLTRELKNQGLRVHLETSGAHPFTGFFDWVTFSPKTYKMPDPSIYARVNELKIVVANPEDLDWAAMQESQLSEGVIKYLQPEWNTVESKELVFNYVLRHPQWRLSLQTHKFLGVR

SEQ ID NO: 31771 - protein, 224 aa, Micromonospora aurantiaca
  REGION 1..224: note = tr|A0A3M9KBP2|A0A3M9KBP2_9ACTN 7-carboxy-7-deazaguanine synthase OS=Micromonospora aurantiaca OX=47850 GN=queE PE=3 SV=1
MRCNLTCGYPGMPRTADAAASGAMVCDTEYTWNTAKHDLKAAPAMSAAEIWDQLIRLDPAIRDPGMAPVDLVVVSGGEPLLHPGIVVDLARSASASGRALEIETNATIAPSAALIAAGARFNAGLKLASSTVPYAKRIKPQVITQLQASGRARWKFVVSGPDDVREIADLQQQFGLTEVWLSPEGTSVDVIVDRMRWLADVALTHGWNLTTRQHVLIWGDERGR

SEQ ID NO: 31772 - protein, 215 aa, Micromonospora chokoriensis
  REGION 1..215: note = tr|A0A1C4UPW1|A0A1C4UPW1_9ACTN 7-carboxy-7-deazaguanine synthase OS=Micromonospora chokoriensis OX=356851 GN=queE PE=3 SV=1
MRSVYRVKEIFYTLQGEGTHAGRPAVFCRFTSCNLWTGRESDRHRAICRFCDTDFVGTDGPGGGRFRSAADLAAAVAKTWQGKSHPRSRPYVVCTGGEPLLQLDEAAVQALHAEGFTVAVETNGTRPAPAGLDWICVSPKAGADLVLTQGHDLKLVYPQVGAEPQLFEDLAFEHFLLQPMDGPDRAANTEAAVRYCLDHPQWQLSLQTHKYLGIA

SEQ ID NO: 31773 - protein, 215 aa, Micromonospora echinospora
  REGION 1..215: note = tr|A0A1C4WLG8|A0A1C4WLG8_MICEC 7-carboxy-7-deazaguanine synthase OS=Micromonospora echinospora OX=1877 GN=queE PE=3 SV=1
MTDVYRIKEIFYTLQGEGTHAGRPAVFCRFTSCNLWTGREEERHRAICRFCDTDFVGTDGPGGGRFGTAAELAAAVAAAWQGQAHPRSRPYVVCTGGEPLLQLDEAAVSALHDAGFEVAVETNGTRPAPPGIDWTCVSPKAGAEVVLTRGDDLKLVYPQPGAEPARFEHLDFTHFMLQPMDGPDRVANTEAAVRYCLEHPQWRLSLQTHKYIGIA

SEQ ID NO: 31774 - protein, 212 aa, Micromonospora echinospora
  REGION 1..212: note = tr|Q6QVS6|Q6QVS6_MICEC 7-carboxy-7-deazaguanine synthase OS=Micromonospora echinospora OX=1877 GN=queE; PE = 3 SV=1
MYRIKEIFYTLQGEGTHAGRPAVFCRFTSCNLWTGREEERYRAICRFCDTDFVGTDGPGGGRFGTAAELAAAVAAAWQGQAHPRSRPYVVCTGGEPLLQLDEAAVSALHDAGFEVAVETNGTRPAPPGIDWTCVSPKAGAEVVLTRGDDLKLVYPQPGAEPARFEHLDFTHFMLQPMDGPDRVANTEAAVRYCLEHPQWRLSLQTHKYIGIA

SEQ ID NO: 31775 - protein, 215 aa, Micromonospora inyonensis
  REGION 1..215: note = tr|A0A1C6RDT7|A0A1C6RDT7_9ACTN 7-carboxy-7-deazaguanine synthase OS=Micromonospora inyonensis OX=47866 GN=queE PE=3 SV=1
MTGVYRIKEIFYTLQGEGTHAGRPAVFCRFTSCNLWTGRKEDRHRAVCRFCDTDFVGTDGPGGGRFATAADLAAAVAAAWRGGDHPRSRPYVVCTGGEPLLQLDEAAVTALHEAGFEVAVETNGTRPAPPGLDWVCVSPKAGADLVLTRGDDLKLVYPQPGAEPGRFEHLDFTHFMLQPMDGPNRAANTEAAVRYCLEHPQWRLSLQTHKYIGIA

SEQ ID NO: 31776 - protein, 215 aa, Micromonospora inyonensis
  REGION 1..215: note = tr|C9W391|C9W391_9ACTN 7-carboxy-7-deazaguanine synthase OS=Micromonospora inyonensis OX=47866 GN=sis25; PE = 3 SV=1
MTGVYRIKEIFYTLQGEGTHAGRPAVFCRFTSCNLWTGREEDRHRAICQFCDTDFVGTDGPGGGRFATAAELAAAVATAWRGQAHPRSRPYVVCTGGEPLLQLDEAAVAALHEAGFEVAVETNGTRPAPPGLDWVCVSPKAGADLVLTRGDDLKLVYPQPGAEPGRFEHLDFTHFMLQPMDGPDRVANTEAAVRYCLEHPQWRFSLQTHKYIGIA

SEQ ID NO: 31777 - protein, 251 aa, Micromonospora lupini
  REGION 1..251: note = tr|I0L1T8|I0L1T8_9ACTN 7-carboxy-7-deazaguanine synthase OS=Micromonospora lupini str. Lupac 08 OX=1150864; GN = queE PE=3 SV=1
MTAPSMPAVPPFPAGSPAVPARPLLVAETFGPTLQGEGPSTGQQALFLRLSRCNLSCPRCDTPYTWDTSRFDLRAHTADRPAEEIIRWVLTQQTRLLVITGGEPLLQQDRLLPVVDAVTAAGRRVEIETNGTVVPLPALVASVGAFNVSPKLAGFAGPRDGRRRINPDALSALAGSGRAVFKFVAADTAELDEIARLQEQFGLDPVWVMPEGTTSDAVLAGMRDLADAVLARGWHLSSRLHVLLWEDTRGR

SEQ ID NO: 31778 - protein, 265 aa, Micromonospora narathiwatensis
  REGION 1..265: note = tr|A0A1A8ZA80|A0A1A8ZA80_9ACTN 7-carboxy-7-deazaguanine synthase OS=Micromonospora narathiwatensis OX=299146 GN=queE PE=3 SV=1
MSTTITATTSRTSTQVAVADLFYSFQGEGANLGRRALFVRLLRCNLTCGYPGMPRTADAAAVGAMVCDTEYTWNTAKHDLQAAPAMSAAEIWDDLVRLDPATGNPGLAPVDLIVVSGGEPLLHRGIVTDLARRASASGKALEIETNATMAPSAALIAAGARFNAGLKLASSAVPYGKRIKPQVITQLQASGQARWKFVVTGPDDVREIADLQQEFGLTEVWLSPEGASVDVVISRMRWLADVALTHGWNLTTRQHVLIWGDERGR

SEQ ID NO: 31779 - protein, 268 aa, Micromonospora nigra
  REGION 1..268: note = tr|A0A1C6R821|A0A1C6R821_9ACTN 7-carboxy-7-deazaguanine synthase OS=Micromonospora nigra; OX = 145857 GN=queE PE=3 SV=1
MTGKRAILPTEITPAGERVGVADLFYSFQGEGVNLGRRALFVRLMRCNLTCGYSRMPRRPNTPAVGAMVCDTEYTWNTAKHDLEAAPTMSAAEIWDALVRLDPATGDPSLAPVGLVVVSGGEPLLHRGTVTALARRATALGKALEIETNATINPGTELIAAGARFNAGLKLASSAVPYSKRVKPQVIRQLQASGQARWKFVVTSPDDVREIADLQQQFGLTDVWLSPEGTSVRVVADRMRWLADVALTRGWNLTTRQHVLIWGDERGR

SEQ ID NO: 31780 - protein, 212 aa, Micromonospora olivasterospora
  REGION 1..212: note = tr|Q2MFY9|Q2MFY9_MICOL 7-carboxy-7-deazaguanine synthase OS=Micromonospora olivasterospora OX=1880 GN=fosF; PE = 3 SV=1
MYRVKEIFYTLQGEGSHAGRPAVFCRFTSCNLWTGREEERHRAICQFCDTDFVGTDGPGGGRFATAAELAAAVVAAWRGEDHPRSRPYVVCTGGEPLLQLDEAAVRALHDAGFEVAVETNGTRPAPPGIDWVCVSPKAGADLVLTRGDDLKLVYPQPGAEPARFEGLDFAHFMLQPMDGPDRVANTEAAVRYCLEHPQWRLSLQTHKYIGIA

SEQ ID NO: 31781 - protein, 212 aa, Micromonospora pallida
  REGION 1..212: note = tr|A0A1C6TCT7|A0A1C6TCT7_9ACTN 7-carboxy-7-deazaguanine synthase OS=Micromonospora pallida OX=145854 GN=queE PE=3 SV=1
MYRVKEIFYTLQGEGTHAGRPAVFCRFTSCNLWTGREQDRHRAICQFCDTDFVGTDGPGGGRFATAADLAAAVAAAWQGGDHPRSRPYVVCTGGEPLLQLDEAAVTALHEAGFEVAVETNGTRPAPAGIDWVCVSPKAGAEVVLTRGDDLKLVYPQPDAEPARFEHLDFTHFMLQPMDGPDRVANTEAAVRYCLEHPQWRLSLQTHKYIGIA

SEQ ID NO: 31782 - protein, 215 aa, Micromonospora rifamycinica
  REGION 1..215: note = tr|A0A1C5JTQ4|A0A1C5JTQ4_9ACTN 7-carboxy-7-deazaguanine synthase OS=Micromonospora rifamycinica OX=291594 GN=queE PE=3 SV=1
MNPVYRVKEIFYTLQGEGTHAGRPAVFCRFTSCNLWTGREEDRHRAVCQFCDTDFVGTDGPGGGRFRSAAELAGAVAAAWQGQRHPRSRPYVVCTGGEPLLQLDEAAVQALHDEGFEVAVETNGTRPAPAGLDWICVSPKAGADLVLTRGHDLKLVYPQVGAEPTRFEELDFAHFLLQPMDGPDRVANTEATVRYCLDHPQWQLSLQTHKYLGIA

SEQ ID NO: 31783 - protein, 212 aa, Micromonospora rifamycinica
  REGION 1..212: note = tr|A0A120FA89|A0A120FA89_9ACTN 7-carboxy-7-deazaguanine synthase OS=Micromonospora rifamycinica OX=291594 GN=queE PE=3 SV=1
MYRVKEIFYTLQGEGTHAGRPAVFCRFTSCNLWTGREEDRHRAVCQFCDTDFVGTDGPGGGRFRSAAELAGAVAAAWQGQRHPRSRPYVVCTGGEPLLQLDEAAVQALHDEGFEVAVETNGTRPAPAGLDWICVSPKAGADLVLTRGHDLKLVYPQVGAEPTRFEELDFAHFLLQPMDGPDRVANTEATVRYCLDHPQWQLSLQTHKYLGIA

SEQ ID NO: 31784 - protein, 212 aa, Micromonospora sagamiensis
  REGION 1..212: note = tr|A0A562W8P0|A0A562W8P0_9ACTN 7-carboxy-7-deazaguanine synthase OS=Micromonospora sagamiensis OX=47875 GN=queE PE=3 SV=1
MYRIKEIFYTLQGEGTHAGRPAVFCRFTSCNLWTGREEDRHRAICQFCDTDFVGTDGPGGGRFATATELAAAVAAAWRGQAHPRSRPYVVCTGGEPLLQLDEAAVAALHDAGFEVAVETNGTRPAPAGIDWVCVSPKAGTDLVLTRGDDLKLVYPQPGAEPARFEHLDFTHFMLQPMDGPDRVANTEATVRYCLEHPQWRFSLQTHKYIGIA

SEQ ID NO: 31785 - protein, 212 aa, Micromonospora sp.
  REGION 1..212: note = tr|A0A2G6XP21|A0A2G6XP21_9ACTN 7-carboxy-7-deazaguanine synthase OS=Micromonospora sp. CNZ299 OX=2035244 GN=queE PE=3 SV=1
MYKIKEIFYTLQGEGSHAGRPAVFCRFASCNLWTGRETDRHRAICQFCDTDFVGTDGPGGGRFASAADLATAVAKTWQGLPHSRSKRYVVCTGGEPLLQLDDDAVAALHAEGFEVAVETNGTKPAPAGLDWICVSPKAGADLVLTAGDELKLVYPQPAAMPELFEDLAFTFMRLQPMDGPEQEANTRAAVAYCLAHPQWQLSLQTHKYLGIA

SEQ ID NO: 31786 - protein, 251 aa, Micromonospora sp.
  REGION 1..251: note = tr|A0A559ZH01|A0A559ZH01_9ACTN 7-carboxy-7-deazaguanine synthase OS=Micromonospora sp. CNZ322 OX=2572904 GN=queE PE=3 SV=1
MTAPSMPAVPPCPARSPAVPVRPLLVAETFGPTLQGEGPSTGQQALFLRLSRCNLSCPRCDTPYTWDTSRFDLRAHTTHRPAEEVIRWVVTQQTRLLVITGGEPLLQQDRLLPVVKAVTEAGRRVEIETNGTVIPLPALVASMGAFNVSPKLSGFAGPRDGRRRINPAALSALAGSGRAVFKFVATDAAELDEIARLQEQFGLDPVWVMPEGATSDAVLTGMRDLADAVLARGWHLSSRLHVLLWEDTRGR

SEQ ID NO: 31787 - protein, 250 aa, Microscilla marina
  REGION 1..250: note = tr|A1ZVR2|A1ZVR2_9BACT 7-carboxy-7-deazaguanine synthase OS=Microscilla marina ATCC 23134 OX=313606; GN = queE PE=3 SV=1
MKIAKFNGKGEIFYTIQGEGKSLGKPTVFIRSSLCNLHCIWCDTDYTWNWKNTPYPHVFDQTPGYEKYDKKEQIVELSTAQIIEEIAPYACKNLVLTGGEPLLQQKAWVELMAQLRKKDAGYWFEVETNGTLLPSSEFDALIDQYNVSPKLENSNNSMKIREKPEAYAFFRQSPKAWFKFVIAQQADLEEVLELIKKYDLPSHKVYLMPEGTTPEQLKSKQSWLVEQCKQYGFHYTDRLHIHIYGSKRGV

SEQ ID NO: 31788 - protein, 250 aa, unidentified
  source 1..250: note = Microscillaceae bacterium
  REGION 1..250: note = tr|A0A349DW79|A0A349DW79_9BACT 7-carboxy-7-deazaguanine synthase OS=Microscillaceae bacterium OX=2053581 GN=queE PE=3 SV=1
MKVAKFNGQGEIFYTIQGEGKSLGKPTVFVRSSLCNLHCIWCDTDYTWNWDTTPHPHIFDKIPGYQKYRKEEQIIELSTEELITEVTQYPCKNLVLTGGEPLLQQKEWVALMTQLRALDTNYWFEVETNGTLLPSQNFDALINQYNVSPKLANSNNSVKLREKPAAYTFFTQSPKAWFKFVIAEKPDLEEVLGLIEKYHIPADKVYLMPEGTTPERLNSKQQWLVEQCKKHGFHYTDRLHIHIYGSKRGV

SEQ ID NO: 31789 - protein, 210 aa, Microvirga aerophila
  REGION 1..210: note = tr|A0A512BKX8|A0A512BKX8_9RHIZ 7-carboxy-7-deazaguanine synthase OS=Microvirga aerophila; OX = 670291 GN=queE PE=3 SV=1
MAYTVKEVFKTLQGEGAQAGRAAVFCRFSGCNLWSGREDDRSRAICQFCDTDFVGTDGVGGGRFQSAEALAQAIEDAWAGAGRQRFVVFTGGEPLLQLDQFLIEAVRRRGFEVAVETNGTVEAQPGLDWVCVSPKAGAPLRQSRGNELKLVYPQVGLDPATVAGLAFEHFWLQPMDGPRREANTVAAVEYCLQNPRWRLSLQTHKLIGIP

SEQ ID NO: 31790 - protein, 268 aa, unidentified
  source 1..268: note = Microvirga lotononidis
  REGION 1..268: note = tr|I4YK78|I4YK78_9RHIZ 7-carboxy-7-deazaguanine synthase OS=Microvirga lotononidis OX=864069 GN=queE PE=3; SV = 1
MRVNRQAPEKRTTLLQLGHDKLDVHSIFYTIQGEGPFCGTPAVFVRLAGCNLQCPACDTNYTSGRRWMGTDEICDEIQQAYRDSLPLSNNIDELVEGTTDNFPIKRFTGLVVITGGEPLRQQIEVLVLKLIQRFGCYVQVETNGLLPPPPLNIINKNTADCEGLYIVCSPKSGKINPVTAERACCFKYVIAAHSVDENDGLPVYALDNSLGKLRVARPPVNYTGTIYLQPMDEQNPQLNERHLQACVRSCMQYGYRLQLQVHKILRME

SEQ ID NO: 31791 - protein, 210 aa, unidentified
  source 1..210: note = Microvirga lotononidis
  REGION 1..210: note = tr|I4YR50|I4YR50_9RHIZ 7-carboxy-7-deazaguanine synthase OS=Microvirga lotononidis OX=864069 GN=queE PE=3; SV = 1
MSYAVKEIFLTLQGEGAQAGRTAVFCRFAGCNLWSGRESDRAAASCRFCDTDFVGTDGTFGGRYATAADLCHRIEDLWGPGTDHRLVVLTGGEPLLQVDSALIDELHRRSFAIAVETNGTIEPPLGLDWICISPKGSTDLKIRAGHELKLVFPQEDAPPERFASLSFERFSLQPMDGPDQLSNTALAVEYCLAHPQWRLSLQTRKYLGIR

SEQ ID NO: 31792 - protein, 245 aa, Microvirga sp.
  REGION 1..245: note = tr|A0A2T7TQU2|A0A2T7TQU2_9RHIZ 7-carboxy-7-deazaguanine synthase OS=Microvirga sp. KLBC 81 OX=1862707 GN=queE PE=3 SV=1
MKGSIRISEIFGPTVQGEGPLIGRPTVFVRTGGCDYRCRWCDTLYAVLPEFRGDWTLMAPIEIMAQVERLSGSTPMLVSLSGGNPALQPLAPLIALGRQKGYTFALETQGSVPQPWFAALDWLMLSPKPPSSGMDTDWQALDESVRAAAGGPHCVVKVVVFDKDDYAYARRMASRYPALSVYLQVGNPAPLVTHSGPGCEEADLDDVMERFRWLVDTVAADRWFTATVLPQLHVLAWGNRSYAGI

SEQ ID NO: 31793 - protein, 25 aa, Microvirga sp.
  REGION 1..25: note = tr|A0A2T7TRQ2|A0A2T7TRQ2_9RHIZ 7-carboxy-7-deazaguanine synthase QueE (Fragment); OS = Microvirga sp. KLBC 81 OX=1862707 GN=DC522_30680 PE=4; SV = 1
AADRWFTATVLPQLHVLAWGNKRGV

SEQ ID NO: 31794 - protein, 210 aa, unidentified
  source 1..210: note = Microvirga vignae
  REGION 1..210: note = tr|A0A0H1RBC2|A0A0H1RBC2_9RHIZ 7-carboxy-7-deazaguanine synthase OS=Microvirga vignae; OX = 1225564 GN=queE PE=3 SV=1
MTYAVKEIFLTLQGEGAQAGRTAVFCRFAGCNLWSGRESDRAAAACRFCDTDFVGTNGTFGGRYATAADLCHRIEELWGPGTDHRLVVLTGGEPLLQVDAALIDELHRRSFTIAVETNGTVEPPPGLDWICVSPKGSTALKIRAGHELKLVFPQEDAPPERFASLSFERFSLQPMDGPDQVVNTARAVEYCLAHPQWRLSLQTHKYLGIR

SEQ ID NO: 31795 - protein, 243 aa, unidentified
  source 1..243: note = Microvirga vignae
  REGION 1..243: note = tr|A0A0H1RDW5|A0A0H1RDW5_9RHIZ 7-carboxy-7-deazaguanine synthase OS=Microvirga vignae; OX = 1225564 GN=queE PE=3 SV=1
MKGSIRISEIFGPTVQGEGPLIGRPTVFVRTGGCDYRCHWCDTLYAVLPEFREDWTLMAPTEIMAQVERLSGSTPVLVSLSGGNPALQPLAPLIALGRQKGYTFALETQGSVPQPWFAALDWLMLSPKPPSSGMDTDWQALDECVRAAAGGPHCAVKVVVFDEDDYAYARRVASRYPALPVYLQVGNPAPLVTHSGPGSEEADLDDVMERFRWLVDTVAADRWFTATVLPQLHVLAWGNKRGV

SEQ ID NO: 31796 - protein, 209 aa, Microvirgula aerodenitrificans
  REGION 1..209: note = tr|A0A2S0PD56|A0A2S0PD56_9NEIS 7-carboxy-7-deazaguanine synthase OS=Microvirgula aerodenitrificans OX=57480 GN=queE PE=3 SV=1
MNYTVKEVFYTLQGEGAQAGRAAVFCRFSGCNLWSGREADRDRAICRFCDTDFVGTGPDGGKFADAGALAAHIRAGWRGQGGTPYVVFTGGEPLLQLDAALITALHRLGFEIGVETNGTLPAPDGIDWLCVSPKAGTDWVQRRGDEIKLVYPQPALLPDTVATDGFTHAWLQPMDGPARTEHTRAAIAACLTDPRWRLSVQTHKITGIR

SEQ ID NO: 31797 - protein, 209 aa, Microvirgula sp.
  REGION 1..209: note = tr|A0A329AZ05|A0A329AZ05_9NEIS 7-carboxy-7-deazaguanine synthase OS=Microvirgula sp. AG722 OX=2183901 GN=queE PE=3 SV=1
MNYTVKEVFYTLQGEGAQAGRAAVFCRFSGCNLWSGREVDRDRAICRFCDTDFVGTGPDGGKFADAGALAAHIRAGWRGQGGTPYVVFTGGEPLLQLDAALITALHRLGFEIGVETNGTLPAPDGIDWLCVSPKADTDWVQRRGDEIKLVYPQPALLPDTVATDGFTHAWLQPMDGPARTEHTRAAIAACLTDPRWRLSVQTHKITGIR

SEQ ID NO: 31798 - protein, 218 aa, unidentified
  source 1..218: note = Minicystis rosea
  REGION 1..218: note = tr|A0A1L6LYS8|A0A1L6LYS8_9DELT 7-carboxy-7-deazaguanine synthase OS=Minicystis rosea; OX = 888845 GN=queE PE=3 SV=1
MAKEDTLVVHEIYASIQGESTFAGLPCTFVRLTGCNLRCTWCDTTQAFHGGQRLPRADVLARALATGTTLVELTGGEPLLQPGALPLMTELCDAGRTVLIETSGERDVSKVDPRVHKIMDLKAPGSGESHRNRWENLEHLTARDEIKFVLAGREDYEWMRDVVRSRRLDSIGCALLASVVWGKLALKDLVAWTLEDALPVRVQIQMHKIIWGADTQGV

SEQ ID NO: 31799 - protein, 215 aa, Mitsuaria sp.
  REGION 1..215: note = tr|A0A1A9HP82|A0A1A9HP82_9BURK 7-carboxy-7-deazaguanine synthase OS=Mitsuaria sp. 7; OX = 1658665 GN=queE PE=3 SV=1
MTYAVKEMFYTLQGEGAQAGRAAVFCRFAGCNLWTGREQDREKAVCTFCDTDFVGTDGQGGGKFVSADALAEAIDSKWPKDEHGRKTGTPYVVCTGGEPLLQLDGPLITALKAHGFEIAVETNGTQPAPEGLDWICVSPKADAEVVLTKGNELKLVYPQPLALPERFADLAFDHFFLQPMDSVLQKQNTRAAIAYCMDHPQWKLSIQMHKVVGID

SEQ ID NO: 31800 - protein, 215 aa, Mitsuaria sp.
  REGION 1..215: note = tr|A0A1I6KT36|A0A1I6KT36_9BURK 7-carboxy-7-deazaguanine synthase OS=Mitsuaria sp. PDC51; OX = 1881035 GN=queE PE=3 SV=1
MTYAVKEMFYTLQGEGAQAGRAAVFCRFAGCNLWSGREQDREKAVCSFCDTDFVGTDGQGGGKFASADALAEAIDAQWPKDADGRKTGTPYVVCTGGEPLLQLDGPLITALKALGFEIAVETNGTQPAPEGLDWICVSPKADAELVLTRGNELKLVYPQPLALPERFADLDFDHFFLQPMDSILQKQNTREAVAYCMAHPQWKLSIQMHKVVGID

SEQ ID NO: 31801 - protein, 251 aa, Mitsuokella jalaludinii
  REGION 1..251: note = tr|A0A174C0E3|A0A174C0E3_9FIRM 7-carboxy-7-deazaguanine synthase OS=Mitsuokella jalaludinii OX=187979 GN=queE PE=3 SV=1
MNARHENLIEIFSSIQGEGKYVGCRQVFVRLEGCNLDCSYCDTENKPGSHPACQVETAAGSRTFETIKNPMTASETAAVIVNLLREVPHEAVSFTGGEPLLHAAFIRAVVLQLHALGQQPKVFLETNGTLYRELASILDITDIISMDIKLPSIVTKPQWEAHARFLELARTKDLYVKLVVSAETTDKEFKKSVALLEKEAPDALFIIQPVTPYGGCAAASPEKILACQSYALKHLRDVRVIPQTHKMIGQL

SEQ ID NO: 31802 - protein, 251 aa, Mitsuokella multacida
  REGION 1..251: note = tr|C9KKI3|C9KKI3_9FIRM 7-carboxy-7-deazaguanine synthase OS=Mitsuokella multacida DSM 20544 OX=500635; GN = queE PE=3 SV=1
MNASNENLIEIFSSIQGEGKYVGCRQVFVRLEGCNLDCSYCDTENKPGSHPACQVETAAGSRTFATIKNPMTASETAAVIANLLREVPHEAVSFTGGEPLLHAAFIRAVVLQLRALGQPCKVFLETNGTLYRELASILDITDIISMDIKLPSIVSRPQWEAHARFLELARTKDLYVKLVVSAETTKEEFEKSVALLEEQAPDALFIIQPVTPYGGCKAASPEKILACQSHALKHLKDVRVIPQTHKMIGQL

SEQ ID NO: 31803 - protein, 251 aa, Mitsuokella multacida
  REGION 1..251: note = tr|A0A356UPK8|A0A356UPK8_9FIRM 7-carboxy-7-deazaguanine synthase OS=Mitsuokella multacida; OX = 52226 GN=queE PE=3 SV=1
MNASNENLIEIFSSIQGEGKYVGCRQVFVRLEGCNLDCSYCDTENKPGSHPACQVETAAGSRTFATIKNPMTATETASVIANLMREVPHEAVSFTGGEPLLHAAFIRAVVLQLRALGQSCKVFLETNGTLYRELASILDITDIISMDIKLPSIVSRPQWEAHARFLELARTKDLYVKLVVSAETTKEEFEKSVALLEEQAPDALFIIQPVTPYGGCKAASPEKILACQSYALKHLKDVRVIPQTHKMIGQL

SEQ ID NO: 31804 - protein, 243 aa, Mitsuokella sp.
  REGION 1..243: note = tr|A0A412KZN1|A0A412KZN1_9FIRM 7-carboxy-7-deazaguanine synthase OS=Mitsuokella sp. AF21-1AC OX=2292235 GN=queE PE=3 SV=1
MQENLIEIFSSIQGEGKYVGCRQVFVRFEGCNLDCRYCDTENAPGSHPVCEVETSAGSRQFEHVKNPLTVREAADAIRRLLEAVPHQAVSFTGGEPLLHGPFIRALAEHLDAPVFLETNGTLYRQLEEILDIVDIISMDIKLPSIVREPQWEAHKAFIRLAREKDLYIKLVVSAETSDAEFHTAVGIVAELAPEVPFIIQPVTPYGGCEAAAPGKILTYQAYALQYLRDVRVIPQTHKMIGQL

SEQ ID NO: 31805 - protein, 243 aa, Mitsuokella sp.; identical to SEQ ID NO: 31804
  REGION 1..243: note = tr|A0A415RBH1|A0A415RBH1_9FIRM 7-carboxy-7-deazaguanine synthase OS=Mitsuokella sp. AF33-22 OX=2292047 GN=queE PE=3 SV=1

SEQ ID NO: 31806 - protein, 223 aa, unidentified
  source 1..223: note = Mixta gaviniae
  REGION 1..223: note = tr|A0A2L0IJ23|A0A2L0IJ23_9GAMM 7-carboxy-7-deazaguanine synthase OS=Mixta gaviniae; OX = 665914 GN=queE PE=3 SV=1
MQYPINEMFQTLQGEGFYTGVPAIFIRLQGCPVGCSWCDTKHTWDKLADRETSLGDILIKTVESDAWGAADADALLTTIARQQWTARHVVITGGEPCIHDLTPLTAALQQAGFSCQIETSGTHAVQCTPETWVTVSPKVNMRGGYDVLDQALVRADEIKHPVARQRDIDALEELLARLEDEKARVIALQPISQKEEATRLCIATCIARNWRLSMQTHKYLNIA

SEQ ID NO: 31807 - protein, 223 aa, unidentified
  source 1..223: note = Mixta sp.
  REGION 1..223: note = tr|A0A506V6R3|A0A506V6R3_9GAMM 7-carboxy-7-deazaguanine synthase OS=Mixta sp. BIT-26; OX = 2562439 GN=queE PE=3 SV=1
MQYPINEMFQTLQGEGYYTGVPAIFIRLQGCPVGCSWCDTKHTWDKLADRETSLGDILIKTVESDAWGAADADALLRTIAEQQWTARHVVITGGEPCIHDLTPLTEALQQAGFSCQIETSGTHPVRCTSQTWVTVSPKVNMRGGYDVLEQALLRADEIKHPVARQRDIDALDALLAGLSDSKTRIVALQPISQKEDATRLCIATCIARNWRLSMQTHKYLNIA

SEQ ID NO: 31808 - protein, 223 aa, unidentified
  source 1..223: note = Mixta theicola
  REGION 1..223: note = tr|A0A2K1Q7M6|A0A2K1Q7M6_9GAMM 7-carboxy-7-deazaguanine synthase OS=Mixta theicola; OX = 1458355 GN=queE PE=3 SV=1
MQYPINEMFQTLQGEGFYTGVPAIFIRLQGCPVGCSWCDTKHTWDKLADRETSLGDILVKTVESDAWGAADADALLQTINQQQWTARHVVITGGEPCIHDLTPLTDALQQAGFSCQIETSGTHPVRCTAQTWVTVSPKVNMRGGYDVLDQALVRADEIKHPVARQRDIAALDQLLETIADDKQRIIALQPISQKEDATRLCIETCIARNWRLSMQTHKYLNIA

SEQ ID NO: 31809 - protein, 229 aa, unidentified
  source 1..229: note = Mizugakiibacter sediminis
  REGION 1..229: note = tr|A0A0K8QS16|A0A0K8QS16_9GAMM 7-carboxy-7-deazaguanine synthase OS=Mizugakiibacter sediminis OX=1475481 GN=queE PE=3 SV=1
MTAIVREAAEAAAPASATRLRITEIFHSIQGEADAVGWPTVFVRLTGCPLRCTWCDTEYAFHGGQWRDLDTILAEVAGYGARHVCVTGGEPLAQKRCLALLARLCDAGYEVALETSGALDVSGVDRRVRKVMDLKAPGSGEAARNLWSNLEHLTPRDQVKCVLADRADYDWAVARLREHRLAERCTVLFSPVHGALAPRELAEWILADRLPVRFQLQLHKALWGDVPGR

SEQ ID NO: 31810 - protein, 223 aa, Moellerella wisconsensis
  REGION 1..223: note = tr|A0A0H2QQX9|A0A0H2QQX9_9GAMM 7-carboxy-7-deazaguanine synthase OS=Moellerella wisconsensis OX=158849 GN=queE PE=3 SV=1
MQYPINEIFQTLQGEGVFTGVPAIFVRLQGCPVGCSWCDTKHTWQQEPQKQRSLGDILIKQVENDEWAFASVDEIIQRFEQQNYTARHIAITGGEPCIYDLRILTQGLEARGYRCQIETSGTYPIQCSENTWVTVSPKVGMKGGLKVLKEAIDRANEIKHPVAREKDIEALDNLLLLRDNISDLTVSLQPISQKLSATKLCIETCIARNWRLSVQTHKYLNIA

SEQ ID NO: 31811 - protein, 234 aa, Moellerella wisconsensis
  REGION 1..234: note = tr|A0A485A448|A0A485A448_9GAMM 7-carboxy-7-deazaguanine synthase OS=Moellerella wisconsensis OX=158849 GN=queE PE=3 SV=1
MLAELNAVEKVMQYPINEIFQTLQGEGVFTGVPAIFVRLQGCPVGCSWCDTKHTWQQEPQKQRSLGDILIKQVENDEWAFASVDEIIQRFEQQNYTARHIAITGGEPCIYDLRILTQGLEARGYRCQIETSGTYPIQCSENTWVTVSPKVGMKGGLKVLKEAIDRANEIKHPVAREKDIEALDHLLLLRDNISDLTVSLQPISQKLSATKLCIETCIARNWRLSVQTHKYLNIA

SEQ ID NO: 31812 - protein, 215 aa, unidentified
  source 1..215: note = Moheibacter sediminis
  REGION 1..215: note = tr|A0A1W2BGB4|A0A1W2BGB4_9FLAO 7-carboxy-7-deazaguanine synthase OS=Moheibacter sediminis; OX = 1434700 GN=queE PE=3 SV=1
MIALNSITEEQSELLKEGKFLPVMEHFYTLQGEGAHAGKAAYFIRLGGCDVGCHWCDVKDSWDAEKHPLTDIEKLAKEATDLSKTIIITGGEPLMWNLDFLTKKLKEFGAAIHIETSGAYSLSGQIDWITLSPKKLADVEPDVLEKASELKCIIFNNDDFRFAEKYAELVDSSCRLYLQVEWSKKEKMSPLVVEYVKANPKWQVSVQTHKYLDIP

SEQ ID NO: 31813 - protein, 197 aa, unidentified
  source 1..197: note = Mongoliibacter ruber
  REGION 1..197: note = tr|A0A2T0WBM3|A0A2T0WBM3_9BACT 7-carboxy-7-deazaguanine synthase OS=Mongoliibacter ruber; OX = 1750599 GN=queE PE=3 SV=1
MLPVMEAFYTIQGEGVHTGTPAYFIRLGGCDVGCVWCDVKESWEAEKWPVSTIEEIVQGALAYPGRMVVITGGEPLMYDLGPLTKLLKEKGFTINIETSGAHPFSGTFDWVCFSPKKFKEPHPSIYVQANELKVVIFHKSDFEFAEKHAVLVNDNCHKLLQPEWSRSTQHLQSIIDYVKFHPDWKISLQTHKFMDIP

SEQ ID NO: 31814 - protein, 226 aa, unidentified
  source 1..226: note = Monoglobus pectinilyticus
  REGION 1..226: note = tr|A0A2K9P5Y4|A0A2K9P5Y4_9FIRM 7-carboxy-7-deazaguanine synthase OS=Monoglobus pectinilyticus OX=1981510 GN=queE PE=3 SV=1
MNHDSQAFKVCEKFVSINGEGIKAGQLSVFVRFKGCNLDCSYCDTKWANEKDADFESMSTDEIVKYVVETSVQNVTLTGGEPLIQPGISGLIKNLKENDLNVEIETNGAVNLKPFCSDETRPDCFTMDYKLPSSGMEDSMLTDNFFYLKDSDCVKFVAGSENDLEKALKIIHEYDLTNRCHVYISPVFGSIEPVRIVEFMIENVLNNVNLQIQMHKVIWNPEERGV

SEQ ID NO: 31815 - protein, 259 aa, unidentified
  source 1..259: note = Moorea bouillonii
  REGION 1..259: note = tr|A0A1U7N318|A0A1U7N318_9CYAN 7-carboxy-7-deazaguanine synthase OS=Moorea bouillonii PNG; OX = 568701 GN=queE PE=3 SV=1
MLCGNQATARLIEVFSAIQGEGLNVGTRQIFIRFALCDLRCHFCDSFHTWTVPPQCQVEQTPGKRDFETYPNPVPLRSLLKWVNRQNKHRLHDSISLTGGEPLLHTPFLVEFLPELRQLTGLPIYLETGGHRPQEMAMVLPYLDSVGMDIKLPSVSGENRWAAHKEFLKLCHNSSVEVFVKLIIDCHTDPTELEQSADLVAAVSPEIPVFLQPVTPVEGSGQPIVAPTPEQVLAWQALMKLFLKQVRVLPQTHKMIGQL

SEQ ID NO: 31816 - protein, 259 aa, unidentified
  source 1..259: note = Moorea producens
  REGION 1..259: note = tr|A0A1D8U3B3|A0A1D8U3B3_9CYAN 7-carboxy-7-deazaguanine synthase OS=Moorea producens PAL-8-15-08-1 OX=1458985 GN=queE PE=3 SV=1
MPCGTQPTARLIEVFSAIQGEGLNVGTRQIFIRFALCDLRCHFCDSFHTWAVPPQCQVEQTPGKRDFETYPNPVPLRSLLKWVDRQNKHRLHDSISLTGGEPLLHTPFLVEFLPELRQLTGLPIYLETGGHRPEEIARVLPYLDSVGMDIKLPSVSGENRWADHREFLKVCHNSSVEVFVKLIIDYHTDPTDLEQSADLVAALSPEIPVFLQPVTPVEGSGQPIVTPTPEQVLAWQVLMKRSLKQVRVIPQTHKMIGQL

SEQ ID NO: 31817 - protein, 259 aa, unidentified
  source 1..259: note = Moorea producens
  REGION 1..259: note = tr|A0A1D9G0C5|A0A1D9G0C5_9CYAN 7-carboxy-7-deazaguanine synthase OS=Moorea producens JHB; OX = 1454205 GN=queE PE=3 SV=1
MPCGNQPTARLIEVFSAIQGEGLNVGTRQIFIRFALCDLRCHFCDSFHTWAVPPQCQVEQTPGKRDFETYPNPVPLPWLLKWVDRQNKHRLHDSISLTGGEPLLHTPFLVEFLPELRQLTGLPIYLETGGHRPEEMARVLPYLDSVGMDIKLPSVSGENRWAAHREFLKLCHNSSVEVFVKLIIDCQTDPTELEQSADLVAALSPEIPVFLQPVTPVEGSGQPIVAPTPEQVLAWQALMKRFLKQVRVLPQTHKMIGQL

SEQ ID NO: 31818 - protein, 212 aa, Moorella glycerini
  REGION 1..212: note = tr|A0A0C7NKP8|A0A0C7NKP8_9THEO 7-carboxy-7-deazaguanine synthase OS=Moorella glycerini; OX = 55779 GN=queE PE=3 SV=1
MLVKEIFLSLQGESTGAGLPTVFVRFSGCNLRCRYCDTKYAYEGGEEVSVQALFERISQYPYRRVCLTGGEPLLQSREELQKLLNVLSNYEVSIETNGSLPLEMVYLNPDQRWVMDIKCPGSGEVAANRWENLSLIRPEDEIKFVVSSEDDYIWAREFIRKNLPVSCERLLFSPAYGLLEPACLAEWILSDGLDVRLQLQLHKIIFGPESRM

SEQ ID NO: 31819 - protein, 220 aa, Moorella mulderi
  REGION 1..220: note = tr|A0A151AVA4|A0A151AVA4_9THEO 7-carboxy-7-deazaguanine synthase OS=Moorella mulderi DSM 14980 OX=1122241 GN=queE PE=4 SV=1
MDFPSEVCTTVFYGGCNFRCPWCHNADLVLRPFTLPEISPDEVLNLLSRRRSWVQAVCITGGEPTLAPGLEEFILSLKSCGFKVKLDTNGTQPEVLARLLAGGLLDYVAMDVKAPPEKYNLLTGTRADLEAVRESIALIKNSRVAYEFRTTVVPGLLLEEDFLAIGRLLRGARRYVLQQYRPAGTLLDGNFRDILPYPGATLNNIAQKLQPFFANVEIRI

SEQ ID NO: 31820 - protein, 234 aa, Moorella thermoacetica
  REGION 1..234: note = tr|A0A1J5NDT3|A0A1J5NDT3_MOOTH 7-carboxy-7-deazaguanine synthase OS=Moorella thermoacetica OX=1525 GN=queE PE=4 SV=1
MIPIAIRGIQLTSLVDFPGTVCTTIFFGGCNFRCPWCHNADLVLRPSALPETSPAEVLNLLERRSAWVQAVCITGGEPTLAPDLEEFIRSLKASGFKVKLDTNGTQPGVIARLLAGGLLDYVAMDVKGPPEKYDLLTGIRANLEAVRESIALIKNSRVAYEFRTTVVPGLLAEEDLPAIGEMLAGARHYVLQQFRPAGTLLNPGLRELHPYPEATLKNIADTLQPFFARVEVRS

SEQ ID NO: 31821 - protein, 234 aa, Moorella thermoacetica
  REGION 1..234: note = tr|A0A1J5JEX2|A0A1J5JEX2_MOOTH 7-carboxy-7-deazaguanine synthase OS=Moorella thermoacetica OX=1525 GN=queE PE=4 SV=1
MIPIAIRGIQLTSLVDFPGTVCTTIFFGGCNFRCPWCHNADLVLRPSALPETSPAEVLNLLERRSAWVQAVCITGGEPTLAPDLEEFIRSLKASGFKVKLDTNGSQPDVIARLLAGGLLDYVAMDVKGPPGKYDLLTGTRADLEAIKESIAFIKKSRVAYEFRTTVVPGLLAAEDLPAIGEMLAGARHYVLQQFRPGNTLLDASFRLLPPYSGSTLRALAQKLRPYIEKVEVRE

SEQ ID NO: 31822 - protein, 248 aa, Moraxella atlantae
  REGION 1..248: note = tr|A0A1B8QF82|A0A1B8QF82_9GAMM 7-carboxy-7-deazaguanine synthase OS=Moraxella atlantae; OX = 34059 GN=queE PE=3 SV=1
MSISNASDILLNTPLRNTTIPTTDPAAGLRVSEIFYSLQGEALTAGLPTVFIRLTGCPLRCVYCDTEYAFFGGERMSLEDIIADVARYACQRVCVTGGEPLAQPNAIALMRQLLDLGYEISLETSGALDVCGVPPAVSKVMDIKTPSSGEVDKNLWNNLACLTTHDQLKFVIMNRADYDWAKQVLARYDLADKVGTVWFSPMFNVYADRSPDVPSLATELAEWILADALPVRFQLQLHKIIWADAKGK

SEQ ID NO: 31823 - protein, 246 aa, Moraxella atlantae
  REGION 1..246: note = tr|A0A1B8QK37|A0A1B8QK37_9GAMM 7-carboxy-7-deazaguanine synthase OS=Moraxella atlantae; OX = 34059 GN=queE PE=3 SV=1
MSNASDILLNTPLRNTTIPTTDPAAGLRVSEIFYSLQGEALTAGLPTVFIRLTGCPLRCVYCDTEYAFFGGERMSLEDIIADVARYACQRVCVTGGEPLAQPNTIALMRQLLGLGYEISLETSGALDVCGVPPAVSKVMDIKTPSSGEVDKNLWNNLACLTTHDQLKFVIMNRADYDWAKQVLARYDLADKVGTVWFSPMFNVHADRSPEVPSLATELAEWILADALPVRFQLQLHKIIWADAKGK

SEQ ID NO: 31824 - protein, 295 aa, Moraxella bovis
  REGION 1..295: note = tr|A0A378PNC7|A0A378PNC7_MORBO 7-carboxy-7-deazaguanine synthase OS=Moraxella bovis; OX = 476 GN=queE PE=3 SV=1
MARTRLFICLMNLNWCILNVDIFNIIFFPKFCQKSAKIVSFSIIIIPMSANSQSQSTPKSIQLRNTQIPTTDPSAGLKLTEIFYSLQGEALAMGLPTIFIRLTGCPLRCVYCDTTYSFTGGERWGLDTILEHIKEYPCKRICLTGGEPLAQPNAIALMKLLLDNGYEISLETAGALSVKDVPIAVSKVMDLKSPSSGEVGKNLWENLDYLTPHDQIKIVIADRADYDWAKGVLQKYELDKKCGVVWFSPMFNIDERKSDVPNLAVELAEWILADGLPVRFQLQLHKIIWADAKGK

SEQ ID NO: 31825 - protein, 248 aa, Moraxella bovis
  REGION 1..248: note = tr|A0A1T0A4K6|A0A1T0A4K6_MORBO 7-carboxy-7-deazaguanine synthase OS=Moraxella bovis; OX = 476 GN=queE PE=3 SV=1
MSANSQSQSTPKSIQLRNTQIPTTDPSAGLKLTEIFYSLQGEALAMGLPTIFIRLTGCPLRCVYCDTTYSFAGGERWGLDTILEHIKEYPCKRICLTGGEPLAQPNAIALMKLLLDNGYEISLETAGALSVKDVPIAVSKVMDLKSPSSGEVGKNLWENLDYLTPHDQIKIVIADRADYDWAKGVLQKYELDKKCGVVWFSPMFNIDERKSDVPNLAVELAEWILADGLPVRFQLQLHKIIWADAKGK

SEQ ID NO: 31826 - protein, 239 aa, Moraxella bovoculi
  REGION 1..239: note = tr|A0A0U2B928|A0A0U2B928_9GAMM 7-carboxy-7-deazaguanine synthase OS=Moraxella bovoculi; OX = 386891 GN=queE PE=3 SV=1
MPNSTRLRNTFIPTTDPSAGLRLTEIFYSLQGEALAMGLPTIFIRLTGCPLRCVYCDTTYSFTGGERWGLDTILEYIKQYPCKRICLTGGEPLAQPNAIALMKLLLENGYEISLETAGALSVKDVPVAVSKVMDLKSPSSSEVGKNLWKNLEYLTNNDQIKIVIADRADYDWAKEMLQKYELDKKCGVVWFSPMFNIDERKSDVPNLAVELAEWILADGLPVRFQLQLHKIIWADAKGK

SEQ ID NO: 31827 - protein, 239 aa, Moraxella bovoculi
  REGION 1..239: note = tr|A0A066UPW4|A0A066UPW4_9GAMM 7-carboxy-7-deazaguanine synthase OS=Moraxella bovoculi 237 OX=743974 GN=queE PE=3 SV=1
MPNSTRLRNTFIPTTDPSAGLRLTEIFYSLQGEALAMGLPTIFIRLTGCPLRCVYCDTTYSFTGGERWGLDTILEYIKQYPCKRICLTGGEPLAQPNAIALMKLLLDNGYEISLETAGALSVKDVPVAVSKVMDLKSPSSGEVRKNLWKNLEYLTNNDQIKIVIADRADYDWAKEMLQKYELDKKCGVVWFSPMFNIDERKSDVPNLAVELAEWILADGLPVRFQLQLHKIIWADAKGK

SEQ ID NO: 31828 - protein, 239 aa, Moraxella canis
  REGION 1..239: note = tr|A0A1S9ZQI9|A0A1S9ZQI9_9GAMM 7-carboxy-7-deazaguanine synthase OS=Moraxella canis; OX = 90239 GN=queE PE=3 SV=1
MNQADTLRNTKIPTTDPQAGLKLTEIFYSLQGEALTSGLPTVFIRLTGCPLRCTYCDTTYSFSGGERWGLDDIMAHIAQYPCKRVCVTGGEPLAQPNAIALMQRLLESGYEISLETAGALSVADVPRSVSKVMDLKTPSSGEADKNLWENLAHLTSHDQIKIVIADRADYDWAKQMIEHHALHERVGTVWLSPMFDINETTSQAPTIATNLAEWILADALPVRLGLQLHKIIWADAKGK

SEQ ID NO: 31829 - protein, 246 aa, Moraxella caprae
  REGION 1..246: note = tr|A0A378R2Y8|A0A378R2Y8_9GAMM 7-carboxy-7-deazaguanine synthase OS=Moraxella caprae; OX = 90240 GN=queE PE=3 SV=1
MSANSQSTPKSIQLRNTQIPTTDPSAGLKLTEIFYSLQGEALAMGLPTIFIRLTGCPLRCVYCDTTYSFTGGERWGLDTILEHVKEYPCKRICLTGGEPLAQPNSIALMKLLLENGYEISLETAGALSVKDVPIAVSKVMDLKSPSSGEVDKNLWENLGYLTSHDQIKIVIADRADYDWAKDVLQKYELDKKCGVVWFSPMFNIDERKSDVSNLAIKLAEWILADGLPVRFQLQLHKIIWADAKGK

SEQ ID NO: 31830 - protein, 266 aa, Moraxella catarrhalis
  REGION 1..266: note = tr|D5VAC7|D5VAC7_MORCB 7-carboxy-7-deazaguanine synthase OS=Moraxella catarrhalis (strain BBH18); OX = 1236608 GN=queE PE=3 SV=1
MDNPFAIYVEVWYNIAFYHHLTLKKPNIVTKDTLRNTKIPTTDPQAGLKLTEIFYSLQGEALTAGLPTIFIRLTGCPLRCHYCDTTYSFSGGERWGLDDIMTHIAQYPCWRVCVTGGEPLAQPNAIALMHKLIQSGYEVSLETAGALSVANVPPLVSKVMDLKSPSSGEADKNLWENLAHLTLHDQIKIVIANRTDYEWAKNIITKHALDDKVGTIWLSPMFNIQENTSHAPKLATDLAEWILKDALPVRFGLQLHKIIWADAKGK

SEQ ID NO: 31831 - protein, 238 aa, Moraxella catarrhalis
  REGION 1..238: note = tr|A0A3A9R5V0|A0A3A9R5V0_MORCA 7-carboxy-7-deazaguanine synthase OS=Moraxella catarrhalis; OX = 480 GN=queE PE=3 SV=1
MTKDTLRNTKIPTTDPQAGLKLTEIFYSLQGEALTAGLPTIFIRLTGCPLRCHYCDTTYSFSGGERWGLDDIMTHIAQYPCWRVCVTGGEPLAQPNAIALMHKLIQSGYEVSLETAGALSVANVPPLVSKVMDLKSPSSGEADKNLWENLAHLTLHDQIKIVIANRTDYEWAKNIITKHALDDKVGTIWLSPMFNIQENTSHAPKLATNLAEWILKDALPVRFGLQLHKIIWADAKGK

SEQ ID NO: 31832 - protein, 237 aa, Moraxella caviae
  REGION 1..237: note = tr|A0A1T0A119|A0A1T0A119_9GAMM 7-carboxy-7-deazaguanine synthase OS=Moraxella caviae; OX = 34060 GN=queE PE=3 SV=1
MTALRNTQIPTTDPAAGLRLTEIFYSLQGEALTMGLPTIFVRLTGCPLRCTYCDTTYSFTGGERFGLDEIMVKIASFPCKRVCITGGEPLAQPNAIALMQMLVAAGFEVSLETAGALSVKDVPPQVSKVMDLKSPSSGECERNLWENLAHLTTHDQIKIVIADRADYDWAKQMLQTHELHKKCGTVWFSPMFNIDEAYKSDVPMLATNLAEWILADALPVRFQLQLHKIIWADAKGK

SEQ ID NO: 31833 - protein, 240 aa, Moraxella cuniculi
  REGION 1..240: note = tr|A0A3S4UJB9|A0A3S4UJB9_9GAMM 7-carboxy-7-deazaguanine synthase OS=Moraxella cuniculi; OX = 34061 GN=queE PE=3 SV=1
MNTKQTALRNTKIPTTDPQAGLKLTEIFYSLQGEALSSGLPTIFIRLTGCPLRCVYCDTTYSFTGGERWTLEGIADYIAKYPCQRVCITGGEPLAQPNAIALMQLLLDKGYEISLETAGALSVAEVPAAVSKVMDLKTPSSGEMDKNLWENLHHLGRHDQIKIVIADRKDYQWAKQIIATHRLHELVGTVWLSPMFNIHENHGNAPTLATDLAEWILADGLPVRFGLQLHKIIWADAKGK

SEQ ID NO: 31834 - protein, 240 aa, Moraxella cuniculi; identical to SEQ ID NO: 31833
  REGION 1..240: note = tr|A0A1N7F6P8|A0A1N7F6P8_9GAMM 7-carboxy-7-deazaguanine synthase OS=Moraxella cuniculi DSM 21768 OX=1122245 GN=queE PE=3 SV=1

SEQ ID NO: 31835 - protein, 241 aa, Moraxella equi
  REGION 1..241: note = tr|A0A378QQX2|A0A378QQX2_9GAMM 7-carboxy-7-deazaguanine synthase OS=Moraxella equi; OX = 60442 GN=queE PE=3 SV=1
MPTIIKTQLRNTQIPTTDPSAGLKLTEIFYSLQGEALAMGLPTIFIRLTGCPLRCVYCDTTYSFTGGQRWGLDAILEHIKQYPCKRICLTGGEPLAQPNAIALMKLLLKNGYEISLETAGALSVKDVPIAVSKVMDLKSPSSGEVDKNLWENLDYLTPHDQIKIVIADHADYDWAKDVLQKYELDKKCGVVWFSPMFNIDERKSDVPNLAVELAEWILADGLPVRFQLQLHKIIWADAKGK

SEQ ID NO: 31836 - protein, 239 aa, Moraxella lacunata
  REGION 1..239: note = tr|A0A1V4GUB9|A0A1V4GUB9_MORLA 7-carboxy-7-deazaguanine synthase OS=Moraxella lacunata; OX = 477 GN=queE PE=3 SV=1
MPNPTPLRNTFIPTTDPSSGLRLTEIFYSLQGEALTMGLPTIFIRLTGCPLRCTYCDTTYSFTGGERWGLDAILEHIKQYPCKRICLTGGEPLAQPNAIALMKLLLDNGYEISLETAGALSVKDVPIAVSKVMDLKSPSSGEVDKNLWENLNYLTDNDQIKIVITDRADYDWAKDVLQKYELDKKCGVVWFSPMFNIDERKSDVPNLAVELAEWILADGLPVRFQLQLHKIIWADAKGK

SEQ ID NO: 31837 - protein, 239 aa, Moraxella lacunata
  REGION 1..239: note = tr|A0A378TUC0|A0A378TUC0_MORLA 7-carboxy-7-deazaguanine synthase OS=Moraxella lacunata; OX = 477 GN=queE PE=3 SV=1
MPHPTALRNTFIPTTDPSAGLRLTEIFYSLQGEALAMGLPTIFIRLTGCPLRCVYCDTTYSFTGGERWGLDAILEHIKQYPCKRICLTGGEPLAQPNAIALMKLLLDNGYEISLETAGALSVKDVPVEVSKVMDLKTPSSGEDGKNLWENLDYLTPHDQIKIVIADRADYDWAKDVLQKYELDKKCGVVWFSPMFNIDERKSDVPNLAVELAEWILADGLPVRFQLQLHKIIWADAKGK

SEQ ID NO: 31838 - protein, 245 aa, Moraxella lincolnii
  REGION 1..245: note = tr|A0A1T0CD77|A0A1T0CD77_9GAMM 7-carboxy-7-deazaguanine synthase OS=Moraxella lincolnii; OX = 90241 GN=queE PE=3 SV=1
MPTTDPEAGLKLTEIFYSLQGEALTAGLPTIFIRLTGCPLRCVYCDTEYAFVGGQRWGLDDILTHIQQYPCQRVCVTGGEPLAQPNAIVLMQHLIDAGYEVSLETSGALSVADVPKQVSKVMDLKTPSSGEMTKNLWDNLTHLTQHDQLKFVIMNQKDYDWAKQQVIMHSLHHKVGVVWFSPMFEVNTPKVISISDDTACQHDQSPIQPVQQLAQQLADWILSDALPVRLQLQLHKIIWADAKGK

SEQ ID NO: 31839 - protein, 256 aa, unidentified
  source 1..256: note = Moraxella macacae
  REGION 1..256: note = tr|L2F6K9|L2F6K9_9GAMM 7-carboxy-7-deazaguanine synthase OS=Moraxella macacae 0408225 OX=1230338 GN=queE; PE = 3 SV=1
MNNPLRTPLIPTTDPSAGLKVSEIFYSLQGEALTAGLPTIFIRLTGCPLRCVYCDTTYAFSGGERFSLTDILAKVKSFNCKRICLTGGEPLAQPNALALMNLLLEHSYEISLETAGALSVKNVPIAVSKVMDLKTPSSGEANKNLWENLAYLTTHDQLKLVIMNRDDYDWAVQKLFQYDLHKKVGTVWFSPMFNIHDAFNHNNALNHNNTLNSSNAFNSIIPSLATELAEWILADNLPVRFQLQLHKIIWADAKGK

SEQ ID NO: 31840 - protein, 238 aa, Moraxella nonliquefaciens
  REGION 1..238: note = tr|A0A1B8PLC8|A0A1B8PLC8_MORNO 7-carboxy-7-deazaguanine synthase OS=Moraxella nonliquefaciens OX=478 GN=queE PE=3 SV=1
MSPPLLRNISIPTTDPSAGLRLTEIFYSLQGEALTMGMPTIFIRLTGCPLRCVYCDTTYSFTGGERWGLDAILAYIKRYPCKRICLTGGEPLAQPNAIALMRLLVDDGYEVSLETAGALSVKNVPVVVSKVMDLKSPSSGENAKNLWQNLDYLTCHDQIKIVIADRADYEWAKNVLHQYQLDKKCGVVWFSPMFNIDERKSDVPNLAVELAEWILADGLPVRFQLQLHKIIWADAKGK

SEQ ID NO: 31841 - protein, 238 aa, Moraxella nonliquefaciens
  REGION 1..238: note = tr|A0A1B8QMM7|A0A1B8QMM7_MORNO 7-carboxy-7-deazaguanine synthase OS=Moraxella nonliquefaciens OX=478 GN=queE PE=3 SV=1
MSPPLLRNISIPTTDPSAGLRLTEIFYSLQGEALTMGMPTIFIRLTGCPLRCVYCDTTYSFTGGERWGLDAILAYIKKYPCKRICLTGGEPLAQPNAITLMRLLVDDGYEVSLETAGALSVKNVPVAVSKVMDLKSPSSGENAKNLWQNLDYLTCHDQIKIVIADRADYEWAKNVLHQYQLDKKCGVVWFSPMFNIDERKSDVPNLAVELAEWILADGLPVRFQLQLHKIIWADAKGK

SEQ ID NO: 31842 - protein, 240 aa, Moraxella osloensis
  REGION 1..240: note = tr|A0A378Q8S1|A0A378Q8S1_9GAMM 7-carboxy-7-deazaguanine synthase OS=Moraxella osloensis; OX = 34062 GN=queE PE=3 SV=1
MPNSTLPIRNTAIPTTDPEAGLKVTEIFYSLQGEALTAGLPTIFIRLTGCPLRCVYCDTEYAFVGGERMSLAGILAVCQSFPCQRICLTGGEPLAQPNAIALMNLLLAHGYEISLETSGALSVAEVPTAVSKVMDIKTPSSQEADKNLWQNLPYLTAHDQIKFVIMNRDDYDWSKKILSDYQLDKKVATVWFSPMFNVEERQANVPTLAADLAEWILADALPVRFQLQLHKIIWADAKGK

SEQ ID NO: 31843 - protein, 240 aa, Moraxella osloensis
  REGION 1..240: note = tr|A0A173MWU6|A0A173MWU6_9GAMM 7-carboxy-7-deazaguanine synthase OS=Moraxella osloensis; OX = 34062 GN=queE PE=3 SV=1
MPNSTLPIRNTAIPTTDPEAGLKITEIFYSLQGEALTAGLPTIFIRLTGCPLRCVYCDTEYAFVGGERMSLAGILAVCQSFSCQRICLTGGEPLAQPNAIALMNLLLAHGYEISLETSGALSVAEVPTAVSKVMDIKTPSSQEADKNLWQNLPYLTAHDQIKFVIMNRDDYDWSKKILSDYQLDKKVATVWFSPMFNVEERQANVPTLATDLAEWILADALPVRFQLQLHKIIWADAKGK

SEQ ID NO: 31844 - protein, 239 aa, Moraxella ovis
  REGION 1..239: note = tr|A0A378PLJ5|A0A378PLJ5_9GAMM 7-carboxy-7-deazaguanine synthase OS=Moraxella ovis; OX = 29433 GN=queE PE=3 SV=1
MPNSTRLRNTFIPTTDPSSGLRLTEIFYSLQGEALAMGLPTIFIRLTGCPLRCVYCDTTYSFTGGERWGLDTILEYIKQYPCKRICLTGGEPLAQPNAIALMKLLLENGYEISLETAGALSVKDVPVAVSKVMDLKSPSSGEDGKNLWENLDYLTAHDQLKIVIADRADYDWAKEMLQKYELDKKCGVVWFSPMFNIDERKSDVPNLAVELAEWILADGLPVRFQLQLHKIIWADAKGK

SEQ ID NO: 31845 - protein, 240 aa, Moraxella pluranimalium
  REGION 1..240: note = tr|A0A1T0CM03|A0A1T0CM03_9GAMM 7-carboxy-7-deazaguanine synthase OS=Moraxella pluranimalium OX=470453 GN=queE PE=3 SV=1
MTITDPLRNTKIPTTDPQAGLKLTEIFYSLQGEALASGLPTIFIRLTGCPLRCTYCDTTYSFTGGERFSLDEIIDHISQYPCKRVCVTGGEPLAQPNAIALMDRLLSLGYEISLETAGALSVKDVPTAVSKVMDLKTPSSGEMNKNLWKNLDYLTHHDQLKIVIADRADYDWAVAQLHAYELDKKVGTVWFSPMFDVHTAHKGEVPNMATQLAEWILADGLPVRFGLQLHKIIWADAKGK

SEQ ID NO: 31846 - protein, 240 aa, Moraxella porci
  REGION 1..240: note = tr|A0A1T0CRY0|A0A1T0CRY0_9GAMM 7-carboxy-7-deazaguanine synthase OS=Moraxella porci DSM 25326 OX=573983 GN=queE PE=3 SV=1
MTITDPLRNTKIPTTDPQAGLKLTEIFYSLQGEALASGLPTIFIRLTGCPLRCTYCDTTYSFTGGERFSLDEIIDHISQYPCKRVCVTGGEPLAQPNAIALMDRLLSLGYEISLETAGALPVKDVPTAVSKVMDLKTPSSGEMDKNLWKNLDYLTHHDQLKIVIADRADYDWAVAQLHAYELDKKVGTVWFSPMFDVHTAHKGEVPSMATQLAEWILADGLPVRFGLQLHKIIWADAKGK

SEQ ID NO: 31847 - protein, 238 aa, Moraxella sp.
  REGION 1..238: note = tr|A0A229GUS4|A0A229GUS4_9GAMM 7-carboxy-7-deazaguanine synthase OS=Moraxella sp. VT-16-12 OX=2014877 GN=queE PE=3 SV=1
MPTTPLRNTLIPTTDPAAGLRLTEIFYSLQGEALSMGLPTIFIRLTGCPLRCTYCDTVYSFTGGERHGLDDILAHIAQYPCKRVCITGGEPLAQPNVIALMRLLLAHGYDASLETSGALSVAHVPPAISKVMDLKSPSSGECERNLWENINHLTTHDQLKIVIADRNDYDWAKTQITTHQLDKKCGVIWLSPMFEIDPDKMGVPTIATDLAQWILDDGLPVRFGLQLHKIIWADARGK

SEQ ID NO: 31848 - protein, 240 aa, Moraxella sp.
  REGION 1..240: note = tr|A0A2K0XUU5|A0A2K0XUU5_9GAMM 7-carboxy-7-deazaguanine synthase OS=Moraxella sp. RCAD0137 OX=1775913 GN=queE PE=3 SV=1
MTITDPLRNTKIPTTDPQAGLKLTEIFYSLQGEALTSGLPTIFIRLTGCPLRCTYCDTTYSFTGGERFSLDEIIDHISQYPCKRVCVTGGEPLAQPNAIALMDRLLSLGYEISLETAGALSVKDVPTAVSKVMDLKTPSSGEMDKNLWKNLDYLTHHDQLKIVIADRADYDWAVDKLHTYKLDKKVGTVWFSPMFDVHTAHKGEVPNMATQLAEWILADGLPVRFGLQLHKIIWADAKGK

SEQ ID NO: 31849 - protein, 237 aa, unidentified
  source 1..237: note = Moraxellaceae bacterium
  REGION 1..237: note = tr|A0A345P5K6|A0A345P5K6_9GAMM 7-carboxy-7-deazaguanine synthase OS=Moraxellaceae bacterium HYN0046 OX=2283318 GN=queE PE=3 SV=1
MNPLRSTQIPVTDPAAGLRITEIFYSLQGEARDSGYPTVFVRLTGCPLRCTYCDTAYAFEGGIRWSLDAILAEVAQHEGVRHVCVTGGEPLAQPNCIPLLHALCNAGYVVSLETSGAIDVSTVDLRVSRVVDLKTPDSGEMKRNLLTNLPLLTKHDQIKFVITSRTDYEWSRDMLKVHELDKLVGEVWFSPSFAIEVGQVKLPKLARELADWIVEDKLPVRFQLQLHKLLWQDEAGR

SEQ ID NO: 31850 - protein, 240 aa, unidentified
  source 1..240: note = Moraxellaceae bacterium
  REGION 1..240: note = tr|A0A3D3KCV1|A0A3D3KCV1_9GAMM 7-carboxy-7-deazaguanine synthase OS=Moraxellaceae bacterium OX=1889775 GN=queE PE=3 SV=1
MPNSTLPIRNTAIPTTDPEAGLKITEIFYSLQGEALTAGLPTIFIRLTGCPLRCVYCDTEYAFVGGERMSLAGILAVCQSFPCQRICLTGGEPLAQPNAIALMNLLLAHGYEISLETSGALSVAEVPTAVSKVMDIKTPSSQEADKNLWQNIPYLTAHDQIKFVIMNRDDYDWSKQILADYQLDKKVATVWFSPMFNVEERQTNVPTLATDLAEWILADALPVRFQLQLHKIIWADAKGK

SEQ ID NO: 31851 - protein, 223 aa, Morganella morganii
  REGION 1..223: note = tr|M7CP67|M7CP67_MORMO 7-carboxy-7-deazaguanine synthase OS=Morganella morganii SC01 OX=1239989 GN=queE; PE = 3 SV=1
MQYPINEIFQTLQGEGVFTGVPAIFVRLQRCPVGCSWCDTKHTWEQLPEKVCSAEDMMSKTEEDDRWASLDADSIIMQFEAKGYTARHVVITGGEPCLYDLRPLTAVLEARGYQCQIETSGTQPVQCSEKTWVTVSPKVNMRGGYDVLTPSLLRADEVKHPVGRQRDIDELDLLLAKLPGDKQPVVALQPISQKPAATALCIETCIARNWRFSMQTHKYLNIA

SEQ ID NO: 31852 - protein, 223 aa, Morganella morganii
  REGION 1..223: note = tr|A0A2S1B9E0|A0A2S1B9E0_MORMO 7-carboxy-7-deazaguanine synthase OS=Morganella morganii; OX = 582 GN=queE PE=3 SV=1
MQYPINEIFQTLQGEGVFTGVPAIFVRLQRCPVGCSWCDTKHTWEQLPEKACSAEDMMNKAEEDDRWASLDADSIIMQFEAKVYTARHVVITGGEPCLYDLRPLTAVLEARGYQCQIETSGTQPVQCSEKTWVTVSPKVNMRGGYDVLTPSLLRADEVKHPVGRQRDIDELDLLLAKLPGDKQPVVALQPISQKPAATALCIETCIARNWRFSMQTHKYLNIA

SEQ ID NO: 31853 - protein, 223 aa, Morganella psychrotolerans
  REGION 1..223: note = tr|A0A1B8HAM0|A0A1B8HAM0_9GAMM 7-carboxy-7-deazaguanine synthase OS=Morganella psychrotolerans OX=368603 GN=queE PE=3 SV=1
MHYPINEIFQTLQGEGVFTGVPAIFVRLQRCPVGCSWCDTKHTWEQDPEKICPADMMMNKTQEDDRWASLSAQDIIMQFGAQGYTARHVVVTGGEPCLYDLQPLTAALEAQGWQCQIETSGTQPVSCSEKTWVTVSPKVNMRGGYDVLTSALIRADEVKHPVGRQRDIDELDLLLAKLPSGEYPVVALQPISQKPAATELCIKTCIARNWRFSMQTHKYLNIA

SEQ ID NO: 31854 - protein, 223 aa, Morganella psychrotolerans
  REGION 1..223: note = tr|A0A1B8H9S4|A0A1B8H9S4_9GAMM 7-carboxy-7-deazaguanine synthase OS=Morganella psychrotolerans OX=368603 GN=queE PE=3 SV=1
MHYPINEIFQTLQGEGVFTGVPAIFVRLQRCPVGCSWCDTKHTWEQDPEKICSADMMMNKTQENDRWASLSAQDIIMQFTAQGYTARHVVITGGEPCLYDLQPLTAELEAQGWRCQIETSGTQPVLCSEKTWVTVSPKVNMRGGYDVLTSALIRADEVKHPVGRQRDIDELDLLLAKLPSGKYPVVALQPISQKPAATQLCIKTCIARNWRFSMQTHKYLNIA

SEQ ID NO: 31855 - protein, 223 aa, Morganella sp.
  REGION 1..223: note = tr|A0A3D3HNG3|A0A3D3HNG3_9GAMM 7-carboxy-7-deazaguanine synthase OS=Morganella sp. (in: Bacteria) OX=1912315 GN=queE PE=3 SV=1
MHYPINEIFQTLQGEGVFTGVPAIFVRLQCCPVGCSWCDTKHTWEQDPEKICSADVMMSKTQEDDRWASLSAEHIIMQFTAQGYTARHIVITGGEPCLYDLQPLTAELEAQGWQCQIETSGTQPVLCSEKTWVTVSPKVNMRGGYDVLTSALIRADEVKHPVGRQRDIDELDLLLAKLPSGKCPVVALQPISQKPAATELCIKTCIARNWRFSMQTHKYLNIA

SEQ ID NO: 31856 - protein, 222 aa, Moritella marina
  REGION 1..222: note = tr|A0A5J6WK22|A0A5J6WK22_MORMI 7-carboxy-7-deazaguanine synthase QueE OS=Moritella marina ATCC 15381 OX=1202962 GN=queE PE=4 SV=1
MQYPVNEIFETVQGEGHFTGYPVIFIRLQGCDVGCSWCDTKQTWTVDPEMQVSQQTVNKACDDKPHWANFTAQEFITMIQKNGFVAKHIVISGGEPCQYDLVELTSKLEQAGYFCQIETSGTSEVRATDSTWVTVSPKIQMKGQLPVLQSALRRANEIKHVIAMEKHIDELDALIADIDLTHKIMCLQPISQQQRATELAIKLCIERNWKLSVQMHKYIFID

SEQ ID NO: 31857 - protein, 222 aa, Moritella sp.
  REGION 1..222: note = tr|A0A137S3H4|A0A137S3H4_9GAMM 7-carboxy-7-deazaguanine synthase OS=Moritella sp. JT01; OX = 756698 GN=queE PE=3 SV=1
MQYPVNEIFETVQGEGHFTGYPVIFIRLQGCDVGCSWCDTKQTWTVDPEMQVSQQTVNKACDDKPHWANFTAQEFIAMIQKNGFVAKHIVISGGEPCQYDLVELTRELEHAGYFCQIETSGTSEVRATDTTWVTVSPKIQMKGQLPVLQSALRRANEIKHVIAMEKHIEELDELIANIDTADKIMCLQPISQQKRATDLAIKLCIERNWKLSVQMHKYIFID

SEQ ID NO: 31858 - protein, 222 aa, Moritella sp.
  REGION 1..222: note = tr|A6FFG0|A6FFG0_9GAMM 7-carboxy-7-deazaguanine synthase OS=Moritella sp. PE36 OX=58051 GN=queE PE=3 SV=1
MQYPVNEIFETVQGEGHFTGYPVIFIRLQGCDVGCSWCDTKQTWTVDPEMQVSQQTVNKACDDKPHWANFTAQEFITMIQKNGFVAKHIVISGGEPCQYDLVELTSELEQAGYFCQIETSGTSEVRATDSTWVTVSPKIQMKGQLPVLQSALRRANEIKHVIAMEKHIEELDALIADIDTSDKIMCLQPISQQKRATDLAIKLCIERNWKLSVQMHKYIFID

SEQ ID NO: 31859 - protein, 222 aa, Moritella viscosa
  REGION 1..222: note = tr|A0A090IE46|A0A090IE46_9GAMM 7-carboxy-7-deazaguanine synthase OS=Moritella viscosa; OX = 80854 GN=queE PE=3 SV=1
MQYPVNEIFETVQGEGHFTGYPVIFIRLQGCDVGCSWCDTKQTWTVDPEMQVSQQAVNKACDDKPHWANFTAQEFIAMIQKNGFVAKHIVISGGEPCQYDLVELTGELEQAGYFCQIETSGTSEVRATDTTWVTVSPKIQMKGQLPVLQSALRRANEIKHVIAMEKHIEELDELIANIDTEDKIMCLQPISQQKRATDLAIKLCIERNWKLSVQMHKYIFID

SEQ ID NO: 31860 - protein, 222 aa, Moritella yayanosii
  REGION 1..222: note = tr|A0A330LL78|A0A330LL78_9GAMM 7-carboxy-7-deazaguanine synthase OS=Moritella yayanosii; OX = 69539 GN=ygcF PE=3 SV=1
MQYPVNEIFETVQGEGHFTGFPVIFIRLQGCDVGCSWCDTKQTWLVDPEMQVSQQTVNKACDDKPHWANFTAQEFITMIQKNGFVAKHIVISGGEPCQYDLVELTSKLEQAGYFCQIETSGTSEVRATDSTWVTVSPKIQMKGQLPVLQSALRRANEIKHVIAMEKHIEELDALIVDIDTSDKIMCLQPISQQKRATDLAIKLCIERNWKLSVQMHKYIFID

SEQ ID NO: 31861 - protein, 212 aa, Morococcus cerebrosus
  REGION 1..212: note = tr|A0A0C1GYU0|A0A0C1GYU0_9NEIS 7-carboxy-7-deazaguanine synthase OS=Morococcus cerebrosus; OX = 1056807 GN=queE PE=3 SV=1
MKKISVAPENPQYRIVEIFESLQGEGWNTGMAAVFLRLGKCNLACGWCDTDYLTFGMMSLSDILGRLKTYTARNIIITGGEPTIQPHLDMLLDALKAEGYFLCIETNGLKPAPPQIDYVATSPKACYAAKYEKSCIETADEVRIVADGDVVAFCEKMERKIRARHYYLSPCEQNGVMNIYDTIRQIGILNSRPDAPVHWQLSVQTHKWAGIE

SEQ ID NO: 31862 - protein, 225 aa, unidentified
  source 1..225: note = Motilimonas sp.
  REGION 1..225: note = tr|A0A418YG91|A0A418YG91_9GAMM 7-carboxy-7-deazaguanine synthase OS=Motilimonas sp. PLHSC7-2 OX=2303987 GN=queE PE=3 SV=1
MAQQYRINEMFQTIQGEGVYTGVPAVFIRLQGCDVGCPWCDTQHTWHIADQDKTDLIIITDKSNESSRWAQVDSCGIIKEMQRLGYVAKHVVITGGEPCMYDLRELTLALHQQGYSTQIETSGTYKVQVADASFVTVSPKVNMKGGLSVRKDALLRANEIKHPVGTAKDIDALDALIQPLHKQLQAQICLQPISQKPRATQLATQVCIERNWRLSIQTHKYIGID

SEQ ID NO: 31863 - protein, 214 aa, unidentified
  source 1..214: note = Motiliproteus coralliicola
  REGION 1..214: note = tr|A0A369WRH9|A0A369WRH9_9GAMM 7-carboxy-7-deazaguanine synthase OS=Motiliproteus coralliicola OX=2283196 GN=queE PE=3 SV=1
MYSVKEIFYSLQGEGAQAGRASIFCRFSGCNLWSGREQDRAKAQCDFCDTDFVGTDGELGGKYPTAEQLADTVAALWRRRSNQAQGGTPYVICTGGEPLLQLDETLIQAFQARGFEVAVETNGTLPAPAGLDWICVSPKGSSELVQLRGHELKLVHPQSGVDPADFASLDFDNFYLQPLDGGDNNANLNACLSYCHEHPRWRLSLQVHKLVDIP

SEQ ID NO: 31864 - protein, 210 aa, unidentified
  source 1..210: note = Motiliproteus sp.
  REGION 1..210: note = tr|A0A1R1MG73|A0A1R1MG73_9GAMM 7-carboxy-7-deazaguanine synthase OS=Motiliproteus sp. MSK22-1 OX=1897630 GN=queE PE=3 SV=1
MYSVKELFYSLQGEGAHAGRAAVFCRFTGCNLWSGREQDRAKAACNFCDTDFVGTDGEGGGKYGRATDLAKAAMALWPASQRDSAYLICTGGEPLLQLDQELVSAFKAVGFEVAIETNGTLPAPTDIDWICVSPKGSSELVLQQGDELKLVYRQQDALPERFENLDFSYFFLQAMAGPQEKEQLQQCVKYCQEHPQWRLSLQTHKLIGIP

SEQ ID NO: 31865 - protein, 207 aa, unidentified
  source 1..207: note = Mucilaginibacter auburnensis
  REGION 1..207: note = tr|A0A2H9VMJ2|A0A2H9VMJ2_9SPHI 7-carboxy-7-deazaguanine synthase OS=Mucilaginibacter auburnensis OX=1457233 GN=queE PE=3 SV=1
MAHQVPEDGTLLPLMEEFYTIQGEGFNTGKAAYFIRLGGCDVGCHWCDVKESWNAELHPLTSSDTIVEHASQFPSKAVVVTGGEPLIYNLDYLTTRLQQSGIQTFIETSGAYPLSGSWDWVCLSPKKFKAPMQQVADVANELKVIIFNKSDFAFAEENALRVKPGCKLYLQPEWSRNKEMTPLIVEYVMNNPKWEISLQTHKYLNIP

SEQ ID NO: 31866 - protein, 243 aa, Mucilaginibacter frigoritolerans
  REGION 1..243: note = tr|A0A562UHK9|A0A562UHK9_9SPHI 7-carboxy-7-deazaguanine synthase OS=Mucilaginibacter frigoritolerans OX=652788 GN=queE PE=3 SV=1
MDFLLWTIDYGLTKLSTQKKPSPLSFRHKTVLLHFIMAHQIPDDGTLLPLMEEFYTIQGEGFNTGKAAYFIRLGGCDVGCHWCDVKESWDAELHALTAADQIIANASVHPSKAVVVTGGEPLIYNLDYLTAGLQQKGIKTFIETSGAYPLSGSWDWICLSPKKFKSPMPSVAEKADELKVIIFNKSDFEFAECNAKLVSNTCKLFLQPEWSKSKEMIPLIVDYVMNNPQWEISLQTHKYLNIP

SEQ ID NO: 31867 - protein, 207 aa, unidentified
  source 1..207: note = Mucilaginibacter ginsenosidivorans
  REGION 1..207: note = tr|A0A5B8UYU7|A0A5B8UYU7_9SPHI 7-carboxy-7-deazaguanine synthase OS=Mucilaginibacter ginsenosidivorans OX=398053 GN=queE PE=3 SV=1
MAHQVPDDGTLLPLMEEFYTIQGEGFNTGKAAYFIRLGGCDVGCHWCDVKESWDAELHPLTAADKIVENALKYPSRAVVVTGGEPLLYNLDYLTSGLRENGIKTFIETSGAYPMSGQWDWVCLSPKKFKKPAAGIAQHADELKVIIFNKSDFAWAEEHAAMVSAQCKLYLQPEWSKAKEMTPLIVDYVMNNPKWEISLQTHKYLNIP

SEQ ID NO: 31868 - protein, 207 aa, unidentified
  source 1..207: note = Mucilaginibacter ginsenosidivorax
  REGION 1..207: note = tr|A0A5B8WAE4|A0A5B8WAE4_9SPHI 7-carboxy-7-deazaguanine synthase OS=Mucilaginibacter ginsenosidivorax OX=862126 GN=queE PE=3 SV=1
MAHQIPDDGTLLPLMEEFYTIQGEGYNTGKAAYFIRLGGCDVGCHWCDVKESWDAELHPLTAADQIVANASVHPSKAVVVTGGEPLIYNLDYLTTQLHERGIKTFIETSGAYPLSGDWDWICLSPKKFKAPTPQVAEHAHELKVIVFNKSDFEWAEYHAKMVSPDCKLYLQPEWSKSKEMTPLIVDYVMNNPQWEISLQTHKYLNIP

SEQ ID NO: 31869 - protein, 207 aa, Mucilaginibacter gossypii
  REGION 1..207: note = tr|A0A1G7TIL1|A0A1G7TIL1_9SPHI 7-carboxy-7-deazaguanine synthase OS=Mucilaginibacter gossypii OX=551996 GN=queE PE=3 SV=1
MAHQIPDDGTLLPLMEEFYTIQGEGYNTGKAAYFIRLGGCDVGCHWCDVKESWDAELHPLTAADTIVSNADLHPAKAVVVTGGEPLIYNLDYLTHNLHEKGIKTFIETSGAYPLSGDWDWICLSPKKFKAPTPNVAECAHELKVIVFNKSDFEWAEYHAKMVSPDCKLYLQPEWSKSKEMTPLIVDYVKENPQWEISLQTHKYLNIP

SEQ ID NO: 31870 - protein, 207 aa, Mucilaginibacter gossypii
  REGION 1..207: note = tr|A0A5C1IGS8|A0A5C1IGS8_9SPHI 7-carboxy-7-deazaguanine synthase OS=Mucilaginibacter gossypii OX=551996 GN=queE PE=3 SV=1
MAHQIPDDGTLLPLMEEFYTIQGEGYNTGKAAYFIRLGGCDVGCHWCDVKESWDAELHPLTAADTIVSNAALHPAKAVVVTGGEPLIYNLDYLTHNLHEKGIKTFIETSGAYPLSGDWDWICLSPKKFKAPTPNVAECAHELKVIVFNKSDFEWAEYHAKMVSPDCKLYLQPEWSKSKEMTPLIVDYVKENPQWEISLQTHKYLNIP

SEQ ID NO: 31871 - protein, 207 aa, Mucilaginibacter gossypiicola
  REGION 1..207: note = tr|A0A1H7ZKZ1|A0A1H7ZKZ1_9SPHI 7-carboxy-7-deazaguanine synthase OS=Mucilaginibacter gossypiicola OX=551995 GN=queE PE=3 SV=1
MAHQIPDDGTLLPLMEEFYTIQGEGYNTGKAAYFIRLGGCDVGCHWCDVKESWDAELHALTAADTIVSNAALHPAKAVVVTGGEPLIYNLDYLTHQLHEKGIKTFIETSGAYPLSGDWDWICLSPKKFKAPTPNVAESAHELKVIVFNKSDFEWAEYHAKMVSPDCKLYLQPEWSKSKEMTPLIVDYVKENPQWEISLQTHKYLNIP

SEQ ID NO: 31872 - protein, 207 aa, unidentified
  source 1..207: note = Mucilaginibacter gotjawali
  REGION 1..207: note = tr|A0A0X8X7B3|A0A0X8X7B3_9SPHI 7-carboxy-7-deazaguanine synthase OS=Mucilaginibacter gotjawali OX=1550579 GN=queE PE=3 SV=1
MAHQIPEDGTQLPLMEEFYTIQGEGFHTGKAAYFIRLGGCDVGCHWCDVKESWNAELHALTYADQIVENASKYPSKAVVVTGGEPLIYNLDYLTAGLQGRGIKTFIETSGAYPLSGHWDWICLSPKKFKAPTKNVADHADELKVIIFNKSDFAFAEENAKLVSPGCKLYLQPEWSKSKEMTPLIVDYVMNNPHWEISLQTHKYLNIP

SEQ ID NO: 31873 - protein, 207 aa, Mucilaginibacter gracilis
  REGION 1..207: note = tr|A0A495J4G7|A0A495J4G7_9SPHI 7-carboxy-7-deazaguanine synthase OS=Mucilaginibacter gracilis OX=423350 GN=queE PE=3 SV=1
MVNQIPEDGTLLPLMEEFYTIQGEGYNTGKAAYFIRLGGCDVGCHWCDVKESWDASIHPLTLADTIVTNAEKFPGKAVVVTGGEPLIYNLDYLTAQLQQRGIKTFIETSGAYPLSGSWDWICLSPKKFKSPNPNVAPFAHELKVIVFNKSDFVWAEQYAELVSPDCKLYLQPEWSKSKENIPLIVDYVMNNPKWEISLQTHKYLNIP

SEQ ID NO: 31874 - protein, 207 aa, Mucilaginibacter lappiensis
  REGION 1..207: note = tr|A0A1N6X2P0|A0A1N6X2P0_9SPHI 7-carboxy-7-deazaguanine synthase OS=Mucilaginibacter lappiensis OX=354630 GN=queE PE=3 SV=1
MAHQIPDDGTLLPLMEEFYTIQGEGYNTGKAAYFIRLGGCDVGCHWCDVKESWDAELHPLTATDQIVVNASVHPSKAVVVTGGEPLIYNLDYLTSQLHEKGIKTFIETSGAYPLSGDWDWICLSPKKFKAPMPHVAENAHELKVIVFNKSDFEWAEYHAKMVSPDCKLYLQPEWSKSKEMTPLIVDYVMNNPQWEISLQTHKYLNIP

SEQ ID NO: 31875 - protein, 207 aa, Mucilaginibacter mallensis
  REGION 1..207: note = tr|A0A1H1UV04|A0A1H1UV04_9SPHI 7-carboxy-7-deazaguanine synthase OS=Mucilaginibacter mallensis OX=652787 GN=queE PE=3 SV=1
MAHQIPDDGTLLPLMEEFYTIQGEGYHTGKAAYFIRLGGCDVGCHWCDVKESWDAELHALTAADTIAENASRFPSKAVVVTGGEPLIYNLDYLTSQLQQKGIKTFIETSGAYPLSGHWDWICLSPKKFKGPTTSVAAKADELKVIIFNKSDFEWAEQHAKLVSPDCKLYLQPEWSKSKEMTPLIVEYVMNNPHWEISLQTHKYLNIP

SEQ ID NO: 31876 - protein, 207 aa, Mucilaginibacter oryzae
  REGION 1..207: note = tr|A0A316HL11|A0A316HL11_9SPHI 7-carboxy-7-deazaguanine synthase OS=Mucilaginibacter oryzae OX=468058 GN=queE PE=3 SV=1
MAHQIPDDGTLLPLMEEFYTIQGEGYNTGKAAYFIRLGGCDVGCHWCDVKESWDAELHALTAADTIVANANLHPAKAVVVTGGEPLIYNLDYLTHQLHEKGIKTFIETSGAYPLSGDWDWICLSPKKFKAPVPHVAECAHELKVIVFNKSDFEWAEYHAKMVSPDCKLYLQPEWSKAKDMTPLIVDYVKENPQWEISLQTHKYLNIP

SEQ ID NO: 31877 - protein, 207 aa, Mucilaginibacter paludis
  REGION 1..207: note = tr|H1YFL4|H1YFL4_9SPHI 7-carboxy-7-deazaguanine synthase OS=Mucilaginibacter paludis DSM 18603 OX=714943; GN = queE PE=3 SV=1
MANQIPEDGTLLPLMEEFYTIQGEGYNTGKAAYFIRLGGCDVGCHWCDVKESWDASIHPLTPSDTIVDNAVKYPGKAVVVTGGEPLIYNLDYLTAQLQQKGIKTFIETSGAYPLSGSWDWICLSPKKFKAPSASVAPYAHELKVIVFNKSDFAWAEQYAALVSPGCKLYLQPEWSKSKEMIPLIVDYVMNNPQWEISLQTHKYLNIP

SEQ ID NO: 31878 - protein, 207 aa, unidentified
  source 1..207: note = Mucilaginibacter pedocola
  REGION 1..207: note = tr|A0A1S9PLE2|A0A1S9PLE2_9SPHI 7-carboxy-7-deazaguanine synthase OS=Mucilaginibacter pedocola OX=1792845 GN=queE PE=3 SV=1
MAHQVPEDGTLLPLMEEFYTIQGEGYNTGKAAYFIRLGGCDVGCHWCDVKESWDAEMHPLTHADTIVENAKKHPSKAVVVTGGEPLIYNLDYLTAKLHEEGIKTFIETSGAYPLSGDWDWICLSPKKFKSPMQNVADKAHELKVIIFNKSDFEFAEHNAKLVAPDCKLFLQPEWSKHKEMSPLIVEYVMNNPQWEISLQTHKYLNIP

SEQ ID NO: 31879 - protein, 207 aa, unidentified
  source 1..207: note = Mucilaginibacter phyllosphaerae
  REGION 1..207: note = tr|A0A4Y8ABI2|A0A4Y8ABI2_9SPHI 7-carboxy-7-deazaguanine synthase OS=Mucilaginibacter phyllosphaerae OX=1812349 GN=queE PE=3 SV=1
MAHQVPEDGTLLPLMEEFYTIQGEGYNTGKAAYFIRLGGCDVGCHWCDVKESWDAELHPLTAADTIVNNASKFPSKAVVVTGGEPLIYNLDYLTQNLQQNGIKTFIETSGAYPLSGSWDWICLSPKKFKAPTQQVADKAHELKVIIFNRSDFAFAEHHAKLVGPDCKLYLQPEWSKHAEMTPLIVDYVMANPRWEISLQTHKYLNIP

SEQ ID NO: 31880 - protein, 207 aa, unidentified
  source 1..207: note = Mucilaginibacter pineti
  REGION 1..207: note = tr|A0A1G6THM1|A0A1G6THM1_9SPHI 7-carboxy-7-deazaguanine synthase OS=Mucilaginibacter pineti OX=1391627 GN=queE PE=3 SV=1
MAHQIPDDGTLLPLMEEFYTIQGEGYNTGKAAYFIRLGGCDVGCHWCDVKESWDAELHPLTTADRIVDNAAVHPSKAVVVTGGEPLIYNLDYLTAQLHQRGIKTFIETSGAYPLSGDWDWICLSPKKFKAPIPHVAENAHELKVIVFNKSDFEWAEYHAKMVSPDCKLYLQPEWSKSKEMIPLIVDYVMNNPQWEISLQTHKYLNIP

SEQ ID NO: 31881 - protein, 207 aa, unidentified
  source 1..207: note = Mucilaginibacter polytrichastri
  REGION 1..207: note = tr|A0A1Q5ZW33|A0A1Q5ZW33_9SPHI 7-carboxy-7-deazaguanine synthase OS=Mucilaginibacter polytrichastri OX=1302689 GN=queE PE=3 SV=1
MTAQVPEDGTLLPLMEEFYTIQGEGYNTGKAAYFIRLGGCDVGCHWCDVKESWDASLHPLTTADQIVTNALQFPAKTVVVTGGEPLIYNLDYLTAQMKANGVTTFIETSGAYPLSGHWDWICLSPKKFKAPQPAIAKEAHELKVIVFNKSDFAWAEEYAELVSPGCKLYLQPEWSKSKEVTPLIIDYVMANPKWEISLQTHKYLNIP

SEQ ID NO: 31882 - protein, 207 aa, unidentified
  source 1..207: note = Mucilaginibacter psychrotolerans
  REGION 1..207: note = tr|A0A4Y8SKP1|A0A4Y8SKP1_9SPHI 7-carboxy-7-deazaguanine synthase OS=Mucilaginibacter psychrotolerans OX=1524096 GN=queE PE=3 SV=1
MAHQVPDDGTLLPLMEEFYTIQGEGYNTGKAAYFIRLGGCDVGCHWCDVKESWDAELHPLTLADTIVANAKVHPSKAVVVTGGEPLIYNLDYLTAQLHNEGIRTFIETSGAYPLSGDWDWICLSPKKFKAPMQNVADKAHELKVIIFNKSDFEFAEHNAKLVAPDCKLYLQPEWSKNKEMAPLIVEYVMNNPQWEVSLQTHKYLNIP

SEQ ID NO: 31883 - protein, 207 aa, unidentified
  source 1..207: note = Mucilaginibacter rubeus
  REGION 1..207: note = tr|A0A5C1HXH2|A0A5C1HXH2_9SPHI 7-carboxy-7-deazaguanine synthase OS=Mucilaginibacter rubeus OX=2027860 GN=queE PE=3 SV=1
MAHQIPDDGTLLPLMEEFYTIQGEGYNTGKAAYFIRLGGCDVGCHWCDVKESWDAELHALTAADTIVNNATLHPAKAVVVTGGEPLIYNLDYLTHQLHEKGIKTFIETSGAYPLSGDWDWICLSPKKFKAPTPHVAECAHELKVIVFNKSDFEWAEYHAKMVSPDCKLYLQPEWSKAKEMTPLIVDYVKENPQWEISLQTHKYLNIP

SEQ ID NO: 31884 - protein, 207 aa, unidentified; identical to SEQ ID NO: 31870
  source 1..207: note = Mucilaginibacter rubeus
  REGION 1..207: note = tr|A0A364WBH5|A0A364WBH5_9SPHI 7-carboxy-7-deazaguanine synthase OS=Mucilaginibacter rubeus OX=2027860 GN=queE PE=3 SV=1

SEQ ID NO: 31885 - protein, 207 aa, Mucilaginibacter sp.
  REGION 1..207: note = tr|A0A556MBM2|A0A556MBM2_9SPHI 7-carboxy-7-deazaguanine synthase OS=Mucilaginibacter sp. MAH-19 OX=2597670 GN=queE PE=3 SV=1
MAHQVPEDGTLLPLMEEFYTIQGEGYHTGKAAYFIRLGGCDVGCHWCDVKESWDAELHPLTHADKIVENAMLYPGKAVVVTGGEPLIYNLDYLTSQLQGKGIKTFIETSGAYPLSGHWDWICLSPKKFKGPTPEIARHANELKVIVFNKSDFLFAEQHAELVPVGCKLYLQPEWSKSKEMTPLIVDYVMNNPKWEISLQTHKYLNIP

SEQ ID NO: 31886 - protein, 207 aa, Mucilaginibacter sp.
  REGION 1..207: note = tr|A0A437MTG6|A0A437MTG6_9SPHI 7-carboxy-7-deazaguanine synthase OS=Mucilaginibacter sp. YBJ-36 OX=1932778 GN=queE PE=3 SV=1
MAHIIPDDGSQLPLMEEFYTIQGEGYNTGKAAYFIRLGGCDVGCHWCDVKESWDAELHALTHADVIVTNAAIHPAKTVVITGGEPLIYNLEYLTTKLHEQGIKTFIETSGAYPLSGNWDWICLSPKKFKAPTLSVAQKADELKVIVFNKSDFEFAEQNALLVGPDCKLFLQPEWSKAKEMTPLIVDYVMNNPKWEISLQTHKFLNIP

SEQ ID NO: 31887 - protein, 207 aa, unidentified
  source 1..207: note = Mucilaginibacter yixingensis
  REGION 1..207: note = tr|A0A2T5J9L6|A0A2T5J9L6_9SPHI 7-carboxy-7-deazaguanine synthase OS=Mucilaginibacter yixingensis OX=1295612 GN=queE PE=3 SV=1
MAHVIPEDGTMLPLMEEFYTIQGEGFNTGKAAYFIRLGGCDVGCHWCDVKESWDAELHPLTHADVIVKNAGQHPAKAVVVTGGEPLIYNLDYLTAQLQEHGIRTFIETSGAYPLSGNWDWICLSPKKFKAPTPHVAEKADELKVIVFNKSDFMWAEEHAKMVGPNCKLYLQPEWSKAKEMIPLIVDYVMNNPQWEISLQTHKYLNIP

SEQ ID NO: 31888 - protein, 207 aa, unidentified
  source 1..207: note = Mucinivorans hirudinis
  REGION 1..207: note = tr|A0A060RD84|A0A060RD84_9BACT 7-carboxy-7-deazaguanine synthase OS=Mucinivorans hirudinis OX=1433126 GN=queE PE=3 SV=1
MSKDILRQGALLPLVEDFYTIQGEGFHTGKPAYFIRLGGCDVGCGWCDAKFTWNPRKFPPVAVEEIVRRAVACQAKAIVITGGEPTLYPLGKLTEELKKEDFEIFIETSGTNPLTGTIDWVCLSPKPQQPPLQEVLLRADELKIIVESQSDLEWAEENSKKVSDRCLLFLQPEWSVFREITPAIVEYAKQNPRWNVSVQTHKFMKIP

SEQ ID NO: 31889 - protein, 233 aa, Mucispirillum schaedleri
  REGION 1..233: note = tr|V2QE12|V2QE12_9BACT 7-carboxy-7-deazaguanine synthase OS=Mucispirillum schaedleri ASF457 OX=1379858; GN = queE PE=3 SV=1
MKINISEVFYSTQGEGKYIGTAQVFIRLSQCPFSCPYCDTDIQDKEYFKINNKQYNNPVSAEELSEIVLKEFGVGDNFHSYSITGGEPLIHYDFVKKLAYLLKNKSKAKLFLETSGLITKYFQELDNIFDIMSIDIKTHSEKVLKKLPVLLDVLSSLEHSDYYLKLLLPKENAKEIIDYTAQELNKYNIKNIIIQPVDSIIAKDTIDYLYNMYYSKNIEARIIPQTHKILAIP

SEQ ID NO: 31890 - protein, 206 aa, unidentified
  source 1..206: note = Muribacter muris
  REGION 1..206: note = tr|A0A0J5S241|A0A0J5S241_9PAST 7-carboxy-7-deazaguanine synthase OS=Muribacter muris; OX = 67855 GN=queE PE=3 SV=1
MNQTEINYRIVEIFETLQGEGFNTGMPSIFIRFGKCNLACPWCDTNYNQFEMMSLTAILTKVALFSARNIIITGGEPTIQPHIEILLDALKQQGYFLAIETNGLKPVPPQIDYIATSPKRLYQKNYLKHHIPTANEVRIVVDGDVLDFCEQIENSIQAQRYYLSPCEQNGEMNMLATITQLGRLNQRPNKPRWQLSIQTHKIAGIA

SEQ ID NO: 31891 - protein, 206 aa, unidentified
  source 1..206: note = Muribacter muris
  REGION 1..206: note = tr|A0A4Y9JW95|A0A4Y9JW95_9PAST 7-carboxy-7-deazaguanine synthase OS=Muribacter muris; OX = 67855 GN=queE PE=3 SV=1
MNQTEINYRIVEIFETLQGEGFNTGIPSIFIRFGKCNLACPWCDTNYNQFEMMSLTAILTKVAQFSARNIIITGGEPTIQPHIEILLDALKQQGYFLAIETNGLKPVPPQIDYIATSPKRLYQKNYLKHHIPTANEVRIVVDGDVLDFCEQIENSIQAQRYYLSPCEKNGEMNMLATITQLGRLNQRPNKPRWQLSIQTHKIAGIA

SEQ ID NO: 31892 - protein, 193 aa, unidentified
  source 1..193: note = Muribaculaceae bacterium
  REGION 1..193: note = tr|A0A4Q0IGP2|A0A4Q0IGP2_9BACT 7-carboxy-7-deazaguanine synthase OS=Muribaculaceae bacterium Isolate-007 (NCI) OX=2489217 GN=queE PE=3 SV=1
MKVKEIFYSLQGEGRFTGTAAVFLRLSGCNLKCPFCDTDHFDGTFMSHEDIMDELVKYPSRHLVITGGEPSLQLEPGFINMLHEYGYFVQVETNGTHPLPQNVDWITCSPKSKNIVYDRVNELKVVFGSDAVGGNSLLEHLSISVEAEEYYLQPCDTGDKAVNVEILGRCVEYIKDNPVWRLSLQTHKLIDIP

SEQ ID NO: 31893 - protein, 199 aa, unidentified
  source 1..199: note = Muribaculaceae bacterium
  REGION 1..199: note = tr|A0A3N2NLR2|A0A3N2NLR2_9BACT 7-carboxy-7-deazaguanine synthase OS=Muribaculaceae bacterium Isolate-114 (HZI) OX=2486475 GN=queE PE=3 SV=1
MRKINEIFYSLQGEGHHEGYPSVFVRFSGCNLNCSFCDTAHTEGIYMDDDAIIRAINLYSADWVVLTGGEPAMWIDKDFIHLLKRATGKKIAIETNGTLPVPEGIDWVTVSPKSGFEGAGEAPVRVRHANEIKVVDLGQNLDPYFDLPCRGEDTIMYLQPCYVPDEEEFRQNRLNTVRRILADPKWTLSVQLHRYLDIP

SEQ ID NO: 31894 - protein, 193 aa, unidentified
  source 1..193: note = Muribaculum intestinale
  REGION 1..193: note = tr|A0A1B1SD98|A0A1B1SD98_9BACT 7-carboxy-7-deazaguanine synthase OS=Muribaculum intestinale OX=1796646 GN=queE PE=3 SV=1
MKVKEIFYSLQGEGRFTGTAAVFLRLSGCNLKCPFCDTDHFDGTFMSHEDIMDELVKYPSRHLVITGGEPSLQLEPGFIDMLHEYGYFVQVETNGTHPLPQNVDWITCSPKSKNIVYDRVNELKVVFGSDAVGGNSLLEHLSISVEAEEYYLQPCDTGDKAVNVEILGRCVEYIKDNPVWRLSLQTHKLIDIP

SEQ ID NO: 31895 - protein, 195 aa, unidentified
  source 1..195: note = Muribaculum sp.
  REGION 1..195: note = tr|A0A1Y4C520|A0A1Y4C520_9BACT 7-carboxy-7-deazaguanine synthase OS=Muribaculum sp. An287; OX = 1965623 GN=queE PE=3 SV=1
MGSTYRINEIFYSLQGEGFFTGTASVFIRFSGCNLECPFCDTRHEEGTEMSARGIIEAISPWPSPHVVLTGGEPSLFIDRELVEALHGDGRFIAIETNGTNPLPEGIDWITYSPKQFWLPEAEPAITECDELKVVYTGQDLSRYSAIKAAHRFIQPCDTGDGDRNRKLIEESVEFCKRNPQWRLSLQTHKFIDIK

SEQ ID NO: 31896 - protein, 193 aa, unidentified
  source 1..193: note = Muribaculum sp.
  REGION 1..193: note = tr|A0A4P7VH48|A0A4P7VH48_9BACT 7-carboxy-7-deazaguanine synthase OS=Muribaculum sp. TLL-A4 OX=2530390 GN=queE PE=3 SV=1
MYLINEIFYSIQGEGVNAGVPAIFLRFSGCNLKCPFCDTSHQTGNPMSLDDIMHEVSRYNASLVVLTGGEPSLFIDDAIVEALHNAGKTIAIETNGTHPLPAGIDHVTLSPKDDFCDNAQTVIEHCDELKIVYRGDNDPSRYNHIKASHRVLQPCDTGDDEQNRRITSEALDYCLSHPQWRLSLQLHKILNVR

SEQ ID NO: 31897 - protein, 210 aa, unidentified
  source 1..210: note = Muricauda antarctica
  REGION 1..210: note = tr|A0A1M6YZR5|A0A1M6YZR5_9FLAO 7-carboxy-7-deazaguanine synthase OS=Muricauda antarctica; OX = 1055723 GN=queE PE=3 SV=1
MVEENVMDLVDKGLMLPLMEEFYTIQGEGFHKGTAAYFIRVGGCDVGCHWCDVKESWNAETHPPTSIDSIIANAKKYSDTIVITGGEPLTWDMGPLTHGLKKEGMKTHIETSGAYPLTGVWDWICLSPKKNKLPVGDIAKKADELKVIVYNKHDFIFAEEQAAQVEDNCILYLQPEWSVRDKMVPLIVDYVMKNPKWKVSLQTHKYLNIP

SEQ ID NO: 31898 - protein, 210 aa, Muricauda lutaonensis
  REGION 1..210: note = tr|A0A0D5YPZ4|A0A0D5YPZ4_9FLAO 7-carboxy-7-deazaguanine synthase OS=Muricauda lutaonensis; OX = 516051 GN=queE PE=3 SV=1
MIANDVMDLVEKGLMLPLMEEFYTIQGEGYHKGTAAYFIRIGGCDVGCHWCDVKESWDAETHPPTNIGSIVANAAKYSDTIVVTGGEPLTWDMGPLTASLKNKGLKTHIETSGAYPLTGVWDWICLSPKKNKLPVGNIHQKAHELKVIVYNKHDFKFAEEQAAKVGKNCILYLQPEWSVREKVTPLIVDYVMQHPKWKVSLQTHKYLNIP

SEQ ID NO: 31899 - protein, 210 aa, Muricauda lutimaris
  REGION 1..210: note = tr|A0A3A1NDH0|A0A3A1NDH0_9FLAO 7-carboxy-7-deazaguanine synthase OS=Muricauda lutimaris; OX = 475082 GN=queE PE=3 SV=1
MVEENVMDLVEKGLMLPLMEEFYTIQGEGYHKGTAAYFIRVGGCDVGCHWCDVKESWNAETHPPTTIESIVANAEKYSDTIVITGGEPLTWDMGPLTQGLKERGMTIHIETSGAYPLTGVWDWICLSPKKNKLPVGDIYKKAQELKVIVYNKHDFIFAEEQAAQVGEDCILYLQPEWSVRDKMVPKIVDYVMKHPKWKVSLQTHKYLNIP

SEQ ID NO: 31900 - protein, 210 aa, Muricauda olearia
  REGION 1..210: note = tr|A0A444VRX2|A0A444VRX2_9FLAO 7-carboxy-7-deazaguanine synthase OS=Muricauda olearia; OX = 552546 GN=queE PE=3 SV=1
MVEDNVMDLVDKGLMLPLMEEFYTIQGEGYHKGTAAYFIRVGGCDVGCHWCDVKESWNAETHPPTAVDQIVDHAAKYSNTIVVTGGEPLTWDMGPLTEGLKARNLQTHIETSGAYPLTGIWDWICLSPKKNKLPEGEIYEKADELKVIVYNKHDFIFAEEQAAKVKEDCILYLQPEWSVREKIVPMIVDYVMQHPKWKVSLQTHKYLNIP

SEQ ID NO: 31901 - protein, 210 aa, unidentified
  source 1..210: note = Muricauda pacifica
  REGION 1..210: note = tr|A0A2T0M8D0|A0A2T0M8D0_9FLAO 7-carboxy-7-deazaguanine synthase OS=Muricauda pacifica; OX = 1080225 GN=queE PE=3 SV=1
MVSEEIMDLVNQGTMLPLMEEFYTIQGEGYHKGTAAYFIRVGGCDVGCHWCDVKESWNAETHPPISVDAIVENATKHSDTIVVTGGEPLTWDMNPLTQGLKAQNLQTHIETSGAYPLTGTWDWICLSPKKNKLPVGEIYNKAHELKVIIYNKHDFIFAEEQAAKVSQDCILYLQPEWSVREKMIPQIVEYVMKNPKWKVSLQTHKYLNIP

SEQ ID NO: 31902 - protein, 216 aa, Muricauda ruestringensis
  REGION 1..216: note = tr|G2PSK1|G2PSK1_MURRD 7-carboxy-7-deazaguanine synthase OS=Muricauda ruestringensis (strain DSM 13258 / CIP 107369 / LMG 19739 / B1) OX=886377 GN=queE PE=3 SV=1
MNYLCTMVEENVMDLVEKGLTLPLMEEFYTIQGEGYHKGTAAYFIRIGGCDVGCHWCDVKESWNAETHPPTPIDSIIANAEKYSDTIVITGGEPLTWDMGPLTQGLKAKNMKIHIETSGAYPLTGVWDWICLSPKKNKLPVDDIYRKAHELKVIVYNKHDFIFAEEQAAKVNDDCILYLQPEWSVRDKMVPQIVDYVMKHPKWKVSLQTHKYLNIP

SEQ ID NO: 31903 - protein, 210 aa, Muricauda sp.
  REGION 1..210: note = tr|A0A2N0GEB7|A0A2N0GEB7_9FLAO 7-carboxy-7-deazaguanine synthase OS=Muricauda sp. ES.050; OX = 1798204 GN=queE PE=3 SV=1
MVEENVMDLVEKGLMLPLMEEFYTIQGEGYHKGTAAYFIRVGGCDVGCHWCDVKESWNAETHPPTSIDSIVANAEKYSDTIVITGGEPLTWDMGPLTQGLKDKNMTIHIETSGAYPLTGVWDWICLSPKKNKLPEGDIYKKAQELKVIVYNKHDFIFAEEQAAQVGEDCILYLQPEWSVRDKMVPQIVDYVMKHPKWKVSLQTHKYLNIP

SEQ ID NO: 31904 - protein, 210 aa, Muricauda sp.
  REGION 1..210: note = tr|A0A2D9BSH9|A0A2D9BSH9_9FLAO 7-carboxy-7-deazaguanine synthase OS=Muricauda sp.; OX = 192149 GN=queE PE=3 SV=1
MVEENVMDLVEKGLMLPLMEEFYTIQGEGYHKGTAAYFIRVGGCDVGCHWCDVKESWNAETHPPTAIDSIIANAEKYSDTIVITGGEPLTWDMGPLTQGLKAKNMKIHIETSGAYPLTGVWDWICLSPKKNKLPEGEIYKKAHELKVIVYNKHDFIFAEEQAAQVGKDCILYLQPEWSVRDKMVPLIVDYVMKHPKWKVSLQTHKYLNIP

SEQ ID NO: 31905 - protein, 210 aa, unidentified
  source 1..210: note = Muricauda taeanensis
  REGION 1..210: note = tr|A0A3A1NRK7|A0A3A1NRK7_9FLAO 7-carboxy-7-deazaguanine synthase OS=Muricauda taeanensis; OX = 1005926 GN=queE PE=3 SV=1
MVEENVMDLVDKGLMLPLMEEFYTIQGEGFHKGTAAYFIRVGGCDVGCHWCDVKESWNAETHPPTSIDSIIANAKKYSDTIVITGGEPLTWDMGPLTHGLNKEGMKTHIETSGAYPLTGVWDWICLSPKKNKLPIGDIAKKADELKVIVYNKHDFIFAEEQAAQVEDNCILYLQPEWSVRDKMVPLIVDYVMKNPKWKISLQTHKYLNIP

SEQ ID NO: 31906 - protein, 210 aa, unidentified
  source 1..210: note = Muricauda zhangzhouensis
  REGION 1..210: note = tr|A0A1H2Q932|A0A1H2Q932_9FLAO 7-carboxy-7-deazaguanine synthase OS=Muricauda zhangzhouensis OX=1073328 GN=queE PE=3 SV=1
MVEENVMELVNKGVMLPLMEEFYTIQGEGYHKGTAAYFIRVGGCDVGCHWCDVKESWNAETHPPTAIESIISNAEKYSDTIVITGGEPLTWDMGPLTEGLKAKNMKTHIETSGAYPLTGVWDWICLSPKKNKLPVGEIYEKADELKVIVYNKHDFIFAEEQAAQVGENCILYLQPEWSVRDKMVPMIVDYVMENPKWKVSLQTHKYLNIP

SEQ ID NO: 31907 - protein, 210 aa, Muriicola sp.
  REGION 1..210: note = tr|A0A411EAV9|A0A411EAV9_9FLAO 7-carboxy-7-deazaguanine synthase OS=Muriicola sp. MMS17-SY002 OX=2507538 GN=queE PE=3 SV=1
MEAKAVMELVNEGKMLPLMEEFYTIQGEGYHKGTAAYFIRIGGCDVGCHWCDVKESWNAEIHPPSAVETIVENAAKYSDTIVVTGGEPLTWDMNPLTTLLREKQLKIHIETSGAYPLSGTWDWICLSPKKNKAPVGDIHLRADELKVIVYNRDDLRFAEEHAAKVSENCVLYLQPEWSVREKVTPLIVDYVMAHPKWKVSLQTHKYLNIP

SEQ ID NO: 31908 - protein, 211 aa, unidentified
  source 1..211: note = Mycoavidus cysteinexigens
  REGION 1..211: note = tr|A0A2Z6EYA9|A0A2Z6EYA9_9BURK 7-carboxy-7-deazaguanine synthase OS=Mycoavidus cysteinexigens OX=1553431 GN=queE PE=3 SV=1
MASYSIKEIFYTLQGEGINAGRPAVFCRFAGCNLWSGREQNRAQAVCRFCDTDFVGTDGENGGKYQNAASLASQITSLWPSGAMHRLVVCTGGEPLLQLDDELIQALHAAHFEIALETNGTLPIPAGIDWVCVSPKADAPLVVTQGDELKVVVPQANQQLLSYESLDFKHFLVQPMDNAARAFNTQFAIDWCKQHPRWRLSMQTHKYLNIP

SEQ ID NO: 31909 - protein, 211 aa, unidentified
  source 1..211: note = Mycobacterium angelicum
  REGION 1..211: note = tr|A0A1W9ZW13|A0A1W9ZW13_9MYCO 7-carboxy-7-deazaguanine synthase OS=Mycobacterium angelicum OX=470074 GN=queE PE=3 SV=1
MGYTVKEIFYTLQGEGFHTGRPAVFCRFASCNLWTGRESDRKRAICKFCDTDFVGTDGPGGGRFASAEKLASAIARAWPETGHEHRMVVCTGGEPLLQVDTALTAALHAEGFYIAVETNGTRLPPPGIDWICVSPKMGAALPVTSGDELKLVYPQDGGDPEQFEHLDFGSFRLSPMDGPALRENTAAAVEFCLKRPRWRLSLQTHKYLEIP

SEQ ID NO: 31910 - protein, 211 aa, Mycobacterium bohemicum
  REGION 1..211: note = tr|A0A1X1QWY6|A0A1X1QWY6_9MYCO 7-carboxy-7-deazaguanine synthase OS=Mycobacterium bohemicum OX=56425 GN=queE PE=3 SV=1
MAYTVKEIFYTLQGEGFHTGRPAVFCRFASCNLWNGRERDRAQAICKFCDTDFVGTNGPGGGHFQDATDLAAAVARAWPESSHEHRMVVCTGGEPLLQLDNALVDALHVQGFYVAVETNGTRHPPPGIDWTCVSPKIGAPLVLTSGDELKLVFPQDGGDPAQFENLNFGSFRLSPMDGPSVDENTASAVEYCLKRPRWRLSLQTHKYLGIA

SEQ ID NO: 31911 - protein, 211 aa, Mycobacterium bohemicum; identical to SEQ ID NO: 31910
  REGION 1..211: note = tr|A0A0U0W844|A0A0U0W844_9MYCO 7-carboxy-7-deazaguanine synthase OS=Mycobacterium bohemicum DSM 44277 OX=1236609 GN=queE PE=3 SV=1

SEQ ID NO: 31912 - protein, 162 aa, unidentified
  source 1..162: note = Mycobacterium pseudokansasii
  REGION 1..162: note = tr|A0A498QZK2|A0A498QZK2_9MYCO 7-carboxy-7-deazaguanine synthase OS=Mycobacterium pseudokansasii OX=2341080 GN=queE PE=4 SV=1
MESTRFNKPGTIPLQFQTEVRDGCPSDCGLCPDHKQHACLGLIEVNTHCNPDCPICFADSGHQPDGYALAVAQCEKMLDALVAAEGEPEIVMFSGGEPTIHKQILEFVDAAQARPIKTVIINTNGIRLASDRRFVASLAQRNRRPNDSVHADDRGKGVIDHR

SEQ ID NO: 31913 - protein, 211 aa, Mycobacterium scrofulaceum
  REGION 1..211: note = tr|A0A1A2UED9|A0A1A2UED9_MYCSC 7-carboxy-7-deazaguanine synthase OS=Mycobacterium scrofulaceum OX=1783 GN=queE PE=3 SV=1
MPYNVKEIFYTLQGEGHHTGRPAVFLRFASCNLWTGRELDRTRAICKFCDTDFVGTDGQGGGRFRDATELATAVEGQWPEVSWDRRMVVCTGGEPLLQLDEVLVDALHDRGFYVAIETNGTRRAPDGIDWICVSPKVGAPLVQISGDELKLVFPQDGGDPEQYEDLDFQSFRLSPMDGPALRENTASAVEYCLKRPRWQLNLQTHKYLGIP

SEQ ID NO: 31914 - protein, 210 aa, Mycobacterium sp.
  REGION 1..210: note = tr|A0A554U8T2|A0A554U8T2_9MYCO 7-carboxy-7-deazaguanine synthase OS=Mycobacterium sp. KBS0706 OX=2578109 GN=queE PE=3 SV=1
MGYVVKEIFKTLQGEGRHAGRASVFCRFVGCNLWTGREQDRAEAVCRFCDTDFLGTDGPGGGRFDGAEALAAAIEACWNSPAADRFVVFTGGEPLLQLDRALLDAIHARGFTAAVETNGTIDPPAELDWVCVSPKAGAPLAARRGDELKLIYPQPELLPEAVADLDFTHFWLQPMDGPDRIANTEAAVAYCLSHPQWRLSLQTHKLIGIP

SEQ ID NO: 31915 - protein, 211 aa, Mycobacterium sp.
  REGION 1..211: note = tr|A0A1A2JG69|A0A1A2JG69_9MYCO 7-carboxy-7-deazaguanine synthase OS=Mycobacterium sp. E3339 OX=1834146 GN=queE PE=3 SV=1
MPYNVKEIFYTLQGEGHHTGRPAVFLRFASCNLWTGRESDRTRAICKFCDTDFVGTDGQGGGRFRDATQLANAVEGQWPEVSWDRRMVVCTGGEPLLQLDEVLVDALHDRGFYVAIETNGTRSAPDGIDWICVSPKVGAPLVQTSGDELKLVFPQDGGGPEQYENLDFQSFRLSPMDGPALRENTASAVEYCLKRPRWQLNLQTHKYLGIP

SEQ ID NO: 31916 - protein, 211 aa, Mycobacterium szulgai
  REGION 1..211: note = tr|A0A1X2F2Z6|A0A1X2F2Z6_MYCSZ 7-carboxy-7-deazaguanine synthase OS=Mycobacterium szulgai; OX = 1787 GN=queE PE=3 SV=1
MGYTVKEIFYTLQGEGFHTGRPAVFCRFASCNLWTGREADRKRAICKFCDTDFVGIDGPGGGRFASAENLASAIAQAWSETGREHRMVVCTGGEPLLQVDTALVAALHAEGFYIAIETNGTRLPPPGIDWICVSPKIGAPLSVTSGDELKLVYPQDGGDPEQFEQLDFGSFRLSPMDGSALRENTAAAVEFCLRRPRWRLSLQTHKYLEIP

SEQ ID NO: 31917 - protein, 222 aa, unidentified
  source 1..222: note = Mycolicibacter arupensis
  REGION 1..222: note = tr|A0A5B1M685|A0A5B1M685_9MYCO 7-carboxy-7-deazaguanine synthase OS=Mycolicibacter arupensis OX=342002 GN=queE PE=3 SV=1
MQGEGPYMGRRAMFVRLGGCNLSCSWCDTPYTWNGARFDLRHEIAPQSSESVLVQLDEWADGIVVITGGEPLLQASYPEFSILLRALRNRGREVHVESNGTIFPPHEVLEMLDVVVLSPKLANAGKHRGGQSAAMHAGWATVVAEREVYLKIVCRNGADVASVAELAEDIGWPRDRVWVMPEGTRPETIAASITEIADAAIAFGVNVSSRLQVLAWGDVRGH

SEQ ID NO: 31918 - protein, 234 aa, unidentified
  source 1..234: note = Mycolicibacterium mucogenicum
  REGION 1..234: note = tr|A0A1A0MM52|A0A1A0MM52_9MYCO 7-carboxy-7-deazaguanine synthase OS=Mycolicibacterium mucogenicum OX=56689 GN=queE PE=3 SV=1
MTLYVSEVFGPTVQGEGPYMGRRAMFVRLGGCNLSCSWCDTPYTWNGARFDLRHEIAPQSSESVLVQLDEWADGIVVITGGEPLLQASYPEFSILLRALRNRGREVHVESNGTIFPPHEVLEMLDVVVLSPKLANAGKHRGGQSAAMHAGWATVVAEREVYLKIVCRNGADVASVAELAEDIGWPRDRVWVMPEGTRPETIAASITEIADAAIAFGVNVSSRLQVLAWGDVRGH

SEQ ID NO: 31919 - protein, 234 aa, unidentified
  source 1..234: note = Mycolicibacterium obuense
  REGION 1..234: note = tr|A0A0M2JTH2|A0A0M2JTH2_9MYCO 7-carboxy-7-deazaguanine synthase OS=Mycolicibacterium obuense OX=1807 GN=queE PE=3 SV=1
MTLYVSEVFGPTVQGEGPYMGRRAMFVRLGGCNLSCSWCDTPYTWNGARFDLRHEIAPQSSESVLVQLDEWADGIVVITGGEPLLQASYPEFLILLRALRNRGREVHVESNGTIFPPHEVLEMLDVVVLSPKLANAGKHRGGQSAAMHAGWATVVAEREVYLKIVCRNGADVASVAELAEDIGWPRDRVWVMPEGTRPETIAASITEIADAAIAFGVNVSSRLQVLAWGDVRGH

SEQ ID NO: 31920 - protein, 211 aa, unidentified
  source 1..211: note = Myroides guanonis
  REGION 1..211: note = tr|A0A1I3SVS9|A0A1I3SVS9_9FLAO 7-carboxy-7-deazaguanine synthase OS=Myroides guanonis; OX = 1150112 GN=queE PE=3 SV=1
MKKQIIEQDLTYNGTILPLMEEFYTIQGEGFHTGTAAYFIRLGGCDVGCHWCDVKESWEVLKHPLTSIDTIVGNASEKANLAVITGGEPLMWNLEPLTKALKDSGMFVNMETSGAYELTGSFDWICLSPKKTMLPTQSVYDAANELKAIIYNKHDFIFAEEQAAKVNDKAILFLQPEWSKSEEVLPLIIEYVKENPKWRISLQTHKYLDIP

SEQ ID NO: 31921 - protein, 209 aa, unidentified
  source 1..209: note = Myroides indicus
  REGION 1..209: note = tr|A0A4R7EYL7|A0A4R7EYL7_9FLAO 7-carboxy-7-deazaguanine synthase OS=Myroides indicus; OX = 1323422 GN=queE PE=3 SV=1
MEAETKKALDAGINLPLMEEFYTIQGEGYYSGHAAYFIRLGGCDVGCHWCDVKESWNATLHPLTKVEDIIERASKIAKLAVITGGEPLMYNLDYLTAELKRKGMQTNIETSGAYELSGDFDWICLSPKKAKLPVQSVYDAANELKVIIYNKHDFIFAEEQAAKVNKNALLLLQTEWGKRTEMMPLIIEYVKQNPKWKISLQTHKFLDIP

SEQ ID NO: 31922 - protein, 210 aa, Myroides marinus
  REGION 1..210: note = tr|A0A161S1X5|A0A161S1X5_9FLAO 7-carboxy-7-deazaguanine synthase OS=Myroides marinus; OX = 703342 GN=queE PE=3 SV=1
MTKDYDKVALDEGRILPLMEEFYTIQGEGYYSGHAAYFIRLGGCDVGCHWCDVKESWDAELHPLTDVHNIVARAKAEANLAVITGGEPLMYNLDYITSELKKAGLQTNIETSGAYELSGDFDWICLSPKKNKLPTQSVYDAADELKVVIYNKHDFIFAEEQAARVNDNALLLLQVEWSKRAEMNPLIVEYVKKNPQWKISVQTHKYLDIP

SEQ ID NO: 31923 - protein, 210 aa, Myroides odoratimimus
  REGION 1..210: note = tr|A0A0E1ZE59|A0A0E1ZE59_9FLAO 7-carboxy-7-deazaguanine synthase OS=Myroides odoratimimus CCUG 10230 OX=883150 GN=queE PE=3 SV=1
MTKDYDKEALDEGRILPLMEEFYTIQGEGFYSGHAAYFIRLGGCDVGCHWCDVKESWDAELHPLTDVQQIVSRAGKEANLAVITGGEPLMYNLDVITAELKKAGLQTNIETSGAYDLTGDFDWICLSPKKNKLPTQSVYDAANELKVVIYNKHDFIFAEEQAARVNKDALLLLQVEWSKRAEMNPLIVDYVKKNPKWKISVQTHKYLDIP

SEQ ID NO: 31924 - protein, 210 aa, Myroides odoratimimus; identical to SEQ ID NO: 31923
  REGION 1..210: note = tr|A0A0S7ECJ7|A0A0S7ECJ7_9FLAO 7-carboxy-7-deazaguanine synthase OS=Myroides odoratimimus; OX = 76832 GN=queE PE=3 SV=1

SEQ ID NO: 31925 - protein, 211 aa, Myroides odoratus
  REGION 1..211: note = tr|H1Z9M2|H1Z9M2_MYROD 7-carboxy-7-deazaguanine synthase OS=Myroides odoratus DSM 2801 OX=929704 GN=queE; PE = 3 SV=1
MIQENLENKALTEGRVLPLMEQFYTIQGEGFYSGHAAYFIRLGGCDVGCHWCDVKESWDAELHPLTAVEKIVSDASAVANLAVITGGEPLMYNLDYLTKKLKEAGLKTNIETSGAYEMSGDFDWVCLSPKKAKLPTASAYAAANELKVVIYNKHDFIFAEEQAAKVNKDALLLLQTEWSKRAVMMPLIIEYVKKNPQWKISLQTHKYLDIP

SEQ ID NO: 31926 - protein, 211 aa, Myroides odoratus; identical to SEQ ID NO: 31925
  REGION 1..211: note = tr|A0A378RU83|A0A378RU83_MYROD 7-carboxy-7-deazaguanine synthase OS=Myroides odoratus; OX = 256 GN=queE PE=3 SV=1

SEQ ID NO: 31927 - protein, 211 aa, Myroides phaeus
  REGION 1..211: note = tr|A0A1G8EZX8|A0A1G8EZX8_9FLAO 7-carboxy-7-deazaguanine synthase OS=Myroides phaeus; OX = 702745 GN=queE PE=3 SV=1
MLKEENNKALKEGKELPLMEDFYTIQGEGFYSGHAAYFIRLGGCDVGCHWCDVKESWDAELHPLTKVEDMVAKASENEGKLVIITGGEPLMYNLDYLTSELKKAGMQTNIETSGAYEMSGDFDWICLSPKKNKLPTQSVYDSAHELKVVIYNKHDFIFAEEQAARVNGNALLLLQTEWSKKDEMTPLIVEYVKKNPKWKISMQTHKYLDIP

SEQ ID NO: 31928 - protein, 210 aa, Myroides profundi
  REGION 1..210: note = tr|A0A0B5RU85|A0A0B5RU85_9FLAO 7-carboxy-7-deazaguanine synthase OS=Myroides profundi; OX = 480520 GN=queE PE=3 SV=1
MTKDYDKEALDEGRILPLMEEFYTIQGEGFYSGHAAYFIRLGGCDVGCHWCDVKESWDAELHPLTDVQQIVSRASEEANLAVITGGEPLMYNLDVITAELKKAGLQTNIETSGAYELTGDFDWICLSPKKNKLPTQSVYDAANELKVVIYNKHDFIFAEEQAARVNKDALLLLQVEWSKRAEMNPLIVEYVKKNPKWKISVQTHKYLDIP

SEQ ID NO: 31929 - protein, 213 aa, unidentified
  source 1..213: note = Myxococcaceae bacterium
  REGION 1..213: note = tr|A0A521U206|A0A521U206_9DELT 7-carboxy-7-deazaguanine synthase OS=Myxococcaceae bacterium OX=2484252 GN=queE PE=3 SV=1
MAYTVKELFYTLQGEGARAGRAAVFVRFSGCNLWNGREADRERGAGGCARWCDTDFVGTDGDGGGRFATAEAVADAAAGAWGPGREARYVVCTGGEPLLQLDEALIEAFHREGFEVAIETNGTLPVPPGVDWVCVSPKAGSTVVVRSGHELKLVIPQEGVNPVDFEGWSFERFFVQPCDGMLRAEHTRRAIEWCRAHPKWRLSLQTHKLLGIP

SEQ ID NO: 31930 - protein, 230 aa, unidentified
  source 1..230: note = Myxococcaceae bacterium
  REGION 1..230: note = tr|A0A4Q5ZGB9|A0A4Q5ZGB9_9DELT 7-carboxy-7-deazaguanine synthase OS=Myxococcaceae bacterium OX=2484252 GN=queE PE=3 SV=1
MPAARPHIEPRRVPTADSVVVKEIYLSLQGESSHAGLLCAFIRLTGCHLRCTYCDSEFAFHGGSRRKNADIVTEILALNTPAVEVTGGEPLLQPGVYPLMESLLDAGLKVLLETSGAIDVRLVPPAVHKIVDMKTPSSGECDRNDYRNLVSMNANDELKLVIGSREDYEWSRALITEHRLGSKPYSVLCSTIFDKLHPRELAEWIIEDRLPVRFQLQMHKYLWDPNARGV

SEQ ID NO: 31931 - protein, 218 aa, unidentified
  source 1..218: note = Myxococcales bacterium
  REGION 1..218: note = tr|A0A0S8F010|A0A0S8F010_9DELT 7-carboxy-7-deazaguanine synthase OS=Myxococcales bacterium SG8_38_1 OX=1703408 GN=queE PE=3 SV=1
MADADQIRVHEIYESIQGESTFAGLPCTFVRLSRCNLRCRWCDTPQAFEGGTEMSRTDVLERALSFGTPLVELTGGEPLLQEGAFPLLRELCDAGRVVLLETSGERDISKVDPRVHRIMDLKAPGSGESARNRWENIGHLTTRDEVKIVLADRADYEWAKGVIEEHGLRGRVKEVLLSPVWGELDPKDLVQWVLEDDLGVRVQIQMHKVIWDADTQGV

SEQ ID NO: 31932 - protein, 230 aa, unidentified
  source 1..230: note = Myxococcales bacterium
  REGION 1..230: note = tr|A0A2D5EUB2|A0A2D5EUB2_9DELT 7-carboxy-7-deazaguanine synthase OS=Myxococcales bacterium OX=2026763 GN=queE PE=3 SV=1
MKLRIAKDRLLVSEIFDSVQGEGPSAGTPSTFLRLGHCNLRCAWCDTPYTWDWERHRLEDELRAWDLDALAADLVARAPQNLVVTGGEPLLQRDALAALLPRLGKRVEVETAGTLPPELEGVAQWNVSPKLASSGNPLDKRWRPDVLRAFARREDAVFKFVIASEADLEELRARVSELALPPERVWLMPEGTDAATLAERGRALSEVCVQEGWRLGWRLHVSLWGDRRGV

SEQ ID NO: 31933 - protein, 230 aa, Myxococcus fulvus
  REGION 1..230: note = tr|F8C8N3|F8C8N3_MYXFH 7-carboxy-7-deazaguanine synthase OS=Myxococcus fulvus (strain ATCC BAA-855 / HW-1); OX = 483219 GN=queE PE=3 SV=1
MPAARPHIEPRRVPSADSVVVKEIYLSVQGESSHAGLLCAFVRLTGCHLRCTYCDSEFAFHGGARRKIPDIVSEVRAMRTPMVEVTGGEPLLQPGVYPLMEALLDAGFKVLLETSGAIDVRLVPPAVHKIVDMKTPSSGEHLRNDYRNFTSMNANDELKFVIGSREDYDWAKALIAEHQLLQKPYGTLFSTVFDKLHPRELAEWVIEDRLAVRFQLQMHKYMWDPNERGV

SEQ ID NO: 31934 - protein, 230 aa, Myxococcus fulvus
  REGION 1..230: note = tr|A0A511T0D2|A0A511T0D2_MYXFU 7-carboxy-7-deazaguanine synthase OS=Myxococcus fulvus; OX = 33 GN=queE PE=3 SV=1
MPAARPHIEPRLVPAADSVVVKEIYLSLQGESSHAGLLCAFVRLTGCHLRCTYCDSEFAFHGGTRMKNADVVEQVKALRTPRVEVTGGEPLLQPGVYPLMQSMLDAGLIVLLETSGAIDVRLVPPAVHKIVDMKTPSSGECARNDLRNFTSMNANDEVKFVIGSREDYEWSKALIAEHRLTEKPFSLLFSTVFGKLHPRELAEWTIEDRLSVRFQLQMHKYMWDPNERGV

SEQ ID NO: 31935 - protein, 230 aa, unidentified
  source 1..230: note = Myxococcus hansupus
  REGION 1..230: note = tr|A0A0H4X362|A0A0H4X362_9DELT 7-carboxy-7-deazaguanine synthase OS=Myxococcus hansupus; OX = 1297742 GN=queE PE=3 SV=1
MPAARPHIEPRRVPTADSVVVKEIYLSVQGESSHAGLLCAFVRLTGCHLRCTYCDSEFAFHGGARRKIPDIVSEVLGMRTPMVEVTGGEPLLQPGVYPLMEALLDAGLKVLLETSGAIDVRLVPPAVHKIVDMKTPSSGEHLRNDYRNFTSMNANDELKFVIGSREDYDWAKALIAEHQLLQKPYGTLFSTVFDKLHPRQLAEWVIEDRLAVRFQLQMHKYMWDPNERGV

SEQ ID NO: 31936 - protein, 230 aa, unidentified
  source 1..230: note = Myxococcus macrosporus
  REGION 1..230: note = tr|A0A250JN60|A0A250JN60_9DELT 7-carboxy-7-deazaguanine synthase OS=Myxococcus macrosporus DSM 14697 OX=1189310 GN=queE PE=3 SV=1
MPAARPHIEPRRVPSADSVVVKEIYLSVQGESSHAGLLCAFVRLTGCHLRCTYCDSEFAFHGGARRKIPDIVNEVRAMRTPMVEVTGGEPLLQPGVYPLMEALLDAGFKVLLETSGAIDVRLVPPAVHKIVDMKTPSSGEHLRNDYRNFTSMNANDELKFVIGSREDYDWAKALIAEHQLLQKPYGTLFSTVFDKLHPRELAEWVIEDRLAVRFQLQMHKYMWDPNERGV

SEQ ID NO: 31937 - protein, 230 aa, Myxococcus sp.
  REGION 1..230: note = tr|A0A540WKE5|A0A540WKE5_9DELT 7-carboxy-7-deazaguanine synthase OS=Myxococcus sp. AM401; OX = 2590453 GN=queE PE=3 SV=1
MPAARPHIEPRLVPTADSVVVKEIYLSLQGESSHAGLLCAFIRLTGCHLRCTYCDSEFSFHGGARRKNADVIEEIKALRTPRVEITGGEPLLQPGVYPLMQSLLDEGFTVLLETSGAIDVRLVPPAVHKIVDMKTPSSGEAARNDLRNFASMNANDELKFVIGSREDYDWSKALIAEHRLAEKPFALLFSTVFEKLHPRELAEWTIEDRLSVRFQLQMHKYLWEPNARGV

SEQ ID NO: 31938 - protein, 216 aa, Myxococcus sp.
  REGION 1..216: note = tr|A0A540WUT6|A0A540WUT6_9DELT 7-carboxy-7-deazaguanine synthase OS=Myxococcus sp. AM401; OX = 2590453 GN=queE PE=3 SV=1
MSYAVKELFYTLQGEGAQSGRAAVFLRFSGCNLWSGFARDRERGTGGCSRWCDTDFVGTNGPGGGRFASAEGLADAVAAAWLPNMGTSVRPMVVCTGGEPLLQLDAPLIEALHARGFFLAIETNGTRPVPAGIDWVCVSPKAGTDLVQKKGHELKLVYPQPGFEPGQFESLEFEHFFLQPMDGPERTRNTTQAMQFCLNHPQWRLGIQMHKSAGFP

SEQ ID NO: 31939 - protein, 230 aa, Myxococcus stipitatus
  REGION 1..230: note = tr|L7U0V4|L7U0V4_MYXSD 7-carboxy-7-deazaguanine synthase OS=Myxococcus stipitatus (strain DSM 14675 / JCM 12634 / Mx s8) OX=1278073 GN=queE PE=3 SV=1
MPVARPHIEPRLVPSADSVVVKEIYLSLQGESSHAGLLCAFIRLTGCHLRCTYCDSEFAFHGGKRRKNAEILEEVKSLRTPRVEITGGEPLLQPGVYPLMQSLLDGGYTVLLETSGAIDVRLVPPDVHKIVDMKTPSSGESSRNDLRNFASMNARDELKFVIGSREDYEWSKALITEHRLAEKPFALLFSTVFDKLHPRELAEWTVDDRLPVRFQLQMHKYLWDPNARGV

SEQ ID NO: 31940 - protein, 230 aa, Myxococcus virescens
  REGION 1..230: note = tr|A0A511H925|A0A511H925_9DELT 7-carboxy-7-deazaguanine synthase OS=Myxococcus virescens; OX = 83456 GN=queE PE=3 SV=1
MPAARPHIEPRRVPTADSVVVKEIYLSVQGESSHAGLLCAFIRLTGCHLRCTYCDSEFAFHGGARRKIADIVSEVRDLRTPMVEVTGGEPLLQPGVYPLMEALLDAGFKVLLETSGAIDVRLVPPAVHKIVDMKTPSSGEHLRNDYRNFTSMNANDELKFVIGSREDYDWAKALIAEHQLLQKPYGSLFSTVFDKLHPRELAEWVIEDRLAVRFQLQMHKYMWDPNARGV

SEQ ID NO: 31941 - protein, 216 aa, Myxococcus xanthus
  REGION 1..216: note = tr|A0A4Y6CN43|A0A4Y6CN43_MYXXA 7-carboxy-7-deazaguanine synthase OS=Myxococcus xanthus; OX = 34 GN=queE PE=3 SV=1
MSYAVKELFYTLQGEGAQAGRAAVFLRFTGCNLWSGLERDREKGAGGCSRWCDTDFVGMDGAGGGRFSSAVALAEAVAAAWPRSQAAGQAPMVVCTGGEPLLQLDAPLIDALHAQGFFVAVETNGTQPVPSSVDWICVSPKAGSTLVQRSGNELKFVFPQPGFDPERFLELEFAHFFLQPMDGPAQAANMERALHYCLEHPRWRLGLQMHKVAGIR

SEQ ID NO: 31942 - protein, 230 aa, Myxococcus xanthus
  REGION 1..230: note = tr|A0A4Y6C2J5|A0A4Y6C2J5_MYXXA 7-carboxy-7-deazaguanine synthase OS=Myxococcus xanthus; OX = 34 GN=queE PE=3 SV=1
MPAARPHIEPRRVPTADSVVVKEIYLSVQGESSHAGLLCAFIRLTGCHLRCTYCDSEFAFHGGARRKIADIVSEVRGLRTPMVEVTGGEPLLQPGVYPLMEALLDAGFKVLLETSGAIDVRLVPPAVHKIVDMKTPSSGEHLRNDYRNFTSMNANDELKFVIGSREDYDWAKALIAEHQLLQKPYGSLFSTVFDKLHPRELAEWVIEDRLAVRFQLQMHKYMWDPNARGV

SEQ ID NO: 31943 - protein, 258 aa, Nannocystis exedens
  REGION 1..258: note = tr|A0A1I1WU24|A0A1I1WU24_9DELT 7-carboxy-7-deazaguanine synthase OS=Nannocystis exedens; OX = 54 GN=queE PE=3 SV=1
MTAAFDPPGSAPNSVGPSLSTSPPTWLPIQERFVSLQGEGTLVGVPSSFVRVSGCNLRCAWCDSPATSWAPSGRRTELAELVAFCAAGPRHVVLTGGEPLLFAGVAALSRWLREAGHHITVETAGTVWLDGLACDLLSLSPKLRHSTPWDRDPAQAERHERARLNVPVLARLMASFPWQLKFVVRADAGAADVAEVEALLRELAVPDDQRSRVLLMPECTDSEALRAAYRALLPICVERGFRLGERLHIHMFGHTPGT

SEQ ID NO: 31944 - protein, 218 aa, Natranaerobius trueperi
  REGION 1..218: note = tr|A0A226BY22|A0A226BY22_9FIRM 7-carboxy-7-deazaguanine synthase OS=Natranaerobius trueperi OX=759412 GN=queE PE=3 SV=1
MFKVNETFVSINGEGPHAGQLAFFVRFQGCNLNCSYCDTDYARSLNSEYIEKSTHDLVSEIEQSGVNSILLTGGEPLLQDKDSLSFLITTLLDKGYNVDIETNGAVDIKWIDNDVNIIMDYKLPSSNMESDMLIANIKSLQKNDAIKFVCGNDKDLNKVLEIIDKYNLNKKTQVFLSPVFGMLEPSQIVEFIKENNTNDVKVQLQLHKIIWDPDMRGV

SEQ ID NO: 31945 - protein, 222 aa, Natranaerovirga hydrolytica
  REGION 1..222: note = tr|A0A4V2Q088|A0A4V2Q088_9FIRM 7-carboxy-7-deazaguanine synthase OS=Natranaerovirga hydrolytica OX=680378 GN=queE PE=3 SV=1
MSYKVVEKFISINGEGQRAGQLAVFIRFAGCNLNCSYCDTLWANEKNVDYEVMTLEDIYTYIESTGVKNITITGGEPLLQDNIFDLIKVLTAENELRLEIETNGSVSIKKYYEKLNHPPSFTMDYKLESSQMEDKMNIDNFNVLTQKDTVKFVVGDMKDLIKVKEVIDEYNLTEKTNVYLSPIYGKINYQDMVDFMIENKLNDVSLQLQLHKIIWDPNQKGV

SEQ ID NO: 31946 - protein, 222 aa, Natranaerovirga pectinivora
  REGION 1..222: note = tr|A0A4R3MQG3|A0A4R3MQG3_9FIRM 7-carboxy-7-deazaguanine synthase OS=Natranaerovirga pectinivora OX=682400 GN=queE PE=3 SV=1
MSYKVVETFVSINGEGRKAGQLAVFIRLAGCNLECSYCDTMWANNTDVKYTEMSSEDIYSYIKSTNIKNITITGGEPLLQDNIIDLLNLLSSDNELSVEIETNGSVPLEPFHKGMDRPPSFTMDYKLGSSKMEGHMELDNLQFLTKYDTLKFVVGNLEDLERARGLINDYDLTNKTNIFLSPVFNVINYEDIVEYMKANHLNDVSLQLQLHKIIWNPDERGV

SEQ ID NO: 31947 - protein, 240 aa, Natribacillus halophilus
  REGION 1..240: note = tr|A0A1G8PDC2|A0A1G8PDC2_9BACI 7-carboxy-7-deazaguanine synthase OS=Natribacillus halophilus OX=549003 GN=queE PE=3 SV=1
MSSKIPVLEIFGPTIQGEGMVAGQKTMFVRTGGCDYRCAWCDSAFTWDGSQKATPMTADDIMAKLEQTGGGRFSHVTISGGNPALHVGIAELIERFQEKGIASAVETQGSFWQDWLLNVDDVTISPKPPSSEMTTDWSRLDTFMMRLSARRDGNHNLKIVIFDEEDLVYAKQVHGRYPDVPLYLQVGNDDLDNQDPARLRDHLLEKYEWLVDRVMADPELNRVRVLPQIHALLWGNKQGV

SEQ ID NO: 31948 - protein, 312 aa, Natronoflexus pectinivorans
  REGION 1..312: note = tr|A0A4R2GE16|A0A4R2GE16_9BACT 7-carboxy-7-deazaguanine synthase OS=Natronoflexus pectinivorans OX=682526 GN=queE PE=3 SV=1
MIQQTVIKHKFSVSGLRTPVSEKLKAMSTKIVLANEGVFPITKDINGAALSQLPATAIPVAGTIQGEGKLAGVPSLFIRFSSCNLRCIWQLPDGSYSRCDTPYASFDTQQVVHTTVKEVIQLVKKNLGSIRHVVITGGEPLMQKDALAELACGLKNELNVHLTIETNGSMFNKDVAENIDLFSISPKLANSEPNPEKLKALGLNPSGPLSYHAQRRYNSKALQSYINLCNESDKEMQLKFVVGKPEDEQEIINDFLNQLNGWKPSDIMLMPLGANEEELKQTTPLTLEMAIRNGWRFTPRVHIDIFGCKPGV

SEQ ID NO: 31949 - protein, 214 aa, unidentified
  source 1..214: note = Natronospirillum operossus
  REGION 1..214: note = tr|A0A4Z0WIR0|A0A4Z0WIR0_9BACT 7-carboxy-7-deazaguanine synthase OS=Natronospirillum operossus OX=2562806 GN=queE PE=3 SV=1
MYQIKEVFHTLQGEGAHSGRPAVFCRFAGCNLWSGREQDRAVARCNFCDTDFVGTDGQNGGSFRLPTELADHIAGFWPADQGHRYVICTGGEPLLQLDAPLIEALHARGFEIGVETNGTLPAPAGIDWLCVSPKGATNVVIEQCDELKLVYPQAEAPPERFSRIAARNFYLSPMNPPDGTISTDSPAVRAAIDYCLAHPQWKLTLQSHKILHID

SEQ ID NO: 31950 - protein, 233 aa, Nautilia profundicola
  REGION 1..233: note = tr|B9L874|B9L874_NAUPA 7-carboxy-7-deazaguanine synthase OS=Nautilia profundicola (strain ATCC BAA-1463 / DSM 18972 / AmH) OX=598659 GN=queE PE=3 SV=1
MKSEKLIPVSEIFYSIQGEGKYAGHPSVFVRVGGCNLKCPGFGEKGCDSYYAVDKSYKSEWKLMSVEEIKSEVSKYIRKDTHLVITGGEPTLFYKQLYPLVVWFEGQITVETNTTVDIDFEKYPAYKDVAFAMSVKLSNSAEEYGKRVKKHVIKSYVKNAPKSFFKFVIDKDLNNEIKDITAGINAPVYCMPLGADKEELEKNAPFVFGFCLKHGYCYSDRIHIRLFGKKKGV

SEQ ID NO: 31951 - protein, 230 aa, Nautilia sp.
  REGION 1..230: note = tr|A0A3T0L0I2|A0A3T0L0I2_9PROT 7-carboxy-7-deazaguanine synthase OS=Nautilia sp. PV-1; OX = 2579250 GN=queE PE=3 SV=1
MGHIPISEIFYSIQGEGKYAGHPSVFVRVGGCNLKCPGFGEKGCDSYYAVDKSYKSEWKLMNVEEIKSEVSKYLNKNTHLVITGGEPTLFYKQLYPLVEWFKGQITIETNTTVDINFEKYPAYKKAAFAMSVKLSNSGEEYTKRVKKGIIASYVKNAPKSFFKFVIDRDLNDEIKEITGETNAAVYCMPLGADREELEKNAPFVFGFCLKHGYCYSDRIHIRLFGKKKGV

SEQ ID NO: 31952 - protein, 229 aa, Nautilia sp.
  REGION 1..229: note = tr|A0A432RT14|A0A432RT14_9PROT 7-carboxy-7-deazaguanine synthase OS=Nautilia sp.; OX = 2231114 GN=queE PE=3 SV=1
MTSKTIPITEIFYSIQGEGKYCGHPSLFIRVGGCNLTCSGFSKHGCDSFYAVDKKYKSSWKMMSINDLIVEIEKYYPCDIVLTGGEPTLYYQKLYPIIEKFDNITIETNTTIDIDFEKYPAFKKVSFAMSVKLSNSGEEYSKRVNKEAIQNIANNAKNSFFKFVINSDLLSEINDICKNIDLPIYCMPLGETKKELEKNSPFVFDFCLKNNFFYSDRIHIRLFSKKRGV

SEQ ID NO: 31953 - protein, 210 aa, Neisseria animalis
  REGION 1..210: note = tr|A0A3N3EHS8|A0A3N3EHS8_NEIAN 7-carboxy-7-deazaguanine synthase OS=Neisseria animalis; OX = 492 GN=queE PE=3 SV=1
MTEIRPENPRYRLVEMFESLQGEGYNTGMRAVFLRLGKCNLACGWCDTDYLTFEMTGLSDILGRLKQYTARTVIITGGEPTIQPHLDILLDTLKAQGYYLCIETNGLNPAPPQIDFVAASPKACYAGKYTKQYIETADEVRIVADGDVTAFAEEMERKIRARHYYLSPCEQNGEMNIYDTIRQIGLLNSRPNAPVHWSLSLQTHKLAGIE

SEQ ID NO: 31954 - protein, 210 aa, Neisseria animaloris
  REGION 1..210: note = tr|A0A448UD65|A0A448UD65_9NEIS 7-carboxy-7-deazaguanine synthase OS=Neisseria animaloris; OX = 326522 GN=queE PE=3 SV=1
MTEICPENPPYRIVEIFESLQGEGYNTGMPAVFIRLGKCNLACSWCDTDYLTFNMMSLQDILGRLKSYTARNIIITGGEPTIQPHLDILLDTLKAEGYTLCIETNGLNPAPPQIDFVATSPKACYAEKYEKQCIATADEVRIVADGDVLAFCERMEHKIRAKHYYLSPCEQNGEMNIYDTIRQIGLLNSRPDAPVHWQLSVQTHKWAGIE

SEQ ID NO: 31955 - protein, 210 aa, unidentified
  source 1..210: note = Neisseria arctica
  REGION 1..210: note = tr|A0A0J0YS30|A0A0J0YS30_9NEIS 7-carboxy-7-deazaguanine synthase OS=Neisseria arctica; OX = 1470200 GN=queE PE=3 SV=1
MQTIQPADPIFRIVEIFESLQGEGYNTGMPAVFIRLGKCNLACRWCDTDYLTFQQMPLSEILGRLKNYTARNIIITGGEPTIQPHLETLLNALKKEGYYLCIETNGLNPVPPQIDYIATSPKACYAEKYQTQYIKRADEVRIVVDGDIIAFCTAIEQKIRARHYYLSPCEQNGVMNIYETIRQIGLLNSRPDAAVHWQLSVQTHKWAGIE

SEQ ID NO: 31956 - protein, 212 aa, Neisseria bacilliformis
  REGION 1..212: note = tr|F2BCW9|F2BCW9_9NEIS 7-carboxy-7-deazaguanine synthase OS=Neisseria bacilliformis ATCC BAA-1200; OX = 888742 GN=queE PE=3 SV=1
MTRIDLAPADPQYRIVEIFESLQGEGWNTGMPAIFVRLGKCNLACSWCDTDYLKFSMMPLSEILGRLKNYTARNIIITGGEPTIQPHLNTLLDALKNAGYRLCIETNGLNPAPPQIDYVAASPKACYAAKYEKSCIAAADEVRIVADGDVISFCEALEQKIRARRYYLSPCEQNGAMNIYDTIRQIGILNSRPDAPVHWQLSVQTHKWAGIE

SEQ ID NO: 31957 - protein, 212 aa, Neisseria canis
  REGION 1..212: note = tr|A0A1X3CZ81|A0A1X3CZ81_9NEIS 7-carboxy-7-deazaguanine synthase OS=Neisseria canis; OX = 493 GN=queE PE=3 SV=1
MLPIHTQTQNPPYRIVEIFESLQGEGYNTGMPAVFIRLGKCNLACSWCDTDYLTFNMMSLQDIVGRLKSYTARNIIITGGEPTIQPHLDILLDALKTEGYTLCIETNGLNPAPPQIDFVAASPKACYAEKYEKQCIATADEVRIVADGDVLAFCERMEHKIRAKHYYLSPCEQNGEMNIYDTIRQIGLLNSRPNATVHWQLSVQTHKWAGIE

SEQ ID NO: 31958 - protein, 200 aa, Neisseria cinerea
  REGION 1..200: note = tr|A0A2X3Z4T4|A0A2X3Z4T4_NEICI 7-carboxy-7-deazaguanine synthase OS=Neisseria cinerea; OX = 483 GN=queE PE=3 SV=1
MKKISVTPKNPQYRIVEIFESLQGEGWNTGMPAIFVRLGKCNLACGWCDTDYLTFGMMGLSDILGRLKTYAARNIIITGGEPTIQPHLDTLLDALKAEGYFLCLETNGLKPAPPQIDYVATSPKVCYADKYETNCIAEADEVRIVADGDVIAFCENMERKIRARRYYLSPCEKDGVMNIYDTIRQIGILNSRPDASVHWS

SEQ ID NO: 31959 - protein, 212 aa, Neisseria cinerea
  REGION 1..212: note = tr|D0W2T6|D0W2T6_NEICI 7-carboxy-7-deazaguanine synthase OS=Neisseria cinerea ATCC 14685 OX=546262 GN=queE; PE = 3 SV=1
MKKINVAPENPQYRIVEIFESLQGEGWNTGMPAIFVRLGKCNLACGWCDTDYLTFDIMSLSDILGRLKTYAARNIIITGGEPTIQPHLDTLLDALKAEGYFLCIETNGLKPAPPQIDYVATSPKVCYADKYETNCIAEADEVRIVADGDVVAFCENMERKIRARRYYLSPCEQNGAMNIYDTIRQIGILNSRPDASVHWQLSVQTHKWAGIE

SEQ ID NO: 31960 - protein, 210 aa, Neisseria dentiae
  REGION 1..210: note = tr|A0A1X3DF61|A0A1X3DF61_9NEIS 7-carboxy-7-deazaguanine synthase OS=Neisseria dentiae; OX = 194197 GN=queE PE=3 SV=1
MTEIRPENPAYRIVEIFESLQGEGYNTGMSAVFIRLGKCNLACAWCDTDYLTFTMMSLADILGRLKSYTARNIIITGGEPTIQPHLAVLLDALKSAGYRLYLETNGLNPAPPQIDYVAASPKACYAAKYEQQCIETADEVRIVADGDVLAFCAAMEQKIRAEHYYLSPCERKGEMNIYETIRQIGLLNSRPDAAVHWQLSVQTHKWAGIE

SEQ ID NO: 31961 - protein, 210 aa, unidentified
  source 1..210: note = Neisseria dumasiana
  REGION 1..210: note = tr|A0A1X3DKE1|A0A1X3DKE1_9NEIS 7-carboxy-7-deazaguanine synthase OS=Neisseria dumasiana; OX = 1931275 GN=queE PE=3 SV=1
MTEIRPENPQYRIVEIFESLQGEGYNTGMPAVFIRLGKCNLACSWCDTDYLTFNMMSLQDILGRLKNHTARNIIITGGEPTIQPHLDILLDTLKTEGYTLCIETNGLNPAPPQIDFVATSPKACYAEKYEKQCITTADEVRIVADGDVLAFCERMEQKIRAKHYYLSPCEQNGEMNIYDTIRQIGLLNSRPNAPVHWQLSVQTHKWAGIE

SEQ ID NO: 31962 - protein, 212 aa, Neisseria elongata
  REGION 1..212: note = tr|A0A378TYT1|A0A378TYT1_NEIEL 7-carboxy-7-deazaguanine synthase OS=Neisseria elongata; OX = 495 GN=queE PE=3 SV=1
MKKISVAPENPQFRIVEIFESLQGEGWNTGMPAVFVRLGKCNLACGWCDTDYLKFGMMSLSDILGRLKTYTARNVIITGGEPTIQPHLDTLLDALKAEGYFLCIETNGLKPAPSQIDYVATSPKACYAEKYETNCIAKADEVRIVADGDVVAFCQNMERKIRARHYYLSPCEQNGAMNIYDTIRQIGILNSRPDAPVHWQLSVQTHKWAGIE

SEQ ID NO: 31963 - protein, 212 aa, Neisseria elongata
  REGION 1..212: note = tr|D4DQ49|D4DQ49_NEIEG 7-carboxy-7-deazaguanine synthase OS=Neisseria elongata subsp. glycolytica ATCC 29315 OX=546263 GN=queE PE=3 SV=1
MKKISVAPENPQYRIVEIFESLQGEGWNTGMPAVFVRLGKCNLACGWCDTDYLKFGMMSLSDILGRLKTYAARNVIITGGEPTIQPHLDTLLDTFKAEGYFLCIETNGLKPAPPQIDYVATSPKACYAAKYETNCITEADEVRIVADGDVVAFCENMERKIRARHYYLSPCEQDGAMNIYDTIRQIGILNSRPDAPAHWQLSVQTHKWAGIE

SEQ ID NO: 31964 - protein, 211 aa, Neisseria flavescens
  REGION 1..211: note = tr|A0A154U6V1|A0A154U6V1_NEIFL 7-carboxy-7-deazaguanine synthase OS=Neisseria flavescens; OX = 484 GN=queE PE=3 SV=1
MTIQITPNNPQYRIVEIFESLQGEGWNTGMPAVFIRLGKCNLACSWCDTDYLKFGMMSLSDILGRLKTYTARNIIITGGEPTIQPHLDTLLNALKAEGYFLCIETNGLNPAPPQIDYVATSPKACYAAKYESSCIEKADEVRIVADGDVIAFCQEMERKIRARHYYLSPCEQDGVMNIYDTIRQIGVLNSRPDAPIHWQLSVQTHKWAGIE

SEQ ID NO: 31965 - protein, 211 aa, Neisseria flavescens
  REGION 1..211: note = tr|C5TL96|C5TL96_NEIFL 7-carboxy-7-deazaguanine synthase OS=Neisseria flavescens SK114 OX=596320 GN=queE; PE = 3 SV=1
MTIQITPNNPQYRIVEIFESLQGEGWNTGMPAVFVRLGKCNLACGWCDTDYLKFGMMSLSDILGRLKTYTARNVIITGGEPTIQPHLNTLLDALKAEGYFLCIETNGLNPAPPQIDYVATSPKACYAAKYESSCIEKADEVRIVADGDVVAFCQEMERKIRAQHYYLSPCEQDGVMNIYDTIRQIGVLNSRPDAPVHWQLSVQTHKWAGIE

SEQ ID NO: 31966 - protein, 212 aa, Neisseria gonorrhoeae
  REGION 1..212: note = tr|B4RQ65|B4RQ65_NEIG2 7-carboxy-7-deazaguanine synthase OS=Neisseria gonorrhoeae (strain NCCP11945); OX = 521006 GN=queE PE=3 SV=1
MKKISVAPENPQYRIVEIFESLQGEGRNTGMPAVFVRLGKCNLACGWCDTDYLTFGMMSLSDILGCLKTYAARNIIITGGEPTIQPHLDMLLDTLKAEGYFLCLETNGLKPAPPQIDYVATSPKACYAAKYETNCIAEADEVRIVADGDVLAFCENMERKIRARHYYLSPCEQNGVMNIYDTIRQIGILNSRPDAPVHWQLSVQTHKWAGIE

SEQ ID NO: 31967 - protein, 212 aa, Neisseria gonorrhoeae
  REGION 1..212: note = tr|A0A5K1QHF9|A0A5K1QHF9_NEIGO 7-carboxy-7-deazaguanine synthase OS=Neisseria gonorrhoeae; OX = 485 GN=queE PE=4 SV=1
MKKISVAPENPQYRIVEIFESLQGEGRNTGMPAVFVRLGKCNLACGWCDTDYLTFGMMSLSDILGCLKTYAARNIIITGGEPTIQPHLDMLLDTLKAEGYFLCIETNGLNPVPPQIDYVATSPKACYAAKYEKSCIETADEVRIVADGDVVGFCENMERKIRAHHYYLSPCEQDGAMNIYDTIRQIGILNSRPDAPVHWQLSVQTHKWAGIE

SEQ ID NO: 31968 - protein, 209 aa, Neisseria iguanae
  REGION 1..209: note = tr|A0A2P7TYY1|A0A2P7TYY1_9NEIS 7-carboxy-7-deazaguanine synthase OS=Neisseria iguanae; OX = 90242 GN=queE PE=3 SV=1
MVVEPVNPQYRIVEIFESLQGEGYNTGMPAIFIRLGKCNLACSWCDTDYLRFELMSLQEILGRLKSYSARNVIITGGEPTIQLYLNTLLNALKAAGYYLCLETNGLHPAPPQIDFVATSPKACYAAKYAQSCIATADEVRIVADGDVLAFCEQMECKIHAKHFYLSPCEQNGIMNIYDTIRQIGLLNSRPNAPVHWQLSVQTHKWAGIE

SEQ ID NO: 31969 - protein, 212 aa, Neisseria lactamica
  REGION 1..212: note = tr|E4ZEY0|E4ZEY0_NEIL0 7-carboxy-7-deazaguanine synthase OS=Neisseria lactamica (strain 020-06) OX=489653; GN = queE PE=3 SV=1
MKKINVAPENPQYRIVEIFESLQGEGRNTGMPAVFVRLGKCNLACGWCDTDYLTFGMMSLSDILGRLKTYTVRNIIITGGEPTIQPHLDTLLDALKAEGYFLCLETNGLNPAPPQIDYVATSPKACYAAKYEKSCIETADEVRIVADGDVLAFCENMERKIRARHYYLSPCEQNGAMNIYDTIRQIGILNSRPDAPVHWQLSVQTHKWAGIE

SEQ ID NO: 31970 - protein, 212 aa, Neisseria lactamica
  REGION 1..212: note = tr|D0WB74|D0WB74_NEILA 7-carboxy-7-deazaguanine synthase OS=Neisseria lactamica ATCC 23970 OX=546265; GN = queE PE=3 SV=1
MKKINVAPENPQYRIVEIFESLQGEGRNTGMPAVFVRLGKCNLACGWCDTDYLTFGMMSLSDILGRLKAYAARNIIITGGEPTIQPHLDTLLDALKAEGYFLCLETNGLNPAPPQIDYVATSPKACYAAKYETNCIAEADEVRIVADGDVLAFCENMERKIRARHYYLSPCEQNGAMNIYDTIRQIGILNSRPDAPVHWQLSVQTHKWAGIE

SEQ ID NO: 31971 - protein, 212 aa, Neisseria macacae
  REGION 1..212: note = tr|F9EUV2|F9EUV2_9NEIS 7-carboxy-7-deazaguanine synthase OS=Neisseria macacae ATCC 33926 OX=997348 GN=queE; PE = 3 SV=1
MKKISVAPENPQYRIVEIFESLQGEGWNTGMPAVFVRLGKCNLACGWCDTDYLKFGMMSLSDILGRLKTYTARNIIITGGEPTIQPHLDTLLDALKAEGYFLCIETNGLKPAPPQIDYVATSPKACYAAKYETNCIAEANEVRIVADGDVVAFCENMERKIRARHYYLSPCEQNGVMNIYDTIRQIGLLNSRPDAPVHWQLSVQTHKWAGIE

SEQ ID NO: 31972 - protein, 212 aa, Neisseria meningitidis
  REGION 1..212: note = sp|Q9K0Q5|QUEE_NEIMB 7-carboxy-7-deazaguanine synthase OS=Neisseria meningitidis serogroup B (strain MC58) OX=122586 GN=queE PE=3 SV=1
MKKINVAPENPQYRIVEIFESLQGEGWNTGMPAVFVRLGKCNLACGWCDTDYLTFGMMGLSDILGRLKTYAARNIIITGGEPTIQPHLDMLLDTLKAEGYFLCLETNGLNPAPPQIDYVATSPKACYAAKYENSCIETADEVRIVADGDVLAFCENMERKIRAHHYYLSPCEQDGAMNIYDTIRQIGILNSRPDASVHWQLSVQTHKWAGIE

SEQ ID NO: 31973 - protein, 212 aa, Neisseria meningitidis
  REGION 1..212: note = tr|A0A121PH74|A0A121PH74_NEIME 7-carboxy-7-deazaguanine synthase OS=Neisseria meningitidis OX=487 GN=queE PE=3 SV=1
MKKINVAPENPQYRIVEIFESLQGEGWNTGMPAVFVRLGKCNLACGWCDTDYLTFGMMSLSDILGCLKTYAARNIIITGGEPTIQPHLDMLLDTLKAEGYFLCLETNGLNPAPPQIDYVATSPKACYAAKYEKSCIETADEVRIVADGDVVAFCENMERKIRAHHYYLSPCEQDGAMNIYDTIRQIGILNSRPDASVHWQLSVQTHKWAGIE

SEQ ID NO: 31974 - protein, 212 aa, Neisseria mucosa
  REGION 1..212: note = tr|A0A2R4AW95|A0A2R4AW95_NEIMU 7-carboxy-7-deazaguanine synthase OS=Neisseria mucosa; OX = 488 GN=queE PE=3 SV=1
MKKISVSPENPQYRIVEIFESLQGEGWNTGMPAVFVRLGKCNLACGWCDTDYLKFGMMSLSDILGRLKTYTARNIIITGGEPTIQPHLDTLLDALKAEGYFLCIETNGLKPAPPQIDYVATSPKACYAAKYETNCIAEANEVRIVADGDVVVFCENMERKIRARHYYLSPCEQNGVMNIYDTIRQIGLLNSRPDAPVHWQLSVQTHKWAGIE

SEQ ID NO: 31975 - protein, 212 aa, Neisseria mucosa
  REGION 1..212: note = tr|D2ZU72|D2ZU72_NEIMU 7-carboxy-7-deazaguanine synthase OS=Neisseria mucosa ATCC 25996 OX=546266 GN=queE; PE = 3 SV=1
MKKISVAPENPQYRIVEIFESLQGEGWNTGMPAVFVRLGKCNLACGWCDTDYLKFGMMSLSDILGRLKTYTARNIIITGGEPTIQPHLDTLLDALKAEGYFLCIETNGLKPAPPQIDYVATSPKACYAAKYETNCIAEADEVRIVADGDVVAFCENMERKIRARYYYLSPCEQNGAMNIYDTIHQIGILNSRPDAPVHWQLSVQTHKWAGIE

SEQ ID NO: 31976 - protein, 211 aa, Neisseria perflava
  REGION 1..211: note = tr|A0A2I1QWJ3|A0A2I1QWJ3_NEIPE 7-carboxy-7-deazaguanine synthase OS=Neisseria perflava; OX = 33053 GN=queE PE=3 SV=1
MTIQITPNNPQYRIVEIFESLQGEGWNTGMPAVFIRLGKCNLACSWCDTDYLKFGMMSLSDILGRLKTYTARNIIITGGEPTIQPHLDTLLNTLKAEGYFLCIETNGLNPAPPQIDYVATSPKACYAAKYEKSCIEKADEVRIVADGDVITFCQEMERKIRAQHYYLSPCEQDGVMNIYDTIRQIGVLNSRSDAPVHWQLSVQTHKWAGIE

SEQ ID NO: 31977 - protein, 212 aa, Neisseria polysaccharea
  REGION 1..212: note = tr|E2PI41|E2PI41_NEIPO 7-carboxy-7-deazaguanine synthase OS=Neisseria polysaccharea ATCC 43768 OX=546267; GN = queE PE=3 SV=1
MKKISVAPENPQYRIVEIFESLQGEGWNTGMPAVFVRLGKCNLACGWCDTDYLTFSMMSLSDILGRLKAYAARNIIITGGEPTIQPHLDALLDTLKAEGYFLCLETNGLNPAPPQIDYVATSPKAYYAAKYEKSCIETADEVRIVADGDVVGFCENMERKIRARHYYLSPCEQDGAMNIYDTIRQIGILNSRPDAPVHWQLSVQTHKWAGIE

SEQ ID NO: 31978 - protein, 211 aa, Neisseria shayeganii
  REGION 1..211: note = tr|G4CF30|G4CF30_9NEIS 7-carboxy-7-deazaguanine synthase OS=Neisseria shayeganii 871 OX=1032488 GN=queE; PE = 3 SV=1
MKFPLLPDNPSYRIVEIFESLQGEGYHTGMPAVFIRLGKCNLACAWCDTDYLNFRPMSLHDILNTVAAYASRNIIITGGEPTIQPHLNQLLDALKARGYRLHLESNGLQAIPEQIDYAAVSPKAAYAEKYAAAGTKRADEVRIVADGDVLAFCSTIEQNIQAERYYLSPCERDGEMNIHHTIRQLGQLNARGSAFPHWQLSVQTHKWAGIE

SEQ ID NO: 31979 - protein, 212 aa, Neisseria sicca
  REGION 1..212: note = tr|C6M3W6|C6M3W6_NEISI 7-carboxy-7-deazaguanine synthase OS=Neisseria sicca ATCC 29256 OX=547045 GN=queE; PE = 3 SV=1
MKKISVAPENPQYRIVEIFESLQGEGWNTGMPAVFVRLGKCNLACGWCDTDYLKFSMMSLSDILGRLKTYTVRNIIITGGEPTIQPHLDTLLDALKAEGYFLCIETNGLKPVPPQIDYVATSPKACYAAKYEKSCIETADEVRIVADGDVVAFCENMERKIRARHYYLSPCEQNGVMNIYDTIRQIGILNSRPDAPVHWQLSVQTHKWAGIE

SEQ ID NO: 31980 - protein, 212 aa, Neisseria sicca
  REGION 1..212: note = tr|I2NS68|I2NS68_NEISI 7-carboxy-7-deazaguanine synthase OS=Neisseria sicca VK64 OX=1095748 GN=queE PE=3; SV = 1
MKKISVAPENPQYRIVEIFESLQGEGWNTGMPAVFVRLGKCNLACGWCDTDYLKFGMMSLSDILGRLKTYTARNIIITGGEPTIQPHLDTLLDALKAEGYFLCIETNGLKPAPPQIDYVATSPKACYAAKYETNCIAEANEVRIVADGDVVAFCQNMERKIRARHYYLSPCEQNGVMNIYDTIRQIGILNSRPDAPVHWQLSVQTHKWAGIE

SEQ ID NO: 31981 - protein, 212 aa, Neisseria sp.
  REGION 1..212: note = tr|A0A1F1SHD9|A0A1F1SHD9_9NEIS 7-carboxy-7-deazaguanine synthase OS=Neisseria sp. HMSC31F04 OX=1581075 GN=queE PE=3 SV=1
MKKISVAPENPQYRIVEIFESLQGEGWNTGMPAVFVRLGKCNLACGWCDTDYLKFGMMGLSDILGRLKTYTARNIIITGGEPTIQPHLDTLLDALKAEGYFLCIETNGLKPAPPQIDYVATSPKACYAAKYETNCIAEADEVRIVADGDVVAFCQNMERKIRASHYYLSPCEQDGVMNIYDTIRQIGILNSRPDAPVHWQLSVQTHKWAGIE

SEQ ID NO: 31982 - protein, 211 aa, Neisseria sp.
  REGION 1..211: note = tr|A0A2H9X086|A0A2H9X086_9NEIS 7-carboxy-7-deazaguanine synthase OS=Neisseria sp. N95_16; OX = 2024408 GN=queE PE=3 SV=1
MMVPIEPANPQYRIVEIFESLQGEGYNTGMPAIFIRLGKCNLACSWCDTDYLRFEMMSLHEILGRLKNYRARNIIITGGEPTIQPHLDTLLNTLKAAGYYLCMETNGLNPTPIQIDFVATSPKACYADKYAKSCIEKADEVRIVADGDVLAFCEQMERKIQAEHFYLSPCERNGVMNIYDTIRQIGLLNSRAHTTVHWQLSVQTHKWAGIE

SEQ ID NO: 31983 - protein, 211 aa, Neisseria subflava
  REGION 1..211: note = tr|A0A4D7WYD9|A0A4D7WYD9_NEISU 7-carboxy-7-deazaguanine synthase OS=Neisseria subflava; OX = 28449 GN=queE PE=3 SV=1
MTIQITPNNPQYRIVEIFESLQGEGWNTGMPAVFIRLGKCNLACSWCDTDYLKFGMMSLSDILGRLKTYTARNIIITGGEPTIQPHLDTLLNALKAEGYFLCIETNGLNTAPPQIDYVATSPKACYAAKYESSCIEKADEVRIVADGDVVAFCQEMERKIRAQHYYLSPCEQDGVMNIYDTIRQIGVLNSRSDSPVHWQLSVQTHKWAGIE

SEQ ID NO: 31984 - protein, 211 aa, Neisseria subflava
  REGION 1..211: note = tr|D3A6H6|D3A6H6_NEISU 7-carboxy-7-deazaguanine synthase OS=Neisseria subflava NJ9703 OX=546268 GN=queE; PE = 3 SV=1
MTIHITPNNPQYRIVEIFESLQGEGWNTGMPAVFIRLGKCNLACSWCDTDYLKFGMMSLSDILGRLKTYTARNIIITGGEPTIQPHLDTLLNALKAEGYFLCIETNGLNPAPPQIDYVATSPKACYAAKYESGCIEKADEVRIVADGDVIAFCQEMERKIRAQHYYLSPCEQDGVMNIYDTIRQIGVLNSRPDAPVHWQLSVQTHKWAGIE

SEQ ID NO: 31985 - protein, 210 aa, Neisseria wadsworthii
  REGION 1..210: note = tr|G4CSP6|G4CSP6_9NEIS 7-carboxy-7-deazaguanine synthase OS=Neisseria wadsworthii 9715 OX=1030841 GN=queE; PE = 3 SV=1
MIKNHADNPQYRIVEIFESLQGEGYNTGMPAVFIRLGKCNLACPWCDTDYLTFKPMTLSEIHACLKSYTARNIIITGGEPTIQPNLAALLDSLKAEGYRLCIETNGLNPAPPQIDYVATSPKACYAEKYEKQCIATADEVRIVADGDVTAFCERMEHKIRAKHYYLSPCEKTGVMNIYDTIRQIGELNSRPNAPVHWQLSVQTHKWAGIE

SEQ ID NO: 31986 - protein, 210 aa, Neisseria weaveri
  REGION 1..210: note = tr|A0A3S4Z353|A0A3S4Z353_9NEIS 7-carboxy-7-deazaguanine synthase OS=Neisseria weaveri; OX = 28091 GN=queE PE=3 SV=1
MTEIRPENPQYRIVEIFESLQGEGYNTGMPAVFIRLGKCNLACSWCDTDYLTFNMMSLQDILGRLKSYTARNIIITGGEPTIQPHLDILLDTLKAEGYTLCIETNGLNPAPPQIDFVTASPKACYAEKYEKQCIATADEVRIVADGDVLAFCERMEHKIRAKHYYLSPCEQNGEMNIYDTIRQIGLLNSRSDAPVHWQLSVQTHKWAGIE

SEQ ID NO: 31987 - protein, 210 aa, unidentified
  source 1..210: note = Neisseria zalophi
  REGION 1..210: note = tr|A0A5J6PZ43|A0A5J6PZ43_9NEIS 7-carboxy-7-deazaguanine synthase QueE OS=Neisseria zalophi OX=640030 GN=D0T92_07750 PE=4 SV=1
MTEIFPHNPQYRIVEIFESLQGEGYNTGMPAIFIRLGKCNLACPWCDTDYLTFTMMSLSDILGRLKSYTARNIIITGGEPTIQPHLDTLLNALKAEGYTLWMETNGLNPAPAQIDFVATSPKARYADKYQKQCIEKADEVRIVVDGDILAFCEQMEKKIAAKHYFLSPCEENGIMNIHETIRQLGILNSRPHAPVHWQLSIQTHKWAGIE

SEQ ID NO: 31988 - protein, 210 aa, Neisseria zoodegmatis
  REGION 1..210: note = tr|A0A1X3CPM3|A0A1X3CPM3_9NEIS 7-carboxy-7-deazaguanine synthase OS=Neisseria zoodegmatis; OX = 326523 GN=queE PE=3 SV=1
MTEIRPENPQYRIVEIFESLQGEGYNTGMPAVFIRLGKCNLACSWCDTDYLTFNMMSLQDILGRLKNHTARNIIITGGEPTIQPHLDILLDALKAEGYTLCIETNGLNPAPPQIDFVATSPKACYAEKYEKQCIATADEVRIVADGDVLAFCERMEQKIRAKHYYLSPCEQNGEMNIYDTIRQIGLLNSRPDALAHWQLSVQTHKWAGIE

SEQ ID NO: 31989 - protein, 210 aa, Neisseria zoodegmatis
  REGION 1..210: note = tr|A0A378WTM1|A0A378WTM1_9NEIS 7-carboxy-7-deazaguanine synthase OS=Neisseria zoodegmatis; OX = 326523 GN=queE PE=3 SV=1
MTEIRPENPQYRIVEIFESLQGEGYNTGMPAVFIRLGKCNLACSWCDTDYLTFNTMSLQDILGRLKNHTARNIIITGGEPTIQPHLDILLDTLKAEGYTLCIETNGLNPAPPQIDFVATSPKACYAEKYEKQCIATADEVRIVADGDVLAFCERMEQKIRAKHYYLSPCEQNGEMNIYDTIRQIGLLNSRPDAPVHWQLSVQTHKWAGIE

SEQ ID NO: 31990 - protein, 221 aa, unidentified
  source 1..221: note = Neisseriaceae bacterium
  REGION 1..221: note = tr|A0A2I7N312|A0A2I7N312_9NEIS 7-carboxy-7-deazaguanine synthase OS=Neisseriaceae bacterium DSM 100970 OX=2052837 GN=queE PE=3 SV=1
MQYPINEIFYTLQGEASFVGQPSVFIRLQGCNVGCAFCDTKHTWELDTANQVKTIQVIEKTGDRLGWAYFSLEEILAEIARYPACRHIVFTGGEPAMYDLRELISILEDKGYSTQIETSGTEILRVSEKTWVTLSPKIDMPGNKTILAENVARANEIKMPVGKIQDIEKLKRLLQQHAVTNKLIWLQPLSCKENPTKLCIEAALANNWRLSAQVHKYINIR

SEQ ID NO: 31991 - protein, 222 aa, unidentified
  source 1..222: note = Neisseriaceae bacterium
  REGION 1..222: note = tr|A0A3S0DJ21|A0A3S0DJ21_9NEIS 7-carboxy-7-deazaguanine synthase OS=Neisseriaceae bacterium OX=2014784 GN=queE PE=3 SV=1
MQYPINEIFYSLQGEANFAGLPSVFIRMQGCAVGCAFCDTKHTWELDPTTQQTPQAVVGKIFEHSAKWAYFTAEDIWREIKKYPACRHIVFTGGEPAMYDLRSITEDLHAQGYTTQIETSGTEPLRLSDKTWVTLSPKIDMPGHKQILAENVARANEIKMPIGKMADIIKLKQLLVQYTINTQLIWLQPLSCKETPTKLCIEQALANNWRVSTQIHKFINIH

SEQ ID NO: 31992 - protein, 221 aa, unidentified
  source 1..221: note = Neisseriales bacterium
  REGION 1..221: note = tr|A0A5C8AXI8|A0A5C8AXI8_9NEIS 7-carboxy-7-deazaguanine synthase OS=Neisseriales bacterium OX=2053582 GN=queE PE=3 SV=1
MQYPINEIFYTLQGEASFVGQPSVFIRLQGCNVGCAFCDTKHTWELDTANQVKTIQVIEKTGDRLDWAYFSLEEILAEIARYPACRHIVFTGGEPAMYDLRELISILEDKGYSTQIETSGTEILRVSEKTWVTLSPKIDMPGNKIVLAENVARANEIKMPVGKAQDIEKLKQLLQQHAVTNKLIWLQPLSCKENPTKLCIEAALANNWRLSAQVHKYINIR

SEQ ID NO: 31993 - protein, 213 aa, Neoasaia chiangmaiensis
  REGION 1..213: note = tr|A0A1U9KMC6|A0A1U9KMC6_9PROT 7-carboxy-7-deazaguanine synthase OS=Neoasaia chiangmaiensis OX=320497 GN=queE PE=3 SV=1
MSYAVKEMFATLQGEGAQTGRASVFCRFAGCNLWSGREQDRAQAACTFCDTDFVGVDGEGGGRFSCAEALADALETTWRTHAGDAPGRYVVFTGGEPLLQLDAALIDAAHARGFEIAVETNGTIAAPVGIDWICVSPKPNAPLVQTHGHELKLVYPQTQLSPEMFGDLAFDNFWLQPMDGAARVANTSAAVAYCLAHPQWRLSLQTHKLIGIP

SEQ ID NO: 31994 - protein, 215 aa, Neochlamydia sp.
  REGION 1..215: note = tr|A0A0C1HJD6|A0A0C1HJD6_9BACT 7-carboxy-7-deazaguanine synthase OS=Neochlamydia sp. EPS4; OX = 1478175 GN=queE PE=3 SV=1
MNSLNIIEIFRSIQGETSLAGLPTTFIRLAACNLRCSWCDTTYSFGRGVSYTLENIFSKVASFGCQYVCVTGGEPLLQANVIPLMEQLCQAGYIVSLETGGSLSTQKVNANVRIILDIKCPGSQMSNKNLWDNLNHLRFHDQIKFVISNREDYDYAKMVCSQYQLFKKVSEILFSPVFEVLPSQTLVNWILEDQLAVRLNLQIHKFIWPSHTRGV

SEQ ID NO: 31995 - protein, 215 aa, Neochlamydia sp.
  REGION 1..215: note = tr|A0A3T1C8H7|A0A3T1C8H7_9BACT 7-carboxy-7-deazaguanine synthase OS=Neochlamydia sp. S13; OX = 1353976 GN=queE PE=3 SV=1
MNSLNIIEIFRSIQGETSLAGLPTTFIRLAACNLRCSWCDTTYSFGRGASYTLENIFSKVASFGCQYVCVTGGEPLLQANVIPLMEQLCQAGYIVSLETGGSLSTQKVNANVRIILDIKCPGSQMSNKNLWDNLNHLRFHDQIKFVISNREDYDYAKMVCSQYQLFKKVSEILFSPVFEVLPSHTLVNWILEDQLAVRLNLQIHKFIWPPHTRGV

SEQ ID NO: 31996 - protein, 238 aa, Neokomagataea sp.
  REGION 1..238: note = tr|A0A506UKJ2|A0A506UKJ2_9PROT 7-carboxy-7-deazaguanine synthase OS=Neokomagataea sp. Jb2; OX = 2558904 GN=queE PE=3 SV=1
MAYAVKEVFYTLQGEGAQTGRAAVFCRFAGCNLWSGRESDRGRAECTFCDTDFIGTNGEGGGKFPTPEALARHILSCWQAGCTQPEGARPYVVFTGGEPLLQLDSPLLQAVRALGFETAVETNGTLPAPPELDWICVSPKTDAPLVQSRGDELKLVYPQAHLRPEMFAGLDFRHFWLQPLDGSALPEPQPASSQAPPLDHDGHLASSRADATAQAVRYCQAHPRWRLSLQTHKLIGIP

SEQ ID NO: 31997 - protein, 213 aa, Neokomagataea tanensis
  REGION 1..213: note = tr|A0A4Y6V6T8|A0A4Y6V6T8_9PROT 7-carboxy-7-deazaguanine synthase OS=Neokomagataea tanensis OX=661191 GN=queE PE=3 SV=1
MAYTVKEMFLTLQGEGAQTGRAAVFCRFAGCNLWSGREVDRATATCRFCDTDFIGTNGDGGGKFPTAQALAETITHCWSAEADTSGQRYVVFTGGEPLLQLDNSLIDAMHRAGFEIAVETNGTLPAPPGVDWICVSPKADAPVVQQSGAELKLVFPQTELTPQQFESFDFKHFWLQPMDGPDRIANTQAAVAYCRAHPKWRLSLQTHKMIDIP

SEQ ID NO: 31998 - protein, 210 aa, unidentified
  source 1..210: note = Neorhizobium galegae
  REGION 1..210: note = tr|A0A0T7G528|A0A0T7G528_RHIGA 7-carboxy-7-deazaguanine synthase OS=Neorhizobium galegae bv. officinalis OX=323656 GN=queE PE=3 SV=1
MGYAVKEMFKTLQGEGAQAGRAAVFCRFAGCNLWSGREEDRDQAVCQFCDTDFVGTDGIGGAKFKDAATLAVAIAATWGDTPHRRYVVFTGGEPLLQLDDDLVAAVHQQGFEIAIETNGTLEPPAGVDWICVSPKAGAPLKLREGSELKLVYPQPGLLPEALPDLHFEHYFLQPMDGPRRTENTVAVTEYCMEHPKWRLSLQTHKMIGIP

SEQ ID NO: 31999 - protein, 248 aa, unidentified
  source 1..248: note = Neorhizobium sp.
  REGION 1..248: note = tr|A0A4R3A6Z7|A0A4R3A6Z7_9RHIZ 7-carboxy-7-deazaguanine synthase OS=Neorhizobium sp. JUb45 OX=2485113 GN=queE PE=3 SV=1
MSAASEKIRISEIFGPTIQGEGMLIGQPTVFVRTGGCDYRCSWCDTLHAVDSEYRHNWLAMEVETIWGQVRHLSGDVPLTVSLSGGNPAIQPLGSLIRRGKRDGYRFAIETQGSVARDWFAELDFLVLSPKPPSSCMETDWDVLADCLRAATGSPAGGPRIGLKFVVFDDADYAFAKDAAARFPDLPVYLQPGNHTPPPPDDDDARIDLDGIMDRMLWLVDKVTDDRWFSATVLPQLHVLLWGNKRGV

SEQ ID NO: 32000 - protein, 244 aa, unidentified
  source 1..244: note = Neorhizobium sp.
  REGION 1..244: note = tr|A0A386E247|A0A386E247_9RHIZ 7-carboxy-7-deazaguanine synthase OS=Neorhizobium sp. NCHU2750 OX=1825976 GN=queE PE=3 SV=1
MTSAAEIIRVSEIFGPTIQGEGMLIGQPTVFVRTGGCDYRCSWCDTLHAVDSDYRHDWKPMDAGTIWDEVRELSGGRPLMVSLSGGNPAIQPMKPLIRRGKNDGYRFAIETQGSIARDWFADLDVLVLSPKPPSSGMETDWDKLADCLAAAGKAPRIALKFVIFDDADYDFARETSGRYPELPVYLQPGNHTPPPPDDDDARIDLDRIMDRMLWLVDKVTADRWFSATVLPQLHVLLWGNKRGV

SEQ ID NO: 32001 - protein, 265 aa, unidentified
  source 1..265: note = Neosynechococcus sphagnicola
  REGION 1..265: note = tr|A0A098TPA2|A0A098TPA2_9CYAN 7-carboxy-7-deazaguanine synthase OS=Neosynechococcus sphagnicola sy1 OX=1497020 GN=queE PE=3 SV=1
MSTSSTANSRTARLIEVFSAIQGEGQNVGTRQIFIRFAQCDLRCHFCDSVHTWEVPESCRIERSPGERDFETHVNPVTQEHLLQWVQRQHQPGLHDSISLTGGEPLLHASFLQSFLPLVRQQTSLPVYLETGGHRPQQLRQILTHLDSIGMDLKLPSVSGETWWQAHRQCLQAAHSAGVEVFVKIIIAAQTDLTDLLQAAQLVAAVSPEIPVFLQPVTPLEQLHPKQVPLAVPRPDQVLAWQSLLKQTLQWVRVIPQTHKMIAQL

SEQ ID NO: 32002 - protein, 210 aa, Neptuniibacter sp.
  REGION 1..210: note = tr|A0A136HHG8|A0A136HHG8_9GAMM 7-carboxy-7-deazaguanine synthase OS=Neptuniibacter sp. Phe_28 OX=1795871 GN=queE PE=3 SV=1
MYSVKEIFYSLQGEGAQSGRASIFCRFTGCNLWSGREQDRATAVCSFCDTDFIGTDGQNGGKFQTASDLCAFLRTFWPSDSNTPPYIIFTGGEPALQLDQHLVDECHQHGFIIAIETNGTKPLPTDIDWICVSPKADAKIIITSGDELKLVYPQALAQPEQFEAMDFTEFYLQPLDSPARPMHTKAVVDYCLQHPRWKLSLQNHKVLGID

SEQ ID NO: 32003 - protein, 209 aa, Neptunomonas antarctica
  REGION 1..209: note = tr|A0A1N7KLC3|A0A1N7KLC3_9GAMM 7-carboxy-7-deazaguanine synthase OS=Neptunomonas antarctica OX=619304 GN=queE PE=3 SV=1
MYSVKEMFYTLQGEGAHAGRPAVFCRFTGCNLWSGREKDRATAICNFCDTDFVGTDGQNGDKFVTAESLAMTIQSFWPTPEGKPYVVFTGGEPALQLDQALVTAMHLVGFEIAIETNGTKPLPAGIDWICVSPKASAEVIIQTGHELKLVYPQLDAMPEKFTTLNFDHFYLQPMDNQDQNNNTQQVIEYCMRHPQWKMSLQTHKIIGID

SEQ ID NO: 32004 - protein, 213 aa, unidentified
  source 1..213: note = Neptunomonas qingdaonensis
  REGION 1..213: note = tr|A0A1I2PZD0|A0A1I2PZD0_9GAMM 7-carboxy-7-deazaguanine synthase OS=Neptunomonas qingdaonensis OX=1045558 GN=queE PE=3 SV=1
MYSVKEMFYTLQGEGAHAGRPAVFCRFTGCNLWSGREQDRASAICNFCDTDFIGTDGQNGGKFATAESLANKIKSFWATPEGTPYVVFTGGEPALQLDKALVMAMHAVGFEIAIETNGTKPLPRNIDWICVSPKSTTEVIIQKGNELKLVYPQTDAMPEKFNALQFDHFYLQPMDDLIDKPGQTNNTQDTIAYCLRHPQWKLSLQTHKIIGID

SEQ ID NO: 32005 - protein, 209 aa, Neptunomonas sp.
  REGION 1..209: note = tr|A0A437Q8E0|A0A437Q8E0_9GAMM 7-carboxy-7-deazaguanine synthase OS=Neptunomonas sp. HPM-16 OX=1815562 GN=queE PE=3 SV=1
MYSVKEMFYTLQGEGAHAGRPAVFCRFTGCNLWSGREQDRAKAVCDFCDTDFVGTDGQNGGKFATAQDLAQRIASFWPTPEGIPFVVFTGGEPALQLDTPLIDAVHKVGFEVAIETNGTKPLPEGIDWICVSPKGSSDVIITQGHELKLVYPQAAAMPDRFAGADFEHFYLQPIDSAAEPNSTQQAIKYCMQHPRWKLSLQTHKIIGID

SEQ ID NO: 32006 - protein, 212 aa, unidentified; identical to SEQ ID NO: 27172
  source 1..212: note = Nevskiales bacterium
  REGION 1..212: note = tr|A0A2F0A0X7|A0A2F0A0X7_9GAMM 7-carboxy-7-deazaguanine synthase OS=Nevskiales bacterium; OX = 2026766 GN=queE PE=3 SV=1

SEQ ID NO: 32007 - protein, 193 aa, unidentified
  source 1..193: note = Niabella drilacis
  REGION 1..193: note = tr|A0A1G6KYT8|A0A1G6KYT8_9BACT 7-carboxy-7-deazaguanine synthase OS=Niabella drilacis; OX = 1285928 GN=queE PE=3 SV=1
MEHFYTIQGEGYHQGKAAYFIRLGGCDVGCTWCDVKESWPFDAHPLWPVADIVEAVKKTPARIAVITGGEPLLHPLDGLTTALRENGIATNIETSGSAPLSGEWDWICLSPKKFKQPLPAILPGAHELKIIVYNKTDFAWGEQFAAQVSPGCKLYLQPEWSKAAQMTPLIIDYIKDHPQWELSLQIHKYINVP

SEQ ID NO: 32008 - protein, 193 aa, unidentified
  source 1..193: note = Niabella ginsenosidivorans
  REGION 1..193: note = tr|A0A1A9I9F3|A0A1A9I9F3_9BACT 7-carboxy-7-deazaguanine synthase OS=Niabella ginsenosidivorans OX=1176587 GN=queE PE=3 SV=1
MEHFYTIQGEGFHQGKAAYFIRLGGCDVGCTWCDVKESWPFDAHPYYPIESLITEVKKTNTKMVVVTGGEPLLHNLDTLTNALHTEGFHTNIETSGSSPLSGSWDWICLSPKKFKRPLPEVLLKANELKVIVYNKTDFAWGEQFAAQVTPNCKLYLQPEWSKAAAMTPLIVEYIKQHPEWELSLQLHKYINVP

SEQ ID NO: 32009 - protein, 193 aa, Niabella soli
  REGION 1..193: note = tr|W0EXJ1|W0EXJ1_9BACT 7-carboxy-7-deazaguanine synthase OS=Niabella soli DSM 19437 OX=929713 GN=queE PE=3; SV = 1
MEHFYTIQGEGFHQGRAAYFVRLGGCDVGCTWCDVKDSWSFDAHPLLATEAIVAAVKNAKATMAVITGGEPLLHDLNPLTAALRENGIETNIETSGSAPLTGTWDWICLSPKKFKQPRAEILPKANELKVIVYNKTDFAWGEQFAAQVAPHCKLYLQPEWSKADAMTPLIVDYIKQNPQWELSLQLHKYINVP

SEQ ID NO: 32010 - protein, 215 aa, Niastella koreensis
  REGION 1..215: note = tr|G8TLJ8|G8TLJ8_NIAKG 7-carboxy-7-deazaguanine synthase OS=Niastella koreensis (strain DSM 17620 / KACC 11465 / GR20-10) OX=700598 GN=queE PE=3 SV=1
MTVFITNFALMTNVSIAVQYPVMEAFYTLQGEGYHQGKAAYFVRLGGCDVGCVWCDVKDSWEAGKHPLQSIEEIVTGASAFPGRMAIVTGGEPLMHNLDALTDALHAAGFATNIETSGAWPVSGSWDWICLSPKKFKAPLPEILPLANELKVVIFNKSDFEWAEKYAALVSPACKLFLQPEWSKSAVVTPLIIDYIKDNPRWEFSLQLHKYIHVP

SEQ ID NO: 32011 - protein, 206 aa, Niastella populi
  REGION 1..206: note = tr|A0A1V9G7Z9|A0A1V9G7Z9_9BACT 7-carboxy-7-deazaguanine synthase OS=Niastella populi; OX = 550983 GN=queE PE=3 SV=1
MTKASIDTIQYPVMESFYTLQGEGYHQGRAAYFIRLGGCDVGCVWCDVKESWEASKHPLQTIETIVAGASAEPGRLAIITGGEPLMHNLDALTDALHAAGFQTNIETSGAWPVSGSWDWICLSPKKFKAPLPEILPLANELKVVVYNKSDFEWAEKYAALVSPACKLYLQPEWSKSAAVTPLIIDYIKANPRWEFSLQLHKYIHVP

SEQ ID NO: 32012 - protein, 206 aa, Niastella sp.
  REGION 1..206: note = tr|A0A4R2W051|A0A4R2W051_9BACT 7-carboxy-7-deazaguanine synthase OS=Niastella sp. CF465; OX = 2135684 GN=queE PE=3 SV=1
MTKTTTDIIQYPVMEAFYTLQGEGYHQGKAAYFVRLGGCDVGCVWCDVKDSWEAGKHPLHTIEEIVAGASAEPGRLAIITGGEPLMHNLDALTDALHEAGFETNIETSGAWPVSGSWDWICLSPKKFKAPLPEILPLANELKVVVFNKSDFEWAEKYAALVSPGCKLYLQPEWSKVATVTPLIIDYIKANPRWEFSLQLHKYINVP

SEQ ID NO: 32013 - protein, 193 aa, Niastella sp.
  REGION 1..193: note = tr|A0A1E4EDD5|A0A1E4EDD5_9BACT 7-carboxy-7-deazaguanine synthase OS=Niastella sp. SCN 39-18 OX=1660119 GN=queE PE=3 SV=1
MEHFYTLQGEGFHQGKAAYFIRLGGCDVGCTWCDVKESWDALAHPEMEIRDLLHAVTKTKARMVVITGGEPLMHNLDSLCEALMEAGYETNIETSGSSPLSGAWNWICLSPKKFKAPLPQVIAQAHELKIIIYNKSDFAWAEQYAAQVPSHCKLYLQPEWSKANAITPLIVDYIKQHPQWELSLQIHKYIHVP

SEQ ID NO: 32014 - protein, 205 aa, unidentified
  source 1..205: note = Niastella vici
  REGION 1..205: note = tr|A0A1V9FYQ6|A0A1V9FYQ6_9BACT 7-carboxy-7-deazaguanine synthase OS=Niastella vici; OX = 1703345 GN=queE PE=3 SV=1
MTKASTDIQYPVMESFYTLQGEGYHQGKAAYFIRLGGCDVGCVWCDVKESWEASKHPLQSIEEIVAGASANPGRMAIVTGGEPLMHNLDALTQALHEAGFQTNIETSGAWPVSGSWDWICLSPKKFKVPLPEILPLANELKVVVYNKTDFMWAEKYAALVSPSCKLFLQPEWSKSGIVTPLIIDYIKDNPQWEFSLQLHKYIHVP

SEQ ID NO: 32015 - protein, 205 aa, Niastella yeongjuensis
  REGION 1..205: note = tr|A0A1V9FC44|A0A1V9FC44_9BACT 7-carboxy-7-deazaguanine synthase OS=Niastella yeongjuensis OX=354355 GN=queE PE=3 SV=1
MVSTQPTIQYPVMEAFYTLQGEGYHQGKAAYFVRLGGCDVGCVWCDVKDSWDAGKHPLQSIDEIVTGASAFPGRMAIVTGGEPLMHNLDALTDALHAAGFATNIETSGAWPVSGSWDWICLSPKKFKAPLPEILPMANELKVVIYNKSDFEWAEKYAALVSPSCKLFLQPEWSKSAMVTPLIIDYIKENPRWEFSLQLHKYIHVP

SEQ ID NO: 32016 - protein, 230 aa, unidentified
  source 1..230: note = Nibricoccus aquaticus
  REGION 1..230: note = tr|A0A290QC01|A0A290QC01_9BACT 7-carboxy-7-deazaguanine synthase OS=Nibricoccus aquaticus; OX = 2576891 GN=queE PE=3 SV=1
MLISEIFYSLQGEGVLTGVPSVFVRAAGCNLRCNWCDTPYASWKPEGETRSVAEIVTEISRHPAKHVVLTGGEPMIAKEIRELAGEVKKLGYHITIETAGTVAPEGIACDLASISPKLKNSAPDERLPDAWRERHEATRWQPEVVRAWIDAGDYQLKFVVSSAADVQEIEEMLAELGRDIPRAKVLLMPEGTSMEALRARAGWLGELCKERGYRYAHRLHVELYGNKRGT

SEQ ID NO: 32017 - protein, 208 aa, Nicoletella semolina
  REGION 1..208: note = tr|A0A4R2N7N2|A0A4R2N7N2_9PAST 7-carboxy-7-deazaguanine synthase OS=Nicoletella semolina; OX = 271160 GN=queE PE=3 SV=1
MNENILQTPYRIVEIFETLQGEGFNTGMPSIFIRFGKCNLACDWCDTNYHQYENKTLGDILATIRQFSAKNIIITGGEPTIQPHLERLLDRLKNEGYFLAIETNGLKPVPLQIDYIATSPKRLYQKNYLKHHIPFAHEVRIVVDSDVQDFCEQIEQSIKADRYYLSPCEKEGEMNLLETITQLGKLNARLNKPRWQLSIQTHKIAGIE

SEQ ID NO: 32018 - protein, 211 aa, Nisaea sp.
  REGION 1..211: note = tr|A0A2D7Z475|A0A2D7Z475_9PROT 7-carboxy-7-deazaguanine synthase OS=Nisaea sp. OX=2024842; GN = queE PE=3 SV=1
  VARIANT 17: note = Xaa can be any naturally occurring amino acid
  VARIANT 45: note = Xaa can be any naturally occurring amino acid
  VARIANT 66: note = Xaa can be any naturally occurring amino acid
  VARIANT 68: note = Xaa can be any naturally occurring amino acid
  VARIANT 137: note = Xaa can be any naturally occurring amino acid
  VARIANT 176: note = Xaa can be any naturally occurring amino acid
  VARIANT 180: note = Xaa can be any naturally occurring amino acid
MTYSVKEVFYTLQGEGXNAGRPAVFCRFAGCNLWSGRESDRAQAXCQFCDTDFVGTDGPGGGKFAXAXALAAHVDGFWPAAPGGRKLVVCTGGEPALQIDEGLVDALHGHGFEIAIETNGTLALPAGIDWICVSPKXGNALNVTAGDELKVVFPQADIDLAGLAALPFTHHLLQPXDGPXRAAAEAATVRACMADPRWRLSVQTHKYLGFD

SEQ ID NO: 32019 - protein, 212 aa, Nisaea sp.; identical to SEQ ID NO: 28836
  REGION 1..212: note = tr|A0A2D7JP15|A0A2D7JP15_9PROT 7-carboxy-7-deazaguanine synthase OS=Nisaea sp. OX=2024842; GN = queE PE=3 SV=1

SEQ ID NO: 32020 - protein, 223 aa, unidentified
  source 1..223: note = Nissabacter sp.
  REGION 1..223: note = tr|A0A4V1FGQ2|A0A4V1FGQ2_9GAMM 7-carboxy-7-deazaguanine synthase OS=Nissabacter sp. SGAir0207 OX=2126321 GN=queE PE=3 SV=1
MQYPINEMFQTLQGEGYFTGVPAIFVRLQGCPVGCSWCDTKHTWDKLADREVALDEILVKTVETDAWGAATTEDLLAVIERNGYTARHIVITGGEPCIYDLGPLTLLLEKSGFTCQIETSGTHEVRCSPNTWVTVSPKVNMRGGMAVLDQALKRADEIKHPVARERDIEALDALLARLHDEKHRIVALQPISQKEEATRLCIETCIARNWRLSMQTHKYLNIA

SEQ ID NO: 32021 - protein, 253 aa, Nitratifractor salsuginis
  REGION 1..253: note = tr|E6X235|E6X235_NITSE 7-carboxy-7-deazaguanine synthase OS=Nitratifractor salsuginis (strain DSM 16511 / JCM 12458 / E9I37-1) OX=749222 GN=queE PE=3 SV=1
MFWLTEKFLSIQGEGRYAGVPSYFLRTGGCNLHCPGFGAEYDVEGEKRYGCDTWFSVDRAFAARWQAVESAAPLLEEMDRAFLEIGYLPHVVITGGEPLIYAADPAFYEVVEGLVERGVQITFETNGTVAPDFLRYGAYKACTFALSVKLSNSGEPKERRIHPEVLRTIASEAGEAFLKFTLDRSSIESGEALREIEEIRNYLPETEVYCMPMGESREVLRQNDWAVFAFCIRHNFHYSDRLHIRIFDTTVGV

SEQ ID NO: 32022 - protein, 249 aa, Nitratireductor aquibiodomus
  REGION 1..249: note = tr|I5BY81|I5BY81_9RHIZ 7-carboxy-7-deazaguanine synthase OS=Nitratireductor aquibiodomus RA22 OX=1189611; GN = queE PE=3 SV=1
MSTLRIAEIFGPTIQGEGALIGMPTVFVRAGGCDYRCRWCDSLHAVDNAYRHDWLPMQSRDVFERIKDLSGGAPVMVSLSGGNPAIQPFERLIDTGRAEGYRFALETQGSIARDWFAKLDMLVLSPKPPSSGETVDWERFDACIAAAGSASTVMKIVIFDEADYRWAKDAAERYPALPLYLQPGNHTPPPPTPEAEAEDAAIDMEGILERMRWLVDRTVADRWFSPHILPQLHVLLWATGAASERKRQQ

SEQ ID NO: 32023 - protein, 239 aa, Nitratireductor indicus
  REGION 1..239: note = tr|K2NYP5|K2NYP5_9RHIZ 7-carboxy-7-deazaguanine synthase OS=Nitratireductor indicus C115 OX=1231190; GN = queE PE=3 SV=1
MSTLRIAEIFGPTIQGEGALIGLPTVFVRAGGCDYRCRWCDSLHAVDNAHRHGWTPMETRHVWAKVRELSGEVPLTVSLSGGNPAIQPFRALIETGKPEGYRFAMETQGSVARDWFDLLDMLVLSPKPPSSGETVDWARFEECLEAAGPARCVLKIVVFDEEDYLWAKAAAARFPTLPLYLQPGNHTPPPPEALDAAIDMEGILQRMRWLVDRTAEDRWFAPHILPQLHVLLWGNRRGV

SEQ ID NO: 32024 - protein, 239 aa, Nitratireductor pacificus
  REGION 1..239: note = tr|K2MH05|K2MH05_9RHIZ 7-carboxy-7-deazaguanine synthase OS=Nitratireductor pacificus pht-3B OX=391937; GN = queE PE=3 SV=1
MSTLRIAEIFGPTIQGEGALIGLPTVFVRAGGCDFRCSWCDSLHAVDNAYRHDWIPMQTAEVWERVRALSGGQPLTVSLSGGNPAIQPFGLLVRTGRAQGYRFAMETQGSVPREWFAALDTLVLSPKPPSSGETMDWQRFEECIAAARDAAVVLKIVVFDDDDYAWARLVAQRYASLPLYLQPGNHTPPPPDAEDAAIDMDGVLDRMRWLVKRAAADRWFTPHILPQLHVLLWGNRRGV

SEQ ID NO: 32025 - protein, 239 aa, Nitratireductor sp.
  REGION 1..239: note = tr|A0A1H4LCY0|A0A1H4LCY0_9RHIZ 7-carboxy-7-deazaguanine synthase OS=Nitratireductor sp. ES.061 OX=1855335 GN=queE PE=3 SV=1
MSTLRIAEIFGPTIQGEGALIGMPTVFVRAGGCDYRCRWCDSLHAVDNTYRHDWLPMQSRDVFERIKDLSVGAPVMVSLSGGNPAIQPFEELIDTGRAEGYRFALETQGSIARDWFAKLDMLVLSPKPPSSGETVDWERFEVCIAAAGSASTVMKIVIFDEADYRWARHVANRYPALPLYLQPGNHTPPPPEAEDAAIDMEGILERMRWLVDRTVADRWFSPHILPQLHVLLWGNRRGV

SEQ ID NO: 32026 - protein, 252 aa, Nitratiruptor sp.
  REGION 1..252: note = tr|A6Q5C9|A6Q5C9_NITSB 7-carboxy-7-deazaguanine synthase OS=Nitratiruptor sp. (strain SB155-2) OX=387092; GN = queE PE=3 SV=1
MLYLVEDFYSIQGEGKFIGTPSVFFRFGGCNLKCPSFGEYFIQGRIVHGCDSIRAVNRELFQSKWKEIGTKDELIEILHSHVEYLDFKPHIVITGGEPLIYWNDPVFYGFLEYLVEEGYIVTIETNATIVIDFEKYPAYKDVIFAMAVKLANSGEKYEKRVNKKAIEAIAVNTGYSFFKFTLDRGSVQMRAYEEIVDIVGEYPEIEVFCMPLGDKIDELKKHDKAVAEFCMIHGFIYSDRLQVRLWNREKRR

SEQ ID NO: 32027 - protein, 253 aa, Nitratiruptor tergarcus
  REGION 1..253: note = tr|A0A1W1WQ40|A0A1W1WQ40_9PROT 7-carboxy-7-deazaguanine synthase OS=Nitratiruptor tergarcus DSM 16512 OX=1069081 GN=queE PE=3 SV=1
MMLYLVEHFYSIQGEGKFIGTPSIFFRFGGCNLKCPSFGEYFIKGTKIFGCDSVRAVNRKLFEEEWQEIQKSETLITILQEHLENLDFKPHIVLTGGEPLLYWRDETFYGFVEYLIAQGFIVTIETNATIEIDFANFPAYKDVIFALAVKLSNSGEPYEKRVNKRAIDAIINNTAYSFFKFTLNRGIIEMRAYEEIVDIVGEYPEVEVFCMPQGDRVEILRKNDKVVAEFCMIYGFIYSDRLQVRLWNREKMR

SEQ ID NO: 32028 - protein, 210 aa, Nitrincola lacisaponensis
  REGION 1..210: note = tr|A0A063Y1A0|A0A063Y1A0_9GAMM 7-carboxy-7-deazaguanine synthase OS=Nitrincola lacisaponensis OX=267850 GN=queE PE=3 SV=1
MYSVKEIFYTLQGEGAHAGRPAIFCRFTGCNLWSGREQDRATAVCDFCDTDFIGTDGQNGGKFATAESLVQRLRQFWPPGASTPPYLVCTGGEPALQLDQTLVDALHAEGFIIAIETNGSKPLPEGIDWICVSPKADTPLCITQGNELKLVYPQILAQPERFEALAFEHFYLQPLDGPDATAALTACLHYCLQHPQWKLSLQTHKMIGID

SEQ ID NO: 32029 - protein, 209 aa, unidentified
  source 1..209: note = Nitrincola nitratireducens
  REGION 1..209: note = tr|W9V108|W9V108_9GAMM 7-carboxy-7-deazaguanine synthase OS=Nitrincola nitratireducens OX=1229521 GN=queE; PE = 3 SV=1
MYSVKEVFYTLQGEGAHAGRPAIFCRFTGCNLWSGREIDRSKAICQFCDTDFIGHDGQNGGKFDSPDALVTHLQRFWPLSSEPPYVVCTGGEPALQLDQPLVDALHKAGFIIAIETNGTKPLPNGIDWICVSPKADTDIIIRKGNELKLVYPQSHAMPERFVSYQFDNFYLQPMDSADAQENLKATLNYCLRHPQWRLSLQTHKILGID

SEQ ID NO: 32030 - protein, 210 aa, Nitrincola sp.
  REGION 1..210: note = tr|A0A5J6LFC6|A0A5J6LFC6_9GAMM 7-carboxy-7-deazaguanine synthase OS=Nitrincola sp. KXZD1103 OX=2614693 GN=queE PE=4 SV=1
MYSVKESFYTLQGEGAHAGRPAIFCRFTGCNLWSGREQDRASAVCNFCDTDFVGTDGQNGGKFASAEALVAHLKCFWPLTTTQPPYLVCTGGEPALQLDQTLVDALHQEGFIIAVETNGTKPLPDGIDWICVSPKADTPLYLQGGNELKLVYPQTQALPERFEQLQFDHFYLQPMDGPAQAASLVACIDYCKAHPRWKLSLQTHKLIGID

SEQ ID NO: 32031 - protein, 210 aa, Nitrincola sp.
  REGION 1..210: note = tr|A0A5A9W6H8|A0A5A9W6H8_9GAMM 7-carboxy-7-deazaguanine synthase OS=Nitrincola sp. MEB193; OX = 1708751 GN=queE PE=3 SV=1
MYSVKEVFYSLQGEGAQSGRPAIFCRFSGCNLWSGREQDRASSVCRFCDTDFIGTDGQNGGKFASPEALVAHLLSLWPSNSGVSPYVICTGGEPALQLDQALVDALHAQGVEIAIETNGTRPLPKGLDWICVSPKADSDVIIQQGDELKLVYPQVEIQPEQCQHWSFKHFYLQPMDSPERQAHLQACLDYCLTHPQWKLSLQTHKILGID

SEQ ID NO: 32032 - protein, 209 aa, unidentified
  source 1..209: note = Nitrincola tibetensis
  REGION 1..209: note = tr|A0A364NL04|A0A364NL04_9GAMM 7-carboxy-7-deazaguanine synthase OS=Nitrincola tibetensis; OX = 2219697 GN=queE PE=3 SV=1
MYSVKEVFYTLQGEGAHAGRPAIFCRFTGCNLWSGREVDRSNAICQFCDTDFIGSDGQNGGKFNCPEALVTHLQHFWPLSSEPPYVVCTGGEPALQLDQPLVDALHKAGFIIAIETNGTKPLPNGIDWICVSPKADTDIIIRKGNELKLVYPQSQAMPERFVSYQFDNFYLQPMDSEDAQENLKATLSYCLRHPKWRLSLQTHKILGID

SEQ ID NO: 32033 - protein, 211 aa, Nitritalea halalkaliphila
  REGION 1..211: note = tr|I5C1K7|I5C1K7_9BACT 7-carboxy-7-deazaguanine synthase OS=Nitritalea halalkaliphila LW7 OX=1189621; GN = queE PE=3 SV=1
MDTRTLSSQVRAGQALPIMESFYTVQGEGTFTGHAAYFIRIGGCDVGCVWCDVKDSWEAARWPIQSIEEIVAGARAYPGRLAVITGGEPLLYPLAPLTDALRAAGFQVHLETSGAHPFSGSFDWVVFSPKKFKAPHPSIFEVADELKVVVSHKSDFTFAQENASKMYKNAVFRLQPEWTKSSRYLGSIIEFVKLHPEWQISLQTHKFMEIP

SEQ ID NO: 32034 - protein, 210 aa, Nitrobacter hamburgensis
  REGION 1..210: note = tr|Q1QIG9|Q1QIG9_NITHX 7-carboxy-7-deazaguanine synthase OS=Nitrobacter hamburgensis (strain DSM 10229 / NCIMB 13809 / X14) OX=323097 GN=queE PE=3 SV=1
MSYAVKEIFLTLQGEGAHAGRAAVFCRFAGCNLWSGREEDRTSAICRFCDTDFVGMDGTRGGRYAAADELADTVAAQWTGSAPHRYAVLTGGEPLLQVDKAFVDALHARGFEIGIETNGTIVPPDGIDWLCVSPKAGADLRVTKGHELKLVYPQAGARPEDFKDLAFERFSLQPMDGPDAADNTARAIDYCMRHPQWRLSLQTHKTLGIR

SEQ ID NO: 32035 - protein, 210 aa, Nitrobacter sp.
  REGION 1..210: note = tr|A0A1M3C889|A0A1M3C889_9BRAD 7-carboxy-7-deazaguanine synthase OS=Nitrobacter sp. 62-23; OX = 1895798 GN=queE PE=3 SV=1
MSYAVKEIFLTLQGEGAHAGRAAVFCRFSGCNLWSGREEDRASATCRFCDTDFVGTDGTLGGRYATADRLADTIATQWAGPPARRYAVLTGGEPLLQVDKALVDALHARGFEIGIETNGTIAPPDGVDWLCVSPKAGADLRVTRGQELKLVYPQADARPEDFADLAFERFSLQPMDGPDAAGNTARAIDYCLRHPQWRLSLQTHKTLGIR

SEQ ID NO: 32036 - protein, 210 aa, Nitrobacter sp.
  REGION 1..210: note = tr|A3WT48|A3WT48_9BRAD 7-carboxy-7-deazaguanine synthase OS=Nitrobacter sp. Nb-311A OX=314253 GN=queE PE=3; SV = 1
MSYAIKEVFLTLQGEGAHAGRAAVFCRFSGCNLWSGREKDRASATCAFCDTDFVGTDGTLGGRYDTADALAETVAAQWIGPAAHRYAVLTGGEPLLQVDKAFIDALHARRFEIGIETNGTIVPPDGIDWLCVSPKAGADLRVTKGHELKLVYPQENIRPEDFKDLAFERFSLQPMDGPDAADNTARAIDYCLRHPQWRLSLQTHKTIGIR

SEQ ID NO: 32037 - protein, 210 aa, Nitrobacter vulgaris
  REGION 1..210: note = tr|A0A1V4HWA7|A0A1V4HWA7_NITVU 7-carboxy-7-deazaguanine synthase OS=Nitrobacter vulgaris; OX = 29421 GN=queE PE=3 SV=1
MSYAVKEIFLTLQGEGAHAGRAAVFCRFSGCNLWSGREKDRASATCRFCDTDFVGTDGTLGGRYDTADALAETIAAQWIGPAAHRYTVLTGGEPLLQVNKPLVDALHARGFEIGIETNGTIAPPDGIDWLCVSPKAGADLLVTKGHELKLVYPQTNIRPEDFKDLTFERFSLQPMDGPDVAGNTVRAINYCLRHPQWRLSLQTHKTLGIR

SEQ ID NO: 32038 - protein, 210 aa, Nitrobacter winogradskyi
  REGION 1..210: note = tr|A0A4Y3W653|A0A4Y3W653_NITWI 7-carboxy-7-deazaguanine synthase OS=Nitrobacter winogradskyi OX=913 GN=queE PE=3 SV=1
MSYAVKEIFLTLQGEGAHAGRAAVFCRFSGCNLWSGREEDRASATCRFCDTDFVGTDGTLGGRYATADALADTVAGQWAGPAAHRYTVLTGGEPLLQVDKAFVDALHARGFEVGIETNGTLAPPDGIDWLCVSPKAGADLRIRRGHELKLVYPQADARPEDFVNLAFDRFSLQPMDGPDAAENTARAIDYCLRHPQWRLSLQTHKTLGIR

SEQ ID NO: 32039 - protein, 210 aa, Nitrobacter winogradskyi
  REGION 1..210: note = tr|Q3SPB9|Q3SPB9_NITWN 7-carboxy-7-deazaguanine synthase OS=Nitrobacter winogradskyi (strain ATCC 25391 / DSM 10237 / CIP 104748 / NCIMB 11846 / Nb-255) OX=323098; GN = queE PE=3 SV=1
MSYAVKEIFLTLQGEGAHAGRAAVFCRFSGCNLWSGREEDRASATCRFCDTDFVGTDGTLGGRYASADALADTVAGQWAGPAAHRYAVLTGGEPLLQVDKAFVDALHARGFEIGIETNGTLAPPDGIDWLCVSPKAGADLRIRRGHELKLVYPQADARPEDFADLAFDRFSLQPMDGPDAAENTARAVDYCLRHPQWRLSLQTHKTLGIR

SEQ ID NO: 32040 - protein, 225 aa, Nitrococcus mobilis
  REGION 1..225: note = tr|A4BLV1|A4BLV1_9GAMM 7-carboxy-7-deazaguanine synthase OS=Nitrococcus mobilis Nb-231 OX=314278 GN=queE; PE = 3 SV=1
MGAMPSVAMRPRPEALRVTEIFYSLQGEAGTVGAPTVFVRLTGCPLRCHYCDTAYAFHGGEKMSIIRILDRVGEHAAKFVTVTGGEPLAQRGCLTLLSSLCDRGYRVSLETSGALDVQAVDPRVIKVMDLKTPGSGEERRNRWENLNYLRPHDELKFVICNRQDYDWARTKVSELKLGERWTVFFSASYGELSSRLLADWILADHLNVRLQIQLHKYLWGDQPGR

SEQ ID NO: 32041 - protein, 213 aa, unidentified
  source 1..213: note = Nitrosococcus halophilus
  REGION 1..213: note = tr|D5C4X3|D5C4X3_NITHN 7-carboxy-7-deazaguanine synthase OS=Nitrosococcus halophilus (strain Nc4); OX = 472759 GN=queE PE=3 SV=1
MKRLRITEIFHSLQGESRSVGWPTVFVRLTGCPLRCHYCDTEYAFQGGTWMELDEILATVAEFGARHVTVTGGEPLAQPACLELLTQLCDVGYEVSLETSGALDISAVDPRVVKVMDLKTPGSGEEARNSTTNLDYLSSQDQVKLVLCDRHDYEWARTALERHRLAERCEVLFSPSYEQLSPTDLAEWILEDRLPVRMQIQLHKYLWGEEPGR

SEQ ID NO: 32042 - protein, 213 aa, Nitrosococcus oceani
  REGION 1..213: note = tr|A0A0E2ZRF0|A0A0E2ZRF0_9GAMM 7-carboxy-7-deazaguanine synthase OS=Nitrosococcus oceani C-27 OX=314279 GN=queE PE=3 SV=1
MKRLRITEIFYSLQGEARSVGWPTAFVRLTGCPLRCHYCDTEYAFQGGRWMALDGILDAVAEFGVRHVTVTGGEPLAQSACLGLLTRLCDAGYEVSLETSGALDISAVDRRVIKVMDWKTPGSGEEARNLSTNLEHLSSQDQVKLVLCNRHDYDWAKGVLERHRLTEYCEVLFSPSYEQLSPTDLADWILADHLPVRMQIQLHKYLWGEEPGR

SEQ ID NO: 32043 - protein, 213 aa, Nitrosococcus oceani; identical to SEQ ID NO: 32042
  REGION 1..213: note = tr|Q3JER5|Q3JER5_NITOC 7-carboxy-7-deazaguanine synthase OS=Nitrosococcus oceani (strain ATCC 19707 / BCRC 17464 / NCIMB 11848 / C-107) OX=323261 GN=queE PE=3 SV=1

SEQ ID NO: 32044 - protein, 213 aa, unidentified
  source 1..213: note = Nitrosococcus wardiae
  REGION 1..213: note = tr|A0A4P7BVF4|A0A4P7BVF4_9GAMM 7-carboxy-7-deazaguanine synthase OS=Nitrosococcus wardiae; OX = 1814290 GN=queE PE=3 SV=1
MKRLRITEIFHSLQGESRSVGWPTVFVRLTGCPLRCHYCDTEYAFQGGTWMDLDEILATVAEFSARHVTVTGGEPLAQPACLELLTRLCDTGYEVSLETSGALDISAVDPRVVKVMDLKTPGSGEEARNSATNLDYLSPQDQVKLVLCDRHDYEWAKATLERHRLAERCEVLFSPSYEQLSPTDLAEWILEDRLPVRMQIQLHKYLWGEEPGR

SEQ ID NO: 32045 - protein, 213 aa, unidentified
  source 1..213: note = Nitrosococcus watsoni
  REGION 1..213: note = tr|D8K8Q5|D8K8Q5_NITWC 7-carboxy-7-deazaguanine synthase OS=Nitrosococcus watsoni (strain C-113) OX=105559; GN = queE PE=3 SV=1
MKRLRITEIFYSLQGEARSVGWPTAFVRLTGCPLRCHYCDTEYAFQGGNWMALDRILDVVAEFGVRHVTVTGGEPLVQSACLELLTRLCDAGYEVSLETSGALDISAIDCRVVKVMDWKTPGSGEEARNLYTNLAHLSSQDQVKLVLCNRHDYDWAKAVLDRHRLTEYCDVLFSPSHEQLSPTDLADWILADRLPVRMQIQLHKYLWGEEPGR

SEQ ID NO: 32046 - protein, 237 aa, unidentified
  source 1..237: note = Nitrosomonadaceae bacterium
  REGION 1..237: note = tr|A0A2E6USS6|A0A2E6USS6_9PROT 7-carboxy-7-deazaguanine synthase OS=Nitrosomonadaceae bacterium OX=2026767 GN=queE PE=3 SV=1
MASTSTSTSISASSSQHKVIQPFESETLRVNEIFVSLQGETSRVGLPTVFVRLTGCPLRCSYCDTEYAFHYGKNLSVSSVLSRISDYKVQNVTVTGGEPLAQKKCLLLLRLLCDAGYLVSLETSGSQDVSNVDDRVTKIIDIKTPASGESQKNNWNNLNHLTSQDELKFVLCNEADYQWAVKIMHNYNLDKLCPILFSPVYNKLDPTLLAEWVLRDRLGVRVQIQLHKLLWGEEPGR

SEQ ID NO: 32047 - protein, 218 aa, unidentified
  source 1..218: note = Nitrosomonadaceae bacterium
  REGION 1..218: note = tr|A0A4P5UDE1|A0A4P5UDE1_9PROT 7-carboxy-7-deazaguanine synthase OS=Nitrosomonadaceae bacterium OX=2026767 GN=queE PE=3 SV=1
MTTPEAQTLRVSEIFFSLQGETSRIGLPTVFVRLTGCPLRCGYCDTGYAFYGGESVTISSILDDVSGHMPRYVTVTGGEPLAQKECLTLLSLLCDAGYSVSLETSGAMDISNVDDRVTRVLDIKTPGSGEVKKNRWSNLEHLSPRDELKFVLCDEADYLWAVKMIDENDLDKICSILFSPVYGRLDPTILAEWILRDHLSVRLQIQLHKFLWGEGPGR

SEQ ID NO: 32048 - protein, 220 aa, unidentified
  source 1..220: note = Nitrosomonadales bacterium
  REGION 1..220: note = tr|A0A2E0I7Q4|A0A2E0I7Q4_9PROT 7-carboxy-7-deazaguanine synthase OS=Nitrosomonadales bacterium OX=2026761 GN=queE PE=3 SV=1
MIKNEFQLKQLKVNEIFYSLQGESSYVGIPTIFIRLTGCPMRCGYCDTAYAFIEGKNFTINQIVENISKYKTKNITVTGGEPLAQKECWNLLKILSDRGYIVSLETGGAISINKIDDRVKIILDIKTPGSGEEKNNLWSNLKLIKPKDEIKFVITDLDDYIWAKEILFKEKLNEKASILFSPVYGNIKPKDLAEWILNDHLPVRFQIQLHKMIWGQIPGV

SEQ ID NO: 32049 - protein, 210 aa, unidentified
  source 1..210: note = Nitrosomonadales bacterium
  REGION 1..210: note = tr|A0A1E4GJF1|A0A1E4GJF1_9PROT 7-carboxy-7-deazaguanine synthase OS=Nitrosomonadales bacterium SCN 54-20 OX=1660164 GN=queE PE=3 SV=1
MRVNEIFLSLQGETSRVGLPTVFVRLTGCPLRCGYCDTAYAFHEGERISLAAILLEVARHGVRHVTVTGGEPLAQKECLTLLRLLCDADYSVSLETSGALDISKVDERVSRILDLKTPGSGEAEKNLWSNIQYLTSHDEVKFVLCDEGDYRWAVEIMGKHRLDRTWPVLFSPVHGRLDPTVLAEWILRDRLPVRMQVQLHKLLWGEGPGR

SEQ ID NO: 32050 - protein, 228 aa, Nitrosomonas aestuarii
  REGION 1..228: note = tr|A0A1I3XCH7|A0A1I3XCH7_9PROT 7-carboxy-7-deazaguanine synthase OS=Nitrosomonas aestuarii OX=52441 GN=queE PE=3 SV=1
MNSPAANRYLKQADKTATLRVSEIFYSLQGETSRIGLPTVFIRLTGCPLRCGYCDTAYAFTGGENMSITAIVQQTADYRTRYVTVTGGEPLAQKACLTLLTALCDAAHSVSLETSGAMDLSAVDPRVSKIMDIKTPGSGEVEKNRWSNLDYLTWQDEIKFVLCGEADYQWACQMIQEHQLDSRCPVLFSPVHGQLIPSTLADWILRDHLPVRMQIQLHKLLWEDGPGR

SEQ ID NO: 32051 - protein, 229 aa, Nitrosomonas communis
  REGION 1..229: note = tr|A0A0F7KDE6|A0A0F7KDE6_9PROT 7-carboxy-7-deazaguanine synthase OS=Nitrosomonas communis; OX = 44574 GN=queE PE=3 SV=1
MHSLSLLRQHATQKPEAEVLRVSEIFYSIQGETSRTGLPTVFIRLTGCPLRCGYCDTEYAFSGGENMSIADVLNKASNYASRYITVTGGEPLAQKACSTLLKVLCDTGYSVSIETSGALDISKLDKRVSKIMDIKTPGSGEVAKNRWSNLDYLTDQDELKFVLCDEADYRWAVDVFYERCLHQICPVLFSPVYGQLDPAKLADWILKDRLPVRLQLQLHKILWGEVAGR

SEQ ID NO: 32052 - protein, 242 aa, Nitrosomonas communis
  REGION 1..242: note = tr|A0A5D3YBQ9|A0A5D3YBQ9_9PROT 7-carboxy-7-deazaguanine synthase OS=Nitrosomonas communis; OX = 44574 GN=queE PE=3 SV=1
MKEAIVKAVSKDVMHSLSLLRQHATQKPEAEVLRVSEIFYSIQGETSRTGLPTVFIRLTGCPLRCGYCDTEYAFSGGENMSIADVLNKASNYASRYITVTGGEPLAQKACSTLLKVLCDTGYSVSIETSGALDISKLDKRVSKIMDIKTPGSGEVAKNRWSNLDYLTDQDELKFVLCDEADYRWAVDVFYERCLHQICPVLFSPVYGQLDPAKLADWILKDRLPVRLQLQLHKILWGEVAGR

SEQ ID NO: 32053 - protein, 218 aa, unidentified
  source 1..218: note = Nitrosomonas cryotolerans
  REGION 1..218: note = tr|A0A1N6G6L6|A0A1N6G6L6_9PROT 7-carboxy-7-deazaguanine synthase OS=Nitrosomonas cryotolerans ATCC 49181 OX=1131553 GN=queE PE=3 SV=1
MQNIETEILRINEIFFSLQGETSRVGLPTVFIRLTGCPLRCGYCDTEYAFSGGENMPISAILSKVSHYKARYITVTGGEPLAQKACLMLLSALCNTGYAVSLETSGALDISEVDARVCKVMDIKTPGSGEMAKNQWSNLDYLTQQDELKFVLCDEADYQWASEIIHTRRLDQVCPILFSPVYDQLDPSILATWILRDHLPVRMQIQLHKLLWEEGPGR

SEQ ID NO: 32054 - protein, 211 aa, Nitrosomonas europaea
  REGION 1..211: note = tr|Q82XN6|Q82XN6_NITEU 7-carboxy-7-deazaguanine synthase OS=Nitrosomonas europaea (strain ATCC 19718 / CIP 103999 / KCTC 2705 / NBRC 14298) OX=228410 GN=queE PE=3 SV =1
MLRITEIFYSLQGETSRMGLPTVFVRLTGCPLRCGYCDTGYAFSGGKSMSISEIMGEVASFSPRYVTVTGGEPLAQADSLVLLAALCDRGYSVSLETSGALDIARVDARVSRIVDIKTPGSGEVEKNHWNNLAYLTSHDEIKFVLCDRADYDWARQKLLELKLDVICPVLFSPAYGQLVPADLAAWILQDQLPVRLQLQLHKLLWGECVGR

SEQ ID NO: 32055 - protein, 211 aa, Nitrosomonas europaea; identical to SEQ ID NO: 32054
  REGION 1..211: note = tr|A0A1I0C209|A0A1I0C209_NITER 7-carboxy-7-deazaguanine synthase OS=Nitrosomonas europaea; OX = 915 GN=queE PE=3 SV=1

SEQ ID NO: 32056 - protein, 211 aa, Nitrosomonas eutropha
  REGION 1..211: note = tr|A0A1G4VWH0|A0A1G4VWH0_9PROT 7-carboxy-7-deazaguanine synthase OS=Nitrosomonas eutropha; OX = 916 GN=queE PE=3 SV=1
MLRVTEIFYSLQGETSRMGLPTVFIRLTGCPLRCGYCDTSYAFSGGESMDISEIMRKVASFSPHYVTVTGGEPLAQADSLTLLTALCDRGYSVSLETSGALDISRVDTRVSRILDIKTPGSGEMEKNYWNNLDCLTAHDEIKFVLCDRTDYNWAMQKLLTLELANICPVLFSPVYNQLDPAALAAWILQDRLPVRLQFQLHKLLWGECVGR

SEQ ID NO: 32057 - protein, 211 aa, Nitrosomonas eutropha; identical to SEQ ID NO: 32056
  REGION 1..211: note = tr|Q0AJ95|Q0AJ95_NITEC 7-carboxy-7-deazaguanine synthase OS=Nitrosomonas eutropha (strain DSM 101675 / C91) OX=335283 GN=queE PE=3 SV=1

SEQ ID NO: 32058 - protein, 211 aa, Nitrosomonas halophila
  REGION 1..211: note = tr|A0A1H3IR52|A0A1H3IR52_9PROT 7-carboxy-7-deazaguanine synthase OS=Nitrosomonas halophila OX=44576 GN=queE PE=3 SV=1
MLRITEIFYSLQGETSRAGLPTVFIRLTGCPLRCRYCDTSYAFSGGQTMSIAAILDAVAAFAPHYVTVTGGEPLAQSNCRVLLTSLCDAGYSVSLETSGALDISQVDRRVSRIVDIKTPGSGEVDKNRWQNLDDLTAHDEVKFVLCGQADYHWAMQVLRDFKLDTKCPVLFSPSHHELKPTELANWILQDRLPVRMQLQLHKLLWGECAGK

SEQ ID NO: 32059 - protein, 231 aa, Nitrosomonas marina
  REGION 1..231: note = tr|A0A1I0BFD6|A0A1I0BFD6_9PROT 7-carboxy-7-deazaguanine synthase OS=Nitrosomonas marina; OX = 917 GN=queE PE=3 SV=1
MSLISSTSKDPKSTNSDTTVSLRISEIFHSLQGETSRSGLSTVFVRLTGCPLRCGYCDTAYAFTGGVHMTIAAILKQVANYKTHYVTVTGGEPLAQKSCLALLTALCDRNYSVSLETSGALDLSGVDPRVSKVMDIKTPGSGEMDKNHWANLEYLTPHDEVKFVLCDEADYQWARQIIKAYRLENRCPLLFSPVYGQLEPSVLADWILRDQVPVRLQIQLHKLLWGDGPGR

SEQ ID NO: 32060 - protein, 231 aa, Nitrosomonas marina
  REGION 1..231: note = tr|A0A1H8CKV4|A0A1H8CKV4_9PROT 7-carboxy-7-deazaguanine synthase OS=Nitrosomonas marina; OX = 917 GN=queE PE=3 SV=1
MSLISSTSKDPTSTNSDTTVSLRISEIFHSLQGETSRSGLPTVFVRLTGCPLRCGYCDTAYAFTGGEHMTIAAILKQVANYKTHYVTVTGGEPLAQKSCLPLLTALCDRNYSVSLETSGAMDLSGVDPRVSKIMDIKTPGSGEMDKNHWANLDYLTPHDEVKFVLCDEADYQWAHQIIKACRLENRCPLLFSPVYGQLDPSALAEWILRDHLPVRLQIQLHKLLWGDGPGR

SEQ ID NO: 32061 - protein, 211 aa, unidentified
  source 1..211: note = Nitrosomonas mobilis
  REGION 1..211: note = tr|A0A1G5SF44|A0A1G5SF44_9PROT 7-carboxy-7-deazaguanine synthase OS=Nitrosomonas mobilis; OX = 51642 GN=queE PE=3 SV=1
MPRITEIFYSLQGETSRVGLPTAFIRLTGCPLRCGYCDTSYAFSGGTLMSIDSVINQVALFSTHYVTVTGGEPLAQVDCLPLLASLCDLGYSVSLETSGAIDISPVDTRVSRIVDIKTPGSGEVERNNWKNLEYLTAQDELKFVLCDENDYHWAKQVMHDRKLDQICPILFSPVFQQLDPTALATWILQDKLPVRLQLQLHKLIWGECAGK

SEQ ID NO: 32062 - protein, 229 aa, Nitrosomonas nitrosa
  REGION 1..229: note = tr|A0A1I4S456|A0A1I4S456_9PROT 7-carboxy-7-deazaguanine synthase OS=Nitrosomonas nitrosa; OX = 52442 GN=queE PE=3 SV=1
MDFPLPLRQHSLKQRESETLRVSEIFYSLQGETSRVGLPTVFIRLTGCPLRCGYCDTAYAFTGGENISIMDVLAKVSEYAPRYVTVTGGEPLAQKACLTLLTSLCDAGYSVSIETSGALDISGIDKRVSKIVDIKTPDSGEVTKNRWANLDYLTPQDELKFVLCSEQDYRWAVDIFYERQLDQLCPVLFSPAFGQLDPALLASWILKDRLPVRLQLQLHKILWGEVAGR

SEQ ID NO: 32063 - protein, 218 aa, Nitrosomonas oligotropha
  REGION 1..218: note = tr|A0A2T5I3Y7|A0A2T5I3Y7_9PROT 7-carboxy-7-deazaguanine synthase OS=Nitrosomonas oligotropha OX=42354 GN=queE PE=3 SV=1
MQALETTVLRISEIFFSLQGETSRIGLPTVFVRLTGCPLRCGYCDTAYAFSGGENLSIAEILCQVARHKTRYVTVTGGEPLAQKACLVLLTALCDAHYSVSLETSGALDLSQVDARVSKIMDIKTPGSGEVSKNNWRNLEYLTPQDEIKFVLCDEADYQWACELIGSKQLQPICPILFSPVYESLNPAQLASWILRDELPVRMQVQLHKLLWGEGPGR

SEQ ID NO: 32064 - protein, 218 aa, Nitrosomonas oligotropha
  REGION 1..218: note = tr|A0A1H8NRF6|A0A1H8NRF6_9PROT 7-carboxy-7-deazaguanine synthase OS=Nitrosomonas oligotropha OX=42354 GN=queE PE=3 SV=1
MQALETTVLRISEIFFSLQGETSRIGLPTVFVRLTGCPLRCGYCDTAYAFSGGENLSIAEILRQVARHKTRYVTVTGGEPLAQKACLVLLTALCDAHYSVSLETSGALDLSQVDARVSKIMDIKTPGSGEVSKNNWRNLEYLTPQDEIKFVLCDEADYQWACEIIRSSQLQPICPILFSPVYESLNPAQLASWILRDELPVRMQVQLHKLLWGEGPGR

SEQ ID NO: 32065 - protein, 229 aa, Nitrosomonas sp.
  REGION 1..229: note = tr|A0A1H3NFZ6|A0A1H3NFZ6_9PROT 7-carboxy-7-deazaguanine synthase OS=Nitrosomonas sp. Nm58; OX = 200126 GN=queE PE=3 SV=1
MHFPFSLQQHSTHKPETEVLRVSEVFYSLQGETSRIGLPTVFIRLTGCPLRCGYCDTEYAFSGGRNMSIAEVLDEASSYASRYITVTGGEPLAQKACLTLLTVLCDAGYSVSIETSGALDVSKVDKRVSKIVDIKTPGSGEVTKNLWSNLEYLTCHDELKFVLCDKADYQWAVGVFYERRLDQICPVLFSPVYGQLDPALLADWILKDRLAVRLQLQLHKMLWGEVAGR

SEQ ID NO: 32066 - protein, 218 aa, Nitrosomonas sp.
  REGION 1..218: note = tr|F8GGH4|F8GGH4_NITSI 7-carboxy-7-deazaguanine synthase OS=Nitrosomonas sp. (strain Is79A3) OX=261292; GN = queE PE=3 SV=1
MQALETATLRISEIFYSLQGETSRVGLPTVFVRLTGCPLRCGYCDTAYAFSGGANLSIAKILNQVAHYQTNYVTVTGGEPLAQKACLDLLTALCDAQYSVSLETSGALDLSKVDVRVCKVMDIKTPGSGEVAKNNWSNLAHLKQHDEIKFVLCDEADYQWACEIIHNRQLQQTCPILLSPVYGSLDPATLASWILRDSLPVRMQIQMHKLLWGEGPGR

SEQ ID NO: 32067 - protein, 212 aa, unidentified
  source 1..212: note = Nitrosomonas stercoris
  REGION 1..212: note = tr|A0A4Y1YKC9|A0A4Y1YKC9_9PROT 7-carboxy-7-deazaguanine synthase OS=Nitrosomonas stercoris OX=1444684 GN=queE PE=3 SV=1
MLRVTEIFYSLQGETSRVGLPTVFIRLTGCPLRCGYCDTSYAFSGGKRMHLDEIMHEVALFAPHYVTLTGGEPLAQTNSLALLTALCDQGYAVSLETSGALDISHVDTRVSRILDIKTPGSGEVAKNHWRNIDYLTAQDEIKFVLCDRADYDWAVEKLRTLKLDSLCPVLFSPVFNQLDSAKLADWILQDRLPVRLQLQLHKLLWGEECAGR

SEQ ID NO: 32068 - protein, 219 aa, Nitrosomonas ureae
  REGION 1..219: note = tr|A0A285BZB6|A0A285BZB6_9PROT 7-carboxy-7-deazaguanine synthase OS=Nitrosomonas ureae; OX = 44577 GN=queE PE=3 SV=1
MMQALETTTLRVNEIFFSLQGETSRVGLPTVFVRLTGCPLRCGYCDTAYAFTGGENISIAEILNRIADYKTNYITVTGGEPLAQKACLVLLTALCNAKYSVSLETSGALDLSQVDLRVCKVMDIKTPGSGEVTKNNWENLIHLTPKDEIKFVLCDEADYQWASEIIRCKQLFRLCPILFSPVYDVLNPATLASWILRDELPVRMQLQMHKLLWGEGPGR

SEQ ID NO: 32069 - protein, 219 aa, Nitrosomonas ureae
  REGION 1..219: note = tr|A0A1H9CLT3|A0A1H9CLT3_9PROT 7-carboxy-7-deazaguanine synthase OS=Nitrosomonas ureae; OX = 44577 GN=queE PE=3 SV=1
MMQAFETTTLRINEIFFSLQGETSRVGLPTVFVRLTGCPLRCGYCDTAYAFTGGENISIAEILNRIAHYKTNYITVTGGEPLAQKACLVLLTALCDAKYSVSLETSGALDLSQVDLRVCKVMDIKTPGSGEVTKNNWENLIHLTPKDEIKFVLCNEADYQWAGEIIRRKQLSQLCPILFSPVYDSLNPATLASWILRDELPVRMQLQMHKLLWGEGPGR

SEQ ID NO: 32070 - protein, 218 aa, Nitrosospira briensis
  REGION 1..218: note = tr|A0A1I5EN56|A0A1I5EN56_9PROT 7-carboxy-7-deazaguanine synthase OS=Nitrosospira briensis; OX = 35799 GN=queE PE=3 SV=1
MRPSEAGYLRVSEIFFSLQGETSRVGLPTVFVRLTGCPLRCGYCDTEYAFQGGDRISIVDILTKVASYGTRYVTVTGGEPLAQKECLALLSLLCEAHYSVSLETSGALDVSAVDPCVSKILDIKTPGSGEAERNRWSNLDCLTSQDEVKFVLCDETDYLWAVEVLRERRLDRICPVLFSPVYGKLDPAALAAWVLRDHLPVRVQVQLHKLLWGEGPGR

SEQ ID NO: 32071 - protein, 230 aa, unidentified
  source 1..230: note = Nitrosospira lacus
  REGION 1..230: note = tr|A0A1W6SLY2|A0A1W6SLY2_9PROT 7-carboxy-7-deazaguanine synthase OS=Nitrosospira lacus; OX = 1288494 GN=queE PE=3 SV=1
MVHTPFPLQHSITQPADAVNLRVSEIFFSLQGETSRAGLPTVFVRLTGCPLRCGYCDTGYAFYGGKSLSISTILAEVARYVPHYVTVTGGEPLAQKECLVLLRLLCDAGYSVSLETSGALDISRVDARVSRILDIKTPGSGEVEKNQWSNLDHLTRHDEVKFVLCDEADYEWAVEAIRERKLDLICPILFSPVYDKLDPATLAEWVLRDRLPVRVQIQLHKLLWGEGPGR

SEQ ID NO: 32072 - protein, 234 aa, Nitrosospira multiformis
  REGION 1..234: note = tr|A0A1I0FAS4|A0A1I0FAS4_9PROT 7-carboxy-7-deazaguanine synthase OS=Nitrosospira multiformis OX=1231 GN=queE PE=3 SV=1
MVQTLSPDFPHLSRKIPSSAEAASLRVNEIFLSLQGETSRVGLPTVFVRLTGCPLRCGYCDTAYAFHEGERISLATILLEVARHGAHHVTVTGGEPLAQKECLTLLRLLCDAGYSVSLETSGALDISKVDERVSRILDLKTPGSGEAEKNLWSNIQYLTSHDEVKFVLCDEGDYRWAVEMMGKHRLDRTYPVLFSPVHGELDPIVLAEWILRDRLPVRMQVQLHKLLWGEGPGR

SEQ ID NO: 32073 - protein, 234 aa, Nitrosospira multiformis
  REGION 1..234: note = tr|Q2Y5H3|Q2Y5H3_NITMU 7-carboxy-7-deazaguanine synthase OS=Nitrosospira multiformis (strain ATCC 25196 / NCIMB 11849 / C 71) OX=323848 GN=queE PE=3 SV=1
MVQILSPDFPPLSRKIPSSAEGASLRVNEIFLSLQGETSRVGLPTVFVRLTGCPLRCGYCDTAYAFHEGERLSLAAILMEVARHGARHVTVTGGEPLAQKECLALLRLLCDAGYSVSMETGGALDISKVDARVSRILDLKTPGSGEVEKNLWSNVQYLTSHDEVKFVLCDEDDYRWAVEMMGKHRLDHTCPVLFSPVHGKLEPTVLAEWILRDRLPVRMQVQLHKLLWGEGPGR

SEQ ID NO: 32074 - protein, 246 aa, Nitrosospira sp.
  REGION 1..246: note = tr|A0A1M7EM59|A0A1M7EM59_9PROT 7-carboxy-7-deazaguanine synthase OS=Nitrosospira sp. Nsp11 OX=1855338 GN=queE PE=3 SV=1
MVHTFSPPPPPPISQVKRSPEAERSPEAERSRKAESLRISEIFFSLQGETSRSGLPTVFVRLTGCPLRCAYCDTDYAFYGGKRLSISDILAEVASYGARYVTVTGGEPLAQKECLLLLTLLCDAGYSVSLETSGALDISEVDDRVSKILDIKTPGSGEVARNFWPNLQHLTSHDEVKFVLCDEADYQWALEVMHERQLSLICPVLFSPVYGKLDPAMLAAWVLRDRVMVRVQIQLHKLLWGEGAGR

SEQ ID NO: 32075 - protein, 230 aa, Nitrosospira sp.
  REGION 1..230: note = tr|A0A495EM01|A0A495EM01_9PROT 7-carboxy-7-deazaguanine synthase OS=Nitrosospira sp. Nsp44 OX=1945879 GN=queE PE=3 SV=1
MIQTSSQLVNPACASPEHAYLRVSEIFLSLQGETSRVGLPTVFVRLTGCPLRCHYCDTEYAFYGGRRIAISAILDEIANYAVRHVTVTGGEPLAQKECPTLLKLLCDAGYSVSLETSGALDISKLDVRVSRIVDIKTPGSGELDKNRWSNLHHLTSHDEVKFVLCDKTDYEWAVAVMREHELDRICPILFSPVYGSLDPTTLAEWVLRDRLPVRVQVQLHKLLWGEGPGR

SEQ ID NO: 32076 - protein, 218 aa, unidentified
  source 1..218: note = Nitrosovibrio sp.
  REGION 1..218: note = tr|A0A497X7E7|A0A497X7E7_9PROT 7-carboxy-7-deazaguanine synthase OS=Nitrosovibrio sp. Nv12 OX=2135773 GN=queE PE=3 SV=1
MQSSEAGNLRVNEIFLSLQGETSRVGLPTVFVRLTGCPLRCGYCDTEYAFYGGKRLPISDILVEVASYAARYVTVTGGEPLAQKECLTLLRLLCDAGYSVSLETSGALDVSMVDERVSKILDIKTPGSGEAEKNRWSNLPYLTPHDEVKFVLCDEIDYQWAVEAMRKHQLDLVCPVLFSPVYDRLDPAALAAWVLRDRLPVRVQVQLHKLLWGEGPGR

SEQ ID NO: 32077 - protein, 218 aa, unidentified
  source 1..218: note = Nitrosovibrio sp.
  REGION 1..218: note = tr|A0A1K1MXX6|A0A1K1MXX6_9PROT 7-carboxy-7-deazaguanine synthase OS=Nitrosovibrio sp. Nv17 OX=1855339 GN=queE PE=3 SV=1
MCRDGDATLRVNEIFHSLQGETSRAGLPTVFVRLTGCPLRCDYCDTGYAFHEGRNLTLSAILAAVAGYAPRYVTVTGGEPLAQSACPMLLGRLCDAGYSVSLETSGALDISGVDARVSRIMDIKTPGSGEVEKNRWSNLDHLTAHDEIKFVLSDETDYRWAMRILRKYRLDLICPLLLSPVHGALDPATLAAWVLRDRLPVRVQIQLHKLLWGEGPGR

SEQ ID NO: 32078 - protein, 233 aa, unidentified
  source 1..233: note = Nitrosovibrio tenuis
  REGION 1..233: note = tr|A0A1H7LFU4|A0A1H7LFU4_9PROT 7-carboxy-7-deazaguanine synthase OS=Nitrosovibrio tenuis; OX = 1233 GN=queE PE=3 SV=1
MASTLSPASSVSPRNTRSSDEESLRVSEIFFSLQGETSRVGLPTVFVRLAGCPLRCGYCDTEYAFYGGRRLSITAILAEVCSFAAHYVTVTGGEPLAQKECLTLLKELCNAGYSVSLETSGALDISKIDTRVSKIMDIKTPGSGEVEKNLWSNLNHLAANDEVKFVLCDEVDYRWAIEIFRERQLDLICPILFSPVYGRLDPATLAGWVLRDRLPVRMQIQLHKVLWGEGPGR

SEQ ID NO: 32079 - protein, 212 aa, Nitrospina gracilis
  REGION 1..212: note = tr|M1YYS5|M1YYS5_NITG3 7-carboxy-7-deazaguanine synthase OS=Nitrospina gracilis (strain 3/211) OX=1266370; GN = queE PE=3 SV=1
MLKVTEIFKSVQGESTRAGLPCLFVRLTGCNLRCRWCDTEYSFYGGKSMSLDEIIHALTPHKISLVEITGGEPLLQDEVYELMQALLDRDYTVMLETGGSLSLEHVPAAVIKIVDLKCPGSGEVMQNRYDNLDRLQPHDEVKFVIADRTDYEWSRDTLKKYNIDQKGQVLFSPVYDKLPLKDLTEWVLEDGLPVRVQTQLHKWIWGKDAIGV

SEQ ID NO: 32080 - protein, 212 aa, Nitrospina sp.
  REGION 1..212: note = tr|A0A523NU69|A0A523NU69_9BACT 7-carboxy-7-deazaguanine synthase OS=Nitrospina sp.; OX = 2024844 GN=queE PE=3 SV=1
MLQVNEIFKSIQGESSHAGLLCAFVRLTGCNLRCTWCDTEYAFHAGKNMSIDEIVRTVDSYGLSLVEITGGEPLLQDGVYDLMQAFLAKNYQVLLETGGSLPLDRVPHQVIKIVDLKCPGSGEESKNLFSNLDLLQPTDEVKFVILDRADYEWSKQIMAQYGIHKKAQVLFSPVYDKLALKDLAEWALADNLPVRLQTQLHKVAWGKDTIGV

SEQ ID NO: 32081 - protein, 212 aa, Nitrospina sp.
  REGION 1..212: note = tr|A0A523NX31|A0A523NX31_9BACT 7-carboxy-7-deazaguanine synthase OS=Nitrospina sp.; OX = 2024844 GN=queE PE=3 SV=1
MLTINEIFKSIQGESSYTGRPCIFIRLTGCNLRCSWCDTEYAFYEGQPKSVKDIMDAIEPLGVPLVEITGGEPLLQEEVYDLMDVLLAKNYEVLLETGGGVSVAKVPERVIKILDIKCPGSGEDAKNLWDNLDHLNPHDEVKFVLADRADYEWSRDVLQRRDIHQKVQVLFSPVYDTLGLKELAAWVLDDNLPVRVQTQLHKIIWGKDAIGV

SEQ ID NO: 32082 - protein, 211 aa, unidentified
  source 1..211: note = Nitrospinae bacterium
  REGION 1..211: note = tr|A0A2H0MGD4|A0A2H0MGD4_9BACT 7-carboxy-7-deazaguanine synthase OS=Nitrospinae bacterium CG11_big_fil_rev_8_21_14_0_20_56_8 OX=1974049 GN=queE PE=3; SV = 1
MLTVSEIYKTIQGESTYAGLPCVMVRLTGCNLRCVWCDSTHAFYSGKNMTREEVVRQVSEFKIPLVEITGGEPLLQADVYPLMEDLIGKNFTVLLETSGSVSIENVPRKVVKIMDLKCPGSGENEKNHFDNLRGLADWDEVKFVISDRTDYEWSRDTVQSYAIPPRQVLFSPVFDRISLRSLADWILADNLGVRLQTQLHKHIWDKNAVGV

SEQ ID NO: 32083 - protein, 212 aa, unidentified
  source 1..212: note = Nitrospinae bacterium
  REGION 1..212: note = tr|A0A2H0CWF8|A0A2H0CWF8_9BACT 7-carboxy-7-deazaguanine synthase OS=Nitrospinae bacterium CG22_combo_CG10-13_8_21_14_all_47_10 OX=1974050 GN=queE; PE = 3 SV=1
MLKINEIYASIQGESSHTGLPCVFIRLTGCNLRCSWCDTAYAFHKGDDFTVDQIMQKIEAFALPLVEITGGEPLMQEDVYPLMEALLEKGYRVMLETGGALPIDGVPEKVIKILDIKCPGSGEKEKNRLENLQLLAPHDEVKFVLLDRADYEWSRDLLKKCDLAPSVQVLFSPVYDRLDLKDLSEWILEDRLPVRLQTQLHKVIWSKNAIGV

SEQ ID NO: 32084 - protein, 214 aa, unidentified
  source 1..214: note = Nitrospira bacterium
  REGION 1..214: note = tr|A0A0S8AHP2|A0A0S8AHP2_9BACT 7-carboxy-7-deazaguanine synthase OS=Nitrospira bacterium SG8_35_4 OX=1704025 GN=queE PE=3 SV=1
MLKINEIFKSIQGESTFAGLPCTFVRLAGCNLRCTYCDTNYAYYHGNEISDEEIVSKIEEYGVKFVEFTGGEPLLQEETPKLLKSLLDRDYTVLIETNGSICIGCLDKRLNIIMDYKSPKSGMSERMRPKNFEFLKKTDQIKFVLMDESDYNWAKRTIEENKLFDKFDNILMSPAYGELSPKELVAWVLKDNLPVRVQLQIHKYIWAPDEREGV

SEQ ID NO: 32085 - protein, 214 aa, unidentified
  source 1..214: note = Nitrospira bacterium
  REGION 1..214: note = tr|A0A0S8D153|A0A0S8D153_9BACT 7-carboxy-7-deazaguanine synthase OS=Nitrospira bacterium SG8_35_1 OX=1704024 GN=queE PE=3 SV=1
MLKINEIFKSIQGESTFAGLPCTFVRLAGCNLRCTYCDTNYAYYDGEELSDDAIIRKIEEYGVTCVEFTGGEPLLQEETPKLLKTLLDKGYNVLVETNGSICIGCLDKRLNIIMDYKTPKSGMSERMRPKNFEFLKKTDQIKFVLMDESDYQWAKAVIEENGLTEKFENILMSPAYGELSPKSLVTWVLKDNLPVRVQLQIHKYIWAPDEREGV

SEQ ID NO: 32086 - protein, 212 aa, unidentified
  source 1..212: note = Nitrospira defluvii
  REGION 1..212: note = tr|D8P9W6|D8P9W6_9BACT 7-carboxy-7-deazaguanine synthase OS=Nitrospira defluvii OX=330214 GN=queE PE=3 SV=1
MVKVTEIFHSIQGESTYAGRPCVFVRLTGCPLRCTWCDTAYAFYGGRDLTIDDIVNQVRAFSCDLVEVTGGEPLSQPASLPLLTRLCDEGFEVLVETSGAIETIGVDRRVHVILDVKCPGSGMTDRMCWSNLDRLAPQDEVKFVIKDRVDYEWAREVLHRHELPGRCTVLMSPVFGEVEVRYLAEWILADKLPVRFQLQMHKFIWAPDMRGV

SEQ ID NO: 32087 - protein, 211 aa, unidentified
  source 1..211: note = Nitrospira japonica
  REGION 1..211: note = tr|A0A1W1I3M7|A0A1W1I3M7_9BACT 7-carboxy-7-deazaguanine synthase OS=Nitrospira japonica; OX = 1325564 GN=queE PE=3 SV=1
MRITEIFHSIQGESTYAGEPCVFVRLTGCPLRCTWCDTAYAFHEGQEMSLADVMTAVKSYGCRLVEVTGGEPLAQSQTIELIESLCETGYKVLVETSGAIDISPVDRRAQIILDVKCPGSGMTERMWWPNLAQLTAKDEVKFVVAGRSDYDWAVGIIERYGLTGLCPVLMSPVFETLEPRQLAEWILRDRLPIRFQLQLHKFIWAPDARGV

SEQ ID NO: 32088 - protein, 222 aa, unidentified
  source 1..222: note = Nitrospira lenta
  REGION 1..222: note = tr|A0A330L3T6|A0A330L3T6_9BACT 7-carboxy-7-deazaguanine synthase OS=Nitrospira lenta; OX = 1436998 GN=queE PE=3 SV=1
MTAPLQTQEQPLRVTEIFHSIQGESTYAGQPCVFVRLTGCPLRCTWCDTEYSFYGGTTFSIDEILSTIRAYGCQLVEVTGGEPLAQPAALPLIARLCDAGYTVLIETSGAIDVQPVDRRAKLILDVKCPGSGMTDRMHWPNLDYLTAKDEAKFVLASREDYEWARGMVAQYRLADRCPVLFSPVFGSLDLRALAEWILADRLSVRFQLQMHKYIWAPDMRGV

SEQ ID NO: 32089 - protein, 212 aa, Nitrospira moscoviensis
  REGION 1..212: note = tr|A0A0K2G6P4|A0A0K2G6P4_NITMO 7-carboxy-7-deazaguanine synthase OS=Nitrospira moscoviensis OX=42253 GN=queE PE=3 SV=1
MLRVTEIFHSLQGESTFAGRPCVFVRLTGCPLRCTWCDTEYAFYGGTEQSIDDIIARVRAYGCPLVEVTGGEPLAQPDAAALLKRLCDEGFTVLLETSGALDAAAVDQRVHIILDIKCPGSGMAERMHWPNVERLRSQDEAKFVLQDRADYEWAKDVMIRYGLTERCTVLFSPVFGVLDPQHLAEWILADRLPVRFQLQMHKFIWAPDMRGV

SEQ ID NO: 32090 - protein, 211 aa, Nitrospira sp.
  REGION 1..211: note = tr|A0A136K6Z4|A0A136K6Z4_9BACT 7-carboxy-7-deazaguanine synthase OS=Nitrospira sp. OLB3; OX = 1617410 GN=queE PE=3 SV=1
MRVTEIFHSIQGESTHAGHPCVFIRLTGCPLRCTWCDTAYAFYGGREMSIEDIVAQTRTFGCDLVELTGGEPLSQPDAPLLLARLCDERFEVLLETSGAINTAVVDRRVRVILDVKCPGSGMSDRMHWPNLDRLSSQDEVKFVIRDRADYEWAREMVRQRDLSATCPVLFSPVFGELEPRSLAEWVLGDRLRVRFQLQMHKYIWAPDMRGV

SEQ ID NO: 32091 - protein, 212 aa, Nitrospira sp.
  REGION 1..212: note = tr|A0A3C1QF91|A0A3C1QF91_9BACT 7-carboxy-7-deazaguanine synthase OS=Nitrospira sp.; OX = 70125 GN=queE PE=3 SV=1
MVKITEIFHSIQGESTYAGRPCVFVRLTGCPLRCTWCDTAYAFYGGRDMTIDDIVNQVRAFNCDLVEVTGGEPLSQTESLPLLSRLCDEGFEVLVETSGAIDTAGVDRCVHVILDVKCPGSGMTDRMYWPNLDRLAPHDEVKFVIKDRSDYEWARDVLHRYDLPARCTVLMSPVFGEVEVRHLAEWILADKLPVRFQLQMHKYIWAPDMRGV

SEQ ID NO: 32092 - protein, 212 aa, unidentified
  source 1..212: note = Nitrospiraceae bacterium
  REGION 1..212: note = tr|A0A3N5IBK8|A0A3N5IBK8_9BACT 7-carboxy-7-deazaguanine synthase OS=Nitrospiraceae bacterium OX=2026770 GN=queE PE=3 SV=1
MLRVTEIFHSIQGESSYAGQPCVFVRLTGCPLRCTWCDTDYAFYGGQECSIEEVLAKVRTYGCRLVEVTGGEPLAQPESLPLMSKLCDTGYTVLLETSGAVDIAQVDPRVHVIMDVKCPGSGMTERMHWPNLSTLTAKDEAKFVLADRADYDWAHDILARYDIASRCSVLFSPVFGSLDVRQLAEWILADRLPVRFQLQMHKYIWAPDMRGV

SEQ ID NO: 32093 - protein, 150 aa, unidentified
  source 1..150: note = Nitrospiraceae bacterium
  REGION 1..150: note = tr|A0A356R7R7|A0A356R7R7_9BACT 7-carboxy-7-deazaguanine synthase (Fragment); OS = Nitrospiraceae bacterium OX=2026770 GN=DD706_09820 PE=3; SV = 1
MTTLPSLKITEIFHSLQGESTRVGQPCVFVRLTGCPLRCTWCDTEYAFYGGNTMPIETILAQVQSYGCPLVEVTGGEPLHQPGSLVLLTQLCEAGLHVMLETSGAFDIANVDERVSIILDVKCPGSGMTDRMQWDTLRHLSGKDEVKFVL

SEQ ID NO: 32094 - protein, 211 aa, unidentified
  source 1..211: note = Nitrospirae bacterium
  REGION 1..211: note = tr|A0A1G1E9K8|A0A1G1E9K8_9BACT 7-carboxy-7-deazaguanine synthase OS=Nitrospirae bacterium GWA2_42_11 OX=1817752 GN=queE PE=3 SV=1
MKINEIFKSIQGETTYQGLPAVFIRTTGCNLRCSWCDTTYAYSEGNEYSIEDILKIIDKYSCKDIVITGGEPLTQDETPLLIDRLITLGHTVLLETNGSLDISIVHPDTIRILDIKCPGSGMSENMMWNNIKSLKPHDEVKFVVSDYNDYIWAKSVIESYNLVNLCHVLVMPVFARLDPKALAGWIINDNLDVRLQLQIHKYIWGPDTRGV

SEQ ID NO: 32095 - protein, 211 aa, unidentified
  source 1..211: note = Nitrospirae bacterium
  REGION 1..211: note = tr|A0A2G4HXK4|A0A2G4HXK4_9BACT 7-carboxy-7-deazaguanine synthase OS=Nitrospirae bacterium; OX = 2026887 GN=queE PE=3 SV=1
MRVTEIFHSIQGESSYAGQPCVFVRLTGCPLRCTWCDTDYAFYGGHDCSIDEVLAKVQTYGCRLVEVTGGEPLAQTESLPLMARLCDADYTVLLETSGSIEIAPVDPRVHIILDVKCPGSGMTERMHWPNLAGLTAKDEAKFVLADRADYDWAKEILARHHLADRCSVLFSPVFGSLDLRQLAEWILADRLPVRFQLQMHKYIWAPDMRGV

SEQ ID NO: 32096 - protein, 209 aa, unidentified
  source 1..209: note = Nitrospirillum amazonense
  REGION 1..209: note = tr|A0A560I8D0|A0A560I8D0_9PROT 7-carboxy-7-deazaguanine synthase OS=Nitrospirillum amazonense OX=28077 GN=queE PE=3 SV=1
MVYYVKEIFLTIQGEGINCGRVAVFCRFSGCNLWSGREIDRPTAACKFCDTDFVGLDGDRGGRYLAEELANTMACLWPQETTRPLAVMTGGEPLLQLDSELIHALHARGFEIAVETNGTIPIPGGVDWVCVSPKSATMLSVVSGDELKIVYPQKNLPPEALENMEFNHKILQPMDGPEREKNLKAAIAYCLAHPRWRLSLQTHKIIGIR

SEQ ID NO: 32097 - protein, 213 aa, Nocardia brasiliensis
  REGION 1..213: note = tr|K0F0H8|K0F0H8_9NOCA 7-carboxy-7-deazaguanine synthase OS=Nocardia brasiliensis ATCC 700358 OX=1133849; GN = queE PE=3 SV=1
MSYQIKEIFYTLQGEGGQAGRPAVFCRFSGCNLWSGRESGRARAVCSFCDTDFVGTDGTGGGTFRDTASLTEAVRAAWKGEVHARAVPMVVCTGGEPLLQLDQQLVDSFHAAGFYVAVETNGTRPAPAGLDWICVSPKAGTTLTITEGDELKLVYPQPEAPPARFENLGFRKLRLQPMDGPDLVANTRSAIEYCLNYPQWQLSVQSHKYLGIR

SEQ ID NO: 32098 - protein, 213 aa, Nocardia sp.
  REGION 1..213: note = tr|A0A3A4KD97|A0A3A4KD97_9NOCA 7-carboxy-7-deazaguanine synthase OS=Nocardia sp. YIM PH 21724 OX=2340916 GN=queE PE=3 SV=1
MSYQVKEIFYTLQGEGTHAGRPAVFCRFAACNLWSGTEAGRARAVCTFCDTDFVGTDGPGGGMFRTPEELAAAISKTWDGLAHPRAQRFVVCTGGEPLLQLDTPAVEALHAAGFEIAVETNGTKPAPEGLDWICVSPKAGAPLNLTSGDELKLVYPQVGAEPERFENLDFPRLLLQPMDGPDVVENTRRAVDYCLRHPQWRLSTQTHKYLGIR

SEQ ID NO: 32099 - protein, 211 aa, unidentified
  source 1..211: note = Nocardioidaceae bacterium
  REGION 1..211: note = tr|E9US36|E9US36_9ACTN 7-carboxy-7-deazaguanine synthase OS=Nocardioidaceae bacterium Broad-1 OX=408672; GN = queE PE=3 SV=1
MTYKVKEIFYTLQGEGTHAGRPAVFCRFTSCNLWTGREKDRDRAICKFCDTAFVGTDGEGGGKFADAAALAAAVASKWPMGTDGQPMVVCTGGEPLLQLDDAAVAAMKAAGFYVAVETNGTILPPAGIDWLCVSPKIGSDLVVESGQELKFVVPQADVDPTTFEALDFESFRVQPMDGPDLAANTEYAVKFCLEHPRWHLSTQTHKFLGIP

SEQ ID NO: 32100 - protein, 296 aa, unidentified
  source 1..296: note = Nocardioides bacterium
  REGION 1..296: note = tr|A0A4S5AUA0|A0A4S5AUA0_9ACTN 7-carboxy-7-deazaguanine synthase OS=Nocardioides bacterium OX=1565122 GN=queE PE=3 SV=1
MTENTDLPAVSDKQRARIVAQPGLEVPLLPRQARAATPRPQGRPLRVDPCRTPSTTTAARTLTLPLSEVFGPTWQGEGPYAGRRCGFVRLGECNLTCEWCDTPYTWDRARHDVTAECPPTAVADIATAVTNLDVDVMVLSGGEPLLHAKRTPACALGVLLDCTPFVSWHVETNGTIPPPDWLVERVQHFTASPKVGTRDPEHRRLNPRALTAWRELCDQGAAAFKFVCRDEADLASVHSLCARMKIDAAHVWIMPEGRSAQAVLDAQRDLAPRIRDHGYNLTTRLHVLTYDDRRGV

SEQ ID NO: 32101 - protein, 211 aa, Nocardioides caeni
  REGION 1..211: note = tr|A0A4S8NHR6|A0A4S8NHR6_9ACTN 7-carboxy-7-deazaguanine synthase OS=Nocardioides caeni; OX = 574700 GN=queE PE=3 SV=1
MTYKVKEIFYTLQGEGTHAGRPAVFCRFSSCNLWTGREADRERAICKFCDTDFVGTDGEGGGKFADAEALAEAVAAKWPMNSGGRPMVVCTGGEPLLQLDVNAIEAFHARGFYVAVETNGTIAPPPGIDWLCVSPKIGSELIVEKGQELKFVVPQGGVDPTAFEHLDFESFRVQPMDGPDVVANTELAVKFCLDHPLWQLSLQTHKHLGIP

SEQ ID NO: 32102 - protein, 211 aa, Nocardioides sp.
  REGION 1..211: note = tr|A0A1V1W5W4|A0A1V1W5W4_9ACTN 7-carboxy-7-deazaguanine synthase OS=Nocardioides sp. PD653 OX=393303 GN=queE PE=3 SV=1
MTYKVKEIFYTLQGEGTHAGRPAVFCRFSSCNLWTGREADRERAICKFCDTDFVGTDGEGGGKFADAQALAAAVAAKWPVNGGGRPMVVCTGGEPLLQLDTAAVDAFHELGFYVAVETNGTLVPPAGIDWLCVSPKIGSELVVEKGQELKFVVPQGGVDPTAFEHLDFESFRAQPMDGPDVAANTELAVKFCLDHPLWQLSLQTHKHLGIP

SEQ ID NO: 32103 - protein, 211 aa, Nocardioides sp.
  REGION 1..211: note = tr|A0A542RQF8|A0A542RQF8_9BURK 7-carboxy-7-deazaguanine synthase OS=Nocardioides sp. SLBN-35 OX=512030 GN=queE PE=3 SV=1
MTYSVKEIFYTLQGEGGQAGTPAVFCRFAGCNLWTGREQDRAQAICPFCDTDFVGTDGTLGGKFETATALAELIAAQWPAGAGHRLVVLTGGEPLLQVDAALIDALHAQQFRIAVESNGTVAAPEGIDWLCISPKAGAPWVQRSGQELKLVWPQPGFDLRALEQETQFTHRFLQPMDGLLQRQNTAACIDACLAHPAWRLSLQTHKLTGIR

SEQ ID NO: 32104 - protein, 222 aa, Nocardiopsis dassonvillei
  REGION 1..222: note = tr|A0A223QE75|A0A223QE75_NOCDA 7-carboxy-7-deazaguanine synthase OS=Nocardiopsis dassonvillei OX=2014 GN=queE PE=3 SV=1
MQGEGPSLGRRCAFVRLGGCNLSCRWCDTPYTWDWTGLGDGKVAYDPKKELRAVPYPQVRDRLVAYGVPLIVVSGGEPLNQQARLLPLVRDLRDSGHDIEVETNGTIIPEPRLAESVRFNVSPKLAHSGDPEDRRIVGPALAALAAVPGTAFKFVCRTEADLDEVGTLVERYGIGPVWVMPEGRTRAALDRSLVRLRDPVMARGWNLTTRLHIMLWGDRRGV

SEQ ID NO: 32105 - protein, 211 aa, Nocardiopsis sinuspersici
  REGION 1..211: note = tr|A0A1V3BVC2|A0A1V3BVC2_9ACTN 7-carboxy-7-deazaguanine synthase OS=Nocardiopsis sinuspersici OX=501010 GN=queE PE=3 SV=1
MGYLVKEIFYTLQGEGSHAGRPAVFCRMSRCNLWTGYEKDRHRAICTFCDTDFVGTDGVGGGRFATADELADAVARAWPSEERAHRFVVCTGGEPLLQLDEEAVEALHKQGFEVAVETNGTRVPPEGIDWLCVSPKIGSKLVVDQGDELKLVYPQPGGSPESFEHLDFSVFRLQPMDGPELEANTRETVEYCLKNPHWRLSLQTHKYLGIQ

SEQ ID NO: 32106 - protein, 239 aa, Nocardiopsis sp.
  REGION 1..239: note = tr|A0A317MLS2|A0A317MLS2_9ACTN 7-carboxy-7-deazaguanine synthase OS=Nocardiopsis sp. L17-MgMaSL7 OX=1938893 GN=queE PE=3 SV=1
MSPERVDGPGLLVAERFGVERPTFQGEGPSSGVPALFIRLSRCNLTCTWCDTPYTWDTSRFDLRAESSRQTVQDLLVWAHGSRVELVVITGGEPLIQQRSLVPLVRGLLARGNRVEFETNGTITPAPELLVEGVRFNVSPKLANSGVAEDRRLVPETLKAFAASGRAVFKFVARTEADLDEIDALTGRYGLAPIWVMPEGATPEELIATTRVLADSVAARRWHLAQRLHVMAFAQTRGR

SEQ ID NO: 32107 - protein, 237 aa, Nocardiopsis sp.
  REGION 1..237: note = tr|A0A495KZT9|A0A495KZT9_9ACTN 7-carboxy-7-deazaguanine synthase OS=Nocardiopsis sp. Huas11 OX=2183912 GN=queE PE=3 SV=1
MNLLLSPTFDGPDLVVSEVFGPTVQGEGPNCGRRAVFVRLADCNLACSWCDTPYSWKWNEYVRREETYRCNAEEVLDRARSSGVGLVVVTGGEPLLQKALEPLVATLTDGGLDVEVETNGTRLPSPDLLFRARFNVSPKLANAGVPQRRRIRAGVLRALARSGNAVFKFVVQRSEELDEVADLVERCRLAPVWIMPQGTSAEEVLAHQSALADEVIKRGWNLSTRLHVLLWGDQRGR

SEQ ID NO: 32108 - protein, 265 aa, Nodularia sp.
  REGION 1..265: note = tr|A0A218PZE6|A0A218PZE6_9CYAN 7-carboxy-7-deazaguanine synthase OS=Nodularia sp. NIES-3585 OX=1973477 GN=queE PE=3 SV=1
MTVKTTVQPTARLIEVFSAIQGEGLNVGTRQLFIRFAFCDLRCHFCDSAHTWNAPPTCRIERSPGLRDFEIHSNPVPLPILMQWVERQNLPCLHDSISLTGGEPLLHAAFLKVFLPQVRSLTNLPIYLESGGHRPQQLAMILPYLDSVGMDLKLPSVSGESLWQEHTEFLQLCFNSHLEVFVKVIISDHTDPAELERAAAMVADVSPDIPVFLQPVTPLPASEQLTKTPVLAPAPEKVLIWQALMKQFLPQVRVIPQTHKMLNQL

SEQ ID NO: 32109 - protein, 265 aa, Nodularia spumigena
  REGION 1..265: note = tr|A0ZLR2|A0ZLR2_NODSP 7-carboxy-7-deazaguanine synthase OS=Nodularia spumigena CCY9414 OX=313624 GN=queE; PE = 3 SV=1
MTVKTTVQPTARLIEVFSAIQGEGLNVGTRQLFIRFALCDLRCHFCDSAHTWNAPATCRIELTPGLRDFEIHSNPVSLPILIQWVERQNLPCLHDSISLTGGEPLLHAAFLKEFLPQVRSLTNLPIYLESGGHRPEQLAMVLPYLDSVGMDLKLPSVSGESLWTEHTNFLQLCFNTHLEVFVKIIISDNTDPAELERSAAMVADVSPDIPIFLQPVTPLAASEQLTETPVLAPAPEKVLMWQALMKQFVPQVRVIPQTHKMLNQL

SEQ ID NO: 32110 - protein, 265 aa, Nodularia spumigena
  REGION 1..265: note = tr|A0A161XRE0|A0A161XRE0_NODSP 7-carboxy-7-deazaguanine synthase OS=Nodularia spumigena CENA596 OX=1819295 GN=queE PE=3 SV=1
MTVKTTVQPTARLIEVFSAIQGEGLNVGTRQLFIRFALCDLRCHFCDSAHTWNAPATCRIERSPGLRDFEIHSNPVPLPILIQWVERQNLPCLHDSISLTGGEPLLHAAFLKEFLPQVRSLTNLPIYLESGGHRPEQLAMVLPYLDSVGMDLKLPSVSGESLWTEHTNFLQLCSNTHLEVFVKIIISDNTDPAELERSAAMVADVSPDIPIFLQPVTPLAASEQLTETPVLAPAPEKVLMWQTLMKRFIPHVRVIPQTHKMLNQL

SEQ ID NO: 32111 - protein, 209 aa, Nonlabens agnitus
  REGION 1..209: note = tr|A0A2S9WUS4|A0A2S9WUS4_9FLAO 7-carboxy-7-deazaguanine synthase OS=Nonlabens agnitus; OX = 870484 GN=queE PE=3 SV=1
MKDTIENKVDAGVMLPLMEEFYTIQGEGFHTGTAAYFIRIGGCDVGCHWCDVKESWNAETHPPTAIEHIVENADKWSKTIVITGGEPLTWNMQPLTNALKDRGMTVHIETSGAYPLTGTWDWICLSPKKVKMPVPEIYKEANELKVIVYNKNDFAFAKAESQKVTSSCQLFLQPEWSVREKMIPLITEFVMENPEWRVSLQTHKYLNIP

SEQ ID NO: 32112 - protein, 210 aa, unidentified
  source 1..210: note = Nonlabens arenilitoris
  REGION 1..210: note = tr|A0A2S7UC52|A0A2S7UC52_9FLAO 7-carboxy-7-deazaguanine synthase OS=Nonlabens arenilitoris OX=1217969 GN=queE PE=3 SV=1
MLEKSISQAVEKGEMLPLMEEFYTIQGEGSHTGKAAYFIRVGGCDVGCHWCDVKESWDPEKHPPTAVDAIVANAAKYSKTIVVTGGEPLTWDMGPLTTGLKNEGMQVHIETSGAYPLSGTWDWICLSPKKMKMPLPEVYEAAHELKVIVFNRHDFAFAKAEAEKVSSNCKLYLQPEWSVREKMIPMITEFVMDNPEWHVSLQTHKYLNIP

SEQ ID NO: 32113 - protein, 243 aa, unidentified
  source 1..243: note = Nonlabens dokdonensis
  REGION 1..243: note = tr|L7W5S9|L7W5S9_NONDD 7-carboxy-7-deazaguanine synthase OS=Nonlabens dokdonensis (strain DSM 17205 / KCTC 12402 / DSW-6) OX=592029 GN=queE PE=3 SV=1
MKTYLKNYIVLRLLNNLKHSRIMKTIAKTYLCGMLEKKIQQQVEKGTMLPLMEEFYTIQGEGFHTGRAAYFIRVGGCDVGCHWCDVKESWAPEKHPPTSVDHIVSNAAKYSKTIVVTGGEPLTWNMEPLTSGLKDAGLDVHIETSGAYPLTGQWDWICLSPKKAKMPLQEVYEAAHELKVIVYNRHDLAFAKAESEKVSSQCKLFLQPEWSVREKMIPLITEFVMQNPEWQVSLQTHKYLNIP

SEQ ID NO: 32114 - protein, 210 aa, unidentified
  source 1..210: note = Nonlabens dokdonensis
  REGION 1..210: note = tr|A0A1Z8AW23|A0A1Z8AW23_9FLAO 7-carboxy-7-deazaguanine synthase OS=Nonlabens dokdonensis; OX = 328515 GN=queE PE=3 SV=1
MLEKNIQQQVEKGTMLPLMEEFYTIQGEGYHTGRAAYFIRVGGCDVGCHWCDVKESWAPEKHPPTSVDHIVSNAAKYSKTIVVTGGEPLTWNMEPLTAGLKNAGLDVHIETSGAYPLTGHWDWICLSPKKAKMPLQEVYEAAHELKVIVYNRHDLAFAKAESEKVSSHCKLFLQPEWSVREKMIPFITEFVMENPEWQVSLQTHKYLNIP

SEQ ID NO: 32115 - protein, 209 aa, unidentified
  source 1..209: note = Nonlabens marinus
  REGION 1..209: note = tr|W8VQ90|W8VQ90_9FLAO 7-carboxy-7-deazaguanine synthase OS=Nonlabens marinus S1-08 OX=1454201 GN=queE; PE = 3 SV=1
MEKKIQDQVNAGTLLPLMEEFYTIQGEGFHTGTAAYFIRVGGCDVGCHWCDVKESWNADTHPPTHIDQIIDHAAQWSKTIVITGGEPLTWDMEPLTQGLKDRGMTVHIETSGAYPLSGAWDWICLSPKKVKMPVAEIYKEAHELKMIIYNKSDFAFAKAEAQKVSATCQLFLQPEWSVREKMIPQITEFVMQNPEWRVSLQTHKYLNIP

SEQ ID NO: 32116 - protein, 210 aa, unidentified
  source 1..210: note = Nonlabens sediminis
  REGION 1..210: note = tr|A0A090Q245|A0A090Q245_9FLAO 7-carboxy-7-deazaguanine synthase OS=Nonlabens sediminis; OX = 319236 GN=queE PE=3 SV=1
MNQEVVQDQVEKGLMLPLMEEFYTIQGEGSHTGRAAYFIRVGGCDVGCHWCDVKESWDPEKHPPTAIDQIIENASKYSKTIVITGGEPLTWDMGPLTQGLKERQMQVHIETSGAYPLTGDWDWICLSPKKVKMPVPEIYPKAHELKVIVYNKHDFAFAKAEAEKVSSSCKLYIQPEWSVREKMIPLITDFVMQNPEWQVSLQTHKYLNIP

SEQ ID NO: 32117 - protein, 209 aa, Nonlabens sp.
  REGION 1..209: note = tr|A0A1G5BBV3|A0A1G5BBV3_9FLAO 7-carboxy-7-deazaguanine synthase OS=Nonlabens sp. Hel1_33_55 OX=1336802 GN=queE PE=3 SV=1
MKETIENKVNAGLMLPLMEEFYTIQGEGFHTGTAAYFIRIGGCDVGCHWCDVKESWNAETHPPTSIEQIVDHADKWSKTIVITGGEPLTWNMQPLTRALKDRDMTVHIETSGAYPLTGIWDWICLSPKKIKMPVPEIYKKANELKVIVYNKNDFAFAKAESQKVSANCQLFLQPEWSVREKMIPLITEFVMENPEWRVSLQTHKYLNIP

SEQ ID NO: 32118 - protein, 210 aa, Nonlabens sp.
  REGION 1..210: note = tr|A0A2K8X5T0|A0A2K8X5T0_9FLAO 7-carboxy-7-deazaguanine synthase OS=Nonlabens sp. MB-3u-79 OX=2058134 GN=queE PE=3 SV=1
MLEKTLQQQVEKGTMLPLMEEFYTIQGEGYHTGRAAYFIRVGGCDVGCHWCDVKESWAPEKHPPTGVDHIVANAAKYSKTIVVTGGEPLTWNMEPLTTGLKNAGLDIHIETSGAYPLTGQWDWICLSPKKAKMPLQEVYLSAHELKVIVFNRHDLAFAKAESEKVSSQCKLFLQPEWSVREKMIPLITEFVMENPEWQVSLQTHKYLNIP

SEQ ID NO: 32119 - protein, 210 aa, unidentified
  source 1..210: note = Nonlabens spongiae
  REGION 1..210: note = tr|A0A1W6MNR8|A0A1W6MNR8_9FLAO 7-carboxy-7-deazaguanine synthase OS=Nonlabens spongiae; OX = 331648 GN=queE PE=3 SV=1
MLEKEIKTAVDRGDMLPLMEEFYTIQGEGYHTGRAAYFIRVGGCDVGCHWCDVKESWDPAKHPPTETSKIVENAAKYSKTIVVTGGEPLTWDMNPLTSQLKAKDLQVHIETSGAYPLTGTWDWICLSPKKVKMPLPEAYEAAHELKVIVYNRHDLAFAKAESQKVNPDCKLFLQPEWSVREKIIPLITDFVMQNPEWQVSLQTHKYLNIP

SEQ ID NO: 32120 - protein, 210 aa, Nonlabens tegetincola; identical to SEQ ID NO: 32116
  REGION 1..210: note = tr|A0A2S7T451|A0A2S7T451_9FLAO 7-carboxy-7-deazaguanine synthase OS=Nonlabens tegetincola; OX = 323273 GN=queE PE=3 SV=1

SEQ ID NO: 32121 - protein, 118 aa, unidentified
  source 1..118: note = Nonlabens ulvanivorans
  REGION 1..118: note = tr|A0A090PW06|A0A090PW06_NONUL Queuosine biosynthesis queE radical SAM OS=Nonlabens ulvanivorans; OX = 906888 GN=JCM19297_1471 PE=4 SV=1
MGPLTTGLKNKGMQVHIETSGAYPLSGSWDWICLSPKKMKMPLPEVYEAAHELKVIIFNKHDFAFAKAEAEKVSSTCKLYLQPEWSVREKMIPLITEFVMDNPEWHVSLQTHKYLNIP

SEQ ID NO: 32122 - protein, 210 aa, unidentified
  source 1..210: note = Nonlabens ulvanivorans
  REGION 1..210: note = tr|A0A090QCM8|A0A090QCM8_NONUL 7-carboxy-7-deazaguanine synthase OS=Nonlabens ulvanivorans OX=906888 GN=queE PE=3 SV=1
MLEKSISQAVEKGEMLPLMEEFYTIQGEGSHTGKAAYFIRVGGCDVGCHWCDVKESWDPEKHPPTAVDAIVANAAKYSKTIVVTGGEPLTWDMGPLTTGLKSEGMQVHIETSGAYPLSGSWDWICLSPKKMKMPLPEVYEAAHELKVIIFNKHDFAFAKAEAEKVSSNCKLYLQPEWSVREKMIPLITEFVMDNPEWHVSLQTHKYLNIP

SEQ ID NO: 32123 - protein, 210 aa, unidentified
  source 1..210: note = Nonlabens xylanidelens
  REGION 1..210: note = tr|A0A2S6IHD8|A0A2S6IHD8_9FLAO 7-carboxy-7-deazaguanine synthase OS=Nonlabens xylanidelens OX=191564 GN=queE PE=3 SV=1
MLEKTIQQQVEKGTMLPLMEEFYTIQGEGYHTGRAAYFIRVGGCDVGCHWCDVKESWDPEKHPPTGVDQIVVNAAKYSKTIVVTGGEPLTWNMEPLTTGLKNASLDVHIETSGAYPLSGHWDWICLSPKKAKMPLPEVYEAAHELKVIVFNRHDLAFAKAESEKVSSTCKLFLQPEWSVREKMIPFITEFVMENPEWQVSLQTHKYLNIP

SEQ ID NO: 32124 - protein, 240 aa, unidentified
  source 1..240: note = Nonomuraea fuscirosea
  REGION 1..240: note = tr|A0A2T0LXZ3|A0A2T0LXZ3_9ACTN 7-carboxy-7-deazaguanine synthase OS=Nonomuraea fuscirosea; OX = 1291556 GN=queE PE=3 SV=1
MSATEVSVPPHDATLLISERFGPTLQGEGPSTGMNALFVRLSRCNLSCSWCDTPYTWDPTRFNLREHRERVPVADLVAWALNRPVPLIVITGGEPLLQQRHLAPLAEPLLRAGRHLEIETNGTIAPDPALLVDGLRFNVSPKLGNANVPRKRRIKPAALEALSSSGQAVFKFVACCLDDLDEIAELAERFAMKQVWVMPEGVTADHVLSRAQLLSEAVIARGWSLSLRLHVLLWGDERGR

SEQ ID NO: 32125 - protein, 267 aa, unidentified
  source 1..267: note = Nonomuraea solani
  REGION 1..267: note = tr|A0A1H5T033|A0A1H5T033_9ACTN 7-carboxy-7-deazaguanine synthase OS=Nonomuraea solani; OX = 1144553 GN=queE PE=3 SV=1
MSADLLSIADPTEQRPVPIAELFYSFQGEGVNLGRRALLVRFLGCNLTCGYRQAPATGDIPAQGTMLCDTEYTWNSAKHDLSDGVRHLTPQGVWDELINLDPATATPSIAPVDLIVVTGGEPLLHQDAILHLARQAALTGRHIEIETNATIKPNPKLLSPGVAFNAGPKLASSAVPRKKRIKPDAIRAIEASGQARWKFVVSTLEDLTEIAELQAEFGLTEIWLSPEGTTPTRVLERMRMAASFALAHGWNLTTREHVLIWGGQRAK

SEQ ID NO: 32126 - protein, 211 aa, unidentified
  source 1..211: note = Nonomuraea solani
  REGION 1..211: note = tr|A0A1H6EYU3|A0A1H6EYU3_9ACTN 7-carboxy-7-deazaguanine synthase OS=Nonomuraea solani; OX = 1144553 GN=queE PE=3 SV=1
MYRVKEIFYTLQGEGAHAGRPAVFCRFTGCNLWTGHEEHRVRAICKFCDTDFVGTDGSGGGRFRTAADLAAAVAAFWPADVAGGERYVVCTGGEPLLQLDHAAVEALHESGFTVAVETNGTRAAPPGIDWICVSPKSSAELVLTSGDELKLVFPQHDARPERYEELDFARFSLQPMDGPDAVANTRLALEYCLTNPRWRLSLQTHKIVGIR

SEQ ID NO: 32127 - protein, 240 aa, Nonomuraea sp.
  REGION 1..240: note = tr|A0A2W2G8D0|A0A2W2G8D0_9ACTN 7-carboxy-7-deazaguanine synthase OS=Nonomuraea sp. KC333; OX = 2070368 GN=queE PE=3 SV=1
MTATAVSAPSRAAELLLAERFGPTLQGEGPSIGQSALFIRLSRCNLSCTWCDTPYTWDSARFDLRQQSERTSVADLVAWALAHPVPLIVITGGEPLLQQRHLPALAEPLLQAGRRLEIETNGTVAPDSALLLAGLRFNVSPKLANAGVPADRRIKSAALEALSASGKAVFKFVARDAADLADLAELAERFAMRQVWVMPEGVTADDVLGCAQALAETVIARGWSLSLRLHVLLWGDERGR

SEQ ID NO: 32128 - protein, 233 aa, Nonomuraea sp.
  REGION 1..233: note = tr|A0A4R4VPU2|A0A4R4VPU2_9ACTN 7-carboxy-7-deazaguanine synthase OS=Nonomuraea sp. KC310; OX = 1848322 GN=queE PE=3 SV=1
MPALPVSEVFGPTIQGEGPYAGRSAWFVRLGGCNLSCSWCDSAYTWDAQRFDLRREIPMTPVEEVLAQVPSSSLVVVTGGEPLLHQNRPAWRALCNGLRARRCTLHVETNGTIVPNETTRGCVQTFVVSPKLANAGVHRGNIDPALRTGWVEVAESGNAHLKVVCASTDDVAGALEIARTTGWPLSQVWVMPEGTTAQELNGRWRAIADAAAHAGINATHRLHILAWQDCRGH

SEQ ID NO: 32129 - protein, 246 aa, unidentified
  source 1..246: note = Nosocomiicoccus massiliensis
  REGION 1..246: note = tr|A0A2J6NIG8|A0A2J6NIG8_9STAP 7-carboxy-7-deazaguanine synthase OS=Nosocomiicoccus massiliensis OX=1232430 GN=queE PE=3 SV=1
MRQQKKMPIMEIFGPTIQGEGMVIGRKTMFVRTGGCDYSCAWCDSAFTWNGEEKANVLSAEDVYNKIQEIGYIDNRRNFNHVTITGGNPALINKPMNDLIDMLHNDDVKVGLETQGSIYQDWFLKIDDLTISPKPPSSKMETDFKILDDILNKLHEANVNFSLKVVIFNEEDFDYAKYVYNRYKNYNRNFYVSVGNPDPYEGGDISRRLLNDLKELWEMVLNDPEANDFKPLPQLHALIYDNQRGV

SEQ ID NO: 32130 - protein, 265 aa, unidentified
  source 1..265: note = Nostoc azollae
  REGION 1..265: note = tr|D7DYT9|D7DYT9_NOSA0 7-carboxy-7-deazaguanine synthase OS=Nostoc azollae (strain 0708) OX=551115 GN=queE; PE = 3 SV=1
MIAKTTVKPTARLVEVFSAIQGEGLNVGTRQIFIRFGLCDLRCHFCDSAHTWDAPSLCKIELSPGLRDFEMHSNPIPPATLIKWVERQNLPFLHDSISLTGGEPLLHAPFLAQFLPEVRAQTNLPIYLETGGHRPDQLAMILPYLDSVGMDLKLPSVSGETHWTEHKEFLQICFEANLDIFVKIIVSQRTDPGELERSALLVAEVGQDIPIFLQPVTPLAESQQFSSVPVEAPAPQQVLEWQALMKKFVKQVRVIPQTHKMLNQM

SEQ ID NO: 32131 - protein, 265 aa, Nostoc calcicola
  REGION 1..265: note = tr|A0A1U7IBX4|A0A1U7IBX4_9NOSO 7-carboxy-7-deazaguanine synthase OS=Nostoc calcicola FACHB-389 OX=1357508 GN=queE PE=3 SV=1
MIAKTTVTSTARLVEVFSAIQGEGLNVGTRQIFIRFALCDLRCHFCDSAHTWNAPLNCRIERSPGLRDFEIYSNPVPLPILIEWVQRQNLPSLHDSISLTGGEPLLHAQFLTQFLPEVRAITGLPIYLETGGHRPEQLAMILPYLDSVGMDFKLPSVSGESHWQEHAKFLQLCRDSYLNVFVKIIVSQNTDPAELERSALLVADVSPDIPVFLQPVTPLIESEQFSPIPALAPAPDRVLMWQALMKQFLKQVRVIPQTHKMLNQL

SEQ ID NO: 32132 - protein, 277 aa, unidentified
  source 1..277: note = Nostoc carneum
  REGION 1..277: note = tr|A0A1Z4HNZ2|A0A1Z4HNZ2_9NOSO 7-carboxy-7-deazaguanine synthase OS=Nostoc carneum NIES-2107 OX=1973483 GN=queE PE=3 SV=1
MTTRRDRFFNHPMTAKTTVKPTARLIEVFSAIQGEGLNVGTRQIFIRFALCDLRCHFCDSAHTWNAPSICRIERTPGLRDFEEHSNPIPLPILLEWVERQNQPSIHDSISLTGGEPLLHAPFLELFLPQVRSLTNLPIYLETGGHRPEQLAMILPYLDSVGMDLKLPSVSGESYWQEHGQCLKLSYDSHLNIFVKIIISQQTEPTELERSALLVASVSSDIPVFLQPVTPLPVSEKSPAKTILAPTPDQVLQWQALMKQWLKHVRVVPQTHKMLNQL

SEQ ID NO: 32133 - protein, 265 aa, Nostoc commune
  REGION 1..265: note = tr|A0A2R5FTU4|A0A2R5FTU4_NOSCO 7-carboxy-7-deazaguanine synthase OS=Nostoc commune NIES-4072 OX=2005467 GN=queE PE=3 SV=1
MIAKNTVTPTARLIEIFSAIQGEGLNVGTRQIFIRFALCDLRCQFCDSVHTWNAPASCRIERSPGLRDFEIHSNPVSLPILVEWVERQNVPSLHDSISLTGGEPLLHAPFLTQFLPEVRAITGLPIYLETGGHRPEQLAIILPYLDSVGMDLKLPSVSGESHWQEHAKFLQLCHDSYLNVFVKIIVSQNTDPAELERSALLVAEVSPDISVFLQPVTPLAVSEQFSSIPVFAPTADQVLTWQALMKGFLKYVRVIPQTHKMLNQL

SEQ ID NO: 32134 - protein, 266 aa, unidentified
  source 1..266: note = Nostoc cycadae
  REGION 1..266: note = tr|A0A2H6LBD9|A0A2H6LBD9_9NOSO 7-carboxy-7-deazaguanine synthase OS=Nostoc cycadae WK-1; OX = 1861711 GN=queE PE=3 SV=1
MTANITVEPTARLIEVFSAIQGEGLNVGTRQIFIRFALCDLRCHFCDSSHTWNAPTTCKVERSPGLRDFEIHSNPVPLTILLEWIKRQNLPLLHDSISVTGGEPLLHAPFLHEFLPQVRSLTGLPIYLETGGHRPDQLAMILPYLDSVGMDWKLPSVSGETYWQAHAKFLQLCHNNPSVDVFIKIIISQSTNPDELKQAALLIADINPNIPVFLQPVTPLPVSEQFTPTPILAPNPDQVLMWQVLMKKFVPHVRVVPQTHKMLNQL

SEQ ID NO: 32135 - protein, 265 aa, unidentified
  source 1..265: note = Nostoc flagelliforme
  REGION 1..265: note = tr|A0A2K8SYV3|A0A2K8SYV3_9NOSO 7-carboxy-7-deazaguanine synthase OS=Nostoc flagelliforme CCNUN1 OX=2038116 GN=queE PE=3 SV=1
MIAKNTVTPTARLIEIFSAIQGEGLNVGTRQIFIRFALCDLRCQFCDSVHTWNAPASCRIERSPGLRDFETYSNPISLPILIEWVERQNVPCLHDSISLTGGEPLLHAPFLTQFLPEVRAITGLPIYLETGGHRPEQLAMILPYLDSVGMDLKLPSVSGESYWQEHAKFLQLCHNSYLNVFVKIIVSQNTDPAELERSALLVAEVSPDISVFLQPVTPLPVSEQFSPIPALAPTADQVLMWQALMKGFLKHVRVIPQTHKMLNQL

SEQ ID NO: 32136 - protein, 265 aa, unidentified
  source 1..265: note = Nostoc linckia
  REGION 1..265: note = tr|A0A1Z4L535|A0A1Z4L535_NOSLI 7-carboxy-7-deazaguanine synthase OS=Nostoc linckia NIES-25 OX=1091006 GN=queE PE=3 SV=1
MIAKTTVTPTARLVEVFSAIQGEGLNVGTRQIFIRFALCDLRCHFCDSAHTWNAPVSCRIERSPGLRDFEIYSNPVPLPILIEWVERQNLPSLHDSISLTGGEPLLHAPFLTQFLPKVRDITGLPIYLETGGHRPEQLAMILPYLDSVGMDFKLPSVSGESHWQEHAKSLQLCHDSYLNVFVKIIVSQNTDPAELERSALLVADISPDIPVFLQPVTPLTESEQLSPIPVLAPTPDRVLIWQALMKQSLKQVRVIPQTHKMLNQL

SEQ ID NO: 32137 - protein, 265 aa, unidentified
  source 1..265: note = Nostoc linckia
  REGION 1..265: note = tr|A0A2C6WID8|A0A2C6WID8_NOSLI 7-carboxy-7-deazaguanine synthase OS=Nostoc linckia z16; OX = 1628751 GN=queE PE=3 SV=1
MIAKTTVTPTARLVEVFSAIQGEGLNVGTRQIFVRFALCDLRCHFCDSAHTWNAPVSCRIERSPGLRDFEIYSNPVPLPILIEWVERQNLPSLHDSISLTGGEPLLHAPFLTQFLPKVRDITGLPIYLETGGHRPEQLAMILPYLDSVGMDFKLPSVSGESHWQEHAKSLQLCHDSYLNVFVKIIVSQNTDPDELERSALLVADISPDIPVFLQPVTPLPESEQFSPIPVLAPTPDRVLMWQALMKQSLKQVRVIPQTHKMLNQL

SEQ ID NO: 32138 - protein, 265 aa, Nostoc minutum
  REGION 1..265: note = tr|A0A367RMS0|A0A367RMS0_9NOSO 7-carboxy-7-deazaguanine synthase OS=Nostoc minutum NIES-26 OX=1844469 GN=queE PE=3 SV=1
MTAKTTVKPTARLIEVFSAIQGEGLNVGTRQIFIRFALCDLRCHFCDSAHTWNAPATCKVERSPGLRDFEIHSNPVPLPTLIEWVQRQNLPCLHDSISLTGGEPLLHVPFLKEFLPEVRSLTNLPVYLETGGHRPEQLATILPYLDSVGMDFKLPSVSGESHWSEHAKFLQLCFGSHLDIFVKIIISNNTDPTELERSALLVADVSPDIPIFLQPVTPLPASEQFTQTPVLAPTPEQVLMWQALMKKFVPHVRVIPQTHKMLNQL

SEQ ID NO: 32139 - protein, 265 aa, unidentified
  source 1..265: note = Nostoc piscinale
  REGION 1..265: note = tr|A0A0M5MG18|A0A0M5MG18_9NOSO 7-carboxy-7-deazaguanine synthase OS=Nostoc piscinale CENA21 OX=224013 GN=queE PE=3 SV=1
MTANTTEPTARLIEVFSAIQGEGLNVGTRQIFIRFALCDLRCNFCDSSHTWNAPTTCKVERSPGSREFEIHSNPVPLTILLDWIKRQNLPLLHDSISLTGGEPLLHAPFLDEFLPQVRSLTGLPIYLETGGHRPEQLAMILPYLDSVGMDWKLPSVSGETYWQEHTKFLQLCHNNPSLDVFVKIIISQNTNPDELQKTALLIADINPKVPVFLQPVTPLPASEQFTAKPLLAPNPDQVLMWQALMKKFVPHVRVVPQTHKMLNQL

SEQ ID NO: 32140 - protein, 265 aa, unidentified
  source 1..265: note = Nostoc punctiforme
  REGION 1..265: note = tr|A0A367RFU3|A0A367RFU3_NOSPU 7-carboxy-7-deazaguanine synthase OS=Nostoc punctiforme NIES-2108 OX=1356359 GN=queE PE=3 SV=1
MIAKNTVTPTARLIEVFSAIQGEGLNVGTRQIFIRFALCDLRCHFCDSAHTWSAPTTCRIERSPGLRDFEIHSNPVPLPILIEWVEQQNLPCLHDSISLTGGEPLLHASFLTQFLPQVRAITGLPIYLETGGHRPEQLAMIIPYLDSVGMDLKLPSVSGESHWQEHSKFLQLCYDSYLNVFVKIIVSQNTDPAELERSASLVAEVSPDISVFLQPVTPLAVSEQFSPVPALAPSSDQVLTWQALMKGFVKHVRVIPQTHKMLNQL

SEQ ID NO: 32141 - protein, 265 aa, unidentified
  source 1..265: note = Nostoc punctiforme
  REGION 1..265: note = tr|B2JA32|B2JA32_NOSP7 7-carboxy-7-deazaguanine synthase OS=Nostoc punctiforme (strain ATCC 29133 / PCC 73102) OX=63737 GN=queE PE=3 SV=1
MIAKTTVTPTARLVEVFSAIQGEGLNVGTRQIFIRFALCDLRCHFCDSAHTWNAPATCRIERSPGLRDFEIHSNPVPLPILIEWVEQQNLPCLHDSISLTGGEPLLHAPFLTQFLPQVRAITGLPIYLETGGHRSEQLAMILPYLDSVGMDFKLPSVSGESHWQEHAKFLQLCHDSYLNVFVKIIVSQNTDPGELERSASLVAKVSPDIPVFLQPVTPLAVSEQFSSILMLAPTPDQVLTWQALMKGFIKHVRVIPQTHKMLNQL

SEQ ID NO: 32142 - protein, 209 aa, Nostoc sp.
  REGION 1..209: note = tr|A0A318AJT7|A0A318AJT7_9NOSO 7-carboxy-7-deazaguanine synthase OS=Nostoc sp. 3335mG; OX = 2204170 GN=queE PE=3 SV=1
MSFAVKEIFLTLQGEGINAGRRAVFLRFAGCNLWSGREEDRATAQCTFCDTDFIGMDGEEGGRYDLAALVAKVSALWGDIGGDRLVVMTGGEPMLQVTDALVDALHVAGFEVAMETNGTLPAAPGIDWVTVSPKAGNEVVQRSGQELKLVWPQSGIDPEAMRGWDFAHFLIQPMDGIGREEWRETAIRYVMDHPGWRLSVQTHKAMGIP

SEQ ID NO: 32143 - protein, 264 aa, Nostoc sp.
  REGION 1..264: note = tr|K9QZ37|K9QZ37_NOSS7 7-carboxy-7-deazaguanine synthase OS=Nostoc sp. (strain ATCC 29411 / PCC 7524); OX = 28072 GN=queE PE=3 SV=1
MTAKTTAEPTARLIEVFSAIQGEGLNVGTRQIFIRFAFCDLRCHFCDSVHTWNAPANCRIERSPGLRDFETHPNPVPIPILLEWIERQNLPSLHDSISLTGGEPLLHAGFLKEFLPQVRSLTGLPIYLETGGHRPEQLAMILPYLDLVGMDWKLPSVSGESHWQEHMKFLQICYPNLETFIKIIISDQTDVAELEQAALLVADVSPEIPLFLQPVTPLAESEQFTKTPVLAPTPEQVLTWQALMKRFLKQVRVVPQTHKMLNQL

SEQ ID NO: 32144 - protein, 265 aa, unidentified
  source 1..265: note = Nostocales cyanobacterium
  REGION 1..265: note = tr|A0A1Y0RJ39|A0A1Y0RJ39_9CYAN 7-carboxy-7-deazaguanine synthase OS=Nostocales cyanobacterium HT-58-2 OX=1940762 GN=queE PE=3 SV=1
MTVKTTITPSARLIEVFSAIQGEGLNVGTRQIFIRFALCDLRCHFCDSAHTWHAPATCRIEQTPGLRDFEIYSNPVTLPMLLEWVERQNLPFLHDTISLTGGEPLLHTPFLVEFLPQVRSVTGLPVYLETGGHRPEQLDTILPYIDSVGMDFKLPSTSGETRWQEHTKFLELCWKSQVEVFIKIIVSQTTDPTELERSAELIASISPSIPVFLQPVTPLDDPIAFNQPPVLAPSPSQVLNWQALMKRYVKQVRVIPQTHKMLNQL

SEQ ID NO: 32145 - protein, 214 aa, unidentified
  source 1..214: note = Notoacmeibacter marinus
  REGION 1..214: note = tr|A0A231UXI6|A0A231UXI6_9RHIZ 7-carboxy-7-deazaguanine synthase OS=Notoacmeibacter marinus OX=1876515 GN=queE PE=3 SV=1
MSYAVKEMFYTLQGEGAQAGRASLFCRFAGCNLWSGREQDRHKAVCQFCDTDFVGMDGPGGGRFASADKLAARARQMWDETAAGENGQPYIVCTGGEPLLQLDPPLIAALHAAGFEIAVETNGTIEAPAGIDWICVSPKAGSELVQKAGHELKLVWPQPPFALEQFEPLAFDRFYLQPMDGPYVAANTRLCVETAMARPKWRLSLQTHKIIGIA

SEQ ID NO: 32146 - protein, 214 aa, unidentified
  source 1..214: note = Notoacmeibacter sp.
  REGION 1..214: note = tr|A0A3L7JD57|A0A3L7JD57_9RHIZ 7-carboxy-7-deazaguanine synthase OS=Notoacmeibacter sp. M2BS9Y-3-1 OX=2448481 GN=queE PE=3 SV=1
MSYAVKEMFYTLQGEGAQAGRASLFCRFAGCNLWTGREQDRHKAICQFCDTDFIGMDGPGGGRCATPKDLAQQARRMWDQTAASQSGKPYIVCTGGEPLLQLDAPLIAALHEAGFEIAVETNGTIAAPDGIDWICVSPKAGSELVQTRGNELKLVWPQPPFSLEQFEPLAFDKFYLQPMDGPDVIANTQLCVKTSMARPQWRLSLQTHKMIGIA

SEQ ID NO: 32147 - protein, 211 aa, unidentified
  source 1..211: note = Noviherbaspirillum autotrophicum
  REGION 1..211: note = tr|A0A0C2BX13|A0A0C2BX13_9BURK 7-carboxy-7-deazaguanine synthase OS=Noviherbaspirillum autotrophicum OX=709839 GN=queE PE=3 SV=1
MSYSVKEIFYTLQGEGTHAGRPAVFCRFSGCNLWSGRESDRASAVCKFCDTDFVGMDGELGGKYPDSSSLAKTIDTLWPAAYAASKFVVFTGGEPLLQLDAALIESMHACGFEIAIESNGTLPVPAGVDWVCISPKVGSTLQVRKGNELKVVIPQQNQNLDDYEPLDFDHFYLQPMDGPDVERNTQRAIELCKQRPQWKLSLQTHKLLQIP

SEQ ID NO: 32148 - protein, 211 aa, unidentified
  source 1..211: note = Noviherbaspirillum denitrificans
  REGION 1..211: note = tr|A0A254THP3|A0A254THP3_9BURK 7-carboxy-7-deazaguanine synthase OS=Noviherbaspirillum denitrificans OX=1968433 GN=queE PE=3 SV=1
MTYSVKEIFYTLQGEGTHAGRPAVFCRFAGCNLWTGRESDRASAICKFCDTDFVGTDGVRGGKFADGAALAETIDALWPAAYTKSKFVVFTGGEPLLQLDGALIEAMHARGFEIAIETNGTIAVPDGVDWICVSPKVGSELVVRRGNELKVVIPQANQDVATYESLDFDHFYLQPMDGPDAAHNTRLAIEMCRTNPKWKLSLQTHKLLQIP

SEQ ID NO: 32149 - protein, 211 aa, unidentified
  source 1..211: note = Noviherbaspirillum humi
  REGION 1..211: note = tr|A0A239H877|A0A239H877_9BURK 7-carboxy-7-deazaguanine synthase OS=Noviherbaspirillum humi OX=1688639 GN=queE PE=3 SV=1
MTYSVKEMFYTLQGEGTHAGRPAVFCRFSGCNLWSGREADRATAVCRFCDTDFVGTDGEGGGKFAAAADLAERIDSFWPAAYPQRKFVVFTGGEPLLQLDAPLLEQVHARGFEVAIESNGTLPVPAGVDWVCISPKIGSELVVTKGDELKVVIPQLGQDISRYENLDFTHFYLQAMDGPKVEANTRLAIETCKQRPRWKLSLQTHKLLHIP

SEQ ID NO: 32150 - protein, 211 aa, unidentified
  source 1..211: note = Noviherbaspirillum sp.
  REGION 1..211: note = tr|A0A3A3G8S5|A0A3A3G8S5_9BURK 7-carboxy-7-deazaguanine synthase OS=Noviherbaspirillum sp. K1S02-23 OX=2320865 GN=queE PE=3 SV=1
MTYSVKEIFYTLQGEGTHAGRPAVFCRFSGCNLWSGRESDRASAVCKFCDTDFVGTDGERGGKYPGAQQLADAIDSLWPDTHAASKYVVFTGGEPLLQLDTPLIDAVHAAGFEIAIETNGTLPVPPGVDWICVSPKIGSELVQRSGNELKVVIPQVGQSLQDYETLDFQHFYVQPMDGPQQEANTRLAIDTCKRNPHWKLSLQTHKLLQIP

SEQ ID NO: 32151 - protein, 211 aa, unidentified
  source 1..211: note = Noviherbaspirillum sp.
  REGION 1..211: note = tr|A0A5B8N557|A0A5B8N557_9BURK 7-carboxy-7-deazaguanine synthase OS=Noviherbaspirillum sp. UKPF54 OX=2601898 GN=queE PE=3 SV=1
MSYIVKEIFYTLQGEGTHAGRPAVFCRFSGCNLWSGRESDRASAVCKFCDTDFVGTDGELGGKYPDSASLAKAIDALWPAAYPASKFVVFTGGEPLLQLDAALIESMHAHGFEIAIESNGTLPVPAGVDWICISPKIGSMLQVRRGNELKVVIPQQNQNLDDYELLEFDHFYLQPMDGPDAERNTQLAIELCKQRPQWKLSLQTHKLLQIP

SEQ ID NO: 32152 - protein, 208 aa, unidentified
  source 1..208: note = Novimethylophilus kurashikiensis
  REGION 1..208: note = tr|A0A2R5F766|A0A2R5F766_9PROT 7-carboxy-7-deazaguanine synthase OS=Novimethylophilus kurashikiensis OX=1825523 GN=queE PE=3 SV=1
MHEIFFSLQGETSRMGLPTAFVRLTGCPLRCGYCDTAYAFQGGSTMELAEILDKVAATGAHYVTVTGGEPLAQKDCLPLLKQLCDAGYNVSIETGGSLDISGVDPRVSVILDIKTPGSGEVSKNLWTNLDHIKPKDEIKFVICNREDYEWARQVLQERQLAERCPVLFSPVYGEISARDLAEWGLADKLPVRFQVQLHKILWGEEPGR

SEQ ID NO: 32153 - protein, 247 aa, Novosphingobium aromaticivorans
  REGION 1..247: note = tr|Q2G4E0|Q2G4E0_NOVAD 7-carboxy-7-deazaguanine synthase OS=Novosphingobium aromaticivorans (strain ATCC 700278 / DSM 12444 / CIP 105152 / NBRC 16084 / F199); OX = 2792 38 GN=queE PE=3 SV=1
MLTLATVNPGEPEVFSSLQGEGPGMGRPSVFVRLSRCNLACRWCDTAYTWRFAGDNRPHRDEVAFEKAGNQLVMSEEDTAALILVHPEDRLVITGGEPLLQGAALARLVALLKAERPALHVEIETNGTVAVHPALDPLVDQFNVSPKLSHSGNPAELALLPERLEAWARDPRAWFKFVVADPSDLAEISALQDRFGIAPDHLFVMPEGTSSAVLRDRSRWLAEEALVRGWRFTDRLHIHLYGDTRGT

SEQ ID NO: 32154 - protein, 243 aa, unidentified
  source 1..243: note = Novosphingobium barchaimii
  REGION 1..243: note = tr|A0A147ELT6|A0A147ELT6_9SPHN 7-carboxy-7-deazaguanine synthase OS=Novosphingobium barchaimii OX=1420591 GN=queE PE=3 SV=1
MLTLATTTPGEPEIFTSLQGEGLSLGRPSTFVRLSRCNLACQWCDTAYTWRFEGDNRPHRDALAFDRTQNQVALSEEDVAARITALSPDRLVVTGGEPLLQGPALARLLALLPGMHVEIETNGTVAPHPALDGLVHQYNVSPKLAHSGNPADLALMPERLQAWATDPRAVFKFVIAQAADMAQVLGLQRDYAIPADRVFLMAEGRTPAELAARNRWLAQLCLDHGLRFTDRLHIHLYGDTRGT

SEQ ID NO: 32155 - protein, 248 aa, unidentified
  source 1..248: note = Novosphingobium barchaimii
  REGION 1..248: note = tr|A0A0J8B1I5|A0A0J8B1I5_9SPHN 7-carboxy-7-deazaguanine synthase OS=Novosphingobium barchaimii LL02 OX=1114963 GN=queE PE=3 SV=1
MTLTLATTTPGEPEIFASLQGEGPSMGRPSTFVRLSRCNLACQWCDTAYTWRFTGDNRFHRDDLAFERRENQVAMEEGDLARAVADLVPDRLVITGGEPLLQGAALARMVAALNELRPGMHVEVETNSTVAPHPALDGLVHQYNVSPKLAHSGNPAELALLPDRLSAWAANPRAFFKFVIAEKSDLTEVMALQETYAIPGPRLFLMPEGRSSDVIRKRSGWLADFCSLHGLRFTDRLHIHLWGDTRGT

SEQ ID NO: 32156 - protein, 248 aa, unidentified
  source 1..248: note = Novosphingobium fuchskuhlense
  REGION 1..248: note = tr|A0A117USK6|A0A117USK6_9SPHN 7-carboxy-7-deazaguanine synthase OS=Novosphingobium fuchskuhlense OX=1117702 GN=queE PE=3 SV=1
MSLTLATTTPGEPEIFPSLQGEGPSAGRPCVFVRLSRCNLACRWCDTAYTWRFTGDIRPHRDDLTFERSENQITLDVREVAMRILALRPTRLVITGGEPLLQAPALGRLIPMLKEAVPGLEVEIETNGSVPPPHSITQLVDQFNVSPKLSHSGNDESLALVPALLREWAASTKAWFKFVVADEDDVNEVAELQAIYHIPAERLFVMPEGTSSKILRERSKWLAGAALTHGWRFTDRLHIHLYGDTRGT

SEQ ID NO: 32157 - protein, 243 aa, unidentified
  source 1..243: note = Novosphingobium ginsenosidimutans
  REGION 1..243: note = tr|A0A5B8S591|A0A5B8S591_9SPHN 7-carboxy-7-deazaguanine synthase OS=Novosphingobium ginsenosidimutans OX=1176536 GN=queE PE=3 SV=1
MLTLATTTPGEPEIFASLQGEGPSIGRPVAFVRLSRCNLACTWCDTAYTWRFEGDNRPHRDGLAFERKANQVVLDEADVAARIMALGQDRLVITGGEPLLQGTALARMVTLLEGMSVEIETNGTVAPHPALDPLVSQYNVSPKLKHSGNPVDSAQIPERFAEWIQKPQVWFKFVVATPDDVAEVLDLIETHRLPRERTFVMPEGTDSATLRERERWLAPLALQHGLRLSDRMHIHLYGDTRGT

SEQ ID NO: 32158 - protein, 247 aa, unidentified
  source 1..247: note = Novosphingobium guangzhouense
  REGION 1..247: note = tr|A0A2K2FVZ7|A0A2K2FVZ7_9SPHN 7-carboxy-7-deazaguanine synthase OS=Novosphingobium guangzhouense OX=1850347 GN=queE PE=3 SV=1
MLTLATTTPGQPEIFASLQGEGPSMGRPSTFVRLSRCNLACQWCDTAYTWRFTGDNRFHRDALAFERRENQVTMEEAELAQAVADLVPDRLVITGGEPLLQGAALARMLAALDAIRPGMHVEVETNSTVAPHPALDARIDQYNVSPKLAHSGNPADLALLPDRLSAWAAEPRAFFKFVVATRADVDEVMALQQTYAIPGARLFLMPEGRSSDVIRERSGWLADFCSQHGLRFTDRLHIHLWGDTRGT

SEQ ID NO: 32159 - protein, 244 aa, unidentified
  source 1..244: note = Novosphingobium kunmingense
  REGION 1..244: note = tr|A0A2N0HKJ3|A0A2N0HKJ3_9SPHN 7-carboxy-7-deazaguanine synthase OS=Novosphingobium kunmingense OX=1211806 GN=queE PE=3 SV=1
MSLTLATVRPGEPEIFASLQGEGASAGRPVAFVRLSRCNLACQWCDTAYTWRFTGDNRPHRDGLAFERKANQIVLDEAELAERVLALGQDRLVITGGEPLLQGAALARLVPLLAGMSVEIETNGSVAPHPALDAQVAQYNVSPKLAHSGNPADLALVPERLTAWAGDPRAFFKFVVAEPDDLAEVEALQAAYGIASERLYLMGEGTDSATLLARARWLSDECLKRGWRFTDRLHIHLYGDTRGT

SEQ ID NO: 32160 - protein, 248 aa, unidentified
  source 1..248: note = Novosphingobium lindaniclasticum
  REGION 1..248: note = tr|T0IUX1|T0IUX1_9SPHN 7-carboxy-7-deazaguanine synthase OS=Novosphingobium lindaniclasticum LE124; OX = 1096930 GN=queE PE=3 SV=1
MTLALATTTPGEPEVFASLQGEGASMGRPSTFVRLSRCNLACEWCDTAYTWRFSGDNRFHRDDLAFERKANQVMAEEADVARMVADLPPDRLVITGGEPLLQGPQLARMLAALDEARPGMHVEIETNGSVAPHAVLDARVQQYNVSPKLSHSGNPAELALVPERLDAWAADPRAWFKFVVAEPADVEEVRALKERHAIPAERIFLMPEGRSSDVIRQRSGWLSDICTREGYRFSDRLHIHIWGDTRGT

SEQ ID NO: 32161 - protein, 247 aa, unidentified
  source 1..247: note = Novosphingobium malaysiense
  REGION 1..247: note = tr|A0A0B1ZV19|A0A0B1ZV19_9SPHN 7-carboxy-7-deazaguanine synthase OS=Novosphingobium malaysiense OX=1348853 GN=queE PE=3 SV=1
MLTLATTVPGDPEIFASLQGEGPSIGRPSTFVRLSRCNLACQWCDTAYTWRFEGDNRPHRDEAAFERKSNQLSLEEADVAERIAALAPDRLVITGGEPLLQGAALARMASALNDLRPGMHIEIETNGTVAPHPALDPLIHQFNVSPKLAHSGNPADLALIPERLAAWAAEPRAVFKFVVAQQADLDEVHALQDHYAIPSERLFVMPEGRSSDVLRQRSAWMADFCAQSGWRFTDRLHIHLWGDTRGT

SEQ ID NO: 32162 - protein, 248 aa, Novosphingobium mathurense
  REGION 1..248: note = tr|A0A1U6GSZ5|A0A1U6GSZ5_9SPHN 7-carboxy-7-deazaguanine synthase OS=Novosphingobium mathurense OX=428990 GN=queE PE=3 SV=1
MPLILATTTPGEPEIFASLQGEGASMGRPSTFVRLSRCNLACQWCDTAYTWRFEGDNRPHRDDTAFERKANQLTLEEADVAAQVAALPPDRLVVTGGEPLLQGAALARMIGELNAMRPGMHVEIETNGSVAPHAALDPLIHQFNVSPKLAHSGNPAELALIPERLAAWSADPRAFFKFVIAVPDDLDEVLALQQAHAIPGERIFLMPEGRSSEVVRQRSAWLADLCMNRGLRFTDRLHIHLWGDTRGT

SEQ ID NO: 32163 - protein, 248 aa, Novosphingobium nitrogenifigens
  REGION 1..248: note = tr|F1ZBN1|F1ZBN1_9SPHN 7-carboxy-7-deazaguanine synthase OS=Novosphingobium nitrogenifigens DSM 19370; OX = 983920 GN=queE PE=3 SV=1
MALVLATTTPGEAELFASLQGEGASLGRPSVFVRLSRCNLACRWCDTAYTWRFSGDNRPHRDDIAFERTANQITADEGDIATRILAFGVPRLVVTGGEPLLQAPALARMIAAVRAGNEAMHIEIETNGSVAPTPALDALIDQYNVSPKLAHSGNPADLALIPERLAAWAADPRAYFKFVIATPDDLTQVRELVATYGIVPERLFVMPEGTDSATLRERSRWLAQAAIDAGWRVTDRLHIHLYGDTRGT

SEQ ID NO: 32164 - protein, 248 aa, Novosphingobium pentaromativorans
  REGION 1..248: note = tr|G6E8L1|G6E8L1_9SPHN 7-carboxy-7-deazaguanine synthase OS=Novosphingobium pentaromativorans US6-1; OX = 1088721 GN=queE PE=3 SV=1
MPLILATTTPGEPEIFASLQGEGASMGRPSTFVRLSRCNLACQWCDTAYTWRFEGDNRPHSDDVAFERKANQLTLEEADVAARVAALHPDRLVLTGGEPLLQGPALARLVTELDALRPGMHVEVETNGSVAPHAALDPMIHQFNVSPKLAHSGNPADLALIPQRLAAWSADPRAFFKFVIAAPEDLQEVLALQQTYAIPGERIFLMPEGRSSEVVRQRSAWLADLCLDNALRFTDRLHIHLWGDTRGT

SEQ ID NO: 32165 - protein, 248 aa, Novosphingobium pentaromativorans
  REGION 1..248: note = tr|A0A2W5QE64|A0A2W5QE64_9SPHN 7-carboxy-7-deazaguanine synthase OS=Novosphingobium pentaromativorans OX=205844 GN=queE PE=3 SV=1
MTLALATTTPGEPEVFASLQGEGASMGRPSTFVRLSRCNLACQWCDTAYTWRFTGDNRFHRDDLAFERKANQVMAEEADVARMVADLPPDRLVITGGEPLLQGPQLARMLAALDEARPGMHVEIETNGSVAPHASLDARVQQYNVSPKLSHSGNPAELALVPERLDAWAADPRAYFKFVVAEPADVDEVRALKERHDIPAERIFLMPEGRSSDVIRQRSPWLSDICTQEGYRFTDRLHIHIWGDTRGT

SEQ ID NO: 32166 - protein, 248 aa, Novosphingobium resinovorum
  REGION 1..248: note = tr|A0A1D8A3T4|A0A1D8A3T4_9SPHN 7-carboxy-7-deazaguanine synthase OS=Novosphingobium resinovorum OX=158500 GN=queE PE=3 SV=1
MTLTLATTTPGQPEIFASLQGEGPSMGRPSTFVRLSRCNLACQWCDTAYTWRFTGDNRFHRDDLAFERRENQVTMEEADLAQAVADLVPDRLVITGGEPLLQGAALARMVKALDEIRPGMHVEVETNSTVAPHPALDARIDQYNVSPKLAHSGNPDTLALLPERLAAWAAEPRAFFKFVVATRDDLDEVMALQQTYAIPGARLFLMPEGRSSDVIRERSGWLADFCSQHGLRFTDRLHIHLWGDTRGT

SEQ ID NO: 32167 - protein, 247 aa, Novosphingobium resinovorum
  REGION 1..247: note = tr|A0A031K3W3|A0A031K3W3_9SPHN 7-carboxy-7-deazaguanine synthase OS=Novosphingobium resinovorum OX=158500 GN=queE PE=3 SV=1
MLTLATTTPGQPEIFASLQGEGPSMGRPSTFVRLSRCNLACQWCDTAYTWRFTGDNRFHRDDLAFERRENQVTMEEADLAQAVADLVPDRLVITGGEPLLQGAALARMVKALDEIRPGMHVEVETNSTVAPHPALDARIDQYNVSPKLAHSGNPDTLALLPERLAAWAAEPRAFFKFVVATRDDLDEVMALQQTYAIPGARLFLMPEGRSSDVIRERSGWLADFCSQHGLRFTDRLHIHLWGDTRGT

SEQ ID NO: 32168 - protein, 248 aa, unidentified
  source 1..248: note = Novosphingobium sediminis
  REGION 1..248: note = tr|A0A512ALJ7|A0A512ALJ7_9SPHN 7-carboxy-7-deazaguanine synthase OS=Novosphingobium sediminis OX=707214 GN=queE PE=3 SV=1
MSLTLATTTPGEPEIFPSLQGEGPSAGRPCVFVRLSRCNLACRWCDTAYTWRFTGDIRPHRDDLTFERSENQITLDVREAAMRILALRPTRLVITGGEPLLQAPSLAKLIPMLREAVPALEVEIETNGSVPPPHAIMQLVDQFNVSPKLSHSGNAEHLALVPELLRDWAASPKAWFKFVVADMDDVNEVAELQAMYRIPSERLFVMPEGTSSETLRERSKWLAGAALTHGWRFTDRLHIHLYGDTRGT

SEQ ID NO: 32169 - protein, 267 aa, Novosphingobium sp.
  REGION 1..267: note = tr|A0A1W2A6N1|A0A1W2A6N1_9SPHN 7-carboxy-7-deazaguanine synthase OS=Novosphingobium sp. B1 OX=1938756 GN=queE PE=3 SV=1
MPCTPPRPSVWQRRCSGWGNLLTLATVNPGEPEVFSSLQGEGPGMGRPSVFVRLSRCNLACRWCDTAYTWRFTGDNRPHRDEVAFERRENQVTLDEQEVAALILSHPEDRLVITGGEPLLQGASLARLVALLKAERPALHIEIETNGSVPPHGALDPCIDQYNVSPKLAHSGNAAELALVPERLEAWSGNVRAWFKFVVASPADLAEIAALQDRYHIASDRLFVMPEGTASSTLRERSRWLAEEALAKGWRFTDRLHIHLYGDTRGT

SEQ ID NO: 32170 - protein, 247 aa, Novosphingobium sp.
  REGION 1..247: note = tr|A0A258V2R8|A0A258V2R8_9SPHN 7-carboxy-7-deazaguanine synthase OS=Novosphingobium sp. 28-62-57 OX=1970409 GN=queE PE=3 SV=1
MLTLATVNPGEPEVFSSLQGEGPSMGRPSVFVRLSRCNLACRWCDTAYTWRFTGDNRPHRDEVAFERTDNQLTMTEEDAAALILSHPEDRLVITGGEPLLQGAALARMVALMKAARPALHVEIETNGTVAVHPALNPLVDQFNVSPKLAHSGNDAALSLVPEQLTQWAQNPRAWFKFVVATPADLAEISALQERYGIAPDHLFVMPEGTASATLRERSRWLAEEALERGWRFTDRLHIHLYGDTRGT

SEQ ID NO: 32171 - protein, 249 aa, Novosphingobium subterraneum
  REGION 1..249: note = tr|A0A0B9A061|A0A0B9A061_9SPHN 7-carboxy-7-deazaguanine synthase OS=Novosphingobium subterraneum OX=48936 GN=queE PE=3 SV=1
MNLLTLATVNPGEPEVFSSLQGEGLGLGRPSVFVRLSRCNLACRWCDTAYTWRFTGDNRPHRDEVAFERWENQLKMSEADAAALILSHPEDRLVITGGEPLLQGAALARLVALLKAERPALHVEIETNGTVAVHPELDPLIDQFNVSLKLAHSGNPAELALVPERLDAWARDVRAWFKFVVASASDLAEIAALQDRHGIASDHLFVMPEGTASSVLRERSRWLAEEALERGWRFTDRLHIHLYGDTRGT

SEQ ID NO: 32172 - protein, 267 aa, Novosphingobium taihuense
  REGION 1..267: note = tr|A0A562JZG6|A0A562JZG6_9SPHN 7-carboxy-7-deazaguanine synthase OS=Novosphingobium taihuense OX=260085 GN=queE PE=3 SV=1
MRCTLPRPSGSQRRCSGWGNLLTLATTSPGEPEVFSSLQGEGPGMGRPSVFMRLSRCNLACRWCDTAYTWRFTGDNRPHRDEVAFERGENQVAMSEADAAALILSHPEDRLVITGGEPLLQGAALARVVALVKAERPALHVEIETNGTVAAHAELDPLINQFNVSPKLAHSGNAAELALVPERLDAWARDPRAWFKFVVATASDLAEISALQARHAIASDHLFVMPEGTSSAVLRDRSRWLAEEALERGWRFTDRLHIHLYGDTRGT

SEQ ID NO: 32173 - protein, 244 aa, Novosphingobium tardaugens
  REGION 1..244: note = tr|U3A3S9|U3A3S9_9SPHN 7-carboxy-7-deazaguanine synthase OS=Novosphingobium tardaugens NBRC 16725; OX = 1219035 GN=queE PE=3 SV=1
MALALATTTPGEPEIFASLQGEGPSQGRPSTFIRLSRCNLACQWCDTAYTWRFTGDNRPHRDGTAFDRTANQLMMAEDKAAERILALGQDRLVITGGEPLLQAAALARMLGHLPTMHVEIETNGTVAPSPALDAMVQQYNVSPKLAHSGNPTDLALIPERLAEWAQNPRAFFKFVIATPDDMAEVLALQERYAIPGDRIFLMPEGTASAILRERQVWLSDLCMRHGFRMSDRLHIHLYGDTRGT

SEQ ID NO: 32174 - protein, 223 aa, Obesumbacterium proteus; identical to SEQ ID NO: 30493
  REGION 1..223: note = tr|A0A4Q9D5G4|A0A4Q9D5G4_9GAMM 7-carboxy-7-deazaguanine synthase OS=Obesumbacterium proteus OX=82983 GN=queE PE=3 SV=1

SEQ ID NO: 32175 - protein, 223 aa, Obesumbacterium proteus; identical to SEQ ID NO: 30493
  REGION 1..223: note = tr|A0A1B7KE16|A0A1B7KE16_9GAMM 7-carboxy-7-deazaguanine synthase OS=Obesumbacterium proteus ATCC 12841 OX=1354268 GN=queE PE=3 SV=1

SEQ ID NO: 32176 - protein, 218 aa, unidentified
  source 1..218: note = Oblitimonas alkaliphila
  REGION 1..218: note = tr|A0A0K1XGQ8|A0A0K1XGQ8_9GAMM 7-carboxy-7-deazaguanine synthase OS=Oblitimonas alkaliphila OX=1697053 GN=queE PE=3 SV=1
MIKLATEPQFNIVEIFQSLQGEGYNTGMDAIFIRFGKCNLACPWCDTDYLSYSTLSLSEILKQVEALNATNIIITGGEPSVVPEIDLLLKQLKQRGYFLTIETNGLQPVPSEIDFISASPKALYAKKYHSQMLTQADEVRIVVDGDVFDFCQFIEQHLPAKHYYLSPCEQITVSSSKTSSPSFTLLETLQLLGRLNQRAQGQPHWQLSLQTHKLLGIR

SEQ ID NO: 32177 - protein, 210 aa, Oceanibaculum indicum
  REGION 1..210: note = tr|K2JL81|K2JL81_9PROT 7-carboxy-7-deazaguanine synthase OS=Oceanibaculum indicum P24 OX=1207063 GN=queE; PE = 3 SV=1
MTYSVKELFKTLQGEGAQAGRAAVFCRFAGCNLWTGREEDRAGAVCRFCDTDFVGTDGEGGGKFRDADALAEAIAACWGTGTARRYVVFTGGEPLLQLDKALVDAVHARGFEIAIETNGTLEPPPGIDWICVSPKEGADWVLRRGDELKLVYPQPGLGPDGMTALSFRHFWLQPMDGPARAENTAAAVAYCLDHPDWRLSVQTHKMIGIP

SEQ ID NO: 32178 - protein, 210 aa, Oceanibaculum indicum
  REGION 1..210: note = tr|A0A420WI89|A0A420WI89_9PROT 7-carboxy-7-deazaguanine synthase OS=Oceanibaculum indicum; OX = 526216 GN=queE PE=3 SV=1
MTYSVKELFKTLQGEGAQAGRAAVFCRFAGCNLWTGREEDRAGAVCRFCDTDFVGTDGEGGGKFRDADALAEAIAACWGTGTARRYVVFTGGEPLLQLDKALVDAVHARGFEIAIETNGTLEPPPGIDWICVSPKEGADWVLRRGDELKLVYPQPGLGPEGMTALSFRHFWLQPMDGPARAENTAAAVAYCLDHPDWRLSVQTHKMIGIP

SEQ ID NO: 32179 - protein, 209 aa, Oceanicaulis sp.
  REGION 1..209: note = tr|A0A2T4ZRM3|A0A2T4ZRM3_9RHOB 7-carboxy-7-deazaguanine synthase OS=Oceanicaulis sp. PT13A OX=2135616 GN=queE PE=3 SV=1
MTYSVKEMFLTVQGEGGQTGRPAVFLRFAGCNLWSGLERDRASAICQFCDTDFVGVDGVNGGKFKTAEALAEAVASLWPGGGEPYVVCTGGEPLLQLDAPLIDALHAEGFKIAVETNGTIEAPDGIDWVCVSPKSTAPLKQISGDELKLVYPQPEAMPELFEHLDFKQFRLQPMDGPHQAENAQAAFEYCLKHPQWMLSLQTHKWINVP

SEQ ID NO: 32180 - protein, 209 aa, Oceanicaulis sp.
  REGION 1..209: note = tr|A0A3D4J1E3|A0A3D4J1E3_9RHOB 7-carboxy-7-deazaguanine synthase OS=Oceanicaulis sp.; OX = 1924941 GN=queE PE=3 SV=1
MTYSVKEMFLTVQGEGGQTGRPAVFLRFAGCNLWSGLERDRASAICQFCDTDFVGVDGVNGGKFKTAEALAEAVASLWPGGGEPYVVCTGGEPLLQLDAPLIDALHKSGFKIAVETNGTIKAPEGIDWVCVSPKSTPPLKQLTGDELKLVYPQPEAMPELFEHLDFRQFRLQPMDGPRQAENALAAFEYCLKHPKWMLSLQTHKWINVP

SEQ ID NO: 32181 - protein, 214 aa, unidentified
  source 1..214: note = Oceanicoccus sagamiensis
  REGION 1..214: note = tr|A0A1X9NAL7|A0A1X9NAL7_9GAMM 7-carboxy-7-deazaguanine synthase OS=Oceanicoccus sagamiensis OX=716816 GN=queE PE=3 SV=1
MTDLRITEIFYSLQGETKTVGLPTVFVRLTGCPLRCGYCDTEYAFHGGEKRSQQSILDEVASHQPRYITVTGGEPLAQPNCLPLLTALCDQGYEVSLETSGAITLAGVDPRVVTVMDLKTPASNEVSRNLYENIGHLSRQDQIKFVICDRGDYEWARFKIDEYQLTDKVDEILFSPSFGQVDGKELAEWILADNLPVRLQLQLHKLLWDDAAGH

SEQ ID NO: 32182 - protein, 210 aa, unidentified
  source 1..210: note = Oceanihabitans sediminis
  REGION 1..210: note = tr|A0A368P550|A0A368P550_9FLAO 7-carboxy-7-deazaguanine synthase OS=Oceanihabitans sediminis OX=1812012 GN=queE PE=3 SV=1
MTRSERQELLDKGLLLPLMEEFYTIQGEGFHKGTAAYFVRIGGCDVGCHWCDVKESWLPELHPATKAVDIAENAAKYSRTIVVTGGEPLMWDMGPLTKELKDKGLQIHIETSGAYKLTGIWDWICLSPKKNKLPTEEVYAKAHELKCIVYNKDDFRFAEEQAAKINDDCILYLQPEWSKRDKMMPQIVDYVMKNPKWKVSLQTHKYLNIP

SEQ ID NO: 32183 - protein, 238 aa, Oceanimonas baumannii
  REGION 1..238: note = tr|A0A235CMM6|A0A235CMM6_9GAMM 7-carboxy-7-deazaguanine synthase OS=Oceanimonas baumannii; OX = 129578 GN=queE PE=3 SV=1
MIAISEIFGPTIQGEGALTGVPTVFVRTGGCDFRCSWCDTLYAVEPRFRADWTPMSAGAVLAEVERLSGGRPLLITLSGGNPALQPLGDLLQLGHDKGYTFAIETQGSKAQKWFGQLDHLTLSPKPPSSGMAFSQSRFGECLAAAGEHTRVTLKLVIADETDYRWAREFAAQYPQLPLTLQPCNPVPATPDEPERETDLDALNARLRWLVDKVTADGWFEARVLPQLHVIIWNNERGV

SEQ ID NO: 32184 - protein, 238 aa, Oceanimonas doudoroffii
  REGION 1..238: note = tr|A0A233RF68|A0A233RF68_9GAMM 7-carboxy-7-deazaguanine synthase OS=Oceanimonas doudoroffii OX=84158 GN=queE PE=3 SV=1
MIAISEIFGPTIQGEGALTGVPTVFVRTGGCDFRCSWCDTLYAVEARFKADWTPMSAEAVLAEVERLSGGRPLLITLSGGNPALQPLGDLLSLGQARGYTFAIETQGSKAQDWFARLDHLTLSPKPPSAGMAFSQRRFDACLAAAGVNTQVTLKLVIADEADYRWARDFAARYPHLPLTLQPCNPAPATPDEPARETDLDALNARLRWLVDKVTADGWFAARVLPQLHVIIWNNERGV

SEQ ID NO: 32185 - protein, 238 aa, Oceanimonas sp.
  REGION 1..238: note = tr|H2FX31|H2FX31_OCESG 7-carboxy-7-deazaguanine synthase OS=Oceanimonas sp. (strain GK1) OX=511062 GN=queE; PE = 3 SV=1
MIAISEIFGPTIQGEGALTGVPTVFVRTGGCDFRCSWCDTLYAVEPRFKADWTPMSAEAVLAEVERLSGGRPLLVTLSGGNPALQPLGELLALGHAKGYTFAIETQGSKVQDWFAELDHLTLSPKPPSAGMAFSQHRFDACLAAAGAHTQVTLKLVIADEVDYQWARDFAARYPQLPLTLQPCNPAPATPDEPERTTDLDALNAHLRWLVDRVTADGWFEARVLPQLHVIIWNNERGV

SEQ ID NO: 32186 - protein, 239 aa, unidentified
  source 1..239: note = Oceanisphaera arctica
  REGION 1..239: note = tr|A0A2P5TR02|A0A2P5TR02_9GAMM 7-carboxy-7-deazaguanine synthase OS=Oceanisphaera arctica; OX = 641510 GN=queE PE=3 SV=1
MSIAISEIFGPTIQGEGALIGVPTLFVRTGGCDFRCSWCDTLYAVEPRFKADWTPMSAEAVMTEVNGLSGGHPLLVTLSGGNPALQPLTELLELGHAQGYTFAMETQGSKVQDWFAMLDHLTLSPKPPSSGMAFNRSRFEASLAAAGDQTQVSLKLVIADEADYQWARDVAAGYPQLPLTLQPCNPSPATPEQPDLETDTESLNSRLRWLVDKVTADRWFNARVLPQLHVLIWNNERGV

SEQ ID NO: 32187 - protein, 266 aa, unidentified
  source 1..266: note = Oceanisphaera profunda
  REGION 1..266: note = tr|A0A1Y0D1P3|A0A1Y0D1P3_9GAMM 7-carboxy-7-deazaguanine synthase OS=Oceanisphaera profunda OX=1416627 GN=queE PE=3 SV=1
MSKVTSRATTLNQDSGTPNLNSDTRAFIAISEIFGPTIQGEGALIGVPTVFVRTGGCDFRCSWCDTLYAVEPRFKADWAQMSAQAVMAEIIRLSGNQPLLVTLSGGNPALQPLGELVQLGQQQGYTFAIETQGSKAQPWFGLLDHLTLSPKPPSSGMAFNRARFAECLTAAGKRTQISLKLVISDDADYQWAKEFAARYPQLSLTLQPCNLAPATPEQPDMETDIESLNARLRWLVDKVTADRWFNARVLPQLHVLIWNNERGFKA

SEQ ID NO: 32188 - protein, 241 aa, Oceanobacillus caeni; identical to SEQ ID NO: 27973
  REGION 1..241: note = tr|A0A0N0M7X4|A0A0N0M7X4_9BACI 7-carboxy-7-deazaguanine synthase OS=Oceanobacillus caeni; OX = 405946 GN=queE PE=3 SV=1

SEQ ID NO: 32189 - protein, 240 aa, Oceanobacillus iheyensis
  REGION 1..240: note = tr|Q8EMN9|Q8EMN9_OCEIH 7-carboxy-7-deazaguanine synthase OS=Oceanobacillus iheyensis (strain DSM 14371 / CIP 107618 / JCM 11309 / KCTC 3954 / HTE831) OX=221109; GN = qu eE PE=3 SV=1
MKIPVLEIFGPTIQGEGMVIGRKTMFVRTAGCDYSCSWCDSKFTWDGSEKDSIQLLEPEEVFDSLKDIGGNTFGHVTISGGNPALLKQIDGLVDLLHQHQIEVALETQGSRWQDWFTKVDDLTLSPKPPSSGMKTNFTTLDNIIERLDKEQDGHFSLKVVIFDQEDLTYAEQIHVRYPFVTLFLQVGNDNIEASEDDRLLSDLLDKYEKLIDLVMENKVLKDVRVLPQLHTYLWGNKRGV

SEQ ID NO: 32190 - protein, 242 aa, Oceanobacillus oncorhynchi
  REGION 1..242: note = tr|A0A0A1MXR2|A0A0A1MXR2_9BACI 7-carboxy-7-deazaguanine synthase OS=Oceanobacillus oncorhynchi OX=545501 GN=queE PE=3 SV=1
MRKIPVLEIFGPTIQGEGMVVGRKTMFVRTAGCDYRCAWCDSAFTWDGSAKEDIVQMTSEDIWQRLQEVGGSCFDHVTISGGNPALLSAIDNLIDLLQEKSIEVALETQGSRYQNWFVKIDDLTISPKPPSSKMKTNWETLDDIIHQLEINDRLAHASLKVVIFDKEDLRYAEKVHQRYPKLAFFLQVGNDDLEEIEPQQLSRHLLNKYEWLIDQVVASTVLNRVRVLPQVHALVWGNKRGV

SEQ ID NO: 32191 - protein, 241 aa, Oceanobacillus profundus
  REGION 1..241: note = tr|A0A417YLR6|A0A417YLR6_9BACI 7-carboxy-7-deazaguanine synthase OS=Oceanobacillus profundus OX=372463 GN=queE PE=3 SV=1
MRKIPVLEIFGPTIQGEGMVIGQKTMFVRTAGCDYSCSWCDSKFTWDGSEKESIQMMEPQKIVDALFEKGDGRFQHVTISGGNPGLLAQLNTLVDLLHENKVKVALETQGSRWQKWFTKIDDLTISPKPPSSGMTTNFETLDFIIRSLEEKQQGNFSLKVVIFEKGDLQYAINIHKRYPDVELFLQVGNDDLETVEQDKLLPYLLEKYERLVDLVMNNSELNDVRVLPQLHTYLWGNKRGV

SEQ ID NO: 32192 - protein, 242 aa, Oceanobacillus sojae
  REGION 1..242: note = tr|A0A511ZJB1|A0A511ZJB1_9BACI 7-carboxy-7-deazaguanine synthase OS=Oceanobacillus sojae; OX = 582851 GN=queE PE=3 SV=1
MRKIPVLEIFGPTIQGEGMVVGRKTMFVRTAGCDYRCAWCDSSFTWDGSAKEDIVQMTSEEIWQRLKEIGGNQFDHVTISGGNPALLSAIDNLIDLLQKNNIEVALETQGSSYQDWFVRIDDLTISPKPPSSNMKTNWEKLDDIIHQLKANERLKHTSLKVVIFDKEDLHYAEKVHQRYPELAFFMQVGNDDLEEAEPQQLSRHLLNKYEWLINEVVASTVLNRVRVLPQVHALVWGNKRGV

SEQ ID NO: 32193 - protein, 240 aa, Oceanobacillus sp.
  REGION 1..240: note = tr|A0A1E5K2G6|A0A1E5K2G6_9BACI 7-carboxy-7-deazaguanine synthase OS=Oceanobacillus sp. E9; OX = 1742575 GN=queE PE=3 SV=1
MKIPVLEIFGPTIQGEGMVIGRKTMFVRTAGCDYSCSWCDSKFTWDGSEKDSIQMLEPAEIFDSLKEVGGNKFGHVTISGGNPGLLKQIDSLVDLLHQHQIEVALETQGSRWQNWFTKIDDLTLSPKPPSSGMKTNFTTLDYIIERLHKEQDGHFSLKVVIFDEEDLAYAEQIHERYPSVTLFLQVGNDNLEANENESLLSDLLEKYEKLIDRVMENKLLKDVRVLPQLHTYLWGNKRGV

SEQ ID NO: 32194 - protein, 241 aa, Oceanobacillus sp.
  REGION 1..241: note = tr|A0A498DB95|A0A498DB95_9BACI 7-carboxy-7-deazaguanine synthase OS=Oceanobacillus sp. YLB-02 OX=2448030 GN=queE PE=3 SV=1
MRKIPVLEIFGPTIQGEGMVIGQKTMFVRTAGCDYSCSWCDSKFTWDGSEKESIQMMEPQKIVDALFEKGGGRFQHVTISGGNPGLLVQLNALVDLLHENQVKVALETQGSRWQQWFTKIDDLTISPKPPSSGMTTNFETLDFIISSLKEEQQGDFSLKVVIFGEEDMQYAINIHKRYPDVKLFLQVGNDDLETGEQEKLLPYLLKKYERLVDLVMNNAELNDVRVLPQLHTYIWGNKRGV

SEQ ID NO: 32195 - protein, 234 aa, Oceanobacter sp.
  REGION 1..234: note = tr|A0A2G2JQD4|A0A2G2JQD4_9GAMM 7-carboxy-7-deazaguanine synthase OS=Oceanobacter sp.; OX = 2030817 GN=queE PE=3 SV=1
MTTSTYRIKEIFYTLQGEGAHAGRPAVFCRFSKCNLWNGREDGRAAAVCTFCDTDFIGTDGNLGGTYSLEELIETIGKQWPGKTIGDSVQGQPYVVCTGGEPALQLDTALVDALHHAGFEVAIETNGTLPLPANIDWVCLSPKADAELVVIECDELKLVYPQPTAMPERFDYIEADHFYLQPMADYEPVVLASDKLSGAREGLSLTNTQKALQYCMKHPKWKLSLQTHKMIGIE

SEQ ID NO: 32196 - protein, 229 aa, unidentified
  source 1..229: note = Oceanococcus atlanticus
  REGION 1..229: note = tr|A0A1Y1SCA1|A0A1Y1SCA1_9GAMM 7-carboxy-7-deazaguanine synthase OS=Oceanococcus atlanticus OX=1317117 GN=queE PE=3 SV=1
MGDALTSAQTQVRAPTAARLKITEVFRSLQGEALQVGLPTTFVRLTGCPLRCRYCDSAYAFHGGQWRELEDLLSDPLVQGTRHICVTGGEPLAQKTCIPFLRALCDAGHAVSLETSGALDISPVDARVSRVVDIKTPDSGEVRRNLWDNLDGLRAHDQVKLVICSRADFDWAVTIIDQYRLLERCAVLVSPSFGQVDPSALAQWVLDSGLELRFQLQLHKLLWGDEPGH

SEQ ID NO: 32197 - protein, 225 aa, unidentified
  source 1..225: note = Oceanococcus sp.
  REGION 1..225: note = tr|A0A520SLW6|A0A520SLW6_9GAMM 7-carboxy-7-deazaguanine synthase OS=Oceanococcus sp.; OX = 1958892 GN=queE PE=3 SV=1
MTSAQTQVRAPTAARLKITEVFRSLQGEALQVGLPTTFVRLTGCPLRCRYCDSAYAFHGGQWRELEDLLSDPLVQGTRHICVTGGEPLAQKTCIPFLRALCDAGHAVSLETSGALDISPVDARVSRVVDIKTPDSGEVRRNLWDNLDGLRAHDQVKLVICSRADFDWAVTIIDQYRLLERCAVLVSPSFGQVDPSALAQWVLDSGLELRFQLQLHKLLWGDEPGH

SEQ ID NO: 32198 - protein, 216 aa, unidentified
  source 1..216: note = Oceanospirillaceae bacterium
  REGION 1..216: note = tr|A0A3D2EWC6|A0A3D2EWC6_9GAMM 7-carboxy-7-deazaguanine synthase OS=Oceanospirillaceae bacterium OX=1899355 GN=queE PE=3 SV=1
MYSVKEIFYTLQGEGRHAGRPAVFCRFAGCNLWTGSEARRASSLCNFCDTDFVGVDGHCGGRYNTAAELVEVIEQQWPEGMPGHPLVVLTGGEPMLQLDEALINALHDEGFEIALETNGTIPVPESVDWICVSPKGEAKLLQTSGQELKLVYPQHQAMPEQFSHLDFDHFYLQPMDTSYIATSSDDGDYVQQAIEYCLLHPQWHLSLQTHKITGIL

SEQ ID NO: 32199 - protein, 234 aa, unidentified
  source 1..234: note = Oceanospirillaceae bacterium
  REGION 1..234: note = tr|A0A2E2G5F2|A0A2E2G5F2_9GAMM 7-carboxy-7-deazaguanine synthase OS=Oceanospirillaceae bacterium OX=1899355 GN=queE PE=3 SV=1
MAKNTYRVKEVFYTLQGEGAQAGRPAVFCRFSKCNLWNGREDSRTAAVCKFCDTDFIGTDGHLGGEYSASELVTIIASQWPGETSGNSVQGKPYVVCTGGEPALQLDSALVDELHKAGFEVAIETNGTLPLPDGIDWICLSPKGDSELAVINCDELKLVYPQADAPPERFDYIVAEHCYLQPMADFEPVVIASDKLEGAKEGLSVSNTRKAVDYCMKHPKWKLSLQTHKLLGIE

SEQ ID NO: 32200 - protein, 228 aa, unidentified
  source 1..228: note = Oceanospirillales bacterium
  REGION 1..228: note = tr|A0A357LVG7|A0A357LVG7_9GAMM 7-carboxy-7-deazaguanine synthase OS=Oceanospirillales bacterium OX=1914300 GN=queE PE=3 SV=1
MAASYRVKEIFYTLQGEGAQAGRPAVFCRFSKCNLWNGREDGRENAVCQFCDTDFIGTDGHLGGVYTASDLVNIISTQWPDLSQGTPYVVCTGGEPALQLDDELVTTLHKAGFEIAIETNGTLPLPDGIDWICLSPKAGAEVVIDRCDELKLVFPQPLAMPERFTGFNATHYYLQPMADYAPVVIASDKLSGAKQSLSATTTRKTLDYCLQHPQWKLSIQTHKLLEIE

SEQ ID NO: 32201 - protein, 232 aa, unidentified
  source 1..232: note = Oceanospirillales bacterium
  REGION 1..232: note = tr|A0A3D3E822|A0A3D3E822_9GAMM 7-carboxy-7-deazaguanine synthase OS=Oceanospirillales bacterium OX=1914300 GN=queE PE=3 SV=1
MTKTYRVKEIFYTLQGEGAQAGRPSVFCRFSKCNLWNGKEESRSQSVCDFCDTDFIGTDGENGGVYSAQELVQLISSLWPGNPSPQTKDKNQGTPYIVCTGGEPLLQLDEPLIEVMHHYGFEVAVETNGTLPAPEGLDWICLSPKADAELSLIECDELKLVYPQPLAMPEFFEHVQATHRYLQPMADASLDYIVSDAHEGLSQSNTQKATNYCLKHPKWKLSLQTHKMLGIE

SEQ ID NO: 32202 - protein, 113 aa, Oceanospirillum linum
  REGION 1..113: note = tr|A0A1T1H7J3|A0A1T1H7J3_OCELI 7-carboxy-7-deazaguanine synthase QueE (Fragment); OS = Oceanospirillum linum OX=966 GN=BTA35_0216480 PE=4 SV=1
MSNSTLRITEIFYSLQGETRTVGLPTVFIRLTGCPMRCVYCDTSYAFSGGETVSIDSIMSQTEQYKARYVTVTGGEPLAQKNCAKLLTRLCDAGYQVSVETGGAIDIASVDPR

SEQ ID NO: 32203 - protein, 216 aa, Oceanospirillum multiglobuliferum
  REGION 1..216: note = tr|A0A1T4RQ70|A0A1T4RQ70_9GAMM 7-carboxy-7-deazaguanine synthase OS=Oceanospirillum multiglobuliferum OX=64969 GN=queE PE=3 SV=1
MSNSTLRITEIFYSLQGETRTVGLPTVFIRLTGCPMRCVYCDTSYAFSGGETVSIDSIMSQTEQYKARYVTVTGGEPLAQKNCAKLLTRLCDAGYQVSVETGGAIDIASVDPRACVVLDIKTPASGELGKNLWSNIALLKKDDQVKFVICNRSDYEWVRFKINELDLNSRVSEILFSPSHHELSAKTLAEWIIEDRLQVRLQVQLHKILWNDEPGH

SEQ ID NO: 32204 - protein, 227 aa, Oceanospirillum sp.
  REGION 1..227: note = tr|A0A2D5G9I5|A0A2D5G9I5_9GAMM 7-carboxy-7-deazaguanine synthase OS=Oceanospirillum sp.; OX = 2021254 GN=queE PE=3 SV=1
MRRLFFYRCVVMSESTLRITEIFCSLQGETRTVGLPTVFIRLTGCPMRCVYCDTSYSFYGGETVKIDDIMAQTAGYGAKHVTVTGGEPLAQKRCFELLTRLCDEGYEVSVETGGAMDISCADPRACMVLDIKTPASGELAKNRWENIEYLKANDQVKFVICDRQDYEWSRMKIEELALHDRVDEILFSPIHGQLDARELAEWILRDKLQVRFQLQLHKILWDDAQGR

SEQ ID NO: 32205 - protein, 246 aa, Ochrobactrum anthropi
  REGION 1..246: note = tr|A6WXM5|A6WXM5_OCHA4 7-carboxy-7-deazaguanine synthase OS=Ochrobactrum anthropi (strain ATCC 49188 / DSM 6882 / JCM 21032 / NBRC 15819 / NCTC 12168) OX=439375 GN=q ueE PE=3 SV=1
MGRVQTVTQIRIAEIFGPTLQGEGVLIGEPTVFVRTGGCDYRCVWCDSLHAVESRFRREWKAMSVEAVWGEVTTLSRNKPLTVSLSGGNPAIQPLGPLIEHGKTEGYRFALETQGSVAQDWFSALDTLVLSPKPPSSGMDADFDALAVCVEAAGRTPRTVLKFVIFDDADYVFAKDVASQYSGLPVYLQPGNHTPPPPEAHDAAIDIDGIMRRMEWLVEKVIADGWYEAHVLPQLHVLIWGNRRGV

SEQ ID NO: 32206 - protein, 246 aa, Ochrobactrum anthropi; identical to SEQ ID NO: 32205
  REGION 1..246: note = tr|A0A3R8YA72|A0A3R8YA72_OCHAN 7-carboxy-7-deazaguanine synthase OS=Ochrobactrum anthropi; OX = 529 GN=queE PE=3 SV=1

SEQ ID NO: 32207 - protein, 246 aa, Ochrobactrum cytisi
  REGION 1..246: note = tr|A0A1J6HWD4|A0A1J6HWD4_9RHIZ 7-carboxy-7-deazaguanine synthase OS=Ochrobactrum cytisi; OX = 407152 GN=queE PE=3 SV=1
MGRVQTVTQIRIAEIFGPTIQGEGVLIGEPTVFVRTGGCDYRCVWCDSLHAVESRFRHEWKAMSVEAIWGEVTTLSRNKPLTVSLSGGNPAIHPLGPLIEHGKTEGYRFALETQGSVAQDWFSALDTLVLSPKPPSSGMSSDFDALAACIEAAGIGPRTVLKFVIFDDADYAFAKDVASQYSGLPVYLQPGNHTPPPPEAHDAAIDIDGIMRRMEWLVEKVIADGWYEAHVLPQLHVLIWGNKRGV

SEQ ID NO: 32208 - protein, 243 aa, Ochrobactrum gallinifaecis
  REGION 1..243: note = tr|A0A502BJV7|A0A502BJV7_9RHIZ 7-carboxy-7-deazaguanine synthase OS=Ochrobactrum gallinifaecis OX=215590 GN=queE PE=3 SV=1
MKAGPEIRISEIFGPTIQGEGVLSGEPTVFVRTGGCDYRCAWCDSLHAVESRFRHDWKPMSIDAIWQEVTTLSGKKPITVSLSGGNPAIQPLGPLIDHGHAQNYRFALETQGSVAKDWFAKLDTLVLSPKPPSSGMQTDWNALASCIDAAGPKPKTVLKFVVFDDADYAFAKATSALHPHLPIYLQPGNHTPPPPEDDDARIDMDGIMNRMEWLIDKVMADRWFEARVLPQLHVLIWGNKRGV

SEQ ID NO: 32209 - protein, 243 aa, Ochrobactrum grignonense
  REGION 1..243: note = tr|A0A256FAS4|A0A256FAS4_9RHIZ 7-carboxy-7-deazaguanine synthase OS=Ochrobactrum grignonense OX=94627 GN=queE PE=3 SV=1
MKASPEIRISEIFGPTIQGEGVLSGEPTVFIRTGGCDYRCAWCDSLHAVESRFRHDWKPMSVEAIWHEVTALSGKKPITVSLSGGNPAIQPLGPLIDHGHAQDYRFALETQGSVAKDWFAKLDTLVLSPKPPSSGMETDWGALAASIDAAGSKPRTVLKFVVFDDADYAFAKAASARHPHLAVYLQPGNHTPPPPEDNDARIDMGGIMRRMEWLIDKVMADRWFEAHVLPQLHVLIWGNKRGV

SEQ ID NO: 32210 - protein, 200 aa, Ochrobactrum haematophilum
  REGION 1..200: note = tr|A0A2P9HQW3|A0A2P9HQW3_9RHIZ 7-carboxy-7-deazaguanine synthase OS=Ochrobactrum haematophilum OX=419474 GN=queE PE=3 SV=1
MKPVSEIRISEIFGPTIQGEGVLIGEPTVFVRTGGCDYRCAWCDSLHAVESRFRHEWKSMGVEAIWHEVTALSENRPLTVSLSGGNPAIQPLGPLIAHGKKEAYRFALETQGSVAKDWFSALDTLVLSPKPPSSAMAFDPDALAACVEAAGPKPRTVLKFVIFDDADYASQNTSRRFIRICRSISSPAITRRHRQKRTMH

SEQ ID NO: 32211 - protein, 243 aa, Ochrobactrum haematophilum
  REGION 1..243: note = tr|A0A397L6Y5|A0A397L6Y5_9RHIZ 7-carboxy-7-deazaguanine synthase OS=Ochrobactrum haematophilum OX=419474 GN=queE PE=3 SV=1
MKPAPEIRISEIFGPTIQGEGVLIGEPTVFVRTGGCDYRCVWCDSLHAVESRFRHEWKPMGVEAIWREVTELSGKKPLTVSLSGGNPAIQPLAPLIERGKADGYRFALETQGSVARDWFSMLDTLVLSPKPPSSKMAFDPDALAACIAAAGPNPRTVLKFVIFDEADYAFAKDVSARHPHLPVYLQPGNHTPPPPEADDASIDIDGIMRRMEWLVDKVIADRWFAAHVLPQLHVLIWGNRRGV

SEQ ID NO: 32212 - protein, 248 aa, Ochrobactrum intermedium
  REGION 1..248: note = tr|U4VJQ5|U4VJQ5_9RHIZ 7-carboxy-7-deazaguanine synthase OS=Ochrobactrum intermedium 229E OX=1337887; GN = queE PE=3 SV=1
MGRVPTVTRIRIAEIFGPTIQGEGVLIGEPTVFVRTGGCDYRCAWCDSLHAVESRFRHEWKTMSVEAIWDEVTALSRNKPLTVSLSGGNPAIQPLGPLIEHGRKHGYRFALETQGSVVQGWFSALDTLVLSPKPPSSAMDTDFDALAACIEAAGNTPRTVLKFVIFDDADYAFAKEVANRHPHLPVYLQPGNHTPPPPEANDAAIDIDGIMRRMEWLVEKVIADGWYEAHVLPQLHVLIWGGNKRGGV

SEQ ID NO: 32213 - protein, 246 aa, Ochrobactrum intermedium
  REGION 1..246: note = tr|C4WJA3|C4WJA3_9RHIZ 7-carboxy-7-deazaguanine synthase OS=Ochrobactrum intermedium LMG 3301 OX=641118; GN = queE PE=3 SV=1
MGRVPTVTRIRIAEIFGPTIQGEGVLIGEPTVFVRTGGCDYRCAWCDSLHAVESRFRHEWKTMSVEAIWDEVTALSRNKPLTVSLSGGNPAIQPLGPLIEHGRKHGYRFALETQGSVVQGWFSALDTLVLSPKPPSSAMDTDFDALAACIEAAGNTPRTVLKFVIFDDADYAFAKEVANRHPHLPVYLQPGNHTPPPPEANDAAIDIDGIMRRMEWLVEKVIADGWYEAHVLPQLHVLIWGNKRGV

SEQ ID NO: 32214 - protein, 240 aa, Ochrobactrum lupini
  REGION 1..240: note = tr|A0A256GR36|A0A256GR36_9RHIZ 7-carboxy-7-deazaguanine synthase OS=Ochrobactrum lupini; OX = 255457 GN=queE PE=3 SV=1
MTQIRIAEIFGPTIQGEGVLIGEPTVFVRTGGCDYRCVWCDSLHAVESRFRREWKAMSVEAVWDQVTTLSRNKPLKVSLSGGNPAIQPLGPLIEHGKTDGYRFALETQGSVAQDWFSALDTLVLSPKPPSSGMDADFDALAVCVEAAGRTPRTVLKFVIFDDADYAFAKDVASQYSSLPVYLQPGNHTPPPPEAHDAAIDIDGIMRRMEWLVEKVIADGWYEAHVLPQLHVLIWGNRRGV

SEQ ID NO: 32215 - protein, 246 aa, Ochrobactrum oryzae
  REGION 1..246: note = tr|A0A2S7J1E9|A0A2S7J1E9_9RHIZ 7-carboxy-7-deazaguanine synthase OS=Ochrobactrum oryzae; OX = 335286 GN=queE PE=3 SV=1
MGRVQTVTQIRIAEIFGPTIQGEGVLIGEPTVFVRTGGCDYRCIWCDSLHAVESRFRHEWKAMSVEAIWDEVTALSRNKPITVSLSGGNPAIQPLGPLIEHGKAEGYRFALETQGSVAQGWFSALDTLVVSPKPPSSGMSTDFDLLAACVEAAGTAPRTVLKFVIFDDEDYAFTKAVASRHPQLPVYLQPGNHTPPPPEAHDAAIDMDGIMRRMEWLADKVIADGWYEAHVLPQLHVLIWGNRRGV

SEQ ID NO: 32216 - protein, 253 aa, Ochrobactrum pecoris
  REGION 1..253: note = tr|A0A5C5CNF5|A0A5C5CNF5_9RHIZ 7-carboxy-7-deazaguanine synthase OS=Ochrobactrum pecoris; OX = 867683 GN=queE PE=3 SV=1
MGRVQTVTSEQKPPRDIRIAEIFGPTIQGEGVLIGEPTVFVRTGGCDYRCAWCDSLHAVESRFRHEWKAMSVEAIWDEVTALSRNKPLMVSLSGGNPAIQPLGPLIERGKAEGYRFALETQGSVAQDWFSAIDTLVLSPKPPSSAMNTDFDALAACVETVGKAPRTVLKFVIFDDADYAFAKEVARQYPRLPVYLQPGNHTPPPPEAHDAAIDIDGIMRRMEWLVEKVIGDGWYGAHVLPQLHVLIWGNRRGV

SEQ ID NO: 32217 - protein, 253 aa, Ochrobactrum pseudogrignonense
  REGION 1..253: note = tr|A0A1A9FQW2|A0A1A9FQW2_9RHIZ 7-carboxy-7-deazaguanine synthase OS=Ochrobactrum pseudogrignonense OX=419475 GN=queE PE=3 SV=1
MGRVSPREPVMKTSSEIRISEIFGPTIQGEGVLSGEPTVFVRTGGCDYRCAWCDSLHAVESRFRHDWKPMSVDAIWHEVTILSGKKPITVSLSGGNPAIQPLGPLIDHGHTQGYRFALETQGSVAKDWFSRLDTLVLSPKPPSSGMDTDWNALAASIDAAGPAPKTVLKFVVFDDADYAFAKAASARHPHLAVYLQPGNHTPPPPEDDDARIDMDGIMSRMEWLIDKVMADRWFEAHVLPQLHVLIWGNKRGV

SEQ ID NO: 32218 - protein, 243 aa, Ochrobactrum pseudogrignonense
  REGION 1..243: note = tr|A0A256GM93|A0A256GM93_9RHIZ 7-carboxy-7-deazaguanine synthase OS=Ochrobactrum pseudogrignonense OX=419475 GN=queE PE=3 SV=1
MKTSSEIRISEIFGPTIQGEGVLSGEPTVFVRTGGCDYRCAWCDSLHAVESRFRHDWKPMSVDAIWHEVTILSGKKPITVSLSGGNPAIQPLGPLIDHGHTQGYRFALETQGSVAKDWFSRLDTLVLSPKPPSSGMDTDWNALAASIDAAGPAPKTVLKFVVFDDADYAFARAASARHPHLAVYLQPGNHTPPPPEDDDARIDMDGIMSRMEWLIDKVMADRWFEAHVLPQLHVLIWGNKRGV

SEQ ID NO: 32219 - protein, 243 aa, unidentified
  source 1..243: note = Ochrobactrum quorumnocens
  REGION 1..243: note = tr|A0A248UKU9|A0A248UKU9_9RHIZ 7-carboxy-7-deazaguanine synthase OS=Ochrobactrum quorumnocens OX=271865 GN=queE PE=3 SV=1
MKTDTEIRISEIFGPTIQGEGLLSGEPTVFVRTGGCDYRCVWCDSLHAVESRFRHDWKPMSVDAIWHEVTILSGKKPITVSLSGGNPAIQPLGPLIDHGHTQGYRFALETQGSVAKDWFSRLDTLVLSPKPPSSGMETDWDALAASIDAAGSKPTTVLKFVIFDDADYAFAKAASARHPHLAVYLQPGNHTPPPPEDDDARIDMDGIMRRMEWLIDKVMQDRWFEAHVLPQLHVLIWGNKRGV

SEQ ID NO: 32220 - protein, 243 aa, Ochrobactrum rhizosphaerae
  REGION 1..243: note = tr|A0A256F3J5|A0A256F3J5_9RHIZ 7-carboxy-7-deazaguanine synthase OS=Ochrobactrum rhizosphaerae OX=571254 GN=queE PE=3 SV=1
MKEASEIRISEIFGPTIQGEGVLSGEPTVFVRTGGCDYRCVWCDSLHAVESRFRQEWKPMDVEAIWHEVTALSGKRPITVSLSGGNPAIQPLGPLIDHGQSEGYRFALETQGSVTKDWFAKLDTLVLSPKPPSSGMETDWGALAASIQAAGSKPKTVLKFVVFDDADYAFAKDVSARHPHLAIYLQPGNHTPPPPEDDDARIDMDGIMRRMEWLIDKVMQDRWFEAHVLPQLHVLIWGNKRGV

SEQ ID NO: 32221 - protein, 241 aa, Ochrobactrum sp.
  REGION 1..241: note = tr|A0A4R7WRG5|A0A4R7WRG5_9RHIZ 7-carboxy-7-deazaguanine synthase OS=Ochrobactrum sp. LP_5_YM OX=2485134 GN=queE PE=3 SV=1
MNTEIRISEIFGPTIQGEGVLSGEPTIFVRTGGCDYRCAWCDSLHAVESRFRHDWKVMSVDAIWHEVTALSGKNPITVSLSGGNPAIQPLGPLIDHGHAQGYRFALETQGSVPKDWFAKLDTLVLSPKPPSSCMETDWDALAASIDAAGSKPKTVLKFVIFDDADYAFAKAASACHPHLAVYLQPGNHTPPPPEDDDARIDMDGIMRRMEWLIDKVMRDRWFEAHVLPQLHVLIWGNKRGV

SEQ ID NO: 32222 - protein, 243 aa, Ochrobactrum sp.
  REGION 1..243: note = tr|A0A5C5CIB4|A0A5C5CIB4_9RHIZ 7-carboxy-7-deazaguanine synthase OS=Ochrobactrum sp. LCB8; OX = 2479765 GN=queE PE=3 SV=1
MKPVSEIRISEIFGPTIQGEGVLIGEPTVFVRTGGCDYRCAWCDSLHAVESRFRHEWKPMGVEAIWHEVTALSGNRPLTVSLSGGNPAIQPLGPLIAHGKKEAYRFALETQGSVAKDWFSGLDTLVLSPKPPSSAMAFDPDALAACVEAAGPKPRTVLKFVIFDDADYAFAKHVSALYPHLPVYLQPGNHTPPPPETDDALIDIDGIMRRMEWLVEKVIADRWFEAHVLPQLHVLIWGNKRGV

SEQ ID NO: 32223 - protein, 243 aa, Ochrobactrum thiophenivorans
  REGION 1..243: note = tr|A0A256G0N2|A0A256G0N2_9RHIZ 7-carboxy-7-deazaguanine synthase OS=Ochrobactrum thiophenivorans OX=571255 GN=queE PE=3 SV=1
MTTDPEIRISEIFGPTIQGEGVLSGEPTVFVRTGGCDYRCAWCDSLHAVESRFRHEWQPMSVDAIWREVTTLSGKKPITVSLSGGNPAIQPLAPLIDHGHAQGYRFALETQGSVAKDWFSKLDTLVLSPKPPSSGMETDWAALAASINAAGSKPKTVLKFVVFDDADYAFAKGASARHPHLPVYLQPGNHTPPPPEDDDARIDMDGIMHRMEWLIDKVMADRWFEAHVLPQLHVLIWGNKRGV

SEQ ID NO: 32224 - protein, 248 aa, unidentified
  source 1..248: note = Unknown
  REGION 1..248: note = tr|A0A2A4Z1W3|A0A2A4Z1W3_9PROT 7-carboxy-7-deazaguanine synthase OS=OCS116 cluster bacterium OX=2030921 GN=queE PE=3 SV=1
MNELLRPELEIAKSKTLRVVEIFGPTIQGEGAYIGRPTVFVRFGGCDYRCLWCDTMHAVGKQYVHEWAKMTAVEILTKIDELTGGAPILITISGGNPAIQQLEEFLVLGKAKGHTFSMETQGSVSKDWFGLLDQLTLSPKPPSSGEATDWTKLDKCIAVADKVETSLKVVVFDRADYAYARDVAKRYPNLPLFLSIGNDDTDPNAPVDKEALHAKMRELIDWVNADSWYNVTILPQLHVLLWGNQLGV

SEQ ID NO: 32225 - protein, 271 aa, Odoribacter laneus
  REGION 1..271: note = tr|R5VBJ4|R5VBJ4_9BACT 7-carboxy-7-deazaguanine synthase OS=Odoribacter laneus CAG:561 OX=1263089 GN=queE; PE = 3 SV=1
MLHLAKDGIFPIIKDAAGHPLSSLPASGFPFAGTIQGEGKLCGMPSLFVRVAGCNLHCHWSTSEGKLTECDTAYAAYRLQNTFSLETEEICRLIRANTENLDHIVITGGEPFLQAEALTNLCKALKQSRKYHLTIETNATLYDKDLVEQIDFFSLSPKLSSSQSPAFSGKQKSGVPLNPLCIQQFIDHARSNGKDFQLKFVYTATKDIQEIKTLLSSLKKWHKSDILLMPLGTTPTEVQAHSRETLRHCLQNGWRYCDRLHLTLFGPKEGV

SEQ ID NO: 32226 - protein, 271 aa, Odoribacter laneus
  REGION 1..271: note = tr|H1DFE3|H1DFE3_9BACT 7-carboxy-7-deazaguanine synthase OS=Odoribacter laneus YIT 12061 OX=742817 GN=queE; PE = 3 SV=1
MLHLAKDGIFPIVKDAAGHPLSSLPASGFPFAGTIQGEGKLCGIPSLFVRVAGCNLHCHWSTSEGKLTECDTAYAAYRLQNTFSLETEEICRLIRANTENLDHIVITGGEPFLQADALTNLCKALKQSRKYHVSIETNATLYDKDLVEQIDFFSLSPKLSSSQSPAFSGKQKSGVPLNPLCIQQFIDHARSNGKDFQLKFVYTATKDIQEIKTLLSSLKKWHKSDILLMPLGTIPTEVQAHSRETLRHCLQNGWRYCDRLHLTLFGPKEGV

SEQ ID NO: 32227 - protein, 271 aa, Odoribacter sp.
  REGION 1..271: note = tr|A0A373UXF7|A0A373UXF7_9BACT 7-carboxy-7-deazaguanine synthase OS=Odoribacter sp. AF21-41 OX=2293111 GN=queE PE=3 SV=1
MLHLAKDGIFPITKDKDGKLLKEVPASGLHVAGTIQGEGKLNGIPSLFIRLAGCNLHCTWKTLAGNTCECDTAYAAFKVENSFSLPVEEIVRIISHNRGNIDHIVITGGEPFLQADKVRALCLQLKKESHFHITVETNATLYVEECAEMIDFFSLSPKLSGSVPPAPHADHHNKTRINIPAIQSFITHARKNKKDFQLKFVYSGENDVIEIQALLKQLDGWAKEDILLMPMGATPEELSLSIPKTLEHCIRNGWRFCDRLHISLFGNKQGV

SEQ ID NO: 32228 - protein, 267 aa, Odoribacter sp.
  REGION 1..267: note = tr|A0A1Q6IKT2|A0A1Q6IKT2_9BACT 7-carboxy-7-deazaguanine synthase OS=Odoribacter sp. 43_10; OX = 1897010 GN=queE PE=3 SV=1
MRLAKDGIFPIVKDKDGHLLPDLPASGFQFAGTVQGEGKLCGIPSLFVRLAGCNLQCHWQTSDGLSSPCDSAYAAYQLKDTRQVSVEAIYTTLLQNAGPIRHIVLTGGEPLLQVKELKALCQKLKSDYRFHLTLETNATLFDPELARYIDLFSLSPKLSSSYTGASPLSIQRLNPECIQQYISSARQYQKDFQLKFVYACDEDIDEIQQLLSVLQAWKNDDILLMPLGGTPEIMRRNMRKTLEYCIRNGWRYCDRLHISLFGDKAGV

SEQ ID NO: 32229 - protein, 267 aa, Odoribacter splanchnicus; identical to SEQ ID NO: 32228
  REGION 1..267: note = tr|F9Z7X0|F9Z7X0_ODOSD 7-carboxy-7-deazaguanine synthase OS=Odoribacter splanchnicus (strain ATCC 29572 / DSM 20712 / CIP 104287 / JCM 15291 / NCTC 10825 / 1651/6) O X=709991 GN=queE PE=3 SV=1

SEQ ID NO: 32230 - protein, 267 aa, Odoribacter splanchnicus
  REGION 1..267: note = tr|A0A412TYG0|A0A412TYG0_9BACT 7-carboxy-7-deazaguanine synthase OS=Odoribacter splanchnicus OX=28118 GN=queE PE=3 SV=1
MRLAKDGIFPIVKDKDGHLLPDLPASGFQFAGTVQGEGKLCGIPSLFVRLAGCNLQCHWQTSDGLSSPCDSAYAAYQLKDTRQVSVEAIYTTLLQNAGPIRHIVLTGGEPLLQVKELKALCQKLKSDNRFHLTLETNATLFDPELVRYIDLFSLSPKLSSSYTGASPLSIQRLNPECIQQYISSARQYQKDFQLKFVYACDEDIDEIQQLLSVLQAWKNDDILLMPLGGAPEIMRRNMRKTLEHCIRNNWRYCDRLHISLFGDKAGV

SEQ ID NO: 32231 - protein, 262 aa, Oerskovia enterophila
  REGION 1..262: note = tr|A0A163Q7G2|A0A163Q7G2_9CELL 7-carboxy-7-deazaguanine synthase OS=Oerskovia enterophila; OX = 43678 GN=queE PE=4 SV=1
MTALASTPPGPSGRPAGSPTAGHRTGSHRSRTLAPLAVAGMTSLSTVDWPGRLVATVFLQGCPWHCTYCHAPDLAAVAPGDVTSPISWPDVVAFLERRREALDGVVFSGGEPTLQAALPAAIADVRNLGLAVGLHTAGPWPVRLEHVLPLVDWVGLDIKHLPEDYALVTGARPSGEAAYKSLAVLQRSGVDHEVRTTVDPTVHSRGDVLELCGRLAALGVRGHVLQEAHPLGTDARYAAALAGRRLSDVLHDDDLPQLERRT

SEQ ID NO: 32232 - protein, 208 aa, Ohtaekwangia koreensis
  REGION 1..208: note = tr|A0A1T5LTK0|A0A1T5LTK0_9BACT 7-carboxy-7-deazaguanine synthase OS=Ohtaekwangia koreensis OX=688867 GN=queE PE=3 SV=1
MPETINETLIQALPLMEDFYTIQGEGYYQGSAAYFLRLGGCDVGCVWCDVKESWDASAHPLVTVQEMASRVKKSGSPIAVITGGEPVMYNLTALTASIKSEGIRTHIETSGVYPLTGTWDWVCFSPKKFKNPDPSIFEKTDELKVIIYNKSDFGWAEDFASKVRSSCQLYLQPEWSKEKEMVPLIIDYVKANPQWQISLQVHKYMNIP

SEQ ID NO: 32233 - protein, 207 aa, unidentified
  source 1..207: note = Okeania hirsuta
  REGION 1..207: note = tr|A0A3N6PXB7|A0A3N6PXB7_9CYAN 7-carboxy-7-deazaguanine synthase OS=Okeania hirsuta; OX = 1458930 GN=queE PE=3 SV=1
MTEKLIIPIHETFQKTIQGEGYWTGTPVDFIRLAGCPVGCHYCDTGYANGGVDLPRQIRTFDELINELFSPRVVISGGEPFIHKQLPNLVNKIEATGRQVSIETSGCYWQEISHQTWITLSPKQHISSKYPVVKQMWMRASEIKLVIETGKELEFYSKILLANNNIPVFLQPEWYSRNLALPLVLELLQEYPNYRLSVQLHKYLGIQ

SEQ ID NO: 32234 - protein, 228 aa, unidentified
  source 1..228: note = Oleiagrimonas soli
  REGION 1..228: note = tr|A0A099CTP4|A0A099CTP4_9GAMM 7-carboxy-7-deazaguanine synthase OS=Oleiagrimonas soli; OX = 1543381 GN=queE PE=3 SV=1
MSEQVTGAARDSSSAAERLRVCEIFHSIQGEADAVGWPTVFVRLTGCPLRCVWCDTEYSFQGGEWHDIDDLVAQVGAFDTRHVCVTGGEPLAQKRCLRLLERLCDAGHEVSLETSGALDVSEVDPRVRKVMDLKAPGSGESARNLWSNLAHLQAHDQIKIVIADRADYEWACDVLREHALQQRCMVLFSPVHLKLTPRQLAEWILADRLPVRLQTQMHKQLWGETPGH

SEQ ID NO: 32235 - protein, 228 aa, unidentified
  source 1..228: note = Oleiagrimonas sp.
  REGION 1..228: note = tr|A0A328T5A4|A0A328T5A4_9GAMM 7-carboxy-7-deazaguanine synthase OS=Oleiagrimonas sp. MCCC 1A03011 OX=1926883 GN=queE PE=3 SV=1
MNKQATGTTGVSASGAERLRVCEIFHSIQGEADAVGWPTVFVRLTGCPLRCVWCDTEYSFQGGEWRDIDDLVADVGAFDTRHVCVTGGEPLAQKRCLLLLQRLCGAGHEVSLETSGALDVSGVDPRVRKVMDLKAPGSGEAARNLWSNLDHLQAHDQIKIVIADREDYEWARAAVREHALEQRCMVLFSPVHGKLAPRQLAEWILEDRLPVRLQMQMHKQLWGDAPGH

SEQ ID NO: 32236 - protein, 234 aa, Oleibacter marinus
  REGION 1..234: note = tr|A0A1N7LHZ9|A0A1N7LHZ9_9GAMM 7-carboxy-7-deazaguanine synthase OS=Oleibacter marinus; OX = 484498 GN=queE PE=3 SV=1
MAKNTYRVKEVFYTLQGEGAQAGRPAVFCRFSKCNLWNGREDSRTAAVCKFCDTDFIGTDGHLGGEYSASELVTIIASQWPGETSGNSVQGKPYVVCTGGEPALQLDSVLIDELHKAGFEVAIETNGTLPLPDGIDWVCLSPKGDSKLAVINCDELKLVYPQADALPERFDYIVAEHCYLQPMADFEPVVIASDKLEGAKEGLSVSNTRKAVDYCMKHPKWKLSLQTHKLLGIE

SEQ ID NO: 32237 - protein, 213 aa, Oleiphilus messinensis
  REGION 1..213: note = tr|A0A1Y0I1P4|A0A1Y0I1P4_9GAMM 7-carboxy-7-deazaguanine synthase OS=Oleiphilus messinensis OX=141451 GN=queE PE=3 SV=1
MFYSLQGEGARSGRAAVFCRFSKCNLWTGREQDRKAAVCNFCDTDIVGTDGQNGGIFTGALALVDAVTALWPDNAGGKPYVICTGGEPALQLDEELISCFHDSGFEVGIETNGTLPLPNGLDWICVSPKGSAQVVVEHCNELKLVYPQALAPPERFQNLSAENYFLSPMASPNVADSALDAFKQENTRKALEYCLVHPQWRLTLQMHKLLGID

SEQ ID NO: 32238 - protein, 232 aa, Oleispira antarctica
  REGION 1..232: note = tr|R4YTD1|R4YTD1_OLEAN 7-carboxy-7-deazaguanine synthase OS=Oleispira antarctica RB-8 OX=698738 GN=queE; PE = 3 SV=1
MTKTYRVKEIFYTLQGEGAQAGRPSVFCRFSKCNLWNGKEESRAQSVCDFCDTDFVGTDGENGGIYSAKELVELIASLWPGKPSPKSRNKNQGSPYIVCTGGEPLLQLDEPLIEVMHDYGFEIAVETNGTLPAPEGLDWICLSPKADAELILIECDELKLVYPQPLALPESFNYVQATHRYLQPMADASLDYIVSDAHQGLSQSNTQKATHYCLKHPQWKLSLQTHKMLGIE

SEQ ID NO: 32239 - protein, 232 aa, Oleispira sp.
  REGION 1..232: note = tr|A0A2E3B8Q5|A0A2E3B8Q5_9GAMM 7-carboxy-7-deazaguanine synthase OS=Oleispira sp.; OX = 2024846 GN=queE PE=3 SV=1
  VARIANT 178: note = Xaa can be any naturally occurring amino acid
MTKTYRVKEIFYTLQGEGAQAGRPSVFCRFSKCNLWNGKEESRSQSVCDFCDTDFIGTDGENGGVYSAQELVQLISSLWPGNPSPQTKDKNQGTPYIVCTGGEPLLQLDEPLIEVMHHYGFEVAVETNGTLPAPEGLDWICLSPKADAELSLIECDELKLVYPQPLAMPEFFEHVQAXHRYLQPMADASLDYIVSDAHEGLSQSNTQKATNYCLKHPKWKLSLQTHKMLGIE

SEQ ID NO: 32240 - protein, 211 aa, unidentified
  source 1..211: note = Oleomonas sp.
  REGION 1..211: note = tr|A0A418WEZ5|A0A418WEZ5_9PROT 7-carboxy-7-deazaguanine synthase OS=Oleomonas sp. K1W22B-8 OX=2320859 GN=queE PE=3 SV=1
MGYAVKEIFKTLQGEGAQAGRAAVFCRFAGCNLWSGREADRADAVCTFCDTDFVGMDGDGGGRFETAQDLAAAIERAWADASHERRYIVFTGGEPLLQLDEALLEAVHARGFAAAVETNGTQEAPAGLDWVCVSPKAGAPLKLDQGDEMKLVYPQAGLDPAQVADLAFEHFWLQPMDGPDRLANTAAAVAYCLDHPRWRLSLQTHKLIGIP

SEQ ID NO: 32241 - protein, 230 aa, Oligella ureolytica
  REGION 1..230: note = tr|A0A378XCI9|A0A378XCI9_9BURK 7-carboxy-7-deazaguanine synthase OS=Oligella ureolytica; OX = 90244 GN=queE_2 PE=3 SV=1
MVETVIIPIPSREPIQDPNPEFRIVEIFESLQGEGYNTCMPAIFIRLGRCDLACSWCDTDYQTYDSMTLTQILEKLQGYTAKNIIITGGEPAIHPRLTVLLDALKSRAYYLCIETNGLHQIPAQIDYIATSPKACYAERYQKKALSHADEVRIVADLNTMTERQFMDFAQVMAQKITAKHYYLSPLEIEGEMNIYQTIRLIGQLNAAGVEGPNTVHWQLSVQTHKWAGIE

SEQ ID NO: 32242 - protein, 243 aa, Oligella ureolytica
  REGION 1..243: note = tr|A0A378XAC4|A0A378XAC4_9BURK 7-carboxy-7-deazaguanine synthase OS=Oligella ureolytica; OX = 90244 GN=queE_1 PE=3 SV=1
MVSEKQRVIRLSSETAGSAEEPQFRIAEIFESLQGEGYNTGMPAIFIRLGRCDLACSWCDTDYMRFNYVPLSQVLAMLQGYTARNIIITGGEPVVHPRLGSLLDALKERGYTLCIETNGLHQVPEQIDYIATSPKACYAERYVGGGLTEADEVRIVVDVSGVSADVGGELQPSDSEYSFEVTEKERQFMHFAQAMAQKISAKQYYLSPLEEEGEMNIHQTIRLIGLLNVTEQANKVRLLHKNG

SEQ ID NO: 32243 - protein, 210 aa, Oligotropha carboxidovorans
  REGION 1..210: note = tr|B6JI62|B6JI62_OLICO 7-carboxy-7-deazaguanine synthase OS=Oligotropha carboxidovorans (strain ATCC 49405 / DSM 1227 / KCTC 32145 / OM5) OX=504832 GN=queE PE=3 SV=1
MSYAVKEIFLTLQGEGAHAGRTAVFCRFAGCNLWTGREQDRADATCRFCDTDFVGTDGTLGGRYATADALADQIAATWGEGTTHRFVVLTGGEPLLQIDVELIEALHARHFMIAVETNGTLPAPPGLDWICVSPKADTELAIRQGHELKLVYPQAENTPEDYAALAFAHFSLQPMDGPDLAQNTERAIDYCLRHPQWRLSVQTHKTIGIR

SEQ ID NO: 32244 - protein, 207 aa, Olivibacter sp.
  REGION 1..207: note = tr|A0A5C0ZJS6|A0A5C0ZJS6_9SPHI 7-carboxy-7-deazaguanine synthase OS=Olivibacter sp. LS-1; OX = 2592345 GN=queE PE=3 SV=1
MSKQVPADGTLLPLMEEFYTIQGEGYHTGKAAYFIRLGGCDVGCHWCDVKESWDAELHPLTKADDIIRNAARYPAKTVVITGGEPLIYNLDYLTRGLQDAGIKTFIETSGAYPLSGHWDWVCLSPKKFKAPLPDVIEAAGELKVIVFNKSDFEWAERYAAQIPVGRKLYLQPEWSKAAQMTPLIIDYVKENPKWEISLQTHKYLNIP

SEQ ID NO: 32245 - protein, 209 aa, Olleya aquimaris
  REGION 1..209: note = tr|A0A327RD33|A0A327RD33_9FLAO 7-carboxy-7-deazaguanine synthase OS=Olleya aquimaris; OX = 639310 GN=queE PE=3 SV=1
MKQEIQDLVNKGLMLPLMEEFYTIQGEGYHKGTAAYFIRIGGCDVGCHWCDVKESWIADLHPPTKTETIVQNAKKYSDTVVVTGGEPLTWDMTELTSKLKAENCKTHIETSGAYELTGEWDWICLSPKKMKLPTQSVYEKANELKCIIYNKDDFKFAEAQAEKVNNDCILYLQPEWSKRDTMIPLIVDYVMANPKWKVSLQTHKYLNIP

SEQ ID NO: 32246 - protein, 209 aa, unidentified
  source 1..209: note = Olleya namhaensis
  REGION 1..209: note = tr|A0A1I3RKE1|A0A1I3RKE1_9FLAO 7-carboxy-7-deazaguanine synthase OS=Olleya namhaensis; OX = 1144750 GN=queE PE=3 SV=1
MKQEIQDLVNKGLMLPLMEEFYTIQGEGFHKGTAAYFIRIGGCDVGCHWCDVKESWNANLHPPTSTDVIVANAKKYSDTVVVTGGEPLTWDMTALTDKLKAEGCKIHIETSGAYELTGQWDWICLSPKKMKLPTQGVYDKAHELKCIIYNKDDFKFAEEQAAKVNSDCILYLQPEWSKRDTMIPMIVDYVMANPKWKVSLQTHKYLNIP

SEQ ID NO: 32247 - protein, 209 aa, Olleya sp.
  REGION 1..209: note = tr|A0A2K8X3A1|A0A2K8X3A1_9FLAO 7-carboxy-7-deazaguanine synthase OS=Olleya sp. Bg11-27; OX = 2058135 GN=queE PE=3 SV=1
MKQEIQDLVNKGLMLPLMEEFYTIQGEGFHKGTAAYFIRIGGCDVGCHWCDVKESWNANLHPPTSTDVIVANAKKYSDTVVVTGGEPLTWDMTALTDKLKAEGCKIHIETSGAYELTGQWDWICLSPKKMKLPTQGVYDKAHELKCIIYNKDDFKFAEEQAAKVNGDCILYLQPEWSKRDTMIPMIVDYVMANPKWKVSLQTHKYLNIP

SEQ ID NO: 32248 - protein, 209 aa, Olleya sp.
  REGION 1..209: note = tr|A0A559RIS4|A0A559RIS4_9FLAO 7-carboxy-7-deazaguanine synthase OS=Olleya sp. Hel_I_94; OX = 1250001 GN=queE PE=3 SV=1
MKQETQDLVNKGLMLPLMEEFYTIQGEGFHKGTAAYFIRIGGCDVGCHWCDVKESWNADLHPPTSTDVIVANAKKYSDTVVVTGGEPLTWDMTALTDKLKAEGCKIHIETSGAYELTGQWDWICLSPKKMKLPTQGVYDKAHELKCIIYNKDDFKFAEAQAAKVNGDCILYLQPEWSKRDTMIPMIVDYVMANPKWKVSLQTHKYLNIP

SEQ ID NO: 32249 - protein, 213 aa, unidentified
  source 1..213: note = Unknown
  REGION 1..213: note = tr|A0A0R2TH21|A0A0R2TH21_9GAMM 7-carboxy-7-deazaguanine synthase OS=OM182 bacterium BACL3 MAG-120619-bin3 OX=1655593 GN=queE PE=3 SV=1
MSVRLTEIFHSLQGEARTAGRPTVFVRLTGCPLRCTYCDTAYAFEGGKQHSLDSVLAQVAEHSADYVTVTGGEPLAQPAAIQLMQRLCDAGYQVSLETGGAMPIDDVDDRVSIVLDLKTPASGECDRNLLANVPLLRPKDQVKFVICDRGDYEWSKAQVHMHDLGSRVDDILFSPSYEELAPALLAQWVLEDRLKVRMQLQLHKQIWGDKKGV

SEQ ID NO: 32250 - protein, 173 aa, unidentified
  source 1..173: note = Unknown
  REGION 1..173: note = tr|A0A0R2S4R7|A0A0R2S4R7_9GAMM 7-carboxy-7-deazaguanine synthase (Fragment) OS=OM182 bacterium BACL3 MAG-120507-bin80 OX=1655577 GN=ABR69_00920; PE = 3 SV=1
AYAFEGGKQHSLDSVLAQVAEHSADYVTVTGGEPLAQPAAIQLMQRLCDAGYQVSLETGGAMPIDDVDDRVSIVLDLKTPASGECDRNLLANVPLLRPKDQVKFVICDRGDYEWSKAQVHMHDLGSRVDDILFSPSYEELAPALLAQWVLEDRLKVRMQLQLHKQIWGDKKGV

SEQ ID NO: 32251 - protein, 227 aa, unidentified
  source 1..227: note = Omnitrophica bacterium
  REGION 1..227: note = tr|A0A1G1J3R4|A0A1G1J3R4_9BACT 7-carboxy-7-deazaguanine synthase OS=Omnitrophica bacterium RBG_13_46_9 OX=1801818 GN=queE PE=3 SV=1
MREAKISEIFLSIQGEGIYFGIPQLFIRFYRCNLSCGFCDTDLDSYQIFTLDNLMGKIAEYKAPYHSLSLTGGEPLLQAYFIRDFLRAHKESHKKPVYLETNGILYRELSRVVDYVDIIAMDFKLPSSTGETDFWRKHEKFLRIANRKKVFIKAVITSATTSEDISRMRKVAYKIAKDIPIVLQPVTALSESERIPQEFLSRFRDILKESMERVEIIPQVHRMIGVR

SEQ ID NO: 32252 - protein, 247 aa, unidentified
  source 1..247: note = Omnitrophica bacterium
  REGION 1..247: note = tr|A0A1G1KSX5|A0A1G1KSX5_9BACT 7-carboxy-7-deazaguanine synthase OS=Omnitrophica bacterium RIFCSPLOWO2_12_FULL_44_17 OX=1801832 GN=queE; PE = 3 SV=1
MIDDVTAKPITKSVAEITEIFSSLQGEGLYVGERHLFVRFGGCNLTCQYCDEKGKTPKTMTSEEVLDYVKNVDLISGPHSYISLTGGEPLMSGAFLLKLCPELKSEGFKLYLETNGTLVEEMKNLMPFVDVISMDVKPASVTKGKSWLDEHERFLGAIYNYGKKRPDIFVKMVIDNTLVLKEFRDLCEMIGLVDANIPLILQPVSRFSEGYHDPDLMHFLTGLQTNALYVLKDVRIIPRLHKLLKIR

SEQ ID NO: 32253 - protein, 226 aa, unidentified
  source 1..226: note = Unknown
  REGION 1..226: note = tr|A0A1G1PVG0|A0A1G1PVG0_9BACT 7-carboxy-7-deazaguanine synthase OS=Omnitrophica WOR_2 bacterium RIFCSPLOWO2_12_FULL_51_8 OX=1801870 GN=queE PE=3; SV = 1
MNGRISEIFDSVQGEGIYFGEKQLFVRFFGCNLSCRFCDTKLDRFTEYEPRELLEEIRLYKDKQDSFESISFTGGEPLLQAGFLQEVLKLTSGHGYKNYLETNGTLPGELSEVIDYLHTVAMDLKLPSSSGMPQLWPMHRRFLKTASRKDVFIKAVICGTTSEDDIRQAAELILEADRSAILVLQPNSFEKISALTERLGQFKDYCVGRGVITCVIPQLHKKIGLR

SEQ ID NO: 32254 - protein, 223 aa, unidentified
  source 1..223: note = Unknown
  REGION 1..223: note = tr|A0A0S8IGE5|A0A0S8IGE5_9BACT 7-carboxy-7-deazaguanine synthase OS=Omnitrophica WOR_2 bacterium SM23_72 OX=1703777 GN=queE PE=3 SV=1
MKGRIFDVFESIQGEGLYLGEKQIFVRMHGCNLSCRYCDTHMDRFREYEPRELIEEIGLYGNDFHSISFTGGEPLLQKEFLKEVLKHTCLLGYKNYLETNATLSGELEDVIDYLDFLSIDLKLPTSTGMGCLWGLHRKFLKIASRKENFIKAVICSTTIEDDLRYAIDLIKDVSPQSILVLQPNSLDYNEHLQVMLQKFREVCTEAKVTACIIPQVHKIAGIK

SEQ ID NO: 32255 - protein, 231 aa, unidentified
  source 1..231: note = Opitutaceae bacterium
  REGION 1..231: note = tr|A0A178IHR1|A0A178IHR1_9BACT 7-carboxy-7-deazaguanine synthase OS=Opitutaceae bacterium TSB47 OX=1184151 GN=queE PE=3 SV=1
MLISEIFYSLQGEGELTGVPSVFVRTSGCNLRCNWCDTPYASWEPEGRAMETGEIMAEINRHAAARHVVLTGGEPLVAKDIRVLAAAVRATGRHITIETAATIAPDGIACDLASLSPKLRNSAPDTRLPESWRERHKAARWRPDVVRAWMAHCAYQFKFVVSAPADIEELEAMLREAGGDILPSKVLLMPEGTTMEALRARAGWVGEICKARGYRYAHRLHIELYGNKRGT

SEQ ID NO: 32256 - protein, 230 aa, unidentified
  source 1..230: note = Opitutaceae bacterium
  REGION 1..230: note = tr|A0A2T6DS22|A0A2T6DS22_9BACT 7-carboxy-7-deazaguanine synthase OS=Opitutaceae bacterium EW11 OX=2161865 GN=queE PE=3 SV=1
MLISEIFHSLQGEGELIGVPSVFVRTSGCNLRCNWCDTPYASWNPEGENRSLEDILAVVARYPAKHVVLTGGEPMIAKGIHELAEELRRRGYHITIETAGTIRPDGIACDLASVSPKLSNSTPDDRLPSAWKERHEATRFQPDVLRAWIDRGAYQLKFVVSSPADLDEIQRLIAALERQVPRDKILLMPEARTPERLREQAGWLSEQCKAGGFRYAHRLHLELYGNRRGT

SEQ ID NO: 32257 - protein, 232 aa, unidentified
  source 1..232: note = Opitutae bacterium
  REGION 1..232: note = tr|A0A2A2QNG9|A0A2A2QNG9_9BACT 7-carboxy-7-deazaguanine synthase OS=Opitutae bacterium Tous-C5TDCM OX=1982322 GN=queE PE=3 SV=1
MLISEIFYSLQGEGALSGVPSVFVRTSGCNLRCAWCDTPYASWNPEGTTMRVDNIVAAVQSHRTARHVVLTGGEPMIAKEIRELAAALKELGYHITIETAATVAPEAIACDLASMSPKLLNSAPQGTEHGVWRKKHEATRWQPTVVRAWLDAGCDYQFKFVVAAPSDVEELEGMLASLKRDIPRHKVQLMPEARTLEAMRERAGWLGEVCKARGYRYAHRLHIELYGNKRGT

SEQ ID NO: 32258 - protein, 231 aa, unidentified
  source 1..231: note = Opitutae bacterium
  REGION 1..231: note = tr|A0A2A2Q6S1|A0A2A2Q6S1_9BACT 7-carboxy-7-deazaguanine synthase OS=Opitutae bacterium Tous-C1TDCM OX=1982319 GN=queE PE=3 SV=1
MLIAEVFHSLQGEGELTGVPSVFIRTSGCNLRCAWCDTPYASWAPEGKLRLLPDLIAEVDAHPATRHVVLTGGEPMIAKDVRPLAAALRATGRHLTIETAATVAPDGIGCDLASLSPKLLNSAPDPVEHAAWRKKHEATRWQPDVVRAWIDAYPYQFKFVVARPEDIEELEHMLAALKREIPRHKVLLMPEATSLEKMRSRAAWLGDLCKARGYRYAHRLHIELYGNKRGT

SEQ ID NO: 32259 - protein, 229 aa, unidentified
  source 1..229: note = Opitutales bacterium
  REGION 1..229: note = tr|A0A424KCX6|A0A424KCX6_9BACT 7-carboxy-7-deazaguanine synthase OS=Opitutales bacterium TMED207 OX=1986795 GN=queE PE=3 SV=1
  VARIANT 46: note = Xaa can be any naturally occurring amino acid
  VARIANT 61: note = Xaa can be any naturally occurring amino acid
  VARIANT 139: note = Xaa can be any naturally occurring amino acid
  VARIANT 163: note = Xaa can be any naturally occurring amino acid
  VARIANT 178: note = Xaa can be any naturally occurring amino acid
MTKNGKLPIYEQFFTWQGEGIHQGRSAYFIRTFGCPVHCPWCDSAXTWHPDFIPKTIEKIXPKDLIENAQKNNASIVVVTGGEPTIHNLNELCALCSEANLPVHLETSGAFEIKGTFDWITLSPKEWKLPLQKNIQSAXEIKLIVDTTSAIQQWLERFPDITXVETVWLHPEWSKRNXANILDTITEWIKDHGDPFRAGYQIHKLFSADQKDVHSKPNVPLGGDRNLGF

SEQ ID NO: 32260 - protein, 223 aa, unidentified
  source 1..223: note = Opitutales bacterium
  REGION 1..223: note = tr|A0A2E7PZZ8|A0A2E7PZZ8_9BACT 7-carboxy-7-deazaguanine synthase OS=Opitutales bacterium; OX = 2026772 GN=queE PE=3 SV=1
MMGLPVYERFHSWQGEGTHLGKSAFFIRLHGCPVHCSWCDSAGTWHPDHRPESVENMDPQKLADEAFLSCPEIVVITGGEPAIHDLQDLAYQLRSRNLPVHLETCGAFPISGEIDWITISPKWAAPPIEETLEFADELKIIVENEHSIAKWSEKLSLPDFNLPVWLNPEWSKSKDPVVLESINQWVKERGAPFRAGFQAHKLFFADQGDERSRPDASLSHLQE

SEQ ID NO: 32261 - protein, 231 aa, Opitutus sp.
  REGION 1..231: note = tr|A0A2T6D7S7|A0A2T6D7S7_9BACT 7-carboxy-7-deazaguanine synthase OS=Opitutus sp. ER46; OX = 2161864 GN=queE PE=3 SV=1
MLIAEIFHSLQGEGELTGVPSVFVRTSGCNLRCAWCDTPYASWNPEGKNLGVPQIIAAVEQYRTAHHVVLTGGEPMIAKDIRELATALKALGRHITIETAATVAPTGIACDLASLSPKLLNSAPDALEHTTWRRRHEATRWQPDVVRAWIDAYPYQFKFVVARPEDVEELEHMLAALQREIPPHKVLLMPEGTTLERIRTRAPWLAQLCKERGYRYAHRLHLELYGNKRGT

SEQ ID NO: 32262 - protein, 230 aa, Opitutus sp.
  REGION 1..230: note = tr|A0A1H1N978|A0A1H1N978_9BACT 7-carboxy-7-deazaguanine synthase OS=Opitutus sp. GAS368; OX = 1882749 GN=queE PE=3 SV=1
MLIAEIFHSLQGEGELTGVSSVFVRTSGCNLRCNWCDTPYASWSPEGVQMRVDEIVAEVTKRPARHVVLTGGEPMVAREIRELAAALKKLGYHITIETAATIAPDSIACDLASLSPKLRNSAPDERLSAAWRGKHEALRWQPEVVKAWLAGYGFQLKFVVAQVADVDEIEGMLAQLGRDIPRAKVLLMPEGTTVEALRAKAGWLGELCKVRGYRYAPRLHIELYGNKRGT

SEQ ID NO: 32263 - protein, 231 aa, Opitutus terrae
  REGION 1..231: note = tr|B1ZWM3|B1ZWM3_OPITP 7-carboxy-7-deazaguanine synthase OS=Opitutus terrae (strain DSM 11246 / JCM 15787 / PB90-1) OX=452637 GN=queE PE=3 SV=1
MLISEIFYSLQGEGLLTGVPSVFVRTSGCNLRCNWCDTPYASWNPEGKPWRIEQIVREVQSHPTARHVVLTGGEPMIAKEIAELAAQLKGLHYHITIETAATVAPEGIACDLASLSPKLLNSAPDARLGVAWRRKHEALRWQPAVVRAWVDAYPYQLKFVVARPEDVEEIETMLGALEREIPRHRVLLMPEGTTVEAIRTKSGWLGETCKARGFRYAHRLHLELYGNQRGT

SEQ ID NO: 32264 - protein, 245 aa, Orenia marismortui
  REGION 1..245: note = tr|A0A4R8H0Q0|A0A4R8H0Q0_9FIRM 7-carboxy-7-deazaguanine synthase OS=Orenia marismortui; OX = 46469 GN=queE PE=3 SV=1
MKKEDIKIPVVEIFKSISGEGVSAGEVVVFVRVAGCNLRCSYCDTKYSYNQNLEEYQYLTYEEIRERINKFNCNKVICTGGEPLESDQAKRYLPLYLAEQGFKVRIETNGSCQLYSEQELSEFEINSRDSDLNYTLDIKSPSSKMSDNNIFMDNFIKLESNDELKFVVGDNQDLEYALAVIEKHKNILAQRQVMINFSPIFEVIEVDEIVEFLKQESLFFTKNNLKVRLSLQIHKFIWPPEARGV

SEQ ID NO: 32265 - protein, 248 aa, unidentified
  source 1..248: note = Orenia metallireducens
  REGION 1..248: note = tr|A0A285GWQ3|A0A285GWQ3_9FIRM 7-carboxy-7-deazaguanine synthase OS=Orenia metallireducens OX=1413210 GN=queE PE=3 SV=1
MRIRELEEIKIPIVEIFNSISGEGISAGEVVTFLRVAGCNLRCGYCDTTYSYQGSDDEYQWLTFQEILERLSRYNCNKVICTGGEPLETTKVKRYLPLYLLKQGYEVRIESNGSCPIYSQEELREFAITEEINRLDYTLDIKVPSSKMSDHNIFAENFINLISGDELKFVVGNDKDLNYAKEVIDEYRDILAKGDVIINFSPVFETIKAETIVEFLKENNSYFVDNNLQTRLSLQLHKFIWDPEAKGV

SEQ ID NO: 32266 - protein, 248 aa, unidentified
  source 1..248: note = Orenia metallireducens
  REGION 1..248: note = tr|A0A1C0ACR2|A0A1C0ACR2_9FIRM 7-carboxy-7-deazaguanine synthase OS=Orenia metallireducens OX=1413210 GN=queE PE=3 SV=1
MKIREFEEVRIPVVEIFNSISGEGISAGEVVTFLRVAECNLRCSYCDTTYSYQLSDDNYDWLTPQEILERLSQYNCNKVICTGGEPLETTKAKRYLPLYLVKKGYKVRIESNGSCPVYSKKELREFEIEQVNDRLNYTLDIKPPSSKMSNHNIFAENFIKLTLGDELKFVVANDEDLNYAKKVIDKYKDILAKSNLIINFSPVFQAIEAESLVEFLKENNPYFINNNLKVRLSLQLHKFIWDPEAKGV

SEQ ID NO: 32267 - protein, 217 aa, Oribacterium sp.
  REGION 1..217: note = tr|A0A1I2PWC8|A0A1I2PWC8_9FIRM 7-carboxy-7-deazaguanine synthase OS=Oribacterium sp. WCC10 OX=1855343 GN=queE PE=3 SV=1
MKVVEKFVSINGESTRAGELAVFIRFKGCNLSCSYCDTMWANEKNCPYTEMSPEEILNYVRETGVTNVTLTGGEPLLQDQVSELIELLLDNGNRVEIETNGSIDLKPFITEKRPVFTMDYKLPGSRCEKSMLIENFSLLEEQDTVKFVSGSIEDLDKARSIIETYDLCRKCHTYISPVFGSIEPSEIVDYMIQHNMNEVRLQIQMHKVIWDPDKRGV

SEQ ID NO: 32268 - protein, 217 aa, Oribacterium sp.
  REGION 1..217: note = tr|A0A1S9BST3|A0A1S9BST3_9FIRM 7-carboxy-7-deazaguanine synthase OS=Oribacterium sp. C9; OX = 1943579 GN=queE PE=3 SV=1
MKVVEKFVSINGEGTRAGELAVFIRFKGCNLRCSYCDTMWANEGNCLYTEMSQEEILTYILETGVKNVTLTGGEPLLQKGAHELIQLLLENGLSVEIETNGSVDLRPFTGGRRPLFTMDYKLPGSNCEDGMLLENFELLDPQDTVKFVSGSIEDLERARCLIEKYGLTERCHVYISPVFGSIEPKDIVDYMIEHKMNDVRLQIQMHKVIWDPDKRGV

SEQ ID NO: 32269 - protein, 277 aa, unidentified
  source 1..277: note = Oricola cellulosilytica
  REGION 1..277: note = tr|A0A4R0PAY8|A0A4R0PAY8_9RHIZ 7-carboxy-7-deazaguanine synthase OS=Oricola cellulosilytica OX=1429082 GN=queE PE=3 SV=1
MPGAPPLWLVQGALARDDRCQGQRNAQDLGRISPMSEERTIKVCEIFGPTIQGEGALIGRPTVFVRTGGCDYRCSWCDSLHAVESRFRDDWRPMEPHEILESVRRLSGGKPLTVTLSGGNPAIQPFADLIRRGKADGYGFALETQGSVSQPWFSELETLVLSPKPPSSGMQCDVDAVRTCLRAAGEGPRSVLKFVVFDDADFRFARQTAALFPTLRVYLQPGNHTPPPPGEEDAAIDLDGINRRFEWLVGKVLSEGWFEAHVLPQLHVLIWGNRRGV

SEQ ID NO: 32270 - protein, 213 aa, Ornithobacterium rhinotracheale
  REGION 1..213: note = tr|I3ZXD9|I3ZXD9_ORNRL 7-carboxy-7-deazaguanine synthase OS=Ornithobacterium rhinotracheale (strain ATCC 51463 / DSM 15997 / CCUG 23171 / CIP 104009 / LMG 9086); OX = 8 67902 GN=queE PE=3 SV=1
MVQSLTPEQTELMNAGKLLPIMEDFYTLQGEGAHTGAASYFIRIGGCDVGCHWCDVKESWDASKHPLTPVDELVERATKYAKMIVITGGEPLMWNLEYLTQKLKEKGCKIHIETSGSHSLSGTLDWICLSPKKRLLPKQDVLDRASELKVIVFNHHDFKFAEEYAAKVSPDCVLYLQPEWSKREEMTPKIIDYILENPKWKISLQTHKVLRIP

SEQ ID NO: 32271 - protein, 213 aa, Ornithobacterium rhinotracheale
  REGION 1..213: note = tr|A0A3R5XU10|A0A3R5XU10_9FLAO 7-carboxy-7-deazaguanine synthase OS=Ornithobacterium rhinotracheale OX=28251 GN=queE PE=3 SV=1
MVQTLTPEQTKLMNAGKLLPIMEDFYTLQGEGAHTGAASYFIRIGGCDVGCHWCDVKESWEAGKHPLTPVDELVERANQHAKMIVITGGEPLMWNLDYLTQKLKEKGCQIHIETSGSHPLSGTLDWICLSPKKRLLPKQEVLERASELKVIIFNHHDFKFAEEYAAKVSPECELYLQPEWSKREEMTPKIIDYILGNPKWKISLQTHKVLHIP

SEQ ID NO: 32272 - protein, 210 aa, unidentified
  source 1..210: note = Orrella dioscoreae
  REGION 1..210: note = tr|A0A1C3JWR5|A0A1C3JWR5_9BURK 7-carboxy-7-deazaguanine synthase OS=Orrella dioscoreae; OX = 1851544 GN=queE PE=3 SV=1
MAYSVKELFKTLQGEGAHAGRASVFCRFAGCNLWTGREADRVSAACRFCDTDFVGTDGDGGGKFADAQALADALAACWGPGTEHRYVVFTGGEPLLQLDPALIEAAHAQGFTIAIETNGTLPVPPGVDWICVSPKGSAPLAQTRGDELKLVYPQPEHTPARFAGLDFTHFWLQPMDGPARVANTALAVEYCTAHPPWRLSLQTHKYIGIP

SEQ ID NO: 32273 - protein, 219 aa, unidentified
  source 1..219: note = Oryzomicrobium terrae
  REGION 1..219: note = tr|A0A5C1E4U7|A0A5C1E4U7_9RHOO 7-carboxy-7-deazaguanine synthase OS=Oryzomicrobium terrae; OX = 1735038 GN=queE PE=3 SV=1
MVENHRQLTLKVSEIFYSVQGEASRVGLPTVFVRLTGCPLRCTWCDTAYAFTGGETQTIGQVLYEVAKHPTHHVCVSGGEPLAQKNCLPLLTALCDDGCDVSLETSGALDISAVDPRVSRIMDLKAPDSGEVGRNRLANLAHLTHRDELKIVIASRGDYEWAKEQLREHALTDKCPVLFSPVAGQLEPRQLAEWILTDGLPVRFQVQLHKILWGNMKGK

SEQ ID NO: 32274 - protein, 270 aa, Oscillatoria acuminata
  REGION 1..270: note = tr|K9TBC9|K9TBC9_9CYAN 7-carboxy-7-deazaguanine synthase OS=Oscillatoria acuminata PCC 6304 OX=56110; GN = queE PE=3 SV=1
MTHSIAAPPTTRAIEVFSGIQGEGLNVGTRQIFIRFGGCDLRCNYCDSAHTWTIPDTCRIEKTPGDRDFEVHPNPVPLPLFLDWIDRQNQPSLHDSISLTGGEPLLHTPFLEEFLPPLKQRTGLPLYLETGGHRPQQLQRILPYLDLVGMDIKLPSVSGETHWQAHQEFLSLCCTAGVEVFVKIIISDDTLEAELEQAAQLVAGINPLVTVFLQPVTPLSAGEMANFGDRPTPAIKSPAPTKVLAWQGVMKQWLKPVRVVPQTHKMLGQL

SEQ ID NO: 32275 - protein, 208 aa, unidentified
  source 1..208: note = Oscillatoria nigroviridis
  REGION 1..208: note = tr|K9VHN4|K9VHN4_9CYAN 7-carboxy-7-deazaguanine synthase OS=Oscillatoria nigro-viridis PCC 7112 OX=179408; GN = queE PE=3 SV=1
MSNLQLKLPIHETFQCTVQGEGYWTGTLVDFIRLAGCPVRCPWCDTGYANGGKGLPSVPQSIAQLLAQLQSPRVVITGGEPFIHRDLPELVEALLEADKQVSIETSGACWQDVSPQAWITLSPKEHVNPKYPVQEIFWTRANEIKLVVSTGEEVEFYHKHLENNVNIPVFLQPEWNSKKTAIPIILELLKQNPSYRLSLQTHKFIGVQ

SEQ ID NO: 32276 - protein, 210 aa, unidentified
  source 1..210: note = [Oscillatoria] sp.
  REGION 1..210: note = tr|D8G901|D8G901_9CYAN 7-carboxy-7-deazaguanine synthase OS=[Oscillatoria] sp. PCC 6506 OX=272129 GN=queE; PE = 3 SV=1
MLESNLHIKLPIHETFQSTVQGEGYWSGTLVDFIRLAGCPVHCPWCDTGYSEGGKDLPNVQRSIVELLTELKSPRVVISGGEPFIHKNLPLLVESLLEVGKQVSIETSGSHWQEVAGETWITLSPKEHVNPKYPVQEKFWSRANEIKLVISTGEEVNFYRDGLVSNPNIPVFLQPEWSDRFRAIPIILQLLQQNPGYRLSLQTHKLIGVQ

SEQ ID NO: 32277 - protein, 210 aa, unidentified
  source 1..210: note = Oscillatoriales cyanobacterium
  REGION 1..210: note = tr|A0A1C0VQU9|A0A1C0VQU9_9CYAN 7-carboxy-7-deazaguanine synthase OS=Oscillatoriales cyanobacterium USR001 OX=1880991 GN=queE PE=3 SV=1
MLDLTLNLKLPIHETFQSTVQGEGYWTGNLVDFIRLAGCPVGCPWCDTGYSDGGKNLPNVSRSIAELLAELKSPRVVISGGEPFIHKNLTPLITSLLEFGKQVSIETSGICWQEVPAETWITLSPKQHVNSQYPVQKQFWTRANEIKLVISNGEEIDFYRNCLNSTLNIPIFLQPEWNNRSIAMPIILDLLQQYPNYRLSLQTHKFIDLQ

SEQ ID NO: 32278 - protein, 204 aa, unidentified
  source 1..204: note = Oscillatoriales cyanobacterium
  REGION 1..204: note = tr|A0A1J5GJ31|A0A1J5GJ31_9CYAN 7-carboxy-7-deazaguanine synthase OS=Oscillatoriales cyanobacterium CG2_30_40_61 OX=1805291 GN=queE PE=3 SV=1
MFEIPVHETFQSTIQGEGYWVGTLVDFIRLAGCPVRCPWCDTGYGDGGMDLPRQLRSFDSLMAELRSPRVVISGGEPLIYAQLPRLIQTIEATRRTVAIETSGSFWQDIPNSVWVTLSPKHHVSPNYPVVPLIWKRANEIKLVIETGSELEFYAEYLELNDQIPVFLQPEWNQRDRTLPLVLELLKKFPHYRLSVQIHKWLQVP

SEQ ID NO: 32279 - protein, 214 aa, unidentified
  source 1..214: note = Osedax symbiont
  REGION 1..214: note = tr|S6GKU5|S6GKU5_9GAMM 7-carboxy-7-deazaguanine synthase OS=Osedax symbiont Rs2 OX=1330035 GN=queE PE=3; SV = 1
MYKVKEMFYTLQGEGAQAGRPAVFCRFTGCNLWSGRERDRAKSVCDFCDTDFIGTDGQNGAKFSTALDLAKAIASFWPVPKVGQGTQGIPYVVFTGGEPALQLDAALISALKQQNFEIAIETNGTKELPQGIDWICVSPKADAKVIIQSGQELKLVYPQSLAMPQRFEQFNFQHFYLQPMAQDNANHTQATIEYCMTHPRWKLSLQTHKITGID

SEQ ID NO: 32280 - protein, 214 aa, unidentified
  source 1..214: note = Osedax symbiont
  REGION 1..214: note = tr|A0A1Y5GRI8|A0A1Y5GRI8_9BACT 7-carboxy-7-deazaguanine synthase OS='Osedax' symbiont bacterium Rs2_46_30_T18 OX=1856298 GN=queE PE=3 SV=1
MYKVKEMFYTLQGEGAQAGRPAVFCRFTGCNLWSGRERDRAKSVCDFCDTDFIGTDGQNGAKFSTALELADKIASFWPTPQLGRSVEGVPYVVFTGGEPALQLDEALTSALKQRNFEIAIETNGTKQLPAGIDWICVSPKADAEVIIECGQELKLVYPQSLAMPQRFEQLNFEHFYLQPMAQDNANHTKATIEYCMAHPRWKLSLQTHKITGID

SEQ ID NO: 32281 - protein, 179 aa, unidentified
  source 1..179: note = Otariodibacter oris
  REGION 1..179: note = tr|A0A420XH27|A0A420XH27_9PAST 7-carboxy-7-deazaguanine synthase OS=Otariodibacter oris; OX = 1032623 GN=queE PE=3 SV=1
MQAVNSSQNNALISYRIVEIFETLQGEGYNTGMPSIFIRFGKCNLACPWCDTNYHQYEEKTASEILSIVKQFSAKNIIITGGEPTIQPHLDILLDMLKNEGYFLAIETNGLKPVPLQIDYIATSPKRLYQKNYSKHHIPYADGEVNMLATITQLGLLNQRANKPHWHLSIQTHKIANID

SEQ ID NO: 32282 - protein, 219 aa, Ottowia sp.
  REGION 1..219: note = tr|A0A5C7W0R0|A0A5C7W0R0_9BURK 7-carboxy-7-deazaguanine synthase OS=Ottowia sp.; OX = 1898956 GN=queE PE=3 SV=1
MDNAAPPNRLRLTEIFLSLQGEAASVGWPTVFVRLTGCPLRCQYCDTAYAFHGGQWWEIEDILAEVARLGVRHVCVTGGEPLAQKRCLELLRQLCDAGYEVSLETSGALDIAGVDPRVSRVVDLKTPGSAEQARNRLENLPLLTARDQVKFVLCGRGDYEWARAMVAEHRLAERCEVLFSPSKTELEPRELADWIVADRLPVRFQMQLHKLLWNDEPGR

SEQ ID NO: 32283 - protein, 207 aa, Owenweeksia hongkongensis
  REGION 1..207: note = tr|G8R255|G8R255_OWEHD 7-carboxy-7-deazaguanine synthase OS=Owenweeksia hongkongensis (strain DSM 17368 / CIP 108786 / JCM 12287 / NRRL B-23963 / UST20020801); OX = 926 562 GN=queE PE=3 SV=1
MTENDKVEKGLFLPLMEEFYTIQGEGYHSGRAAYFIRIGGCDVGCHWCDVKESWNPKLHPPTDIQQIADHAAEYSKTIVITGGEPLMWNMEPITTLLKDKGLEVHIETSGAYTVSGNWDWFCLSPKKTKPPVKEAYEYAHELKVIIYNKHDFKWAEEHAARVGAHCKLFLQPEWSRREVMMDDIANYVMQNPKWQISLQTHKYIGIP

SEQ ID NO: 32284 - protein, 203 aa, Owenweeksia sp.
  REGION 1..203: note = tr|A0A1Z8L9N4|A0A1Z8L9N4_9FLAO 7-carboxy-7-deazaguanine synthase OS=Owenweeksia sp. TMED14 OX=1986609 GN=queE PE=3 SV=1
  VARIANT 44: note = Xaa can be any naturally occurring amino acid
  VARIANT 68: note = Xaa can be any naturally occurring amino acid
  VARIANT 87: note = Xaa can be any naturally occurring amino acid
  VARIANT 93: note = Xaa can be any naturally occurring amino acid
MKRTELPALPLMEAFRTIQGEGAHTGLPSFFLRIGGCDVGCHWXDVKESWDPNKHPLTEISDILSQIXDSDKTIVITGGEPLMWDMXPLTTSXKGMGKRIHLETSGSYNFSGTWDWVCLSPKKTKPPIDQWYSQADELKIIIYNQDDLKWAEYHSKRVGKKCKIYLQPEWSKKEKVMPMIIKFLESKPDWRLSLQSHKYIGLP

SEQ ID NO: 32285 - protein, 209 aa, Owenweeksia sp.
  REGION 1..209: note = tr|A0A2D8SRU0|A0A2D8SRU0_9FLAO 7-carboxy-7-deazaguanine synthase OS=Owenweeksia sp.; OX = 2024847 GN=queE PE=3 SV=1
MVNAHEEKVAQGLWVPLMEEFYTIQGEGFHTGKAAYFIRIGGCDVGCHWCDVKESWNPDLHPPTEVQQIADTAAHYSKTVVVTGGEPLTWNMDPLTHALQERGLQIHLETSGAYQLSGSWDWICLSPKKTKPPVDEVYAQAHELKIIIYNKHDFKWAEEHAARVGDHCKLFLQPEWSRSKEMMSSIADYVMQNPQWQISLQTHKYIGIP

SEQ ID NO: 32286 - protein, 211 aa, Oxalobacter formigenes
  REGION 1..211: note = tr|C3X240|C3X240_OXAFO 7-carboxy-7-deazaguanine synthase OS=Oxalobacter formigenes HOxBLS OX=556268; GN = queE PE=3 SV=2
MAYSVKEIFYTLQGEGARTGRPAVFCRFSGCNLWSGREQDRARAICRFCDTDFVGTSGERGGKFPEAEKLASVIISLWPREHAENRYVVFTGGEPLLQLDRPLIGIMHRAGFEIAIETNGTIPVPEGVDWVCVSPKVGSTLVVKSGDELKVVIPQAGQNLADYEDLSFSHFYVQPMDGENRERNIKMAIDTCLKNPKWKLGLQTHKYLQIP

SEQ ID NO: 32287 - protein, 219 aa, Oxalobacter formigenes
  REGION 1..219: note = tr|C3XA64|C3XA64_OXAFO 7-carboxy-7-deazaguanine synthase OS=Oxalobacter formigenes OXCC13 OX=556269; GN = queE PE=3 SV=1
MDDCQDIVLTYSVKEIFYTLQGEGARSGRPAVFCRFSGCNLWSGREADRSRSVCRFCDTDFVGTDGVNGGKFAQAEDLSSFIESLWPAGFMENRYVVFTGGEPLLQLDAALIDAMHGKGFEIAIETNGTLAVPDGIDWVCVSPKAGADLAVAGGDELKVVVPQPGQILADYESLAFTHFYVQPMDGENRLQNVKIAIDTCLQNPKWKLSLQTHKYLQIP

SEQ ID NO: 32288 - protein, 211 aa, Oxalobacter sp.
  REGION 1..211: note = tr|A0A3A6P9G9|A0A3A6P9G9_9BURK 7-carboxy-7-deazaguanine synthase OS=Oxalobacter sp.; OX = 2093374 GN=queE PE=3 SV=1
MTYAIKEIFYTLQGEGARAGRPAVFCRFAGCNLWSGREADRAGAMCRYCDTDFVGTDGAHGGKYENAEALANAMDALWPATFAASKYVVLTGGEPLLQLDATLIAALHLHGFEIAIETNGSLPVPEGVDWVCVSPKVGVKLAVKRGDELKLVVPQSGLSLPDYEGLEFSHFFVQPMDNADREANAQYAVRLCLQNPRWKLSLQAHKILQIP

SEQ ID NO: 32289 - protein, 186 aa, unidentified
  source 1..186: note = Oxalobacteraceae bacterium
  REGION 1..186: note = tr|A0A4Q3IJQ6|A0A4Q3IJQ6_9BURK 7-carboxy-7-deazaguanine synthase (Fragment); OS = Oxalobacteraceae bacterium OX=1871070 GN=queE PE=3 SV=1
PQAVDQAGKVGRESDRSTAVCQFCDTDFVGTDGERGGKYRAAADLAGLIDSLWPASHAASKYVVFTGGEPLLQLDSALIAAMHERGFEIAIETNGTLAVPPGVDWVCVSPKAGSFLNVEQGSELKVVIPQAGQNLADYERLSFDHFYLQAMDGPEAAANIRLAIETCKSNPKWKLSLQTHKLLQIP

SEQ ID NO: 32290 - protein, 211 aa, unidentified
  source 1..211: note = Oxalobacteraceae bacterium
  REGION 1..211: note = tr|A0A4Y9QJ09|A0A4Y9QJ09_9BURK 7-carboxy-7-deazaguanine synthase OS=Oxalobacteraceae bacterium OM1 OX=2561929 GN=queE PE=3 SV=1
MTYSVKEMFYTLQGEGTHAGRPAVFCRFSGCNLWSGRESDRATAICKFCDTDFVGIDGEGGGKFADAALLAAAIDARWPTSDTAHKFVVFTGGEPLLQLDAALIDAMHARGFEIAIETNGTLAAPPGIDWICVSPKLGSELVQRRGNELKVVIPQEAQDLSAYEALAFDHFYLQPMDGPFAERNTRLAIELCKQRPQWKLSLQTHKLLNIP

SEQ ID NO: 32291 - protein, 325 aa, Oxobacter pfennigii
  REGION 1..325: note = tr|A0A0P8X604|A0A0P8X604_9CLOT 7-carboxy-7-deazaguanine synthase OS=Oxobacter pfennigii; OX = 36849 GN=queE PE=4 SV=1
MKEAGFYKKLKDNLVKCNLCPNYCVIENANLGSCRTRKNTGGTLYTLNYNRIAALALDPIEKKPLYHFYPGTKILSAGTLGCNLKCSFCQNWHIAQDDADTQEITGERLVDIAIKQESLGIAFTYNEPFIWYEYIYEIAKLCKKKGLKYVLVTNGYVNEEPLNEMLHLIDAMNIDVKGFTGKFYKDICKGILEPVKRTVEKAASQCHIEVTTLVVTDLNDTIDEIRELSLWLSSIDKNIPLHLSRYFPNYKLDNPPTPLNTLKMLYDEAKKHLNYVYLGNVADKDNTTYCPKCKNPLVKRGSNVTVEGIYKGKCKNCSESINIIY

SEQ ID NO: 32292 - protein, 236 aa, Pacificibacter maritimus
  REGION 1..236: note = tr|A0A3N4UVC9|A0A3N4UVC9_9RHOB 7-carboxy-7-deazaguanine synthase OS=Pacificibacter maritimus OX=762213 GN=queE PE=3 SV=1
MTSLRIAEIFGPTVQGEGALIGEPTVFVRTGGCDYRCVWCDSLHAVASEFRHTWAAMTTDDIWNDITRLSQGKPLTVSLSGGNPAIQDFAPLITLGHEHGYKFALETQGSIARPWFSQIDTLVLSPKPPSSGETVDWTAFDACLEAAQDAGTVVMKIVIFDDKDYDWARDVADAYPALPLYLQPGNPEVDPNVAVDPQALSDRLLWLVDKVMEDAWFTPRVLPQLHVMLWGNKRGV

SEQ ID NO: 32293 - protein, 210 aa, unidentified
  source 1..210: note = Pacificimonas flava
  REGION 1..210: note = tr|M2T999|M2T999_9SPHN 7-carboxy-7-deazaguanine synthase OS=Pacificimonas flava OX=1234595 GN=queE PE=3; SV = 1
MSYAVKEIFPTLQGEGGQAGRRAVFLRFAGCNLWTGREQDRAGAVCRFCDTDFVGMNGPGGGRFPDADALADAVERTWGDSREHRLTVCTGGEPLLQLDTPLIEALHRRGFEIAVETNGTVPAPAGLDWICVSPKAAEPLKQRSGNELKLVYPQPENDPAQFEHLAFDHFFLQPMDSPQQAENVAAATRYCMDHPKWRLSLQTHKLIGIP

SEQ ID NO: 32294 - protein, 209 aa, unidentified
  source 1..209: note = Pacificimonas flava
  REGION 1..209: note = tr|A0A219B5H7|A0A219B5H7_9SPHN 7-carboxy-7-deazaguanine synthase OS=Pacificimonas flava; OX = 1234595 GN=queE PE=3 SV=1
MSYAVKELFLTLQGEGAQAGRRAVFLRFSGCNLWSGRERDRASAVCTFCDTDFVGTDGERGGRYETEELAGLVEEVWGLAQPARLVVCTGGEPLLQLDRQLIDALHRRGFEIAIESNGTIAAPDGVDWICISPKAAQPLVQTRGQELKLVYPQAENDPADFEHLDFEHFYLQPMDGPSQAENIAAATRYCLDHPGWRLSLQTHKLIGIP

SEQ ID NO: 32295 - protein, 231 aa, unidentified
  source 1..231: note = Paenibacillaceae bacterium
  REGION 1..231: note = tr|A0A2A6DXR9|A0A2A6DXR9_9BACL 7-carboxy-7-deazaguanine synthase OS=Paenibacillaceae bacterium JTherm OX=1906605 GN=queE PE=3 SV=1
MNRPEWNTVRVPIVEIFETIEGEGTKAGFPTVFVRLFGCNLRCVWCDTTYSYPPAEPGPTLTVADIVERVTSYRSRHLCLTGGEPLMYGERSRMLLEALAECGAFDDIHVETNGAVDLRPFLESVRSLAVRYIMDYKLPDSGEERRMVAGNLPLLRPQDELKFVVASRRDFDRAVSLLDEYDVRAQVLFSPVWGAVEPRKLAEWMLERGLARARLNLQLHKIIWSPDARGV

SEQ ID NO: 32296 - protein, 233 aa, unidentified
  source 1..233: note = Paenibacillaceae bacterium
  REGION 1..233: note = tr|A0A354DFI0|A0A354DFI0_9BACL 7-carboxy-7-deazaguanine synthase OS=Paenibacillaceae bacterium OX=2003592 GN=queE PE=3 SV=1
MENLCLPMVECFQTVEGEGKMAGTPTTFVRVYNCNLRCRWCDTPYSYAPEHPSYFSSIGEILEQVKSFGHGSVCLTGGEPLMHGEKSLALVKELSLLPEVWDVHVETNGSIPLHEFIDLRSQDEKIGKTLRFIVDYKLPSSGEEDQMDSSTFSLLQAQDEGKFVVANDDDFHRALEVIKNNSIQADLLFSPVWDTMPPHHLVELLLAHRPHGGRARLNLQLHKMIWDPDMRGV

SEQ ID NO: 32297 - protein, 271 aa, Paenibacillus agaridevorans
  REGION 1..271: note = tr|A0A2R5F042|A0A2R5F042_9BACL 7-carboxy-7-deazaguanine synthase OS=Paenibacillus agaridevorans OX=171404 GN=queE PE=3 SV=1
MTDFQRSRRSDSAALANAGKASGTASGLVGAARPIPVLEVFGPTVQGEGMVVGRKTMFVRTAGCDYSCSWCDSAFTWDGSGKDDIRLLSAAAIIEELEKIGGGTFDHVTISGGNPALLPQLSALIQGLQDRGCKVALETQGSRWQPWFTAIDDLTLSPKPPSSGMTTNWDTLDDIVSRLGEAGNGFCLKVVIFDDADLDYARKVHARYRDVPFYLQAGNGNLTETDPQAMLPYLVERYEWLISRTMPDESLRGVHVLPQLHTWIYGNKKGV

SEQ ID NO: 32298 - protein, 245 aa, Paenibacillus algorifonticola
  REGION 1..245: note = tr|A0A1I2IK03|A0A1I2IK03_9BACL 7-carboxy-7-deazaguanine synthase OS=Paenibacillus algorifonticola OX=684063 GN=queE PE=3 SV=1
MLKQAEARIPVMEIFGPTVQGEGMVIGQKTMFVRTAGCDYSCAWCDSAFTWDGTGKDDIRMLTAAEIISELHAVGGEAFSHVTLSGGNPALLRHAGELVQGLHAAGIQVALETQGSKWQDWLLDIDELTLSPKPPSSGMDTSWEMLDEIVHQLSAANRSFSLKVVVFDDADLAYAASVHARYPGVLFFVQAGNDDLAEGDNGKLRDKLVERYEWLIERVMVRSDMNQVRVLPQLHAWVWGNKRGV

SEQ ID NO: 32299 - protein, 241 aa, Paenibacillus alvei
  REGION 1..241: note = tr|S9SMX0|S9SMX0_PAEAL 7-carboxy-7-deazaguanine synthase OS=Paenibacillus alvei TS-15 OX=1117108 GN=queE; PE = 3 SV=1
MTIPVLEIFGPTVQGEGLLVGQKTMFVRTAGCDYRCSWCDSAFTWDGSAKDDIRQLTADAVIEELDRLAKGRYGHVTISGGNPALLEGMDELVQRLGERGVRTAVETQGSRWQDWLLDIDDVTLSPKPPSSGMGTNFTRLDEIVGKLWNRSARKGLCLKVVVFNEDDMQYAIEVHERYPEIPFVMQTGNEDVHSGDDGELVQKLLRQYEWLIDKVALEPRLNQIRVLPQLHTLVWGNKRGV

SEQ ID NO: 32300 - protein, 241 aa, Paenibacillus alvei
  REGION 1..241: note = tr|K4Z971|K4Z971_PAEA2 7-carboxy-7-deazaguanine synthase OS=Paenibacillus alvei (strain ATCC 6344 / DSM 29 / NBRC 3343 / NCIMB 9371 / NCTC 6352) OX=1206781 GN=queE P; E = 3 SV=1
MTIPVLEIFGPTVQGEGLLVGQKTMFVRTAGCDYRCSWCDSAFTWDGSAKDDIQQMAADEVIAELDRLAEGRYAHVTISGGNPALLGGIGELVERLSKRGVRTAVETQGSRWQNWLLDIDDVTLSPKPPSSGMDTDFVRLDEIAEKLWNRSVRKGLCLKVVVFNEEDMRYAIAVHERYPEIPFVMQTGNEDVHNNDDQELIQKLLRRYEWLIDQVALEPRLNRTRVLPQLHTLVWGNKRGV

SEQ ID NO: 32301 - protein, 257 aa, Paenibacillus amylolyticus
  REGION 1..257: note = tr|A0A100VHP1|A0A100VHP1_PAEAM 7-carboxy-7-deazaguanine synthase OS=Paenibacillus amylolyticus OX=1451 GN=queE PE=3 SV=1
MSSVTQQVNETGTRKEARIPVMEIFGPTVQGEGMVIGQKTMFVRTAGCDYRCSWCDSAFTWNGSGKDQIRMITPEDVWEELRRVGGTRFSHVTISGGNPALLASLGGLVALLRENGIRTAVETQGSRWQSWLADIDEVTVSPKPPSSGMDTDWAVLDDLIKRLAAGPVERSHSLKIVIFDETDLDYARRVHARYPGTDLFLQTGNPDVTSADTPDLASSLLARYEWLIDQVSASDDLNNVRVLPQLHTLVWGNKRGV

SEQ ID NO: 32302 - protein, 257 aa, Paenibacillus amylolyticus
  REGION 1..257: note = tr|A0A1R1DY35|A0A1R1DY35_PAEAM 7-carboxy-7-deazaguanine synthase OS=Paenibacillus amylolyticus OX=1451 GN=queE PE=3 SV=1
MSSVTQQVNETGSRKEARIPVMEIFGPTVQGEGMVIGQKTMFVRTAGCDYRCSWCDSAFTWDGSGKDQIRMITPEDVWEELRRVGGTRFSHVTISGGNPALLASLGGLVALLRENGIRTAVETQGSRWQPWLANIDEVTVSPKPPSSGMDTDWAVLDDLIERLAAGPVERSHSLKIVIFDETDLDYARRVHARYPGTDLFLQTGNPDVTSADTPDLASSLLARYEWLIDQVSASDDLNNVRVLPQLHTLVWGNKRGV

SEQ ID NO: 32303 - protein, 257 aa, Paenibacillus antarcticus
  REGION 1..257: note = tr|A0A168QTM7|A0A168QTM7_9BACL 7-carboxy-7-deazaguanine synthase OS=Paenibacillus antarcticus OX=253703 GN=queE PE=3 SV=1
MSSQHPKGHFEDSKPARRLPILEIFGPTVQGEGMVIGRKTMFVRTAGCDYHCSWCDSSFTWDGSGKDLIKLLSPEQICHELYQIGEDRFSHVTLSGGNPTLLPQLGELIQLLHDRNITVAVETQGSRWQDWLIDVDEVTLSPKPPSSGMITEWRTLDIIVDNLKQRPAKYSHSLKVVIFDEADLDYAVTVHLRYPDTLLYLQVGNSDVHTMDSTQLTMTLLQRYEWLIDKVMESSILNNVRVLPQLHTLVWGNKRGV

SEQ ID NO: 32304 - protein, 269 aa, unidentified
  source 1..269: note = Paenibacillus aquistagni
  REGION 1..269: note = tr|A0A1X7M0F6|A0A1X7M0F6_9BACL 7-carboxy-7-deazaguanine synthase OS=Paenibacillus aquistagni OX=1852522 GN=queE PE=3 SV=1
MDDGMSHKNGMNSVLARCDASQAHSHTPHTQRIPVLEVFGPTVQGEGALVGQKTMFVRTAGCDYRCSWCDSAFTWDGSAKDEIQLLTAEEIFLRLESLAAGRYSHVTLSGGNPALLPSLGELVKLLKQKGIRTAVETQGTKWQPWLAEIDDVTVSPKPPSSGMTTDDDKLEELMNRLCKADTSVCLKVVVFDEADLQYAVDMHERYAGIPFVLQTGNPDVASANDDELIKGLLKRYEWLIEQAAAEPRLNDAKVLPQLHTLVWGNKRGV

SEQ ID NO: 32305 - protein, 239 aa, unidentified
  source 1..239: note = Paenibacillus baekrokdamisoli
  REGION 1..239: note = tr|A0A3G9JKN2|A0A3G9JKN2_9BACL 7-carboxy-7-deazaguanine synthase OS=Paenibacillus baekrokdamisoli OX=1712516 GN=queE PE=3 SV=1
MSSRFPVMEIFGPTIQGEGMVIGQKTMFVRTAGCDYQCAWCDSAFTWDGTGKEDIRMLTAEEIAAELREIGGTTHVTISGGNPALLPHLNELIDRLHEQGITVALETQGSLWKNWFLQIDELTLSPKPPSSGMTTDWSQLDAIVAQLTEHERAFSLKVVVFDEADLQYAVTVHERYKQVPFYLQAGNDDVIQEDTSVLLNRLIERYKWLVDMVIASSALTNVRVLPQLHAWLWGNKRGK

SEQ ID NO: 32306 - protein, 264 aa, Paenibacillus barcinonensis
  REGION 1..264: note = tr|A0A2V4V7P0|A0A2V4V7P0_PAEBA 7-carboxy-7-deazaguanine synthase OS=Paenibacillus barcinonensis OX=198119 GN=queE PE=3 SV=1
MSSVQDQKQTGSAAAHNPAPAGQARIPVMEVFGPTVQGEGMVIGQKTMFVRTAGCDYRCSWCDSAFTWDGSGKDQIRMLTPEAVWDELRRLGGTRFSHVTLSGGNPALLASLGGLVALLRENGVRTAVETQGSRWQPWLADIDEVTVSPKPPSSGMDTDWAVLDEVMGRLAAGPANQSHSLKIVIFDQTDLDYARRVHTRYPGTALFLQTGNPDVASVDTPDLAASLLARYEWLIDQISASDDLNNVRVLPQLHTLVWGNKRGV

SEQ ID NO: 32307 - protein, 253 aa, Paenibacillus barengoltzii
  REGION 1..253: note = tr|R9LAQ2|R9LAQ2_9BACL 7-carboxy-7-deazaguanine synthase OS=Paenibacillus barengoltzii G22 OX=1235795; GN = queE PE=3 SV=1
MNKDATLQEHRELPIPVMEIFGPTVQGEGMVIGQKTMFVRTAGCDYRCSWCDSAFTWDGSGKDMIRRLTPAEILGELRDIGGDRFSHVTLSGGNPALLPQLAGLVELLHAEGIAVAVETQGSRWQDWLAEIDQVTLSPKPPSSGMDTNWDVLDDIVTRLAARPHPLAVSLKVVVFDDDDLAYAKRVHARYPNVPMYVQVGNPDVKRMDIQEHASDLLRRYEALIDKVMATPDLNNVRVLPQLHALVWGNKRGV

SEQ ID NO: 32308 - protein, 222 aa, unidentified
  source 1..222: note = Paenibacillus beijingensis
  REGION 1..222: note = tr|A0A0D5NQW3|A0A0D5NQW3_9BACL 7-carboxy-7-deazaguanine synthase OS=Paenibacillus beijingensis OX=1126833 GN=queE PE=3 SV=1
MVIGQKTMFVRTAGCDYSCSWCDSAFTWDGSAKEEIRLLTPEQIDAELRELGGGAPGHVTLSGGNPALLRQLGQLIELLHESGAAVALETQGSRWQDWFVAVDELTLSPKPPSSGMKTDWAVLDQIVSRLQDAGSRFSLKVVIFDEEDLRYAAGVHERYPAVPFFLQSGNDRLLEPDAGELLRHLQARYEWLVERVMAEPGWKQVRVLPQLHAWIWGNKRGV

SEQ ID NO: 32309 - protein, 245 aa, Paenibacillus borealis
  REGION 1..245: note = tr|A0A1R0YFU0|A0A1R0YFU0_9BACL 7-carboxy-7-deazaguanine synthase OS=Paenibacillus borealis OX=160799 GN=queE PE=3 SV=1
MGVVTVSKIPVIEMFGPTIQGEGAVIGVKTMFVRTYGCDYRCSWCDSAFTWDGSAKDKVRMLTPEEIMAELLSLAGNNFDCVTISGGNPALIGEAMGTFIMGLHERGIQAAIETQGSRWQEWFNDVDVLTISPKPPSSGMKTDWEILDGIMGKLHDKGKAAHSLKVVVFNEGDYEYAKAVHKRYPEVPLFLQPGNEDVTEEGDISVRLLGRLEWLFNQVIVDPEMNRARVLPQLHALIWHNKRGK

SEQ ID NO: 32310 - protein, 240 aa, Paenibacillus borealis
  REGION 1..240: note = tr|A0A089LIF5|A0A089LIF5_9BACL 7-carboxy-7-deazaguanine synthase OS=Paenibacillus borealis OX=160799 GN=queE PE=3 SV=1
MSKIPVIEMFGPTIQGEGAVIGVKTMFVRTYGCDYRCSWCDSAFTWDGSAKDKVTMMEPQEILAGLLELAGENFNCVTISGGNPALIGEAIGEFITLLHERGIQAAIETQGSRWQDWFNDVDVLTISPKPPSSGMKTDWDKLHEIMLRVGNHGKAAHSLKVVVFNQEDYEYARKVHFKYPEVPLFLQPGNDNVTEEGDISGRLLGRLEWLFNLVIADPQMNRARVLPQLHALIWHNKRGK

SEQ ID NO: 32311 - protein, 286 aa, unidentified
  source 1..286: note = Paenibacillus bovis
  REGION 1..286: note = tr|A0A172ZM88|A0A172ZM88_9BACL 7-carboxy-7-deazaguanine synthase OS=Paenibacillus bovis; OX = 1616788 GN=queE PE=3 SV=1
MNENDQTGRENEQASRGNESVGTASRPTATIPVLEIFGPTVQGEGMVIGQKTMFVRTAGCDYRCSWCDSAFTWDGSAKDQIRKLSAQDVYDELKAIGGDRFNHVTISGGNPALLVSIGELVQLLRQDGIRTAVETQGSRWQDWLLDINDVTISPKPPSSGMETNFEILDSIIRKLRQNQINQMMQDIIYADSDEQAPVDQSISLKVVIFDEADLKYAEQVHKRYPNVPFYMQTGNPDVTSADDNIASSLLHRYEWLIDQAMDMPAFNDARILPQLHTLVWGNKRGV

SEQ ID NO: 32312 - protein, 242 aa, unidentified
  source 1..242: note = Paenibacillus catalpae
  REGION 1..242: note = tr|A0A1I1Z6A6|A0A1I1Z6A6_9BACL 7-carboxy-7-deazaguanine synthase OS=Paenibacillus catalpae OX=1045775 GN=queE PE=3 SV=1
MTEKRIPVMEIFGPTVQGEGMVIGQKTMFIRTAGCDYSCSWCDSAFTWDGTGKDDIRMLTADDIVTELRELGGNTFSHVTLSGGNPALLKNADELVDTLHREGIRVAVETQGSRWQDWLLAIDELTLSPKPPSSGMTTNWVVLDEIVTKLTGGQNPFSLKVVVFDEQDLAYAAEVHNRYAGVPFFVQTGNDDLLEADNGKLASMLIERYEWLIDQVMKREDMTNVRVLPQLHALVWGNKRGV

SEQ ID NO: 32313 - protein, 238 aa, Paenibacillus cellulosilyticus
  REGION 1..238: note = tr|A0A2V2YEF1|A0A2V2YEF1_9BACL 7-carboxy-7-deazaguanine synthase OS=Paenibacillus cellulosilyticus OX=375489 GN=queE PE=3 SV=1
MSSSDMHQSERDPLDTRLPMVEIFETVEGEGTRAGFPTVFVRLFGCNLRCTWCDTTYSYPPAKSEFTLSIREIVEQVRSYKSKHICFTGGEPLLYGDKSARLLQALADIEGIVDVHVETNGAIGLAPFLEKVQASNVRYVMDYKLPDSGENERMDSDNFALLRSQDEVKFVIATDRDFDFAVETLKRYPTKALPMFSPVWESMPPAKLVERMLEAGLSNVKLNMQLHKIIWDPAKRGV

SEQ ID NO: 32314 - protein, 275 aa, Paenibacillus chitinolyticus
  REGION 1..275: note = tr|A0A410WS68|A0A410WS68_9BACL 7-carboxy-7-deazaguanine synthase OS=Paenibacillus chitinolyticus OX=79263 GN=queE PE=3 SV=1
MSASQTNAAVPSPPRTLPAAGKTAAAAVSPSGTAAAGEATIPVLEIFGPTVQGEGMVIGRKTMFVRTAGCDYRCSWCDSAFTWDGSGAADIRPLTAEAVWEELVRTGGSRFSHVTLSGGNPALLRSLGPLVKLLRAQGIRTAVETQGSRWQDWLTEIDEVTLSPKPPSSGMETDFAKLDDIVRRLNPDGVSLKVVVFDERDFAFAREVHRRYPAVPFYLQAGNEDVRLADDDLLRGQLLRKYEWLVDLTMASEDLNDVRVLPQLHALLWGNKRGV

SEQ ID NO: 32315 - protein, 249 aa, Paenibacillus contaminans
  REGION 1..249: note = tr|A0A329MV46|A0A329MV46_9BACL 7-carboxy-7-deazaguanine synthase OS=Paenibacillus contaminans OX=450362 GN=queE PE=3 SV=1
MTELNGKPQSRLIPVIEIFGPTVQGEGMVIGKKTMFVRTAGCDYSCKWCDSSFTWDGSGKSDIRQLSAQDIYNELLQTGGDTFAHVTVSGGNPALLPQLGELIEVLKRQGLSVALETQGSRWQDWFWSIDDLTISPKPPSSGMKTDFTVLDSIAAKLAERARHYSLKVVVFDDADLQYAAEIHERYPNIPFYVQAGNGRLHETDPGMMLPYLLERYEWLIGRTMEHRRLKQVHVLPQLHTWLWGNKKGV

SEQ ID NO: 32316 - protein, 258 aa, unidentified
  source 1..258: note = Paenibacillus crassostreae
  REGION 1..258: note = tr|A0A167GR55|A0A167GR55_9BACL 7-carboxy-7-deazaguanine synthase OS=Paenibacillus crassostreae OX=1763538 GN=queE PE=3 SV=1
MNSQSVHVDERISHQIDRPIPVLEVFGPTVQGEGMVIGRKTMFVRTAGCDYHCSWCDSSFTWDGSGKEQIRLLQSEQIWDELYQIGGACFSHVTLSGGNPALLPQLGGLVQLLHDRNIIVAVETQGSKWQDWLASVDEVTISPKPPSSGMNTDWEILDEIINHLEVRPVTYSHSLKVVIFNEEDLDYAVKVHLRYLDTPMYLQVGNADVHTTDSNQLTSTLLERYEWLIEKVMESSMLNQVRVLPQLHTLIWGNKRGV

SEQ ID NO: 32317 - protein, 240 aa, Paenibacillus curdlanolyticus
  REGION 1..240: note = tr|E0IGB9|E0IGB9_9BACL 7-carboxy-7-deazaguanine synthase OS=Paenibacillus curdlanolyticus YK9 OX=717606; GN = queE PE=3 SV=1
MMNKMGDAIHAERDPLDSKLPMVEIFETVEGEGTRAGFPTVFVRLFGCNLRCVWCDTTYSYPPAKSEYSLSIREIVEKVKSYRSRHICFTGGEPLLYGDRSAMLLKALAEIDGIVDVHVETNGAIGLAPFLESVPLPNVRYVMDYKLPDSGENDKMEMANFELLRPQDEIKFVIASDQDFDAAVETLRRYPTQALPMFSPVWESMPPAKLVDRMLEAGLSGVKLNMQLHKIIWDPAKRGV

SEQ ID NO: 32318 - protein, 178 aa, unidentified
  source 1..178: note = Paenibacillus darwinianus
  REGION 1..178: note = tr|A0A015NQ10|A0A015NQ10_9BACL 7-carboxy-7-deazaguanine synthase (Fragment); OS = Paenibacillus darwinianus OX=1380763 GN=BG52_07400 PE=4; SV = 1
VEELLRIGGSRFGHVTLSGGNPALLPQLDELIRLLHARGMQVALETQGSRWQEWFRAIDDLTISPKPPSSGMNTDWNRLDEIMNKLSGRAEGLCLKVVIFDEADLDYALTVHRRYPGVPLVLQVGNDDVGTSDAAGLIVKLLRRYEWLVERVAASEAFRQVRVLPQLHTLLWGNKRGV

SEQ ID NO: 32319 - protein, 241 aa, Paenibacillus dendritiformis
  REGION 1..241: note = tr|A0A4R5YRE2|A0A4R5YRE2_9BACL 7-carboxy-7-deazaguanine synthase OS=Paenibacillus dendritiformis OX=130049 GN=queE PE=3 SV=1
MTIPVLELFGPTVQGEGLLVGRKTMFVRTAGCDYRCSWCDSAFTWDGSAKEEIRSLTAEDILRELNALAAGRFDHVTISGGNPALIPGISGLVRLLGEHGIRTAVETQGSRWQEWLLDIDDVTLSPKPPSSGMSTDEARLDQMVSRLWDRPDRKGLCLKIVVFDEQDLGYAIRMHERYPDIPFVLQTGNDDVQSADDHELIRKLLGRYEWLIEQVAADPRLNRVRVLPQLHTLVWGNKRGV

SEQ ID NO: 32320 - protein, 241 aa, Paenibacillus dendritiformis
  REGION 1..241: note = tr|H3SNA4|H3SNA4_9BACL 7-carboxy-7-deazaguanine synthase OS=Paenibacillus dendritiformis C454 OX=1131935; GN = queE PE=3 SV=1
MTIPVLELFGPTVQGEGMLVGRKTMFVRTAGCDYRCSWCDSAFTWDGSAKEEIRSLTAEDILRELNALAAGRFDHVTISGGNPALIPGISGLVRLLGEHGIRTAVETQGSRWQEWLLDIDDVTLSPKPPSSGMSTDEARLDQMVSQLWERPDRKGLCLKIVVFDDRDLAYAIRMHERYPDIPFVLQTGNDDVRSADDHELIRKLLGRYEWLIEQVAADPRLNRVRVLPQLHTLVWGNKRGV

SEQ ID NO: 32321 - protein, 240 aa, unidentified
  source 1..240: note = Paenibacillus donghaensis
  REGION 1..240: note = tr|A0A2Z2KNP7|A0A2Z2KNP7_9BACL 7-carboxy-7-deazaguanine synthase OS=Paenibacillus donghaensis OX=414771 GN=queE PE=3 SV=1
MSKLPVIEIFGPTIQGEGAVIGVKTMFVRTYGCDYRCSWCDSAFTWDGSAKDKMRLLEPEQVVAELLELGGDNFSSVTISGGNPALIGEGVGQLIELLHQREIGVAIETQGSRWQDWFLQVDALTISPKPPSSGMATNWEMLDSILHKLKSSESAAHNLKVVVFDEQDYAYAKAVHQRYPGVELFLQPGNTDVTEEGDISTRLLGRLEWLFQQVIADPEMNQVRVLPQLHALIWHNKRGK

SEQ ID NO: 32322 - protein, 241 aa, Paenibacillus durus
  REGION 1..241: note = tr|A0A089IVV4|A0A089IVV4_PAEDU 7-carboxy-7-deazaguanine synthase OS=Paenibacillus durus; OX = 44251 GN=queE PE=3 SV=1
MSAKIPVIEMFGPTIQGEGAVIGVKTMFVRTYGCDYRCAWCDSAFTWDGTGKDKRVMMDAEEIMSGLTELGGDRFDCVTISGGNPALIGEGLSELIGLLHERGIKAAIETQGSRWQDWFMEVDALTISPKPPSSGMPTDWEVLDSIMARVRTSGKGGHSLKVVVFDDEDYKYAAQVHHRYPDVPFFLQPGNDNVTEEGDISARLLNKLEWLFEKVIVDPEMNAARVLPQLHALIWHNKRGK

SEQ ID NO: 32323 - protein, 241 aa, Paenibacillus durus
  REGION 1..241: note = tr|A0A0F7F936|A0A0F7F936_PAEDU 7-carboxy-7-deazaguanine synthase OS=Paenibacillus durus ATCC 35681 OX=1333534 GN=queE PE=3 SV=1
MSAKIPVIEMFGPTIQGEGAVIGVKTMFVRTYGCDYHCSWCDSSFTWDGSGKDKRVMMDAEEIMSGLTELGGDRFDCVTISGGNPALIGEGLSELIDLLHERGIKAAIETQGSRWQDWFLKVDALTISPKPPSSGMPTDWEVLDSIMERVRTSGKGAHSLKVVVFDDEDYKYAAKVHHRYPDVPFFLQPGNDNVTEEGDISARLLNKLEWLFEKVIADPEMNAARVLPQLHALIWHNKRGK

SEQ ID NO: 32324 - protein, 224 aa, Paenibacillus elgii
  REGION 1..224: note = tr|A0A161US47|A0A161US47_9BACL 7-carboxy-7-deazaguanine synthase OS=Paenibacillus elgii; OX = 189691 GN=queE PE=3 SV=1
MIRLPMVEIFETVEGEGTRAGFPTVFVRLFGCNLRCTWCDTKYSYPPAEAEFTMTIDDIVAEAGRYRSRHVCLTGGEPLLYGDKSAALIEALVATGRYDDLHIETNGAIDLTPFLERIESPIVRYIMDYKLPDSGEEERMVTANLAKLRPQDELKFVIGSERDFHAAKALLEAYPTRALPLFSPVWETMPPAKLVGLMLEHGLSGVKLNMQMHKIIWDPAARGV

SEQ ID NO: 32325 - protein, 245 aa, unidentified
  source 1..245: note = Paenibacillus etheri
  REGION 1..245: note = tr|A0A0W1AYY9|A0A0W1AYY9_9BACL 7-carboxy-7-deazaguanine synthase OS=Paenibacillus etheri; OX = 1306852 GN=queE PE=3 SV=1
MEAVTVSKIPVIEMFGPTIQGEGTVIGVKTMFVRTYGCDYRCSWCDSAFTWDGTAKNKVQMMAADEIMNELLALAGDNFDCVTISGGNPALIGEGMGTFINLLHERGIQAAIETQGSKWQEWFNDVDVLTISPKPPSSGMTTNWEILDNIMSKMENLGRSTHSLKVVVFDDKDFDYAKDIHRRYPNVQLFLQPGNDDVTEEGDISARLLGRLEWLFNKVILDPEMNRVRVLPQLHALIWHNKRGK

SEQ ID NO: 32326 - protein, 252 aa, unidentified
  source 1..252: note = Paenibacillus faecis
  REGION 1..252: note = tr|A0A5D0CYK2|A0A5D0CYK2_9BACL 7-carboxy-7-deazaguanine synthase OS=Paenibacillus faecis; OX = 862114 GN=queE PE=3 SV=1
MNSAERGCGSLPPIPVLEIFGPTVQGEGMVIGQKTMFVRTAGCDYRCAWCDSAFTWDGSAKEQIRRMAPAEILGELRALGGGRFSHVTLSGGNPALLPQLAGLVSLLRREGIAVAVETQGSRWQDWLAEIDQVTISPKPPSSGMDTDWAALDGIVAKLAARPAPLAVSLKVVVFDDADLAYAKRVHARYPGVAMFVQVGNPDVRRMDTLAHAADLLDRYGRLIDRVMDTAELNDVRVLPQLHALVWGNKRGV

SEQ ID NO: 32327 - protein, 226 aa, unidentified
  source 1..226: note = Paenibacillus ferrarius
  REGION 1..226: note = tr|A0A1V4HJ97|A0A1V4HJ97_9BACL 7-carboxy-7-deazaguanine synthase OS=Paenibacillus ferrarius OX=1469647 GN=queE PE=3 SV=1
MRDYRIPMVEIFETVEGEGTRAGFPTVFVRLFGCNLRCTWCDTKYSYPPAEAENVMTIAEIVSKVSSFRSRHICLTGGEPLLYGEKSLALIEALAELEQVDDLHIETNGAIDLALFVERVASPKVRYIMDFKLPDSGEMAQMLTSNFALLREQDELKFVIGSELDFRTAVEVLEQHPTKALPMFSPVWETMPPHKLVEHMLAAGLSKVKLNMQLHKIIWDPAMRGV

SEQ ID NO: 32328 - protein, 242 aa, Paenibacillus ginsengarvi
  REGION 1..242: note = tr|A0A3B0BLE2|A0A3B0BLE2_9BACL 7-carboxy-7-deazaguanine synthase OS=Paenibacillus ginsengarvi OX=400777 GN=queE PE=3 SV=1
MSGARFPVMELFGPTVQGEGMVIGRKTMFVRTAGCDYSCSWCDSAFTWDGSGKADIRMMNAQDIYEELYKLGGETFAHVTVSGGNPALLPQLGELIDLLHSRGIGVALETQGSRWQDWFWRIDELTLSPKPPSSGMVTDWAALDSIVARLTERKRLFSLKVVVFGDSDLEYAAGVHERYAHVPFYVQAGNDRLWETEPERLLPYLLERYRWLIDRVMPHPRLRQVHVLPQLHTWIWGNKKGV

SEQ ID NO: 32329 - protein, 258 aa, Paenibacillus glacialis
  REGION 1..258: note = tr|A0A168NN24|A0A168NN24_9BACL 7-carboxy-7-deazaguanine synthase OS=Paenibacillus glacialis OX=494026 GN=queE PE=3 SV=1
MSSQNYDKRKPDDHKLGRPLPVLEIFGPTVQGEGMVIGRKTMFVRTAGCDYHCSWCDSSFTWDGSGKDLIKLLSPEQICHELYQVGEDRFSHVTLSGGNPALLPQLGELIQLLHDRNITVAVETQGSRWQDWLIAVDEVTLSPKPPSSGMETEWKMLDIIVDNLRQRPARYSHSLKVVIFDEVDLDYATTVHLRYPETLLYLQVGNSDVHTMDSVQLTTNLLQRYEWLIDKVMESSTLNNVRVLPQLHTLVWGNKRGV

SEQ ID NO: 32330 - protein, 264 aa, Paenibacillus glucanolyticus
  REGION 1..264: note = tr|A0A163KND7|A0A163KND7_9BACL 7-carboxy-7-deazaguanine synthase OS=Paenibacillus glucanolyticus OX=59843 GN=queE PE=3 SV=1
MNDQHVTTANDPGRGSAAAATVDRPIPVMEIFGPTVQGEGMVVGRKTMFVRTAGCDYRCSWCDSAFTWDGSAKDSISHMSADDIWQELYRLGGERFDHVTLSGGNPALLSQLGSLVNELHRHGITVAVETQGSRWQDWLNEVDEVTISPKPPSSGMATDWGKLDDIISRLSGRPPGRSFSLKVVVFDDHDLAYAETVHERYPNVPFYLQTGNPDVGTGDTTTLVSHLLDRYEQLVEAVMLSDRLNDVRVLPQLHTLVWGNKRGV

SEQ ID NO: 32331 - protein, 240 aa, Paenibacillus graminis
  REGION 1..240: note = tr|A0A089M7A6|A0A089M7A6_9BACL 7-carboxy-7-deazaguanine synthase OS=Paenibacillus graminis OX=189425 GN=queE PE=3 SV=1
MSKLPVIEIFGPTIQGEGAVIGVKTMFVRTYGCDYRCSWCDSAFTWDGSAKDKVRMLAPEEIMNELTALAGDNFDCVTISGGNPALIGGGMGTLIQLLHERGIQAAIETQGSRWQDWFYDVDVLTVSPKPPSSGMKTDWNMLDGILDQMKEHGRAAHSLKVVVFNDEDYQYAKSIHRRYPGVPLFLQPGNEDVNEEGDISVRLLARLEWLFNLVIADPEMNKARVLPQLHALIWHNKRGK

SEQ ID NO: 32332 - protein, 243 aa, unidentified
  source 1..243: note = Paenibacillus hemerocallicola
  REGION 1..243: note = tr|A0A5C4T8X5|A0A5C4T8X5_9BACL 7-carboxy-7-deazaguanine synthase OS=Paenibacillus hemerocallicola OX=1172614 GN=queE PE=3 SV=1
MTEGRPIPVIEIFGPTVQGEGMVIGQKTMFVRTAGCDYSCAWCDSAFTWDGSGKADIRLLTAQDVYAEMRHIGGEAFAHATISGGNPALLPQLGELIGLLHGQRIRVALETQGSRWQNWFWDIDDLTLSPKPPSSRMETDWPVLDDIVAKLTERNRSFSLKIVVFDEADLQYAAEVHERYPHVPFYAQAGNGRLSETEPERLLPYLLERYEWLIDRVMAHTGLKQVHVLPQLHTWVWGNKKGV

SEQ ID NO: 32333 - protein, 284 aa, unidentified
  source 1..284: note = Paenibacillus herberti
  REGION 1..284: note = tr|A0A229NYZ7|A0A229NYZ7_9BACL 7-carboxy-7-deazaguanine synthase OS=Paenibacillus herberti OX=1619309 GN=queE PE=3 SV=1
MPTRSATPRRKRIPVLEVFGPTVQGEGMVIGVKTMFVRTAGCDYSCSWCDSAFTWDGSAKDDIRWLEPQEIIDELTALSGGSWPGHVTLSGGNPALLPQLGELISQLQAGGSAVALETQGSRWQDWFLDIDELTLSPKPPSSGMETDWAQLESIVERLVQAGRIPSLKVVVMESKVGAEAAAEHANQPADGDSQATKKPEPAEAGSGWSDLEFAKEVHRRFPAIPMFLQAGNDQLDEPDSAALREHLAARYERLIDEVMSDPEWRRVRILPQLHAWLWGNKRGV

SEQ ID NO: 32334 - protein, 264 aa, unidentified
  source 1..264: note = Paenibacillus ihbetae
  REGION 1..264: note = tr|A0A1B2DXP8|A0A1B2DXP8_9BACL 7-carboxy-7-deazaguanine synthase OS=Paenibacillus ihbetae; OX = 1870820 GN=queE PE=3 SV=1
MNNQHRKAETGASGGAFAAATVDRPIPVMEIFGPTVQGEGMVVGRKTMFVRTAGCDYRCSWCDSAFTWDGSAADSIRKMSTDEIWQELYRLGGERFDHVTLSGGNPALLSQLGSLVDELHRHGITVAVETQGSRWQDWLNDIDEVTISPKPPSSGMDTDWEKLDIMISRLSARQPGRSFSLKVVVFDDADLAYAETVHERYPNVPFYLQTGNPDVSTSDTASHVGYLLERYEWLVNAVMQSDRLNDVRVLPQLHTLVWGNKRGV

SEQ ID NO: 32335 - protein, 259 aa, Paenibacillus illinoisensis
  REGION 1..259: note = tr|A0A2W0C5C2|A0A2W0C5C2_9BACL 7-carboxy-7-deazaguanine synthase OS=Paenibacillus illinoisensis OX=59845 GN=queE PE=3 SV=1
MSSVQENVNASSSVQNKEARIPVMEIFGPTVQGEGMVIGQKTMFVRTAGCDYRCSWCDSAFTWDGSGKDQIQMITPEDVWAELRRVGGSRFSHVTISGGNPALLASLGGLVSLLRENGIRTAVETQGSRWQPWLADIDEVTVSPKPPSSGMDTNWDVLDDLINRLSTGPAERSHSLKIVIFDEVDLDYARRVHERYPATDLYLQTGNPDVTSTETPDLASSLLARYEWLIDQVSASDDLNDVRVLPQLHTLVWGNKRGV

SEQ ID NO: 32336 - protein, 240 aa, Paenibacillus jilunlii
  REGION 1..240: note = tr|A0A1G9KC13|A0A1G9KC13_9BACL 7-carboxy-7-deazaguanine synthase OS=Paenibacillus jilunlii OX=682956 GN=queE PE=3 SV=1
MSKLPVIEIFGPTIQGEGAVIGVKTMFVRTYGCDYRCGWCDSAFTWDGSAKDKVRMLAPEEIMDELTALAGDNFDCVTLSGGNPALIGEGMGILIQLLQERGIQAAIETQGSRWQDWFYDVDVLTVSPKPPSSGMKTDWNMLDGIMDKMKAQGRAAHSLKVVVFNEEDYQYAKSIHRRYPGVPLYLQPGNEDVTEEGDISVRLLGKLEWLFNLVIADPEMNKARVLPQLHALIWHNKRGK

SEQ ID NO: 32337 - protein, 293 aa, Paenibacillus kribbensis
  REGION 1..293: note = tr|A0A222WQ58|A0A222WQ58_9BACL 7-carboxy-7-deazaguanine synthase OS=Paenibacillus kribbensis OX=172713 GN=queE PE=3 SV=1
MNNNTVTAHQATTSSRVLQTAPIPVLEVFGPTVQGEGMVIGRKTMFVRTAGCDYHCSWCDSAFTWDGSAKDQIRRLSAADIWQELKAIGGECFSHVTLSGGNPVLLPQLGELVALLRSQGIATAVETQGSRWQDWLYDIDEVTLSPKPPSSGMTTNWDVLDDIVARLSNRKRTDCKTVGESRSATHVSTAACTEEAVNESARFYHGACSLKVVIFDDTDLAYARTVHQRYPHVPLFLQTGNPDVSTENTEQIAESLLHRYEWLIDRVMDDSRLNDVRVLPQLHTLVWGNKRGV

SEQ ID NO: 32338 - protein, 264 aa, Paenibacillus lactis
  REGION 1..264: note = tr|G4HI41|G4HI41_9BACL 7-carboxy-7-deazaguanine synthase OS=Paenibacillus lactis 154 OX=743719 GN=queE; PE = 3 SV=1
MNNQHSKAETGTSGGAFAAATVDRPIPVMEIFGPTVQGEGMVVGRKTMFVRTAGCDYRCAWCDSAFTWDGSAADSIRKMSTDEIWQELYRLGGERFDHVTLSGGNPALLSQLGSLVDELHRHGITVAVETQGSRWQDWLNDIDEVTISPKPPSSGMETDWEKLDIMISRLSARQPGRSFSLKVVVFDDTDLAYAETVHERYPNVPFYLQTGNPDVSTSDTSSHVSYLLERYEWLVNAVMQSDRLNDVRVLPQLHTLVWGNKRGV

SEQ ID NO: 32339 - protein, 245 aa, Paenibacillus larvae
  REGION 1..245: note = tr|V9W437|V9W437_9BACL 7-carboxy-7-deazaguanine synthase OS=Paenibacillus larvae subsp. larvae DSM 25430; OX = 697284 GN=queE PE=3 SV=1
MTNIPVLEIFGPTIQGEGMVIGQKTMFVRTAGCDYRCSWCDSSFTWDGSGKDQIRMLSPEDIVEELKRLGGKRFSHVTISGGNPVLLSQMGKLVSLLQSQGIRTAIETQGSKWQDWLLAVDDVTLSPKPPSSGMTTDWGMLDKIAEKLRGRMQSHPMQRVSLKVVVFDDIDFQYAKRVHQRYPLVPMYLQVGNPDIYTADNAKLLEQLLDRYEWLIRKTVASGDLNDVMVLPQLHAFLWGNKRGV

SEQ ID NO: 32340 - protein, 245 aa, Paenibacillus larvae; identical to SEQ ID NO: 32339
  REGION 1..245: note = tr|A0A1V0URX4|A0A1V0URX4_9BACL 7-carboxy-7-deazaguanine synthase OS=Paenibacillus larvae subsp. pulvifaciens OX=1477 GN=queE PE=3 SV=1

SEQ ID NO: 32341 - protein, 264 aa, Paenibacillus lautus
  REGION 1..264: note = tr|A0A385TS12|A0A385TS12_PAELA 7-carboxy-7-deazaguanine synthase OS=Paenibacillus lautus; OX = 1401 GN=queE PE=3 SV=1
MNNVHETPVTDSNGASSPAMTVDRPIPVMEIFGPTVQGEGMVVGRKTMFVRTAGCDYRCSWCDSAFTWDGSAKDSISLLSADEIWQELYRLGGERFDHVTLSGGNPALLPQLGALVDELHRHGITVAVETQGSRWQDWLNHIDEVTISPKPPSSGMDTDWGKLDDIVSRLSARPPGRTFSLKVVVFDDKDLTYAETVHERYPNVPFYLQTGNPDVGTGDTTSLVSHLLDRYESLVDAVMQSDRLNDVRVLPQLHTLVWGNKRGV

SEQ ID NO: 32342 - protein, 245 aa, Paenibacillus lautus
  REGION 1..245: note = tr|A0A2A5LJ49|A0A2A5LJ49_PAELA 7-carboxy-7-deazaguanine synthase OS=Paenibacillus lautus; OX = 1401 GN=queE PE=3 SV=1
MTVDRPIPVMEIFGPTVQGEGMVVGRKTMFVRTAGCDYRCSWCDSAFTWDGSAKDSISLLSADEIWQELYRLGGERFDHVTLSGGNPALLSQLGALVDELHRHGITVAVETQGSRWQDWLNHIDEVTISPKPPSSGMDTDWGKLDDIVSRLSARPPGRTFSLKVVVFDDKDLTYAETVHERYPNVPFYLQTGNPDVGTGDTTSLVSHLLDRYESLVDAVMQSDRLNDVRVLPQLHTLVWGNKRGV

SEQ ID NO: 32343 - protein, 246 aa, unidentified
  source 1..246: note = Paenibacillus lentus
  REGION 1..246: note = tr|A0A3S8RZH7|A0A3S8RZH7_9BACL 7-carboxy-7-deazaguanine synthase OS=Paenibacillus lentus; OX = 1338368 GN=queE PE=3 SV=1
MSNHQQPIPVLEIFGPTIQGEGMVIGQKTMFVRTAGCDYRCSWCDSAFTWDGSAKDDIRLLTAEDIYAELCSLGGDRFSHVTLSGGNPALLGGLGTLVSLLHERGFIVAVETQGSRWQDWLAEVDEVTLSPKPPSSGMTTDWNMLDEVTSKLSARPYPLKQSLKVVVFDDEDLAYAKEVHVRYPHIPFYLQVGNPDVKRMDIQQHTADLLERYEQLIDQVVSAPELNNVRVLPQLHALVWGNKRGV

SEQ ID NO: 32344 - protein, 244 aa, Paenibacillus macerans
  REGION 1..244: note = tr|A0A090Z9L2|A0A090Z9L2_PAEMA 7-carboxy-7-deazaguanine synthase OS=Paenibacillus macerans OX=44252 GN=queE PE=3 SV=1
MNNPPIPVLEVFGPTVQGEGMVIGQKTMFVRTAGCDYRCVWCDSAFTWDGSAKDAIRFMTPAAIWEELREIGGDRFSHVTLSGGNPALLPQLAGLVALLHAKGVAIAVETQGSRWQDWLAEIEQVTLSPKPPSSGMETDWAILDDIVTKLSHRPHPLAVSLKVVVFDEADLAYAKQVHARYPDTPMYVQVGNPDVRRMDIREHAADLLRRYEALIDKVVASSELNNVRVLPQLHALVWGNKRGV

SEQ ID NO: 32345 - protein, 258 aa, Paenibacillus macquariensis
  REGION 1..258: note = tr|A0A1N6UXF6|A0A1N6UXF6_9BACL 7-carboxy-7-deazaguanine synthase OS=Paenibacillus macquariensis OX=948756 GN=queE PE=3 SV=1
MSSQSYDKRKPDDLKLGRPLPVLEIFGPTVQGEGMVIGRKTMFVRTAGCDYHCSWCDSSFTWDGSGKDLIKLLSPEQICHELYQVGEDRFSHVTLSGGNPALLPQLGELIQLLHDRNITVAVETQGSRWQDWLIAVDEVTLSPKPPSSGMETEWKMLDIIVDKLKQRPAKYSHSLKVVIFDEADLDYAVTIHLRYPDTLLYLQVGNSDVHTMDSTQLTMTLLQRYEWLIDKVMESSTLNNIRVLPQLHTLVWGNKRGV

SEQ ID NO: 32346 - protein, 258 aa, Paenibacillus macquariensis; identical to SEQ ID NO: 32345
  REGION 1..258: note = tr|A0A168FMK3|A0A168FMK3_PAEMC 7-carboxy-7-deazaguanine synthase OS=Paenibacillus macquariensis OX=1468 GN=queE PE=3 SV=1

SEQ ID NO: 32347 - protein, 236 aa, unidentified
  source 1..236: note = Paenibacillus montanisoli
  REGION 1..236: note = tr|A0A328UCH1|A0A328UCH1_9BACL 7-carboxy-7-deazaguanine synthase OS=Paenibacillus montanisoli OX=2081970 GN=queE PE=3 SV=1
MTDNVAAAAARSFRLPMVEIFETVEGEGTRAGFPTVFVRLFGCNLRCVWCDTKYSYPPAEAEFTMSIEDIVAQVEKQYKAEHICMTGGEPLLYGNKSAALLQALCDIERIKDVHVETNGAIDLEPFLRGVTSSKARYIMDYKLPDSGENEAMLHHNFALLREQDEVKFVIASDRDFDAAVRTLTTSPTAALALFSPVWETMPPAKLVEKMLASGLTGVKLNMQLHKIIWDPAQRGV

SEQ ID NO: 32348 - protein, 244 aa, Paenibacillus mucilaginosus
  REGION 1..244: note = tr|F8FPI8|F8FPI8_PAEMK 7-carboxy-7-deazaguanine synthase OS=Paenibacillus mucilaginosus (strain KNP414); OX = 1036673 GN=queE PE=3 SV=1
MIELEQQELTVQQESIKNPLDIRLPMVEIFETVEGEGTRAGFPTVFIRLFGCNLRCTWCDTKYSYPPAEAEFVMTIGEIVQEAAKYKAKHICFTGGEPLLYGDKSAALIEALVAAGRYTDLHVETNGAVDLAPFLERIDSPVVRYVMDYKLPDSGEQEKMLTGNLALLRPQDELKFVIGSERDFFTAVQVLKDYPTKALPLFSPVWETMPPVKLVGLMLEHGLSHVKLNMQLHKIIWDPAERGV

SEQ ID NO: 32349 - protein, 244 aa, Paenibacillus mucilaginosus; identical to SEQ ID NO: 32348
  REGION 1..244: note = tr|H6NA13|H6NA13_9BACL 7-carboxy-7-deazaguanine synthase OS=Paenibacillus mucilaginosus 3016 OX=1116391; GN = queE PE=3 SV=1

SEQ ID NO: 32350 - protein, 243 aa, Paenibacillus nanensis
  REGION 1..243: note = tr|A0A3A1V5U7|A0A3A1V5U7_9BACL 7-carboxy-7-deazaguanine synthase OS=Paenibacillus nanensis OX=393251 GN=queE PE=3 SV=1
MSSARRIPVLEIFGPTVQGEGMVVGRKTMFVRTAGCDYQCSWCDSAFTWDGSGKDDIRLLSAAEVIGELERAGGQAFDHVTVSGGNPALLPQLGGLIDGLHERGIQVALETQGSRWQPWFTAIDDLTLSPKPPSSGMETNWDVLDDIVARLQAAGSRFCLKVVVFDDADLAYARMVHARYPLVPFYAQAGNGNLTETEPAKMLPYLVERYEWLIGQIMADNSLRSVHVLPQLHTWVWGNKKGV

SEQ ID NO: 32351 - protein, 235 aa, Paenibacillus naphthalenovorans
  REGION 1..235: note = tr|A0A0U2W0L7|A0A0U2W0L7_9BACL 7-carboxy-7-deazaguanine synthase OS=Paenibacillus naphthalenovorans OX=162209 GN=queE PE=3 SV=1
MSQAAERVDINEIKLPMVEIFETVEGEGSRAGFPTVFIRLFGCNLRCTWCDTKYSYPPAEAEFVMTIGDIVAEASRYSSKHVCLTGGEPLLYGDRSTALIEALAATGRYTDLHIETNGAIDLTPYLERIKSPIVRYIMDYKLPDSGEEDKMITANLSKLRPQDELKFVIGSDRDFLAAKTVLETFPTAALPLFSPVWETMPPDKLVRLMLEHGLSQVKLNMQMHKIIWDPAMRGV

SEQ ID NO: 32352 - protein, 235 aa, Paenibacillus naphthalenovorans
  REGION 1..235: note = tr|A0A480BAE4|A0A480BAE4_9BACL 7-carboxy-7-deazaguanine synthase OS=Paenibacillus naphthalenovorans OX=162209 GN=queE PE=3 SV=1
MSQAAERVDINEIKLPMVEIFETVEGEGSRAGFPTVFIRLYGCNLRCTWCDTKYSYPPAEAEFVMTIGDIVAEASRYSSKHVCLTGGEPLLYGDRSTALIEALAATGRYTDLHIETNGAIDLTPYLERIKSPIVRYIMDYKLPDSGEEDKMITANLSKLRPQDELKFVIGSDRDFLAAKTVLETFPTAALPLFSPVWETMPPDKLVRLMLEHGLSQVKLNMQMHKIIWDPAMRGV

SEQ ID NO: 32353 - protein, 297 aa, unidentified
  source 1..297: note = Paenibacillus nuruki
  REGION 1..297: note = tr|A0A1E3KZL5|A0A1E3KZL5_9BACL 7-carboxy-7-deazaguanine synthase OS=Paenibacillus nuruki; OX = 1886670 GN=queE PE=3 SV=1
MSTTFKVNAEQIAKANQLAGSDTDNHDHSEHPHTPKIAPIPVLEIFGPTVQGEGMVIGQKTMFVRTAGCDYRCSWCDSAFTWDGSAKDQIMRLSAEEVYAQLFDIGGDRFNHVTISGGNPALLPQLGQLVQLLSEKGIRTAVETQGSKWQDWLTDINEVTISPKPPSSGMTTNFEVLDDIIRRLEHNQISRYTAQAQEAPLSYAGTSQFAHSFSLKVVIFDEQDLAYAEKVHLRYPNVLLYLQTGNPDVTSADDQIAASLLKRYEWLIDQAMDMPAFNDARILPQLHTLVWGNKRGV

SEQ ID NO: 32354 - protein, 240 aa, Paenibacillus odorifer
  REGION 1..240: note = tr|A0A1R0ZMC7|A0A1R0ZMC7_9BACL 7-carboxy-7-deazaguanine synthase OS=Paenibacillus odorifer OX=189426 GN=queE PE=3 SV=1
MSKIPVIEMFGPTIQGEGAVIGVKTMFVRTYGCDYRCGWCDSAFTWDGTAKDKVRMMTSDEIMNELLAIAGDNFDCVTISGGNPALIGDGMGTFINLLHERGIQAAIETQGSKWQEWFNDVDVLTISPKPPSSGMTTNWEILDNIMSKMEKLGRSMHSLKVVVFDDKDFDYAKDIHQRYPNVQLFLQPGNDDVTEEGDISARLLGRLEWLFNKVIVDADMNRVRVLPQLHALIWHNKRGK

SEQ ID NO: 32355 - protein, 240 aa, Paenibacillus odorifer
  REGION 1..240: note = tr|A0A1R0WRS5|A0A1R0WRS5_9BACL 7-carboxy-7-deazaguanine synthase OS=Paenibacillus odorifer OX=189426 GN=queE PE=3 SV=1
MSKIPVIEMFGPTIQGEGAVIGVKTMFVRTYGCDYRCGWCDSAFTWDGTAKNKVRMMEAEEIINELLALAGDNFDCVTISGGNPALIGEGMGTFINLLHERGIKAAIETQGSKWQDWFNDVDVLTISPKPPSSGMTTNWEMLDNIMSKMEKLGRSTHSLKVVVFDDKDFDYAKNVHQRYPNVQLFLQPGNDDVTEEGNISARLLGRLEWLFNKVIVDSDMNKVRVLPQLHALIWHNKRGK

SEQ ID NO: 32356 - protein, 234 aa, unidentified
  source 1..234: note = Paenibacillus oryzae
  REGION 1..234: note = tr|A0A1A5YPD3|A0A1A5YPD3_9BACL 7-carboxy-7-deazaguanine synthase OS=Paenibacillus oryzae; OX = 1844972 GN=queE PE=3 SV=1
MEVFGPTVQGEGMVIGRKTMFVRTAGCDYQCSWCDSAFTWDGTGKADIRLLSAKEIFDELLAVGGEGFDHVTISGGNPALLPQLASLIDLLHAEGIRVALETQGSRWQPWFTVIDDLTLSPKPPTSGMVTDLGKLDEIIGELSQAKTVFCLKVVVFDEADLAYAKTIHIRYPGVPFYLQAGNGNLLETDPAALLPYLVERYEWLIEFVMDDNELRGVHVLPQLHTWVWGNKKGV

SEQ ID NO: 32357 - protein, 226 aa, unidentified
  source 1..226: note = Paenibacillus oryzisoli
  REGION 1..226: note = tr|A0A198AM36|A0A198AM36_9BACL 7-carboxy-7-deazaguanine synthase OS=Paenibacillus oryzisoli OX=1850517 GN=queE PE=3 SV=1
MRDIRIPMVEIFETVEGEGTRAGFPTIFVRLFGCNLRCSWCDTTYSYPPAEAENVMTIAEIISKVQTFRSRHICLTGGEPLLYGDKSLALIEAIAELAQVDDLHIETNGAIHLAPFIAQVSSPKVRYVMDFKLPDSGEMDRMIYSNFELLREQDELKFVIGSDLDFQTAVSVLQKYPTKALPMFSPVWETMPPRKLVDLMLAEGLSKVKLNMQLHKIIWDPAMRGV

SEQ ID NO: 32358 - protein, 250 aa, Paenibacillus pabuli
  REGION 1..250: note = tr|A0A327PJP9|A0A327PJP9_9BACL 7-carboxy-7-deazaguanine synthase OS=Paenibacillus pabuli; OX = 1472 GN=queE PE=3 SV=1
MSSVERSQEARIPVMEIFGPTVQGEGMVIGQKTMFVRTAGCDYRCSWCDSAFTWDGSGKDLIRMITPEDVWNELRRVGGSRFSHVTISGGNPALLASLGGLVKLLRENGIRTAVETQGSRWQPWLADIDEVTVSPKPPSSGMDTDWAVLDDLIGRLTAGPVERSHSLKIVIFDETDLDYARRVHARYPGTDLFLQTGNPDVTSANTPDLASSLLARYEWLIDQVSASDDLNDVRVLPQLHTLVWGNKRGV

SEQ ID NO: 32359 - protein, 243 aa, unidentified
  source 1..243: note = Paenibacillus paeoniae
  REGION 1..243: note = tr|A0A371PPB0|A0A371PPB0_9BACL 7-carboxy-7-deazaguanine synthase OS=Paenibacillus paeoniae OX=2292705 GN=queE PE=3 SV=1
MSNPRRIPVMEVFGPTVQGEGMVIGRKTMFVRTAGCDYQCAWCDSAFTWDGTGKDEIRLLSAGEVIQELERIGGSSFDHVTLSGGNPALLPQLGELIVGLHERGIKAALETQGSRWQPWFTDIDDLTLSPKPPSSGMTTDWAVLDDIVERLLNQGSDFCLKVVVFDETDLAYGKSVHKRYADVPFYLQAGNGNLTESEPHLMLPYLVERYEWLIELAMADDELRGVHVLPQLHTWVWGNKKGV

SEQ ID NO: 32360 - protein, 278 aa, Paenibacillus pasadenensis
  REGION 1..278: note = tr|A0A2N5N128|A0A2N5N128_9BACL 7-carboxy-7-deazaguanine synthase OS=Paenibacillus pasadenensis OX=217090 GN=queE PE=3 SV=1
MAERRTRIPVLETFGPTVQGEGMVIGVKTCFVRTAGCDYSCSWCDSAFTWDGSAKDDIRWLEPEDVLEELKALSGGEWPGHVTLSGGNPALLPQLGGLIALLRSGGTIIALETQGSRWQDWFLDVDELTLSPKPPSSGMATDWARLDEIVERLAAAGRSPSLKVVVMEEPASEAGSAAGTSAASETGGARLAVEANGASRQGSDLAYAKEVHRRFPAVSMFLQAGNDRLDEPDPAALREHLAARYERLVDAVMADPDWRHVRVLPQLHAWLWGNKRGV

SEQ ID NO: 32361 - protein, 226 aa, Paenibacillus pectinilyticus
  REGION 1..226: note = tr|A0A1C0ZV71|A0A1C0ZV71_9BACL 7-carboxy-7-deazaguanine synthase OS=Paenibacillus pectinilyticus OX=512399 GN=queE PE=3 SV=1
MRDIRIPMVEIFETVEGEGTRAGFPTIFVRLFGCNLRCTWCDTKYSYPPAEAENVMTIAEIVSKVQSFRSRHICLTGGEPLLYGDKSLALIEALAALEQIDDLHIETNGAIDLAPFIAQVSSPKVRYIMDFKLPDSGEMDQMIYSNFPLLREQDELKFVIGSDLDFQTAVDVLAQNPTKALPMFSPVWETMPPRKLVDLMLAAGLSKVKLNMQLHKIIWDPAMRGV

SEQ ID NO: 32362 - protein, 292 aa, Paenibacillus peoriae
  REGION 1..292: note = tr|A0A0K2F5V2|A0A0K2F5V2_9BACL 7-carboxy-7-deazaguanine synthase OS=Paenibacillus peoriae; OX = 59893 GN=queE PE=3 SV=1
MSNTVTANIVNTHQPMTTPDKASTAPIPVLEVFGPTVQGEGMVIGRKTMFVRTAGCDYHCSWCDSAFTWDGSAKDQIRRLSATDIWQELKAIGGERFSHVTLSGGNPALLPQLGELITLLRSQGIATAVETQGSRWQEWLYDIDEVTLSPKPPSSGMTTNWDVLDDIVARLSNRKMASESRATSNVPTAPGLKEPANESARLYTGACSLKVVIFDDTDLAYARIVHERYPHVPLFLQTGNPDVNTENTGQIAESLLHRYEWLIDRVMDDSRLNDVRVLPQLHTLVWGNKRGV

SEQ ID NO: 32363 - protein, 287 aa, Paenibacillus peoriae
  REGION 1..287: note = tr|A0A2S6NWF4|A0A2S6NWF4_9BACL 7-carboxy-7-deazaguanine synthase OS=Paenibacillus peoriae; OX = 59893 GN=queE PE=3 SV=1
MSNTVTTHQPMTASHGTKLAPIPVLEVFGPTVQGEGMVIGRKTMFVRTAGCDYHCSWCDSAFTWDGSAKDQIRRLSATDIWQELKAIGGERFSHVTLSGGNPALLPQLGELITLLRSQGIATAVETQGSRWQEWLYDIDEVTLSPKPPSSGMTTNWDVLDDIVARLSNRKMASESRATSSVPTATGLKEPSNESARLYTGACSLKIVIFDDTDLAYARIVHERYPHVPLFLQTGNPDVNTENTGQIAESLLHRYEWLIDRVMDDSRLNDVRVLPQLHTLVWGNKRGV

SEQ ID NO: 32364 - protein, 224 aa, Paenibacillus pini
  REGION 1..224: note = tr|W7Y9I5|W7Y9I5_9BACL 7-carboxy-7-deazaguanine synthase OS=Paenibacillus pini JCM 16418 OX=1236976; GN = queE PE=3 SV=1
MVIGQKTMFVRTAGCDYRCSWCDSSFTWDGSGAGDISKMRAQEIWQELRRIGGDRFSHVTLSGGNPALLPQLSSLVSLLKESGIRMAVETQGSRWQDWLSDVEEVTISPKPPSSGMETNWVTLDSIIANLVNRPSGYTFSLKVVIFNEEDLAYAKRVHTRYPDAAMFLQVGNPDVERMDIQVHASDLLKQYEELIQRVVDSAELNNVRVLPQLHTLVWGNKRGV

SEQ ID NO: 32365 - protein, 243 aa, unidentified
  source 1..243: note = Paenibacillus pinisoli
  REGION 1..243: note = tr|A0A3A6PCN4|A0A3A6PCN4_9BACL 7-carboxy-7-deazaguanine synthase OS=Paenibacillus pinisoli OX=1276110 GN=queE PE=3 SV=1
MNSPRRIPVMEVFGPTVQGEGMVIGRKTMFVRTAGCDYQCAWCDSAFTWDGTGKDEIRLLAASEVMEELERTGGSSFDHVTISGGNPALLPQLGELIARLHERGIKTALETQGSRWQPWFADIDDLTLSPKPPSSGMATDWALLDDIVAKLIEQGSAFCLKVVVFDEADLAYAKTVHKRYADVPFYLQAGNGNLTETEPRLMLPYLVERYEWLIGLAMADSELRGVHVLPQLHTWVWGNKKGV

SEQ ID NO: 32366 - protein, 265 aa, Paenibacillus polymyxa
  REGION 1..265: note = tr|E3EFG2|E3EFG2_PAEPS 7-carboxy-7-deazaguanine synthase OS=Paenibacillus polymyxa (strain SC2) OX=886882; GN = queE PE=3 SV=1
MSNTVNANTVTTHQPTTTLDRAKAAPIPVLEVFGPTVQGEGMVIGRKTMFVRTAGCDYHCSWCDSAFTWDGSAKDQIRRLSATDIWQELKSIGGERFSHVTLSGGNPALLPQLGALITLLRSQGIATAVETQGSRWQEWLYDIDEVTLSPKPPSSGMTTNWEVLDDIVTRLSNQRMAGACSLKVVIFNDTDLAYARTIHERYPHIPLFLQTGNPDVNTENTGQIAESLLHRYEWLIDRVMDDSRLNDVRVLPQLHTLVWGNKRGV

SEQ ID NO: 32367 - protein, 287 aa, Paenibacillus polymyxa
  REGION 1..287: note = tr|A0A1D7MLE5|A0A1D7MLE5_PAEPO 7-carboxy-7-deazaguanine synthase OS=Paenibacillus polymyxa OX=1406 GN=queE PE=3 SV=1
MSNTMTTHQPMIASHGTQIAPIPVLEVFGPTVQGEGMVIGRKTMFVRTAGCDYHCSWCDSSFTWDGSSKDQIRRLSATDIWQELKAIGGERFSHVTFSGGNPALLPQLGELITLLRSQGTATAVETQGSRWQEWLYDIDEVTLSPKPPSSGMTTNWDVLDDIVARLSNRKMAGESRATSNVPTATGLKEPANESARLYTGACSLKVVIFDDTDLAYARTVHERYPHVPLFLQTGNPDVNTENTGQIAESLLHRYEWLIDRVMDDSRLNDVRVLPQLHTLVWGNKRGV

SEQ ID NO: 32368 - protein, 245 aa, unidentified
  source 1..245: note = Paenibacillus polysaccharolyticus
  REGION 1..245: note = tr|A0A1G5GH46|A0A1G5GH46_9BACL 7-carboxy-7-deazaguanine synthase OS=Paenibacillus polysaccharolyticus OX=582692 GN=queE PE=3 SV=1
MSKEARIPVMEVFGPTVQGEGMVIGQKTMFVRTAGCDYRCSWCDSAFTWDGSGKDQIRMLTPEAVWDELRRLGGTRFSHVTLSGGNPALLASLGGLVALLRENGVRTAVETQGSRWQSWLADVDEVTVSPKPPSSGMDTDWAVLDDMISRLAAGPADRNHSLKIVIFDQTDLNYARRVHARYPGTALFLQTGNPDVSSADTPDLAASLLERYELLIDQVSASDDLNNVRVLPQLHTLVWGNKRGV

SEQ ID NO: 32369 - protein, 241 aa, Paenibacillus popilliae
  REGION 1..241: note = tr|M9LA60|M9LA60_PAEPP 7-carboxy-7-deazaguanine synthase OS=Paenibacillus popilliae ATCC 14706 OX=1212764; GN = queE PE=3 SV=1
MTIPVLELFGPTVQGEGMLVGRMTMFVRTAGCDYRCSWCDSAFTWDGSAKDEIRSLTAEDILRELNTLAAGRFDHVTISGGNPALLPGIGDLVHLLREHGICTAVETQGSRWQEWLLDIDDVTLSPKPPSSGMSTDEARLDPIVSELWERPDRKGLCLKIVVFDERDLEYAIRMHERYPDIPFILQTGNDDVRSADDHELIRKLLCRYEWLIEQVAADPRLNRVRVLPQLHTLVWGNKRGV

SEQ ID NO: 32370 - protein, 243 aa, Paenibacillus prosopidis
  REGION 1..243: note = tr|A0A368VZ38|A0A368VZ38_9BACL 7-carboxy-7-deazaguanine synthase OS=Paenibacillus prosopidis OX=630520 GN=queE PE=3 SV=1
MSANKRIPVMEIFGPTVQGEGMVIGRKTMFVRTAGCDYSCSWCDSAFTWDGSGKEDIRLLTALEIIEELKQIGGDTFEHVTISGGNPALLPQLGELIDRLHDEGISVALETQGSRWQDWFWAIDELTLSPKPPSSGMTTDWSVLDDIVAKLNGQERNFCLKTVVFNDADLEYATSVHLRYPHIPFYLQAGNGNLQETEPRLMLPYLVERYEWLIERIMPNPDLKRVHVLPQLHTWVWGNKKGV

SEQ ID NO: 32371 - protein, 245 aa, Paenibacillus rhizosphaerae
  REGION 1..245: note = tr|A0A1R1F1X6|A0A1R1F1X6_9BACL 7-carboxy-7-deazaguanine synthase OS=Paenibacillus rhizosphaerae OX=297318 GN=queE PE=3 SV=1
MDVRMNIPVLEIFGPTVQGEGMVIGQKTMFVRTAGCDYHCSWCDSAFTWDGSAKADIRQMSAGDIWEELQRIGGERFSHVTLSGGNPALLPQLGSLVSLLESHGIRIAVETQGSRWQDWLDDIHEVTLSPKPPSSGMETDWEMLDSIVTRLAARPAAYAYSLKVVVFDDADLAYATKVHARYPQAPMYLQVGNTDLKRMDIAGHAADLLARYERLIDAVVASPELNAVRVLPQLHALVWGNKRGV

SEQ ID NO: 32372 - protein, 219 aa, Paenibacillus rigui
  REGION 1..219: note = tr|A0A229ULE0|A0A229ULE0_9BACL 7-carboxy-7-deazaguanine synthase OS=Paenibacillus rigui; OX = 554312 GN=queE PE=3 SV=1
MVEIFETVEGEGTRAGFPTVFVRLFGCNLRCTWCDTKYSYPPEEAEFVMTMGEIVEQVKGFRSTHVCLTGGEPLLYGDKSAALIEALLGIDRLTDIHVETNGAIDLTLFLERIHSPKVRYVMDYKLPDSGESDKMLLSNFGKLRGQDELKFVIGSLEDFHEARRLLEQVPTKALPLFSPVWETMPPARLVELMLEHGLSQVKLNMQLHKIIWNPAARGV

SEQ ID NO: 32373 - protein, 240 aa, Paenibacillus riograndensis
  REGION 1..240: note = tr|A0A0E3WHY8|A0A0E3WHY8_9BACL 7-carboxy-7-deazaguanine synthase OS=Paenibacillus riograndensis SBR5 OX=1073571 GN=queE PE=3 SV=1
MSKLPVIEIFGPTIQGEGAVIGVKTMFVRTYGCDYRCSWCDSAFTWDGSAKDKVRMLAPEEIMDELAALAGGNFDCVTLSGGNPALIGEGMGRLIQLLHERGIQAAVETQGSRWQNWFYAVDVLTVSPKPPSSGMETDWNMLDGIMDKMKAHGRATHSLKVVVFNDEDYQYAKRVHSRYPGVPFFLQPGNEDVTEEGDISVRLLARLEWLFNLVIADPEMNKARVLPQLHALIWHNKRGK

SEQ ID NO: 32374 - protein, 244 aa, Paenibacillus riograndensis
  REGION 1..244: note = tr|A0A132TLG2|A0A132TLG2_9BACL 7-carboxy-7-deazaguanine synthase OS=Paenibacillus riograndensis OX=483937 GN=queE PE=3 SV=1
MSFKENPIPVLEIFGPTVQGEGLVIGQKTMFVRTAGCDYSCSWCDSSFTWDGSAKNEIKQLSAQTIYHELKTLGGTTFKHVTISGGNPALLKNIGYLVDLLHDQGIRVGLETQGSRWQEWMADIDDLTISPKPPSSGMITDWDRLDEVMEKLKNSSNEICIKVVVFDEDDLQYAVQVHKRYPHMRLVLQVGNSDVTTGDREGLVFDLLEKYEWLISQVMASSDLRQVKVLPQLHTLLWGNKRGV

SEQ ID NO: 32375 - protein, 241 aa, Paenibacillus sabinae
  REGION 1..241: note = tr|X4ZLN4|X4ZLN4_9BACL 7-carboxy-7-deazaguanine synthase OS=Paenibacillus sabinae T27 OX=1268072 GN=queE; PE = 3 SV=1
MSAKIPVIEMFGPTIQGEGAVIGVKTMFVRTYGCDYRCSWCDSAFTWDGSSKDKRVMMDAEEIMSGLTELGGNRFDCVTISGGNPALIGEGLSELIDLLHERGIKAAIETQGSRWQDWFLKVDALTISPKPPSSGMSTDWEVLDSIMERVRTSGKGAHSLKVVVFDDEDYKYAAKVHHRYPDIPFFLQPGNDNVTEEGDISTRLLSKLEWLFDKVIADPDMNAARVLPQLHALIWHNKRGK

SEQ ID NO: 32376 - protein, 248 aa, unidentified
  source 1..248: note = Paenibacillus selenitireducens
  REGION 1..248: note = tr|A0A1T2X308|A0A1T2X308_9BACL 7-carboxy-7-deazaguanine synthase OS=Paenibacillus selenitireducens OX=1324314 GN=queE PE=3 SV=1
MMRDASQREIPVLEIFGPTVQGEGMVIGQKTMFVRTAGCDYHCDWCDSAFTWDGSGKDAIRHMHADEIWNELHDIGGNRFSHVTLSGGNPALLPSLGQLVDLLHRQGMTLAVETQGSRWQDWLARVEQVTLSPKPPSSGMSTDWSRLDDIVEKLSKRPVEYAMSLKVVIFDLTDLNYAKEVHSRYPRIPLYLQVGNPDVQRMDIANHASDLLLRYEQLIELVMASSELKDVRVLPQLHSLVWGNKRGV

SEQ ID NO: 32377 - protein, 245 aa, unidentified
  source 1..245: note = Paenibacillus silvae
  REGION 1..245: note = tr|A0A2W6N8U4|A0A2W6N8U4_9BACL 7-carboxy-7-deazaguanine synthase OS=Paenibacillus silvae; OX = 1325358 GN=queE PE=3 SV=1
MSKEARIPVMEVFGPTVQGEGMVIGQKTMFVRTAGCDYRCFWCDSAFTWDGSGKDQIRMLTPEAVWDELRRLGGTRFSHVTLSGGNPALLASLGGLVALLREHGVRTAVETQGSRWQSWLADIDEVTVSPKPPSSGMDTDWAVLDDVIGRLAAGKADRSHSLKIVIFDQTDLDYARRVHARYPGTALFLQTGNPDVASADTPDLAASLLERYEWLIDQVSASDDLNNVRVLPQLHTLVWGNKRGV

SEQ ID NO: 32378 - protein, 264 aa, unidentified
  source 1..264: note = Paenibacillus solani
  REGION 1..264: note = tr|A0A0M1P0S1|A0A0M1P0S1_9BACL 7-carboxy-7-deazaguanine synthase OS=Paenibacillus solani; OX = 1705565 GN=queE PE=3 SV=1
MNNTHVTPANENVRDSSPTLTVERPIPVMEIFGPTVQGEGMVVGRKTMFVRTAGCDYRCSWCDSAFTWDGSAKDTISLMNAEEIWQELYRLGGERFDHVTLSGGNPALLSQLGTLVDELHRHGITVAVETQGSRWQDWLNDIDEVTISPKPPSSGMDTDWGKLDDIVSRLSARPPGRTYSLKVVIFDDKDLTYAETVHERYPNVPFYLQTGNPDVGTGNTTELVSHLLGRYEQLVDAVMQSDRLNDVRILPQLHTLVWGNKRGV

SEQ ID NO: 32379 - protein, 241 aa, Paenibacillus sophorae
  REGION 1..241: note = tr|A0A1H8FPI4|A0A1H8FPI4_9BACL 7-carboxy-7-deazaguanine synthase OS=Paenibacillus sophorae OX=1333845 GN=queE PE=3 SV=1
MSAKIPVIEMFGPTIQGEGAVIGVKTMFVRTYGCDYRCTWCDSAFTWDGSGKDKRVMMDAEEIMSGLTELGGDRFDCVTISGGNPALIGEGLSELIDLLHERGIKAAIETQGSRWQDWFMEVDALTISPKPPSSGMSTDWDVLDSIMERVRTSGKGNHSLKVVVFDDEDYKYAAQIHHRYPDVPFFLQPGNDNVTEEGDISARLLNKLEWLFEKVIADPEMNAARVLPQLHALIWHNKRGK

SEQ ID NO: 32380 - protein, 275 aa, Paenibacillus sp.
  REGION 1..275: note = tr|A0A1H5V4N9|A0A1H5V4N9_9BACL 7-carboxy-7-deazaguanine synthase OS=Paenibacillus sp. UNC499MF OX=1502751 GN=queE PE=3 SV=1
MSASRTYAAVPSPPQTLPAAGNTTAVSAAPADKTTPAEATIPVLEIFGPTVQGEGMVIGRKTMFVRTAGCDYRCSWCDSAFTWDGSGAGDIRPLTAEAVWEELVRTGGSRFSHVTLSGGNPALLRSLGPLVKLLRAQGIRTAVETQGSRWQDWLTEIDEVTLSPKPPSSGMETDFAKLDDIVRRLNPDGISLKVVVFDERDFAFAREVHRRYPAVPFYLQAGNEDVRLADDDLLRGQLLRKYEWLVDLTMASEDLNDVRVLPQLHALLWGNKRGV

SEQ ID NO: 32381 - protein, 241 aa, Paenibacillus sp.
  REGION 1..241: note = tr|A0A3D9GWH0|A0A3D9GWH0_9BACL 7-carboxy-7-deazaguanine synthase OS=Paenibacillus sp. VMFN-D1 OX=2135608 GN=queE PE=3 SV=1
MNIPVLEIFGPTVQGEGMVIGQKTMFVRTAGCDYRCSWCDSAFTWDGSAKADIRQMSAGDIWEELQRIGGERFSHVTLSGGNPALLPQLGSLVSLLESHGIRVAVETQGSRWQDWLDDIHEVTLSPKPPSSGMETDWEMLDSIVTRLAARPAAYAYSLKVVVFDDADLAYAAKVHARYPQAPMYLQVGNPDLKRMDIAGHAADLLARYERLIDAVVASPELNAVRVLPQLHALVWGNKRGV

SEQ ID NO: 32382 - protein, 241 aa, Paenibacillus stellifer
  REGION 1..241: note = tr|A0A089LRM6|A0A089LRM6_9BACL 7-carboxy-7-deazaguanine synthase OS=Paenibacillus stellifer OX=169760 GN=queE PE=3 SV=1
MSTKIPVIEMFGPTIQGEGAVIGVKTMFVRTYGCDYRCSWCDSAFTWDGSAKDLRVMMEPEEVLSGLLEIGGDRFDTVTISGGNPALIGEGISELIGLLHDRGIKVAIETQGSRWQDWFLEVDALTVSPKPPSSGMATDWTMLDSILTEVGMNARGSYSLKVVVFDDIDYDYAVQVHKRYPDVPFYLQPGNDNVTEEGDISARLLGRLEWLFNKAIADPDMNAARVLPQLHALIWYNKRGK

SEQ ID NO: 32383 - protein, 247 aa, unidentified
  source 1..247: note = Paenibacillus swuensis
  REGION 1..247: note = tr|A0A172TMJ9|A0A172TMJ9_9BACL 7-carboxy-7-deazaguanine synthase OS=Paenibacillus swuensis OX=1178515 GN=queE PE=3 SV=1
MDQEQEREMERELRAEVNPADAGELRLPMVEIFETVEGEGTRAGFPTVFVRLFGCNLRCTWCDTTYSYPPAEADNFMTIREITQQVMTYRSTHLCLTGGEPLLYGGRSMALIRNLAELPHLVDLHIETNGAIDLKPFMEGVQSSKVRYVMDYKLPDSGEGGKMNTGNLALLRKQDELKFVIGSERDFQAALRILKENPTEALPLFSPVWETMPPRRLVELMLEHGLSQVKLNMQMHKIIWDPAMRGV

SEQ ID NO: 32384 - protein, 250 aa, Paenibacillus taichungensis
  REGION 1..250: note = tr|A0A2V3SEJ1|A0A2V3SEJ1_9BACL 7-carboxy-7-deazaguanine synthase OS=Paenibacillus taichungensis OX=484184 GN=queE PE=3 SV=1
MSSVERSKEARIPVMEIFGPTVQGEGMVIGQKTMFVRTAGCDYRCSWCDSAFTWDGSGKDLIRMITPEDVWNELCRVGGSRFSHVTISGGNPALLASLGGLVKLLRENGIRTAVETQGSRWQPWLADIDEVTVSPKPPSSGMDTDWAVLDDLIGRLAAGPVERSHSLKIVIFDETDLDYARRVHARYPGTDLFLQTGNPDVTSADTPDLASSLLARYEWLIDQVSASDDLNDVRVLPQLHTLVWGNKRGV

SEQ ID NO: 32385 - protein, 250 aa, Paenibacillus taichungensis
  REGION 1..250: note = tr|A0A329R7D3|A0A329R7D3_9BACL 7-carboxy-7-deazaguanine synthase OS=Paenibacillus taichungensis OX=484184 GN=queE PE=3 SV=1
MSSVEQIKEARIPVMEIFGPTVQGEGMVIGQKTMFVRTAGCDYRCSWCDSAFTWDGSGKDLIRMITPEDVWNELRRVGGSRFSHVTISGGNPALLASLGGLVKLLRENGIRTAVETQGSRWQSWLADIDEVTVSPKPPSSGMETDWAVLDDLIHRLAARPVGRSHSLKIVIFDGIDLDYARRVHARYPGTDLFLQTGNPDVTSADTPDLASSLLARYEWLIEQVSASADLNDVRVLPQLHTLVWGNKRGV

SEQ ID NO: 32386 - protein, 236 aa, unidentified
  source 1..236: note = Paenibacillus taihuensis
  REGION 1..236: note = tr|A0A3D9S2M4|A0A3D9S2M4_9BACL 7-carboxy-7-deazaguanine synthase OS=Paenibacillus taihuensis OX=1156355 GN=queE PE=3 SV=1
MPVNATEQEKRSIRLPMVEIFETVEGEGTRAGFPTVFVRLFGCNLRCVWCDTKYSYPPAEAEFTMTIEDIVAEVEQKYKAEHICMTGGEPLLYGNRSGELLQALCNIERIKDVHVETNGAIDLAPFLQDIASPKARYIMDYKLPDSGENEAMIHENFSLLREQDEVKFVIASDRDFDAAVETLAKYPTKALALFSPVWESMPPARLVEKMLASGLTGVKLNMQLHKIIWDPAQRGV

SEQ ID NO: 32387 - protein, 290 aa, Paenibacillus terrae
  REGION 1..290: note = tr|G7VYT3|G7VYT3_PAETH 7-carboxy-7-deazaguanine synthase OS=Paenibacillus terrae (strain HPL-003); OX = 985665 GN=queE PE=3 SV=1
MSNITATHQTPPRGPKIAPIPVLEVFGPTVQGEGMVIGRKTMFVRTAGCDYHCSWCDSAFTWDGSAKDQIRRLSATDIWQELQAIGGTRFSHVTLSGGNPALLPQLGELITLLRSQGIATAVETQGSRWQEWLYDIDEVTLSPKPPSSGMSTNWDVLDDIVARLSNRKITDWKAAGEPSSASNFSTATCTKEAANESVRFYHGACSLKVVIFDDIDLTYARTVHERYPHVPLFLQTGNPDVNTENTGQIAESLLHRYEWLIDRVMDDSRLNDVRVLPQLHTLVWGNQRGV

SEQ ID NO: 32388 - protein, 271 aa, Paenibacillus terrae
  REGION 1..271: note = tr|A0A0D7X6D9|A0A0D7X6D9_9BACL 7-carboxy-7-deazaguanine synthase OS=Paenibacillus terrae; OX = 159743 GN=queE PE=3 SV=1
MPVLEVFGPTVQGEGMVIGRKTMFVRTAGCDYHCSWCDSAFTWDGSAKDQIRRLSATDIWQELQSIGGTRFSHVTLSGGNPALLPQLGELITLLRSQNIATAVETQGSRWQEWLYHIDEVTLSPKPPSSGMTTNWDVLDDIVARLSNQKITDWKAAGEPSSASNFSTATCTKEAANESVRYYHGACSLKVVIFDDIDLAYARTVHERYPHVPLFLQTGNPDVNTENTGQIAESLLHRYEWLIDRVMDDSCLNDVRVLPQLHTLVWGNKRGV

SEQ ID NO: 32389 - protein, 244 aa, unidentified
  source 1..244: note = Paenibacillus thermophilus
  REGION 1..244: note = tr|A0A388MPX5|A0A388MPX5_9BACL 7-carboxy-7-deazaguanine synthase OS=Paenibacillus thermophilus OX=1181891 GN=queE PE=3 SV=1
MNNPPIPVLEVFGPTVQGEGMVIGQKTMFVRTAGCDYRCAWCDSAFTWDGSAKDAIRFMTPAEIWEELREIGGDRFSHVTLSGGNPALLPQLAGLVALLHAKGVAIAVETQGSRWQDWLAEIEQVTLSPKPPSSGMETDWAILDDIVTKLSHRPHPLAVSLKVVVFDEADLAYAKQVHARYPDTAMYVQVGNPDVRRMDIREHAADLLRRYEALIDKVVASSELNNVRVLPQLHALVWGNKRGV

SEQ ID NO: 32390 - protein, 250 aa, Paenibacillus thiaminolyticus
  REGION 1..250: note = tr|A0A3A3H805|A0A3A3H805_PANTH 7-carboxy-7-deazaguanine synthase OS=Paenibacillus thiaminolyticus OX=49283 GN=queE PE=3 SV=1
MLASSLSRKSLIPVIEIFGPTVQGEGVLSGCKTMFVRMAGCDYRCSWCDSAFTWDGSERGRIRMLHAEEIWAELEGLASSRFRHVTLSGGNPALLPQLESLVQLLREHGVKSAVETQGSCWQDWLTEVDDVTISPKPPSSGMETDWGKLDRMIERLTEADRQAAVSLKVVVFDQADLEYAAAIHKRYPNVPFVLQTGNDQLGASDRASLAESLLKRYEWLVDAVSASSELNNVRVLPQLHALVWGNKRGV

SEQ ID NO: 32391 - protein, 241 aa, Paenibacillus thiaminolyticus
  REGION 1..241: note = tr|A0A3A3GGT1|A0A3A3GGT1_PANTH 7-carboxy-7-deazaguanine synthase OS=Paenibacillus thiaminolyticus OX=49283 GN=queE PE=3 SV=1
MTIPVLELFGPTVQGEGLLVGRKTMFVRTAGCDYRCSWCDSAFTWDGSAKEEIRSLTAEDILRELNALAAGRFDHVTISGGNPALLPGIGDLVRLLGEHGICTAVETQGSRWQDWLLDIDDVTLSPKPPSSCMSTDQARLDQNVSRLWDRPDRKGLCLKIVVFDERDLAYAIRMHERYPDIPFVLQTGNDDVRSADDNELIRKLLGRYEWLIEQVAADPRLNRARVLPQLHTLVWGNKRGV

SEQ ID NO: 32392 - protein, 224 aa, Paenibacillus tianmuensis
  REGION 1..224: note = tr|A0A1G4RPS9|A0A1G4RPS9_9BACL 7-carboxy-7-deazaguanine synthase OS=Paenibacillus tianmuensis OX=624147 GN=queE PE=3 SV=1
MIRLPMVEIFETVEGEGTRAGFPTVFVRLFGCNLRCTWCDTKYSYPPAEAEFTMTIEDIVVEAGRYHSRHVCLTGGEPLLYGDRSAVLIEALVATGRYDDLHIETNGAIDLAPFLERIESPVVRYIMDYKLPDSGEEERMITANLAKLRPQDELKFVIGSERDFHAAKALLEAYPTRALPLFSPVWETMPPAKLVGLMLEHGLSQVKLNMQLHKIIWDPAARGV

SEQ ID NO: 32393 - protein, 240 aa, unidentified
  source 1..240: note = Paenibacillus typhae
  REGION 1..240: note = tr|A0A1G8GVS8|A0A1G8GVS8_9BACL 7-carboxy-7-deazaguanine synthase OS=Paenibacillus typhae; OX = 1174501 GN=queE PE=3 SV=1
MSKIPVIEIFGPTIQGEGAVIGVKTMFVRTYGCDYRCSWCDSAFTWDGSAKDIVRMLEPEEIMDELLALAGSNFDSVTISGGNPALLGDSMGQFVDLLHERGIQAAIETQGSRWQDWFYEIDALTISPKPPSSGMKTDWAMLDSILEKLKVPGKGTHSLKVVVFNEEDYVYAKTVHQRYPEVQLYLQPGNDDVTEPGDISARLLGRLEWLFNLVIADPAMNRVRVLPQLHALIWHNKRGK

SEQ ID NO: 32394 - protein, 242 aa, unidentified
  source 1..242: note = Paenibacillus tyrfis
  REGION 1..242: note = tr|A0A081NU67|A0A081NU67_9BACL 7-carboxy-7-deazaguanine synthase OS=Paenibacillus tyrfis; OX = 1501230 GN=queE PE=3 SV=1
MSSNTIPVLEIFGPTVQGEGLVIGQKTMFVRTAGCDYSCSWCDSSFTWDGSAKEEIKQLSAQAIWDELVSIGGITFEHVTISGGNPALIKNIGHLVNLLHDNGVRVGLETQGSRWQTWMRDIDDLTISPKPPSSGMITDWDKLDGIIQNLNGENNEVCIKVVVFDEYDLQYAVKVHKRYPQMRLVLQVGNKDVTTADKEALVFELLERYEWLINQVMDSSELKQVKVLPQLHTLLWGNKRGV

SEQ ID NO: 32395 - protein, 224 aa, unidentified
  source 1..224: note = Paenibacillus tyrfis
  REGION 1..224: note = tr|A0A081P6G0|A0A081P6G0_9BACL 7-carboxy-7-deazaguanine synthase OS=Paenibacillus tyrfis; OX = 1501230 GN=queE PE=3 SV=1
MIRLPMVEIFETVEGEGTRAGFPTVFVRLFGCNLRCTWCDTKYSYPPAEAEFTMTIEDIVAEAGRYRSRHVCLTGGEPLLYGDKSAALIEALVATGRYDDLHIETNGAMDLTPFLERIESPIVRYIMDYKLPDSGEEERMITANLAKLRPQDELKFVIGSERDFHTARALLEAYPTRALPLFSPVWETMPPAKLVGLMLEHGLSRVKLNMQMHKIIWDPAARGV

SEQ ID NO: 32396 - protein, 266 aa, Paenibacillus uliginis
  REGION 1..266: note = tr|A0A1X7HPD6|A0A1X7HPD6_9BACL 7-carboxy-7-deazaguanine synthase OS=Paenibacillus uliginis N3/975 OX=1313296 GN=queE PE=3 SV=1
MSNSETLSPAKLSSGSSAAASVIDRPIPVMEIFGPTVQGEGMVIGRKTMFVRTAGCDYRCSWCDSAFTWDGSGTDSISRMNPEEIWQELFRLGGDRFDHVTLSGGNPALLSQLDGLVNVLHSHGITVAVETQGSRWQDWLIDIDEVTISPKPPSSGMNTDWTKLDDMISRLSARAPGRSFSLKVVIFDDLDLAYAETVHERYPNVPFYVQTGNPDVSTTSEASSHISGLLQRYERLVDAVMQSDRLNDVRVLPQLHTLVWSNKRGV

SEQ ID NO: 32397 - protein, 244 aa, unidentified
  source 1..244: note = Paenibacillus vortex
  REGION 1..244: note = tr|A0A2R9SZ56|A0A2R9SZ56_9BACL 7-carboxy-7-deazaguanine synthase OS=Paenibacillus vortex V453 OX=715225 GN=queE PE=3 SV=1
MTHRENSIPVLEIFGPTVQGEGLVIGQKTMFVRTAGCDYSCSWCDSSFTWDGSAKNEIKQLSAQTIYDELNSLGGTTFEHVTISGGNPALIKNIGYLVDLLHDKGIRVGLETQGSRWQDWMADIDDLTVSPKPPSSGMITDWDRLDGVIKNLNNSPNEICIKVVIFDEDDLQYAIKVHKRYPHMRLVLQVGNSDVTTVDRESLVFALLEKYEWLINQVMVSTELKQVKVLPQLHTLLWGNKRGV

SEQ ID NO: 32398 - protein, 224 aa, unidentified
  source 1..224: note = Paenibacillus vortex
  REGION 1..224: note = tr|A0A2R9SYL3|A0A2R9SYL3_9BACL 7-carboxy-7-deazaguanine synthase OS=Paenibacillus vortex V453 OX=715225 GN=queE PE=3 SV=1
MVVGRKTMFVRTAGCDYRCSWCDSAFTWDGSAKDSISHMSADDIWQELYRLGGERFDHVTLSGGNPALLSQLGSLVNELHRHGITVAVETQGSRWQDWLNEVDEVTISPKPPSSGMATDWGKLDDIISRLSGRPPGRSFSLKVVVFDDHDLAYAETVHERYPNVPFYLQTGNPDVGTGDTTTLVSHLLDRYEQLVEAVMLSDRLNDVRVLPQLHTLVWGNKRGV

SEQ ID NO: 32399 - protein, 226 aa, unidentified
  source 1..226: note = Paenibacillus whitsoniae
  REGION 1..226: note = tr|A0A430J7B1|A0A430J7B1_9BACL 7-carboxy-7-deazaguanine synthase OS=Paenibacillus whitsoniae OX=2496558 GN=queE PE=3 SV=1
MQDYRIPMVEIFETVEGEGTRAGFPTIFVRLFGCNLRCTWCDTKYSYPPAEAENVMTIAEIVSKVQTFRSRHICLTGGEPLLYGEKSLALVEALAALEQVDDLHIETNGAIDLAPFIAKVASPKVRYIMDYKLPDSGEMEQMQTGNFALLREQDELKFVIGSDLDFQTAVDVLESYPTKALPMFSPVWETMPPYKLVEKMLSAGLSKVKLNMQLHKIIWDPAMRGV

SEQ ID NO: 32400 - protein, 240 aa, Paenibacillus wynnii
  REGION 1..240: note = tr|A0A098M3S1|A0A098M3S1_9BACL 7-carboxy-7-deazaguanine synthase OS=Paenibacillus wynnii; OX = 268407 GN=queE PE=3 SV=1
MSKIPVIEMFGPTIQGEGAVIGVKTMFVRTYGCDYRCSWCDSAFTWDGSAKDKVRMLSADDIIVELTELAGNNFNCVTISGGNPALIGEGMMDLIVKLQERGIKVAIETQGSKWQDWLSRVDMLTISPKPPSSGMTTDWSVLDTLMSRIKTGNVSSYSLKVVVFGDEDYEYARTVHERYPDVPFYLQTGNEDVTEEGDISCRLLGRLEWLFNKVIVDPRMNNARVLPQLHALIWHNKRGK

SEQ ID NO: 32401 - protein, 235 aa, unidentified
  source 1..235: note = Paenibacillus xerothermodurans
  REGION 1..235: note = tr|A0A2W1N8L3|A0A2W1N8L3_9BACL 7-carboxy-7-deazaguanine synthase OS=Paenibacillus xerothermodurans OX=1977292 GN=queE PE=3 SV=1
MRQVSANPDWYNIKLPMVEIFETVEGEGTRAGFPTIFVRLFGCNLRCTWCDTKYSYPPEEADRVMTISQIVQEVRKYRSTHLCLTGGEPLLYGEKSAALIEALIDIDSLTDIHIETNGAIDISMFMDRISSPKVRYIVDYKLPDSGETDKMVLGNLMKLREQDELKFVIGSEQDFAEAVRVLEQYPTMALPLFSPVWETMPPHKLVQLMLEHGLSRVKLNMQLHKIIWDPAARGV

SEQ ID NO: 32402 - protein, 257 aa, Paenibacillus xylanexedens
  REGION 1..257: note = tr|A0A3N6CYK4|A0A3N6CYK4_9BACL 7-carboxy-7-deazaguanine synthase OS=Paenibacillus xylanexedens OX=528191 GN=queE PE=3 SV=1
MSSVTQQVNETGSRKEARIPVMEIFGPTVQGEGMVIGQKTMFVRTAGCDYRCSWCDSAFTWDGSGKDQIRMITPEDVWEELRRVGGTRFSHVTISGGNPALLASLGGLVALLRENGIRTAVETQGSRWQPWLADIDEVTVSPKPPSSGMDTDWAVLDDLIGRLAAGPVERSHSLKIVIFDETDLDYARRVHARYPGTDLFLQTGNPDVTSADTPDLASSLLARYEWLIDQVSASDDLNNVRVLPQLHTLVWGNKRGV

SEQ ID NO: 32403 - protein, 257 aa, Paenibacillus xylanexedens
  REGION 1..257: note = tr|A0A1L5LLL8|A0A1L5LLL8_9BACL 7-carboxy-7-deazaguanine synthase OS=Paenibacillus xylanexedens OX=528191 GN=queE PE=3 SV=1
MSSVTQQVNETRSRIEARIPVMEIFGPTVQGEGMVIGQKTMFVRTAGCDYRCSWCDSAFTWDGSGKDQIRMITPEDVWAELRRVGGTRFSHVTISGGNPALLASLGGLVALLRENGIRTAVETQGSRWQPWLANIDEVTVSPKPPSSGMDTDWAVLDDLIERLAAGPVERSHSLKIVIFDEIDLDYARRVHARYPGTDLFLQTGNPDVTSADTPDLASSLLARYEWLIDQVSASDDLNNVRVLPQLHTLVWGNKRGV

SEQ ID NO: 32404 - protein, 247 aa, unidentified
  source 1..247: note = Paenibacillus yonginensis
  REGION 1..247: note = tr|A0A1B1N6K0|A0A1B1N6K0_9BACL 7-carboxy-7-deazaguanine synthase OS=Paenibacillus yonginensis OX=1462996 GN=queE PE=3 SV=1
MPPSAAATIPVLEIFGPTVQGEGMVIGQKTMFVRTAGCDYRCSWCDSAFTWDGSAKDQIQRLSAEDIWQRLIELGGDRFSHVTLSGGNPALLPQLGSLVALLREKGISMAVETQGSRWQDWLDDIDEVTLSPKPPSSGMETNFDMLDDIVARLARRPRPFDYSLKVVVFDDQDLDYAIRVHQRYPQAQFYVQVGNPDTVRMDVQEHALFLLQRYEELVEKVMTKPELNRVRVLPQLHALIWGNKRGV

SEQ ID NO: 32405 - protein, 236 aa, unidentified
  source 1..236: note = Paenimaribius caenipelagi
  REGION 1..236: note = tr|A0A547PUR5|A0A547PUR5_9RHOB 7-carboxy-7-deazaguanine synthase OS=Paenimaribius caenipelagi OX=2489174 GN=queE PE=3 SV=1
MTVLRIAEIFGPTIQGEGALIGEPTLFVRAGGCDYRCVWCDSLHAVESRYRHTWAPMSSEDVWAELRHLSGDQPVTISLSGGNPAIQDFGPVIALGRAAGYRFACETQGSLARGWFGALDTLVLSPKPPSSGETVDWSVFADCVEAGRAARSTVMKIVVFDQADFDWAKDAHARHPDLPLYLQPGNPEVDPEIPVDPQALADRLGWLTGLAMEDRWFTPRILPQLHVLIWGNKRGV

SEQ ID NO: 32406 - protein, 235 aa, unidentified
  source 1..235: note = Paenisporosarcina antarctica
  REGION 1..235: note = tr|A0A4P6ZUZ6|A0A4P6ZUZ6_9BACL 7-carboxy-7-deazaguanine synthase OS=Paenisporosarcina antarctica OX=417367 GN=queE PE=3 SV=1
MKIPVMEIFGPTIQGEGMVIGQKTMFVRTGGCDYSCSWCDSKFTWDGSGKSTAMKAEEIISSLKDIGGEAFSHITISGGNPALHKGLGELINQCHEQGWKVAVETQGSYWQDWLLDIDDVTISPKPPSSLMTTDFNKLDTFMHNLKVANASLKVVVFNDEDFTYAEVIHQRYPTVPFFLQVGNDDVLTIDDQALVSLLLKRFEWLIDRSMKSTIMNDAKVLPQLHALIWGNKRGV

SEQ ID NO: 32407 - protein, 235 aa, Paenisporosarcina sp.
  REGION 1..235: note = tr|S2XDL9|S2XDL9_9BACL 7-carboxy-7-deazaguanine synthase OS=Paenisporosarcina sp. HGH0030 OX=1078085; GN = queE PE=3 SV=1
MKIPVMEIFGPTIQGEGMVIGQKTMFVRTGGCDYSCSWCDSKFTWDGTGKSTAMKPEEIISSLKEIGGDAFSHITISGGNPALHKGLGEFINQCHEQGWKVAIETQGSFWQDWLTEIDDITISPKPPSSLMVTDFNKLDTFMRNLKDSHISLKVVVFNEEDFDFAEMVHMRYPAVPFYLQVGNEDVLTVDDQALVSTLLTRFEWLIDRAMKSTIMNDAKVLPQLHALVWGNKRGV

SEQ ID NO: 32408 - protein, 235 aa, Paenisporosarcina sp.
  REGION 1..235: note = tr|A0A2T6KGG5|A0A2T6KGG5_9BACL 7-carboxy-7-deazaguanine synthase OS=Paenisporosarcina sp. OV554 OX=2135694 GN=queE PE=3 SV=1
MKIPVMEIFGPTIQGEGMVIGQKTMFVRTGGCDYSCSWCDSKFTWDGTGKSTAMKAEEIIETLKEIGGEAFSHITISGGNPALHKGLGEFINQCHEQGWKVAIETQGSFWQDWLLDIDDVTISPKPPSSLMKTDFSKLDLFMQNLVDSNVSLKVVIFDEEDFGYAEMIHTRYPEVPFFLQVGNDDVLTVDDQALVSTLLKRFEWLIDRSMKSTIMNDAKVLPQLHALIWGNKRGV

SEQ ID NO: 32409 - protein, 218 aa, unidentified
  source 1..218: note = Pajaroellobacter abortibovis
  REGION 1..218: note = tr|A0A1L6MZ45|A0A1L6MZ45_9DELT 7-carboxy-7-deazaguanine synthase OS=Pajaroellobacter abortibovis OX=1882918 GN=queE PE=3 SV=1
MAKEDTLVIHEIYTSIQGESTFAGLPCTFIRTTGCNLRCSWCDTPHAFYDGTRMRRQKVLYAALERGTSLIEMTGGEPLLQPAVFPLLEELCNASRTVLLETSGEADVAKVDPRVHKIMDLKPPGSGESHRIRWSNLEFISARDELKFVLANRQDYEWMREMIQTFRLTDRTPHLLASTVFGQLSPQALIQWVLEDRVQVRVQLQLHKYIWPPDIQGV

SEQ ID NO: 32410 - protein, 209 aa, Paludibacter propionicigenes
  REGION 1..209: note = tr|E4T1V8|E4T1V8_PALPW 7-carboxy-7-deazaguanine synthase OS=Paludibacter propionicigenes (strain DSM 17365 / JCM 13257 / WB4) OX=694427 GN=queE PE=3 SV=1
MRSKADEILLNVVEIFHSIQGEGANAGRSAVFVRLSNCNKNCWYCDTDWSKGETMSVSQILAEVNKFVGKKDYPNNLIIWTGGEPTLQLTDEILSHFSEYYNCIETNGTNPVPSLIKYISCSPKVKPEVLRKNFKHVNEFRYPIGDGDVLPDIAELPAADNYIVSPIFLGEAKKRFEQVDENVKYAIDFVKKNPRWRLSLQLHKLLNIP

SEQ ID NO: 32411 - protein, 209 aa, unidentified
  source 1..209: note = Paludibacterium purpuratum
  REGION 1..209: note = tr|A0A4R7B1R1|A0A4R7B1R1_9NEIS 7-carboxy-7-deazaguanine synthase OS=Paludibacterium purpuratum OX=1144873 GN=queE PE=3 SV=1
MYTVKEIFYTLQGEGGQTGRAAVFCRFAGCNLWSGKERHRAQAICQFCDTDFVGTGPDGGKFADAEALAERVAAAWPDRNQGRPYVVCTGGEPLLQLDAPLIDALHARGFEVAVETNGTVVAPQGIDWLCVSPKAGAPLRQTSGSELKLVYPQQTALPETFEHLDFTHWYLQPMDGPDADANLQAAIAYCLAHPRWRLSLQTHKTIRIR

SEQ ID NO: 32412 - protein, 243 aa, unidentified
  source 1..243: note = Paludifilum halophilum
  REGION 1..243: note = tr|A0A235B582|A0A235B582_9BACL 7-carboxy-7-deazaguanine synthase OS=Paludifilum halophilum OX=1642702 GN=queE PE=3 SV=1
MRKGWELPSSEGYRDWKLPMVEVFETVEGEGTAAGFPTVFVRLFHCNLRCSWCDTPYSYAPARPEYEAAIGEIVHQVERYASRRICFTGGEPLMHQEKSAALLAALADLDSIEDIHIETNGAIDLAPFDALRRSREDWFRKVRFIMDYKLPASGEEHRMIRGNFDHLTDQDEVKLVIGNEEDFRAAVRVVRQYHRQGQVLFSPVWETMPPRRLVEKVLAEPLPQVKVSLQLHKVIWDPAERGV

SEQ ID NO: 32413 - protein, 242 aa, unidentified
  source 1..242: note = Paludisphaera borealis
  REGION 1..242: note = tr|A0A1U7CXU6|A0A1U7CXU6_9BACT 7-carboxy-7-deazaguanine synthase OS=Paludisphaera borealis OX=1387353 GN=queE PE=3 SV=1
MENAAGSRAETAASIALARRLKPLENKPAGVLVVHEIYRSLQGESTYAGLPCVFVRLTACQLRCVYCDTPHAFQHGEPLSLDDVVEQALKLGDDLVEITGGEPLLQDEVYPLMSRLADHGRTVLLETSGAVDTSLVDPRVRVILDLKTPGSGELAANVWSNLNRLKPIDEVKFVLCSRDDFDWAVDVVHRHDLTRRCPVLFSAVFGQVNPTDLAAWILESRLPIRLQLQQHKILWDPKARGV

SEQ ID NO: 32414 - protein, 231 aa, Panacagrimonas perspica
  REGION 1..231: note = tr|A0A4S3K8E1|A0A4S3K8E1_9GAMM 7-carboxy-7-deazaguanine synthase OS=Panacagrimonas perspica OX=381431 GN=queE PE=3 SV=1
MDDAAPAPAATGREAGTQSRRLRITEIFVSLQGESTRVGLPSVFVRLTGCPLRCSYCDTAYAFHGGQSRDLDEVLAEVESYGVRHVCVTGGEPLAQRTCLDLLRALCDRGLSVSLETSGALDVSRVDPRVSRIVDVKTPGSGEALRNLLGNLDLLTPADEIKFVVCSRADYEWARELIAARALAQRCTVLLSPSHGQIEPAELARWIVEDRLPVRFQMQLHKILWGNVAGY

SEQ ID NO: 32415 - protein, 193 aa, unidentified
  source 1..193: note = Panacibacter ginsenosidivorans
  REGION 1..193: note = tr|A0A5B8VGP0|A0A5B8VGP0_9BACT 7-carboxy-7-deazaguanine synthase OS=Panacibacter ginsenosidivorans OX=1813871 GN=queE PE=3 SV=1
MEAFYTLQGEGFHQGRAAYFIRLGGCDVGCSWCDVKESWDALKHPVLSIDKIIAEAKKHPGRLAVVTGGEPLMHDLDALTRALHNAGFENNIETSGSHPLSGTWDWICLSPKKFKAPLPEILPLANELKVVVYNKSDFKWAEDYAAKVSATCKLYLQPEWGKSEKITPLIIDYIKANPQWELSMQLHKYINVP

SEQ ID NO: 32416 - protein, 193 aa, unidentified
  source 1..193: note = Panacibacter sp.
  REGION 1..193: note = tr|A0A4U3L7L2|A0A4U3L7L2_9BACT 7-carboxy-7-deazaguanine synthase OS=Panacibacter sp. 17mud1-8 OX=2575867 GN=queE PE=3 SV=1
MEAFYTLQGEGFYQGQAAYFIRLGGCDVGCFWCDVKESWDAAAHPQVAIEEIIAGAAAYPGRIAVVTGGEPLLHNLDELTAELRQAGFQTNIETSGSSPISGKWDWICLSPKKFKAPLPENIPLANELKIIVYNKHDFAWAERFAQQTSKNCRLYLQPEWSKAAEVTPLIVEYIKANPKWQLSLQVHKYINVP

SEQ ID NO: 32417 - protein, 211 aa, Pandoraea apista
  REGION 1..211: note = tr|A0A0B5FEC7|A0A0B5FEC7_9BURK 7-carboxy-7-deazaguanine synthase OS=Pandoraea apista; OX = 93218 GN=queE PE=3 SV=1
MTYAVKEIFYTLQGEGANAGRPAVFCRFAGCNLWTGREEDRADAVCQFCDTDFVGTDGENGGKYRTPADLVAQIVALWPQGDRAHRFVVCTGGEPLLQLDAPLIEALHAEGFRIAVETNGTQAIPEGIDWVCVSPKADAEMVVTRGDELKVVVPQDRQRLADYEALDFQHFYLQPMDGPLRDTNTKLAIDYCKSHPRWSLSMQTHKYLNIP

SEQ ID NO: 32418 - protein, 211 aa, Pandoraea faecigallinarum
  REGION 1..211: note = tr|A0A0H3WRA1|A0A0H3WRA1_9BURK 7-carboxy-7-deazaguanine synthase OS=Pandoraea faecigallinarum OX=656179 GN=queE PE=3 SV=1
MTYAVKEIFYTLQGEGANAGRPAVFCRFAGCNLWTGREEDRAEAVCQFCDTDFVGTDGENGGKYRTPADLVAQIVALWPQGDRAHRFVVCTGGEPLLQLDAPLIDALHAEGFRIAVETNGTQAIPDGIDWVCVSPKADAEMVVTRGDELKVVVPQDRQRLADYEALDFTHFYLQPMDGPLRDTNTRLAIEYCKSHPRWSLSMQTHKYLNIP

SEQ ID NO: 32419 - protein, 211 aa, unidentified
  source 1..211: note = Pandoraea fibrosis
  REGION 1..211: note = tr|A0A5E4VVW1|A0A5E4VVW1_9BURK 7-carboxy-7-deazaguanine synthase OS=Pandoraea fibrosis; OX = 1891094 GN=queE PE=3 SV=1
MTYAVKEIFYTLQGEGANAGRPAVFCRFAGCNLWTGREEDRAEAVCQFCDTDFVGTDGENGGKYRTPADLVAQIVALWPEGDRAHRFVVCTGGEPLLQLDAPLIDALHAEGFRIAVETNGTQVVPEGIDWVCVSPKADAEMVVTRGDELKVVVPQDRQRLADYEALDFQHFYLQPMDGPLRDTNTKLAIDYCKSHPRWSLSMQTHKYLNIP

SEQ ID NO: 32420 - protein, 211 aa, unidentified
  source 1..211: note = Pandoraea fibrosis
  REGION 1..211: note = tr|A0A0B3SP75|A0A0B3SP75_9BURK 7-carboxy-7-deazaguanine synthase OS=Pandoraea fibrosis; OX = 1891094 GN=queE PE=3 SV=1
MTYAVKEIFYTLQGEGANAGRPAVFCRFAGCNLWTGREEDRAEAVCQFCDTDFVGTDGENGGKYRTPADLVAQIVALWPEGDRAHRFVVCTGGEPLLQLDSPLIDALHAEGFRIAVETNGTQVVPEGIDWVCVSPKADAEMVVTRGDELKVVVPQDRQRLADYEALDFQHFYLQPMDGPLRDTNTKLAIDYCKSHPRWSLSMQTHKYLNIP

SEQ ID NO: 32421 - protein, 211 aa, Pandoraea norimbergensis
  REGION 1..211: note = tr|A0A0U2WJ80|A0A0U2WJ80_9BURK 7-carboxy-7-deazaguanine synthase OS=Pandoraea norimbergensis OX=93219 GN=queE PE=3 SV=1
MTYAVKEIFYTLQGEGANAGRPAVFCRFAGCNLWTGREEDRAEAVCQFCDTEFVGTDGENGGKYRTPADLVAQIVALWPEGDRAHRFVVCTGGEPLLQLDAPLIAALHAEGFRIAVETNGTQVVPEGIDWVCVSPKADAGLVVTRGDELKVVVPQDRQRLAEYETLDFTHFYLQPMDGPLRDTNTKLAIDYCKSHPRWSLSMQTHKYLNIP

SEQ ID NO: 32422 - protein, 211 aa, Pandoraea oxalativorans
  REGION 1..211: note = tr|A0A0E3YB47|A0A0E3YB47_9BURK 7-carboxy-7-deazaguanine synthase OS=Pandoraea oxalativorans OX=573737 GN=queE PE=3 SV=1
MTYAVKEIFYTLQGEGANAGRPAVFCRFAGCNLWTGREEDRADAVCQFCDTDFVGTDGENGGKYRTPADLVAQVVALWPQDDRAHRFIVCTGGEPLLQLDAPLIAALHAEGFRIAVETNGTQAIPEGIDWVCVSPKADAELIVTRGDELKVVVPQDRQRLADYEALDFTHFYLQPMDGPLRDTNTKLAIDYCKSHPRWSLSMQTHKYLNIP

SEQ ID NO: 32423 - protein, 211 aa, Pandoraea pnomenusa
  REGION 1..211: note = tr|A0A518QXM3|A0A518QXM3_9BURK 7-carboxy-7-deazaguanine synthase OS=Pandoraea pnomenusa; OX = 93220 GN=queE PE=3 SV=1
MTYAVKEIFYTLQGEGANAGRPAVFCRFAGCNLWTGREEDRAEAVCQFCDTDFVGTDGENGGKYRTPADLVAQIVALWPQGDRAHRFVVCTGGEPLLQLDAPLIDALHAEGFRIAVETNGTQVIPEGIDWVCVSPKADAEMVVTRGDELKVVVPQDRQRLAEYEALDFAHFYLQPMDGPLRDTNTKLAIDYCKSHPRWSLSMQTHKYLNIP

SEQ ID NO: 32424 - protein, 211 aa, Pandoraea pnomenusa
  REGION 1..211: note = tr|A0A378YQA7|A0A378YQA7_9BURK 7-carboxy-7-deazaguanine synthase OS=Pandoraea pnomenusa; OX = 93220 GN=queE PE=3 SV=1
MTYAVKEIFYTLQGEGANAGRPAVFCRFAGCNLWTGREEDRAGAVCQFCDTDFVGTDGENGGKYRTPADLVAQIVALWPRDDRAHRFVVCTGGEPLLQLDAPLIDALHAEGFRIAVETNGTQAIPEGIDWVCVSPKADAEMVVTRGDELKVVVPQDRQRLLEYEALDFAHFYLQPMDGPLRDTNTKLAIDYCKSHPRWSLSMQTHKYLNIP

SEQ ID NO: 32425 - protein, 211 aa, Pandoraea pulmonicola
  REGION 1..211: note = tr|A0A378Z4W9|A0A378Z4W9_9BURK 7-carboxy-7-deazaguanine synthase OS=Pandoraea pulmonicola; OX = 93221 GN=queE PE=3 SV=1
MTYAVKEIFYTLQGEGANAGRPAVFCRFAGCNLWTGREEDRAEAVCQFCDTDFVGTDGENGGKYRTPAELVAQIVALWPADDRANRFVVCTGGEPLLQLDAPLIDALHAEGFRIAVETNGTQGVPEGIDWVCVSPKADAELVVTHGDELKVVVPQDHQRLADYETLDFAHFYLQPMDGPLRDTNTKLAIDYCKAHPRWSLSMQTHKYLNIP

SEQ ID NO: 32426 - protein, 211 aa, Pandoraea sp.
  REGION 1..211: note = tr|A0A1Q4CH76|A0A1Q4CH76_9BURK 7-carboxy-7-deazaguanine synthase OS=Pandoraea sp. 64-18; OX = 1895806 GN=queE PE=3 SV=1
MTYAVKEIFYTLQGEGANAGRPAVFCRFAGCNLWTGREEDRADAVCQFCDTDFIGTDGENGGKYRTPADLVAQIVALWPAGERAHRFVVCTGGEPLLQLDAPLIDALHAEGFRIAVETNGTQAIPEGIDWVCVSPKADAELIVTRGDELKVVVPQDRQRLAEYEALDFQYFYLQPMDGPLRDTNTKLAIDYCKAHPRWSLSMQTHKYLNIP

SEQ ID NO: 32427 - protein, 211 aa, Pandoraea sp.
  REGION 1..211: note = tr|A0A522ERZ1|A0A522ERZ1_9BURK 7-carboxy-7-deazaguanine synthase OS=Pandoraea sp.; OX = 1883445 GN=queE PE=3 SV=1
MTYTVKEIFYTLQGEGANAGRPAVFCRFAGCNLWTGREQDRADAVCRFCDTDFVGTDGENGGKYATPEALAERIASLWPAGDSEHRFVVCTGGEPLLQLDEPLIDALHRSRFRIAIETNGTQPVPPGIDWVCVSPKADAPLVVTRGHELKVVVPQARQSLAGYEALDFEHFYLQPMDGPLREANTRWAIDYCKQHPRWRLSMQTHKYLNIP

SEQ ID NO: 32428 - protein, 211 aa, Pandoraea sputorum
  REGION 1..211: note = tr|A0A239S6A7|A0A239S6A7_9BURK 7-carboxy-7-deazaguanine synthase OS=Pandoraea sputorum; OX = 93222 GN=queE PE=3 SV=1
MTYAVKEIFYTLQGEGANAGRPAVFCRFAGCNLWTGREEDRADAVCQFCDTDFVGTDGENGGKYRTPAELVAQVVALWPQDDRAHRFIVCTGGEPLLQLDAPLIAALHAEGFRIAVETNGTQAIPEGIDWVCVSPKADAELIVTRGDELKVVVPQDRQRLADYEALDFTHFYLQPMDGPLRDTNTRLAIDYCKSHPRWSLSMQTHKYLNIP

SEQ ID NO: 32429 - protein, 211 aa, Pandoraea sputorum
  REGION 1..211: note = tr|A0A5E5ANA5|A0A5E5ANA5_9BURK 7-carboxy-7-deazaguanine synthase OS=Pandoraea sputorum; OX = 93222 GN=queE PE=3 SV=1
MTYAVKEIFYTLQGEGANAGRPAVFCRFAGCNLWTGREEDRAEAVCQFCDTDFVGTDGENGGKYRTPAELVAQVVALWPQDDRAHRFIVCTGGEPLLQLDALLIAALHAEGFRIAVETNGTQAIPEGIDWVCVSPKADAELIVTRGDELKVVVPQDRQRLADYEALDFTHFYLQPMDGPLRDTNTRLAIDYCKSHPRWSLSMQTHKYLNIP

SEQ ID NO: 32430 - protein, 211 aa, unidentified
  source 1..211: note = Pandoraea terrae
  REGION 1..211: note = tr|A0A5E4T9N1|A0A5E4T9N1_9BURK 7-carboxy-7-deazaguanine synthase OS=Pandoraea terrae; OX = 1537710 GN=queE PE=3 SV=1
MTYAVKEIFYTLQGEGANAGRPAVFCRFAGCNLWTGREEDRAEAVCQFCDTDFVGMDGENGGKFRTPGALVAQIVALWPEGDRAHRFVVCTGGEPLLQLDPALIDALHAEGFTIAVETNGTQPVPDGIDWVCVSPKADAPLVVTRGDELKVVVPQDRQRLADYEALDFKHFYLQPMDGPLRDTNTRLAIDYCKSHPRWSLSMQTHKYLNIP

SEQ ID NO: 32431 - protein, 211 aa, Pandoraea thiooxydans
  REGION 1..211: note = tr|A0A0G3ERG7|A0A0G3ERG7_9BURK 7-carboxy-7-deazaguanine synthase OS=Pandoraea thiooxydans; OX = 445709 GN=queE PE=3 SV=1
MTYTVKEIFYTLQGEGANAGRPAVFCRFAGCNLWTGREQDRADAVCRFCDTDFVGTDGENGGKYATPEALAERIASLWPAGDSAHRFVVCTGGEPLLQLDAPLIDALHRAHFRIAIETNGTQPVPPGIDWVCVSPKADAPLVVTRGHELKVVVPQARQSLADYEALDFEHFYLQPMDGPLREANTRWAIDYCKQHPRWRLSMQTHKYLNIP

SEQ ID NO: 32432 - protein, 211 aa, Pandoraea vervacti
  REGION 1..211: note = tr|A0A0C5JM05|A0A0C5JM05_9BURK 7-carboxy-7-deazaguanine synthase OS=Pandoraea vervacti; OX = 656178 GN=queE PE=3 SV=1
MTYAVKEIFYTLQGEGANAGRPAVFCRFAGCNLWTGREEDRAGAVCQFCDTDFVGTDGENGGKYRTPADLVAQIAALWPQSDRAHRFVVCTGGEPLLQLDAPLIDALHAEGFRIAVETNGTQVIPEGIDWVCVSPKADAEMIVKRGDELKVVVPQDRQRLADYETLDFTHFYLQPMDGPLRDTNTKLAIDYCKSHPRWSLSMQTHKYLNIP

SEQ ID NO: 32433 - protein, 242 aa, unidentified
  source 1..242: note = Pannonibacter indicus
  REGION 1..242: note = tr|A0A0K6HS32|A0A0K6HS32_9RHOB 7-carboxy-7-deazaguanine synthase OS=Pannonibacter indicus; OX = 466044 GN=queE PE=3 SV=1
MSGEILRISEIFGPTIQGEGALIGMATVFVRTGGCDFRCSWCDTLHAVDSAYRDTWTPMSADAVMDEVRRLSGGEPLMVTVSGGNPAIQPLGRLIELGKREGYRFALETQGSLSRDWFAALDVLSLSPKPPSSGMAFDRKALADAVAAAGPNTAIALKFVVFDEADYGFAREVARAYPHLPVYLQPGNHTPPPAGQEDAVIDIPGIMARLRWLIGRAANDRWFQASILPQLHTLIWGNLRGV

SEQ ID NO: 32434 - protein, 242 aa, Pannonibacter phragmitetus
  REGION 1..242: note = tr|A0A379A0L5|A0A379A0L5_9RHOB 7-carboxy-7-deazaguanine synthase OS=Pannonibacter phragmitetus OX=121719 GN=queE PE=3 SV=1
MSGQTLRISEIFGPTIQGEGALIGMATVFVRTGGCDFRCSWCDTLHAVDSAYRETWTPMSADAVMDEVRRLSGGAPLMITVSGGNPAIQPLGRLIELGKREGYRFALETQGSLSRDWFAALDVLSLSPKPPSSSMAFDRKALADAIAAAGPGTAIALKFVVFDEPDYGFAREVAGAYPHLPVYLQPGNHTPPPADQEDAVIDIPGIMARMRWLIDRAANDRWFEASILPQLHTLIWGNLRGV

SEQ ID NO: 32435 - protein, 242 aa, Pannonibacter phragmitetus
  REGION 1..242: note = tr|A0A0U3E5E7|A0A0U3E5E7_9RHOB 7-carboxy-7-deazaguanine synthase OS=Pannonibacter phragmitetus OX=121719 GN=queE PE=3 SV=1
MSGETLRISEIFGPTIQGEGALIGMATVFVRTGGCDFRCSWCDTLHAVDSAYRDTWTPMSADAVMDEVRRLSGGAPLMVTVSGGNPAIQPLGRLIELGKREGYRFALETQGSLSRDWFAGFDVLSLSPKPPSSGMAFDRKALADAVAAAGPNTAIALKFVVFDEADYGFAREVARAYPHLPVYLQPGNHTPPPADQEDAVIDIPGIMARLRWLIDRAANDRWFEASILPQLHTLIWGNLRGV

SEQ ID NO: 32436 - protein, 223 aa, unidentified
  source 1..223: note = Pantoea alhagi
  REGION 1..223: note = tr|A0A1W6B698|A0A1W6B698_9GAMM 7-carboxy-7-deazaguanine synthase OS=Pantoea alhagi; OX = 1891675 GN=queE PE=3 SV=1
MQYPINEMFQTLQGEGFYTGVPAIFIRLQGCPVGCSWCDTKHTWDKLADRETSLGDILLKTVETDAWGAADADALLNTINQQQWTARHVVITGGEPCIHDLTPLTEALQQAGFSCQIETSGTYAVRCTAQTWVTVSPKVNMRGGYDVLDQALVRADEIKHPVARQRDIDALDLLLARLKDQKARIIALQPISQKEDATRLCIATCIARNWRLSMQTHKYLNIA

SEQ ID NO: 32437 - protein, 223 aa, Pantoea allii
  REGION 1..223: note = tr|A0A4S3BGN3|A0A4S3BGN3_9GAMM 7-carboxy-7-deazaguanine synthase OS=Pantoea allii; OX = 574096 GN=queE PE=3 SV=1
MFYPINEMFQTLQGEGYYTGVPAIFIRLQGCPVGCSWCDTKHTWEKRTDRETSLGDILIKTVESDAWGDADAATLVSAIGQQGWTARHVVITGGEPAIYDLRPLTTALEQHGFQCQIETSGTHEIHCSEQTWVTVSPKVNMRGGYDVLPQALSRADEIKHPVARERDVEALDLLLAGIDDTKARIIALQPISRKDDATRLCIETCIARNWRLSMQTHKYLNIA

SEQ ID NO: 32438 - protein, 223 aa, Pantoea allii
  REGION 1..223: note = tr|A0A2V2BPX2|A0A2V2BPX2_9GAMM 7-carboxy-7-deazaguanine synthase OS=Pantoea allii; OX = 574096 GN=queE PE=3 SV=1
MQYPINEMFQTLQGEGYYTGVPAIFIRLQGCPVGCSWCDTKHTWEKQADRETSLGDILVKTVESDAWGNADAAMLLSSIQQQGWTARHVVITGGEPAIYDLRPLTASLEAAGFQCQIETSGTHEIHCADATWVTVSPKVNMRGGYDVLAQALSRADEIKHPVARQRDVDALDDLLAGIHDSKARIIALQPISRKDEATKLCIETCIARNWRLSMQTHKYLNIA

SEQ ID NO: 32439 - protein, 223 aa, unidentified
  source 1..223: note = Pantoea ananas
  REGION 1..223: note = tr|A0A2U1D5I0|A0A2U1D5I0_PANAN 7-carboxy-7-deazaguanine synthase OS=Pantoea ananas OX=553; GN = queE PE=3 SV=1
MQYPINEMFQTLQGEGYYTGVPAIFIRLQGCPVGCSWCDTKHTWEKQADRETSLGDILVKTVESDAWGNADTATLLSSIAQQGWTARHVVITGGEPAIYDLRPLTASLEAAGFQCQIETSGTHEIHCSEQTWVTVSPKVNMRGGYDVLAQALSRADEIKHPVARQRDVEALDDLLAGIQDSKARIIALQPISRKDEATKLCIETCIARNWRLSMQTHKYLNIA

SEQ ID NO: 32440 - protein, 223 aa, unidentified
  source 1..223: note = Pantoea ananas
  REGION 1..223: note = tr|A0A2S7ZV66|A0A2S7ZV66_PANAN 7-carboxy-7-deazaguanine synthase OS=Pantoea ananas OX=553; GN = queE PE=3 SV=1
MFYPINEMFQTLQGEGYYTGVPAIFIRLQGCPVGCSWCDTKHTWEKRTDRETSLGDILIKTVESDAWGDADAATLVNAIAQQGWTARHVVITGGEPAIYDLRPLTTALEQHGFQCQIETSGTHEIHCSEQTWVTVSPKVNMRGGYDVLPQALSRADEIKHPVARERDVDALDLLLAGIDDTKARIIALQPISRKDDATRLCIETCIARNWRLSMQTHKYLNIA

SEQ ID NO: 32441 - protein, 223 aa, Pantoea ananatis
  REGION 1..223: note = tr|D4GLI4|D4GLI4_PANAM 7-carboxy-7-deazaguanine synthase OS=Pantoea ananatis (strain LMG 20103) OX=706191; GN = ygcF PE=3 SV=1
MQYPINEMFQTLQGEGYYTGVPAIFIRLQGCPVGCSWCDTKHTWEKQADRETSLGDILVKTVESDAWGNADTATLLSSIAQQGWTARHAVITGGEPAIYDLRPLTASLEAAGFQCQIETSGTHEIHCSEQTWVTVSPKVNMRGGYDVLAQALSRADEIKHPVARQRDVEALDDLLAGIQDSKARIIALQPISRKDEATKLCIETCIARNWRLSMQTHKYLNIA

SEQ ID NO: 32442 - protein, 223 aa, Pantoea ananatis; identical to SEQ ID NO: 32439
  REGION 1..223: note = tr|A0A0H3KZA9|A0A0H3KZA9_PANAA 7-carboxy-7-deazaguanine synthase OS=Pantoea ananatis (strain AJ13355) OX=932677 GN=ygcF PE=3 SV=1

SEQ ID NO: 32443 - protein, 223 aa, Pantoea anthophila
  REGION 1..223: note = tr|A0A506NMP4|A0A506NMP4_9GAMM 7-carboxy-7-deazaguanine synthase OS=Pantoea anthophila; OX = 470931 GN=queE PE=3 SV=1
MFYPINEMFQTLQGEGYYTGVPALFIRLQGCPVGCSWCDTKHTWDKRADRETSLGDILIKTVESDAWGDADAATLLRAIEQQGWTARHVVITGGEPAIYDLRPLTAALEQQGFQCQIETSGTHEIHCSERTWVTVSPKVNMRGGYDVLPQALSRADEIKHPVARQRDVEALDALLAGIEDSKPRIIALQPISRKEEATRLCIETCIARNWRLSMQTHKYLNIA

SEQ ID NO: 32444 - protein, 223 aa, unidentified
  source 1..223: note = Pantoea coffeiphila
  REGION 1..223: note = tr|A0A2S9I967|A0A2S9I967_9GAMM 7-carboxy-7-deazaguanine synthase OS=Pantoea coffeiphila; OX = 1465635 GN=queE PE=3 SV=1
MQYPINEMFQTLQGEGIYTGVPAIFIRLQGCPVGCSWCDTKHTWDKLADRETSLGDILLKTVETDAWGAADADALIGVIRGNGWTANHIVITGGEPCIHDLTPLTASLQQQGFSCQIETSGTHTVRCTPQTWVTVSPKVNMRGGYDVLNQALVRADEVKHPVARQRDVDALDALLATLDDDKARIIALQPISQKADATQLCIDTCIARNWRLSMQTHKYLNIA

SEQ ID NO: 32445 - protein, 223 aa, Pantoea conspicua
  REGION 1..223: note = tr|A0A1X1BVY5|A0A1X1BVY5_9GAMM 7-carboxy-7-deazaguanine synthase OS=Pantoea conspicua; OX = 472705 GN=queE PE=3 SV=1
MQYPINEMFQTLQGEGFYTGVPAIFIRLQGCPVGCSWCDTKHTWEKRADRETSLGDILIKTVESDAWGDADAATLLNAIQQQGWTARHVVITGGEPAIYDLRPLTTALEQHGFQCQIETSGTHDIRCSEQTWVTVSPKVNMRGGYDVLPQALVRADEIKHPVARMRDVEALDELLAGLDDDKARIIALQPISRKDEATRLCIEICIARNWRLSMQTHKYLNIA

SEQ ID NO: 32446 - protein, 223 aa, Pantoea cypripedii
  REGION 1..223: note = tr|A0A1X1EXE1|A0A1X1EXE1_PANCY 7-carboxy-7-deazaguanine synthase OS=Pantoea cypripedii; OX = 55209 GN=queE PE=3 SV=1
MFYPINEMFQTLQGEGFYTGVPALFIRLQGCPVGCSWCDTKHTWEKLADRETSLGDILVKTVESDAWGNADAAMLIESIQRQGWTARHVVITGGEPAIYDLRPLTSALEAAGFQCQIETSGTHEIRCTDTTWVTVSPKVNMRGGYDVLPQALVRADEIKHPVARERDVEALDALLAGLHDEKKRIIALQPISRGDAATKLCIETCIARNWRLSMQTHKYLNIA

SEQ ID NO: 32447 - protein, 223 aa, Pantoea deleyi
  REGION 1..223: note = tr|A0A506PY71|A0A506PY71_9GAMM 7-carboxy-7-deazaguanine synthase OS=Pantoea deleyi; OX = 470932 GN=queE PE=3 SV=1
MFYPINEMFQTLQGEGYYTGVPAIFIRLQGCPVGCSWCDTKHTWEKRADRETSLGDILIKTVESDAWGDADAATLLRAIAEQGWTARHVVITGGEPAIYDLRPLTAALEEQGFQCQIETSGTHEIHCSGQTWVTVSPKVNMRGGYDVLDQALSRADEIKHPVARERDVEALDQLLAGVNDAKARIIALQPISRKEDATRLCIETCIARNWRLSMQTHKYLNIA

SEQ ID NO: 32448 - protein, 223 aa, Pantoea dispersa
  REGION 1..223: note = tr|A0A518XFA9|A0A518XFA9_9GAMM 7-carboxy-7-deazaguanine synthase OS=Pantoea dispersa; OX = 59814 GN=queE PE=3 SV=1
MFYPINEMFQTLQGEGFYTGVPAIFIRLQGCPVGCSWCDTKHTWEKLANRETSLGDILVKTVESDAWGSADAATLIDTIARQGWTARHVVITGGEPAIFDLRPLTDALEAAGFQCQIETSGTHEVHCSAGTWVTVSPKVNMRGGYDVLPQALQRADEIKHPVARERDVEALDALLAGLHDTKPRIVALQPISRGEAATRLCIETCIARNWRLSMQTHKYLNIA

SEQ ID NO: 32449 - protein, 223 aa, Pantoea dispersa
  REGION 1..223: note = tr|A0A437T623|A0A437T623_9GAMM 7-carboxy-7-deazaguanine synthase OS=Pantoea dispersa; OX = 59814 GN=queE PE=3 SV=1
MFYPINEMFQTLQGEGFYTGVPAIFIRLQGCPVGCSWCDTKHTWETRADRETSLGDILVKTVESDAWGSADAATLIDSIQRQGWTARHVVITGGEPAIFDLRPLTEALKAAGFQCQIETSGTHEVHCSAATWVTVSPKVNMRGGYDVLPQALQRADEIKHPVARERDVEALDALLAGLQDEKKRIVALQPISRGEAATRLCIETCIARNWRLSMQTHKYLNIA

SEQ ID NO: 32450 - protein, 223 aa, Pantoea eucalypti; identical to SEQ ID NO: 32440
  REGION 1..223: note = tr|A0A506P5X3|A0A506P5X3_9GAMM 7-carboxy-7-deazaguanine synthase OS=Pantoea eucalypti; OX = 470933 GN=queE PE=3 SV=1

SEQ ID NO: 32451 - protein, 223 aa, unidentified
  source 1..223: note = Pantoea latae
  REGION 1..223: note = tr|A0A1V9DCW4|A0A1V9DCW4_9GAMM 7-carboxy-7-deazaguanine synthase OS=Pantoea latae; OX = 1964541 GN=queE PE=3 SV=1
MQYPINEMFQTLQGEGFYTGVPAIFIRLQGCPVGCSWCDTKHTWEKRADRETALGDILIKTVESEAWGNADAALLIETIQRQGWTARHVVITGGEPAIYDLRPLTTALEAHGFQCQIETSGTHEVHCSDRTWVTVSPKVNMRGGYDVLAQALQRADEIKHPVARERDVEALDELLATLSDNKARIIALQPISRKDAATKLCIDTCIARNWRLSMQTHKYLNIA

SEQ ID NO: 32452 - protein, 223 aa, unidentified
  source 1..223: note = Pantoea rodasii
  REGION 1..223: note = tr|A0A0B1R509|A0A0B1R509_9GAMM 7-carboxy-7-deazaguanine synthase OS=Pantoea rodasii; OX = 1076549 GN=queE PE=3 SV=1
MFYPINEMFQTLQGEGFYTGVPALFIRLQGCPVGCSWCDTKHTWEKLADRETSLGDILVKTVESDAWGSADAAMLIETIQRQGWTARHVVITGGEPAIFDLRPLTEALEAAGFDCQIETSGTHEVQCSEATWVTVSPKVNMRGGYDVLPQALQRADEIKHPVARERDVEALDALLAGLHDDKNRIVALQPISRGDAATKLCIETCIARNWRLSMQTHKYLNIA

SEQ ID NO: 32453 - protein, 223 aa, unidentified
  source 1..223: note = Pantoea rodasii
  REGION 1..223: note = tr|A0A2M9W8F5|A0A2M9W8F5_9GAMM 7-carboxy-7-deazaguanine synthase OS=Pantoea rodasii; OX = 1076549 GN=queE PE=3 SV=1
MFYPINEMFQTLQGEGFYTGVPALFIRLQGCPVGCSWCDTKHTWEKLANRETSLGDILVKTVESDAWGSADAAMLIETIQRQGWTARHVVITGGEPAIFDLRPLTEALEAGGFDCQIETSGTHEVQCSDATWVTVSPKVNMRGGYDVLPQALQRADEIKHPVARERDVEALDVLLAGLHDDKKRIVALQPISRGDAATKLCIDTCIARNWRLSMQTHKYLNIA

SEQ ID NO: 32454 - protein, 223 aa, unidentified
  source 1..223: note = Pantoea rwandensis
  REGION 1..223: note = tr|A0A1X1CSD6|A0A1X1CSD6_9GAMM 7-carboxy-7-deazaguanine synthase OS=Pantoea rwandensis; OX = 1076550 GN=queE PE=3 SV=1
MFYPINEMFQTLQGEGFYTGVPALFIRLQGCPVGCSWCDTKHTWEKLADRETSLGDILIKTVESDAWGSADAAMLIETIQRQGWTARHVVITGGEPAIFDLRPLTEALEAAGFECQIETSGTHEVHCSDATWVTVSPKVNMRGGYDVLPQALQRADEIKHPVARERDVEALDVLLAGLHDDKKRIVALQPISRGDAATKLCIDTCIARNWRLSMQTHKYLNIA

SEQ ID NO: 32455 - protein, 223 aa, unidentified; identical to SEQ ID NO: 29891
  source 1..223: note = Pantoea sesami
  REGION 1..223: note = tr|A0A1M5UH68|A0A1M5UH68_9GAMM 7-carboxy-7-deazaguanine synthase OS=Pantoea sesami; OX = 1881110 GN=queE PE=3 SV=1

SEQ ID NO: 32456 - protein, 223 aa, Pantoea sp.
  REGION 1..223: note = tr|A0A2S4RNZ6|A0A2S4RNZ6_9GAMM 7-carboxy-7-deazaguanine synthase OS=Pantoea sp. PSNIH5; OX = 1758192 GN=queE PE=3 SV=1
MQYPINEMFQTLQGEGFYTGVPAIFIRLQGCPVGCSWCDTKHTWDKLADRETSLGDILIKTVESDAWGAADADALLATIKRQQWTARHVVITGGEPCIHDLTPLTAALQQAGFSCQIETSGTHEVQCSPETWVTVSPKVNMRGGYDVLNQALARADEIKHPVARQRDIDALDELLARLEDEKARIVALQPISQKEDATRLCIATCIARNWRLSMQTHKYLNIA

SEQ ID NO: 32457 - protein, 223 aa, Pantoea sp.; identical to SEQ ID NO: 29506
  REGION 1..223: note = tr|A0A519R615|A0A519R615_9GAMM 7-carboxy-7-deazaguanine synthase OS=Pantoea sp. OX=69393; GN = queE PE=3 SV=1

SEQ ID NO: 32458 - protein, 223 aa, Pantoea stewartii
  REGION 1..223: note = tr|H3RGW0|H3RGW0_PANSE 7-carboxy-7-deazaguanine synthase OS=Pantoea stewartii subsp. stewartii DC283; OX = 660596 GN=ygcF PE=3 SV=1
MQYPINEMFQTLQGEGYYTGVPAIFIRLQGCPVGCSWCDTKHTWEKQADRETALGDILVKTVESDAWGNADVPMLLSSIAQQGWTARHIVITGGEPAIYDLRPLTDALEAAGFQCQIETSGTHEIHCSAQTWVTVSPKVNMRGGYDVLAQALSRADEIKHPVARQRDVEALDDLLAGIQDTKARIIALQPISRKDDATKLCIETCIARNWRLSMQTHKYLNIA

SEQ ID NO: 32459 - protein, 223 aa, Pantoea vagans
  REGION 1..223: note = tr|E1SC31|E1SC31_PANVC 7-carboxy-7-deazaguanine synthase OS=Pantoea vagans (strain C9-1) OX=712898 GN=queE; PE = 3 SV=1
MFYPINEMFQTLQGEGYYTGVPAIFIRLQGCPVGCSWCDTKHTWEKRADRETSLGDILIKTVESDAWGDADASTLLRSIEQQGWTARHVVITGGEPAIYDLRPLTTILEQHGFQCQIETSGTHEIHCSEQTWVTVSPKVNMRGGYDVLPQALSRADEIKHPVARQRDVDALDGLLAGIDDTKARIIALQPISRKDDATRLCIETCIARNWRLSMQTHKYLNIA

SEQ ID NO: 32460 - protein, 223 aa, Pantoea vagans
  REGION 1..223: note = tr|A0A2R4JB76|A0A2R4JB76_9GAMM 7-carboxy-7-deazaguanine synthase OS=Pantoea vagans; OX = 470934 GN=queE PE=3 SV=1
MFYPINEMFQTLQGEGYYTGVPAIFIRLQGCPVGCSWCDTKHTWEKRADRETSLGDILIKTVESDAWGDADAVTLLRSIEQQGWTARHVVITGGEPAIYDLRPLTTILEQHGFQCQIETSGTHEIHCSEQTWVTVSPKVNMRGGYDVLPQALSRADEIKHPVARQRDVDALDGLLAGIDDTKARIIALQPISRKDDATRLCIETCIARNWRLSMQTHKYLNIA

SEQ ID NO: 32461 - protein, 223 aa, unidentified
  source 1..223: note = Pantoea wallisii
  REGION 1..223: note = tr|A0A1X1DA69|A0A1X1DA69_9GAMM 7-carboxy-7-deazaguanine synthase OS=Pantoea wallisii; OX = 1076551 GN=queE PE=3 SV=1
MFYPINEMFQTLQGEGFYTGVPAIFIRLQGCPVGCSWCDTKHTWEKHADRETSLGDILVKTVESDAWGSADAATLIETIQRQGWTARHIVITGGEPAIFDLRPLTDALEAGGFQCQIETSGTHEVHCSAATWVTVSPKVNMRGGYDVLPQALQRADEIKHPVARERDVEALDALLAGLGDEKKRIVALQPISRGDAATKLCIETCIARNWRLSMQTHKYLNIA

SEQ ID NO: 32462 - protein, 180 aa, unidentified
  source 1..180: note = Parabacteroides acidifaciens
  REGION 1..180: note = tr|A0A3D8HF56|A0A3D8HF56_9BACT 7-carboxy-7-deazaguanine synthase OS=Parabacteroides acidifaciens OX=2290935 GN=queE PE=3 SV=1
MRKINEIFYSLQGEGFHTGTPAVFIRFSGCNLKCSFCDTRHEDGTLMSDEEILQAVSAYPSNVVILTGGEPSLWIDQSFIDLLHQAGKYICIETNGTNPLPEGIDWVTCSPKGAPLRLTHIDEIKVVYTGQDLTAYANLKASWHFLQPCSCQNTKEVVEYILHHPLWRLSLQTHKLIDIN

SEQ ID NO: 32463 - protein, 181 aa, unidentified
  source 1..181: note = Parabacteroides chinchillae
  REGION 1..181: note = tr|A0A1H5Y8R5|A0A1H5Y8R5_9BACT 7-carboxy-7-deazaguanine synthase OS=Parabacteroides chinchillae OX=871327 GN=queE PE=3 SV=1
MRKINEIFYSLQGEGFHAGTPAIFIRFSGCNLKCNFCDTQHESGELMSDKDILQTIDGYPANMVILTGGEPSLWIDDLFIKQLHQAGKIVCIETNGTRSIPASIDWVTCSPKQDAPVLLNRMDEVKVVYTGQDVSPYLELPAQHHYLQPCSCKNTKEVVDYILAHPKWKLSLQTHKLIHIQ

SEQ ID NO: 32464 - protein, 181 aa, Parabacteroides distasonis
  REGION 1..181: note = tr|A0A174VK93|A0A174VK93_9BACT 7-carboxy-7-deazaguanine synthase OS=Parabacteroides distasonis OX=823 GN=queE PE=3 SV=1
MRKINEIFYSLQGEGFHTGTPAVFVRFSGCNLRCSFCDTRHEEGVMMTDEEIVEKVSSFPARMVILTGGEPSLWIDKALISRLREAGKQICIETNGTRPLPDGIDWVTCSPKENAPVVLERVDEIKVVYTGQDLSAYAEIPARYHFLQPCSCQNTKEVVDYILRHPRWRLSLQTHKLIDIQ

SEQ ID NO: 32465 - protein, 181 aa, Parabacteroides distasonis
  REGION 1..181: note = tr|A0A3L7ZZ39|A0A3L7ZZ39_9BACT 7-carboxy-7-deazaguanine synthase OS=Parabacteroides distasonis OX=823 GN=queE PE=3 SV=1
MRKINEIFYSLQGEGFHTGTPAVFVRFSGCNLRCGFCDTRHEEGVMMTDEEIVEKVSSFPARMVILTGGEPSLWIDKSLISRLREAGKQVCIETNGTRPLPDGIDWVTCSPKENAPVVLERIDEIKVVYTGQDLSAYAEMPARYHFLQPCSCRNTEEVVDYILRHPRWRLSLQTHKLIDIR

SEQ ID NO: 32466 - protein, 181 aa, Parabacteroides goldsteinii
  REGION 1..181: note = tr|K5Y108|K5Y108_9BACT 7-carboxy-7-deazaguanine synthase OS=Parabacteroides goldsteinii CL02T12C30; OX = 999418 GN=queE PE=3 SV=1
MRKINQIFYSLQGEGFYTGRAAVFIRFSGCNLKCSFCDTEHEEGTLMSDEEILEAISAYPSDMVILTGGEPALWIDKAFIDMLHKAGKYICIETNGTRPLPKGIDWVTCSPKEGAPLKIDHMDEVKVVYLGQDLSSYIKLPAKYHFLQPCSCRNTMEIVNYILQHPEWQLSLQTHKLIDIA

SEQ ID NO: 32467 - protein, 181 aa, Parabacteroides goldsteinii
  REGION 1..181: note = tr|A0A0J6C6V0|A0A0J6C6V0_9BACT 7-carboxy-7-deazaguanine synthase OS=Parabacteroides goldsteinii OX=328812 GN=queE PE=3 SV=1
MRKINQIFYSLQGEGFYTGRAAVFIRFSGCNLKCSFCDTEHEEGTLMSDEEILEAISAYPSDMVILTGGEPALWIDEAFIDMLHKAGKYICIETNGTRPLPKGIDWVTCSPKEGAPLKIDHMDEVKVVYLGQDLSSYIKLPAKYHFLQPCSCRNTMEIVNYILQHPEWQLSLQTHKLIDIA

SEQ ID NO: 32468 - protein, 190 aa, Parabacteroides gordonii
  REGION 1..190: note = tr|A0A0F5J8S1|A0A0F5J8S1_9BACT 7-carboxy-7-deazaguanine synthase OS=Parabacteroides gordonii MS-1 = DSM 23371 OX=1203610 GN=queE PE=3 SV=1
MNQNQTQRSMRKINQIFYSLQGEGYHTGKAAVFIRFSGCNLKCSFCDTEHEEGTLMSDEEIIRTISAYPSNLVVLTGGEPALWIDEEFIDLLHKEGKYICIETNGTRKLPANIDWVTCSPKEGAPICIDRMDEVKVVYLGQDLSSYINLPAKHHYIQPCSCRNTPEIVEYILQHPEWQLSLQTHKLIDIP

SEQ ID NO: 32469 - protein, 180 aa, Parabacteroides johnsonii
  REGION 1..180: note = tr|B7B7W9|B7B7W9_9BACT 7-carboxy-7-deazaguanine synthase OS=Parabacteroides johnsonii DSM 18315 OX=537006; GN = queE PE=3 SV=1
MRKINEIFYSLQGEGFHTGTPAVFVRFSGCNLKCSFCDTRHEEGILMSDEDILQAISAFPSNVVILTGGEPSLWIDQTFIDLLHMAGKYICIETNGTNPLPEGIDWVTCSPKGFPLRLAHIDEVKVVYTGQDLTEYAGLEATWHFLQPCSCLNTKEVVEYILHHPQWRLSLQTHKLIDIS

SEQ ID NO: 32470 - protein, 180 aa, Parabacteroides johnsonii
  REGION 1..180: note = tr|K5YS86|K5YS86_9BACT 7-carboxy-7-deazaguanine synthase OS=Parabacteroides johnsonii CL02T12C29 OX=999419; GN = queE PE=3 SV=1
MRKINEIFYSLQGEGFHTGTPAVFVRFSGCNLKCSFCDTRHEEGILMSDEDILQAISAFPSNVVILTGGEPSLWIDQTFIDLLHMAGKYICIETNGTNPLPEGIDWVTCSPKGFPLRLAHIDEVKVVYTGQDLTEYAGLKATWHFLQPCSCLNTKEVVEYILHHPQWRLSLQTHKLIHIS

SEQ ID NO: 32471 - protein, 181 aa, Parabacteroides merdae
  REGION 1..181: note = tr|A0A4Q5CCM8|A0A4Q5CCM8_9BACT 7-carboxy-7-deazaguanine synthase OS=Parabacteroides merdae OX=46503 GN=queE PE=3 SV=1
MKKINEIFYSIQGEGYFTGTPTVFVRFSGCNLRCPFCDTEHKEGKMLSDDDIIAEINRYPVLHVVLTGGEPCMQVTYDLVDKIKATGRFVQIETNGTLVPPVNIDWITCSPKDGGKTVVINPNELKVVYIGQDMSQYDKYSAGIYYLQPCSGQNTKEVINYIKEHPKWKLSLQTHKILNVR

SEQ ID NO: 32472 - protein, 180 aa, Parabacteroides merdae
  REGION 1..180: note = tr|A0A412LT92|A0A412LT92_9BACT 7-carboxy-7-deazaguanine synthase OS=Parabacteroides merdae OX=46503 GN=queE PE=3 SV=1
MRKINEIFYSLQGEGFHTGTPAVFVRFSGCNLKCSFCDTRHEEGILMSDEEILRAISAFPSNVVILTGGEPSLWIDQAFIDLLHRAGKYICIETNGTKPLPKGIDWVTCSPKGTPLQLTHIDEVKVVYTGQDLTEYTGLEATWHFLQPCSCRNTKEVVEYILHHPQWRLSLQTHKLINIR

SEQ ID NO: 32473 - protein, 181 aa, Parabacteroides sp.; identical to SEQ ID NO: 32464
  REGION 1..181: note = tr|E1YVT4|E1YVT4_9BACT 7-carboxy-7-deazaguanine synthase OS=Parabacteroides sp. 20_3 OX=469591 GN=queE; PE = 3 SV=1

SEQ ID NO: 32474 - protein, 181 aa, Parabacteroides sp.
  REGION 1..181: note = tr|C7XB66|C7XB66_9BACT 7-carboxy-7-deazaguanine synthase OS=Parabacteroides sp. D13 OX=563193 GN=queE PE=3; SV = 1
MRKINEIFYSLQGEGFHTGTPAVFVRFSGCNLRCGFCDTRHEEGVMMTDEEIVEKVSSFPARMVILTGGEPSLWIDKALISRLREAGKQICIETNGTRPLPDGIDWVTCSPKENAPVVLERVDEIKVVYTGQDLSAYAEIPARYHFLQPCSCQNTKEVVDYILRHPRWRLSLQTHKLIDIQ

SEQ ID NO: 32475 - protein, 210 aa, unidentified
  source 1..210: note = Paraburkholderia aromaticivorans
  REGION 1..210: note = tr|A0A248VFB1|A0A248VFB1_9BURK 7-carboxy-7-deazaguanine synthase OS=Paraburkholderia aromaticivorans OX=2026199 GN=queE PE=3 SV=1
MTYAVKEIFYTLQGEGANAGRPAVFCRFAGCNLWSGREEDRAEAVCRFCDTDFVGTDGENGGKYRTAEELVQMIASQWPQGEGERFVVCTGGEPMLQIDPPLVDALHAAGFEIAIETNGSLPVLETIDWICVSPKADAPLVVTRGNELKVVIPQDNQRLSEYAKLDFEYFLVQPMDGPSRDINTKLAIDWCKRHPQWRLSMQTHKYLNIP

SEQ ID NO: 32476 - protein, 210 aa, unidentified
  source 1..210: note = Paraburkholderia aspalathi
  REGION 1..210: note = tr|A0A1I7CGD5|A0A1I7CGD5_9BURK 7-carboxy-7-deazaguanine synthase OS=Paraburkholderia aspalathi OX=1324617 GN=queE PE=3 SV=1
MTYAVKEIFYTLQGEGANAGRPAVFCRFAGCNLWSGREEDRADAVCRFCDTDFVGTDGENGGKYRTPEELVQMIASQWPEGEGERFVVCTGGEPMLQIDQPFVDALHAAGFEIAIETNGSLPVLETIDWICVSPKADAPLVVTKGNELKVVIPQDNQRLSEYAKLDFEYFLVQPMDGPSRDLNTKLAIDWCKRHPQWRLSMQTHKYLNIP

SEQ ID NO: 32477 - protein, 210 aa, unidentified
  source 1..210: note = Paraburkholderia azotifigens
  REGION 1..210: note = tr|A0A5C6VTR2|A0A5C6VTR2_9BURK 7-carboxy-7-deazaguanine synthase OS=Paraburkholderia azotifigens OX=2057004 GN=queE PE=3 SV=1
MTYAVKEIFYTLQGEGANAGRPAVFCRFAGCNLWSGREEDRAQAVCKFCDTDFVGTDGENGGKFRTPEELAAKIASLWPEGEGQRFVVCTGGEPMLQIDQPLVDALHAQGFEIAIETNGSLPVLDTIDWICVSPKADAPLVQTKGNELKVVVPQDNQRLADYAKLEFDYFLVQPMDGPSRDINTKLAIDWCKRHPQWRLSMQTHKYLNIP

SEQ ID NO: 32478 - protein, 210 aa, unidentified
  source 1..210: note = Paraburkholderia bryophila
  REGION 1..210: note = tr|A0A329C051|A0A329C051_9BURK 7-carboxy-7-deazaguanine synthase OS=Paraburkholderia bryophila OX=420952 GN=queE PE=3 SV=1
MTYAVKEIFYTLQGEGANAGRPAVFCRFAGCNLWSGREEDRADAVCRFCDTDFVGTDGENGGKYRTPEELVQMIASQWPEGEGERFVVCTGGEPMLQIDSPLVDALHAAGFEIAIETNGSLPVLETIDWICVSPKADAPLVVTKGNELKVVIPQDNQRLSEYAKLDFEYFLVQPMDGPSRDLNTKLAIDWCKRHPQWRLSMQTHKYLNIP

SEQ ID NO: 32479 - protein, 210 aa, unidentified
  source 1..210: note = Paraburkholderia caballeronis
  REGION 1..210: note = tr|A0A1H7HCU2|A0A1H7HCU2_9BURK 7-carboxy-7-deazaguanine synthase OS=Paraburkholderia caballeronis OX=416943 GN=queE PE=3 SV=1
MTYAVKEIFYTLQGEGANAGRPAVFCRFAGCNLWSGREEDRSDAVCRFCDTDFVGTDGENGGKYRSAEELVAKIASLWPEGEGNRFVVCTGGEPMLQIDPPFVDALHAAGFEIAIETNGSLPVLDTIDWICVSPKADAPLVVTKGNELKVVVPQDNQRLADYAKLDFQYFLVQPMDGPSRDLNTKLAIDWCKRHPQWRLSMQTHKYLNIP

SEQ ID NO: 32480 - protein, 210 aa, unidentified
  source 1..210: note = Paraburkholderia caribensis
  REGION 1..210: note = tr|A0A0P0R5B7|A0A0P0R5B7_9BURK 7-carboxy-7-deazaguanine synthase OS=Paraburkholderia caribensis MBA4 OX=1323664 GN=queE PE=3 SV=1
MTYAVKEIFYTLQGEGANAGRPAVFCRFAGCNLWSGREEDRADAVCQFCDTDFVGTDGENGGKFRTPEELAAKIASLWPEGEGQRFVVCTGGEPMLQMDQPLVDALHAQGFEIAIETNGSLPVLDTIDWICVSPKADAPLVQTKGNELKVVVPQENQRLADYAKLDFDYFLVQPMDGPSRDINTKLAIDWCKRHPQWRLSMQTHKYLNIP

SEQ ID NO: 32481 - protein, 210 aa, unidentified
  source 1..210: note = Paraburkholderia caribensis
  REGION 1..210: note = tr|A0A2T3YLC4|A0A2T3YLC4_9BURK 7-carboxy-7-deazaguanine synthase OS=Paraburkholderia caribensis OX=75105 GN=queE PE=3 SV=1
MTYAVKEIFYTLQGEGANAGRPAVFCRFAGCNLWSGREEDRADAVCQFCDTDFVGTDGENGGKFRTPEELAAKIASLWPEGEGQRFVVCTGGEPMLQIDQPLVDAFHAQGFEIAIETNGSLPVLDTIDWICVSPKADAPLVQTKGNELKVVVPQENQRLADYAKLDFDYFLVQPMDGPSRDINTKLAIDWCKRHPQWRLSMQTHKYLNIP

SEQ ID NO: 32482 - protein, 235 aa, unidentified
  source 1..235: note = Paraburkholderia diazotrophica
  REGION 1..235: note = tr|A0A1H7EFD1|A0A1H7EFD1_9BURK 7-carboxy-7-deazaguanine synthase OS=Paraburkholderia diazotrophica OX=667676 GN=queE PE=3 SV=1
MQCDVSSVAVPPVGSYPVNEIFESLQGEGSFTGTPSVFVRLQGCPVGCAWCDSKHTWQVMPEREISVGAMGDKTGRPCDSYAWCDVPTLANIVRAADAEHVVITGGEPCMYDLRPLIAKLEAWHHRVQVETSGTYVPLVTPSTFVTTSPKYGMPSGRPVLDEALARANEIKYPVGKQRDIDIVLERLDPIQRARGTPIWLQPLSLSSRATGICMKAAHRYGWRVSLQTNKFINIR

SEQ ID NO: 32483 - protein, 210 aa, unidentified
  source 1..210: note = Paraburkholderia diazotrophica
  REGION 1..210: note = tr|A0A1H6RE95|A0A1H6RE95_9BURK 7-carboxy-7-deazaguanine synthase OS=Paraburkholderia diazotrophica OX=667676 GN=queE PE=3 SV=1
MTYAVKEIFYTLQGEGANAGRPAVFCRFAGCNLWSGREEDRADAVCKFCDTDFVGTDGENGGKFRTPEELAAKIASLWPEGEDQRFVVCTGGEPMLQIDQPFVDALHAAGFEIAIETNGSLPVLDTIDWICVSPKADAPLVQTKGNELKVVVPQENQRLADYAKLDFDYFLVQPMDGPSRDINTKLAIDWCKRHPQWRLSMQTHKYLNIP

SEQ ID NO: 32484 - protein, 210 aa, unidentified
  source 1..210: note = Paraburkholderia dipogonis
  REGION 1..210: note = tr|A0A4Y8N7H7|A0A4Y8N7H7_9BURK 7-carboxy-7-deazaguanine synthase OS=Paraburkholderia dipogonis OX=1211383 GN=queE PE=3 SV=1
MTYAVKEIFYTLQGEGANAGRPAVFCRFAGCNLWSGREEDRAEAVCRFCDTDFVGTDGENGGKYRTADDLVKMIASQWPEGEGERFVVCTGGEPMLQIDQPLVDALHAAGFEIAIETNGSLPVLETIDWICVSPKADAPLVVTKGNELKVVIPQDNQRLSEYAKLDFEYFLVQPMDGPSRDLNTRLAIDWCKRHPQWRLSMQTHKYLNIP

SEQ ID NO: 32485 - protein, 210 aa, unidentified
  source 1..210: note = Paraburkholderia eburnea
  REGION 1..210: note = tr|A0A2S4MP40|A0A2S4MP40_9BURK 7-carboxy-7-deazaguanine synthase OS=Paraburkholderia eburnea OX=1189126 GN=queE PE=3 SV=1
MTYAVKEIFYTLQGEGANAGRPAVFCRFAGCNLWSGREEDRESAQCRFCDTDFVGTDGENGGKFRTPEELVAKIASLWPEGEGNRFVVCTGGEPMLQIDQPFVDALHAAGFEIAIETNGSLPVLETIDWICVSPKADAPLVVTRGNELKVVVPQDNQRLADYAKLDFEYFLVQPMDGPSRDLNTKLAIDWCKRHPQWRLSMQTHKYLNIP

SEQ ID NO: 32486 - protein, 231 aa, unidentified
  source 1..231: note = Paraburkholderia endofungorum
  REGION 1..231: note = tr|A0A2P5KD99|A0A2P5KD99_9BURK 7-carboxy-7-deazaguanine synthase OS=Paraburkholderia endofungorum OX=417203 GN=queE PE=3 SV=1
MAGALILRRFDASGAGSEMTYAVKEIFYTLQGEGANAGRPAVFCRFAGCNLWSGREQDRADAVCRFCDTDFVGTDGENGGKYRDADALVAKIASLWPPGEVAAQYRFVVCTGGEPMLQLDAALIDALHRERFVIAIETNGTLPVLPGIDWVCVSPKAGSSLVVTRGNELKVVIPQDNQQLSEYARLDFEHFLVQPMDGPSRELNTKLAVDWCKRHPQWRLSMQTHKYLNIP

SEQ ID NO: 32487 - protein, 210 aa, unidentified
  source 1..210: note = Paraburkholderia fungorum
  REGION 1..210: note = tr|A0A0D5VAV5|A0A0D5VAV5_9BURK 7-carboxy-7-deazaguanine synthase OS=Paraburkholderia fungorum OX=134537 GN=queE PE=3 SV=1
MTYAVKEIFYTLQGEGANAGRPAVFCRFAGCNLWSGREEDRAEAVCRFCDTDFVGTDGENGGKYRTPEELVQMIASQWPEGEGERFVVCTGGEPMLQIDQPFVDALHAAGFEIAIETNGSLPVLETIDWICVSPKADAPLVVTKGNELKVVIPQDNQRLSEYAKLDFEYFLVQPMDGPSRELNTKLAIDWCKRHPQWRLSMQTHKYLNIP

SEQ ID NO: 32488 - protein, 210 aa, unidentified
  source 1..210: note = Paraburkholderia fungorum
  REGION 1..210: note = tr|A0A1H0YZA8|A0A1H0YZA8_9BURK 7-carboxy-7-deazaguanine synthase OS=Paraburkholderia fungorum OX=134537 GN=queE PE=3 SV=1
MTYAVKEIFYTLQGEGANAGRPAVFCRFAGCNLWSGREEDRAEAVCRFCDTDFVGTDGENGGKYRTAEDLVAMIASLWPEGEGERFVVCTGGEPMLQIDQPLVDALHAAGFEIAIETNGSMPVLETIDWICVSPKADAPLVVTKGNELKVVIPQDNQRLSEYAKLDFEYFLVQPMDGPSRDINTKLAIDWCKRHPQWRLSMQTHKYLNIP

SEQ ID NO: 32489 - protein, 210 aa, unidentified
  source 1..210: note = Paraburkholderia ginsengiterrae
  REGION 1..210: note = tr|A0A1A9NBH8|A0A1A9NBH8_9BURK 7-carboxy-7-deazaguanine synthase OS=Paraburkholderia ginsengiterrae OX=1462993 GN=queE PE=3 SV=1
MTYAVKEIFYTLQGEGANAGRPAVFCRFAGCNLWSGREEDRAEAVCRFCDTDFVGTDGENGGKYRTAAELVQMIASQWPEGEGQRFVVCTGGEPMLQIDPPLVDALHAAGFEIAIETNGSLPVLETIDWICVSPKADAPLVVTKGNELKVVIPQDNQRLSEYAKLDFEYFLVQPMDGPSRDINTRLAIDWCKRHPQWRLSMQTHKYLNIP

SEQ ID NO: 32490 - protein, 210 aa, unidentified
  source 1..210: note = Paraburkholderia graminis
  REGION 1..210: note = tr|B1G3M7|B1G3M7_PARG4 7-carboxy-7-deazaguanine synthase OS=Paraburkholderia graminis (strain ATCC 700544 / DSM 17151 / LMG 18924 / NCIMB 13744 / C4D1M) OX=396598; GN = queE PE=3 SV=1
MTYAVKEIFYTLQGEGANAGRPAVFCRFAGCNLWSGREEDRADAVCRFCDTDFVGTDGENGGKYRTAADLVQMIASQWPEGEGQRFVVCTGGEPMLQIDQPLVDALHAAGFEIAIETNGSLPVLETIDWICVSPKADAPLVVTKGNELKVVIPQDNQRLSDYAKLDFDYFLVQPMDGPSRDINTRLAIDWCKRHPQWRLSMQTHKYLNIP

SEQ ID NO: 32491 - protein, 210 aa, unidentified
  source 1..210: note = Paraburkholderia hospita
  REGION 1..210: note = tr|A0A1H6I049|A0A1H6I049_9BURK 7-carboxy-7-deazaguanine synthase OS=Paraburkholderia hospita OX=169430 GN=queE PE=3 SV=1
MTYAVKEIFYTLQGEGANAGRPAVFCRFAGCNLWSGREEDRADAVCQFCDTDFVGTDGENGGKFRTPEELAAKIASLWPEGEGQRFVVCTGGEPMLQIDQPLVDALHAQGFEIAIETNGSLPVLDTIDWICVSPKADAPLVQTRGNELKVVVPQENQRLADYAKLDFDYFLVQPMDGPSRDINTKLAIDWCKRHPQWRLSMQTHKYLNIP

SEQ ID NO: 32492 - protein, 210 aa, unidentified
  source 1..210: note = Paraburkholderia hospita
  REGION 1..210: note = tr|A0A244DH23|A0A244DH23_9BURK 7-carboxy-7-deazaguanine synthase OS=Paraburkholderia hospita OX=169430 GN=queE PE=3 SV=1
MTYAVKEIFYTLQGEGANAGRPAVFCRFAGCNLWSGREEDRDDAVCQFCDTDFVGTDGENGGKFRTPEELAAKIASLWPEGEGQRFVVCTGGEPMLQIDQPLVDALHAQGFEIAIETNGSLPVLDTIDWICVSPKADAPLVQTRGNELKVVVPQENQRLADYAKLDFDYFLVQPMDGPSRDINTKLAIDWCKRHPQWRLSMQTHKYLNIP

SEQ ID NO: 32493 - protein, 210 aa, unidentified; identical to SEQ ID NO: 32487
  source 1..210: note = Paraburkholderia insulsa
  REGION 1..210: note = tr|A0A2T1B4E6|A0A2T1B4E6_9BURK 7-carboxy-7-deazaguanine synthase OS=Paraburkholderia insulsa OX=1441714 GN=queE PE=3 SV=1

SEQ ID NO: 32494 - protein, 210 aa, unidentified
  source 1..210: note = Paraburkholderia megapolitana
  REGION 1..210: note = tr|A0A1I3UX37|A0A1I3UX37_9BURK 7-carboxy-7-deazaguanine synthase OS=Paraburkholderia megapolitana OX=420953 GN=queE PE=3 SV=1
MTYAVKEIFYTLQGEGANAGRPAVFCRFAGCNLWSGREEDRADAVCRFCDTDFVGTDGENGGKYRSAEELVAMIAAQWPQGEDNRFVVCTGGEPMLQMDPPFVDALHAAGFEIAIETNGSLPVLETIDWICVSPKADAPLVVTKGNELKVVVPQDNQRLADYAKLEFDYFLVQPMDGPSRDINTKLAIDWCKRHPQWRLSMQTHKYLNIP

SEQ ID NO: 32495 - protein, 210 aa, unidentified
  source 1..210: note = Paraburkholderia monticola
  REGION 1..210: note = tr|A0A149PXZ6|A0A149PXZ6_9BURK 7-carboxy-7-deazaguanine synthase OS=Paraburkholderia monticola OX=1399968 GN=queE PE=3 SV=1
MTYVVKEIFYTLQGEGANAGRPAVFCRFAGCNLWSGREEDRAEAVCRFCDTDFVGTDGENGGKYRTPDELVAMIASQWPQGEGERFVVCTGGEPMLQLDQPLVDALHAAGFEIAIETNGSLPVLDTIDWICVSPKADAPLVVTKGNELKVVIPQDNQRLADYAKLDFEYFLVQPMDGPSRDINTKLAIDWCKRHPQWRLSMQTHKYLNIP

SEQ ID NO: 32496 - protein, 210 aa, unidentified
  source 1..210: note = Paraburkholderia phenazinium
  REGION 1..210: note = tr|A0A1G7PHU0|A0A1G7PHU0_9BURK 7-carboxy-7-deazaguanine synthase OS=Paraburkholderia phenazinium OX=60549 GN=queE PE=3 SV=1
MTYAVKEIFYTLQGEGANAGRPAVFCRFAGCNLWSGREEDRAEAVCRFCDTDFVGTDGENGGKYRTADELVAMIASQWPEGEGQRFVVCTGGEPMLQIDQPFVDALHAAGFEIAIETNGSLPVLETIDWICVSPKADAPLVVTKGNELKVVIPQDNQRLSEYAALDFEYFLVQPMDGPSRDINTKLAIDWCKRHPQWRLSMQTHKYLNIP

SEQ ID NO: 32497 - protein, 210 aa, unidentified
  source 1..210: note = Paraburkholderia phenazinium
  REGION 1..210: note = tr|A0A1N6L6L4|A0A1N6L6L4_9BURK 7-carboxy-7-deazaguanine synthase OS=Paraburkholderia phenazinium OX=60549 GN=queE PE=3 SV=1
MTYAVKEIFYTLQGEGANAGRPAVFCRFAGCNLWSGREEDRAEAVCRFCDTDFVGTDGENGGKYRSAADLVAMIAAQWPEGEGERFVVCTGGEPMLQMDQPFVDALHAAGFEIAIETNGSLPVLETIDWICVSPKADAPLVVTKGNELKVVIPQDNQRLSEYAALDFEYFLVQPMDGPSRDINTKLAIDWCKRHPQWRLSMQTHKYLNIP

SEQ ID NO: 32498 - protein, 235 aa, unidentified
  source 1..235: note = Paraburkholderia phenoliruptrix
  REGION 1..235: note = tr|K0DWI6|K0DWI6_9BURK 7-carboxy-7-deazaguanine synthase OS=Paraburkholderia phenoliruptrix BR3459a; OX = 1229205 GN=queE PE=3 SV=1
MQCEVPSVAVPPVCSYPVNEIFESLQGEGSFTGTPSVFVRLQGCLVGCPWCDSKHTWQVMPEREISVGAMGEKTGRPCDSYAWCDVPTLANIVRAADAEHVVITGGEPCMYDLRPLIAKLEAWHHRVQVETSGTYVPLVTPSTFVTTSPKYEMPSGRPVLDEALARANEIKCPVGKQRDIDIVLERLDPIQRARGTPIWLQPLSLSPRATGICMKAAHRYGWRVSLQTNKLINIR

SEQ ID NO: 32499 - protein, 210 aa, unidentified
  source 1..210: note = Paraburkholderia phenoliruptrix
  REGION 1..210: note = tr|K0DHM4|K0DHM4_9BURK 7-carboxy-7-deazaguanine synthase OS=Paraburkholderia phenoliruptrix BR3459a; OX = 1229205 GN=queE PE=3 SV=1
MTYAVKEIFYTLQGEGANAGRPAVFCRFAGCNLWSGREEDRAEAVCRFCDTDFVGTDGENGGKYRTPEELVQMIASQWPEGEGQRFVVCTGGEPMLQIDAPLVDALHAAGFEIAIETNGSLPVLETIDWICVSPKADAPLVVTKGNELKVVIPQDNQRLSDYAKLDFEYFLVQPMDGPSRDINTRLAIDWCKRHPQWRLSMQTHKYLNIP

SEQ ID NO: 32500 - protein, 210 aa, unidentified
  source 1..210: note = Paraburkholderia phymatum
  REGION 1..210: note = tr|B2JJV2|B2JJV2_PARP8 7-carboxy-7-deazaguanine synthase OS=Paraburkholderia phymatum (strain DSM 17167 / CIP 108236 / LMG 21445 / STM815) OX=391038 GN=queE PE=3; SV = 1
MTYAVKEIFYTLQGEGANAGRPAVFCRFAGCNLWSGREEDRADAVCKFCDTDFVGTDGENGGKFRTPEELAAKIASLWPEGEDQRFVVCTGGEPMLQIDQPLVDALHAQGFEIAIETNGSLPVLDTIDWICVSPKAGAPLVQTKGNELKVVVPQDNQRLADYAKLEFDYFLVQPMDGPSRDINTKLAIDWCKRHPQWRLSMQTHKYLNIP

SEQ ID NO: 32501 - protein, 235 aa, unidentified
  source 1..235: note = Paraburkholderia phymatum
  REGION 1..235: note = tr|B2JY77|B2JY77_PARP8 7-carboxy-7-deazaguanine synthase OS=Paraburkholderia phymatum (strain DSM 17167 / CIP 108236 / LMG 21445 / STM815) OX=391038 GN=queE PE=3; SV = 1
MHCDVPSVAVPPVGSYPVNEIFESLQGEGNFTGTPSVFVRLQGCPVGCAWCDSKHTWQVMPEREISVGAMGEKTGRPCDSYAWCDVPTLANIVRAADAEHVVITGGEPCMYDLRPLIAKLQAWHHRVQVETSGTYVPLVTPSTFVTTSPKYGMPSGRPVLDEALERANEIKYPVGKQRDIDIVLERLDPIQRARGTPIWLQPLSLSSRATGICMKAAHRYGWRVSLQTNKFINIR

SEQ ID NO: 32502 - protein, 210 aa, unidentified
  source 1..210: note = Paraburkholderia phytofirmans
  REGION 1..210: note = tr|B2T1L4|B2T1L4_PARPJ 7-carboxy-7-deazaguanine synthase OS=Paraburkholderia phytofirmans (strain DSM 17436 / LMG 22146 / PsJN) OX=398527 GN=queE PE=3 SV=1
MTYAVKEIFYTLQGEGANAGRPAVFCRFAGCNLWSGREEDRAEAVCRFCDTDFVGTDGENGDKYRTADDLVKMIAAQWPEGEGERFVVCTGGEPMLQIDQPLVDALHAAGFEIAIETNGSLPVLETIDWICVSPKADAPLVVTKGNELKVVIPQDNQRLSEYAKLDFEYFLVQPMDGPSRDLNTRLAIDWCKRHPQWRLSMQTHKYLNIP

SEQ ID NO: 32503 - protein, 235 aa, unidentified
  source 1..235: note = Paraburkholderia piptadeniae
  REGION 1..235: note = tr|A0A1N7SL85|A0A1N7SL85_9BURK 7-carboxy-7-deazaguanine synthase OS=Paraburkholderia piptadeniae OX=1701573 GN=queE PE=3 SV=1
MQCDVPSVAVPPVGSYPVNEIFESLQGEGSFTGTPSVFVRLQGCPVGCAWCDSKHTWQVMPEREISVGAMGEKTGRPCDSYAWCDVPTLANIVRAADAEHVVITGGEPCMYDLRPLIAKLEAWHHRVQVETSGTYVPLVTPSTFVTASPKYGMPSGRPVLDEALARANEIKYPVGKQRDIDIVLERLDPIQRARGTPIWLQPLSLSSRATGICMKAAHRYGWRVSLQTNKFINIR

SEQ ID NO: 32504 - protein, 210 aa, unidentified
  source 1..210: note = Paraburkholderia piptadeniae
  REGION 1..210: note = tr|A0A1N7RJC1|A0A1N7RJC1_9BURK 7-carboxy-7-deazaguanine synthase OS=Paraburkholderia piptadeniae OX=1701573 GN=queE PE=3 SV=1
MTYAVKEIFYTLQGEGANAGRPAVFCRFAGCNLWSGREEDRADAVCKFCDTDFVGTDGENGGKFRTPEELAAKIASLWPEGEDQRFVVCTGGEPMLQIDQPFVDALHAAGFEIAIETNGSLPVLDTIDWICVSPKADAPLVQTKGNELKVVVPQENQRLADYAKLDFDYFLVQPMDGPSRDINTKLAIEWCKRHPQWRLSMQTHKYLNIP

SEQ ID NO: 32505 - protein, 210 aa, unidentified
  source 1..210: note = Paraburkholderia rhizosphaerae
  REGION 1..210: note = tr|A0A4R8LQJ4|A0A4R8LQJ4_9BURK 7-carboxy-7-deazaguanine synthase OS=Paraburkholderia rhizosphaerae OX=480658 GN=queE PE=3 SV=1
MTYAVKEIFYTLQGEGANAGRPAVFCRFAGCNLWSGREEDRADAVCRFCDTDFVGTDGENGGKFRSADELVAKIASLWPQGEGERFVVCTGGEPMLQIDPPFVDALHAAGFEIAIETNGSLPVLETIDWICVSPKADAPLVVTKGNELKVVVPQDNQRLSDYEKLDFEYFLVQPMDGPSRDINTKLAIDWCKRHPRWRLSMQTHKYLNIP

SEQ ID NO: 32506 - protein, 263 aa, unidentified
  source 1..263: note = Paraburkholderia rhizoxinica
  REGION 1..263: note = tr|E5ANB0|E5ANB0_PARRH 7-carboxy-7-deazaguanine synthase OS=Paraburkholderia rhizoxinica (strain DSM 19002 / CIP 109453 / HKI 454) OX=882378 GN=queE PE=3 SV=1
MSASGLNCTIGASVAARVRHADCAHAATTRFGMADASIPRRFDVSGTGSEMTYAVKEIFYTLQGEGANAGRPAVFCRFAGCNLWSGREQDRADAVCRFCDTDFVGTDGENGGKYRDADALVAKIASLWPPGEAAAQYRFVVCTGGEPMLQLDAALIDALHRERFVIAVETNGTLPVLPGIDWVCVSPKAGSSIVVTRGNELKVVIPQDNQPLSEYARLDFEHFLVQPMDGPSRELNTKLAVDWCKRHPQWRLSMQTHKYLNIP

SEQ ID NO: 32507 - protein, 210 aa, unidentified
  source 1..210: note = Paraburkholderia rhynchosiae
  REGION 1..210: note = tr|A0A2N7WQF8|A0A2N7WQF8_9BURK 7-carboxy-7-deazaguanine synthase OS=Paraburkholderia rhynchosiae OX=487049 GN=queE PE=3 SV=1
MTYAVKEIFYTLQGEGANAGRPAVFCRFAGCNLWSGREDDRAEAVCRFCDTDFVGTDGENGGKYRTAEDLAQMIASQWPEGEGQRFVVCTGGEPMLQIDQPLVDALHAAGFEIAIETNGSLPVLETIDWICVSPKADAPLVVTKGNELKVVIPQDNQRLSDYAKLDFEYFLVQPMDGPSRDINTKLAIDWCKRHPQWRLSMQTHKYLNIP

SEQ ID NO: 32508 - protein, 210 aa, unidentified
  source 1..210: note = Paraburkholderia ribeironis
  REGION 1..210: note = tr|A0A1N7RJX9|A0A1N7RJX9_9BURK 7-carboxy-7-deazaguanine synthase OS=Paraburkholderia ribeironis OX=1247936 GN=queE PE=3 SV=1
MTYAVKEVFYTLQGEGANAGRPAVFCRFAGCNLWSGREEDRAEAVCRFCDTDFVGTDGENGGKYRTAEELVAMIVSLWPQGEGERFVVCTGGEPMLQIDQPLVDALHAASFEIAIETNGSLPVLETIDWVCVSPKADAPLVVTRGNELKVVIPQDNQRLSEYAKLDFEYFLVQPMDGPSRELNTRLAIDWCKRHPQWRLSMQTHKYLNIP

SEQ ID NO: 32509 - protein, 235 aa, unidentified
  source 1..235: note = Paraburkholderia ribeironis
  REGION 1..235: note = tr|A0A1N7SJF1|A0A1N7SJF1_9BURK 7-carboxy-7-deazaguanine synthase OS=Paraburkholderia ribeironis OX=1247936 GN=ygcF PE=3 SV=1
MQCDVPAVAGPPVGTYPVNEIFESLQGEASFTGTPSVFVRLQGCPVGCPWCDTKHTWQVIPEREISVGAMGEKTEQPCDSYAWCDVPTLANIVRAADAEHVVITGGEPCMYDLRPLIAKLEAWHHRVQVETSGTYVPLVTPSTFVTVSPKYAMSGGRPVLDEALARANEIKHPVGKQREINIVLEKLDPIHQARGTPIWLQPLSLSSRATGICIQAAHRYGWRVSLQTHKFINIR

SEQ ID NO: 32510 - protein, 210 aa, unidentified
  source 1..210: note = Paraburkholderia sacchari
  REGION 1..210: note = tr|A0A0A6QFF7|A0A0A6QFF7_9BURK 7-carboxy-7-deazaguanine synthase OS=Paraburkholderia sacchari OX=159450 GN=queE PE=3 SV=1
MTYAVKEIFYTLQGEGANAGRPAVFCRFAGCNLWSGREEDRETAVCRFCDTDFVGTDGENGGKYRTPEELVAMIASLWPEGEGSRFVVCTGGEPMLQIDQPFVDALHAAGFEIAIETNGSLPVLETIDWICVSPKADAPLVVTKGNELKVVVPQDNQRLADYAKLDFEYFLVQPMDGPSRDLNTKLAIDWCKRHPQWRLSMQTHKYLNIP

SEQ ID NO: 32511 - protein, 210 aa, unidentified
  source 1..210: note = Paraburkholderia sartisoli
  REGION 1..210: note = tr|A0A1H4FTA0|A0A1H4FTA0_9BURK 7-carboxy-7-deazaguanine synthase OS=Paraburkholderia sartisoli OX=83784 GN=queE PE=3 SV=1
MTYAVKEIFYTLQGEGANAGRPAVFCRFAGCNLWSGREEDRADAVCRFCDTDFVGTDGENGGKFRTADELVAMIASLWPEGEGERFVVCTGGEPMLQIDPPFVDALHAAGFEIAIETNGSLPVLDTIDWICVSPKADAPLVVTKGNELKVVVPQDNQRLADYAKLEFDYFLVQPMDGPSRDINTKLAIDWCKRHPQWRLSMQTHKYLNIP

SEQ ID NO: 32512 - protein, 210 aa, unidentified
  source 1..210: note = Paraburkholderia sediminicola
  REGION 1..210: note = tr|A0A3R7D1A2|A0A3R7D1A2_9BURK 7-carboxy-7-deazaguanine synthase OS=Paraburkholderia sediminicola OX=458836 GN=queE PE=3 SV=1
MTYAVKEIFYTLQGEGANAGRPAVFCRFAGCNLWSGREEDRAEAVCRFCDTDFVGTDGENGGKYRTAEELVQMIASQWPEGEGERFVVCTGGEPMLQIDPPFVDALHAAGFEIAIETNGSLPVLETIDWICVSPKADAPLVVTKGNELKVVIPQDNQRLSEYAKLDFEYFLVQPMDGPSRDLNTKLAIDWCKRHPQWRLSMQTHKYLNIP

SEQ ID NO: 32513 - protein, 210 aa, unidentified
  source 1..210: note = Paraburkholderia silvatlantica
  REGION 1..210: note = tr|A0A2V4TRC4|A0A2V4TRC4_9BURK 7-carboxy-7-deazaguanine synthase OS=Paraburkholderia silvatlantica OX=321895 GN=queE PE=3 SV=1
MTYAVKEIFYTLQGEGANAGRPAVFCRFAGCNLWSGREEDREQAVCRFCDTDFVGTDGENGGKFRTQEELVAKIASLWPEGEGNRFVVCTGGEPMLQIDPPFVDALHAAGFEIAIETNGSLPVLDTIDWICVSPKADAPLVVTKGNELKVVVPQENQRLADYAKLDFEYFLVQPMDGPSRDLNTKLAIDWCKRHPQWRLSMQTHKYLNIP

SEQ ID NO: 32514 - protein, 211 aa, unidentified
  source 1..211: note = Paraburkholderia sp.
  REGION 1..211: note = tr|A0A3D9LKD6|A0A3D9LKD6_9BURK 7-carboxy-7-deazaguanine synthase OS=Paraburkholderia sp. BL27I4N3 OX=1938805 GN=queE PE=3 SV=1
MTYSVKEIFYTLQGEGANAGRPAVFCRFSGCNLWTGREQDRSTAQCSFCDTDFVGTDGTGGGKFKDARDLANAIASQWPTTDRAHRFVVLTGGEPLLQVDSALTTALAEEGFFIAVETNGTVSAPAGLDWICVSPKAGTHIRIKAGNELKLVFPQIAFDPKGFEHLAFERFYLQPMDGPDQAQNIAKAIDFCKAHPRWSLSFQTHKALGIR

SEQ ID NO: 32515 - protein, 210 aa, unidentified
  source 1..210: note = Paraburkholderia sp.
  REGION 1..210: note = tr|A0A372K4W5|A0A372K4W5_9BURK 7-carboxy-7-deazaguanine synthase OS=Paraburkholderia sp. DHOC27 OX=2303330 GN=queE PE=3 SV=1
MTYAVKEIFYTLQGEGANAGRPAVFCRFAGCNLWSGREEDRAEAVCRFCDTDFVGTDGENGGKYRTAEELVQMIASQWPEGEGERFVVCTGGEPMLQMDQPFVGALHAAGFEIAIETNGSLPVLETIDWICVSPKADAPLVVTKGNELKVVIPQDNQRLSEYAALDFEYFLVQPMDGPSRDINTKLAIDWCKRHPQWRLSMQTHKYLNIP

SEQ ID NO: 32516 - protein, 210 aa, unidentified
  source 1..210: note = Paraburkholderia sprentiae
  REGION 1..210: note = tr|A0A1I9YIG9|A0A1I9YIG9_9BURK 7-carboxy-7-deazaguanine synthase OS=Paraburkholderia sprentiae WSM5005 OX=754502 GN=queE PE=3 SV=1
MTYAVKEIFYTLQGEGANAGRPAVFCRFAGCNLWSGREEDRAEAVCRFCDTDFVGTDGENGGKYRTADDLVAMITSQWPQGEGERFVVCTGGEPMLQIDQPLVDALHAAGFEIAIETNGSLPVLETIDWICVSPKADAPLVVTKGNELKVVIPQDNQRLADYAKLDFEYFLVQPMDGPSRDINTKLAIDWCKRHPQWRLSMQTHKYLNIP

SEQ ID NO: 32517 - protein, 210 aa, unidentified
  source 1..210: note = Paraburkholderia susongensis
  REGION 1..210: note = tr|A0A1X7K5M9|A0A1X7K5M9_9BURK 7-carboxy-7-deazaguanine synthase OS=Paraburkholderia susongensis OX=1515439 GN=queE PE=3 SV=1
MTYAVKEIFYTLQGEGANAGRPAVFCRFAGCNLWSGREEDRADAVCRFCDTDFVGTDGENGGKYRTPDELVAMIASQWPQGEGERFVVCTGGEPMLQIDQPLVDALHAAGFEIAIETNGSLPVLETIDWICVSPKADAPLVVTKGNELKVVIPQDNQRLADYAKLDFEYFLVQPMDGPSRDINTKLAIDWCKRHPQWRLSMQTHKYLNIP

SEQ ID NO: 32518 - protein, 210 aa, unidentified
  source 1..210: note = Paraburkholderia terrae
  REGION 1..210: note = tr|A0A2I8EH52|A0A2I8EH52_9BURK 7-carboxy-7-deazaguanine synthase OS=Paraburkholderia terrae OX=311230 GN=queE PE=3 SV=1
MTYAVKEIFYTLQGEGANAGRPAVFCRFAGCNLWSGREEDRADAVCQFCDTDFVGTDGENGGKFRTPEELAAKIASLWPEGEGQRFVVCTGGEPMLQIDQPLVDALHAQGFEIAIETNGSLPVLDTIDWICVSPKADAPLVQTKGNELKVVVPQENQRLADYAKLDFDYFLVQPMDGPSRDINTKLAIDWCKRHPQWRLSMQTHKYLNIP

SEQ ID NO: 32519 - protein, 210 aa, unidentified
  source 1..210: note = Paraburkholderia terrae
  REGION 1..210: note = tr|I5CWM8|I5CWM8_9BURK 7-carboxy-7-deazaguanine synthase OS=Paraburkholderia terrae BS001 OX=1171375; GN = queE PE=3 SV=1
MTYAVKEIFYTLQGEGANAGRPAVFCRFAGCNLWSGREEDRADAVCQFCDTDFVGTDGENGGKFRTPEELAAKIASLWPEGEGQRFVVCTGGEPMLQIDQPLVDALHAQGFEIAIETNGSLPVLDTIDWICVSPKANAPLVQTRGNELKVVVPQENQRLADYAKLDFDYFLVQPMDGPSRDINTKLAIDWCKRHPQWRLSMQTHKYLNIP

SEQ ID NO: 32520 - protein, 210 aa, unidentified
  source 1..210: note = Paraburkholderia terricola
  REGION 1..210: note = tr|A0A1M6SFP8|A0A1M6SFP8_9BURK 7-carboxy-7-deazaguanine synthase OS=Paraburkholderia terricola OX=169427 GN=queE PE=3 SV=1
MTYAVKEIFYTLQGEGTNAGRPAVFCRFAGCNLWSGREEDRADAVCRFCDTDFVGTDGENGGKYRSAEELVQMIASLWPQGEGERFVVCTGGEPMLQIDPPFVDALHAAGFEIAIETNGSLPVLETIDWICVSPKAGAPLVVTKGNELKVVIPQDNQRLSDYAKLDFEYFLVQPMDGPSRDINTKLAIDWCKRHPQWRLSMQTHKYLNIP

SEQ ID NO: 32521 - protein, 210 aa, unidentified
  source 1..210: note = Paraburkholderia tropica
  REGION 1..210: note = tr|A0A1A5X7N0|A0A1A5X7N0_9BURK 7-carboxy-7-deazaguanine synthase OS=Paraburkholderia tropica OX=92647 GN=queE PE=3 SV=1
MTYAVKEIFYTLQGEGANAGRPAVFCRFAGCNLWSGREEDRESAQCRFCDTDFVGTDGENGGKFRTPEELVAKIASLWPEGENHRFVVCTGGEPMLQIDPPFVDALHAAGFEIAIETNGSLPVLDTIDWICVSPKADAPLVVTKGNELKVVVPQDNQRLADYAKLDFEYFLVQPMDGPSRDLNTKLAIDWCKRHPQWRLSMQTHKYLNIP

SEQ ID NO: 32522 - protein, 210 aa, unidentified
  source 1..210: note = Paraburkholderia tuberum
  REGION 1..210: note = tr|A0A1H1CWT8|A0A1H1CWT8_9BURK 7-carboxy-7-deazaguanine synthase OS=Paraburkholderia tuberum OX=157910 GN=queE PE=3 SV=1
MTYAVKEIFYTLQGEGANAGRPAVFCRFAGCNLWSGREEDRADAVCRFCDTDFVGTDGENGGKYRTPDELVAMIASQWPQGEGERFVVCTGGEPMLQLDQPLVDALHAAGFEIAIETNGSLPVLDTIDWICVSPKADAPLVVTKGNELKVVIPQDNQRLADYAKLDFEYFLVQPMDGPSRDINTKLAIDWCKRHPQWRLSMQTHKYLNIP

SEQ ID NO: 32523 - protein, 210 aa, unidentified
  source 1..210: note = Paraburkholderia unamae
  REGION 1..210: note = tr|A0A328Y4M2|A0A328Y4M2_9BURK 7-carboxy-7-deazaguanine synthase OS=Paraburkholderia unamae OX=219649 GN=queE PE=3 SV=1
MTYAVKEIFYTLQGEGANAGRPAVFCRFAGCNLWSGREEDRAEAVCRFCDTDFVGTDGENGGKFRTPEELVAKIASLWPEGEGNRFVVCTGGEPMLQIDAPFVDALHAAGFEIAIETNGSLPVLETIDWICVSPKADAPLVVTKGNELKVVVPQDNQRLADYAKLDFEYFLVQPMDGPSRDLNTKLAIDWCKRHPQWRLSMQTHKYLNIP

SEQ ID NO: 32524 - protein, 210 aa, unidentified
  source 1..210: note = Paraburkholderia xenovorans
  REGION 1..210: note = tr|Q146Z5|Q146Z5_PARXL 7-carboxy-7-deazaguanine synthase OS=Paraburkholderia xenovorans (strain LB400); OX = 266265 GN=queE PE=3 SV=1
MTYAVKEIFYTLQGEGANAGRPAVFCRFAGCNLWSGREEDRAEAVCRFCDTDFVGTDGENGGKYRTAEDLVRMIASQWPQGEGERFVVCTGGEPMLQIDQPLVDALHAAGFEIAIETNGSLPVLETIDWICVSPKADAPLVVTKGNELKVVIPQDNQRLSEYAKLDFEYFLVQPMDGPSREINTRLAIDWCKRHPQWRLSMQTHKYLNIP

SEQ ID NO: 32525 - protein, 224 aa, Parachlamydia acanthamoebae
  REGION 1..224: note = tr|F8KZP3|F8KZP3_PARAV 7-carboxy-7-deazaguanine synthase OS=Parachlamydia acanthamoebae (strain UV7); OX = 765952 GN=queE PE=3 SV=1
MTQPLTFASKEQLNIIEIFSSVQGETSFAGLPTAFIRLAACNLRCSWCDTSYSFGRGDVFGLPQILEKVDEFGCRNVCVTGGEPLLQKNVYPLMTQLCDKNYIVSVETGGSLSIEEIDPRVHIILDIKCPDSNMSDRNFWPNLSAIRPEDEVKFVINGYQDYLYAKEVCEKFQLFSRKIPVLLSPVFDVLDSKELVNWVLQDKLPVRLNMQLHKFIWSATTRGV

SEQ ID NO: 32526 - protein, 224 aa, Parachlamydia acanthamoebae; identical to SEQ ID NO: 32525
  REGION 1..224: note = tr|A0A0C1END6|A0A0C1END6_9BACT 7-carboxy-7-deazaguanine synthase OS=Parachlamydia acanthamoebae OX=83552 GN=queE PE=3 SV=1

SEQ ID NO: 32527 - protein, 224 aa, Parachlamydia sp.
  REGION 1..224: note = tr|A0A2H9SPH7|A0A2H9SPH7_9BACT 7-carboxy-7-deazaguanine synthase OS=Parachlamydia sp.; OX = 2052048 GN=queE PE=3 SV=1
MTLPLASVSKEQLNIVEIFSSVQGETSFTGLPTVFVRLAACNLRCSWCDTSYSFGRGVPHPIDEILETVRNSGCRHVCITGGEPLLQKNVHILMSLICNEKLTVSLETGGSLPINEVDSRVIVILDIKCPDSKMSDRNYWPNLEIIRPQDEVKFVVNGYQDYLYAKDICEKHGLFTRKIPVLLSPVFGVLDPKELIEWMLRDKLPVRLNMQVHKFIWSPTTRGV

SEQ ID NO: 32528 - protein, 236 aa, Paracoccus aestuarii
  REGION 1..236: note = tr|A0A418ZTB0|A0A418ZTB0_9RHOB 7-carboxy-7-deazaguanine synthase OS=Paracoccus aestuarii; OX = 453842 GN=queE PE=3 SV=1
MKPLRIAEIFGPTIQGEGALIGEPTVFVRAGGCDYRCSWCDSMHAVDSAYRDAWAPMTTEAIWAEVARLSGGRALTLSISGGNPAIQDFGQLVARARAEGYRTALETQGSVARDWFAGLDMLVLSPKPPSSGEVPDPEALAACIAAGQGAGAMVLKMVIFDAEDYAFARRIAADHPGLPVYLQPGNPETDPDRPVAAQDVADRLLWLVEMVTADGWFGVRVLPQLHVLLWGNQRGV

SEQ ID NO: 32529 - protein, 234 aa, Paracoccus alcaliphilus
  REGION 1..234: note = tr|A0A1H8LXJ5|A0A1H8LXJ5_9RHOB 7-carboxy-7-deazaguanine synthase OS=Paracoccus alcaliphilus OX=34002 GN=queE PE=3 SV=1
MTLRIAEIFGPTIQGEGALIGQPTVFIRAGGCDYRCSWCDSLHAVESRFRHDWAPMQPAAIMDRVAQLSGGQPLMVSISGGNPAIQDFGPVIALGRKAGYGFACETQGSVARDWFAGLALLVLSPKPPSSGQATDWAAFDACLAAAGDAPRVMKIVIFDEADLEWARDAAARYPGLTLYLQPGNPETDPDRPVDPQGLADRMLWLVEATVGRGWLTPRILPQLHVLIWGNRRGV

SEQ ID NO: 32530 - protein, 235 aa, Paracoccus bengalensis
  REGION 1..235: note = tr|A0A3D9XVG6|A0A3D9XVG6_9RHOB 7-carboxy-7-deazaguanine synthase OS=Paracoccus bengalensis OX=302403 GN=queE PE=3 SV=1
MTLRIAEIFGPTIQGEGALIGEPTVFVRAGGCDYRCVWCDSPHAVESRHRHEWRPMSAEAVWAEVRRLSGDQPLTVSLSGGNPAIQDFAPLIALGRAAGYRFACETQGSVAQPWFADLAMLVLSPKPPSSGQVVDWDALDRCVQAGEGAGQRVLKIVIFDQADLDWAHEAAARHPDLPLYLQPGNPETDPALPVDPQALADRLLWLVENTVGRGWLKPRILPQLHVLIWGNRRGV

SEQ ID NO: 32531 - protein, 235 aa, Paracoccus denitrificans
  REGION 1..235: note = tr|A1B9Q3|A1B9Q3_PARDP 7-carboxy-7-deazaguanine synthase OS=Paracoccus denitrificans (strain Pd 1222); OX = 318586 GN=queE PE=3 SV=1
MTLRIAEIFGPTIQGEGALIGEPTVFVRAGGCDYRCVWCDSLHAVESSHRHEWRPMSAEAVWAEVRRLSGGQPLTVSLSGGNPAIQDFTPLIALGREQGYRFACETQGSVAQPWFAELSTLVLSPKPPSSGQVVDWDAFDRCLKAGEGAGQRVLKIVIFDQVDLDWAREVAARHPGLPLYLQPGNPETDPALPVDPQALADRLLWLVENTVGRGWLKPRILPQLHVLIWGNRRGV

SEQ ID NO: 32532 - protein, 240 aa, unidentified
  source 1..240: note = Paracoccus gahaiensis
  REGION 1..240: note = tr|A0A4U0REA4|A0A4U0REA4_9RHOB 7-carboxy-7-deazaguanine synthase OS=Paracoccus gahaiensis; OX = 1706839 GN=queE PE=3 SV=1
MTGAEKPLRIAEIFGPTIQGEGALIGLPTVFVRAGGCDYRCAWCDSMHAVDSAYRETWAPMSTAQVWDRVRELSGGGPLTVSLSGGNPAIQDFGPLIAMGRAEGYGFALETQGSVARDWFSELSMLVLSPKPPSSGEHPDWAAFEACLAAGQGAEAVVMKIVVFDDADYAWAQEVAGRYPDLPLVLQPGNPEVDPAVPVAAQDVADRLLWLVEKVTADGWFRPRLLPQLHVMLWGNRRGV

SEQ ID NO: 32533 - protein, 235 aa, Paracoccus haeundaensis
  REGION 1..235: note = tr|A0A5C4R6D9|A0A5C4R6D9_9RHOB 7-carboxy-7-deazaguanine synthase OS=Paracoccus haeundaensis OX=225362 GN=queE PE=3 SV=1
MKPLRIAEIFGPTIQGEGALIGQPTVFVRAGGCDYRCSWCDSMHAVDSAFRDSWAAMQTAEVWAQVRALSGGRPLTVSISGGNPAIQDFGPLIATGRAEGYGFALETQGSVARDWFADLTLLVLSPKPPSSGETPDPAAFEACLAAAQGTRTVLKIVVFDDADYVWARDWAGRYPDLDLVLQPGNPEVDPDVPVAAQDVADRLLWLVDKVMADGWFRPRLLPQLHVLLWGNRRGV

SEQ ID NO: 32534 - protein, 240 aa, unidentified
  source 1..240: note = Paracoccus hibiscisoli
  REGION 1..240: note = tr|A0A4U0QSC6|A0A4U0QSC6_9RHOB 7-carboxy-7-deazaguanine synthase OS=Paracoccus hibiscisoli OX=2023261 GN=queE PE=3 SV=1
MKPPERPLRIAEIFGPTIQGEGALIGQPTVFVRAGGCDYRCSWCDSMHAVDSAYRDSWAAMDAAQVWARVRELSGGRPLTVSISGGNPAIQDFGPLIAMGRAEGYAFALETQGSIARDWFAQLSVLVLSPKPPSSGERPDWAAFDACLAAGQGAGAVVLKIVVFDDADYAWARAVADRYPGLDLVLQPGNPEVDPDLPVAAQDVADRLLWLVDKVMAEGWFRPRLLPQLHVLLWGNKRGV

SEQ ID NO: 32535 - protein, 235 aa, Paracoccus homiensis
  REGION 1..235: note = tr|A0A1I0EQM9|A0A1I0EQM9_9RHOB 7-carboxy-7-deazaguanine synthase OS=Paracoccus homiensis; OX = 364199 GN=queE PE=3 SV=1
MKLRIAEIFGPTIQGEGVLIGEPTVFVRAGGCDYRCSWCDSLHAVDSAFRHDWAPMSPDAIMDRVRELSGGQPLTVSLSGGNPAIQDFGPVIASGRQSGYRFACETQGSVARPWFAELDTLVLSPKPPSSGETVDWAAFADCVRAGHAARQTVMKIVIFDQADFDWARAAHDRHPDLPLFLQPGNPEVDPALPVDPAMLAQRLEWLTDRAMQAGWFAPRILPQLHVLIWGNKRGV

SEQ ID NO: 32536 - protein, 234 aa, unidentified
  source 1..234: note = Paracoccus laeviglucosivorans
  REGION 1..234: note = tr|A0A521B4P2|A0A521B4P2_9RHOB 7-carboxy-7-deazaguanine synthase OS=Paracoccus laeviglucosivorans OX=1197861 GN=queE PE=3 SV=1
MTLRIAEIFGPTIQGEGVLIGEPTVFIRAGGCDYRCSWCDSLHAVESRYRHDWAALSDAEVWARVRDLSGGQPLTVSISGGNPAIQDFGPVIALGRAQGYRFACETQGSIPRDWFGELSTLVLSPKPPSSGETVDWDAFASCVQAGRLARTVMKIVIFDETDLEWARDTHARHPELPLYLQPGNPVTDPDTPVAPQALADRLLWLVDSTVGRGWLTPHILPQLHVLIWGNRRGV

SEQ ID NO: 32537 - protein, 235 aa, Paracoccus pantotrophus
  REGION 1..235: note = tr|A0A1I5IMI0|A0A1I5IMI0_PARPN 7-carboxy-7-deazaguanine synthase OS=Paracoccus pantotrophus OX=82367 GN=queE PE=3 SV=1
MTLRIAEIFGPTIQGEGALIGEPTVFVRAGGCDYRCLWCDSLHAVDSRHRHEWRPMSAEAIWADVRRLSGGQPLTVSLSGGNPAIQDFAPLIALGRAAGYRFACETQGSVAQPWFADLSTLVLSPKPPSSGQVVDWDAFDRCLKAGEGAGQRVLKIVIFDRRDLDWARAVADRHPGLPLYLQPGNPETDPAQPVDPQALADRLLWLVENTVGRGWLKPRILPQLHVLIWGNRRGV

SEQ ID NO: 32538 - protein, 235 aa, Paracoccus pantotrophus
  REGION 1..235: note = tr|A0A495P449|A0A495P449_PARPN 7-carboxy-7-deazaguanine synthase OS=Paracoccus pantotrophus OX=82367 GN=queE PE=3 SV=1
MTLRIAEIFGPTIQGEGALIGEPTVFVRAGGCDYRCLWCDSLHAVESRHRHEWRPMSAEAIWADVRRLSGGQPLTVSLSGGNPAIQDFAPLIALGRAAGYRFACETQGSVAQPWFADLSTLVLSPKPPSSGQVVDWDAFDRCLKAGEGAGQRVLKIVIFDRRDLDWARAVADRHPGLPLYLQPGNPETDPAQPVDPQALADRLLWLVENTVGRGWLKPRILPQLHVLIWGNRRGV

SEQ ID NO: 32539 - protein, 235 aa, Paracoccus saliphilus
  REGION 1..235: note = tr|A0A1N7PHT5|A0A1N7PHT5_9RHOB 7-carboxy-7-deazaguanine synthase OS=Paracoccus saliphilus; OX = 405559 GN=queE PE=3 SV=1
MTLRIAEIFGPTIQGEGALIGEPTVFIRAGGCDYRCSWCDSLHAVDSRYRHDWTVMTPEAIWQEVRRLSGGRPLTISISGGNPAIQDFAPVIAMGKAEGYRFACETQGSIARPWFSALDTLVLSPKPPSSGENVDWVGFGRCLTAAETCPNVVMKIVIFDDEDYLWAKAVAEKFPDLPLYLQPGNPEVDPDRPIDLQACADRLLWLIEKVTGDDWFAPRVLPQLHVLVWGNKRGV

SEQ ID NO: 32540 - protein, 235 aa, Paracoccus seriniphilus
  REGION 1..235: note = tr|A0A239PV48|A0A239PV48_9RHOB 7-carboxy-7-deazaguanine synthase OS=Paracoccus seriniphilus OX=184748 GN=queE PE=3 SV=1
MTLRIAEIFGPTIQGEGALIGEPTVFVRAGGCDYRCSWCDSLHAVESKYRHDWAKMTTETVWKKVRELSRDRPLTVSLSGGNPAIQDFGPLISMGKAANYRFACETQGSIARQWFAQLDTLVLSPKPPSSGERVDWDAFDACRDIGRKARQQVLKIVIFDEVDYQWAREVHARHSDLALFLQPGNPVVDPDIAVDPQSLADRLGWLTEMAMTDGWFAPRILPQLHVLIWGNKRGV

SEQ ID NO: 32541 - protein, 236 aa, unidentified
  source 1..236: note = Paracoccus siganidrum
  REGION 1..236: note = tr|A0A419A618|A0A419A618_9RHOB 7-carboxy-7-deazaguanine synthase OS=Paracoccus siganidrum; OX = 1276757 GN=queE PE=3 SV=1
MSRLRIAEIFGPTIQGEGALIGEPTVFVRAGGCDYRCAWCDSMHAVDSRYRDTWAAMTSEAVWAKVRQLSGGRALTVSISGGNPAIQDFGPLIEMGRAAGYRFACETQGSVARDWFGALDMLVLSPKPPSSGQVTDWNAFADCLAAGRGAGRMVMKIVVFDEADYAWARQAAARHPDLPLYLQPGNPEVDPSVPVGAQQVADRLLWLVEKVTGDGWFAPRVLPQLHVMLWGNKRGV

SEQ ID NO: 32542 - protein, 236 aa, Paracoccus sp.
  REGION 1..236: note = tr|A0A3A3DF04|A0A3A3DF04_9RHOB 7-carboxy-7-deazaguanine synthase OS=Paracoccus sp. JM45; OX = 2283626 GN=queE PE=3 SV=1
MSRLRIAEIFGPTIQGEGALIGEPTVFIRAGGCDYRCSWCDSLHAVESAFRETWTPLEPEQVWVKVRDLSGGVPLTISISGGNPAIQDFGPVIAMGKRDGYRFACETQGSVARVWFGDLDMLVLSPKPPSSDQVVDWDAFDACVQAGQTAKQTVIKIVIFDDADYRWAQEAAARYPNLPLYLQPGNPEVDPDVPVAAQDVADRLLWLVNKVTADRWFRPRVLPQLHVMLWGNLRGV

SEQ ID NO: 32543 - protein, 240 aa, Paracoccus sp.
  REGION 1..240: note = tr|A0A4P7HMX0|A0A4P7HMX0_9RHOB 7-carboxy-7-deazaguanine synthase OS=Paracoccus sp. 2251; OX = 2560053 GN=queE PE=3 SV=1
MKAPEKPLRIAEIFGPTIQGEGALIGLPTVFVRAGGCDYRCAWCDSMHAVDSAYRETWAAMSTAQVWDRVCALSGGRPLTVSLSGGNPAIQDFGPLIARGRAEGYDFALETQGSVARDWFSDLSMLVLSPKPPSSGERPDWAAFDACLAAGQGAGAVVMKIVVFDDADYAWAQEVAGRYPDLPLVLQPGNPEVDPAVPVAAQDVADRLLWLVEKVTADGWFRPRLLPQLHVMLWGNRRGV

SEQ ID NO: 32544 - protein, 235 aa, Paracoccus versutus
  REGION 1..235: note = tr|A0A3E0BPY7|A0A3E0BPY7_PARVE 7-carboxy-7-deazaguanine synthase OS=Paracoccus versutus; OX = 34007 GN=queE PE=3 SV=1
MTLRIAEIFGPTIQGEGALIGEPTVFVRAGGCDYRCVWCDSPHAVESRHRHEWRPMSAEAVWAEVRRLSGGQPLTVSLSGGNPAIQDFAPLIALGRAAGYRFACETQGSVAQPWFADLAMLVLSPKPPSSGQVVDWDAFDRCVQAGVGAAQRVLKIVIFDQADLDWAHEVAARHPDLPLYLQPGNPETDPALPVDPQALADRLLWLVENTVGRGWLKPRILPQLHVLIWGNRRGV

SEQ ID NO: 32545 - protein, 235 aa, Paracoccus versutus
  REGION 1..235: note = tr|A0A369U3T1|A0A369U3T1_PARVE 7-carboxy-7-deazaguanine synthase OS=Paracoccus versutus; OX = 34007 GN=queE PE=3 SV=1
MTLRIAEIFGPTIQGEGALIGEPTVFVRAGGCDYRCVWCDSPHAVESRHRHEWRPMSAEAVWAEVRRLSGGQPLTVSLSGGNPAIQDFAPLIALGRAAGYRFACETQGSVAQPWFADLAMLVLSPKPPSSGQVVDWDAFDRCVQAGEGAGQRVLKIVIFDQADLDWAHEVAARHPDLPLYLQPGNPETDPALPVDPQALADRLLWLVENTVGRGWLKPRILPQLHVLIWGNRRGV

SEQ ID NO: 32546 - protein, 210 aa, Paracraurococcus sp.
  REGION 1..210: note = tr|A0A4R4DQN0|A0A4R4DQN0_9PROT 7-carboxy-7-deazaguanine synthase OS=Paracraurococcus sp. NE82 OX=2527868 GN=queE PE=3 SV=1
MSYAVKEIFPTLQGEGAQSGRPSVFCRFAGCNLWSGREEDRAEAVCRFCDTDFVGMDGEGGGRFADATELAAAITAAWPGGEAHRYVVFTGGEPLLQLDVPLIAALHAAGFEVAVESNGTIEPPEGIDWLCVSPKSGAPLRAMRGDELKLVYPQPGLPPESVEHLDFRHFFLQPMDGPDRAANTAAAVAHCLRHPRWRLSLQTHKLIGIP

SEQ ID NO: 32547 - protein, 228 aa, unidentified
  source 1..228: note = Parafilimonas terrae
  REGION 1..228: note = tr|A0A1I5VK74|A0A1I5VK74_9BACT 7-carboxy-7-deazaguanine synthase OS=Parafilimonas terrae; OX = 1465490 GN=queE PE=3 SV=1
MNPFLVNSFQTTYKPVLSSESNTATLPVMEAFYTLQGEGFHQGKAAYFIRLGGCDVGCFWCDVKESWDAAVHPQKTVAKIIEEAKKAISFQPSAVSPIFVITGGEPLLHNLDELTLGLKNEGFKTNIETSGSSPLSGYWDWICLSPKKFKNPLPEVFAAASELKVVVYNKSDFKWAEENAAQVSADCKLYLQPEWSKAQSITPSIIEYIKQHPRWQLSLQVHKYLDIP

SEQ ID NO: 32548 - protein, 243 aa, unidentified
  source 1..243: note = Parageobacillus caldoxylosilyticus
  REGION 1..243: note = tr|A0A023DBY0|A0A023DBY0_9BACI 7-carboxy-7-deazaguanine synthase OS=Parageobacillus caldoxylosilyticus NBRC 107762 OX=1220594 GN=queE PE=3 SV=1
MEKTIPVLEIFGPTIQGEGMVIGQKTMFVRTAGCDYRCRWCDSAFTWDGSAKEEIRPMTAEQIWERLYELGGDRFSHVTISGGNPVLISALEELVLLLKKKGIRLAVETQGSRWQDWLYHIDEVTISPKPPSSGMDTDFAMLDHIVKKLADAGRASHMSLKVVVFDDIDFDYAKRVHRRYPGIPFYLQVGNADTAEADDAALRTQLLARLEWLVEKVAQSNELNDVRVLPQLHTLLWGNKRGV

SEQ ID NO: 32549 - protein, 243 aa, unidentified; identical to SEQ ID NO: 32548
  source 1..243: note = Parageobacillus caldoxylosilyticus
  REGION 1..243: note = tr|A0A150L5X6|A0A150L5X6_9BACI 7-carboxy-7-deazaguanine synthase OS=Parageobacillus caldoxylosilyticus OX=81408 GN=queE PE=3 SV=1

SEQ ID NO: 32550 - protein, 243 aa, unidentified
  source 1..243: note = Parageobacillus genomosp.
  REGION 1..243: note = tr|A0A023CTG4|A0A023CTG4_9BACI 7-carboxy-7-deazaguanine synthase OS=Parageobacillus genomosp. 1 OX=1295642 GN=queE PE=3 SV=1
MAKTIPVLEIFGPTIQGEGMVIGQKTMFVRTAGCDYRCRWCDSAFTWDGSAKEEIQPMTAEQIWERLYELGGDRFSHVTLSGGNPVLISALEELVLLLKKKGIRLAVETQGSRWQDWLYHIDEVTISPKPPSSGMDTDFAMLDHIVEKLAGAERASHISLKVVVFDDIDFDYAKRVHQRYPGIPFYLQVGNADTAEADDSALRTQLLARLEWLVEKVAQSNELNDVRVLPQLHTLLWGNKRGV

SEQ ID NO: 32551 - protein, 245 aa, unidentified
  source 1..245: note = Parageobacillus thermantarcticus
  REGION 1..245: note = tr|A0A1I0T968|A0A1I0T968_9BACI 7-carboxy-7-deazaguanine synthase OS=Parageobacillus thermantarcticus OX=186116 GN=queE PE=3 SV=1
MIMAKKIPVLEIFGPTIQGEGMVIGQKTMFVRTAGCDYSCRWCDSAFTWDGSAKGEIRQMTAEQIWERLCELGGDRFRHVTISGGNPVLIQALEELVSLLKNKGIRVAVETQGSRWQDWLYDVDDVTISPKPPSSGMETDFAMLDRIIDKLVGAGRASHVSLKVVVFDDDDFAYAKMVHKRYPNISFYLQAGNDDTKETDVTALREKLLAKLEWLVEKVAQSNELNDVRVLPQLHALLWGNKRGV

SEQ ID NO: 32552 - protein, 243 aa, unidentified; identical to SEQ ID NO: 30335
  source 1..243: note = Parageobacillus thermoglucosidasius
  REGION 1..243: note = tr|A0A178TWV6|A0A178TWV6_PARTM 7-carboxy-7-deazaguanine synthase OS=Parageobacillus thermoglucosidasius OX=1426 GN=queE PE=3 SV=1

SEQ ID NO: 32553 - protein, 243 aa, unidentified
  source 1..243: note = Parageobacillus thermoglucosidasius
  REGION 1..243: note = tr|A0A1B7KU40|A0A1B7KU40_PARTM 7-carboxy-7-deazaguanine synthase OS=Parageobacillus thermoglucosidasius OX=1426 GN=queE PE=3 SV=1
MAKKIPVLEIFGPTIQGEGMVIGQKTMFVRTAGCDYSCRWCDSAFTWDGSAKEEIRQMTAEQIWERLCELGGDRFRHVTISGGNPVLIQALEELVLLLKNKGIRIAVETQGSRWQDWLYDIDDVTISPKPPSSGMETDFAVLDCIIDKLVSAGRAPHVSLKVVVFDDDDFDYAKMIHKRYPNISFYLQAGNDDIMEKDTAALREKLLAKLDWLVEKVAQSNELNDVRVLPQLHALLWGNKRGV

SEQ ID NO: 32554 - protein, 243 aa, unidentified
  source 1..243: note = Parageobacillus toebii
  REGION 1..243: note = tr|A0A150N6A9|A0A150N6A9_9BACI 7-carboxy-7-deazaguanine synthase OS=Parageobacillus toebii OX=153151 GN=queE PE=3 SV=1
MAKKIPVLEIFGPTIQGEGMVIGQKTMFVRTAGCDYRCRWCDSAFTWDGSAKEEIRQMTAEQIWERLYELGGDRFSHVTISGGNPVLIQALEELVVLLKNKGIRIAVETQGSRWQDWLYHIDDITISPKPPSSGMATDFAVLDDIIDKLVSAGRTSHVSLKVVVFDDDDFNYAKMVHKRYPNISFYLQVGNDDVLETDDMALRAKLLKKLEWLVEKVAQSNELNDVRVLPQLHTLLWGNKRGV

SEQ ID NO: 32555 - protein, 245 aa, unidentified
  source 1..245: note = Parageobacillus toebii
  REGION 1..245: note = tr|A0A3M0EYX3|A0A3M0EYX3_9BACI 7-carboxy-7-deazaguanine synthase OS=Parageobacillus toebii NBRC 107807 OX=1223503 GN=queE PE=3 SV=1
MIMAKKIPVLEIFGPTIQGEGMVIGQKTMFVRTAGCDYRCRWCDSAFTWDGSAKEEIRQMTAEQIWERLYELGGDRFSHVTISGGNPVLIQALEELVVLLKNKGIRIAVETQGSRWQDWLYHIDDITISPKPPSSGMDTDFAMLDHIVGKLAGAGRASHMSLKVVVFDEIDFDYAKKVHRRYPDIPFYLQVGNADLAEADDAALRTQLLARLEWLVEKVAQSNELNDVRVLPQLHTLLWGNKRGV

SEQ ID NO: 32556 - protein, 246 aa, unidentified
  source 1..246: note = Paraglaciecola agarilytica
  REGION 1..246: note = tr|K6X100|K6X100_9ALTE 7-carboxy-7-deazaguanine synthase OS=Paraglaciecola agarilytica NO2 OX=1125747; GN = queE PE=3 SV=1
MLSYPVDKSQITLSKTTGKLLNTYKINEVFESLQGEGAHTGVPSIFIRLQGCPVGCPWCDTKHTWEIDLNLKVEASVVMAQNVDTEQWFEHTPKQLLDLFTQHGYTASNIILTGGEPCMYDLTDLSSVLIENGYSVQIETSGTYEIMAHPDTWVTVSPKVNMPGKRDVLKSALLRANEIKHPVAMEKHIEELDQVLTLLEGSNTTKPLIYLQPISQQKRATELCIKTCIARNWRLSLQTHKFIGIE

SEQ ID NO: 32557 - protein, 224 aa, unidentified
  source 1..224: note = Paraglaciecola arctica
  REGION 1..224: note = tr|K6XCT8|K6XCT8_9ALTE 7-carboxy-7-deazaguanine synthase OS=Paraglaciecola arctica BSs20135 OX=493475; GN = queE PE=3 SV=1
MNSYKINEVFESLQGEGSYTGLPSIFVRLQGCPVGCPWCDTKHTWVVSPELKTTSDAVMAETAESDSWFEHSTAQLLELFKLHGYVAKHIVITGGEPCLYDLTEITSSLITKGYSVQIETSGTYEIIAHPDTWVTVSPKVNMPGGRPVLSSAMRRANEIKHPIAMEKHIEELDQVLTLLGDQALPNIYLQPISQQKRATDLAIKTCIARNWRLSLQTHKFIGIE

SEQ ID NO: 32558 - protein, 224 aa, unidentified
  source 1..224: note = Paraglaciecola hydrolytica
  REGION 1..224: note = tr|A0A136A0B0|A0A136A0B0_9ALTE 7-carboxy-7-deazaguanine synthase OS=Paraglaciecola hydrolytica OX=1799789 GN=queE PE=3 SV=1
MSQYKINEVFESIQGEGSFTGVPSIFIRLQGCPVGCPWCDTKHTWTIDPMLERSRDVVMAEQAESEHWFTHSVEQLLALFAAQGYQAKHVVISGGEPCMYDLVPLTSHLITLGYSVQIETSGTYEILTHVDTWVTVSPKVNMPGGKPVLASAMQRANEIKHPVAMEKHIEELDQVLKLLPATNKPLIYLQPISQQKRATELAIKVCIQRNWRLSLQTHKFIGIE

SEQ ID NO: 32559 - protein, 246 aa, unidentified
  source 1..246: note = Paraglaciecola mesophila
  REGION 1..246: note = tr|K6Z527|K6Z527_9ALTE 7-carboxy-7-deazaguanine synthase OS=Paraglaciecola mesophila KMM 241 OX=1128912; GN = queE PE=3 SV=1
MLSYPVDKSQITLSKTTGKLLNTYKINEVFESLQGEGAHTGVPSIFIRLQGCPVGCPWCDTKHTWEIDQNLKVAAPVVMAQNEDTAQWFEHTPEQLLALFEQHGYTASNIILTGGEPCMYDLTNLSSVLIENGFSVQIETSGTYEILTHPDTWVTVSPKVNMPGKRDVLKSAMHRANEIKHPVAMEKHIEELEHVLTLLVGSDNPKPLIYLQPISQQKRATELCIKTCIARNWRLSLQTHKFIGIE

SEQ ID NO: 32560 - protein, 227 aa, unidentified
  source 1..227: note = Paraglaciecola polaris
  REGION 1..227: note = tr|K6ZHA7|K6ZHA7_9ALTE 7-carboxy-7-deazaguanine synthase OS=Paraglaciecola polaris LMG 21857 OX=1129793; GN = queE PE=3 SV=1
MLNTYKINEVFESLQGEGAHTGVPSIFIRLQGCPVGCPWCDTKHTWTVDENLQVEAAQVMAQNEDTEQWFSHTPQQLLSLFKAQGYTANNIILTGGEPCMYDLTELSTVLLDNGYSVQIETSGTYEILTHGDTWVTVSPKVNMPGKRNVLKSAMLRANEIKHPVAMQKHIDELEDVLLLLEGEGAPKPLIYLQPISQQKRATELCIKTCIARNWRLSLQTHKFIGIE

SEQ ID NO: 32561 - protein, 224 aa, unidentified
  source 1..224: note = Paraglaciecola psychrophila
  REGION 1..224: note = tr|K7AJ47|K7AJ47_9ALTE 7-carboxy-7-deazaguanine synthase OS=Paraglaciecola psychrophila 170 OX=1129794; GN = queE PE=3 SV=1
MSTYKINEVFESLQGEGSYTGLPSIFVRLQGCPVGCPWCDTKHTWVVSPELKTTSNAVMAETAESDSWFEQTTEQLLGLFNLHGYVAKHIVITGGEPCLYDLTEITSSLIAKGYSVQIETSGTYEIIAHPDTWVTVSPKINMPGGRLVLRSAMRRANEIKHPIAMQKHIEELDEVLTLLGDQAVPNIYLQPISQQKRATDLAIKTCIARNWRLSLQTHKFIGIE

SEQ ID NO: 32562 - protein, 224 aa, unidentified
  source 1..224: note = Paraglaciecola sp.
  REGION 1..224: note = tr|A0A2N1DG81|A0A2N1DG81_9ALTE 7-carboxy-7-deazaguanine synthase OS=Paraglaciecola sp. MB-3u-78 OX=2058332 GN=queE PE=3 SV=1
MSSYKINEVFESLQGEGSYTGLPSIFVRLQGCPVGCPWCDTKHTWVVSPELQTTRDKVMSEKAESDSWFEHTTEQLLALFNLHGYVAKHIVITGGEPCLYDLTEITSSLIAKGYSVQIETSGTYEIIVHPDTWVTVSPKVNMPGGRAVLSSAMRRANEIKHPIAMEKHIEELDEVLTLLGDQAVPNIYLQPISQQKRATDLAIKTCIARNWRLSLQTHKFIGIE

SEQ ID NO: 32563 - protein, 230 aa, unidentified
  source 1..230: note = Parahaliea aestuarii
  REGION 1..230: note = tr|A0A5C9A1D2|A0A5C9A1D2_9GAMM 7-carboxy-7-deazaguanine synthase OS=Parahaliea aestuarii; OX = 1852021 GN=queE PE=3 SV=1
MNKPLPHSDGAPSAVAEGALRITEIFYSLQGEARTVGLPTVFVRLTGCPLRCVYCDTAYAFSGGEMMPLSAILGQVAGYAPRYVTVTGGEPLAQPDCLPLLRQLCDAGYEVSLETSGALPVAEVDPRVVKVLDLKTPASEEAHRNDYGNIAHLTQRDQVKFVICDRADYEWARFKLDEYQLAAKVSDVLFSPSHGSLPGRDLAEWILADNLPVRMQLQLHKYLWNDEPGH

SEQ ID NO: 32564 - protein, 215 aa, unidentified
  source 1..215: note = Parahaliea aestuarii
  REGION 1..215: note = tr|A0A5C9A738|A0A5C9A738_9GAMM 7-carboxy-7-deazaguanine synthase OS=Parahaliea aestuarii; OX = 1852021 GN=queE PE=3 SV=1
MEAALRITEIFYSLQGEARTVGLPTVFVRLTGCPLRCVYCDTAYAFSGGEIMSLDHIAGRVASYAPRYVTVTGGEPLAQPNCLPLLRQLCDAGYEVSLETSGALSVAGVDPRVVKVLDLKTPASEEVHRNDYGNIAHLNPRDQVKFVICDRGDYEWARFKLDEYQLAGRVSDVLFSPSHGALPGRQLAEWILEDNLPVRMQLQLHKYLWEDAPGH

SEQ ID NO: 32565 - protein, 211 aa, Paralcaligenes ureilyticus
  REGION 1..211: note = tr|A0A4R3MC40|A0A4R3MC40_9BURK 7-carboxy-7-deazaguanine synthase OS=Paralcaligenes ureilyticus OX=627131 GN=queE PE=3 SV=1
MTYSVKEIFYTLQGEGANAGRPAVFCRFAGCNLWTGREKDRKHAICQFCDTDFVGTDGDGGGKFANAKTLVDSIAHHWTPAGPAHRFVVLTGGEPLLQVDEPLIHELHAQNFTIAVETNGTQACPPGLDWVCVSPKAGSELKVFEGNELKLVFPQSGAGPEKFTGLSFDHFYLQPMDNASQRANIQLTTEYCLAHPQWKLSMQTHKLLGIR

SEQ ID NO: 32566 - protein, 219 aa, unidentified
  source 1..219: note = Paramaledivibacter caminithermalis
  REGION 1..219: note = tr|A0A1M6QZX7|A0A1M6QZX7_9CLOT 7-carboxy-7-deazaguanine synthase OS=Paramaledivibacter caminithermalis DSM 15212 OX=1121301 GN=queE PE=3 SV=1
MKVSELFYSIQGETTLVGEPTYFIRLYGCNLRCNWCDTKYSYEKNSYIEYSVEQIYNLVKKENPTNICITGGEPLLQYEEVISVIDLFVNDNSVKTISIETNGSIDISKITERYNTSKLKIVMDYKLEGSYEINNMNTNNFKFLRDTDEIKFVISDYNDLISINKILECYYKKGKILIGFVAGTIQPKEIAKYILKNKLDWRINYQLHKLIWSSEERGV

SEQ ID NO: 32567 - protein, 240 aa, unidentified
  source 1..240: note = Paramesorhizobium deserti
  REGION 1..240: note = tr|A0A135HZB1|A0A135HZB1_9RHIZ 7-carboxy-7-deazaguanine synthase OS=Paramesorhizobium deserti OX=1494590 GN=queE PE=3 SV=1
MSTLRIAEIFGPTIQGEGALIGEPSVFVRAGGCDYRCRWCDSLHAVDSAFRHEWAAMETEEVWARVHALSGGVPLTVSLSGGNPAIQPFGPLIALGRAAGYRFALETQGSIARDWFAQLDMLVLSPKPPSSGEMVDWATFEDCLIAAGDGPKRVMKIIIFDEADYAFAREAAARYHALPLFLQPGNHTPPPPGAEDGEIDLDGIMQRMHWLTERTLADQWFTPRILPQLHVLMWGNRRGV

SEQ ID NO: 32568 - protein, 204 aa, unidentified
  source 1..204: note = Paramuribaculum intestinale
  REGION 1..204: note = tr|A0A2V1INU4|A0A2V1INU4_9BACT 7-carboxy-7-deazaguanine synthase OS=Paramuribaculum intestinale OX=2094151 GN=queE PE=3 SV=1
MTYKVNEIFYSLQGEGFHTGVPAVFLRFSGCNLKCPFCDTLHADGREMDADEIVRLISSYPSRHVVITGGEPAMQLDAALVDRLHENGWFVQVETNGTLPLPGNVDWVTCSPKTDRIACGRVDEIKLLYMADGYDAERMERFSAVEARSYSLQPCDCSVSDLHEDDGGAVECRNKFILEECIACLKANPQWRLSLQTHKLLDIR

SEQ ID NO: 32569 - protein, 207 aa, Parapedobacter composti
  REGION 1..207: note = tr|A0A1I1GHD8|A0A1I1GHD8_9SPHI 7-carboxy-7-deazaguanine synthase OS=Parapedobacter composti OX=623281 GN=queE PE=3 SV=1
MAHQIPDDGTRLPLMEAFYTIQGEGYHTGKAAYFIRLGGCDVGCHWCDVKESWDAELHPLTAADAIVEQAKQYPSKAVVVTGGEPLLYNLDYLTRGLQAAGIKTFIETSGAYPLSGHWDWICLSPKKFKWPLPDVIAAAGELKVIVFNKSDFEWAEKHAALVPPSCRLYLQPEWSREKEMTPLIVEYVKAHPKWEISLQTHKYLNIP

SEQ ID NO: 32570 - protein, 207 aa, unidentified
  source 1..207: note = Parapedobacter indicus
  REGION 1..207: note = tr|A0A1I3DZS0|A0A1I3DZS0_9SPHI 7-carboxy-7-deazaguanine synthase OS=Parapedobacter indicus OX=1477437 GN=queE PE=3 SV=1
MAHQVPEDGTLLPLMEEFYTIQGEGYHTGKAAYFIRLGGCDVGCHWCDVKESWDADLHPLTPADTIIEHAKQHPSKAVVVTGGEPLIYNLDYLTQGLHAAGIKTFVETSGAYPLSGHWDWICLSPKKFKGPLPDVIAAAGELKVIVFNKSDFAWAEKYAALVPSSCRLYLQPEWSKAQEMTPLIVDYVMQNPKWEISLQTHKYLNIP

SEQ ID NO: 32571 - protein, 207 aa, Parapedobacter koreensis
  REGION 1..207: note = tr|A0A1H7TRW0|A0A1H7TRW0_9SPHI 7-carboxy-7-deazaguanine synthase OS=Parapedobacter koreensis OX=332977 GN=queE PE=3 SV=1
MAHQVPDDGTRLPLMEEFYTIQGEGYHTGKAAYFIRLGGCDVGCHWCDVKESWDAELHPLTAADTIVEHAKQYPSKTVVVTGGEPLLYNLDYLTKGLQLAGIKTFIETSGAYPLSGHWDWVCLSPKKFKSPLPDVIAAAGELKVIVFNKSDFAWAEKHAALVPPTCRLYLQPEWSKAQEMTPLIVEYVKQNPKWEISLQTHKYLNIP

SEQ ID NO: 32572 - protein, 207 aa, Parapedobacter luteus
  REGION 1..207: note = tr|A0A1T5AWH2|A0A1T5AWH2_9SPHI 7-carboxy-7-deazaguanine synthase OS=Parapedobacter luteus; OX = 623280 GN=queE PE=3 SV=1
MAHQVPEDGSLLPLMEEFYTIQGEGYHTGKAAYFIRLGGCDVGCHWCDVKESWDAALHPLTAADTIIEHAKQYPSKTVVVTGGEPLLYNLDYLTRGLQAAGIKTFIETSGAYPLSGHWDWICLSPKKFKWPLPDVIAAAGELKVIVFNKSDFAWAEKHASLVPPACRLYLQPEWSKAAEITPLIVDYVKQHPKWEISLQTHKYLNIP

SEQ ID NO: 32573 - protein, 193 aa, Parapedobacter sp.
  REGION 1..193: note = tr|A0A3N7J1H6|A0A3N7J1H6_9SPHI 7-carboxy-7-deazaguanine synthase OS=Parapedobacter sp.; OX = 1958893 GN=queE PE=3 SV=1
MEEFYTIQGEGYHTGKAAYFIRLGGCDVGCHWCDVKESWDAEMHPLTAADTIIEHAKQHPSKAVVVTGGEPLIYNLDYLTRGLQAAGIKTFIETSGAYPLSGHWDWICLSPKKFKWPLPDVIAAAGELKVIVFNKSDFAWAEKHAALVPSSCKLYLQPEWSKAQEMTPLIVDYVMQNPKWEISLQTHKYLNIP

SEQ ID NO: 32574 - protein, 25 aa, Parapedobacter sp.
  REGION 1..25: note = tr|A0A3N7J2P2|A0A3N7J2P2_9SPHI 7-carboxy-7-deazaguanine synthase QueE (Fragment); OS = Parapedobacter sp. OX=1958893 GN=EAS52_19410 PE=4 SV=1
MAHQIPEDGSWLPLMEEFYTIQGEG

SEQ ID NO: 32575 - protein, 213 aa, Paraperlucidibaca baekdonensis
  REGION 1..213: note = tr|A0A3E0H145|A0A3E0H145_9GAMM 7-carboxy-7-deazaguanine synthase OS=Paraperlucidibaca baekdonensis OX=748120 GN=queE PE=3 SV=1
MSLRLTEIFYSLQGEARTVGRPTVFVRLTGCPLRCSWCDSAYAFQGGTLWSEADVLAHVASFTPQYVTVTGGEPLAQPECLSLLTALCDAGYEVSLETSGALALEPVDPRVVKVMDLKAPGSGEVHRNRYENIACLSANDQVKFVISTREDYDWAKRQCDQYDLYSRVSDVLFSPTHELLEPRTLAEWILADRLPGRLQLQLHKYLWNNAPGH

SEQ ID NO: 32576 - protein, 221 aa, unidentified
  source 1..221: note = Paraphotobacterium marinum
  REGION 1..221: note = tr|A0A220VE05|A0A220VE05_9GAMM 7-carboxy-7-deazaguanine synthase OS=Paraphotobacterium marinum OX=1755811 GN=queE PE=3 SV=1
MYNINEIFETIQGEGHFTGKPSIFIRLQGCPVGCSWCDTKHSWFVNEENRIPFKELVNENSILNSWGQASESEILNFLAKKFNARHIVITGGEPCIYDLTSLTESLESQGYFCQIETSGTFEVKASSKSWVTLSPKINMKGKLKLNHKALSRANEIKHPIGTHKDIANLKNILASNLLKQQPKIYLQPISQKERATKLCVQECIKNNWNLSIQVHKYINID

SEQ ID NO: 32577 - protein, 221 aa, unidentified
  source 1..221: note = Pararheinheimera mesophila
  REGION 1..221: note = tr|A0A3P3QP72|A0A3P3QP72_9GAMM 7-carboxy-7-deazaguanine synthase OS=Pararheinheimera mesophila OX=1547515 GN=queE PE=3 SV=1
MYKVNEIFETIQGEGSYTGTPAIFLRLQGCPVGCSWCDTKQTWEIDPDLQLSPAAILEKKADSDHWCSFTAADLVQLFADKAYRAKHVVITGGEPCMYDLRPLCELLHQHGFSTQIETSGTFEILVPNSTWVTVSPKVNMKGGYQVLRTALERANEIKHPVAMEKHIDELLELLQGLDLTQTLVYLQPISQKAKATQLAIEFCKQYNWRLSVQVHKYLGIN

SEQ ID NO: 32578 - protein, 221 aa, unidentified
  source 1..221: note = Pararheinheimera tangshanensis
  REGION 1..221: note = tr|A0A5C8LVT1|A0A5C8LVT1_9GAMM 7-carboxy-7-deazaguanine synthase OS=Pararheinheimera tangshanensis OX=400153 GN=queE PE=3 SV=1
MYKVNEIFETIQGEGSYTGTPAIFLRLQGCPVGCSWCDTKQTWEIDPELQLSPAAILEKKADSDHWCSLTSEQIVQLFADKGYRAKHVVITGGEPCMYDLRPLCELLHARGFSTQIETSGTFEILAPVSTWVTVSPKINMKGGYEVLRTALERANEIKHPVAMEKHIDELLELLQGLDLSTTLVYLQPISQKAKATQLAIEFCKQYNWRLSVQVHKYLGIN

SEQ ID NO: 32579 - protein, 245 aa, unidentified
  source 1..245: note = Pararhizobium polonicum
  REGION 1..245: note = tr|A0A1C7P4P5|A0A1C7P4P5_9RHIZ 7-carboxy-7-deazaguanine synthase OS=Pararhizobium polonicum OX=1612624 GN=queE PE=3 SV=1
MSGVREAQIRVSEIFGPTIQGEGILIGLPTVFVRTGGCDYRCSWCDTLHAVDSAYRDQWRPMSADEIWQDVARLSGNKPLTVSLSGGNPAIQPLGPLIERGHREGYRFALETQGSVAKDWFADLDVLVLSPKPPSSGMETDWDAFDACLAMAAERPQIALKVVVFDDRDYAYARAAAAGYPDLPVYLQPGNHTPPPPDDDDARVDIDGVMDRMLWLVDKVTEDRWFEARVLPQLHVLLWGNKRGV

SEQ ID NO: 32580 - protein, 213 aa, unidentified
  source 1..213: note = Parasaccharibacter apium
  REGION 1..213: note = tr|A0A2C6J2A8|A0A2C6J2A8_9PROT 7-carboxy-7-deazaguanine synthase OS=Parasaccharibacter apium OX=1510841 GN=queE PE=3 SV=1
MAYIIKELFATLQGEGAHAGRAAIFCRFAGCNLWSGREEDRHKAQCNFCDTDFIGTNGPGGGRFAHADSLAEALESCWRAHTDDAAHRYVVFTGGEPLLQLDDALIKATKARGFTLAVETNGTLPAPAGLDWICVSPKPGQSLVQTHGHELKLVYPQPSLTPEQFAGLAFQHFWLQPMDGPERIANTRRAVQYCQAHPQWRLSLQTHKLIGIA

SEQ ID NO: 32581 - protein, 213 aa, unidentified
  source 1..213: note = Parasaccharibacter apium
  REGION 1..213: note = tr|A0A2S4PDC6|A0A2S4PDC6_9PROT 7-carboxy-7-deazaguanine synthase OS=Parasaccharibacter apium OX=1510841 GN=queE PE=3 SV=1
MPYIVKELFATLQGEGAHSGRAAIFCRFTGCNLWSGREEDRHKAQCTFCDTDFIGTDGPGGGRFATAEALAAALDDCWQAHTADVTRRYVVFTGGEPLLQLDAALIAATRARGFTIAVETNGSLPAPEGIDWVCVSPKPGQPLKQTHGHELKLVYPQDTLTPEQFAACDFQHFWLQPMDGPDRPANTEKAVRYCQTHPQWRLSLQTHKLIGIP

SEQ ID NO: 32582 - protein, 222 aa, unidentified
  source 1..222: note = Parashewanella curva
  REGION 1..222: note = tr|A0A3L8PZL4|A0A3L8PZL4_9GAMM 7-carboxy-7-deazaguanine synthase OS=Parashewanella curva; OX = 2338552 GN=queE PE=3 SV=1
MQYPVNEVFETIQGEGSHTGVPAIFVRLQGCPVGCSWCDTKQTWEQELHNQVAPEEVIQVDGTIGRWAMHSAESLMSAFQDKGFTAKLVVITGGEPCIHDLTELTQGLHANGYQAQIETSGTFAVKCDEQTYVTVSPKINMKGGYKVLDQALKRANEIKHPIAKQGHIDELDELLDGVDLSEKTICLQPISQKPRATELAMATCIKRNWRLSIQTHKYLDID

SEQ ID NO: 32583 - protein, 222 aa, unidentified
  source 1..222: note = Parashewanella spongiae
  REGION 1..222: note = tr|A0A3A6UMR4|A0A3A6UMR4_9GAMM 7-carboxy-7-deazaguanine synthase OS=Parashewanella spongiae OX=342950 GN=queE PE=3 SV=1
MNYPVNEVFETIQGEGSNTGVPAVFVRLQGCPVGCSWCDTKQTWDMTAENEVAAKDVIQVDGTIGRWANHSAESLITAFKSKGFTAKLIVITGGEPCMYDLTKLTNELNRAGYITQIETSGTFEVLCSSDTYVTVSPKINMKGGYDVLEQALNRANEIKHPIAKQSHIDELDELLADIDVTRKTICLQPISQIPRATELAMSTCIARNWRLSIQTHKYLDID

SEQ ID NO: 32584 - protein, 210 aa, unidentified
  source 1..210: note = Parasphingopyxis lamellibrachiae
  REGION 1..210: note = tr|A0A3D9FCA9|A0A3D9FCA9_9SPHN 7-carboxy-7-deazaguanine synthase OS=Parasphingopyxis lamellibrachiae OX=680125 GN=queE PE=3 SV=1
MSYAVKEMFLTLQGEGVQAGRRAVFLRFAGCNLWTGREADRAKAVCQFCDTDFVGTDGENGARYADAEAVAAKAGALWGADREHAYIVCTGGEPLLQLDGALIDALHDAGFEIAVESNGTIAAPDGIDWLCVSPKAGSEIIQRSGDELKLVWPQTDIDPDELVGWDFPNFLIQPMDCEDGEAALQAAMAYVRAHPRWRLTLQNHKMLGIP

SEQ ID NO: 32585 - protein, 192 aa, unidentified
  source 1..192: note = Parcubacteria group
  REGION 1..192: note = tr|A0A2D6FNK7|A0A2D6FNK7_9BACT 7-carboxy-7-deazaguanine synthase OS=Parcubacteria group bacterium OX=2026774 GN=queE PE=3 SV=1
MLKVNEYFYSLQGEGYRAGHASIFIRLSDCDQTCGFCDTEFESGQELSNEELLVKIQEYPCQWIVWTGGEPTLQLTQSHVDYFKGKGYSQAIETNGNNRAPNGLDWVCVSPKVADHVVEKNFPDGVDELRYVRHANQLGVPEPKVESKHLYLSPRFDGNDMNKKNLQKCTELILENPKWKLSLQSHKLLNVL

SEQ ID NO: 32586 - protein, 208 aa, unidentified
  source 1..208: note = Parcubacteria group
  REGION 1..208: note = tr|A0A1V5WH20|A0A1V5WH20_9BACT 7-carboxy-7-deazaguanine synthase OS=Parcubacteria group bacterium ADurb.Bin216 OX=1852939 GN=queE PE=3 SV=1
MKYPIQETFTSLKGEGLYTGQPMHFIRLAGCNLKCEFCDTEFNKGKDIELTELVAGIAPSPISRVVITGGEPCLHSLKPLTDALHNVGKLTHLETNGTLPIIKGLFDWIALSPKNMNCLSSSVAQADEIKFLVGFEGWKSFIDNFLASYPIKTGCILYVMPITIGLNQGQTRSSKDFIQENIDDAVEYCTLNPMFRYCIQLHKVLQIP

SEQ ID NO: 32587 - protein, 220 aa, unidentified
  source 1..220: note = Parendozoicomonas haliclonae
  REGION 1..220: note = tr|A0A1X7AJV8|A0A1X7AJV8_9GAMM 7-carboxy-7-deazaguanine synthase OS=Parendozoicomonas haliclonae OX=1960125 GN=queE PE=3 SV=1
MYSVKEMFYTLQGEGANAGRPAVFCRFSGCNLWSGLEKDRATAACTFCDTDFRGTDGDGGGKFANAEALAEAVAALWPRVIDSQAKPLVVCTGGEPLLQLDQPAIDALHQAGFEIAIETNGTLPIPEGIDWSVVSPKGLAEVVVTRCDELKLVYPQPEATPERFAHIQARHYYLSPMVNPHRDDTDPLYQNPETREAINYCLQHPRWRLNLQTHKIVNIA

SEQ ID NO: 32588 - protein, 242 aa, unidentified
  source 1..242: note = Parvibacter caecicola
  REGION 1..242: note = tr|A0A3N0ABS4|A0A3N0ABS4_9ACTN 7-carboxy-7-deazaguanine synthase OS=Parvibacter caecicola; OX = 747645 GN=queE PE=3 SV=1
MEHQPSAQFLPVAEKFVSVNGEGLAAGQLAAFIRFAGCNLWCSYCDTRWANHPLVEVEGWSIENLVAWVRETGVRCVTLTGGEPLLQPNLPHLVRALLEVREPYPLRVEIETNGSRPVEPLLQLRAQAQVEGLAGQLCLTVDWKTPSAGAEVSAAMLADNYPLLDGRDAVKFVVGSEEDLAFARDRCKEQGLFDSTNVLFSPVWGEITPAQIVDSMAANGLARARLQLQMHKIIWPNVEKGV

SEQ ID NO: 32589 - protein, 210 aa, Parvibaculum lavamentivorans
  REGION 1..210: note = tr|A7HXX2|A7HXX2_PARL1 7-carboxy-7-deazaguanine synthase OS=Parvibaculum lavamentivorans (strain DS-1 / DSM 13023 / NCIMB 13966) OX=402881 GN=queE PE=3 SV=1
MYSVKEIFYTLQGEGANAGRPSVFCRFSGCNLWSGREEDRADAVCTFCDTDFVGTNGEGGGKFRDVAALADAIEKTWESGAAHNRFVVCTGGEPLLQLDAPLIAALHSRGFEIAVETNGTIVAPEGIDWICVSPKADAELKQTSGHELKLVYPQHKAQPERFEQLDFRYFYLQPMDGADAEENTRAATAYCLAHPKWRLSLQTHKLIGIP

SEQ ID NO: 32590 - protein, 215 aa, Parvibaculum sp.
  REGION 1..215: note = tr|A0A2D8XBR8|A0A2D8XBR8_9RHIZ 7-carboxy-7-deazaguanine synthase OS=Parvibaculum sp.; OX = 2024848 GN=queE PE=3 SV=1
MYSVKEIFFTLQGEGKQAGRPAVFCRFSGCNLWTGREQDREKAACTFCDTDFVGTDGQGGGKFADAEALAAEVASHWPSDTASAYGDAVKYVVCTGGEPLLQLDTALIQAFHDHGFEIAVETNGTLAAPGGIDWICVSPKADAPLVQTSGSELKLVFPQDLNQPAQFEGLSFDNFLLQPLDGGDYQTNVRASVDYCLAHPRWQLSLQTHKYLGID

SEQ ID NO: 32591 - protein, 210 aa, Parvibaculum sp.
  REGION 1..210: note = tr|A0A2D4VFU3|A0A2D4VFU3_9RHIZ 7-carboxy-7-deazaguanine synthase OS=Parvibaculum sp.; OX = 2024848 GN=queE PE=3 SV=1
MYSVKELFYTLQGEGAQAGRPAVFCRFAGCNLWSGREQDRESAQCTFCDTDFVGTDGPGGGKFKTADELADAVAAAWEGDTDDTRYVVCTGGEPLLQLDSEAIAALHARGFEIAIETNGTLKAPEGIDWICVSPKADAPLAQLTGAELKLVFPQAAAMPERFETLAFRHFYLQPMDGPDREANTQAATAYCLKHPKWKLSLQTHKMIGIP

SEQ ID NO: 32592 - protein, 223 aa, unidentified
  source 1..223: note = Parvibium lacunae
  REGION 1..223: note = tr|A0A368L758|A0A368L758_9BURK 7-carboxy-7-deazaguanine synthase OS=Parvibium lacunae; OX = 1888893 GN=queE PE=3 SV=1
MSYSVKEIFYTLQGEGAQAGRPAVFCRFAGCNLWSGREADRASAACQFCDTDFVGTDGTLGGKYATAAALAAEIAGQWPSLTTAPIQRKAPPRKYVVCTGGEPLLQIDTALIEALHAQGFEIAIETNGTLPAPAGIDWICVSPKGNQPLLQPSGHELKVVYPQAETNLDALGQLDFQHFFIQPMAVLGDSSATQANIAAATAYCLAHPQWHLSLQTHKMINIR

SEQ ID NO: 32593 - protein, 213 aa, Parvularcula bermudensis
  REGION 1..213: note = tr|E0TC96|E0TC96_PARBH 7-carboxy-7-deazaguanine synthase OS=Parvularcula bermudensis (strain ATCC BAA-594 / HTCC2503 / KCTC 12087) OX=314260 GN=queE PE=3 SV=1
MAGEPMSYAIKECYYTLQGEGAQAGRAAVFLRFAGCNLWSGREIDREEAICRFCDTDFVGTDGPGGGRFVAEELAAHVASFWPGGGSPYVVATGGEPLLQLDSPLIDALHDEGFEIGVETNGTIAAPAGLDWICVSPKSTAELVQTEGDELKLVFPQSDAPPDQFSGLAFDHFFLQPMDGPYQSIAIATTVDYCRANPLWRLSLQTHKLIGIP

SEQ ID NO: 32594 - protein, 210 aa, Parvularcula sp.
  REGION 1..210: note = tr|A0A357LC27|A0A357LC27_9PROT 7-carboxy-7-deazaguanine synthase OS=Parvularcula sp.; OX = 1979207 GN=queE PE=3 SV=1
MIYAVKECFLTLQGEGAQAGRAAVFLRFSGCNLWSGLERDRAAANCNFCDTDFIGVDGAGGGKFKDAASLAAHVRARWRGAGGDPLVVCTGGEPLLQLDTALIKALHEAGFKIAVETNGTIAAPPGVDWICVSPKADAQVRQISGDELKLVYPQDRAPPERFAALDFDHFFLQPMDGPCLAGNTAAAVAYCLAHPQWRLSVQSHKMIGID

SEQ ID NO: 32595 - protein, 209 aa, Parvularcula sp.
  REGION 1..209: note = tr|A0A371RLQ9|A0A371RLQ9_9PROT 7-carboxy-7-deazaguanine synthase OS=Parvularcula sp. SM1705 OX=2292771 GN=queE PE=3 SV=1
MTYSVKECYFTLQGEGAQTGRAAVFLRFAGCNLWTGREEDRAAAVCRFCDTDFVGTDGPGGGKFPTAAALAAHVASFWPKGGRPYVVCTGGEPLLQLDSQLIVAFHQIGFKVGVETNGTIPAPEGLDWICVSPKSTAPLVQTSGHELKLVYPQADAQPEQFAGLSFEHFFLQPMDGPDKEKATAETIAYCRSHPQWRLSLQTHKLIGIP

SEQ ID NO: 32596 - protein, 208 aa, Pasteurella aerogenes
  REGION 1..208: note = tr|A0A448K5J8|A0A448K5J8_PASAE 7-carboxy-7-deazaguanine synthase OS=Pasteurella aerogenes; OX = 749 GN=queE PE=3 SV=1
MSLRINEPSFPIVEIFESLQGEGANTGMPSIFVRLGKCNLACPWCDTNYNEFESWTLSQILAKVRSFSAKNIIITGGEPTIHPKVALLLDELKKDGYFLAIETNGLKEIPPQIDYIATSPKAMYAQKYQRRCIKTANEVRIVMDTEAHEFCEFIEGKISADYYFLSPCEVNGKMNLHETIQLLGELNARPNKPKWLLSIQTHKLIGIA

SEQ ID NO: 32597 - protein, 209 aa, Pasteurella bettyae
  REGION 1..209: note = tr|I3D6B2|I3D6B2_9PAST 7-carboxy-7-deazaguanine synthase OS=Pasteurella bettyae CCUG 2042 OX=1095749; GN = queE PE=3 SV=1
MRNQLISNPSYPIVEIFQSLQGEGFNTGMSSIFVRFGKCNLACPWCDTNYEQFEMMSLQQILEKVRSFSAKNIIITGGEPSIQPKLSLLLEQLKAEGYFLAIETNGLKEIPAQIDYIATSPKAMYAQKYSRRCIPIANEVRIVVDADAKQFCQQIEQQIQAEHYYLSPCEIDGKMNLLETIQLLGALNQRKDKPKWQLSIQTHKLIGIE

SEQ ID NO: 32598 - protein, 209 aa, unidentified
  source 1..209: note = Pasteurella caecimuris
  REGION 1..209: note = tr|A0A4S2E544|A0A4S2E544_9PAST 7-carboxy-7-deazaguanine synthase OS=Pasteurella caecimuris OX=1796644 GN=queE PE=3 SV=1
MKNQAVLKPHFNIVEIFESLQGEGFNTGMPSIFVRFGKCNLACPWCDTPYNQFERWSASQILAKVRSFSAKNIIITGGEPTIVPKIELLLDQFKADGYFLAIETNGLKVIPPQIDYIATSPKRLYMHKYEQRCIESADEVRVVADENVLPFCELIEQKIRAQHYYLSPCDIDGKMNLLETITQLGKLNQRTNKPKWQLSLQTHKLVGIE

SEQ ID NO: 32599 - protein, 209 aa, Pasteurella canis
  REGION 1..209: note = tr|A0A379EUV7|A0A379EUV7_9PAST 7-carboxy-7-deazaguanine synthase OS=Pasteurella canis; OX = 753 GN=queE PE=3 SV=1
MQGQRVLQQKYNIVEIFESLQGEGFNTGMPSIFIRFGKCNLACPWCDTHYNQYSTWTLSQILNKVRSFSSKNIIITGGEPTIVPKLDVLLDHLKANGYFLAIETNGLKTIPRQIDYIATSPKRLYQYKYQQQCIPFAHEVRIVADENVLDFCQQIEQQIKAERYYLSPCEVNSEMNLLDTITQLGILNQRVNKPKWQLSIQVHKLVGIE

SEQ ID NO: 32600 - protein, 209 aa, Pasteurella dagmatis
  REGION 1..209: note = tr|C9PRY6|C9PRY6_9PAST 7-carboxy-7-deazaguanine synthase OS=Pasteurella dagmatis ATCC 43325 OX=667128; GN = queE PE=3 SV=1
MQIREIFEPEYNIVEIFESLQGEGFNTGMPSIFVRFGKCNLACPWCDTNYNQYTTWSLSQILQKVRSFSAKNIIITGGEPTIVPKIEYLLDTLKAEGYFLAIETNGLKTIPSQIDYIATSPKRLYQHKYQQKCIPFANEVRIVADEDVFSFCEQIEQQIHADRYYLSPCEIDGEMNLLETITQIGLLNQRVNKPKWQLSIQTHKLIGIE

SEQ ID NO: 32601 - protein, 208 aa, Pasteurella langaaensis
  REGION 1..208: note = tr|A0A2U0SKJ3|A0A2U0SKJ3_9PAST 7-carboxy-7-deazaguanine synthase OS=Pasteurella langaaensis DSM 22999 OX=1122935 GN=queE PE=3 SV=1
MNSLINEPKFPIVEIFESLQGEGMNTGMPSVFVRLGKCNLACPWCDTHYNDFELWSLSQIMEKVRSFSAKNVIITGGEPTLQPKLSLLLEALKQAGYFLAIETNGLKDIPAQIDFIATSPKAMYAEKYQRRCISTADEVRIVVDGDIQAFCEIIENKIHASGYFLSPCEKNGEMNLLETITLLGQLNARANKPKWQLSIQTHKLIGIE

SEQ ID NO: 32602 - protein, 208 aa, unidentified
  source 1..208: note = [Pasteurella] mairii
  REGION 1..208: note = tr|A0A379B6D4|A0A379B6D4_9PAST 7-carboxy-7-deazaguanine synthase OS=[Pasteurella] mairii; OX = 757 GN=queE PE=3 SV=1
MSLLINEPSFPIVEIFESLQGEGANTGMPSIFVRLGKCNLACPWCDTNYHEFEPWTLSQILVKVRSFSAKNVIITGGEPTIHPKVVLLLDELKKDGYFLAIETNGLKEIPPQIDYIATSPKGMYAEKYQRRCIKKANEVRIVMDAEAREFCEFIEGKISADYYFLSPCEVNGKMNLHETIQLLGELNARPNKPQWLLSIQTHKLIGIE

SEQ ID NO: 32603 - protein, 209 aa, Pasteurella multocida
  REGION 1..209: note = tr|A0A0E3ZR73|A0A0E3ZR73_PASMD 7-carboxy-7-deazaguanine synthase OS=Pasteurella multocida subsp. multocida OH4807 OX=1304873 GN=queE PE=3 SV=1
MQIREILEPEYDIVEIFESLQGEGFNTGMPSIFVRFGKCNLACPWCDTHYNQYTTWSLSQIRQKVRSFSAKNIIITGGEPTIVPKIEHLLEALKAEGYFLAIETNGLKTIPSQIDYIATSPKRLYQHKYQQKCIPFANEVRIVADEDAFNFCEQIEQQIQAERYYLSPCEIDGEMNLLETITQIGLLNQRVNKPKWQLSIQTHKLIGIE

SEQ ID NO: 32604 - protein, 209 aa, Pasteurella multocida
  REGION 1..209: note = tr|A0A1D7R2Q5|A0A1D7R2Q5_PASMD 7-carboxy-7-deazaguanine synthase OS=Pasteurella multocida; OX = 747 GN=queE PE=3 SV=1
MQIQEIFEPEYAIVEIFESLQGEGFNTGMPSIFVRFGKCNLACPWCDTPYNQYTTWTLSKIVQKVRSFSAKNIIITGGEPTIVPKIGVLLDALKAEGYFLAIETNGLKSIPNQIDYIATSPKRLYQHKYQQKCIPFAHEVRIVADENVIAFCEQIEQQIRADHYYLSPCEVNGEMNLLETITQIGRLNQRVNKPKWQLSIQTHKLIGIE

SEQ ID NO: 32605 - protein, 209 aa, Pasteurella sp.
  REGION 1..209: note = tr|A0A4Y9GX69|A0A4Y9GX69_9PAST 7-carboxy-7-deazaguanine synthase OS=Pasteurella sp. WM03; OX = 2558280 GN=queE PE=3 SV=1
MEKLTNFDPHFNIVEIFESLQGEGFNTGMPSIFVRFGKCNLACPWCDTPYNQFERWSASQILAKVRSFSAKNIIITGGEPTIVPKIELLLDQFKADGYFLAIETNGLKAIPPQIDYIATSPKRLYMYKYEQRCIESADEVRVVADENVLPFCELIEQKIRAKHYYLSPCDIDGKMNLLETITQLGKLNQRTNKPKWQLSLQTHKLMGIE

SEQ ID NO: 32606 - protein, 205 aa, Pasteurella testudinis
  REGION 1..205: note = tr|A0A1W1UL58|A0A1W1UL58_9PAST 7-carboxy-7-deazaguanine synthase OS=Pasteurella testudinis DSM 23072 OX=1122938 GN=queE PE=3 SV=1
MSSDIHYNIVEIFESLQGEGFNTGMPSIFIRFGKCNLACPWCDTDYHRFERWTLDQIMQKVRSYTAKNIIITGGEPTIQPKLTMLLDELKAAGYFLAIETNGLKPIAPQIDYIATSPKRLYQHKYQQRCIPSADEVRIVNDGEILPFCEQIEQRIQAQHYYLSPCEQQGEMNLLDTIRKLGELNQRRNKPKWQLSLQTHKLVGIE

SEQ ID NO: 32607 - protein, 208 aa, unidentified; identical to SEQ ID NO: 31366
  source 1..208: note = Pasteurellaceae bacterium
  REGION 1..208: note = tr|A0A3S7N1H6|A0A3S7N1H6_9PAST 7-carboxy-7-deazaguanine synthase OS=Pasteurellaceae bacterium 12565 OX=2093222 GN=queE PE=3 SV=1

SEQ ID NO: 32608 - protein, 210 aa, unidentified
  source 1..210: note = Pasteurellaceae bacterium
  REGION 1..210: note = tr|A0A5C4QM73|A0A5C4QM73_9PAST 7-carboxy-7-deazaguanine synthase OS=Pasteurellaceae bacterium BK431 OX=2585026 GN=queE PE=3 SV=1
MSSEIHYNIVEIFESLQGEGFNTGMPSIFIRFGKCNLACPWCDTDYNRFTRWTLNQIIQKVRSYTAKNIIITGGEPTIQPRLSALLDQLKADGYFLAIETNGLKPIPPQIDYIATSPKRLYHHKYQQRGIPFAHEVRIVNDGDILPFCQQLEQQVQADHYYLSPCEQQGEMNLLDTIRKLGELNQRPESLSGKRPKWQLSLQTHKLVGIE

SEQ ID NO: 32609 - protein, 211 aa, unidentified
  source 1..211: note = Paucibacter aquatile
  REGION 1..211: note = tr|A0A2N8KZI4|A0A2N8KZI4_9BURK 7-carboxy-7-deazaguanine synthase OS=Paucibacter aquatile; OX = 2070761 GN=queE PE=3 SV=1
MTYAVKEIFYTLQGEGAQAGRASVFCRFAGCNLWSGREEDRARAVCNFCDTDFVGTDGQGGGKFATAEALADAIASRWPADRPGKPYVVCTGGEPLLQLDTPLIEALHARGFEIAVETNGTQPAPEGLDWICVSPKADAELVLTRGHELKLVYPQPLARPERFAGLDFQHFFLQPLDSVLKTQHTREVVDYCMQHPQWRMSVQMHKVIGIE

SEQ ID NO: 32610 - protein, 211 aa, Paucibacter sp.
  REGION 1..211: note = tr|A0A3N7EKV8|A0A3N7EKV8_9BURK 7-carboxy-7-deazaguanine synthase OS=Paucibacter sp. KBW04; OX = 2153361 GN=queE PE=3 SV=1
MTYAVKEMFYTLQGEGAQAGRASVFCRFAGCNLWSGREQDRAEAVCSFCDTDFVGTDGQNGAKFASAEALADAVASHWPANTVGKPYVVCTGGEPLLQLDKALIDALHARGFEIAVETNGTQPAPEGLDWICVSPKADAEIVLTRGHELKLVYPQPLAQPERFAGLDFQHFFLQPMDSVLKTQHTREAVAYCMSHPQWRLSVQMHKVIGIE

SEQ ID NO: 32611 - protein, 211 aa, Paucibacter sp.
  REGION 1..211: note = tr|A0A0U3EMI0|A0A0U3EMI0_9BURK 7-carboxy-7-deazaguanine synthase OS=Paucibacter sp. KCTC 42545 OX=1768242 GN=queE PE=3 SV=1
MTYAVKEIFYTLQGEGAQAGRASVFCRFAGCNLWSGREQDRAEAVCSFCDTDFVGVDGQGGGKFASAADLAEAVAAQWPSGMPGKPYVVCTGGEPLLQLDAGLIAALHAKGFEIAVETNGTQPAPEGLDWICVSPKADAEIVLTKGHELKLVYPQPLAKPERFESMDFEHFFLQPLDSILKTQHTREAVAYCMSHPQWRLSVQMHKVIGIE

SEQ ID NO: 32612 - protein, 211 aa, Paucibacter toxinivorans
  REGION 1..211: note = tr|A0A4R6QJD0|A0A4R6QJD0_9BURK 7-carboxy-7-deazaguanine synthase OS=Paucibacter toxinivorans OX=270368 GN=queE PE=3 SV=1
MSYAVKEMFFTLQGEGAQAGRASVFCRFAGCNLWSGREQDRATAPCNFCDTDFVGMDGIGGGRFATPEALAQAVAALWPAGAGGKPYVVCTGGEPLLQLDQALVDALHGVGFEIAVETNGTQLPPKGLDWICVSPKADTEIVLTQGDELKLVFPQPQALPERFEGLNFTHFFLQPMDSVLRADNTRRAVEYCMAHPQWRLSVQMHKVIGIA

SEQ ID NO: 32613 - protein, 215 aa, Paucimonas lemoignei
  REGION 1..215: note = tr|A0A2X4AQ52|A0A2X4AQ52_PAULE 7-carboxy-7-deazaguanine synthase OS=Paucimonas lemoignei; OX = 29443 GN=queE_1 PE=3 SV=1
MQETLRITEVFYSLQGETRTAGLPTVFVRLTGCPLRCQYCDSAYAFTGGTIQTLDDILGQVAEYRPRYVCVTGGEPLAQPNAIPLLKRLCDAGYEVSLETSGALDISAVDTRVSRILDLKTPGSKEVARNRYENIDLLTPNDQVKFVICSREDYDWAVSKLIQYGLERRADEVLFSPSHHELNARDLADWIVADNLPVRLQMQLHKFLWNDEPGR

SEQ ID NO: 32614 - protein, 211 aa, Paucimonas lemoignei
  REGION 1..211: note = tr|A0A4R3I650|A0A4R3I650_PAULE 7-carboxy-7-deazaguanine synthase OS=Paucimonas lemoignei; OX = 29443 GN=queE PE=3 SV=1
MTYSVKEIFYTLQGEGAHAGRPAVFCRFSGCNLWSGRESDRASAVCKFCDTDFVGTDGERGGKFPDAARLANTIAGLWPSTYTASKYVVFTGGEPLLQLDAALIDAMHAAGFEIAIETNGTLPVPPGVDWVCVSPKMGSELVVKRGNELKVVIPQAAQSLKEYERLEFDHYYVQPMDGPDKEANTRLAIETCKANPRWKLSLQTHKLLQIP

SEQ ID NO: 32615 - protein, 235 aa, Pectinatus cerevisiiphilus
  REGION 1..235: note = tr|A0A4R3KBN4|A0A4R3KBN4_9FIRM 7-carboxy-7-deazaguanine synthase OS=Pectinatus cerevisiiphilus OX=86956 GN=queE PE=3 SV=1
MRAPISEIFSSIQGEGKYAGCRQLFIRFTGCNLECSYCDTDSMLTTKTCDLENEGILSNPVELAAILPYIKKTLLKRHQAISLTGGEPLLHTAFIHELAEYVDLPLLLETNGTLPEALAKVIDDISIVSMDFKMPDAVHTELWQQHAAFLRIAMQKDVYVKIVIAQETKIEDFKKAVDLLCGINKNIMLVLQPITPYGGYTAPAPKKMLAWQSMALEKINDVRVIAQMHVMMGQR

SEQ ID NO: 32616 - protein, 223 aa, unidentified
  source 1..223: note = Pectobacterium actinidiae
  REGION 1..223: note = tr|A0A1V2R423|A0A1V2R423_9GAMM 7-carboxy-7-deazaguanine synthase OS=Pectobacterium actinidiae OX=1507808 GN=queE PE=3 SV=1
MQYPINEMFQTLQGEGYFTGVPAVFVRLQGCPVGCSWCDTKHTWDKLAERETSLDQVLVKTEESDAWGAASADDILALMAQEGYTARHIVITGGEPCIHDLAPLTLQLEKQGFSCQIETSGTHDVRCSPKTWVTVSPKVNMRGGMKVLDQALQRADEIKHPVARERDIEALDALLARLDDDKPRIVALQPISQKDDATKLCIATCIARNWRLSMQTHKYLNIA

SEQ ID NO: 32617 - protein, 223 aa, unidentified
  source 1..223: note = Pectobacterium aquaticum
  REGION 1..223: note = tr|A0A3R8QLM6|A0A3R8QLM6_9GAMM 7-carboxy-7-deazaguanine synthase OS=Pectobacterium aquaticum OX=2204145 GN=queE PE=3 SV=1
MQYPINEMFQTLQGEGYFTGVPAVFVRLQGCPVGCSWCDTKHTWDKLAERETSLDQVLVKTEESDAWGAASADDILALMVQQGYTARHIVITGGEPCIHDLAPLTLQLEKQGFSCQIETSGTHDVRCSPKTWVTVSPKVNMRGGMKVLDQALQRADEIKHPVARERDIEALDALLARLDDDKSRIVALQPISQKDDATKLCIETCIARNWRLSMQTHKYLNIA

SEQ ID NO: 32618 - protein, 223 aa, Pectobacterium atrosepticum
  REGION 1..223: note = tr|Q6D194|Q6D194_PECAS 7-carboxy-7-deazaguanine synthase OS=Pectobacterium atrosepticum (strain SCRI 1043 / ATCC BAA-672) OX=218491 GN=queE PE=3 SV=1
MQYPINEMFQTLQGEGYFTGVPAVFVRLQGCPVGCSWCDTKHTWDKLAERETSLDQVLVKTEESDAWGAASADDILALMAQQGYTARHIVITGGEPCIHDLAPLTLQLEKQGFSCQIETSGTHDVRCSPKTWVTVSPKVNMRGGMKVLDQALQRADEIKHPVARERDIEALDTLLARLDDDKPRIVALQPISQKDDATKLCIATCIARNWRLSMQTHKYLNIA

SEQ ID NO: 32619 - protein, 223 aa, Pectobacterium betavasculorum
  REGION 1..223: note = tr|A0A093VF76|A0A093VF76_9GAMM 7-carboxy-7-deazaguanine synthase OS=Pectobacterium betavasculorum OX=55207 GN=queE PE=3 SV=1
MQYPINEMFQTLQGEGYFTGVPAVFVRLQGCPVGCSWCDTKHTWDKLAERETSLDQVLVKTEESDAWGAASAEDILALMAQQGYTARHIVITGGEPCIHDLAPLTLQLEKQGFSCQIETSGTHDVRCSPKTWVTVSPKVNMRGGMKVLDQALQRADEIKHPVARERDIEALDALLARLDDDKPRIVALQPISQKDDATKLCIATCIARNWRLSMQTHKYLNIA

SEQ ID NO: 32620 - protein, 223 aa, unidentified
  source 1..223: note = Pectobacterium brasiliense
  REGION 1..223: note = tr|A0A086F2D1|A0A086F2D1_9GAMM 7-carboxy-7-deazaguanine synthase OS=Pectobacterium brasiliense OX=180957 GN=queE PE=3 SV=1
MQYPINEMFQTLQGEGYFTGVPAVFVRLQGCPVGCSWCDTKHTWDKLAERETSLDQVLVKTEESDAWGAASADDILALMVQQGYTARHIVITGGEPCIHDLAPLTLQLEKQGFSCQIETSGTHDVRCSPKTWVTVSPKVNMRGGMKVLDQALQRADEIKHPVARERDIEALDALLARLDDDKPRIVALQPISQKDDATKLCIETCIARNWRLSMQTHKYLNIA

SEQ ID NO: 32621 - protein, 223 aa, unidentified
  source 1..223: note = Pectobacterium brasiliense
  REGION 1..223: note = tr|A0A0M2EZG9|A0A0M2EZG9_9GAMM 7-carboxy-7-deazaguanine synthase OS=Pectobacterium brasiliense OX=180957 GN=queE PE=3 SV=1
MQYPINEMFQTLQGEGYFTGVPAVFVRLQGCPVGCSWCDTKHTWDKLAERETSLDQVLVKTEESDAWGAASADDILALMVQQGYTARHIVITGGEPCIHDLAPLTLQLEKQGFSCQIETSGTHDVRCSPKTWVTVSPKVNMRGGMKVLDQALQRADEIKHPVARERDIEALDALLARLDDDKPRIVALQPISQKDDATKLCIATCIARNWRLSMQTHKYLNIA

SEQ ID NO: 32622 - protein, 223 aa, Pectobacterium carotovorum
  REGION 1..223: note = tr|A0A419ACY1|A0A419ACY1_PECCA 7-carboxy-7-deazaguanine synthase OS=Pectobacterium carotovorum OX=554 GN=queE PE=3 SV=1
MQYPINEIFQTLQGEGYFTGVPAVFVRLQGCPVGCSWCDTKHTWDKLAERETSLDQVLVKTEESDAWGAASADDILALMVQQGYTARHIVITGGEPCIHDLAPLTLQLEKQGFSCQIETSGTHDVRCSPKTWVTVSPKVNMRGGMKVLDQALQRADEIKHPVARERDIEALDALLARLDDDKPRIVALQPISQKDDATKLCIETCIARNWRLSMQTHKYLNIA

SEQ ID NO: 32623 - protein, 223 aa, Pectobacterium carotovorum
  REGION 1..223: note = tr|A0A1M5MDK2|A0A1M5MDK2_PECCA 7-carboxy-7-deazaguanine synthase OS=Pectobacterium carotovorum OX=554 GN=queE PE=3 SV=1
MQYPINEMFQTLQGEGYFTGVPAVFVRLQGCPVGCSWCDTKHTWDKLAERETSLDQVLVKTEESDAWGAASADDILALMAQEGYTARHIVITGGEPCIHDLAPLTLQLEKQGFSCQIETSGTHDVRCSPKTWVTVSPKVNMRGGMKVLDQALQRADEIKHPVARERDIEALDALLARLDDDKPRIVALQPISQKDDATKLCIETCIARNWRLSMQTHKYLNIA

SEQ ID NO: 32624 - protein, 223 aa, unidentified
  source 1..223: note = Pectobacterium odoriferum
  REGION 1..223: note = tr|A0A094RSU0|A0A094RSU0_9GAMM 7-carboxy-7-deazaguanine synthase OS=Pectobacterium odoriferum OX=78398 GN=queE PE=3 SV=1
MQYPINEMFQTLQGEGYFTGVPAVFVRLQGCPVGCSWCDTKHTWDKLAERETSLDQVLVKTEESDAWGAASADDILALMAQEGYTARHIVITGGEPCIHDLAPLTLQLEKQGFSCQIETSGTHDVRCSPKTWVTVSPKVNMRGGMKVLDQALQRADEIKHPVARERDIEALDALLARLDDDKPRIVALQPISQKEDATKLCIATCIARNWRLSMQTHKYLNIA

SEQ ID NO: 32625 - protein, 223 aa, unidentified
  source 1..223: note = Pectobacterium parmentieri
  REGION 1..223: note = tr|A0A0H3I6X0|A0A0H3I6X0_PECPM 7-carboxy-7-deazaguanine synthase OS=Pectobacterium parmentieri OX=1905730 GN=queE PE=3 SV=1
MQYPINEMFQTLQGEGYFTGVPAVFVRLQGCPVGCSWCDTKHTWDKLAERETSLDLVLVKTGESDAWGAASADDILALMVQQGYTARHIVITGGEPCIHDLAPLTLQLEKQGFSCQIETSGTHDVRCSPKTWVTVSPKVNMRGGMKVLDQALQRADEIKHPVARERDIEALDALLARLDDDKPRIVALQPISQKEDATKLCIATCIARNWRLSMQTHKYLNIA

SEQ ID NO: 32626 - protein, 223 aa, unidentified
  source 1..223: note = Pectobacterium parmentieri
  REGION 1..223: note = tr|A0A3Q9JX36|A0A3Q9JX36_PECPM 7-carboxy-7-deazaguanine synthase OS=Pectobacterium parmentieri OX=1905730 GN=queE PE=3 SV=1
MQYPINEMFQTLQGEGYFTGVPAVFVRLQGCPVGCSWCDTKHTWDKLAERETSLDLVLVKTEESDAWGAASADDILALMVQQGYTARHIVITGGEPCIHDLAPLTLQLEKQGFSCQIETSGTHDVRCSPKTWVTVSPKVNMRGGMKVLDQALQRADEIKHPVARERDIEALDALLARLDDDKPRIVALQPISQKEDATKLCIATCIARNWRLSMQTHKYLNIA

SEQ ID NO: 32627 - protein, 223 aa, unidentified
  source 1..223: note = Pectobacterium peruviense
  REGION 1..223: note = tr|A0A0J6AH10|A0A0J6AH10_9GAMM 7-carboxy-7-deazaguanine synthase OS=Pectobacterium peruviense OX=2066479 GN=queE PE=3 SV=1
MQYPINEMFQTLQGEGYFTGVPAVFVRLQGCPVGCSWCDTKHTWDKLAERETSLDQVLVKTEESDAWGAASADDILALMAQQGYTARHIVITGGEPCIHDLAPLTLQLEKQGFSCQIETSGTHDVRCSPKTWVTVSPKVNMRGGMKVLDQALQRADEIKHPVARERDIEALDALLARLDDDKPRIVALQPISQKDDATKLCIATCIARNWRLSMQTHKYLNIA

SEQ ID NO: 32628 - protein, 223 aa, unidentified
  source 1..223: note = Pectobacterium polaris
  REGION 1..223: note = tr|A0A093STF3|A0A093STF3_9GAMM 7-carboxy-7-deazaguanine synthase OS=Pectobacterium polaris OX=2042057 GN=queE PE=3 SV=1
MQYPINEMFQTLQGEGYFTGVPAVFVRLQGCPVGCSWCDTKHTWDKLAERETSLDQVLVKTEESDAWGAASADDILARMAQQGYTARHIVITGGEPCIHDLAPLTLQLEKQCFSCQIETSGTHEVRCSPKTWVTVSPKVNMRGGMKVLDQALQRADEIKHPVARERDIEALDALLARLDDDKPRIVALQPISQKDDATKLCIETCIARNWRLSMQTHKYLNIA

SEQ ID NO: 32629 - protein, 234 aa, unidentified
  source 1..234: note = Pectobacterium polaris
  REGION 1..234: note = tr|A0A3S1ACL0|A0A3S1ACL0_9GAMM 7-carboxy-7-deazaguanine synthase OS=Pectobacterium polaris OX=2042057 GN=queE PE=3 SV=1
MHFYVNETVKTMQYPINEMFQTLQGEGYFTGVPAVFVRLQGCPVGCSWCDTKHTWDKLTERETSLDQVLVKTEESDAWGAASADDILARMAQQGYTARHIVITGGEPCIHDLAPLTLQLEKQGFSCQIETSGTHEVRCSPKTWVTVSPKVNMRGGMKVLDQALQRADEIKHPVARERDIEALDALLARLDDDKPRIVALQPISQKDDATKLCIETCIARNWRLSMQTHKYLNIA

SEQ ID NO: 32630 - protein, 223 aa, unidentified
  source 1..223: note = Pectobacterium polonicum
  REGION 1..223: note = tr|A0A4U7KE37|A0A4U7KE37_9GAMM 7-carboxy-7-deazaguanine synthase OS=Pectobacterium polonicum OX=2485124 GN=queE PE=3 SV=1
MQYPINEMFQTLQGEGYFTGVPAVFVRLQGCPVGCSWCDTKHTWDKLAERETSLDQVLVKTEESDAWGAASADDILALMAQQGYTARHIVITGGEPCIHDLAPLTLQLEKQGFSCQIETSGTHDVRCSPKTWVTVSPKVNMRGGMKVLDQALQRADEIKHPVARERDIEALDALLARLDDDKPRIVALQPISQKDDATKLCIETCIARNWRLSMQTHKYLNIA

SEQ ID NO: 32631 - protein, 223 aa, unidentified
  source 1..223: note = Pectobacterium punjabense
  REGION 1..223: note = tr|A0A2T3VYC6|A0A2T3VYC6_9GAMM 7-carboxy-7-deazaguanine synthase OS=Pectobacterium punjabense OX=2108399 GN=queE PE=3 SV=1
MQYPINEMFQTLQGEGYFTGVPAVFVRLQGCPVGCSWCDTKHTWDKLAERETSLDQVLVKTEESDAWGAASADDILALMAQQGYTARHIVITGGEPCIHDLAPLTLQLEKQGFSCQIETSGTHDVRCSPKTWVTVSPKVNMRGGMKVLDQALQRADEIKHPVARERDIEALDALLARLDDDKPRIVALQPISQKEDATKLCIATCIARNWRLSMQTHKYLNIA

SEQ ID NO: 32632 - protein, 223 aa, Pectobacterium wasabiae
  REGION 1..223: note = tr|A0A1D7YX52|A0A1D7YX52_9GAMM 7-carboxy-7-deazaguanine synthase OS=Pectobacterium wasabiae CFBP 3304 OX=1175631 GN=queE PE=3 SV=1
MQYPINEMFQTLQGEGYFTGVPAVFVRLQGCPVGCSWCDTKHTWDKLAERETSLDQVLVKTEESDAWGAASADDILALMAQQGYTARHIVITGGEPCIHDLAPLTLQLEKQGFSCQIETSGTHDVRCSPKTWVTVSPKVNMRGGMRVLDQALQRADEIKHPVARERDIEALDALLARLDDDKPRIVALQPISQKEDATKLCIATCIARNWRLSMQTHKYLNIA

SEQ ID NO: 32633 - protein, 207 aa, Pedobacter africanus
  REGION 1..207: note = tr|A0A1W2DHR1|A0A1W2DHR1_9SPHI 7-carboxy-7-deazaguanine synthase OS=Pedobacter africanus; OX = 151894 GN=queE PE=3 SV=1
MAHQIPEDGTLLPLMEEFYTIQGEGFNTGKAAYFIRLGGCDVGCHWCDVKESWDAELHPLTPTDAIVEKAAGFPGKAVVITGGEPLIYNLDYLTTALQQKGILTFIETSGAYPLSGNWDWICLSPKKFKAPRPDITPFANELKVIVFNKSDFDWAEKYAETVSPNCKLYLQPEWSKSKEITPLIIDYVMANPKWEISLQTHKFLNIP

SEQ ID NO: 32634 - protein, 207 aa, Pedobacter alluvionis
  REGION 1..207: note = tr|A0A497Y2R4|A0A497Y2R4_9SPHI 7-carboxy-7-deazaguanine synthase OS=Pedobacter alluvionis; OX = 475253 GN=queE PE=3 SV=1
MKQEIPEDGTLLPLMEEFYTIQGEGFNTGKAAYFIRLGGCDVGCHWCDVKESWNAEMHPLTPADVIVENADKFPGKAVVITGGEPLIYNLDYLTNKLKERGILTFIETSGAYPLSGNWDWICLSPKKFKAPRPDITPFAHELKVIVFNKSDFKWAEEYAAMVSPTCKLYLQPEWSKSTEITPLIIEYVMANPKWEISLQTHKFLNIP

SEQ ID NO: 32635 - protein, 207 aa, unidentified
  source 1..207: note = Pedobacter antarcticus
  REGION 1..207: note = tr|A0A081PI57|A0A081PI57_9SPHI 7-carboxy-7-deazaguanine synthase OS=Pedobacter antarcticus 4BY OX=1358423 GN=queE PE=3 SV=1
MAHNIPADGTLLPLMEEFYTIQGEGYNTGKAAYFIRLGGCDVGCHWCDVKESWDAELHPLTSSDDIVAKAETFPGKAVVITGGEPLIYNLDYLTAKLKEKNILTFIETSGAYPLSGHWDWICLSPKKFKAPRPDITPFANELKVIVFNKSDFEWAEKYAETVSPGCKLYLQPEWSKAQEITPLIVEYVMANPKWEISLQTHKYLNIP

SEQ ID NO: 32636 - protein, 207 aa, unidentified; identical to SEQ ID NO: 32635
  source 1..207: note = Pedobacter antarcticus
  REGION 1..207: note = tr|A0A1I2FAU8|A0A1I2FAU8_9SPHI 7-carboxy-7-deazaguanine synthase OS=Pedobacter antarcticus OX=34086 GN=queE PE=3 SV=1

SEQ ID NO: 32637 - protein, 207 aa, Pedobacter bauzanensis
  REGION 1..207: note = tr|A0A4R1LR46|A0A4R1LR46_9SPHI 7-carboxy-7-deazaguanine synthase OS=Pedobacter bauzanensis OX=653929 GN=queE PE=3 SV=1
MNNSVPEDGTLLPLMEEFYTIQGEGYNTGKAAYFIRLGGCDVGCHWCDVKESWDASIHPLTAADKIVEHAKQHPAKTVVVTGGEPLIYNMDYLTRKLKENGIQTFIETSGAYPLSGEWDWICLSPKKFKSPRPDITPFAHELKIIVFNKSDFQWAEDYAKLVSPGCKLYLQPEWSNAAKMTPLIIEYVMNNPKWEVSLQTHKFMNIP

SEQ ID NO: 32638 - protein, 207 aa, Pedobacter borealis
  REGION 1..207: note = tr|A0A4R8PA99|A0A4R8PA99_9SPHI 7-carboxy-7-deazaguanine synthase OS=Pedobacter borealis; OX = 475254 GN=queE PE=3 SV=1
MKQAIPEDGTLLPLMEEFYTIQGEGFNTGKAAYFIRLGGCDVGCHWCDVKESWDAEMHPLTASDVIVENASQFPGKAVVITGGEPLIYNLDYLTNKLKERGILTFIETSGAYPLSGNWDWICLSPKKFKAPRPDITPFANELKVIVFNKSDFKWAEEYAAMVSPNCKLYLQPEWSKSKEITPLIIEYVMANPKWEISLQTHKFLNIP

SEQ ID NO: 32639 - protein, 207 aa, Pedobacter caeni
  REGION 1..207: note = tr|A0A1M4WNL2|A0A1M4WNL2_9SPHI 7-carboxy-7-deazaguanine synthase OS=Pedobacter caeni; OX = 288992 GN=queE PE=3 SV=1
MAHQIPADGTLLPLMEEFYTIQGEGFNTGKAAYFIRLGGCDVGCHWCDVKESWDAELHPLTLSDDIVIKADSFPGKAVVITGGEPLIYNLDYLTQKLKERNILTFIETSGAYPLSGTWDWICLSPKKFKAPRPDITPFANELKVIVFNKSDFEWAEKYAESVSDSCKLYLQPEWSKSKEMTPLIIDYVMANPKWEISLQTHKYLNIP

SEQ ID NO: 32640 - protein, 207 aa, unidentified
  source 1..207: note = Pedobacter chitinilyticus
  REGION 1..207: note = tr|A0A3S3QHT9|A0A3S3QHT9_9SPHI 7-carboxy-7-deazaguanine synthase OS=Pedobacter chitinilyticus OX=2233776 GN=queE PE=3 SV=1
MAHQIPEDGTLLPLMEEFYTIQGEGFNTGKAAYFIRLGGCDVGCHWCDVKESWDAELHPLTTADDIAAKAATFPGKAVVVTGGEPLIYNLDYLTKKLQDQGILTFIETSGAYPLSGSWDWICLSPKKFKAPRPDITPFANELKVIVFNKSDFEWAEKYAEMVGPNCKLYLQPEWSKAKTVTPLIVDYVMANPKWEISLQTHKFLNIP

SEQ ID NO: 32641 - protein, 207 aa, Pedobacter cryoconitis
  REGION 1..207: note = tr|A0A127VAI9|A0A127VAI9_9SPHI 7-carboxy-7-deazaguanine synthase OS=Pedobacter cryoconitis OX=188932 GN=queE PE=3 SV=1
MAHNIPADGTLLPLMEEFYTIQGEGFNTGKAAYFIRLGGCDVGCHWCDVKESWDAELHPLTSADDIAEKADTFPGKAVVITGGEPLIYNMDYLTKKLQEKNILTFIETSGAYPLSGSWDWICLSPKKFKAPRPDITPFANELKVIVFNKSDFEWAEKYAETVSPACKLYLQPEWSKSKEITPMIIDYVMANPKWEISLQTHKYLNIP

SEQ ID NO: 32642 - protein, 207 aa, Pedobacter duraquae
  REGION 1..207: note = tr|A0A4R6IP36|A0A4R6IP36_9SPHI 7-carboxy-7-deazaguanine synthase OS=Pedobacter duraquae; OX = 425511 GN=queE PE=3 SV=1
MAHQIPTDGTLLPLMEEFYTIQGEGYNTGKAAYFIRLGGCDVGCHWCDVKESWDADLHPLTLSDDIAAKADTFPGKAVVITGGEPLIYNLDYLTARLKERNILTFIETSGAYPLSGSWDWICLSPKKFKAPRPDITPFANELKVIVFNKSDFAWAEQYAATVSDTCKLYLQPEWSKSKEITPLIIDYVMANPKWEISLQTHKYLNIP

SEQ ID NO: 32643 - protein, 207 aa, Pedobacter ginsengisoli
  REGION 1..207: note = tr|A0A2D1U4V2|A0A2D1U4V2_9SPHI 7-carboxy-7-deazaguanine synthase OS=Pedobacter ginsengisoli OX=363852 GN=queE PE=3 SV=1
MAHQIPADGTLLPLMEEFYTIQGEGFNTGKAAYFIRLGGCDVGCHWCDVKESWDAELHPLTLADDIVTKADTFPGKAVVITGGEPLIYNLDYLTQKLRERKILTFIETSGAYPLSGEWDWICLSPKKFKAPRPDITPFANELKVIVFNKSDFEWAEKYAETVSENCKLYLQPEWSKSKEITPMIIDYVMANPKWEISLQTHKFLNIP

SEQ ID NO: 32644 - protein, 207 aa, unidentified
  source 1..207: note = Pedobacter ginsenosidimutans
  REGION 1..207: note = tr|A0A0T5VJT0|A0A0T5VJT0_9SPHI 7-carboxy-7-deazaguanine synthase OS=Pedobacter ginsenosidimutans OX=687842 GN=queE PE=3 SV=1
MKQDIPEDGTLLPLMEEFYTIQGEGFNTGKAAYFIRLGGCDVGCHWCDVKESWDAEMHPLTASDVIVENADKFPGKAVVITGGEPLIYNLDYLTNKLKERGILTFIETSGAYPLSGNWDWICLSPKKFKAPRPDITPFAHELKVIVFNKSDFKWAEEYAAMVSPTCKLYLQPEWSKSKEITPLIIDYVMANPKWEISLQTHKFLNIP

SEQ ID NO: 32645 - protein, 207 aa, Pedobacter glucosidilyticus
  REGION 1..207: note = tr|A0A0B8YAY4|A0A0B8YAY4_9SPHI 7-carboxy-7-deazaguanine synthase OS=Pedobacter glucosidilyticus OX=1122941 GN=queE PE=3 SV=1
MKNFIPEDGTLLPLMEEFYTIQGEGFNTGKAAYFIRLGGCDVGCHWCDVKESWDADLHPLTPSDDIVNNATQYPGKAVVITGGEPLLYNLDYLTKKLKENDILTFIETSGAYPLSGNWDWICLSPKKFKAPNPSIAKFANELKIIVFNKSDFAWAEEHALLVGPNCKLYLQPEWSKANEMLPLIIDYVKNNPKWEISLQTHKYLNIP

SEQ ID NO: 32646 - protein, 207 aa, Pedobacter hartonius
  REGION 1..207: note = tr|A0A1H4HEP7|A0A1H4HEP7_9SPHI 7-carboxy-7-deazaguanine synthase OS=Pedobacter hartonius; OX = 425514 GN=queE PE=3 SV=1
MAHNIPADGTLLPLMEEFYTIQGEGFNTGKAAYFIRLGGCDVGCHWCDVKESWDAELHPLTSADAIAEKADTFPGKAVVITGGEPLIYNMDYLTKKLQERNILTFIETSGAYPLSGSWDWICLSPKKFKAPRPDITPFANELKVIVFNKSDFEWAERYSETVSPTCKLYLQPEWSKSKEMTPLIIDYVMANPKWEISLQTHKYLNIP

SEQ ID NO: 32647 - protein, 207 aa, Pedobacter heparinus
  REGION 1..207: note = tr|C6XWX8|C6XWX8_PEDHD 7-carboxy-7-deazaguanine synthase OS=Pedobacter heparinus (strain ATCC 13125 / DSM 2366 / CIP 104194 / JCM 7457 / NBRC 12017 / NCIMB 9290 / NR RL B-14731 / HIM 762-3) OX=485917 GN=queE PE=3 S
MAHQIPEDGTLLPLMEEFYTIQGEGFNTGKAAYFIRLGGCDVGCHWCDVKESWDAELHPLTPADAIVAKAESYPGKAVVITGGEPLIYNLDYLTRRLREKGILTFIETSGAYPLSGDWDWICLSPKKFKAPRPDITPYANELKVIVFNKSDFEWAEKYAETVSANCKLYLQPEWSKSKEITPLIIDYVMANPKWEISLQTHKFLNIP

SEQ ID NO: 32648 - protein, 207 aa, Pedobacter insulae
  REGION 1..207: note = tr|A0A1I3AIE6|A0A1I3AIE6_9SPHI 7-carboxy-7-deazaguanine synthase OS=Pedobacter insulae; OX = 414048 GN=queE PE=3 SV=1
MAHIIPENGSMLPLMEEFYTIQGEGFNTGKAAYFIRLGGCDVGCHWCDVKESWDAELHALTAVEEIVEKASSFPGKAVVVTGGEPLIYNLDYLTNKLQEQNMLTFIETSGAYPLSGSWDWICLSPKKFKAPRPDITAFANELKVIVFNKSDFEWAEKYAETVSPTCKLYLQPEWSKAKEMTPLIVDYVMANPKWEISLQTHKFLNIP

SEQ ID NO: 32649 - protein, 207 aa, unidentified
  source 1..207: note = Pedobacter jejuensis
  REGION 1..207: note = tr|A0A3N0BT72|A0A3N0BT72_9SPHI 7-carboxy-7-deazaguanine synthase OS=Pedobacter jejuensis; OX = 1268550 GN=queE PE=3 SV=1
MKQDIPEDGTLLPLMEEFYTIQGEGFNTGKAAYFIRLGGCDVGCHWCDVKESWDAEMHPLTPADVIVENADKFPGKAVVITGGEPLIYNLDYLTNKLKERGILTFIETSGAYPLSGNWDWICLSPKKFKAPRPDITPFAHELKVIVFNKSDFKWAEEYAAMVSPTCKLYLQPEWSKSKEITPMIIEYVMANPKWEISLQTHKFLNIP

SEQ ID NO: 32650 - protein, 207 aa, unidentified
  source 1..207: note = Pedobacter kyonggii
  REGION 1..207: note = tr|A0A4Q9H801|A0A4Q9H801_9SPHI 7-carboxy-7-deazaguanine synthase OS=Pedobacter kyonggii; OX = 1926871 GN=queE PE=3 SV=1
MKQEIPEDGTLLPLMEEFYTIQGEGFNTGKAAYFIRLGGCDVGCHWCDVKESWDAEMHPLTPSDVIVENADKFPGKAVVITGGEPLIYNLDYLTNKLKERGILTFIETSGAYPLSGNWDWICLSPKKFKAPRPDITPFAHELKVIVFNKSDFKWAEEYAAMVSPTCKLYLQPEWSKAKEITPLIIDYVMANPKWEISLQTHKFLNIP

SEQ ID NO: 32651 - protein, 207 aa, unidentified
  source 1..207: note = Pedobacter kyungheensis
  REGION 1..207: note = tr|A0A0C1D569|A0A0C1D569_9SPHI 7-carboxy-7-deazaguanine synthase OS=Pedobacter kyungheensis OX=1069985 GN=queE PE=3 SV=1
MKQDIPEDGTLLPLMEEFYTIQGEGFNTGKAAYFIRLGGCDVGCHWCDVKESWDAEMHPLTASDVIVENADRFPGKAVVITGGEPLIYNLDYLTSKLKERGILTFIETSGAYPLSGNWDWICLSPKKFKAPRPDIAPFANELKVIVFNKSDFKWAEEYAAMVSPGCKLYLQPEWSKSKEITPMIIDYVMANPKWEISLQTHKFLNIP

SEQ ID NO: 32652 - protein, 207 aa, unidentified
  source 1..207: note = Pedobacter lusitanus
  REGION 1..207: note = tr|A0A0D0FSL3|A0A0D0FSL3_9SPHI 7-carboxy-7-deazaguanine synthase OS=Pedobacter lusitanus; OX = 1503925 GN=queE PE=3 SV=1
MAHNIPADGTLLPLMEEFYTIQGEGFNTGKAAYFIRLGGCDVGCHWCDVKESWDAELHPLTSADDIAEKADTFPGKAVVITGGEPLIYNMDYLTKKLQEKNILTFIETSGAYPLSGSWDWICLSPKKFKAPRPDITPFANELKVIVFNKSDFEWAEKYAETVSPTCKLYLQPEWSKSKEITPMIIDYVMANPKWEISLQTHKYLNIP

SEQ ID NO: 32653 - protein, 207 aa, unidentified
  source 1..207: note = Pedobacter luteus
  REGION 1..207: note = tr|A0A1T5ALQ1|A0A1T5ALQ1_9SPHI 7-carboxy-7-deazaguanine synthase OS=Pedobacter luteus; OX = 572036 GN=queE PE=3 SV=1
MAHQIPADGTLLPLMEEFYTIQGEGFHSGKAAYFIRLGGCDVGCHWCDVKESWDAELHPLTAADQIVKNAEKFPGKAVVVTGGEPLIYNLDYLTAELQARGIKTFIETSGAYPLSGSWDWICLSPKKFKAPRPDINPFAGELKVIVFNKSDFAWAEEHAQHVSENCKLYLQPEWSKSAEMTPLIIDYVMQNPKWEISLQTHKYLNIP

SEQ ID NO: 32654 - protein, 207 aa, Pedobacter metabolipauper
  REGION 1..207: note = tr|A0A4R6SZ94|A0A4R6SZ94_9SPHI 7-carboxy-7-deazaguanine synthase OS=Pedobacter metabolipauper OX=425513 GN=queE PE=3 SV=1
MAHQIPADGTLLPLMEEFYTIQGEGFNTGKAAYFIRLGGCDVGCHWCDVKESWDAELHPLTHADDIVAKADGFPGKAVVITGGEPLIYNLDYLTKKLHERKILTFIETSGAYPLSGDWDWICLSPKKFKAPRPDITPFANELKVIVFNKSDFDWAEKYAETVSDTCKLYLQPEWSKSKEITPLIIDYVMANPKWEISLQTHKYLNIP

SEQ ID NO: 32655 - protein, 207 aa, unidentified
  source 1..207: note = Pedobacter nutrimenti
  REGION 1..207: note = tr|A0A318UKK5|A0A318UKK5_9SPHI 7-carboxy-7-deazaguanine synthase OS=Pedobacter nutrimenti; OX = 1241337 GN=queE PE=3 SV=1
MAHQIPSDGTLLPLMEEFYTIQGEGFNTGKAAYFIRLGGCDVGCHWCDVKESWDAELHPLTSADDIVAKAETFPGKAVVITGGEPLIYNLDYLTAKLQQKKILTFIETSGAYPLSGSWDWICLSPKKFKAPRPDITPYANELKVIIFNKSDFKWAEQYAQTVSDNCKLYLQPEWSKSKEITPLIIDYVMANPKWEISLQTHKYLNIP

SEQ ID NO: 32656 - protein, 207 aa, Pedobacter nyackensis
  REGION 1..207: note = tr|A0A1W2DEK1|A0A1W2DEK1_9SPHI 7-carboxy-7-deazaguanine synthase OS=Pedobacter nyackensis; OX = 475255 GN=queE PE=3 SV=1
MAHQIPEDGTLLPLMEEFYTIQGEGFNTGKAAYFIRLGGCDVGCHWCDVKESWDAELHPLTHADEIVAKADSFPGRAVVITGGEPLIYNLDYLTKELRKKNILTFIETSGAYPLSGEWDWICLSPKKFKSPRPDITPFANELKVIVFNKSDFEWAEKYAETVSENCKLYLQPEWSKSKEMTPLIIDYVMANPRWEISLQTHKYLNIP

SEQ ID NO: 32657 - protein, 193 aa, unidentified
  source 1..193: note = Pedobacter psychrophilus
  REGION 1..193: note = tr|A0A179DGX8|A0A179DGX8_9SPHI 7-carboxy-7-deazaguanine synthase OS=Pedobacter psychrophilus OX=1826909 GN=queE PE=3 SV=1
MEEFYTIQGEGFNSGKAAYFIRLGGCDVGCHWCDVKESWDANLHPLTSTDKIVENAIQYPGKAVVVTGGEPLIYNLNNLTQQLKAKGIVTFIETSGAYPLSGNWDWICLSPKKFKAPRKDIAPFANELKVIVFNKSDFIWAEEHAAMVSPTCKLYLQPEWSKSAEMTPLIINYVMNNPKWEISLQTHKFLNIP

SEQ ID NO: 32658 - protein, 207 aa, unidentified
  source 1..207: note = Pedobacter psychrotolerans
  REGION 1..207: note = tr|A0A4R2HC08|A0A4R2HC08_9SPHI 7-carboxy-7-deazaguanine synthase OS=Pedobacter psychrotolerans OX=1843235 GN=queE PE=3 SV=1
MIQHIPEDGTLLPLMEEFYTIQGEGFNTGKAAYFIRLGGCDVGCHWCDVKESWDANMHPLTPADVIVANADKFPGKAVVITGGEPLIYNLDYLTNKLKERGILTFIETSGAYPLSGNWDWICLSPKKFKAPRPDITPFAHELKVIVFNKSDFKWAEEYAAMVSPTCKLYLQPEWSKSKEITPMIIEYVMANPKWEISLQTHKFLNIP

SEQ ID NO: 32659 - protein, 207 aa, Pedobacter rhizosphaerae
  REGION 1..207: note = tr|A0A1H9S2X3|A0A1H9S2X3_9SPHI 7-carboxy-7-deazaguanine synthase OS=Pedobacter rhizosphaerae OX=390241 GN=queE PE=3 SV=1
MKQQIPEDGTLLPLMEEFYTIQGEGFNTGKAAYFIRLGGCDVGCHWCDVKESWDAEMHPLTPSDVIVENADQFPGKAVVITGGEPLIYNLDYLTLKLKERGILTFIETSGAYPLSGHWDWICLSPKKFKAPRPDITPFANELKVIVFNKSDFKWAEEYAAMVSPTCKLYLQPEWSKSKEITPMIIDYVMANPKWEISLQTHKFLNIP

SEQ ID NO: 32660 - protein, 207 aa, unidentified
  source 1..207: note = Pedobacter ruber
  REGION 1..207: note = tr|A0A1G9S7J2|A0A1G9S7J2_9SPHI 7-carboxy-7-deazaguanine synthase OS=Pedobacter ruber; OX = 990371 GN=queE PE=3 SV=1
MAHQIPPDGTLLPLMEEFYTIQGEGFHSGKAAYFIRLGGCDVGCHWCDVKESWDAELHPLTSADQIVQNAEKFPGKAVVVTGGEPLIYNLDYLTAELQKRGIKTFIETSGAYPLSGSWDWICLSPKKFKSPRPDILPFAGELKVIVFNKSDFLWAEEHAAHVSDTCKLYLQPEWSKSAEITPLIIDYVMQNPKWEVSLQTHKYLNIP

SEQ ID NO: 32661 - protein, 207 aa, Pedobacter soli
  REGION 1..207: note = tr|A0A1G6IN98|A0A1G6IN98_9SPHI 7-carboxy-7-deazaguanine synthase OS=Pedobacter soli; OX = 390242 GN=queE PE=3 SV=1
MKQEIPEDGTLLPLMEEFYTIQGEGFNTGKAAYFIRLGGCDVGCHWCDVKESWDAEMHPLTASDVIVENADRFPGKAVVITGGEPLIYNLDYLTNKLKERGILTFIETSGAYPLSGNWDWICLSPKKFKAPRPDIAPFANELKVIVFNKSDFKWAEEYAAMVSPGCKLYLQPEWSKSKEITPMIIDYVMANPKWEISLQTHKFLNIP

SEQ ID NO: 32662 - protein, 207 aa, Pedobacter sp.
  REGION 1..207: note = tr|A0A4R2ZEY9|A0A4R2ZEY9_9SPHI 7-carboxy-7-deazaguanine synthase OS=Pedobacter sp. CF074; OX = 2135714 GN=queE PE=3 SV=1
MKQEIPEDGTLLPLMEEFYTIQGEGFNTGKAAYFIRLGGCDVGCHWCDVKESWNAEMHPLTSADVIVQNADKFPGKAVVITGGEPLIYNLDYLTNKLKERGILTFIETSGAYPLSGNWDWICLSPKKFKAPRPDITPFAHELKVIVFNKSDFKWAEEYAAMVSPTCKLYLQPEWSKSAEITPLIIEYVMANPKWEISLQTHKFLNIP

SEQ ID NO: 32663 - protein, 193 aa, Pedobacter sp.
  REGION 1..193: note = tr|A6E8F6|A6E8F6_9SPHI 7-carboxy-7-deazaguanine synthase OS=Pedobacter sp. BAL39 OX=391596 GN=queE PE=3; SV = 1
MEEFYTIQGEGFNTGKAAYFIRLGGCDVGCHWCDVKESWDAELHPLTAADDIVEKADSFPGKAVVITGGEPLIYNLDYLTRKLRERNILTFIETSGAYPLSGSWDWICLSPKKFKAPRPDITPFANELKVIIFNKSDFKWAEQYAETVSKNCKLYLQPEWSKSKEITPMIIEYVMANPKWEISLQTHKYLNIP

SEQ ID NO: 32664 - protein, 207 aa, Pedobacter steynii
  REGION 1..207: note = tr|A0A1G9KRA2|A0A1G9KRA2_9SPHI 7-carboxy-7-deazaguanine synthase OS=Pedobacter steynii; OX = 430522 GN=queE PE=3 SV=1
MAHQIPADGTLLPLMEEFYTIQGEGFNTGKAAYFIRLGGCDVGCHWCDVKESWDAELHPLTLSDDIVVKADSFPGKAVVITGGEPLIYNLDYLTQKLKERNILTFIETSGAYPLSGTWDWICLSPKKFKAPRPDITPFANELKVIVFNKSDFEWAEKYAESVSDTCKLYLQPEWSKSKEMTPLIIDYVMANPKWEISLQTHKYLNIP

SEQ ID NO: 32665 - protein, 207 aa, Pedobacter steynii
  REGION 1..207: note = tr|A0A1D7QNN4|A0A1D7QNN4_9SPHI 7-carboxy-7-deazaguanine synthase OS=Pedobacter steynii; OX = 430522 GN=queE PE=3 SV=1
MAHQIPADGTLLPLMEEFYTIQGEGFNTGKAAYFIRLGGCDVGCHWCDVKESWDAELHPLTLSDDIVTKADIFPGKAVVITGGEPLIYNLDYLTQKLKEKNILTFIETSGAYPLSGSWDWICLSPKKFKAPRPDITPFANELKVIVFNKSDFEWAEKYAETVSDTCKLYLQPEWSKSKEMTPLIIDYVMANPKWEISLQTHKYLNIP

SEQ ID NO: 32666 - protein, 207 aa, Pedobacter suwonensis; identical to SEQ ID NO: 32638
  REGION 1..207: note = tr|A0A1I0SI19|A0A1I0SI19_9SPHI 7-carboxy-7-deazaguanine synthase OS=Pedobacter suwonensis; OX = 332999 GN=queE PE=3 SV=1

SEQ ID NO: 32667 - protein, 207 aa, Pedobacter terrae
  REGION 1..207: note = tr|A0A1G7N6X7|A0A1G7N6X7_9SPHI 7-carboxy-7-deazaguanine synthase OS=Pedobacter terrae; OX = 405671 GN=queE PE=3 SV=1
MKQAIPEDGTLLPLMEEFYTIQGEGFNTGKAAYFIRLGGCDVGCHWCDVKESWDAEMHPLTSSDVIVENADRFPGKAVVITGGEPLIYNLDYLTYKLKERGILTFIETSGAYPLSGNWDWICLSPKKFKAPRPDITPFAHELKVIIFNKSDFKWAEEYAAMVSPTCKLYLQPEWSKSKEITPLIIEYVMANPKWEISLQTHKFLNIP

SEQ ID NO: 32668 - protein, 207 aa, Pedobacter terrae
  REGION 1..207: note = tr|A0A561G0I0|A0A561G0I0_9SPHI 7-carboxy-7-deazaguanine synthase OS=Pedobacter terrae; OX = 405671 GN=queE PE=3 SV=1
MKQEIPEDGTLLPLMEEFYTIQGEGFNTGKAAYFIRLGGCDVGCHWCDVKESWDAEMHPLTPADLIVENADKFPGKAVVITGGEPLIYNLDYLTNKLKERGILTFIETSGAYPLSGNWDWICLSPKKFKAPRPDITPFAHELKVIVFNKSDFKWAEEYAAMVSPTCKLYLQPEWSKSKEITPLIIEYVMANPKWEISLQTHKFLNIP

SEQ ID NO: 32669 - protein, 206 aa, unidentified
  source 1..206: note = Pedobacter tournemirensis
  REGION 1..206: note = tr|A0A4Q0MG59|A0A4Q0MG59_9SPHI 7-carboxy-7-deazaguanine synthase OS=Pedobacter tournemirensis OX=699437 GN=queE PE=3 SV=1
MTKVPEDGSLLPLMEEFYTIQGEGYHSGKAAYFIRLGGCDVGCHWCDVKESWDAELHPLTPADQIIENAAKYPGKAVVITGGEPLIYNLDYLTAGLHERGIKTFIETSGAYPLSGKWDWICLSPKKFKAPLPEIAPKAGELKIIVFNKSDLAWAEKYAGMVSPSCKLYLQPEWSKAGEVTSLIIDYVKENPKWEISLQTHKYLNIP

SEQ ID NO: 32670 - protein, 206 aa, unidentified
  source 1..206: note = Pedobacter tournemirensis
  REGION 1..206: note = tr|A0A543GYR3|A0A543GYR3_9SPHI 7-carboxy-7-deazaguanine synthase OS=Pedobacter tournemirensis OX=699437 GN=queE PE=3 SV=1
MTKVPEDGSLLPLMEEFYTIQGEGYHSGKAAYFIRLGGCDVGCHWCDVKESWDAELHPLTPADQIIENAAKYPGKAVVITGGEPLIYNLDYLTAGLHDRGIKTFIETSGAYPLSGEWDWICLSPKKFKAPLPEIAPKAGELKIIVFNKSDLAWAEKYAGMVSPSCKLYLQPEWSKAGEVTSLIIDYVKENPKWEISLQTHKYLNIP

SEQ ID NO: 32671 - protein, 207 aa, Pedobacter westerhofensis
  REGION 1..207: note = tr|A0A521FGM7|A0A521FGM7_9SPHI 7-carboxy-7-deazaguanine synthase OS=Pedobacter westerhofensis OX=425512 GN=queE PE=3 SV=1
MAHNIPADGTLLPLMEEFYTIQGEGFNTGKAAYFIRLGGCDVGCHWCDVKESWDAELHPLTAADAIAEKADTFPGKAVVITGGEPLIYNMDYLTKKLHERNILTFIETSGAYPLSGDWDWICLSPKKFKAPRPDITPFANELKVIVFNKSDFEWAERYAETVSPTCKLYLQPEWSKSREMTPLIIDYVMANPKWEISLQTHKYLNIP

SEQ ID NO: 32672 - protein, 207 aa, unidentified
  source 1..207: note = Pedobacter xixiisoli
  REGION 1..207: note = tr|A0A285ZTF5|A0A285ZTF5_9SPHI 7-carboxy-7-deazaguanine synthase OS=Pedobacter xixiisoli; OX = 1476464 GN=queE PE=3 SV=1
MAHHIPEDGTLLPLMEEFYTIQGEGYNTGKAAYFIRLGGCDVGCHWCDVKESWDAELHPLTSSDDIAAKADTFPGKAVVVTGGEPLIYNLDYLTKQLQDRGILTFIETSGAYPLSGSWDWICLSPKKFKAPRPDITPFANELKVIVFNKSDFEWAEKYAEMVGPNCKLYLQPEWSKASTVTPLIIEYVMANPKWEISLQTHKFLNIP

SEQ ID NO: 32673 - protein, 207 aa, unidentified
  source 1..207: note = Pedobacter yonginense
  REGION 1..207: note = tr|A0A317ESX7|A0A317ESX7_9SPHI 7-carboxy-7-deazaguanine synthase OS=Pedobacter yonginense; OX = 651869 GN=queE PE=3 SV=1
MKQEIPEDGTLLPLMEEFYTIQGEGFNTGKAAYFIRLGGCDVGCHWCDVKESWDANLHPLTPSDVIVDHADQYPGKAVVITGGEPLIYNLDYLTNKLKERGILTFIETSGAYPLSGNWDWICLSPKKFKAPRPDITPFAHELKVIVFNKSDFKWAEEYAAMVSPTCKLYLQPEWSKSKEITPLIIDYVMANPKWEISLQTHKFLNIP

SEQ ID NO: 32674 - protein, 207 aa, unidentified
  source 1..207: note = Pedobacter yulinensis
  REGION 1..207: note = tr|A0A2T3HKS0|A0A2T3HKS0_9SPHI 7-carboxy-7-deazaguanine synthase OS=Pedobacter yulinensis; OX = 2126353 GN=queE PE=3 SV=1
MAVQVPEDGSLLPLMEEFYTIQGEGFHTGKAAYFIRLGGCDVGCHWCDVKESWDAEMHPLTAVEQIVANAEKHPGKAVVITGGEPLIYNLDNLTAALQQKGIKTFIETSGAYPLSGHWDWICLSPKKFKAPRPDMTPFANELKVIVFNKSDFDWAEKYAETVSANCKLYLQPEWSRSKEVTPLIIDYVMQHPKWEISLQTHKFLNIP

SEQ ID NO: 32675 - protein, 244 aa, unidentified
  source 1..244: note = Pedosphaera parvula
  REGION 1..244: note = tr|B9XLJ7|B9XLJ7_PEDPL 7-carboxy-7-deazaguanine synthase OS=Pedosphaera parvula (strain Ellin514); OX = 320771 GN=queE PE=3 SV=1
MSETLVVNEIYLSLQGESTFAGLPCIFVRLTACNLRCSYCDTAYAFTEGAKQGMAEMLAEIRTLAASYSQTVGGHKMPLIELTGGEPLLQPNSLPLMKTLCDEGFTVLIETSGAHDISKIDSRVRRIMDLKCPSSGEVLRNRRENLRYLKNSDEIKFVIGTEQDYEWAKQQIVEHKLDAICPLLFSWVQPLTPEQQDKALKKVPAGQTPITRLQLVERIIADALPVRFQLQMHKIIWSPDQRGV

SEQ ID NO: 32676 - protein, 244 aa, unidentified
  source 1..244: note = Pedosphaera sp.
  REGION 1..244: note = tr|A0A2A2QNF0|A0A2A2QNF0_9BACT 7-carboxy-7-deazaguanine synthase OS=Pedosphaera sp. Tous-C6FEB OX=1982324 GN=queE PE=3 SV=1
MSDQLVVNEIYLSLQGESTFAGLPCIFVRLTGCNLRCSYCDTAYAFTEGTRRTLPEILAEVRRLAAAYAPAAASQPLPLVELTGGEPLLQPNTLPLMRQLCDAGFTVLLETSGALDISPVDVRVRRIMDLKCPSSGEVERNRWENLPHLQPTDEIKFVIGTVEDYEWAKAQIREHKLGAKCPLLFSWITPLQAHQQAKVLKPVPTGQTPLSRLDLVQRIIADALPVRFQLQMHKIVWAPDQRGV

SEQ ID NO: 32677 - protein, 252 aa, unidentified
  source 1..252: note = Pedosphaera sp.
  REGION 1..252: note = tr|A0A2D5VZ76|A0A2D5VZ76_9BACT 7-carboxy-7-deazaguanine synthase OS=Pedosphaera sp.; OX = 2024890 GN=queE PE=3 SV=1
  VARIANT 246: note = Xaa can be any naturally occurring amino acid
MSEAPTQEASLLVHEIYLSIQGESTYAGLPCIFIRLTGCDLRCSYCDTAYAFKGGKRMNVSLVLEEVNAMAERFARDPAHDGCRLPLVEITGGEPMLQRSTPALMAQLCDAGYRVLLETSGAHDVSSVDERVIRIVDLKCPSSGESERMVWENLDHLRGKDELKMVIATHEDYRWCREQIRDRKLAELCPILVSWCAPLSEGQQDEALKPGPSPQELISRKELVEQLVHDALPVRFQAQLHKIIWXADQKGV

SEQ ID NO: 32678 - protein, 236 aa, Pelagibaca sp.
  REGION 1..236: note = tr|A0A2D6BA87|A0A2D6BA87_9RHOB 7-carboxy-7-deazaguanine synthase OS=Pelagibaca sp.; OX = 1979400 GN=queE PE=3 SV=1
MTTLRIAEIFGPTIQGEGALIGEPTLFVRAGGCDYRCSWCDSLHAVESAYRHQWAAMTPNAIWTELRRLSDGQPVTVSISGGNPAIQNFGPLIAMGRAAGYRFACETQGSVPRAWFSDLDTLVLSPKPPSSGETVDWSLFAECVEAGRGARETVMKIVIFDQRDYEWAKDTHSRHPELPLFLQPGNPEVDPAVSVDPQALADRLGWLTETAVADRWFAPRILPQLHVLIWGNKRGV

SEQ ID NO: 32679 - protein, 295 aa, unidentified
  source 1..295: note = Pelagibacteraceae bacterium
  REGION 1..295: note = tr|A0A3R7R8I2|A0A3R7R8I2_9PROT 7-carboxy-7-deazaguanine synthase OS=Pelagibacteraceae bacterium TMED232 OX=1986813 GN=queE PE=3 SV=1
  VARIANT 191: note = Xaa can be any naturally occurring amino acid
MEKLRYSEIFYSVQGEGRFVGVPSVFFRVFGCNFNCHGFGQGRDKSKWLKPEEMPYMTQDLSHVKHVRDLPVVEIGCDASASWASRYKHLVNWDTVEEIADKIQQYTPNKRWTNANGSDIHFIITGGEPMLWQRETQQLLRQPQFSDLKNLTIETNCTQGFKADFQRFLQGLVAGDYTKEPVHITWSTSPXLSISGEQWHKAIKGEIAQQYANIPNSHLYFKFVIQDEQDLEEVEMARETYKKFGVEADIYLMAVGATVEGQAKTSKQVANIALQNGYKYSPRLHVDLFGNKWGT

SEQ ID NO: 32680 - protein, 210 aa, unidentified
  source 1..210: note = Pelagibacteraceae bacterium
  REGION 1..210: note = tr|A0A1Z8V152|A0A1Z8V152_9PROT 7-carboxy-7-deazaguanine synthase OS=Pelagibacteraceae bacterium TMED65 OX=1986644 GN=queE PE=3 SV=1
MYKIKEIFKSIQGEGYNSGKTSVFVRFTGCNLWNGKNKDKKNAVCNFCDTDFIGTDGKNGGIYNIEKLVDKIEKVWNSTFSLQNKFVILTGGEPLLQVDDRLVKNLQRKNFIVAVETNGTINTMINFDWICVSPKDPRNWKLKKGDELKIIYPQRIFDLNKLLRFNFKYFFLQPKYDNFTRINLNKTLSYCKRNREWFPSLQLHKIIRVD

SEQ ID NO: 32681 - protein, 209 aa, unidentified
  source 1..209: note = Pelagibacterales bacterium
  REGION 1..209: note = tr|A0A2E6DYH2|A0A2E6DYH2_9PROT 7-carboxy-7-deazaguanine synthase OS=Pelagibacterales bacterium OX=2026776 GN=queE PE=3 SV=1
  VARIANT 83: note = Xaa can be any naturally occurring amino acid
  VARIANT 155: note = Xaa can be any naturally occurring amino acid
MTYNVKEIFYSIQGEGFHTGRPSIFCRFSGCNLWNGLERDREIAKCNFCDTDFVGTNGLGGNKFLNEDDLAKEIISYWPNSSXPFVILTGGEPMLQVDKKLIHALKSYKCHLAIETNGTIKVPNEIDWICVSPKAGNSLVQVYGDELKLVYPQKXITPEEYEKYSFKNFSLQPMDGELKLHNTNLAIEYCKNNPNWKISLQTHKIIGVR

SEQ ID NO: 32682 - protein, 210 aa, unidentified
  source 1..210: note = Pelagibacterales bacterium
  REGION 1..210: note = tr|A0A2E4X5Z5|A0A2E4X5Z5_9PROT 7-carboxy-7-deazaguanine synthase OS=Pelagibacterales bacterium OX=2026776 GN=queE PE=3 SV=1
MIYNVKEIFLTIQGEGYNSGKKATFCRFSGCNLWNGLENSKKTAKCNFCDTDFVGINGENGGKYTEVSLINKIEKISNCNNNIKKFIVFTGGEPLLQLNEQLIKKLKKKNYKIAVETNGTIKAPKGIDWICVSPKIKNKIVLNYGNEIKLVYPQRGLKLKNFENLNFDHYYLQPLYNDKYDQNLKKTLEIIMKYPKWKLSLQTHKFIGIK

SEQ ID NO: 32683 - protein, 245 aa, Pelagibacterium luteolum
  REGION 1..245: note = tr|A0A1G7W2B5|A0A1G7W2B5_9RHIZ 7-carboxy-7-deazaguanine synthase OS=Pelagibacterium luteolum OX=440168 GN=queE PE=3 SV=1
MKHVNAPTIRVSEIFGPTIQGEGLLIGLPTVFVRTGGCDYRCSWCDSLHAVENRFRGDWEAMTAEQIWERVRALSGGNPLTVSLSGGNPAIQPLGELIALGHQDGYRFALETQGSVAREWFSTLDSLVLSPKPPSSQMSTDWAAFDACLEAAQSGPTTVLKLVVFDDADYAYAKDAAARYLNLPIYLQPGNHTPPSPDADDVIVDVPGVMKRTEWLVDKVIQDRWFSARVLPQLHVLLWGNARGV

SEQ ID NO: 32684 - protein, 224 aa, unidentified
  source 1..224: note = Pelagibaculum spongiae
  REGION 1..224: note = tr|A0A2V1GNL2|A0A2V1GNL2_9GAMM 7-carboxy-7-deazaguanine synthase OS=Pelagibaculum spongiae OX=2080658 GN=queE PE=3 SV=1
MSYSVKEVFYTLQGEGAMTGRASVFCRFSGCNLWSGLEKHRAESPCHFCDTDFRGTDGPGGGKFTAAKTLANHIASFWPENAANTGNSQKPYVVITGGEPLLQLDQALVDALHQVGFEIGIETNGTQPAPSGIDWLCLSPKTKDIVLEYCDELKLVYPLQNIKPEDFANFPAKIYYLTPMADPKAADNNSTLYQDQITRQTIDYCHSHPQWRLNLQSHKLVNIP

SEQ ID NO: 32685 - protein, 164 aa, unidentified
  source 1..164: note = Pelagicola litorisediminis
  REGION 1..164: note = tr|A0A1Y5RC36|A0A1Y5RC36_9RHOB 7-carboxy-7-deazaguanine synthase OS=Pelagicola litorisediminis OX=1312363 GN=queE PE=4 SV=1
MVSLSGGNPAIQPLGGLIELGHAKGYRFALETQGSVARRWFADLDLLVLSPKPPSSGMETDWGLLQDCRNAAQGTDTILKVVVFDEADYAYAREVAKRHHDLPMYLQPGNHTPPPPDDDKAVVDQNGIDERMRWLVDRVTADKWFEARVLPQLHVMLWGNKRGV

SEQ ID NO: 32686 - protein, 239 aa, Pelagicola sp.
  REGION 1..239: note = tr|A0A2U2CUK2|A0A2U2CUK2_9RHOB 7-carboxy-7-deazaguanine synthase OS=Pelagicola sp. LXJ1103 OX=2175247 GN=queE PE=3 SV=1
MSEAIRVSEIFGPTIQGEGALIGLPTVFVRTGGCDFRCLWCDSLHAVDSEYRHTWAAMSASAVMGEVRRLAGGPLMVTLSGGNPAIQPLGDLITLGQAEGYGFAMETQGSVAKDWFANLDMLVLSPKPPSSGMQTDWEAFAACVAAAKSAQTVLKIVVFDEADYGYARDAAARFPDLAVYLQPGNHTPPPPEDDDAEVDLAGIEARMNWLIERAAQDHWHNARILPQLHVMLWGNKRGV

SEQ ID NO: 32687 - protein, 240 aa, unidentified
  source 1..240: note = Pelagivirga sediminicola
  REGION 1..240: note = tr|A0A2T7G7S1|A0A2T7G7S1_9RHOB 7-carboxy-7-deazaguanine synthase OS=Pelagivirga sediminicola OX=2170575 GN=queE PE=3 SV=1
MSDVIRVSEIFGPTIQGEGALIGVPTVFVRTGGCDYRCVWCDSLHAVDSEYRHTWAPMRAGAVMDEVRRLSGGVPLTVTLSGGNPAIQPLGDLIALGRAEGYGFAMETQGSVARDWFSQLDMLVLSPKPPSSGMQTDWTLLQDCIDAAAGVRTVLKIVVFDEADFAYARDVAARHPGLPVYLQPGNHTPPPPEDDTATVDQDGIDARMRWLVDRVIAGRWHGATVLPQLHVMLWGNKRGV

SEQ ID NO: 32688 - protein, 257 aa, unidentified
  source 1..257: note = Pelistega indica
  REGION 1..257: note = tr|V8FVY5|V8FVY5_9BURK 7-carboxy-7-deazaguanine synthase OS=Pelistega indica OX=1414851 GN=queE PE=3 SV=1
MSVEHILQPAQQLAEPFSIDEQHPQYRIVEIFESLQGEGFNTGMPAIFIRLGKCSLACSWCDTDYLKFELKSLNDIFAMIDGYTAKNIIITGGEPTIHPYIEQLLDALKLKGYHLCIESNALHAIPLQIEYVAVSPKYCYSEKYAKECISHADEVRIVMDPDKLGSPEKGVLPLEKEQRVHTFIEWCEEIANKISAQHYYLSPLEVDGQMNILDTITAIGLLNERAKGRQKDTKNLANNFIPHWQLSLQTHKFAHIQ

SEQ ID NO: 32689 - protein, 248 aa, Pelobacter acetylenicus
  REGION 1..248: note = tr|A0A1L3GIT0|A0A1L3GIT0_PELAE 7-carboxy-7-deazaguanine synthase OS=Pelobacter acetylenicus OX=29542 GN=queE PE=3 SV=1
MPCNDAQLLEVFSSIQGEAELVGYRQIFIRLAGCNLHCAYCDTDYSLREHCRVEDAPGSGQFRGIANPVSLEVIASLVSAWVDASPGMHHSISLTGGEPLLQAPVLLNWAPVLREILPLHLETNGTCAAALEPLVPHLDMISMDVKLSSVTGVATPWKLHRAFLEIASRTKVCVKAVVGEETPVEEMIDLGRMVRQMSPDTSVYLQPVTQQGKIGMSSNHLLCLQAAVAKQHANVRVVPQMHVFMNLL

SEQ ID NO: 32690 - protein, 253 aa, Pelobacter carbinolicus
  REGION 1..253: note = tr|Q3A421|Q3A421_PELCD 7-carboxy-7-deazaguanine synthase OS=Pelobacter carbinolicus (strain DSM 2380 / NBRC 103641 / GraBd1) OX=338963 GN=queE PE=3 SV=1
MPVPAIPSTDAQLLEIFSSIQGEGGLVGCRQVFIRLAGCNLDCAYCDTDFAPQDTCRIEDAPGSGQFRSVTNPVALEVVADILGAWTKRAPGMHHSISLTGGEPLLQGQLLRDWVPVLKEILPIHLETNGTCPDALAPLLPHLEWVSMDVKLASTTGMPTPWKLHRAFLEIAAQAHVWVKAVVCESTPAEEMHDLGRLVHQIAPHVTIFLQPATRQGKVDMSAERLLALQTALSRHHGKVRVVPQTHVFLGLL

SEQ ID NO: 32691 - protein, 249 aa, Pelobacter propionicus
  REGION 1..249: note = tr|A1APX7|A1APX7_PELPD 7-carboxy-7-deazaguanine synthase OS=Pelobacter propionicus (strain DSM 2379 / NBRC 103807 / OttBd1) OX=338966 GN=queE PE=3 SV=1
MSESLPIAEIFSSIQGEGYLAGRRQIFIRLTRCNLECSYCDTGFGEGESCLVENSPGSNVFEHFPRAVGLDRLMDILNAWTWALPRAHHSISLTGGEPLLFAPLLSDWLPRLRGILPVHLETNGTLPIELGRIIRLVDYVSMDMKLPSTAACGGELWDTHRRFLETARGKNVSVKIVVGEQSDAAEIEQVCRIIAQIRPDTPLFLQPLSLPDSHCGISAAHLLHLQALAAARLSDVRVIPQMHKLMGVL

SEQ ID NO: 32692 - protein, 248 aa, Pelobacter sp.
  REGION 1..248: note = tr|A0A1L3GM60|A0A1L3GM60_9DELT 7-carboxy-7-deazaguanine synthase OS=Pelobacter sp. SFB93; OX = 1842532 GN=queE PE=3 SV=1
MSQTDGQLIELFSSIQGEGLLIGFRQIFIRLALCNLSCRYCDTPFDVADSCRVETAPGAGSFFALPNPVSLDVLSNLIADWLDRLPGGHHSISITGGEPLMQDKVLQGWLPVLGQLLPIHLETNGTLPDAFEPLVPFVDWVSMDIKLASLTGEPTPWLAHEDFLSLASDRGCCVKVVVGTETTVEEVQQAADLVHRKAPSAPLILQPITMAGQVGTAAAHLFRLQEQAARIHGLVRVIPQTHAFLGLL

SEQ ID NO: 32693 - protein, 197 aa, unidentified
  source 1..197: note = Pelobium manganitolerans
  REGION 1..197: note = tr|A0A419SB34|A0A419SB34_9SPHI 7-carboxy-7-deazaguanine synthase OS=Pelobium manganitolerans OX=1842495 GN=queE PE=3 SV=1
MLPLMEEFYTIQGEGYNSGKAAYFIRLGGCDVGCHWCDVKESWDADMHPLTATQTIVEHADQFPGKAVVVTGGEPLLYNLDELTKQLKARGIATFIETSGAYPLSGFWDWICLSPKKFKAPRKDIAPFANELKVIVFNKSDFAWAEEHAKLVSSDCKLYLQPEWSKAAEMTPLIIDYVMNNPKWEISLQTHKFLNIP

SEQ ID NO: 32694 - protein, 223 aa, unidentified
  source 1..223: note = Pelodictyon luteolum
  REGION 1..223: note = tr|A0A165LYK4|A0A165LYK4_PELLU 7-carboxy-7-deazaguanine synthase OS=Pelodictyon luteolum; OX = 1100 GN=queE PE=3 SV=1
MTGAMLQISEIFHSIQGESSFAGWPCTFIRLAGCSHGCRYCDTTYARTAERQLSIGDTIDEARRFRPHLIEVTGGEPLEQPLVHKLLCALCDGGGIIMLETGGFLSVRDVDPRVHKVIDLKPPSSGKDGENCMENIDLALSQGEKERNHYEFKIVAADRDDYLWARKLIKETRLAEACTVMMGPIAGTVHPYELAGWILEDRLHVRMQLQLHKYIWPDIERGV

SEQ ID NO: 32695 - protein, 223 aa, unidentified
  source 1..223: note = Pelodictyon luteolum
  REGION 1..223: note = tr|Q3B5R3|Q3B5R3_PELLD 7-carboxy-7-deazaguanine synthase OS=Pelodictyon luteolum (strain DSM 273 / 2530); OX = 319225 GN=queE PE=3 SV=1
MTGTILQISEIFHSIQGESSFAGWPCTFIRLAGCSHGCRYCDTTYAKTAERRLSIGDTIDEARRYHAHLIEVTGGEPLEQPAVHKLLHALCDGGGGVMLETGGFLSVRDVDPRVHKVIDLKPPSSGRDKENCMENIDIALNAGEGERKRYEFKIVAADREDYLWARGILKDTRLAEACTVMMGPIAGTIHPSELAGWILEDRLHVRMQLQLHRYIWPGMDRGV

SEQ ID NO: 32696 - protein, 223 aa, unidentified
  source 1..223: note = Pelodictyon phaeoclathratiforme
  REGION 1..223: note = tr|B4SE56|B4SE56_PELPB 7-carboxy-7-deazaguanine synthase OS=Pelodictyon phaeoclathratiforme (strain DSM 5477 / BU-1) OX=324925 GN=queE PE=3 SV=1
MSAGTLNISEIFHSIQGESSFAGWPCAFIRLAGCGHGCIGCDTAYAEHDGIKLGIEVVVQRALAFRAPLIEVTGGEPLLQPAVYSLMRQLCDLEQKVLLETGGFLSVAEVDCRVHKIIDLKPPSSGVCDQNNPENIELALAAVLPHRQNFEFKIVVASREDYEWARALLQEHGLMDSFTIMMGVSFGKLDPAELAEWMLRDRLRARMQLQLHKYIWDPCRRGV

SEQ ID NO: 32697 - protein, 214 aa, Pelomonas puraquae
  REGION 1..214: note = tr|A0A254N5D8|A0A254N5D8_9BURK 7-carboxy-7-deazaguanine synthase OS=Pelomonas puraquae; OX = 431059 GN=queE PE=3 SV=1
MYSVKELFFTLQGEGAQAGRAAVFCRFAGCNLWSGREQDRATAVCTFCDTDFVGTDGQGGGKFATAEALADTIAQAWPHAADGSLPGKPYVVCTGGEPLLQLDAPLIDALHARGFEVAVETNGTQPAPPGLDWICVSPKADAPLVLTAGHELKLVYPQPLAQPERFAGLDFQHFFLQPMDSVLQREHTRAAVDYCMKHPQWRLSVQMHKVVGID

SEQ ID NO: 32698 - protein, 209 aa, Pelomonas saccharophila
  REGION 1..209: note = tr|A0A4R3VB98|A0A4R3VB98_PELSC 7-carboxy-7-deazaguanine synthase OS=Pelomonas saccharophila OX=304 GN=queE PE=3 SV=1
MTYSVKELFYTLQGEGAQAGRAAVFCRFAGCNLWTGREQDRATAVCNFCDTDFVGTDGEGGGKFATAQALADTIAKAWPGGGKPYVVCTGGEPLLQLDEPLIDALHAHGFEVAVETNGTQPAPKGLDWICVSPKADAPLLLTSGHELKLVYPQPLAQPERFAHLDFQHFFLQPMDSVLKREHTQAAVDYCMTHPQWRLSVQMHKVVGIA

SEQ ID NO: 32699 - protein, 218 aa, Pelomonas sp.
  REGION 1..218: note = tr|A0A0Q7BF92|A0A0Q7BF92_9BURK 7-carboxy-7-deazaguanine synthase OS=Pelomonas sp. Root405; OX = 1736529 GN=queE PE=3 SV=1
MTYSVKELFYTLQGEGAQAGRAAVFCRFAGCNLWTGREQDRATAVCTFCDTDFVGTDGEGGGKFATADALAGAIASAWPRGADGAASNDRGVPYVVCTGGEPLLQLDTPLIDALHARGFEVAVETNGTQPAPPGLDWICVSPKADAPLVLTSGHELKLVYPQPLARPERFAGLDFQNFFLQPMDSVLQREHTRAAVAYCMAHPQWRLSVQMHKVVGIA

SEQ ID NO: 32700 - protein, 205 aa, Pelomonas sp.
  REGION 1..205: note = tr|A0A2R7SCR1|A0A2R7SCR1_9BURK 7-carboxy-7-deazaguanine synthase (Fragment) OS=Pelomonas sp. HMWF004 OX=2056841 GN=queE PE=3 SV=1
MYSVKELFYTLQGEGAQAGRAAVFCRFAGCNLWSGREQDRATAVCTFCDTDFIGTDGEGGGKFATAEALADAVAKAWPGGAEGAASHARGKPYVVCTGGEPLLQLDTPLIDALHARSFEIAVETNGTQPAPPGLDWICVSPKADAPLVLTSGHELKLVYPQPLAQPERFAGLNFQHFFLQPMDSVLQREHTKAAVAYCMQHPQWR

SEQ ID NO: 32701 - protein, 245 aa, Pelosinus fermentans
  REGION 1..245: note = tr|I9LCU2|I9LCU2_9FIRM 7-carboxy-7-deazaguanine synthase OS=Pelosinus fermentans B4 OX=1149862 GN=queE; PE = 3 SV=1
MVSHKLNIVEVFSSIQGEGEFVGYRQVFVRLAGCNLECDFCDTPSSRTNVIEGQIEMTAGKRDFMTVKNPISIMDLSNYINKLLIVPHHSVSFTGGEPLCQAEGIAQLLPHIKGRIYLETNGTLPEKLKLVLPHIHIVSMDIKLPSIIHQDVWQQHRQFLSIANACSTFVKIVVTGKTNKMEFQKAVELIAAIDQKIPLIIQPVTPIHDCEGVTPDMMLLWQEQALIFLTDVRVIPQTHKFMGQL

SEQ ID NO: 32702 - protein, 245 aa, Pelosinus fermentans
  REGION 1..245: note = tr|I9DH68|I9DH68_9FIRM 7-carboxy-7-deazaguanine synthase OS=Pelosinus fermentans JBW45 OX=1192197 GN=queE; PE = 3 SV=1
MVSHKLNIVEVFSSIQGEGEFVGYRQVFVRLAGCNLECDFCDTPSSRTNAMEGQIEMTAGKRDFKKTKNPISIVDLSNYINNLLIVPHHSVSFTGGEPLCQAEGIAQLLPHIKGRIYLETNGTLPEKLKLVLPHIHIVSMDIKLPSIIHQDVWQQHRQFLSIANACNTFVKIVVTGKTNRIEFQKAVELIAAIDQKIPLIIQPVTPIHDCEGVTPDMMLLWQEQALIFLTDVRVIPQTHKFMGQL

SEQ ID NO: 32703 - protein, 245 aa, Pelosinus propionicus
  REGION 1..245: note = tr|A0A1I4HC63|A0A1I4HC63_9FIRM 7-carboxy-7-deazaguanine synthase OS=Pelosinus propionicus DSM 13327 OX=1123291 GN=queE PE=3 SV=1
MISHELNIVEVFSSIQGEGTFVGYRQIFVRLAGCNLECDFCDTPSSRTNVIEGQIEMTAGKRDFKKVTNPISILDLADYINNLLIVPHHSVSFTGGEPLCQAEGIAQLLPHIKGRIYLETNGTLPEKLKLVLPHTHIISMDIKLPSIIHQDVWKQHRHFLSLANACNTFVKIVVTGKTNRIEFQKAVELIAAIDQKIPLIIQPVTPIYDCEGATPDMMLLWQERALMLLSDVRVIPQTHKFMGQL

SEQ ID NO: 32704 - protein, 244 aa, Pelosinus sp.
  REGION 1..244: note = tr|A0A075KCN4|A0A075KCN4_9FIRM 7-carboxy-7-deazaguanine synthase OS=Pelosinus sp. UFO1; OX = 484770 GN=queE PE=3 SV=1
MSQNVNVVEIFSSIQGEGQFVGYRQVFVRLAGCNLECEFCDTPSSRTMVNAAQIEKTAGRRDFQTIVNPISVIELSNYINSLLVIPHHSVSFTGGEPLCQAKVLAEILPQIKGRIYLESNGTLPNELELVLPHIDIISMDIKLPSIIRQEMWQEHSEFLRLAATRNVFVKIVVTGSTNTTEFLKAVNLIASVDKNIPLIIQPVTPINNCEGVKPDTVLLYQEQALSSLNDVRVIPQTHKFIGQL

SEQ ID NO: 32705 - protein, 245 aa, Pelotomaculum propionicicum
  REGION 1..245: note = tr|A0A4Y7RME7|A0A4Y7RME7_9FIRM 7-carboxy-7-deazaguanine synthase OS=Pelotomaculum propionicicum OX=258475 GN=queE PE=3 SV=1
MGYPVSEIFSSAQGEGPLLGCRQIFIRVHGCNLNCAFCDTYSGETPAHCRIETEPGTGSFKLLPNPLRAEDIASAAAGLGLGWHDSVSFTGGEPLLYPDLIKESAPLLKGTRGGIYLETNGTLPDNLAQVINLIDIVAMDFKLPSVTGERQCWDLHRSFLTVAKSKRTFVKVVVSADTPFNEIETAAEIINNTAPGIPLIIQPVSGSAGINPVNAGYALELQQSALKILSDVRIIPQMHKVMGFL

SEQ ID NO: 32706 - protein, 244 aa, Pelotomaculum schinkii
  REGION 1..244: note = tr|A0A4Y7RD11|A0A4Y7RD11_9FIRM 7-carboxy-7-deazaguanine synthase OS=Pelotomaculum schinkii OX=78350 GN=queE PE=3 SV=1
MAVPVTEIFSSVQGEGLLVGRRQIFIRLYGCNLRCSYCDTVLTEEPAFCRVETAPGCGIFEYLPNPLGIEEIVKVLEGLAVGLHHSISLTGGEPLLHSNIIRELAPALRGSRRGIYLETNGTLPDELSRVIDLVDMVAMDFKLPSVSGLPPLWSKHGRFLEIAATKETYVKVVVAEQTPSREIEMAAGLIKSTAPGVPLVIQPLTTKGAMGISPARLSLLQRQALKVLDDVRVIPQTHKLMGML

SEQ ID NO: 32707 - protein, 245 aa, Pelotomaculum sp.
  REGION 1..245: note = tr|A0A1V4W4X2|A0A1V4W4X2_9FIRM 7-carboxy-7-deazaguanine synthase OS=Pelotomaculum sp. PtaB.Bin104 OX=1811693 GN=queE_1 PE=3 SV=1
MPCQIAEIFSSVQGEGLLVGCRQIFIRLQGCNINCSFCDTPVNESGFCKIEQNPGQKDFRQLPNPLSAEEVAAAVHSYDLSIHHSISLTGGEPLLWTSFIKELIPFIKGTRHGIYLETNGTLPEALSEVIEFIDIIGMDIKLPSISGLTPFWEEHRCFLKVAKKKQVFVKVVVGEDTTKEEIEQAAGLISDYGKSLTMIIQPVSPTAGGIKSVSPGRALYLQQLALKILANVLIIPQTHKIMGQL

SEQ ID NO: 32708 - protein, 245 aa, Pelotomaculum sp.
  REGION 1..245: note = tr|A0A1V5BQV7|A0A1V5BQV7_9FIRM 7-carboxy-7-deazaguanine synthase OS=Pelotomaculum sp. PtaU1.Bin065 OX=1811696 GN=queE PE=3 SV=1
MPCQVAEIFSSVQGEGLLVGCRQVFIRLLGCNINCSYCDTPAGESGFCRIEQHPGHKDFKQLPNPLSAAEVAAAAHAYDLSLHHSVSLTGGEPLLWTSFIKELVPLLQGTRHGIYLETNGTLPEKLSEVIELIDIVGMDIKLPSISGQPPFWEEHRLFLKVAAKKQVFVKVVVGEDTTGEEIEQAAGLISDFGTGLTMIIQPVSPAACGIKSVSPGQALYLQQLALKKLANVLIIPQTHKIMGQL

SEQ ID NO: 32709 - protein, 245 aa, Pelotomaculum thermopropionicum
  REGION 1..245: note = tr|A5D2D9|A5D2D9_PELTS 7-carboxy-7-deazaguanine synthase OS=Pelotomaculum thermopropionicum (strain DSM 13744 / JCM 10971 / SI) OX=370438 GN=NrdG PE=3 SV=1
MRAYVSEIFSSVQGEGLLTGCRQVFIRFYGCNLNCSFCDTKYGGPPACCRIESLPAGGDFRYLPNPLKVGEAASAAASYDLSLHHSVSLTGGEPLLHTAFLKELIPLVKGTRHGIYLETNGTLPGNLLEVIDLIDMVSMDFKLPSVSGMPPFWEKHWDFLKIAASRKVLVKVVVGQNTAHEEIEKSASIIKSVSSNIPMVIQPVTGSDGTLGITASRVLELQKLALKFLNDVRVIPQTHKVIGYL

SEQ ID NO: 32710 - protein, 245 aa, Pelotomaculum thermopropionicum
  REGION 1..245: note = tr|A0A101HW69|A0A101HW69_9FIRM 7-carboxy-7-deazaguanine synthase OS=Pelotomaculum thermopropionicum OX=110500 GN=queE PE=3 SV=1
MSVNVTEIFSSVQGEGLLAGCRQIFIRLYGCNLKCSYCDTFYPQKPLYCRLEETPGHRNYKLIPNPLQPENAAAAAYTFDLSTHHSISLTGGEPLLHISFIRELVPLLKGTRRGIYLETNGTLPDELLKIIDLVDIVAMDFKLPSITGLPPFWEKHKEFLKIASSKNVYVKIVVGENTTYDEIEKTTELISGIRNDLPLIMQPVSTNGNVGRISPVYLLSLQEQALKKLFDVRIIPQTHKIMRQL

SEQ ID NO: 32711 - protein, 222 aa, unidentified
  source 1..222: note = Peptoclostridium acidaminophilum
  REGION 1..222: note = tr|W8U4V2|W8U4V2_PEPAC 7-carboxy-7-deazaguanine synthase OS=Peptoclostridium acidaminophilum DSM 3953; OX = 1286171 GN=queE PE=3 SV=1
MEYNVVEKFASINGEGAKTGQLAVFIRFAGCNLSCSYCDTKWANEADVKAEKMSAQDIHEYIQSTGISNVTLTGGEPLNQYGIMELLQRLAEDSSIDVEIETNGSIDIEPFLNISPRRPSFTLDYKLGSSGMESYMDIENLTCVSKRDAVKFVVGSFDDIDRAKDVIEEYELDKKTRVYFSPVFGEIDPVEIVEYMKSHYMNGVSLQLQLHKFIWDSDKRGV

SEQ ID NO: 32712 - protein, 220 aa, unidentified
  source 1..220: note = Peptoclostridium litorale
  REGION 1..220: note = tr|A0A069RI14|A0A069RI14_PEPLI 7-carboxy-7-deazaguanine synthase OS=Peptoclostridium litorale DSM 5388 OX=1121324 GN=queE PE=3 SV=1
MLKVVEKFISINGEGRRAGQLAIFIRFAGCNLGCSYCDTSWANRDDVHFEPMSAEDIYSYVKSTGVRNITLTGGEPLMQQGIHELLQLLSNDKSLYIEIETNGSISLEDFCDIPNAPSFTMDYKLPSSNMEHKMDTENFDTLTGTDTVKFVCGSHEDLKRAYDIIKKYDLSEKTAVYISPVFGNIEPEDIVEFMKKHNMNGVNLQLQLHKIIWSPDKKGV

SEQ ID NO: 32713 - protein, 245 aa, unidentified
  source 1..245: note = Peptococcaceae bacterium
  REGION 1..245: note = tr|A0A0F2N4M2|A0A0F2N4M2_9FIRM 7-carboxy-7-deazaguanine synthase OS=Peptococcaceae bacterium BRH_c4a OX=1629716 GN=queE PE=3 SV=1
MKCHIREIFSSVQGEGPYLGIRQIFVRFEGCNLSCHYCDTKTHGKGAGCSVEVDPGNKKFIEADNPMSSSDLLGIITGSFDLSLHQWVSITGGEPLLQAGYLMELLPGLRDLGLKIYLETNGTLPDDLERIVDMVDVVAMDIKLPGTSGCQPMWNRHSQFLAIAGRTGVFVKIVMDDGADVSEYDTALDLLSRIDASITLVIQPVTLNGKCMLSPGRALYLQSMALKRLRDVRIIPQAHKMMDQL

SEQ ID NO: 32714 - protein, 207 aa, unidentified
  source 1..207: note = Peptococcaceae bacterium
  REGION 1..207: note = tr|A0A0J1F735|A0A0J1F735_9FIRM 7-carboxy-7-deazaguanine synthase OS=Peptococcaceae bacterium CEB3 OX=999898 GN=queE PE=3 SV=1
MYRLTEQYPVNEIFESIQGEGIWSGIPAAFVRLEGCNLRCRWCDTKEAWSGGNASRLTAAEILTAVNFELVIVTGGEPLLHDLTELFLTLQQAGKKVHVETNGTQPWRESYPPDIWLTVSPKEESGYMVQPSLAARAGEYKFVVDEAFRPEIIREFYTQLGHRQKEPLIFLSPENVRPEMVEKALQIVFQYPFCRLMLQMHKLIGIK

SEQ ID NO: 32715 - protein, 210 aa, Peptoniphilus asaccharolyticus
  REGION 1..210: note = tr|A0A1W1UK14|A0A1W1UK14_PEPAS 7-carboxy-7-deazaguanine synthase OS=Peptoniphilus asaccharolyticus DSM 20463 OX=573058 GN=queE PE=3 SV=1
MKYDINEIFYSIDGEGPNSGKLSVFIRLNYCNLRCVYCDTGYALGRKDNFYTLEEIVEQVESYGIKSVTITGGEPLEHDLKPLISRLLSLEYEIDIETNGSLDIRKYLLENVNIILDIKTPSSKMEKFNLYENLSKLRPNDVVKFVASENDMDFVLNIIQKYYTSAKIFISPIYGCNIDKIVEYIKEHRLEVRLQLQIHKYIWDPNMKGV

SEQ ID NO: 32716 - protein, 218 aa, Peptoniphilus indolicus
  REGION 1..218: note = tr|A0A379D8P2|A0A379D8P2_9FIRM 7-carboxy-7-deazaguanine synthase OS=Peptoniphilus indolicus OX=33030 GN=queE PE=3 SV=1
MKEMLQSMKYDVNEIFYSIDGEGPNSGKLSVFIRLNYCNLRCSYCDTEYAFKRVYNFMTVNEIIDEVESYKIKSVTITGGEPLAQDLEELISGLLKLGYEIDIETNGSKDVSKYLLNNVNIILDIKTPTSKMEDFNLYENLKLLRGNDVVKFVVADEFDMNFIVEVMKLYPTDAQIFLSPVYGTDIDKLVEYMKNYRINARLQLQIHKYIWDSEMRGV

SEQ ID NO: 32717 - protein, 206 aa, Peptoniphilus indolicus
  REGION 1..206: note = tr|G4D5E0|G4D5E0_9FIRM 7-carboxy-7-deazaguanine synthase OS=Peptoniphilus indolicus ATCC 29427 OX=997350; GN = queE PE=3 SV=1
MKFFYSIDGEGPNSGKLSVFIRLNYCNLRCSYCDTEYAFKRVYNFMTVNEIIDEVESYKIKSVTITGGEPLAQDLEELISGLLKLGYEIDIETNGSKDVSKYLLNNVNIILDIKTPTSKMEDFNLYENLKLLRGNDVVKFVVADEFDMNFIVEVMKLYPTDAQIFLSPVYGTDIDKLVEYMKNYRINARLQLQIHKYIWDSEMRGV

SEQ ID NO: 32718 - protein, 245 aa, Peredibacter sp.; identical to SEQ ID NO: 30528
  REGION 1..245: note = tr|A0A2E5CA73|A0A2E5CA73_9PROT 7-carboxy-7-deazaguanine synthase OS=Peredibacter sp.; OX = 2024850 GN=queE PE=3 SV=1

SEQ ID NO: 32719 - protein, 214 aa, Perlucidibaca sp.
  REGION 1..214: note = tr|A0A2P6AV05|A0A2P6AV05_9GAMM 7-carboxy-7-deazaguanine synthase OS=Perlucidibaca sp. HR-E OX=2094561 GN=queE PE=3 SV=1
MVSLRLTEIFHSLQGEARTVGLPTVFVRLTGCPLRCVWCDTSYAFSGGRQWALDDILAEVAGYDTRHVTVTGGEPLAQPECLTLLTALCDRGHDVSLETSGALPIEKVDTRVSRVMDLKAPGSGESHRNLYENIPHLTPNDQVKFVVSSRSDYDWARLQCDQYELYGRVSDVLFSPGHETLKPRELAEWMLADRIPARLQVQLHKYLWNNEPGH

SEQ ID NO: 32720 - protein, 214 aa, unidentified
  source 1..214: note = Permianibacter aggregans
  REGION 1..214: note = tr|A0A4R6UX36|A0A4R6UX36_9GAMM 7-carboxy-7-deazaguanine synthase OS=Permianibacter aggregans OX=1510150 GN=queE PE=3 SV=1
MSERLRITEIFHSLQGEARTVGLPTVFVRLTGCPLRCHYCDSEYAFYGGEYREMDEVIASVQSFGARHVCVTGGEPLAQKACIPLLQKLCDLGYQVSLETSGAMDISDVDPRVSRVVDIKTPDSGEVDKNRWQNLPLLTTNDQIKFVLCSRQDYDWARMICDHHQLWDKTELLFSPSFQQLPLKSLAEWILADRLPVRMQVQLHKFIWGDVPGH

SEQ ID NO: 32721 - protein, 211 aa, Persephonella hydrogeniphila
  REGION 1..211: note = tr|A0A285NKR4|A0A285NKR4_9AQUI 7-carboxy-7-deazaguanine synthase OS=Persephonella hydrogeniphila OX=198703 GN=queE PE=3 SV=1
MTSIKIVEIFRTVEGEGKWVGLPVSFIRLEGCNLRCPWCDTSYSYDGKTFEEISIDSVIKEIEKLGLKRVCITGGEPFLTPQLPELVKKLINRGYKVLIETNGTLWIKELEDIKSKDLYITCSPKPPAYFIHPELLPFITELKYVVDEYLKIEDIINEKTLRIIKNDFVVLQPESNRPEMVRKALKLQEEILKTGYESRIIPQCHKILGLP

SEQ ID NO: 32722 - protein, 214 aa, Persephonella marina
  REGION 1..214: note = tr|C0QQZ3|C0QQZ3_PERMH 7-carboxy-7-deazaguanine synthase OS=Persephonella marina (strain DSM 14350 / EX-H1) OX=123214 GN=queE PE=3 SV=1
MEKFNVVEIFPSIEGEGSLIGYPVTFIRLEGCNLRCEWCDTPYSYDGKTFSKLTSDEIISELKRYPNRKVCLTGGEPLICENVDKLMTEIIKEGYSLIIETNGTVLTEEVKNVLREFGESIYIVVSPKPDSFYFINKELIPSVDEFKFIVDETLRIKDILMYQIYYTEKPLILQPESNRKDMIDKALKLQRELLEKHSIEARVIPQVHKYMGIM

SEQ ID NO: 32723 - protein, 214 aa, Persephonella sp.
  REGION 1..214: note = tr|A0A432S9B5|A0A432S9B5_9AQUI 7-carboxy-7-deazaguanine synthase OS=Persephonella sp.; OX = 2060922 GN=queE PE=3 SV=1
MEYKFKIVEIFNSIEGEGSFIGYPTTFIRLEGCNLRCEWCDTTYSYDNKSFKLLSLKDILKEIKRYKTKKVCITGGEPFLTPNLPFLLINLYKEGYYLIIETNGTIFNEDLEIALREIYPKFYLVVSPKYEVKYIINKFLIKYINEFKFVVDKYISIEDILKYRNLYKVRPLILQPESNKKIFIKKALDLQKELLEFDIEARVIPQCQKFMGVK

SEQ ID NO: 32724 - protein, 214 aa, Persephonella sp.
  REGION 1..214: note = tr|A0A432S2Q8|A0A432S2Q8_9AQUI 7-carboxy-7-deazaguanine synthase OS=Persephonella sp.; OX = 2060922 GN=queE PE=3 SV=1
MEDIFNIVEIFYSVEGEGSFVGYPTVFVRLEGCNLRCEWCDTTYSYDGKTFKQLSLKKIIEEIKKYRTKRVCITGGEPLLTKNVDTLIKAVVKEGYYLIIETNGTVFNNRVEEALKSVYPNFYLVVSPKPEVKYNINQSLLKYINEFKFVVDEYITLKDILKYESLYKLKPLILQPERNKKEFIKKALKLQEELLKKDIEARVIPQCQKFMGLM

SEQ ID NO: 32725 - protein, 193 aa, unidentified
  source 1..193: note = Petrimonas mucosa
  REGION 1..193: note = tr|A0A1G4G3F0|A0A1G4G3F0_9PORP 7-carboxy-7-deazaguanine synthase OS=Petrimonas mucosa; OX = 1642646 GN=queE PE=3 SV=1
MNLTVNEIFYSLQGEGGRSGEPSLFIRLSKCNLACSFCDTDFAFGKRMTLDEIHDEISPYPCRWIIWTGGEPTLQLREEIVAYFKERGYRQAIETNGTRRVPAGIDYITCSPKQQFEKIRELIPEVDELRFPMAKGDPLPDISILPRSKRYLLSPIFDGMNVVQENVDYCVELIKQHPQWGLSLQMHKLIGIR

SEQ ID NO: 32726 - protein, 265 aa, Phaeobacter gallaeciensis
  REGION 1..265: note = tr|V9WHZ7|V9WHZ7_9RHOB 7-carboxy-7-deazaguanine synthase OS=Phaeobacter gallaeciensis DSM 26640 OX=1423144; GN = queE PE=3 SV=1
MTDVLIPRAVRATADTSSLANRPEVGRSAPTTLRIAEIFGPTIQGEGALIGEPTVFVRAGGCDYRCSWCDSLHAVDSRYRDTWAPMDTEEIWQEVTRLSGAQPLTVSLSGGNPAIQNFAPLIALGKEAGYRFACETQGSISQPWFAALDTLVLSPKPPSSGHRVDWQKFDHCLAAAKGCDQIVLKIVIFDDCDYDWAKAVANRQPDLPLYLQPGNPEVDPETPVDLTAATERLHWLIEKVTADRWFAPRVLPQLHVLVWGNKRGV

SEQ ID NO: 32727 - protein, 235 aa, Phaeobacter gallaeciensis
  REGION 1..235: note = tr|A0A1B0ZMZ5|A0A1B0ZMZ5_9RHOB 7-carboxy-7-deazaguanine synthase OS=Phaeobacter gallaeciensis OX=60890 GN=queE PE=3 SV=1
MTLRIAEIFGPTIQGEGALIGEPTVFVRAGGCDYRCSWCDSLHAVDSAYRHTWTPMSDAEIWDEVLRLSGGQALTVSLSGGNPAIQDFAPLIARGRAAGYRFACETQGSVSRPWFGDLDTLVLSPKPPSSGESVDWAAFAACVKAGQTARQMVMKIVIFDEADYDWAKDAHARHPDLPLYLQPGNPDVDPESPVDPQDLADRLEWLTERAMTDGWFTPRILPQLHVLIWGNKRGV

SEQ ID NO: 32728 - protein, 233 aa, Phaeobacter inhibens
  REGION 1..233: note = tr|A0A135IHX5|A0A135IHX5_9RHOB 7-carboxy-7-deazaguanine synthase OS=Phaeobacter inhibens; OX = 221822 GN=queE PE=3 SV=1
MRIAEIFGPTIQGEGALIGEPTVFVRAGGCDYRCSWCDSLHAVDSRYRDTWAPMATDEVWQEVTRLSGGQPLTVSLSGGNPAIQNFAPLIAQGKEAGYRFACETQGSISQPWFAALDTLVLSPKPPSSGHRVDWQKFDHCLAAAKGCDQIVLKIVIFDDCDYDWAKAVANRWPDLPLYLQPGNPEVDPDKPVDLTTATERLHWLIEKVTADRWFAPRVLPQLHVLVWGNKRGV

SEQ ID NO: 32729 - protein, 265 aa, Phaeobacter inhibens
  REGION 1..265: note = tr|A0A2I7K5S6|A0A2I7K5S6_9RHOB 7-carboxy-7-deazaguanine synthase OS=Phaeobacter inhibens; OX = 221822 GN=queE PE=3 SV=1
MTEVLIPRAVRAAGDTSSPVNRQGASRSAPTTLRIAEIFGPTIQGEGALIGEPTVFVRAGGCDYRCSWCDSLHAVDSRYRDTWAPMATDEVWQEVTRLSGGQPLTVSLSGGNPAIQNFAPLIAQGREAGYRFACETQGSISQPWFAALDTLVLSPKPPSSGHRVDWQKFDHCLAAAKGCDQIVLKIVIFDDCDYDWAKAVANRWPDLPLYLQPGNPEVDPETPVDLTAATERLHWLIEKVTADRWFAPRVLPQLHVLVWGNKRGV

SEQ ID NO: 32730 - protein, 235 aa, unidentified
  source 1..235: note = Phaeobacter italicus
  REGION 1..235: note = tr|A0A0H5DG32|A0A0H5DG32_9RHOB 7-carboxy-7-deazaguanine synthase OS=Phaeobacter italicus; OX = 481446 GN=queE PE=3 SV=1
MSLRIAEIFGPTIQGEGALIGEPTVFVRTGGCDYRCSWCDSLHAVDSKFRDTWMPMTTRDVWAEVTHLSGGQPLTVSLSGGNPAIQDFAELIAMGKEAGYRFACETQGSINQAWFSKLDTLVLSPKPPSSGHKVDWLKFGSCLAAAKDCPNVVLKIVVFDEVDYDWARVVADRYPELPLYLQPGNPTVDPETPVDLTETTARLRWLIDKVTADKWFAPRVLPQLHVLVWGNQRGV

SEQ ID NO: 32731 - protein, 265 aa, unidentified
  source 1..265: note = Phaeobacter piscinae
  REGION 1..265: note = tr|A0A291FKN3|A0A291FKN3_9RHOB 7-carboxy-7-deazaguanine synthase OS=Phaeobacter piscinae; OX = 1580596 GN=queE PE=3 SV=1
MTEVLIPRAVRATGDTSPPAHRQGASRSAPTTLRIAEIFGPTIQGEGALIGEPTVFVRAGGCDYRCSWCDSLHAVDSRYRDTWAPMATDEIWQEVTRLSGGQPLTVSLSGGNPAIQNFAPLIALGKEAGYRFACETQGSISQPWFAALDTLVLSPKPPSSGHRVDWQKFDHCLLAARGCDQIVLKIVIFDDCDYDWAKAVAHRYPDLPLYLQPGNPEVDPETPVDLTAATERLHWLIEKVTADRWFVPRVLPQLHVLVWGNKRGV

SEQ ID NO: 32732 - protein, 265 aa, unidentified
  source 1..265: note = Phaeobacter piscinae
  REGION 1..265: note = tr|A0A291FX23|A0A291FX23_9RHOB 7-carboxy-7-deazaguanine synthase OS=Phaeobacter piscinae; OX = 1580596 GN=queE PE=3 SV=1
MTEVLIPRAVRATGDTSSPAHRQGASRSAPTTLRIAEIFGPTIQGEGALIGEPTVFVRAGGCDYRCSWCDSLHAVDSRFRDTWTPMATDQIWQEVTRLSGGQPLTVSLSGGNPAIQNFAPLIALGKEAGYRFACETQGSISQPWFAALDTLVLSPKPPSSGHRVDWQKFDHCLLAAKGCDQIVLKIVIFDDCDYDWAKAVAHRYPDLPLYLQPGNPEVDPETPVDLTAATERLHWLIEKVTADRWFAPRVLPQLHVLVWGNKRGV

SEQ ID NO: 32733 - protein, 265 aa, unidentified
  source 1..265: note = Phaeobacter porticola
  REGION 1..265: note = tr|A0A1L3I7T5|A0A1L3I7T5_9RHOB 7-carboxy-7-deazaguanine synthase OS=Phaeobacter porticola; OX = 1844006 GN=queE PE=3 SV=1
MIHSQAPTATRAPIEADVPGSALKPMARAGTMLRIAEIFGPTIQGEGALIGEPTVFVRAGGCDYRCSWCDSLHAVDSRFRESWAPMTTSQIWQDVTRLSGGQPLTISLSGGNPAIQNFAPLIAKGKAEGYRFACETQGSIRQPWFADLDTLVLSPKPPSSGHRVDWQKFDHCLSAAKGCGQVVVKIVIFDDRDYDWARAVAKRLPDLPLYLQPGNPEVDPDVAVDLVAATERLHWLIEKVTGDLWFAPRVLPQLHVLVWGNKRGV

SEQ ID NO: 32734 - protein, 233 aa, Phaeobacter sp.
  REGION 1..233: note = tr|A0A384GSE4|A0A384GSE4_9RHOB 7-carboxy-7-deazaguanine synthase OS=Phaeobacter sp. S60; OX = 1569353 GN=queE PE=3 SV=1
MRIAEIFGPTIQGEGALIGEPTVFVRAGGCDYRCSWCDSLHAVDSRYRDTWAPMATDEVWQEVTRLSGGQPLTVSLSGGNPAIQNFAPLIALGKEAGYRFACETQGSISQPWFAALDTLVLSPKPPSSGHRVDWQKFDHCLLAARGCDQIVLKIVIFDDCDYDWAKAVAHRRPDLPLYLQPGNPEVDPETPVDLTAATERLHWLIEKVTADRWFAPRVLPQLHVLVWGNKRGV

SEQ ID NO: 32735 - protein, 235 aa, Phaeobacter sp.
  REGION 1..235: note = tr|A0A0N8FSV4|A0A0N8FSV4_9RHOB 7-carboxy-7-deazaguanine synthase OS=Phaeobacter sp. 11ANDIMAR09 OX=1225647 GN=queE PE=3 SV=1
MTLRIAEIFGPTIQGEGALIGEPTVFVRAGGCDYRCSWCDSLHAVDSQYRHSWAPMSAEAVWEQVRHLSGDRPLTVSLSGGNPAIQDFGPLIAMGRAAGYRFACETQGSIARPWFGDLDTLVLSPKPPSSGENVDWAAFDACRKLGSGARQQVMKIVIFDEADYRWARETHARYSDLPLYLQPGNSEVDPTTPVDLHALADRLGWLTDKAMADGWFAPRILPQLHVLIWGNKRGV

SEQ ID NO: 32736 - protein, 247 aa, unidentified
  source 1..247: note = Phaeodactylibacter luteus
  REGION 1..247: note = tr|A0A5C6S1Z9|A0A5C6S1Z9_9BACT 7-carboxy-7-deazaguanine synthase OS=Phaeodactylibacter luteus OX=1564516 GN=queE PE=3 SV=1
MKLAQPDQEPEIFYSIQGEGKNLGQPSIFVRTSLCNLHCSWCDTDYTWNWKGTRFRHDRDAEPGYEKFDKARHIAEMPLEKVAEAIAAFPCKNVVLTGGEPMLQQPQLTALMQMLGPDYWFEVETNGTLLPEPGFDERINQYNVSPKLANSNNSQKLRERPKVYRFFAQSPKAHFKFVLSDVQELEEVLALVRKYGLPPQSVYLMPEGTTAGRLAEKQAWLIEACKAHGFHFTSRLHILVYGNKRGV

SEQ ID NO: 32737 - protein, 249 aa, unidentified
  source 1..249: note = Phaeodactylibacter xiamenensis
  REGION 1..249: note = tr|A0A098SAM6|A0A098SAM6_9BACT 7-carboxy-7-deazaguanine synthase OS=Phaeodactylibacter xiamenensis OX=1524460 GN=queE PE=3 SV=1
MTIKIAKPDKEPEIFYSIQGEGKNMGQPSIFVRTSLCNLHCSWCDTDYTWNWEGTRFTHDNDVLPGYRKFKKEDVIAEMKLEEVVEAIQQYPCKNVILTGGEPMLQQPALAALMQALGRNYWFEVETNGTLLPDPAFEAAIHQYNVSPKLSNSNNSQKLRERPKVYRYFAQSDKAHFKFVVATPAELEEVQDLIDRYAIKPSRVYLMPEGTNTDRLAEKQAWLVEACKAHGFNFTSRLHIFIYGNMRGV

SEQ ID NO: 32738 - protein, 206 aa, Phaeospirillum fulvum
  REGION 1..206: note = tr|A0A1H6J4U8|A0A1H6J4U8_PHAFV 7-carboxy-7-deazaguanine synthase OS=Phaeospirillum fulvum; OX = 1082 GN=queE PE=3 SV=1
MSYLVREIFASLQGEGVQSGRVAVFLRFAECNLWSGREADRATARCRFCDTDFVGGERFADAETLADAVAAAWPVADSENRLAVVTGGEPGLQLDEALIAALHRRGFAIAVETNGTLPLPPGLDWICVSPKAGNRLVVVRGDELKLVFPQDGADPAEFESLAFAHFLLQPMDGAEREANTAAALDYCLSHPRWRLGLQLHKSLGLR

SEQ ID NO: 32739 - protein, 206 aa, Phaeospirillum fulvum
  REGION 1..206: note = tr|S9S4E8|S9S4E8_PHAFV 7-carboxy-7-deazaguanine synthase OS=Phaeospirillum fulvum MGU-K5 OX=1316936; GN = queE PE=3 SV=1
MSYIVHEIFASLQGEGIQSGRVAVFLRFAGCNLWSGREADRATARCRFCDTDFVGGERFADAETLADAVAAAWPVAETAHRLAIVTGGEPGLQLDEALIAALHRRGFAIAVETNGTVPLPPGLDWICVSPKAGNRLVVVQGNELKLVFPQDGADPAEFEALAFDHFLLQPMDGPEQQANTAAALQYCLSHPRWRLGLQLHKSLGLR

SEQ ID NO: 32740 - protein, 206 aa, Phaeospirillum molischianum
  REGION 1..206: note = tr|H8FNB1|H8FNB1_PHAMO 7-carboxy-7-deazaguanine synthase OS=Phaeospirillum molischianum DSM 120 OX=1150626; GN = queE PE=3 SV=1
MTYIVREIFASLQGEGVQSGRVAVFLRFAGCNLWSGREADRITARCRFCDTDFVGGERYGDAESLADAVAAAWPAQDGVNRLAIVTGGEPGLQLDDALIAALHRRGFAVAVETNGTLPLPSGLDWVCVSPKAGTDLVVTRGDELKLVYPQVGAAPEDFEHLDFTHFLLQPMDGPERAANTDAALRHCLSRPRWRLGLQLHKSLGLR

SEQ ID NO: 32741 - protein, 210 aa, unidentified
  source 1..210: note = Phenylobacterium deserti
  REGION 1..210: note = tr|A0A328AS69|A0A328AS69_9CAUL 7-carboxy-7-deazaguanine synthase OS=Phenylobacterium deserti OX=1914756 GN=queE PE=3 SV=1
MSYAVKEIFLTLQGEGGQAGKAAVFCRFAGCNLWSGREQDRATAVCTFCDTDFVGMDGPGGGRFPDAPSLAAAVEAAWTGGPHERLVVLTGGEPLLQVDEALIDALHARGFSIALESNGTIEAPPGVDWICISPKADAEVVQTHGQELKLVYPQRGVDPARFEHMAFERFLLQPMDGPDQAENTRAAIAYCLQHPRWRLSVQTHKYLGIA

SEQ ID NO: 32742 - protein, 210 aa, unidentified
  source 1..210: note = Phenylobacterium hankyongense
  REGION 1..210: note = tr|A0A328AX47|A0A328AX47_9CAUL 7-carboxy-7-deazaguanine synthase OS=Phenylobacterium hankyongense OX=1813876 GN=queE PE=3 SV=1
MSYAVKEIFLTLQGEGGQAGRPAVFCRFAGCNLWSGREQDRASAVCTFCDTDFVGMDGPEGGRFATPEALAEAVEAAWTGGPDDRLVVLTGGEPLLQLDEALIAALHARGFALALETNGTLPAPPGVDWICVSPKADAPLAQTSGQELKLVFPQSGVDPAQFEHLAFERFLLQPMDGPARAENTQAAIAYCLAHPRWRLSVQTHKYLGIA

SEQ ID NO: 32743 - protein, 210 aa, unidentified
  source 1..210: note = Phenylobacterium kunshanense
  REGION 1..210: note = tr|A0A328BEG8|A0A328BEG8_9CAUL 7-carboxy-7-deazaguanine synthase OS=Phenylobacterium kunshanense OX=1445034 GN=queE PE=3 SV=1
MSYAVKEIFLTLQGEGGQAGRPAVFCRFAGCNLWSGLERDRDKAVCTFCDTDFVGMDGPGGGRFADAEALAAAIEAAWTGGPDNRLTVLTGGEPLLQVDAALVDALHARGFSIALETNGTLPVPDGVDWICVSPKADAPVVQTRGQELKLVFPQEKAPPERFEHLDFERFLLQPMDGPDRDRNTQAAIAYCLAHPRWRLSVQTHKYLGIA

SEQ ID NO: 32744 - protein, 210 aa, Phenylobacterium sp.
  REGION 1..210: note = tr|A0A0Q7FBM7|A0A0Q7FBM7_9CAUL 7-carboxy-7-deazaguanine synthase OS=Phenylobacterium sp. Root1290 OX=1736445 GN=queE PE=3 SV=1
MSYAVKEIFLTLQGEGGQAGQPAVFCRFAGCNLWSGREEDRAKAVCTFCDTDFVGMDGEGGGRFATADDLARAVEAAWTGGPDHRLVVCTGGEPLLQVDPALIAALHARGFRIALETNGTLPVPQGVDWICVSPKADAEVVQTRGQELKLVFPQPLADPARFEHMDFERFLLQPMDGPARVENTQAAIAYCLAHPRWRLSVQTHKYLGIP

SEQ ID NO: 32745 - protein, 210 aa, Phenylobacterium sp.
  REGION 1..210: note = tr|A0A521PET1|A0A521PET1_9CAUL 7-carboxy-7-deazaguanine synthase OS=Phenylobacterium sp.; OX = 1871053 GN=queE PE=3 SV=1
MSYAVKEIFLTLQGEGGQAGRPAVFCRFAGCNLWSGLERDRAKAVCTFCDTDFVGMDGPGGGRFADADALAAAVEAAWRGGPDDRLTVLTGGEPLLQVDPALIAALHARGFSIALETNGTLPVPDGVDWICVSPKADAPVVQTRGQELKLVYPQEKAPPSRFEDLDFERFLLQPMDGPDRVVNTQAAIAYCLEHPRWRLSVQTHKYLGIA

SEQ ID NO: 32746 - protein, 241 aa, unidentified
  source 1..241: note = Phenylobacterium zucineum
  REGION 1..241: note = tr|B4RHW1|B4RHW1_PHEZH 7-carboxy-7-deazaguanine synthase OS=Phenylobacterium zucineum (strain HLK1); OX = 450851 GN=queE PE=3 SV=1
MGPRLRRLSGVRAAGPRLGGMGGGRPPRTRRMSYAVKEIFLTLQGEGGQAGRPAVFCRFAGCNLWSGREEDREKAVCTFCDTDFVGMDGPGGGRFADAAALAAAIEAQWAGGPNDRLVVLTGGEPLLQVDEALIEALHARGFSIALETNGTLPVPPGIDWICVSPKADAPVVQTRGQELKLVFPQEKALPERFEHLDFERFLLQPMDGPDRAANTRAAIAYCLAHPRWRLSVQTHKYLGIA

SEQ ID NO: 32747 - protein, 210 aa, unidentified
  source 1..210: note = Phenylobacterium zucineum
  REGION 1..210: note = tr|A0A2W5P6S0|A0A2W5P6S0_9CAUL 7-carboxy-7-deazaguanine synthase OS=Phenylobacterium zucineum OX=284016 GN=queE PE=3 SV=1
MSYAVKEIFLTLQGEGGQAGRPAVFCRFAGCNLWSGLERDRDKAVCTFCDTDFVGMDGEGGGRFADADALAAAIEAAWVGGPDDRLTVLTGGEPLLQVDPALIAALHARGFSIALETNGTLAVPDGVDWICVSPKADAPVVQTRGQELKLVFPQEKARPERFEDLDFERFLLQPMDGPDRVANTQAAIAYCLAHPRWRLSVQTHKYLGIA

SEQ ID NO: 32748 - protein, 222 aa, unidentified
  source 1..222: note = Phorcysia thermohydrogeniphila
  REGION 1..222: note = tr|A0A4R1GPX4|A0A4R1GPX4_9BACT 7-carboxy-7-deazaguanine synthase OS=Phorcysia thermohydrogeniphila OX=936138 GN=queE PE=3 SV=1
MRITLSETFVSIQGEGLDVGQPAFFIRTGRCSVGCKFCDTRYAWNSKKTAQVTEIVKEALKSKLPEVIITGGEPLEEENLPLLIRLLSKEERIKRITIETCGHIFRDDLPGEKLKIVLSPKPPTMGVTFPEESLKKFLKTYERAYIKFGVFSQKDFETIKTFAFKNSELIKEPIVIQPLETPFEDYIETCRRVTHMVVEDREFVNAFSVRIIPQVHKLIGLK

SEQ ID NO: 32749 - protein, 234 aa, unidentified
  source 1..234: note = Phormidesmis priestleyi
  REGION 1..234: note = tr|A0A2W4X0I5|A0A2W4X0I5_9CYAN 7-carboxy-7-deazaguanine synthase OS=Phormidesmis priestleyi OX=268141 GN=queE PE=3 SV=1
MPAVTVKQSPIQPLPSTLPSTVPSTLPTVETFHSIQGEGIWTGASAFFIRLAGCEVGCPWCDTKHSWPMQSHPQREIAALVEEALAAQPFMVVITGGEPLMHDLTHLCAALRQQGLRVHLETSGSSPLTGEFDWITLSPKRFKPPLDAIYSQIHELKIVVGDEADLGWAEWAATQLAAHASRPNDPSDHWLDGPKKMLQPEWNSEQGQTLVFDYVRLHPDWRVSLQTHKFLGIR

SEQ ID NO: 32750 - protein, 211 aa, unidentified
  source 1..211: note = Phormidesmis priestleyi
  REGION 1..211: note = tr|A0A2T1D748|A0A2T1D748_9CYAN 7-carboxy-7-deazaguanine synthase OS=Phormidesmis priestleyi ULC007 OX=1920490 GN=queE PE=3 SV=1
MIDFELTDRASTNQTTLPIVETFHSVQGEGAWTGTNAFFIRLGGCDVGCWFCDTKESWNPRRHPQRKIVDLVADAIAANPAIVVITGGEPLMHDLTELSHSLHDAGLRVHLETSGAHPFSGRFDWVTLSPKVSNPPQESVYAHASELKIVVANSQDLIWAEQQSAKVVASVICYLQAEWNTEGSRDLIFDYVLRHPQWRISVQTHKMLGVR

SEQ ID NO: 32751 - protein, 257 aa, Phormidium ambiguum
  REGION 1..257: note = tr|A0A1U7IQM5|A0A1U7IQM5_9CYAN 7-carboxy-7-deazaguanine synthase OS=Phormidium ambiguum IAM M-71 OX=454136 GN=queE PE=3 SV=1
MTDNFPKARLIELFSAIQGEGLNVGTRQIFIRFAICDLRCQFCDSAHTWQTPSACKIEQTAGKRDFATYPNPVELSSLLDWVEKLNQPGLHDSISLTGGEPLLHANFLVKFLPQLHSVTGLPIYLETGGHRPQELALVLPYLDSVGMDIKLPSVSGENHWSAHQEFLKLCHDANLEVFVKLIISSQTDPQELELTGELVAACDPQIPVFLQPVTPIANQPTILAPAPDLVLEWQSLMKKFVKQVRVIPQTHKMIGQL

SEQ ID NO: 32752 - protein, 269 aa, Phormidium sp.
  REGION 1..269: note = tr|A0A522XJW0|A0A522XJW0_9CYAN 7-carboxy-7-deazaguanine synthase OS=Phormidium sp. SL48-SHIP OX=2518363 GN=queE PE=3 SV=1
MSKGQTARLVEVFSAIQGEGANIGTRQIFVRFALCDLRCLYCDSAHTWHARAHCRVERTPGLRDFDEYDNPITVEVLTAWVERQNRPGLHDSLSLTGGEPLLHAPFLAEFLPEVRRRTQLPVYLETGGHRPDKLGPILPYLDLVGMDIKLPSTSGETWWEEHELFLRQCHEAGVSVFVKTIVCDRTPAQELERVAHLVARVSPDTPIYLQPVTPLNGVLRATNEALRRDSFRDAVVPDPEQILAWQTMMKRTIQQVRVVPQTHKMIGQL

SEQ ID NO: 32753 - protein, 269 aa, Phormidium sp.
  REGION 1..269: note = tr|A0A0P8A2X7|A0A0P8A2X7_9CYAN 7-carboxy-7-deazaguanine synthase OS=Phormidium sp. OSCR; OX = 1666905 GN=queE PE=3 SV=1
MTKGQTARLVEVFSAIQGEGANIGTRQIFIRFALCDLRCLYCDSAHTWHAPARCRIERTPGLRDFDEYDNPITVEVLAAWVERQNRPGLHDSLSLTGGEPLLHAPFLAEFLPEVRRRTRLPVYLETGGHRPDKLEPILPYLDLVGMDIKLPSTSGETWWEEHELFLRQCHEAGVSVFVKTIVCDRTPAQELERVAHLVSRVSPDTPIYLQPVTPLNGVLRATNEALRRDSFRDAVVPDPEQVLAWQTMMKRTIRQVRVVPQTHKMIGQL

SEQ ID NO: 32754 - protein, 214 aa, unidentified
  source 1..214: note = Phormidium tenue
  REGION 1..214: note = tr|A0A1U7IZ46|A0A1U7IZ46_9CYAN 7-carboxy-7-deazaguanine synthase OS=Phormidium tenue NIES-30 OX=549789 GN=queE PE=3 SV=1
MTSPTTISQTAESPLLTLALPVVETFHSIQGEGMWAGTNAFFIRLAGCDVGCPWCDTKQSWNPKRHPLRTLEELVAEAQSANPQIVVITGGEPLMHDLSALTGQLKESGLQTHLETSGAHPFSGNFDWVTFSPKRFKPPHSSIYAHVSELKVVIQNEVDLEWAEQQATQVSSTVVKLLQPEWETPGSRDKVFAYVLKHPEWRVSLQTHKFLGVQ

SEQ ID NO: 32755 - protein, 269 aa, unidentified
  source 1..269: note = Phormidium willei
  REGION 1..269: note = tr|A0A168URE0|A0A168URE0_9CYAN 7-carboxy-7-deazaguanine synthase OS=Phormidium willei BDU 130791 OX=399101 GN=queE PE=3 SV=1
MSKGQTARLVEVFSAIQGEGANIGTRQIFIRFALCDLRCLYCDSAHTWQARTHCRVERTPGLRDFDEYDNPITVEVLAAWVERQNRPGLHDSLSLTGGEPLLHAPFLAEFLPEIRRRTQLPVYLETGGHRPDQLGLVLPYLDLVGMDIKLPSTSGETWWEEHELFLRQCHEAGVSVFVKTIVCDRTPAQELERVAHLVARVSPDTPIYLQPVTPLNGVLRATNEALRRDSFRDAVVPDPEQVLAWQTMMKRTVGQVRVVPQTHKMIGQL

SEQ ID NO: 32756 - protein, 222 aa, Photobacterium angustum
  REGION 1..222: note = tr|Q1ZQH6|Q1ZQH6_PHOAS 7-carboxy-7-deazaguanine synthase OS=Photobacterium angustum (strain S14 / CCUG 15956) OX=314292 GN=queE PE=3 SV=1
MYKINEVFETIQGEGVFTGVPAIFVRLQVCPVGCSWCDTKQTWTAEPQDLVSLDQIMAKTGDSPLWTNLDANGVVQLLQDQKYTAKHVVITGGEPCIYDLRPLTQALEEAGFNCQIETSGTSEIQTSDNTWVTVSPKINMKAKLPVLASSLARANEIKHPVGTSKDIEQLDALIDGVTLKPDVTIALQPISQKTRATELCIETCIQRNWRLSIQTHKYLAIA

SEQ ID NO: 32757 - protein, 222 aa, Photobacterium angustum
  REGION 1..222: note = tr|A0A2T3LZA2|A0A2T3LZA2_PHOAN 7-carboxy-7-deazaguanine synthase OS=Photobacterium angustum OX=661 GN=queE PE=3 SV=1
MYKINEVFETIQGEGVFTGVPAIFVRLQVCPVGCSWCDTKQTWTAEPQDLVSLDQIMAKTGDSPLWTNLDANGVVQLLQDQKYTAKHVVITGGEPCIYDLRPLTQALEEAGFNCQIETSGTSEIQTSDNTWVTVSPKINMKAKLPVLASSLARANEIKHPVGTSKDIEQLDTLIDGVTLKPDVTIALQPISQKTRATELCIETCIQRNWRLSIQTHKYLAIA

SEQ ID NO: 32758 - protein, 222 aa, Photobacterium aphoticum
  REGION 1..222: note = tr|A0A0J1GMM8|A0A0J1GMM8_9GAMM 7-carboxy-7-deazaguanine synthase OS=Photobacterium aphoticum OX=754436 GN=queE PE=3 SV=1
MYKINEMFETIQGEGVFTGVPAIFVRLQVCPVGCAWCDTKQTWSAEPQDETTIETIMAKTGDSPLWTTLDADGVVALLVDQQYTAKHVVITGGEPCIYDLRPLTMALETAGFQCQIETSGTSEVQVTDNTWVTVSPKINMKAKLPVLACALERADEIKHPVGTEKDIEQLDALLAGKALKPAVTIALQPISQKPRATELCIDTCIKRNWRLSIQTHKYLAIA

SEQ ID NO: 32759 - protein, 222 aa, Photobacterium aphoticum
  REGION 1..222: note = tr|A0A090RCB8|A0A090RCB8_9GAMM 7-carboxy-7-deazaguanine synthase OS=Photobacterium aphoticum OX=754436 GN=queE PE=3 SV=1
MYKINEVFETIQGEGVFTGVPAIFVRLQVCPVGCSWCDTKQTWSAEPQDETTIETIMAKTGDSPLWTTLDADGVVALLVDQQYTAKHVVITGGEPCIYDLRPLTMALEAAGFQCQIETSGTSEVQVTDNTWVTVSPKINMKAKLPVLACALKRADEIKHPVGTEKDIEQLDALLAGKALKPAVTIALQPISQKPRATELCIETCIKRNWRLSIQTHKYLAIA

SEQ ID NO: 32760 - protein, 222 aa, unidentified
  source 1..222: note = Photobacterium aquae
  REGION 1..222: note = tr|A0A0J1GZB1|A0A0J1GZB1_9GAMM 7-carboxy-7-deazaguanine synthase OS=Photobacterium aquae; OX = 1195763 GN=queE PE=3 SV=1
MYKINEVFETIQGEGVFTGMPAIFVRLQICPVGCSWCDTKQTWSAEPQDQTTIETVMAKRGDSPLWCELDADGVVKLLQDQKYTAKHVVITGGEPCIYDLIPLTTALENAGFHCQIETSGTSEILATADTWVTVSPKINMKGKLPVLASALARADEIKHPVGTEKDIEQLDALLAGKTLKPKVNIALQPISQKPRATELCIETCIKRNWRLSIQTHKYLAIA

SEQ ID NO: 32761 - protein, 222 aa, Photobacterium aquimaris
  REGION 1..222: note = tr|A0A1Y6KXZ0|A0A1Y6KXZ0_9GAMM 7-carboxy-7-deazaguanine synthase OS=Photobacterium aquimaris OX=512643 GN=queE PE=3 SV=1
MYKINEVFETIQGEGVFTGVPAIFVRLQVCPVGCSWCDTKQTWTAEPEDLVSVERIMVKTEDSPLWTQLDADGVVSLLIAQGYTAKHVVITGGEPCIYDLRPLTTALETAGFNCQIETSGTSAILTSNNTWVTVSPKINMKAKLPVLTSALARANEVKHPVGTQKDIDQLDALLATATLRNDVTIALQPISQKPRATELCISTCIARNWRLSIQTHKYLAIA

SEQ ID NO: 32762 - protein, 222 aa, Photobacterium aquimaris
  REGION 1..222: note = tr|A0A2T3I276|A0A2T3I276_9GAMM 7-carboxy-7-deazaguanine synthase OS=Photobacterium aquimaris OX=512643 GN=queE PE=3 SV=1
MYKINEVFETIQGEGVFTGVPAIFVRLQVCPVGCSWCDTKQTWTAEPEDLVSVDRIMVKTEDSPLWTQLDADGVVSLLIAQGYTAKHVVITGGEPCIYDLRPLTTALEAAGFNCQIETSGTSAILTSNNTWVTVSPKINMKAKLPVLTSALARANEVKHPVGTQKDIDQLDALLATATLRNDVTIALQPISQKPRATELCISTCIARNWRLSIQTHKYLAIA

SEQ ID NO: 32763 - protein, 222 aa, unidentified
  source 1..222: note = Photobacterium carnosum
  REGION 1..222: note = tr|A0A2N4UWW7|A0A2N4UWW7_9GAMM 7-carboxy-7-deazaguanine synthase OS=Photobacterium carnosum OX=2023717 GN=queE PE=3 SV=1
MYKINEVFETIQGEGVFTGVPAIFIRLQVCPVGCSWCDTKQTWTAEPENLVSIERIIVKTEDSPLWTQLDADGIVKLLIDQGYTAKHVVITGGEPCIYDLRPLSAALETAGFNCQIETSGTSEILTSDQTWVTVSPKINMKAKLPVLTSALVRANEIKHPVGTHKDIEQLDALLATAKLRNDVTIALQPISQKPRSTELCIETCITRNWRLSIQTHKYLAIA

SEQ ID NO: 32764 - protein, 222 aa, unidentified
  source 1..222: note = Photobacterium damsela
  REGION 1..222: note = tr|A0A1Q9H5L3|A0A1Q9H5L3_PHODP 7-carboxy-7-deazaguanine synthase OS=Photobacterium damsela subsp. piscicida OX=38294 GN=queE PE=3 SV=1
MYKLNEVFETIQGEGVFTGVPAIFVRLQICPVGCSWCDTKQTWSAEPQDFTTLDRIMAKTGDSPLWTEIDAQGIVSLLQDQGYTAKHVVITGGEPCIYDLRPLTQALEASSYQCQIETSGTSEIQATEATWVTVSPKINMKGKLPVLEKALSRANEIKHPVGTQKDLDQLDELLNGVALRSDVTIALQPISQKPRATELCIETCIKRNWRLSIQTHKYLAIA

SEQ ID NO: 32765 - protein, 222 aa, Photobacterium damselae
  REGION 1..222: note = tr|D0YYE4|D0YYE4_PHODD 7-carboxy-7-deazaguanine synthase OS=Photobacterium damselae subsp. damselae CIP 102761 OX=675817 GN=queE PE=3 SV=1
MYKLNEVFETIQGEGVFTGVPAIFVRLQICPVGCSWCDTKQTWSAEPQDFTTLDRIMAKTGDSPLWTEIDAQGIVSLLQDQGYTAKHVVITGGEPCIYDLRPLTQALEASGYQCQIETSGTSEVQATEATWVTVSPKINMKGKLPVLEKALSRANEIKHPVGTQKDLDQLDELLNGVALRSDVTIALQPISQKPRATELCIETCIKRNWRLSIQTHKYLAIA

SEQ ID NO: 32766 - protein, 222 aa, Photobacterium damselae; identical to SEQ ID NO: 32765
  REGION 1..222: note = tr|A0A2T3QPF4|A0A2T3QPF4_9GAMM 7-carboxy-7-deazaguanine synthase OS=Photobacterium damselae OX=38293 GN=queE PE=3 SV=1

SEQ ID NO: 32767 - protein, 222 aa, Photobacterium frigidiphilum
  REGION 1..222: note = tr|A0A2T3JAF5|A0A2T3JAF5_9GAMM 7-carboxy-7-deazaguanine synthase OS=Photobacterium frigidiphilum OX=264736 GN=queE PE=3 SV=1
MYKINEVFETIQGEGTFTGVPAIFVRLQVCPVGCSWCDTKQTWDAEPTDYASLNDIMAKKGDSPLWTNIDAQGIVALLQDQGYTARHVVITGGEPCIYDLVPLTAALETAGFNCQIETSGTSEILATDNTWVTVSPKINMKAKLPVLASALSRADEIKHPVGTSKDIEQLDALIDGVTLKQNVTIALQPISQKPRATDLCIETCIKRNWRLSIQTHKYLAIA

SEQ ID NO: 32768 - protein, 226 aa, Photobacterium gaetbulicola
  REGION 1..226: note = tr|A0A0B9G1W4|A0A0B9G1W4_9GAMM 7-carboxy-7-deazaguanine synthase OS=Photobacterium gaetbulicola OX=1295392 GN=queE PE=3 SV=1
MRLTVYKINEVFETIQGEGVFTGVPAIFVRLQICPVGCAWCDTKQTWSAEPQDHGSIEDVMAKTGDSPIWTELNAQGIVNLLAQQHYTAKHVVITGGEPCIYDLLPLTTALEQAGFNCQIETSGTSEVLATDNTWVTVSPKINMKAKLPVLASALERADEIKHPVGTQNDIDQLDELLAGKQLKANVNIALQPISQKPRATELCIETCIKRNWRLSIQTHKYLAIA

SEQ ID NO: 32769 - protein, 222 aa, Photobacterium gaetbulicola
  REGION 1..222: note = tr|A0A0C5W9H5|A0A0C5W9H5_9GAMM 7-carboxy-7-deazaguanine synthase OS=Photobacterium gaetbulicola Gung47 OX=658445 GN=queE PE=3 SV=1
MYKINEVFETIQGEGVFTGVPAIFVRLQICPVGCAWCDTKQTWSAEPQDHGSIEDVMEKTGDSPIWTELDAQGIVNLLAQQHYTAKHVVITGGEPCIYDLLPLTTALEQAGFNCQIETSGTSEVQATDNTWVTVSPKINMKAKLPVLASALERADEIKHPVGTQKDIDQLDELLAGKQLKTNVNIALQPISQKPRATELCIETCIKRNWRLSIQTHKYLAIA

SEQ ID NO: 32770 - protein, 222 aa, unidentified
  source 1..222: note = Photobacterium galatheae
  REGION 1..222: note = tr|A0A066RXB0|A0A066RXB0_9GAMM 7-carboxy-7-deazaguanine synthase OS=Photobacterium galatheae OX=1654360 GN=queE PE=3 SV=1
MYKINEIFETIQGEGVFTGVPAIFVRLQVCPVGCAWCDTKQTWSAEPQDEVNVQTMIAKKEDTPTWTALDAAGVVQVLNDQGYTARHVVITGGEPCLYDLRPLTEQLEAHGFRCQIETSGTYEVLATEATWVTVSPKINMKGKLPVLTAALERANEIKHPVGTQKDIEQLDSLLAGVNLKKDVTIALQPISQKPRATALCIQTCIARNWRLSIQTHKYLSIA

SEQ ID NO: 32771 - protein, 222 aa, Photobacterium ganghwense
  REGION 1..222: note = tr|A0A0J1HGX2|A0A0J1HGX2_9GAMM 7-carboxy-7-deazaguanine synthase OS=Photobacterium ganghwense OX=320778 GN=queE PE=3 SV=1
MYKINEVFETIQGEGVFTGVPAIFVRLQICPVGCAWCDTKQTWSAEPQDHVSIAEIMAKKGDSPTWTELDAQGIVNLLHDQKYTAKHVVITGGEPCLYDLVPLTEALEQAGFRCQIETSGTSEVKATANTWVTVSPKINMKAKLPVLPSALERADEIKHPVGTTKDIEQLDDLLAGKNLKTNVSIALQPISQKPRATELCIETCIARNWRLSIQTHKYLAIA

SEQ ID NO: 32772 - protein, 222 aa, Photobacterium halotolerans
  REGION 1..222: note = tr|A0A0F5VGH5|A0A0F5VGH5_9GAMM 7-carboxy-7-deazaguanine synthase OS=Photobacterium halotolerans OX=265726 GN=queE PE=3 SV=1
MYKINEIFETIQGEGVFTGVPAIFVRLQVCPVGCAWCDTKQTWSAEPQDEVNVGAMLAKQGDSPSWTALDAAGVVDLLIEQGYTARHVVITGGEPCLYDLRPLTEQLEAKGFRCQIETSGTYEVLATENTWVTVSPKINMKGKLPVLPGALSRANEIKHPVGTQKDIDQLDALLVGVPLQSNVTIALQPISQKARATELCIQTCIARNWRLSVQTHKYLSIA

SEQ ID NO: 32773 - protein, 222 aa, Photobacterium iliopiscarium
  REGION 1..222: note = tr|A0A2T3MAA4|A0A2T3MAA4_9GAMM 7-carboxy-7-deazaguanine synthase OS=Photobacterium iliopiscarium OX=56192 GN=queE PE=3 SV=1
MYKINEVFETIQGEGVFTGVPAIFVRLQICPVGCSWCDTKQTWTAEPNDLVDVERIIIKTEDSPLWTQLDANGIVDLLIKQGYTAKHVVITGGEPCIYDLHPLTTALETAGFNCQIETSGTSEILTSDQTWVTVSPKINMKAKLPVLPSALARANEIKHPVGTHKDIEQLEALLTTATLRNDVTIALQPISQKPRATELCIETCIARNWRLSIQTHKYLAIA

SEQ ID NO: 32774 - protein, 222 aa, Photobacterium indicum
  REGION 1..222: note = tr|A0A2T3L4J9|A0A2T3L4J9_9GAMM 7-carboxy-7-deazaguanine synthase OS=Photobacterium indicum OX=81447 GN=queE PE=3 SV=1
MYKINEVFETIQGEGTFTGVPAIFVRLQVCPVGCSWCDTKQTWDAEPTDYASLDDIMAKKGDSPLWTNIDAQGIVTLLQDQGYTARHVVITGGEPCIYDLVPLTAALETAGFNCQIETSGTSEVLATENTWVTVSPKINMKAKLPVLASALSRADEIKHPVGTSKDIEQLDALIDGVTLKQNVTIALQPISQKPRATDLCIETCIKRNWRLSIQTHKYLAIA

SEQ ID NO: 32775 - protein, 222 aa, Photobacterium jeanii
  REGION 1..222: note = tr|A0A178KN65|A0A178KN65_9GAMM 7-carboxy-7-deazaguanine synthase OS=Photobacterium jeanii; OX = 858640 GN=queE PE=3 SV=1
MYKLNEVFETIQGEGVFTGVPAIFVRLQVCPVGCSWCDTKQTWYAEEGDFADLDVIMAKTQDSPKWTQIDEQGVVKLLQDQGYTARHVVITGGEPCIYDLRPLTEALEAAGFQCQIETSGTSEVQATSNTWVTVSPKINMKGKLPVLASALERANEIKHPVGTQKDIDQLDELLDGKTLRSDVTIALQPISQKPRATELCIETCVKRNWRLSIQTHKYLAIA

SEQ ID NO: 32776 - protein, 222 aa, Photobacterium kishitanii
  REGION 1..222: note = tr|A0A2T3R2A6|A0A2T3R2A6_9GAMM 7-carboxy-7-deazaguanine synthase OS=Photobacterium kishitanii OX=318456 GN=queE PE=3 SV=1
MYKINEVFETIQGEGVFTGVPAIFVRLQVCPVGCSWCDTKQTWTAEPEDLVSVERIMVKTEDSPLWTQLDADGVVDLLIKQGYTAKHVVITGGEPCIYDLRPLTAALETAGFNCQIETSGTSDILTSDNTWVTVSPKINMKAKLPVLTSALARANEVKHPVGTHKDIDQLDDLLATATLRNDVTIALQPISQKPRATELCISTCITRNWRLSIQTHKYLAIA

SEQ ID NO: 32777 - protein, 222 aa, Photobacterium kishitanii
  REGION 1..222: note = tr|A0A2T3KP90|A0A2T3KP90_9GAMM 7-carboxy-7-deazaguanine synthase OS=Photobacterium kishitanii OX=318456 GN=queE PE=3 SV=1
MYKINEVFETIQGEGVFTGVPAIFVRLQVCPVGCSWCDTKQTWAAEPEDLVSVERIMVKTEDSPLWTQLDANGVVDLLIKQGYTAKHVVITGGEPCIYDLRPLTAALETAGFNCQIETSGTSEILASDNTWVTVSPKINMKAKLPVLTSALARANEVKHPVGTHKDIDQLDALLATATLRNDVTIALQPISQKPRATELCISTCITRNWRLSIQTHKYLAIA

SEQ ID NO: 32778 - protein, 222 aa, Photobacterium leiognathi
  REGION 1..222: note = tr|A0A0U1P6G0|A0A0U1P6G0_PHOLE 7-carboxy-7-deazaguanine synthase OS=Photobacterium leiognathi lrivu.4.1 OX=1248232 GN=queE PE=3 SV=1
MYKINEVFETIQGEGVFTGVPAIFVRLQVCPVGCSWCDTKQTWTAEPQDLASLEQIMAKTEDSPLWTQLDANGVVQLLIDQKYTAKHVVITGGEPCIYDLYPLTEALEAAGFNCQIETSGTSEIQASNNTWVTVSPKINMKAKLPVLASALERANEIKHPVGTSKDIEQLDALLEGKSLKSDVTIALQPISQKPRATELCIETCIARNWRLSIQTHKYLAIA

SEQ ID NO: 32779 - protein, 222 aa, Photobacterium leiognathi
  REGION 1..222: note = tr|A0A2T3MI84|A0A2T3MI84_PHOLE 7-carboxy-7-deazaguanine synthase OS=Photobacterium leiognathi OX=553611 GN=queE PE=3 SV=1
MYKINEVFETIQGEGVFTGVPAIFVRLQVCPVGCSWCDTKQTWTAEPQDLASLEQIMAKTEDSPLWTQLDANGVVELLIDQKYTAKHVVITGGEPCIYDLRPLTEALEAAGFNCQIETSGTSEIQASDNTWVTVSPKINMKAKLPVLASALERANEIKHPVGTSKDIEQLDALLEGKNLKSDVTIALQPISQKPRATELCIETCIARNWRLSIQTHKYLAIA

SEQ ID NO: 32780 - protein, 222 aa, Photobacterium lipolyticum
  REGION 1..222: note = tr|A0A2T3N447|A0A2T3N447_9GAMM 7-carboxy-7-deazaguanine synthase OS=Photobacterium lipolyticum OX=266810 GN=queE PE=3 SV=1
MYKINEVFETIQGEGVFTGVPAIFVRLQICPVGCSWCDTKQTWNAEPADYASVDDIMAKKGDSPLWTNIDAQGVVALLREHGYTAKHIVITGGEPCIYDLIPLTQALEQAGYRCQIETSGTAEIRATDDTWVTVSPKINMKAKLPVLPSALQRADEIKHPVGTAKDIEQLDNLLDGVPLKETVEVALQPISQKPRATELCIDTCIKRNWRLSIQTHKYLAIA

SEQ ID NO: 32781 - protein, 222 aa, Photobacterium lutimaris
  REGION 1..222: note = tr|A0A2T3J1W1|A0A2T3J1W1_9GAMM 7-carboxy-7-deazaguanine synthase OS=Photobacterium lutimaris OX=388278 GN=queE PE=3 SV=1
MYKINEVFETIQGEGVFTGVPAIFVRLQICPVGCAWCDTKQTWSAEPQDHGSVVDVMAKTGDSPIWTELDAQGIVNLLTEQQYTAKHVVITGGEPCIYDLRPLTEALEQAGFRCQIETSGTSEVQATENTWVTVSPKINMKAKLPVLESALERADEIKHPVGTQKDIEQLDELLAGKQLKTEVEIALQPISQKPRATELCIETCIKRNWRLSIQTHKYLAIA

SEQ ID NO: 32782 - protein, 222 aa, unidentified
  source 1..222: note = Photobacterium marinum
  REGION 1..222: note = tr|L8JJE3|L8JJE3_9GAMM 7-carboxy-7-deazaguanine synthase OS=Photobacterium marinum OX=1056511 GN=queE PE=3; SV = 1
MYKINEVFETIQGEGVFTGVPAIFVRLQVCPVGCAWCDTKQTWTAEPQDFTSLEEIMAKKADSPLWTKLDAQGIVQLLKDQGYTAKHVVITGGEPCIYDLVPLTEALEEAGFRCQIETSGTSEIKATTDTWVTVSPKINMKAKLEVLPVALERADEIKHPVGTGKDIEQLDNLLEGVNLKSDVSIALQPISQKPRATELCIETCVKRNWRLSIQTHKYLAIA

SEQ ID NO: 32783 - protein, 222 aa, Photobacterium phosphoreum; identical to SEQ ID NO: 32777
  REGION 1..222: note = tr|A0A0B7J8Y1|A0A0B7J8Y1_PHOPO 7-carboxy-7-deazaguanine synthase OS=Photobacterium phosphoreum ANT-2200 OX=1454202 GN=ygcF PE=3 SV=1

SEQ ID NO: 32784 - protein, 222 aa, Photobacterium phosphoreum
  REGION 1..222: note = tr|A0A2T3PKS2|A0A2T3PKS2_PHOPO 7-carboxy-7-deazaguanine synthase OS=Photobacterium phosphoreum OX=659 GN=queE PE=3 SV=1
MYKINEVFETIQGEGVFTGVPAIFVRLQVCPVGCSWCDTKQTWTAEPEDLVSVERIMVKTEDSPLWTQLDANGVVNLLVDQGYTAKHVVITGGEPCIYDLRPLTAALEAAGFNCQIETSGTSDILTSEQTWVTVSPKINMKAKLPVLTSALARANEIKHPVGTSKDIDQLDALLATATLRNDVTIALQPISQKPRATELCISTCITRNWRLSIQTHKYLAIA

SEQ ID NO: 32785 - protein, 222 aa, unidentified
  source 1..222: note = Photobacterium piscicola
  REGION 1..222: note = tr|A0A1T5HY83|A0A1T5HY83_9GAMM 7-carboxy-7-deazaguanine synthase OS=Photobacterium piscicola OX=1378299 GN=queE PE=3 SV=1
MYKINEVFETIQGEGVFTGVPAIFVRLQVCPVGCSWCDTKQTWTAETEDLVSVERIMIKTEDSPLWTQLDANGIVNLLVDQGYTAKHVVITGGEPCIYDLRPLTTALEKAGFNCQIETSGTSEILTSDQTWVTVSPKINMKAKLPVLSSALARANEIKHPVGTHKDIEQLETLLAPVTLRTDVTIALQPISQKPRATELCISTCIARNWRLSIQTHKYLAIA

SEQ ID NO: 32786 - protein, 222 aa, Photobacterium profundum
  REGION 1..222: note = tr|Q6LPQ8|Q6LPQ8_PHOPR 7-carboxy-7-deazaguanine synthase OS=Photobacterium profundum (strain SS9); OX = 298386 GN=STY3080 PE=3 SV=1
MYKINEVFETIQGEGTFTGVPAIFVRLQVCPVGCSWCDTKQTWDAEPTDYASLNDIMAKKGDSPLWTNIDAQGIVTLLQDQGYTARHVVITGGEPCIYDLVPLTAALETAGFNCQIETSGTSEILATENTWVTVSPKINMKAKLPVLASALSRADEIKHPVGTSKDIKQLDALIDGVILKQNVTIALQPISQKPRATDLCIETCIKRNWRLSIQTHKYLAIA

SEQ ID NO: 32787 - protein, 222 aa, Photobacterium profundum
  REGION 1..222: note = tr|Q1YXF7|Q1YXF7_9GAMM 7-carboxy-7-deazaguanine synthase OS=Photobacterium profundum 3TCK OX=314280; GN = queE PE=3 SV=1
MYKINEVFETIQGEGTFTGVPAIFVRLQVCPVGCSWCDTKQTWDAEPTDYASLNDIMAKKGDSPLWTNIDAQGIVALLQDQGYTARHVVITGGEPCIYDLIPLTAALETAGFNCQIETSGTSEILATEDTWVTVSPKINMKAKLPVLASALSRADEIKHPVGTSKDIEQLDTLINGVTLKQNVTIALQPISQKPRATDLCIETCIKRNWRLSIQTHKYLAIA

SEQ ID NO: 32788 - protein, 222 aa, unidentified
  source 1..222: note = Photobacterium proteolyticum
  REGION 1..222: note = tr|A0A1Q9GFX8|A0A1Q9GFX8_9GAMM 7-carboxy-7-deazaguanine synthase OS=Photobacterium proteolyticum OX=1903952 GN=queE PE=3 SV=1
MYKINEVFETIQGEGVFTGVPAIFVRLQVCPVGCAWCDTKQTWTAEPQDFAPLEDIMAKTADSPLWTNLDAGGVVTLLKDQGYTARHVVITGGEPCIYDLIPLTQSLEDAGFRCQIETSGTSEIKATANTWVTVSPKINMKAKLAVLPSALERADEIKHPVGTAKDIEQLDNLIDGVALKHDVSIALQPISQKPRATALCIDTCVKRNWRLSIQTHKYLAIA

SEQ ID NO: 32789 - protein, 222 aa, Photobacterium rosenbergii
  REGION 1..222: note = tr|A0A2T3NH08|A0A2T3NH08_9GAMM 7-carboxy-7-deazaguanine synthase OS=Photobacterium rosenbergii OX=294936 GN=queE PE=3 SV=1
MYKINEVFETIQGEGVFTGVPAIFVRLQICPVGCAWCDTKQTWNAEPQDHGSIEDVMAKTGDSPIWTEIDADGIVNLLKKQGYTAKHVVITGGEPCIYDLLPLTTALEQAGFQCQIETSGTSDVLATVNTWVTVSPKINMKAKLPVLASALERADEIKHPVGTQKDIDQLDELIDGKNLKSDVNIALQPISQKPRATELCIETCIKRNWRLSIQTHKYLAIA

SEQ ID NO: 32790 - protein, 222 aa, unidentified
  source 1..222: note = Photobacterium sanctipauli
  REGION 1..222: note = tr|A0A2T3NY81|A0A2T3NY81_9GAMM 7-carboxy-7-deazaguanine synthase OS=Photobacterium sanctipauli OX=1342794 GN=queE PE=3 SV=1
MYKINEVFETIQGEGVFTGVPAIFVRLQVCPVGCAWCDTKQTWTAEPQDHVSINDVMAKKADSPRWTELDADGIVGLLQAQQYTAKHVVITGGEPCIYDLLPLTTALESAGFQCQIETSGTSEVKVTEQTWVTVSPKINMKAKLPVIKEALERANEIKHPVGTQKDIEQLDELMAGKNLKKDVVVALQPISQKPRATELCIETCIQRNWRLSIQTHKYLAIA

SEQ ID NO: 32791 - protein, 222 aa, unidentified
  source 1..222: note = Photobacterium sanguinicancri
  REGION 1..222: note = tr|A0A135ZQC3|A0A135ZQC3_9GAMM 7-carboxy-7-deazaguanine synthase OS=Photobacterium sanguinicancri OX=875932 GN=queE PE=3 SV=1
MYKLNEVFETIQGEGVFTGVPAIFVRLQVCPVGCSWCDTKQTWSAEPSDFTDLDTIMAKKEDSPLWTELDANGVVQLLIDQGYTARHVVITGGEPCIYDLLPLTQALESAGFQCQIETSGTSEVLTTEATWVTVSPKINMKAKLPVLASALERANEIKHPVGTQKDIDQLNALIEGKALRSDVTIALQPISQKPRATDLCIETCVKRNWRLSIQTHKYLAIA

SEQ ID NO: 32792 - protein, 222 aa, Photobacterium sp.
  REGION 1..222: note = tr|A0A1Y6M7L6|A0A1Y6M7L6_9GAMM 7-carboxy-7-deazaguanine synthase OS=Photobacterium sp. CECT 9192 OX=2006083 GN=queE PE=3 SV=1
MYKINEVFETIQGEGVFTGVPAIFVRLQVCPVGCSWCDTKQTWTAEPEDLVSVERIMVKTEDSPLWTQLDADGVVNLLIAQGYTAKHVVITGGEPCIYDLRPLTAALEVAGFNCQIETSGTSNILTSDNTWVTVSPKINMKAKLPVLTSALARANEIKHPVGTQKDIDQLDDLLATAALRNDVTIALQPISQKPRATELCISTCIARNWRLSIQTHKYLAIA

SEQ ID NO: 32793 - protein, 222 aa, Photobacterium sp.
  REGION 1..222: note = tr|A0A1Y6M7D6|A0A1Y6M7D6_9GAMM 7-carboxy-7-deazaguanine synthase OS=Photobacterium sp. CECT 9190 OX=2006084 GN=queE PE=3 SV=1
MYKINEVFETIQGEGVFTGVPAIFVRLQVCPVGCSWCDTKQTWTAEPEDLVNVERIMVKTEDSPLWTQLDADGVVSLLIAQGYTAKHVVITGGEPCIYDLRPLTAALETAGFNCQIETSGTSAILTTDNTWVTVSPKINMKAKLPVLTSALARANEVKHPVGTQKDIDQLDALLATATLRNDVTIALQPISQKPRATELCISTCIARNWRLSIQTHKYLAIA

SEQ ID NO: 32794 - protein, 222 aa, Photobacterium swingsii
  REGION 1..222: note = tr|A0A2T3PCS4|A0A2T3PCS4_9GAMM 7-carboxy-7-deazaguanine synthase OS=Photobacterium swingsii OX=680026 GN=queE PE=3 SV=1
MYKLNEVFETIQGEGVFTGVPAIFVRLQVCPVGCSWCDTKQTWSAEPSDFTDLDTIMAKKEDSPLWTELDANGVVQLLIDQGYTAKHVVITGGEPCIYDLMPLTQALENAGFQCQIETSGTSDVMATTATWVTVSPKINMKAKLPVLASALERANEIKHPVGTQKDVDQLDALLNGKTLRSDVTIALQPISQKPRATELCIETCVKRNWRLSIQTHKYLAIA

SEQ ID NO: 32795 - protein, 222 aa, unidentified
  source 1..222: note = Photobacterium toruni
  REGION 1..222: note = tr|A0A1T4M806|A0A1T4M806_9GAMM 7-carboxy-7-deazaguanine synthase OS=Photobacterium toruni; OX = 1935446 GN=queE PE=3 SV=1
MYKINEVFETIQGEGVFTGVPAIFVRLQVCPVGCSWCDTKQTWTAETEDLVSVERIMVKTEDSPLWTQLDANGIIKLLIVQGYTAKHVVITGGEPCIYDLRPLTIALEKAGFNCQIETSGTSEILASDQTWVTVSPKINMKAKLPVLPSALARANEIKHPVGTHKDIEQLDTLLAPVTLRNDVTIALQPISQKSRATELCIATCIARNWRLSIQTHKYLAIA

SEQ ID NO: 32796 - protein, 223 aa, Photorhabdus asymbiotica
  REGION 1..223: note = tr|C7BLC1|C7BLC1_PHOAA 7-carboxy-7-deazaguanine synthase OS=Photorhabdus asymbiotica subsp. asymbiotica (strain ATCC 43949 / 3105-77) OX=553480 GN=ygcF PE=3 SV=1
MFYPINEIFQTLQGEGFFTGVPAIFIRLQGCPVGCSWCDTKHTWEKKAEKQQMLETILLKTNESDEWGEASPKQIATLFVQQGYTARHVVITGGEPCIYDLIPLTEELENLGYQCQIETSGTYHVECSAATWVTVSPKVKMRGGYQVLQQALQRANEIKHPVARERDIEALDELLATLDNNSSRIIALQPISQKEDATRLCIETCIARNWRLSMQTHKYLNIA

SEQ ID NO: 32797 - protein, 223 aa, unidentified
  source 1..223: note = Photorhabdus australis
  REGION 1..223: note = tr|A0A1C0U9P2|A0A1C0U9P2_9GAMM 7-carboxy-7-deazaguanine synthase OS=Photorhabdus australis OX=286156 GN=queE PE=3 SV=1
MFYPINEIFQTLQGEGFFTGVPAIFIRLQGCPVGCGWCDTKHTWEKKAEKQRMLETILLKMNESDEWGEASPKQIATLFVQQGYTARHVVITGGEPCIYNLIPLTEELENLGYQCQIETSGTYHVKCSAATWVTVSPKVKMRGGYQVLQQALQRANEIKHPVARERDIEALDELLATLDNNSSRIIALQPISQKEDATRLCIETCIARNWRLSMQTHKYLNIA

SEQ ID NO: 32798 - protein, 223 aa, unidentified
  source 1..223: note = Photorhabdus bodei
  REGION 1..223: note = tr|A0A329X3S4|A0A329X3S4_9GAMM 7-carboxy-7-deazaguanine synthase OS=Photorhabdus bodei; OX = 2029681 GN=queE PE=3 SV=1
MFYPINEIFQTLQGEGFFTGVPAIFIRLQGCPVGCSWCDTKHTWEKEAEKQRTLETILLKTSESNEWSEASPKQIAALFVQQKYTARHVVITGGEPCLYDLTPLTEELESLGYQCQIETSGTYHVKCSVATWVTVSPKVNMRGGYQVLQQALQRANEIKYPVARERDIEVLDELLATLDGNSSRIIALQPISQKEDATRLCIETCIARNWRLSMQTHKYLNIA

SEQ ID NO: 32799 - protein, 223 aa, unidentified
  source 1..223: note = Photorhabdus heterorhabditis
  REGION 1..223: note = tr|A0A5B0W1J0|A0A5B0W1J0_9GAMM 7-carboxy-7-deazaguanine synthase OS=Photorhabdus heterorhabditis OX=880156 GN=queE PE=3 SV=1
MFYPINEVFQTLQGEGFFTGVPAIFIRLQGCPVGCSWCDTKHTWEKKSEKQRMLETVLLKTGESDEWGEASPKQIAALFVQQGYTARHVVITGGEPCIYDLVPLTEELENLGYQCQIETSGTYHVKCSAATWVTVSPKVKMRGGYQVLQQALQRANEIKHPVARERDIEALDELLATLDDNSSRIIALQPISQKEDATRLCIETCIARNWRLSMQTHKYLNIA

SEQ ID NO: 32800 - protein, 223 aa, unidentified
  source 1..223: note = Photorhabdus heterorhabditis
  REGION 1..223: note = tr|A0A0M9CXP7|A0A0M9CXP7_9GAMM 7-carboxy-7-deazaguanine synthase OS=Photorhabdus heterorhabditis OX=880156 GN=queE PE=3 SV=1
MFYPINEVFQTLQGEGFFTGVPAIFIRLQGCPVGCSWCDTKHTWEKKAEKQRMLETVLLKTGESDEWGEASPKQIAALFVQQGYTARHVVITGGEPCIYDLVPLTEELENLGYQCQIETSGTYHVKCSAATWVTVSPKVKMRGGYQVLQQALQRANEIKHPVARERDIEALDELLATLDDNSSRIIALQPISQKEDATRLCIETCIARNWRLSMQTHKYLNIA

SEQ ID NO: 32801 - protein, 223 aa, unidentified
  source 1..223: note = Photorhabdus khanii
  REGION 1..223: note = tr|W3V0T2|W3V0T2_9GAMM 7-carboxy-7-deazaguanine synthase OS=Photorhabdus khanii NC19 OX=1004151 GN=queE; PE = 3 SV=1
MFYPINEIFQTLQGEGFFTGVPAIFIRLQGCPIGCSWCDTKHTWEKEAEKQRALETILLKTSESDKWGEASPKQIAALFVQQGYTARHVVITGGEPCLYDLTPLTEELESLGYQCQIETSGTYHVKCSAATWVTVSPKVKMRGGYQVLQQALQRANEIKHPVARERDIEALDELLAILDDNSSRIIALQPISQKEDATRLCIETCIARNWRLSMQTHKYLNIA

SEQ ID NO: 32802 - protein, 223 aa, unidentified
  source 1..223: note = Photorhabdus laumondii
  REGION 1..223: note = tr|A0A329VH46|A0A329VH46_9GAMM 7-carboxy-7-deazaguanine synthase OS=Photorhabdus laumondii subsp. clarkei OX=2029685 GN=queE PE=3 SV=1
MFYPINEIFQTLQGEGFFTGVPAIFIRLQGCPVGCSWCDTKHTWEKEVEKQRTLETILLKTSESNEWSEASPKQITALFVQQKYTARHVVITGGEPCLYDLIPLTEELESLGYQCQIETSGTYHVKCSAATWVTVSPKVNMRGGYRILQQALQRANEIKYPVARERDIEALDELLATLNDNSSRIIALQPISQKEEATRLCIETCIARNWRFSMQTHKYLNIA

SEQ ID NO: 32803 - protein, 223 aa, unidentified
  source 1..223: note = Photorhabdus laumondii
  REGION 1..223: note = tr|Q7N8L8|Q7N8L8_PHOLL 7-carboxy-7-deazaguanine synthase OS=Photorhabdus laumondii subsp. laumondii (strain DSM 15139 / CIP 105565 / TT01) OX=243265 GN=queE; PE = 3 SV= 1
MFYPINEIFQTLQGEGFFTGVPAIFIRLQGCPVGCSWCDTKHTWEKEVEKQRTLETILLKTSESNEWSKASPKQITALFVQQKYTARHVVITGGEPCLYDLIPLTEELESLGYQCQIETSGTYHVKCSAATWVTVSPKVNMRGGYRILQQALQRANEIKYPVARERDIEALDELLATLNDNSSRIIALQPISQKEEATRLCIETCIARNWRFSMQTHKYLNIA

SEQ ID NO: 32804 - protein, 223 aa, Photorhabdus luminescens
  REGION 1..223: note = tr|A0A5C4RDL1|A0A5C4RDL1_PHOLU 7-carboxy-7-deazaguanine synthase OS=Photorhabdus luminescens subsp. sonorensis OX=1173677 GN=queE PE=3 SV=1
MFYPINEIFQTLQGEGFFAGVPAIFIRLQGCPVGCSWCDTKHTWEKEAEKQRTLETILLKTSESNEWSEASPKQIAALFVQQKYTARHVVITGGEPCLYNLIPLIEELESLGYQCQIETSGTYHVKCPSATWVTVSPKVNMRGGYQILQQALQRANEIKYPVARERDIEALDELLATLDDNSSRIIALQPISQKEDATRLCIETCIARNWRFSMQTHKYLNIA

SEQ ID NO: 32805 - protein, 223 aa, Photorhabdus luminescens
  REGION 1..223: note = tr|A0A1G5RIU6|A0A1G5RIU6_PHOLU 7-carboxy-7-deazaguanine synthase OS=Photorhabdus luminescens OX=29488 GN=queE PE=3 SV=1
MFYPINEIFQTLQGEGFFAGVPAIFIRLQGCPVGCSWCDTKHTWEKEAEKQRTLETILLKTSESNEWSEASPKQIAELFVQQKYTARHVVITGGEPCLYDLIPLIEELESLGYQCQIETSGTYHVKCSVATWVTVSPKVNMRGGYQILQQALQRANEIKYPVARERDIEALDELLATLDDDSSRIIALQPISQKEDATRLCIETCIARNWRFSMQTHKYLNIA

SEQ ID NO: 32806 - protein, 223 aa, unidentified
  source 1..223: note = Photorhabdus namnaonensis
  REGION 1..223: note = tr|A0A1B8YIM0|A0A1B8YIM0_9GAMM 7-carboxy-7-deazaguanine synthase OS=Photorhabdus namnaonensis OX=1851568 GN=queE PE=3 SV=1
MFYPINEVFQTLQGEGFFAGVPAIFIRLQGCPVGCSWCDTKHTWEKEAEKQRTLETILLKTSESNEWSEASPKQIAALFVQQKYTARHVVITGGEPCLYDLIPLIEELESLGYQCQIETSGTYHVKCSDTTWVTVSPKVNMRGGYQVLQQALQRANEIKYPVARERDIEALDELLATLDDNSSRIIALQPISQKEDATRLCIETCIARNWRFSMQTHKYLNIA

SEQ ID NO: 32807 - protein, 223 aa, Photorhabdus sp.
  REGION 1..223: note = tr|A0A4R4IX63|A0A4R4IX63_9GAMM 7-carboxy-7-deazaguanine synthase OS=Photorhabdus sp. MEX47-22 OX=2100167 GN=queE PE=3 SV=1
MFYPINEIFQTLQGEGVFAGVPAIFVRLQGCPVGCSWCDTKHTWEKEAEKQRTLETILLKTSESNEWSEASPKQIAALFVQQKYTARHVVITGGEPCIYDLIPLIEELESLGYQCQIETSGTYHVKCSAATWVTVSPKVNMRGGYQILQQALQRANEIKYPVARERDIEALDELLATLDDNSSRIIALQPISQKEDATRLCIETCIARNWRFSMQTHKYLNIA

SEQ ID NO: 32808 - protein, 223 aa, Photorhabdus sp.
  REGION 1..223: note = tr|A0A4R4J2H6|A0A4R4J2H6_9GAMM 7-carboxy-7-deazaguanine synthase OS=Photorhabdus sp. MEX20-17 OX=2100166 GN=queE PE=3 SV=1
MFYPINEIFQTLQGEGFFTGVPAIFIRLQGCPIGCSWCDTKHTWEKEAEKQRMLETILLKTNESDEWGEASPKQIAALFVQQGYTARHVVITGGEPCLYDLTPLTEELESLGYQCQIETSGTYHVKCSSATWVTVSPKVKMRGGYQVLQQALQRANEIKHPVARERDIEALDELLATLDDNSSRMIALQPISQKEDATRLCIETCIARNWRLSMQTHKYLNIA

SEQ ID NO: 32809 - protein, 223 aa, Photorhabdus temperata
  REGION 1..223: note = tr|U7QVN6|U7QVN6_PHOTE 7-carboxy-7-deazaguanine synthase OS=Photorhabdus temperata J3 OX=1389415 GN=queE; PE = 3 SV=1
MFYPINEIFQTLQGEGFFTGVPAIFIRLQGCPVGCSWCDTKHTWEKEAKNQRMLETILLKTSESDEWGEASPEQIAALFVQQGYTARHVVITGGEPCLYDLAPLTEELESLGYQCQIETSGTYHVKCSSATWVTVSPKVKMRGGYQVLQQALQRANEIKHPVARERDIEALDELLAALDDNSSRIIALQPISQKEDATRLCIETCIARNWRLSMQTHKYLNIA

SEQ ID NO: 32810 - protein, 223 aa, Photorhabdus temperata
  REGION 1..223: note = tr|T0P3Q1|T0P3Q1_PHOTE 7-carboxy-7-deazaguanine synthase OS=Photorhabdus temperata subsp. temperata M1021; OX = 1221520 GN=queE PE=3 SV=1
MFYPINEIFQTLQGEGFFTGVPAIFIRLQGCPVGCSWCDTKHTWEKEAKKQRMLETILLKTSESDEWGEASPEQIAALFVQQGYTARHVVITGGEPCLYDLAPLTEELESLGYQCQIETSGTYHVKCSSATWVTVSPKVKMRGGYQVLQQALQRANEIKHPVARERDIEALDELLAALDDNSSRIIALQPISQKEDATRLCIETCIARNWRLSMQTHKYLNIA

SEQ ID NO: 32811 - protein, 223 aa, unidentified
  source 1..223: note = Photorhabdus thracensis
  REGION 1..223: note = tr|A0A0F7LV44|A0A0F7LV44_9GAMM 7-carboxy-7-deazaguanine synthase OS=Photorhabdus thracensis OX=230089 GN=queE PE=3 SV=1
MFYPINEIFQTLQGEGFFTGVPAIFIRLQGCPVGCSWCDTKHTWEKEAAKQRMLESILLKTRESDEWGEASPKQIAALFVQQGYTARHVVITGGEPCLYDLTPLTEEFESLGYQCQIETSGTYYVKCSSATWVTVSPKVKMRGGYQVLQQALQRANEIKHPVARERDIEALDELLAALDDNSSRIIALQPISQKEDATRLCIETCIARNWRLSMQTHKYLNIA

SEQ ID NO: 32812 - protein, 210 aa, unidentified
  source 1..210: note = Phreatobacter stygius
  REGION 1..210: note = tr|A0A4D7BH74|A0A4D7BH74_9PROT 7-carboxy-7-deazaguanine synthase OS=Phreatobacter stygius; OX = 1940610 GN=queE PE=3 SV=1
MSYAVKEIFLTLQGEGAQAGRAAVFCRFAGCNLWSGREADRASAQCRFCDTDFVGLDGTKGGRYATAQALARAIAAEWTGAPDRRFCVLTGGEPLLQVDAALIGALHAERFSIAVETNGTIAAPEGLDWICVSPKAGTELKQRHGHELKLVYPQPAAMPEQFADLSFDHFCLQPMDGPQQQDNTALAVAYCLAHPQWRLSVQTHKRIGIR

SEQ ID NO: 32813 - protein, 238 aa, Phycicoccus sp.
  REGION 1..238: note = tr|A0A444BRC9|A0A444BRC9_9MICO 7-carboxy-7-deazaguanine synthase OS=Phycicoccus sp. CMS6Z-2 OX=2502783 GN=queE PE=3 SV=1
MTASDVESVDQLLISEVFGPTLQGEGPSAGQTASFVRLGGCNLACSWCDTPYSWDASRYDLDRELRYSPVEDVVDRVLDMRTALTVISGGEPALQRAALLSLAQTLRGRERRVEIETNGTVPLGPLGNELDLVVVSPKLRNSGIPLRNRRRPEVLRELAALKHSVFKFVVTSRGDLAEVETAQRDLALRPSQVWVMPEGTDTELLTARLRELAGPVADRGWSLSHRLQIVLWGGARGR

SEQ ID NO: 32814 - protein, 228 aa, Phycisphaera mikurensis
  REGION 1..228: note = tr|I0IBM6|I0IBM6_PHYMF 7-carboxy-7-deazaguanine synthase OS=Phycisphaera mikurensis (strain NBRC 102666 / KCTC 22515 / FYK2301M01) OX=1142394 GN=queE PE=3 SV=1
MDPAPLELAAAPASARDRAYRVKEMHLTLQGEGIHAGRAAVFLRFAGCNLWSGREADRATAACRFCDTDFVGTDGPGGGTFRGPEALADAAAECWGRRSEHRFVVCTGGEPLLQLDGPAIAALRARGFEVAVETNGTRPLPDPAPDWVTVSPKAGQPLALGGGDELKLVYPQPALRPESLNALGFRHRLLQPMDGPAQAENTQLAVAYCLANPAWRLSVQTHKVIGIA

SEQ ID NO: 32815 - protein, 246 aa, Phycisphaera sp.
  REGION 1..246: note = tr|A0A3R7RJU4|A0A3R7RJU4_9BACT 7-carboxy-7-deazaguanine synthase OS=Phycisphaera sp. TMED9 OX=1986611 GN=queE PE=3 SV=1
MPDPASEPSADLQADRTSPSTSSIRLNEIFHSIQGESSRAGEPCIFVRLSGCHLRCSWCDTEYAFREGGRREVASVLAEVLAIECDVVEITGGEPLLQKAVHQLERGLLDAGRTVMVETSGACDITACDPRTEVVMDMKAPSSGECGRNLDTNLEALRPHHEVKFVIGNREDYEWSRDAVERHGLAKRCRAVLFSPVFVQAKGLEIAGAPGLEPRSLAEWILEDRLSVRMQLQMHKFIWEPSTRGV

SEQ ID NO: 32816 - protein, 231 aa, Phycisphaera sp.
  REGION 1..231: note = tr|A0A1Z9H8M4|A0A1Z9H8M4_9BACT 7-carboxy-7-deazaguanine synthase OS=Phycisphaera sp. TMED151 OX=1986610 GN=queE PE=3 SV=1
MPIAETFDSIQGEGSLLGTPSFFIRTAGCNLRCTWCDTPYASWAAAGDQRSVASLVEEVQRSGRKHVVLTGGEPFMFPGLIELNDALREAGCHVTIETAGTLVLPLTCDLLSCSPKLSNSTPTNDPRDPTGQWAERHEARRWRPEILSKLIQQSVRTQWKFVVSNQQDLAEIDQMLAEVPPERPEDVFLMPEGVTVPKPERVRWVVELCQKRGWCYGHRLHIALFGNTRGT

SEQ ID NO: 32817 - protein, 231 aa, unidentified
  source 1..231: note = Phycisphaeraceae bacterium
  REGION 1..231: note = tr|A0A2D5Z9R2|A0A2D5Z9R2_9BACT 7-carboxy-7-deazaguanine synthase OS=Phycisphaeraceae bacterium OX=2026777 GN=queE PE=3 SV=1
MAKRKNDVLRVNEIFHSVQGEGTRAGDPCVFVRLTGCHLRCRYCDTEYAFHEGGSKTIDRVVADVTAFGCPLVEITGGEPLLQPNVHPLMTRLCDEGFEVLIETSGACDIGPCDERVARIVDLKTPGSGESHHNEWSNVGHLRPRDEVKFVICDRADYEWSRRQVREYGLCDRVAAVLFGPAERVAPGREIAGVEGLAIERLAGWILEDRLAVRLQTQLHKQIWGPTARGV

SEQ ID NO: 32818 - protein, 231 aa, unidentified; identical to SEQ ID NO: 32816
  source 1..231: note = Phycisphaeraceae bacterium
  REGION 1..231: note = tr|A0A520QDD3|A0A520QDD3_9BACT 7-carboxy-7-deazaguanine synthase OS=Phycisphaeraceae bacterium OX=2026777 GN=queE PE=3 SV=1

SEQ ID NO: 32819 - protein, 225 aa, unidentified
  source 1..225: note = Phycisphaerae bacterium
  REGION 1..225: note = tr|A0A5C5VRE4|A0A5C5VRE4_9BACT 7-carboxy-7-deazaguanine synthase OS=Phycisphaerae bacterium RAS1 OX=2528034 GN=queE PE=3 SV=1
MRINEIFHSIQGEGIRTGLRCVFIRLTGCHLRCTYCDTEYSFFEGDWMTLDDVLSQVAVFECGAVEVTGGEPLLQPGVYPLLARLADDYETVMLETSGAILMDRVDPRVIRILDLKTPSSGEVERNEYRNIDLLTPRDEVKFVIGTRGDYEWARDQVRERNLLQRCPVLFSPVVGHGLADAGGLKLYRGRLDPAELAAWILADRLDVRFMYQLHKLIWPATQRGV

SEQ ID NO: 32820 - protein, 233 aa, unidentified
  source 1..233: note = Phycisphaerae bacterium
  REGION 1..233: note = tr|A0A1Q2MDC6|A0A1Q2MDC6_9BACT 7-carboxy-7-deazaguanine synthase OS=Phycisphaerae bacterium SM-Chi-D1 OX=1851148 GN=queE PE=3 SV=1
MEVVINEIFYSIQGEGRLAGRPSVFVRHAGCTLRCDFCDTPYAQSPDSGTRYSLNHVVEKVRSYKCPNLVITGGEPMANPVLERLVEMTWPLFETITIETNGTCFRQLDPRLDNVLMSISPKFNDRQRAGYQHSFDVEPESGLISQGTILRLVNSYDYQLKFVVGADTDIKKIRRTVEGLGCANQRDIFLMPEAKNRREYIRASRHVVDLCLKYGYSFSPRHHIMIWDTKIGV

SEQ ID NO: 32821 - protein, 226 aa, unidentified
  source 1..226: note = Phycisphaerales bacterium
  REGION 1..226: note = tr|A0A3D1F2Q1|A0A3D1F2Q1_9BACT 7-carboxy-7-deazaguanine synthase OS=Phycisphaerales bacterium OX=2052180 GN=queE PE=3 SV=1
MPRLQINEMFYSIQGESTWSGLRCVFIRLKGCHLRCSYCDTEYAFHEGQSFTVDEVLSQAIRHNCDLYEITGGEPLLQKTVHPLMTRLCDLGKTVLIETSGACDISVCDPRVIRIMDIKTPGSGEVDRNLWTNMDHLNTTDEIKFVLCDRADYDWAKKIMVDYDLANRVKAVLMSGVNAMHATKELAGCGALPMIDLAQWIIEDNLPVRMQSQLHKQIWDPSARGV

SEQ ID NO: 32822 - protein, 226 aa, unidentified
  source 1..226: note = Phycisphaerales bacterium
  REGION 1..226: note = tr|A0A3D3UT00|A0A3D3UT00_9BACT 7-carboxy-7-deazaguanine synthase OS=Phycisphaerales bacterium OX=2052180 GN=queE PE=3 SV=1
MRINEIFYSLQGEGFLAGVPSVFIRLAGCPLRCRWCDTKYAWDKEAGRPYGPDQIVRVMQKWPCKHVVITGGEPMVNSDLPQLARKLKAAGKHITIETAGIVYIPEISCDLMSISPKLSNSMPDEPKLAAIHKHSKLDLAVLGALIDNYNYQLKFVVDSETDLPEIQETIEELENVDKGKIMLMPQAATRQELSGKSPMAAELCKRTGYAFSQRLQVLIWNNQKGK

SEQ ID NO: 32823 - protein, 217 aa, Phyllobacterium bourgognense
  REGION 1..217: note = tr|A0A368YXF7|A0A368YXF7_9RHIZ 7-carboxy-7-deazaguanine synthase OS=Phyllobacterium bourgognense OX=314236 GN=queE PE=3 SV=1
MSYAVKEIYLTLQGEGNHTGRAAVFMRFAGCNLWSGLERDREEANCKFCDTDFIGVNGPGGGKFKTAAALADAVAAAWPQNAGGKPYVICTGGEPLLQLDTPLIKAFHARGFEVGIETNGTIAAPAEIDWICVSPKAAAPLVQTSGNELKLVYPQKEAETHPSRFEQLSFEHFYLQPLDVIGDPAQTAAHVASAAAYCLAHPLWRLSTQTHKILGLP

SEQ ID NO: 32824 - protein, 219 aa, Phyllobacterium brassicacearum
  REGION 1..219: note = tr|A0A2P7BJF7|A0A2P7BJF7_9RHIZ 7-carboxy-7-deazaguanine synthase OS=Phyllobacterium brassicacearum OX=314235 GN=queE PE=3 SV=1
MTYAVKEIYLTLQGEGNHTGRAAVFMRFAGCNLWSGLERDREEAVCQFCDTDFVGLNGPGGGKFKTADALADAVAAHWPDAHNSGGKPYVICTGGEPLLQLDLALIDAFHVRGFEVGVETNGTIAAPAGLDWICVSPKAAAPLVQTSGNELKLVFPQKEAETHPSRFEQLSFEHFYLQPLDVIGDPAQTASHVASAAAYCLAHPLWRLSTQTHKLIGLP

SEQ ID NO: 32825 - protein, 210 aa, unidentified
  source 1..210: note = Phyllobacterium endophyticum
  REGION 1..210: note = tr|A0A2P7ASL1|A0A2P7ASL1_9RHIZ 7-carboxy-7-deazaguanine synthase OS=Phyllobacterium endophyticum OX=1149773 GN=queE PE=3 SV=1
MTYAVKELFKTLQGEGAQAGRAAVFCRFAGCNLWSGREQDRHSAVCKFCDTDFIGIDGEGGGKFRDASELASAIARTWGSAESRRYVVFTGGEPLLQIDDALIVAVHEHGFEIAIETNGTIEPPEGIDWICVSPKAGAPFNLKFGSELKLVYPQAQLLPDDLPDVSFEHYFLQPMDGPEQIENIAAVTAFCLENPRWRLSLQTHKMIGIP

SEQ ID NO: 32826 - protein, 217 aa, unidentified
  source 1..217: note = Phyllobacterium endophyticum
  REGION 1..217: note = tr|A0A2P7AZ03|A0A2P7AZ03_9RHIZ 7-carboxy-7-deazaguanine synthase OS=Phyllobacterium endophyticum OX=1149773 GN=queE PE=3 SV=1
MTYAVKEIYLTLQGEGNHTGRAAVFMRFTGCNLWSGLERDREEAICKFCDTDFVGVNGPGGGKFKTADALADSVASAWPAGGGGQPYVICTGGEPLLQLDLPLLDAFHARGFEVGIETNGTIAAPADIDWICVSPKASAPLVQTSGNELKLVYPQKESEAHPSRFEQLSFQHFYLQPLDVIGDPAQTAAHVASAAAYCLAHPLWRLSTQTHKILGLP

SEQ ID NO: 32827 - protein, 243 aa, Phyllobacterium leguminum
  REGION 1..243: note = tr|A0A318T3N7|A0A318T3N7_9RHIZ 7-carboxy-7-deazaguanine synthase OS=Phyllobacterium leguminum OX=314237 GN=queE PE=3 SV=1
MTGQIIRTSEIFGPTIQGEGALIGLPTVFVRTGGCDYRCSWCDSLHAVDSAFRHEWTPMSPEAIFQEVTRLSGGIPLTVSLSGGNPAVQPLEPLIELGHSHGYRFALETQGSIARDWFADLDVLVLSPKPPSSGMRTDWDQLDACLTAGSAGQAQIALKIVVFDDEDYAFARRTAGRYPDTPIYLQPGNHTPPPPHDDAAHVDIDGIMDRMLWLVAKVTEDRWYAARILPQLHVLLWGNKRGV

SEQ ID NO: 32828 - protein, 219 aa, Phyllobacterium myrsinacearum
  REGION 1..219: note = tr|A0A2S9JJS7|A0A2S9JJS7_9RHIZ 7-carboxy-7-deazaguanine synthase OS=Phyllobacterium myrsinacearum OX=28101 GN=queE PE=3 SV=1
MTYAVKEIYLTLQGEGNHTGRAAVFMRFAGCNLWSGLERDRANAQCRFCDTDFVGVDGPGGGKFKTADALADAVAGAWPKSARSKGKPYVICTGGEPLLQLDQPLIDAFHARGFDIGVETNGTIAAPDGIDWICVSPKADTTLVQTSGHELKLVYPQAEAQTDPAHFEHLSFQHFYLQPLDVIGDPAQTARHVASAAAYCLAHPLWRLSTQTHKLIGLP

SEQ ID NO: 32829 - protein, 244 aa, unidentified
  source 1..244: note = Phyllobacterium salinisoli
  REGION 1..244: note = tr|A0A368JYQ9|A0A368JYQ9_9RHIZ 7-carboxy-7-deazaguanine synthase OS=Phyllobacterium salinisoli OX=1899321 GN=queE PE=3 SV=1
MSAGETQIRISEIFGPTIQGEGILIGLPTVFVRTGGCDYRCSWCDTLHAVASEYRDQWLPMSVDEIWREVTRLSGSRPLMVSLSGGNPAIQPLGALIERGHREGYRFALETQGSVARDWFANLDVLVLSPKPPSSGMETDWDAFDACLRMAAEAPQIALKIVVFDDGDYAYARAAAARYPTFPVYLQPGNHTPPPPDDESAKVDIDGIMDQMLWLVGKVTDNQWFEARVLPQLHVLLWGNRRGV

SEQ ID NO: 32830 - protein, 219 aa, unidentified
  source 1..219: note = Phyllobacterium sophorae
  REGION 1..219: note = tr|A0A2P7BKQ8|A0A2P7BKQ8_9RHIZ 7-carboxy-7-deazaguanine synthase OS=Phyllobacterium sophorae OX=1520277 GN=queE PE=3 SV=1
MTYAVKEIYLTLQGEGNHTGRAAVFMRFAGCNLWSGLERDREEAVCRFCDTDFIGVNGPGGGKFKTAEALADAVAAQWPDTDRSGGKPYVICTGGEPLLQLDAPLIEAFHAHGFEVGVETNGTIAAPAGLDWICVSPKATAPLVQTSGNELKLVFPQKEAETHPSRFEQLSFEHFYLQPLDVIGDPAQTASHVASAAAYCLAHPLWRLSTQTHKLIGLP

SEQ ID NO: 32831 - protein, 219 aa, Phyllobacterium sp.
  REGION 1..219: note = tr|A0A1H0LBG5|A0A1H0LBG5_9RHIZ 7-carboxy-7-deazaguanine synthase OS=Phyllobacterium sp. OV277 OX=1882772 GN=queE PE=3 SV=1
MTYAVKEIYLTLQGEGNHTGRAAVFMRFAGCNLWSGLERDRADAQCRFCDTDFVGVNGPGGGKFKTADALAGAVANAWPRGERSNGKPYVICTGGEPLLQLDKPLIDAFHARGFEVGVETNGTIAAPEGIDWICVSPKANTKLVQTSGHEIKLVYPQAEAATDPIHFERLPFQHFYLQPLDVIGDPAQTARHVASAAAYCLAHPLWRLSTQTHKLIGLP

SEQ ID NO: 32832 - protein, 217 aa, Phyllobacterium sp.
  REGION 1..217: note = tr|J3C715|J3C715_9RHIZ 7-carboxy-7-deazaguanine synthase OS=Phyllobacterium sp. YR531 OX=1144343 GN=queE; PE = 3 SV=1
MTYAVKEIYLTLQGEGNHTGRAAVFMRFAGCNLWTGREQDRATATCQFCDTDFVGVDGPGGGKFKTADALADAVAAAWPQGGGGTPYVICTGGEPLLQLDEPLIEAFHARGFEVGIETNGTIEAPAGIDWICVSPKAAAPLVQTSGNELKLVFPQKEEETHPSRFEQLSFQHFYLQPLDVIGDPAQTAAHVASAAAYCLAHPLWRLSTQTHKMNGLP

SEQ ID NO: 32833 - protein, 219 aa, unidentified
  source 1..219: note = Phyllobacterium zundukense
  REGION 1..219: note = tr|A0A2N9VWS1|A0A2N9VWS1_9RHIZ 7-carboxy-7-deazaguanine synthase OS=Phyllobacterium zundukense OX=1867719 GN=queE PE=3 SV=1
MTYAVKEIYLTLQGEGNHTGRAAVFMRFAGCNLWSGLERDREEAVCQFCDTDFIGVNGPGGGKFKTAEALADAVAAQWPDADRSGGKPYVICTGGEPLLQLDAPLIDAFHARGFEIGVETNGTIAAPSGLDWICVSPKAAAPLVQTSGNELKLVFPQKEPETHPSRFEQLSFEHFYLQPLDVIGDPAQTASHVASAAAYCLAHPLWRLSTQTHKLIGLP

SEQ ID NO: 32834 - protein, 223 aa, unidentified
  source 1..223: note = Phytobacter diazotrophicus
  REGION 1..223: note = tr|A0A4R4BAB9|A0A4R4BAB9_9GAMM 7-carboxy-7-deazaguanine synthase OS=Phytobacter diazotrophicus OX=395631 GN=queE PE=3 SV=1
MQYPINEMFQTLQGEGYFTGVPAIFIRLQGCPIGCAWCDTKHTWDKLEDREVSLYSILAKTKESDKWGAASSEDLLAIIERQGWTARHVVITGGEPCIHDLIPLTHLLEKQGFSCQIETSGTHEVRTSHATWVTVSPKVNMRGGYDILQQALERADEIKHPVGRTRDIEALDELLTQLTDDKHRVIALQPISQKDDATRLCIETCIARNWRLSMQTHKYLNIA

SEQ ID NO: 32835 - protein, 223 aa, unidentified
  source 1..223: note = Phytobacter ursingii
  REGION 1..223: note = tr|A0A508UJH3|A0A508UJH3_9GAMM 7-carboxy-7-deazaguanine synthase OS=Phytobacter ursingii; OX = 1972431 GN=queE PE=3 SV=1
MQYPINEMFQTLQGEGYFTGVPAIFIRLQGCPVGCAWCDTKHTWDKLEDREVSLYSILAKTKESDKWGAASSEDLLAIIERQGWTARHVVITGGEPCIHDLIPLTHLLEKQGFSCQIETSGTHEVRTSHATWVTVSPKVNMRGGYDILQQALERADEIKHPVGRTRDIEALDELLAQLTDDKHRVIALQPISQKDDATRLCIETCIARNWRLSMQTHKYLNIA

SEQ ID NO: 32836 - protein, 223 aa, unidentified; identical to SEQ ID NO: 30456
  source 1..223: note = Phytobacter ursingii
  REGION 1..223: note = tr|A0A0G3Q9D0|A0A0G3Q9D0_9GAMM 7-carboxy-7-deazaguanine synthase OS=Phytobacter ursingii; OX = 1972431 GN=queE PE=3 SV=1

SEQ ID NO: 32837 - protein, 211 aa, unidentified
  source 1..211: note = Pigmentiphaga aceris
  REGION 1..211: note = tr|A0A5C0B4F9|A0A5C0B4F9_9BURK 7-carboxy-7-deazaguanine synthase OS=Pigmentiphaga aceris; OX = 1940612 GN=queE PE=3 SV=1
MTYSVKEMFYTLQGEGAQAGRPAVFCRFAGCNLWTGREKDRAKAICQFCDTDFVGTDGTGGGKFRDAQALAAAIAGFWPNADHANRFVVLTGGEPLMQVDTALIDALHAEGFVIAVETNGTVLAPEGIDWICVSPKAGSEWIQRSGHELKVVWPQPGLDFEALEAADFTHRYLQPMDNILRADNTELCIRTCMARPAWRLSLQTHKITGIR

SEQ ID NO: 32838 - protein, 234 aa, Pirellula sp.
  REGION 1..234: note = tr|A0A142XW39|A0A142XW39_9PLAN 7-carboxy-7-deazaguanine synthase OS=Pirellula sp. SH-Sr6A; OX = 1632865 GN=queE PE=3 SV=1
MVRISEIFHSIQGEGKLSGTPSVFVRTSGCNLRCWFCDTRYASWEPEGDTLSVSSILDRVDAFPCDHVVITGGEPAIFDEIGEVVQSCKARRKHVTIETAGTVDRDWDCDLWSISPKLSNSTPIGMASDEWVRNHDLRRHAPQVVESLMESSLNRQADYQLKFVVGSILDAEEVLEYLGELHAWDRDRVMMMPRGTTAEELQLHSTWLPSWCRTHGVRYCDRQHIYWFGNTRGT

SEQ ID NO: 32839 - protein, 228 aa, Pirellula staleyi
  REGION 1..228: note = tr|D2R4S1|D2R4S1_PIRSD 7-carboxy-7-deazaguanine synthase OS=Pirellula staleyi (strain ATCC 27377 / DSM 6068 / ICPB 4128) OX=530564 GN=queE PE=3 SV=1
MLIAELYTSLQGEGRLTGTPSVFVRASGCNLRCWFCDTPFTSWQPEGEDWSLEEIVHQVQAKQTSHVVITGGEPMLYSEMVPLTQELKRLGLHITIETAGTLHLEVACDLMSISPKLASSTPSVARAGRWAARHERVRHQPHVIRKMIAEYDYQLKFVIDSESDFAELDSWLEEFPEVRPERVLLMPQGTKLEELAARSAWLAPFCAARGFQLCPRKHIEWYGATRGT

SEQ ID NO: 32840 - protein, 215 aa, unidentified
  source 1..215: note = Piscirickettsia litoralis
  REGION 1..215: note = tr|A0A1E3GDY5|A0A1E3GDY5_9GAMM 7-carboxy-7-deazaguanine synthase OS=Piscirickettsia litoralis OX=1891921 GN=queE PE=3 SV=1
MNKDSLRINELFYSLQGETCTVGLPTVFIRLTGCPLRCTYCDSAYAFSGGDRLSLDQIIAQVQGYKAWHVTVSGGEPLAQPAVFELMARLCDLGYEVSVETSGALPVNNIDVRVMKVVDIKTPGSGEQQRNLYENFKYITAKDQIKFVICHREDYDWAVACMSEYDLTSKCEVLFSPSYEELKGVELADWILTDQLNVRFQLQLHKILWGDVPGK

SEQ ID NO: 32841 - protein, 215 aa, Piscirickettsia salmonis
  REGION 1..215: note = tr|A0A0K2DVH9|A0A0K2DVH9_PISSA 7-carboxy-7-deazaguanine synthase OS=Piscirickettsia salmonis OX=1238 GN=queE PE=3 SV=1
MNKDSLRINELFYSLQGETRTVGLPTVFIRLTGCPLRCTYCDSAYAFTGGERLSLDQIIIQVQAYQVRHVTVSGGEPLAQPNVFELMRRLCDLGYEISVETSGALPIEEIDVRVMKVVDIKTPGSGEHQRNRYENFDYITRHDQIKFVICDRQDYDWAVACVNQYDLTSLCEVLFSPSYEQLKGAELADWILTDQLDVRFQLQLHKILWGDVPGK

SEQ ID NO: 32842 - protein, 215 aa, Piscirickettsia salmonis
  REGION 1..215: note = tr|A0A0K2L232|A0A0K2L232_PISSA 7-carboxy-7-deazaguanine synthase OS=Piscirickettsia salmonis OX=1238 GN=queE PE=3 SV=1
MNKDFLRINELFYSLQGEARTVGLPTVFIRLTGCPLRCTYCDSAYAFTGGERLSLDQIIIQVQAYQVRHVTVSGGEPLTQPNVFELMRRLCDLGYEVSVETSGALPIEEIDVRVMKVVDIKTPGSGEHQRNRYENFDYITRHDQIKFVICDRQDYDWAVVCVNQYDLSSLCEVLFSPSYEQLKGAELADWILTDQLDVRFQLQLHKILWGDVPGK

SEQ ID NO: 32843 - protein, 215 aa, unidentified
  source 1..215: note = Piscirickettsiaceae bacterium
  REGION 1..215: note = tr|A0A2A4SIZ0|A0A2A4SIZ0_9GAMM 7-carboxy-7-deazaguanine synthase OS=Piscirickettsiaceae bacterium OX=2030828 GN=queE PE=3 SV=1
MSKDSLRITEIFYSLQGEGKTVGLPTTFIRLTGCPLRCGYCDTEYAFHGGETRSIDSIIEEVRSLGSRYINVTGGEPLAQKRVLLLMQRLCEEGYNVSLETSGAIDVSGVDERVVKILDVKTPASGEVTKNLDKNYGYLSAQDQVKYVICNEADFHWSKEHMFEHKLHVKCEVLFSPVQGQLEPRQLADWLLHEKLPVRFQIQLHKYLWGDVPGK

SEQ ID NO: 32844 - protein, 215 aa, unidentified
  source 1..215: note = Piscirickettsiaceae bacterium
  REGION 1..215: note = tr|A0A2A4PMZ0|A0A2A4PMZ0_9GAMM 7-carboxy-7-deazaguanine synthase OS=Piscirickettsiaceae bacterium OX=2030828 GN=queE PE=3 SV=1
MSKDSLRITEIFYSLQGEGKTVGLPTTFVRLTGCPLRCGYCDTEYAFHGGETRSIDSILEEVAEFGAQYINVTGGEPLAQKRVHDLMNKLCDQGYHVSLETSGALDVSEVDSRVIKVIDVKTPGSGEVSKNLPSNYQYLSSEDQIKYVICDEADFVWSKQHMQKHTLNEQCEVLFSPVQGTLPAAELANWVLRDKLPVRFQIQLHKHLWGDVPGK

SEQ ID NO: 32845 - protein, 225 aa, unidentified
  source 1..225: note = Planctomicrobium piriforme
  REGION 1..225: note = tr|A0A1I3G430|A0A1I3G430_9PLAN 7-carboxy-7-deazaguanine synthase OS=Planctomicrobium piriforme OX=1576369 GN=queE PE=3 SV=1
MWISEVFESVQGEGRYVGVPSGFIRTSGCNLRCVFCDTPYTSWQPEGREQSLEQLLEQTGAMTCGHMVLTGGEPLLTPEIVPLSRELKDRGFVITIETAGTVFRPATADLMSISPKLTNSTPTGTNWEERHDARRHRPDVIRRLTTEYDYQLKFVIDRIEDLAEVDAYLAEFEHVVPEKVYLMPQGTDLVVLQPKMAWLQTEADRRGWQVTPRLHIELFGNSRGT

SEQ ID NO: 32846 - protein, 270 aa, Planctomyces sp.
  REGION 1..270: note = tr|A0A2E8F079|A0A2E8F079_9PLAN 7-carboxy-7-deazaguanine synthase OS=Planctomyces sp.; OX = 37635 GN=queE PE=3 SV=1
MPPAEAATVVCCGPRDSPKPACLTQPSPAIGKVNPVLRLSRQSSGQPEIFHSLQGEGAAIGAATVFLRLALCNLSCTWCDTKYTWDWANYDYKKEVMALEAEDVRDAILAYDCPHLVITGGEPMLQQTELIPLVSSLKQQGFYFEVETNGTIPPLPEMERDIDQWNVSAKLGTSGNQEHRRLVPSTLESFSSIPGAYFKFVIVEPQDIEEVCELAEKYRIPPQRILLLPEGRDMEVLRTRNQWVSEACVKHGFRFSPRLHILLWGDERGT

SEQ ID NO: 32847 - protein, 241 aa, Planctomyces sp.
  REGION 1..241: note = tr|A0A2E3GQZ1|A0A2E3GQZ1_9PLAN 7-carboxy-7-deazaguanine synthase OS=Planctomyces sp.; OX = 37635 GN=queE PE=3 SV=1
MFPDFVSLQESGQTSLFISEIFASIQGEGCYTGTPSVFVRTSGCNLRCHFCDTPYASWNPEGETLSIADIVARVNEWWHPHVVLTGGEPMMVRDLAELTSALKRQDRFITIETAGTVYQDIEADLMSISPKRANSTPTDHPDWAARHEERRHQPDVIRELVASYTCQFKFVIDTPDDVADVDDYLDEFPEIERGTVWLMPQAIEPDILKEKLLWLQPLALERGFHLATRLQIQQFGNRRGT

SEQ ID NO: 32848 - protein, 204 aa, unidentified
  source 1..204: note = Planctomycetaceae bacterium
  REGION 1..204: note = tr|A0A3R7SBG5|A0A3R7SBG5_9PLAN 7-carboxy-7-deazaguanine synthase OS=Planctomycetaceae bacterium TMED241 OX=1986836 GN=queE PE=3 SV=1
MSPPDSLPVVETFHSLQGEGHHCGRSAFFIRLAGCKVGCTWCDTKHSWPLENHPRRSIDALAQEAVEAARNGAAFTVITGGEPLHHDLSRLTDVLAEHGNETHLETSGVDRLSGSPDWITLSPKRHSPPRRELLQRCDELKVIVHEQDDLSFAEEMASETGPGTVLLLQPGWQSEDGQRLSIEHVRCQRRWKLGLQTHKWLGLR

SEQ ID NO: 32849 - protein, 225 aa, unidentified
  source 1..225: note = Planctomycetaceae bacterium
  REGION 1..225: note = tr|A0A350CDI1|A0A350CDI1_9PLAN 7-carboxy-7-deazaguanine synthase OS=Planctomycetaceae bacterium OX=2026779 GN=queE PE=3 SV=1
MQIAEIFESIQGEGPWAGTPSLFIRTSGCNLRCSFCDTPYTSWKPEGNAWTVDDLVHKVAASNSPDVVLTGGEPLLVPELPELAQRCQSLGKRVTVETAGTVHSSTRCDLFAISPKLANSTPDDPRWNERHQTTRFQPAVVQTLIQQSPSILKFVIDQPDDIHEILTWVRLLPMLPPSAVWLMPQARTREQLRDKSQWVRQLALAHSFNFSPRLHLEMFGDVRGT

SEQ ID NO: 32850 - protein, 256 aa, unidentified
  source 1..256: note = Planctomycetales bacterium
  REGION 1..256: note = tr|A0A1W9TDZ0|A0A1W9TDZ0_9BACT 7-carboxy-7-deazaguanine synthase OS=Planctomycetales bacterium 4572_13 OX=1971638 GN=queE PE=3 SV=1
MIVNELFYSLQGEGSLAGVPSVFIRLAGCPLRCCWCDTKYAWDETAGREMSCEQVLEALDGHPTRHVVLTGGEPMVHEGVSGLAAAIREKGYHLTIETAGICFIEGLEADLMSISPKLSNSLPENADRPAERLNLGVLRQLIAAYDYQIKFVVDEPDDLNEIADILEKLDELDLYSIYLMPQATQMDAYMEKSHWLAEYCKQTGFSFSPRLQVMLNFPKKGVDEEAEIDRLYFLGVGCDKGIVFGRSRRKISFQIF

SEQ ID NO: 32851 - protein, 214 aa, unidentified
  source 1..214: note = Planctomycetales bacterium
  REGION 1..214: note = tr|A0A354GRW6|A0A354GRW6_9BACT 7-carboxy-7-deazaguanine synthase OS=Planctomycetales bacterium OX=2053591 GN=queE PE=3 SV=1
MKNYQVKEIYYTLQGEGANTGRAAVFCRFTGCNLWTGLEEDREAAVCRFCDTDFVGVDGPGGGRFSSAQALAAAVAGHWPGDASSASRPLVVCTGGEPLLQLDEPFIHALHKAGFEVAVETNGTRLPPPGIDWICVSPKANAELVLKAGDELKLVFPQPGAEPDRYEALDFRWFFLQPMDGPERERNTQLAIRYCLEHPRWRLSLQTHKLLNLP

SEQ ID NO: 32852 - protein, 278 aa, unidentified
  source 1..278: note = Planctomycetes bacterium
  REGION 1..278: note = tr|A0A517SUV4|A0A517SUV4_9BACT 7-carboxy-7-deazaguanine synthase OS=Planctomycetes bacterium SV_7m_r OX=2528025 GN=queE_1 PE=3 SV=1
MLQVRSKSTSPASPEEGNSTAPVPAIADPVQPPNSSGLPTVSQSLFISETFSSRQGEGKLTGQESFFIRTSGCNLRCWFCDTPYASWQPTGQRQSIESLVQDAQAVFADKPASHRHVVLTGGEPLLGAAIEPLCHLFHQAGFHVTLETAGTIQRELPCDLLSLSPKLASSAPDAKQHPRWHQLHEQRRMPLNTMRYLIETAKDHQLKFVVSDRSQFDEIQSLVEQLEVHPSNVFIMPQGVSIDDLDAALPWLQPWTEQVGYHYCDRMQIRWYGNRRGT

SEQ ID NO: 32853 - protein, 211 aa, unidentified
  source 1..211: note = Planctomycetes bacterium
  REGION 1..211: note = tr|A0A5C5WQE0|A0A5C5WQE0_9BACT 7-carboxy-7-deazaguanine synthase OS=Planctomycetes bacterium CA85 OX=2527987 GN=queE_2 PE=3 SV=1
MKYSVKEIYYTLQGEGANAGKPAVFCRFTGCNLWSGREEDRAAAVCQFCDTQFVGADGPGGGVFQSALELASAVAAMWPESWNANKLVVCTGGEPLLQLDEATVEALHDEGFEVAVETNGTRLPPPGIDWICVSPKANAECILRTGNELKLVYPQVGGDPARYEDFDFDRFFLQPMDGLSQEQNTKLAAQYCLEHPRWELSIQTHKLIGLP

SEQ ID NO: 32854 - protein, 235 aa, unidentified
  source 1..235: note = Planctomycetia bacterium
  REGION 1..235: note = tr|A0A3D3KLP8|A0A3D3KLP8_9BACT 7-carboxy-7-deazaguanine synthase OS=Planctomycetia bacterium OX=2052181 GN=queE PE=3 SV=1
MLKVNEIFKSIQGESTYAGLPCIFIRLTGCNLRCNYCDTVYAYENGVEMRIEEILSDIELLGGSLIEITGGEPLLQGETGELVSLLIKRGCRVLVETNGTLDINALPEGTIRIMDLKCPDSGMADKTDWKNVERLRPNDEVKFVLSSRRDYEWAKDVIGKYRLTKKVKVLIGVAFNKLDLKRVASWILEDGIDVRLQLQIHRYIWPPDTPEGIILRSTCRYESGSGSSTPKRRDG

SEQ ID NO: 32855 - protein, 218 aa, unidentified
  source 1..218: note = Planctomycetia bacterium
  REGION 1..218: note = tr|A0A1Z8SQI4|A0A1Z8SQI4_9BACT 7-carboxy-7-deazaguanine synthase OS=Planctomycetia bacterium TMED53 OX=1986839 GN=queE PE=3 SV=1
MVGRSGGTGLRVVEIYPSIQGESTRAGLPCVFIRLAGCPLRCRWCDTVYSFKGGDEMSLEEICDAAAEPGISLVELTGGEPLAHSEAPELLKMLCDRFTEVLLETSGAFPIGDLDPRVGIIMDLKAPGSGEEDRNLLENLDHLKSGDELKLVLADREDYEWAKRLVNSHEITVPILFSPVHGELDPALLSDWILEDKLAVRLQLQQHKFIWDPAERGR

SEQ ID NO: 32856 - protein, 260 aa, unidentified
  source 1..260: note = Planctopirus ephydatiae
  REGION 1..260: note = tr|A0A518GQR3|A0A518GQR3_9PLAN 7-carboxy-7-deazaguanine synthase OS=Planctopirus ephydatiae OX=2528019 GN=queE PE=3 SV=1
MPTDLSTLPSATRTGHSSARLRIAETFLSVQGEGALTGVQSFFIRTTGCNLRCWFCDTPYTSWTAEGTWQTIDELLAQALASGVQHVILTGGEPLLQPAIVELSHALKAAGLHITVETAGTADRPVVADLMSISPKLANSDPAYALEDSRSSVATLDLESTAALQHAHLRWNLKTLKRLTTDYPYQLKFVIDTPADLDALSEALAELPHVPPEHVWLMPQGITQEELASRGAWLKPLAESQGYNFCPRLHIEWFGHRRGV

SEQ ID NO: 32857 - protein, 240 aa, unidentified
  source 1..240: note = Planctopirus hydrillae
  REGION 1..240: note = tr|A0A1C3EI23|A0A1C3EI23_9PLAN 7-carboxy-7-deazaguanine synthase OS=Planctopirus hydrillae OX=1841610 GN=queE PE=3 SV=1
MRIAETFLSVQGEGALTGVRSFFIRTTGCNLRCWFCDTPYTSWSAEGNWQSVDELLSQAISSGVEHVILTGGEPLLQPAIVELSYAMKAAGLHITVETAGTVDRPVMADLMSISPKLANSDPAYAPNFTVNPTAGRGGSGAVARRHSELRWNIATLTRLTTDYPYQLKFVIDTPADLDALSEALAELPHVPPEHIWLMPQGITQEELAMRGAWLKPLAESQGYNFCPRLHIEWFGHRRGV

SEQ ID NO: 32858 - protein, 260 aa, unidentified
  source 1..260: note = Planctopirus limnophila
  REGION 1..260: note = tr|D5SXT6|D5SXT6_PLAL2 7-carboxy-7-deazaguanine synthase OS=Planctopirus limnophila (strain ATCC 43296 / DSM 3776 / IFAM 1008 / 290) OX=521674 GN=queE PE=3 SV=1
MPTDLSTLPSAKKTGHSSARLRIAETFLSVQGEGALTGVRSFFIRTTGCNLRCWFCDTPYTSWTAEGNWQTIDELLAQATASGAEHVILTGGEPLLQPAIVELSHALKAAGLHITVETAGTVDRPVMADLMSISPKLANSNPTAAPDFPVNPTAVRGSQGAVARRHSELRWNIATLTRLTTDYPYQLKFVIDTPADLDALSEALTELPHVPPEHVWLMPQGITQEELALRGAWLKPLAESQGYNFCPRLHIEWFGHRRGV

SEQ ID NO: 32859 - protein, 232 aa, Planifilum fimeticola
  REGION 1..232: note = tr|A0A2T0LIV1|A0A2T0LIV1_9BACL 7-carboxy-7-deazaguanine synthase OS=Planifilum fimeticola; OX = 201975 GN=queE PE=3 SV=1
MNPKEITIPLVEIFQTVEGEGNMAGFPTTFIRLYNCNLRCTWCDTPYSYAPHPPEKILTLGEILEQVKRYGNRHICLTGGEPLLYRDKALALLQELAPLPFLEDIHIETNGAIDLLPFHRWREASPHGGKVRFIMDFKLRSSGERDKMIPSNFLHLTDRDEIKFVISDREEFNEALSVVENAVRRGQILFSPEWNTLPPDRLVAWLLEGKRKDIRLNLQTHKYIWDPDRRGV

SEQ ID NO: 32860 - protein, 232 aa, Planifilum fulgidum
  REGION 1..232: note = tr|A0A1I2MC32|A0A1I2MC32_9BACL 7-carboxy-7-deazaguanine synthase OS=Planifilum fulgidum; OX = 201973 GN=queE PE=3 SV=1
MNPKEITLPLVEIFQTVEGEGGKAGFPTTFIRLYNCNLRCTWCDTPYSYAPHPPEKMLTVGEILEQVKRWGNRHICLTGGEPLLYRDKALALLQELAPLPFLEDIHIETNGAIDLLPFHRWRESSPHGWKIRFIMDFKLRSSGERDKMILSNFLHLTDRDEIKFVISDRAEFDEALSVVESAVRRGQILFSPEWNSLPPDRLVSWLLQQPRRDIRLNLQTHKYIWDPDRRGV

SEQ ID NO: 32861 - protein, 281 aa, unidentified
  source 1..281: note = Planktothricoides sp.
  REGION 1..281: note = tr|A0A0M1JQB5|A0A0M1JQB5_9CYAN 7-carboxy-7-deazaguanine synthase OS=Planktothricoides sp. SR001 OX=1705388 GN=queE PE=3 SV=1
MTETIKNLATARLIELFSAIQGEGLNVGTRQIFIRFAICDLRCHFCDSAHTWQPSDTCRIEQTPGKRDFVTYANPVTQSQLLGWVEQQMLPPGLHDSISLTGGEPLLHAPFLQEFLPVVKEKTGLPIYLETGGHRPQQLRMILKDLDLVGMDVKLPSVSGENCWAAHEEFLQVCGDGGVEVFVKIIISQDTNPDELIQARDLVAAQSPMIPVFLQPVTPLKPWEILPGKQGENLDKLQKDKLQKPMLPPTPEQVLEWQGLMKRELKQVRVVAQTHKMMNQL

SEQ ID NO: 32862 - protein, 204 aa, Planktothrix agardhii
  REGION 1..204: note = tr|A0A2Z6CG50|A0A2Z6CG50_PLAAG 7-carboxy-7-deazaguanine synthase OS=Planktothrix agardhii NIES-204 OX=282423 GN=queE PE=3 SV=1
MLEIPVHETFQSTIQGEGYWVGTPVDFIRLAGCPVRCPWCDTGYGDGGMNLPRKVRSFDSLIAELRSPRVVISGGEPLIYAQLPQLIQTIEATVRTVAIETSGSFWQDIPNSVWVTFSPKHHVSPNYPVIPLIWKRANEIKIVIETGSELEFYAEYLELNDQIPVFLQPEWNQRDRTLPLVLELLKKFPHYRLSVQIHKWLQVP

SEQ ID NO: 32863 - protein, 204 aa, Planktothrix agardhii; identical to SEQ ID NO: 32862
  REGION 1..204: note = tr|A0A073CEN5|A0A073CEN5_PLAAG 7-carboxy-7-deazaguanine synthase OS=Planktothrix agardhii NIVA-CYA 126/8 OX=388467 GN=queE PE=3 SV=1

SEQ ID NO: 32864 - protein, 204 aa, unidentified
  source 1..204: note = Planktothrix rubescens
  REGION 1..204: note = tr|A0A1J1L7D7|A0A1J1L7D7_PLARU 7-carboxy-7-deazaguanine synthase OS=Planktothrix rubescens OX=59512 GN=queE PE=3 SV=1
MFEIPVHETFQSTIQGEGYWVGTPVDFIRLAGCPVGCPWCDTGYGDGGMNLPRKVRSFDSLIAELRSPRVVISGGEPLIYAQLPQLIQTIEATVRTVAIETSGSFWQDIPNSVWVTFSPKHHVSPNYPVIPLIWKRANEIKIVIETGSELEFYAEYLELNDQIPVFLQPEWNQRDRTLPLVLELLKKFPHYRLSVQIHKWLQVP

SEQ ID NO: 32865 - protein, 204 aa, Planktothrix sp.
  REGION 1..204: note = tr|A0A3C1RMJ2|A0A3C1RMJ2_9CYAN 7-carboxy-7-deazaguanine synthase OS=Planktothrix sp. UBA8407 OX=2055758 GN=queE PE=3 SV=1
MLEIPVHETFQSTIQGEGYWVGTPVDFIRLAGCPVRCPWCDTGYGDGGMNLPRKVRSFDSLIAELRSPRVVISGGEPLIYAQLPRLIQTIEATGRTVAIETSGSFWQDIPNSVWVTLSPKHHVSPNYPVIPLIWKRANEIKLVIETGLELEFYAEYLELNDQIPVFLQPEWNQRDRTLPLVLELLKKFPHYRLSVQIHKWLQVP

SEQ ID NO: 32866 - protein, 204 aa, Planktothrix sp.
  REGION 1..204: note = tr|A0A1T4ZKJ9|A0A1T4ZKJ9_9CYAN 7-carboxy-7-deazaguanine synthase OS=Planktothrix sp. PCC 11201 OX=1729650 GN=queE PE=3 SV=1
MLEIPVHETFQSTIQGEGYWVGTPVDFIRLAGCPVRCPWCDTGYGDGGMSLPREVRSFDSLIAELRSPRVVISGGEPLIYAQLPRLIQTIEAIGRTVAVETSGSFWQDIPNSVWVTLSPKHHVSPNYPVVPLMWKRANEIKLVIETGSELEFYAEYLELNSQIPVFLQPEWNQRDRTLPLVLELLKKFPHYRLSVQIHKWLQVP

SEQ ID NO: 32867 - protein, 205 aa, unidentified
  source 1..205: note = Planktothrix tepida
  REGION 1..205: note = tr|A0A1J1LKZ8|A0A1J1LKZ8_9CYAN 7-carboxy-7-deazaguanine synthase OS=Planktothrix tepida PCC 9214 OX=671072 GN=queE PE=3 SV=1
MRLEIPVHETFQSTIQGEGYWAGTPVDFIRLAGCPVGCPWCDTGYANGGMNLPRQVRSFQDLITELRSPRVVISGGEPFIYAQLPALINTIEATGRSVSIETSGSFWQDISNSVWVTLSPKHHVNWKYPVVEFMWKRASEIKLVIETGKELEFYAEYLTLNPQIPVFLQPEWTQRDRTFPLVLDLLKQFPHYRLSVQLHKYLNVP

SEQ ID NO: 32868 - protein, 235 aa, Planococcus antarcticus
  REGION 1..235: note = tr|A0A1C7DJ41|A0A1C7DJ41_9BACL 7-carboxy-7-deazaguanine synthase OS=Planococcus antarcticus DSM 14505 OX=1185653 GN=queE PE=3 SV=1
MRIPVMEIFGPTIQGEGMVMGQKTMFVRTAGCDYSCSWCDSKFTWDGTGTSISRQPKEIVEELIQTGGAAFSHVTISGGNPALHKGIGELVELCHQQGWKVAVETQASIWQEWLTEIDDITLSPKPPSSGMKTDYIKLDLFIEKLQSANVSLKVVVFDQDDFTYAERLHLRYPTVPFFLQTGNEDTATTDDTQLVADLLQRYEQLIDYHVQSPIMNDAKVLPQLHTLVWGNKRGV

SEQ ID NO: 32869 - protein, 235 aa, Planococcus citreus
  REGION 1..235: note = tr|A0A497YE55|A0A497YE55_9BACL 7-carboxy-7-deazaguanine synthase OS=Planococcus citreus; OX = 1373 GN=queE PE=3 SV=1
MKIPVMEVFGPTIQGEGMVMGQKTMFVRTAGCDYSCSWCDSKFTWDGTGKSTAMTADDIVRQLEALGKDTFSHVTISGGNPALHKGIAELVALCQEKGWRTAVETQGSIWQDWLLEIDEVTVSPKPPSSGMILDYSQLDAMLGRLSSSQASLKVVVFDEADFFFAEQLHLRYPSFPFFLQVGNDDTQTTEDEKLVQHLLGRYQWLIDRHLVSAPLNDAKVLPQLHTLLWGNKRGV

SEQ ID NO: 32870 - protein, 235 aa, Planococcus donghaensis
  REGION 1..235: note = tr|A0A1C7EI00|A0A1C7EI00_9BACL 7-carboxy-7-deazaguanine synthase OS=Planococcus donghaensis OX=414778 GN=queE PE=3 SV=1
MKIPVMEIFGPTVQGEGMVMGQKTMFVRTAGCDYSCSWCDSKFTWDGTGTSVSKQPADIIQELIHIGGKNFSHVTISGGNPALHKGIGELVELCHQQGWKVAVETQASIWQEWMTAIDDITLSPKPPSSGMKTDFTKLDLYLEKLQTANVSLKVVIFDQDDFAYAETLHQRYPNVPFFLQTGNDDTVTTDDAKLVSNLLERYEQLIDYHIQSPIMNDAKVLPQLHTLVWGNKRGV

SEQ ID NO: 32871 - protein, 235 aa, Planococcus donghaensis
  REGION 1..235: note = tr|E7RE91|E7RE91_9BACL 7-carboxy-7-deazaguanine synthase OS=Planococcus donghaensis MPA1U2 OX=933115; GN = queE PE=3 SV=1
MKIPVMEIFGPTVQGEGMVMGQKTMFVRTAGCDYSCSWCDSKFTWDGTGTSVSKQPADIIEELIHIGGSNFSHVTISGGNPALHKGIGELVDLCHQQGWKVAVETQASIWQEWMPTIDDITLSPKPPSSGMKTDFAKLDLFLEKLQTANVSLKVVIFDQDDFSYAEFLHQRYPHVPFFLQTGNDDTVTTDDAKLVSNLLERYEQLIDYHVQSPIMNDAKVLPQLHTLVWGNKRGV

SEQ ID NO: 32872 - protein, 235 aa, unidentified
  source 1..235: note = Planococcus halocryophilus
  REGION 1..235: note = tr|A0A1C7DMU0|A0A1C7DMU0_9BACL 7-carboxy-7-deazaguanine synthase OS=Planococcus halocryophilus OX=1215089 GN=queE PE=3 SV=1
MKIPVMEIFGPTVQGEGMVMGQKTMFVRTAGCDYSCSWCDSKFTWDGTGTSVSKQPADIVEELIQTGGENFSHVTISGGNPALHKGIGELVELCHQQGWKVAVETQASIWQEWMPAIDDITLSPKPPSSGMKTDFAKLDLFLEKLQTANVSLKVVVFDQDDFAYAENLHQRYPNVPFFLQTGNEDTITTDDAQLVSNLLERYEQLIDYHVKSPIMNDAKVLPQLHTLVWGNKRGV

SEQ ID NO: 32873 - protein, 235 aa, unidentified
  source 1..235: note = Planococcus halotolerans
  REGION 1..235: note = tr|A0A365L6P0|A0A365L6P0_9BACL 7-carboxy-7-deazaguanine synthase OS=Planococcus halotolerans OX=2233542 GN=queE PE=3 SV=1
MKIPVMEVFGPTIQGEGMVIGQKTMFVRTAGCDYSCSWCDSSFTWDGTGKSTSRQPSEIIEELKGIGGSRFSHVTISGGNPLLHKGIGELISLCHEEKWKVAVETQATIWQDWLLEVNDITLSPKPPSSGMVTDFDKLDVFMEKLLDSNASLKIVVFDETDFEFAGQLHLRYPTVPFFLQVGNDDITTTDDARLVAGLLERYEWLIDLSTDSSIMNDVKVLPQLHALVWGNKRGV

SEQ ID NO: 32874 - protein, 235 aa, Planococcus kocurii
  REGION 1..235: note = tr|A0A0U2ZGD7|A0A0U2ZGD7_9BACL 7-carboxy-7-deazaguanine synthase OS=Planococcus kocurii; OX = 1374 GN=queE PE=3 SV=1
MRIPVMEIFGPTIQGEGMVMGQKTMFVRTAGCDYSCSWCDSKFTWDGTGTSVSKQPTEIVEELIQTGGKAFSHVTISGGNPALHKGIGELVDLCHLQGWKVAVETQASLWQEWMIEIDDITLSPKPPSSGMKTDVTKLDVFIEKLQNANVSLKVVIFDEIDFAYAEKLHQRYPAVPFFLQTGNEDTATTDDLQLVTTLLHRYEQLIDYHIQSPIMNDAKVLPQLHTLVWGNKRGV

SEQ ID NO: 32875 - protein, 235 aa, Planococcus maitriensis
  REGION 1..235: note = tr|A0A365K0Z3|A0A365K0Z3_9BACL 7-carboxy-7-deazaguanine synthase OS=Planococcus maitriensis OX=221799 GN=queE PE=3 SV=1
MKIPVMEVFGPTIQGEGMVMGQKTMFVRTAGCDYSCSWCDSKFTWDGTGKSVMMAAGEIARQLEELGKGAFSHVTISGGNPALHKGIAELVALCQEKGWRTAVETQGSIWQDWLSEIDEVTVSPKPPSSGMILDYSKLDAMLGRLSSAQASLKVVVFDEADFFFAEQLHLRYPSFPFFLQVGNDDTQTTEDEKLVQHLLGRYQWLIDRHLASAPLNDAKVLPQLHTLLWGNKRGV

SEQ ID NO: 32876 - protein, 235 aa, Planococcus maritimus
  REGION 1..235: note = tr|A0A150W5H1|A0A150W5H1_PLAMR 7-carboxy-7-deazaguanine synthase OS=Planococcus maritimus; OX = 192421 GN=queE PE=3 SV=1
MKIPVMEIFGPTIQGEGMVMGQKTMFVRTAGCDYSCSWCDSKFTWDGTGKSTAMAANDIVTQLKQLGKDAFSHVTISGGNPALHKGIADLVALCRENGWRTAVETQGSIWQDWLTEIDDVTVSPKPPSSGMILDYSKLDAMLGRLSAAQASLKVVVFDEADFFFAEQLHLRYPAFPFFLQVGNDDTQTTDDEQLVQHLLGRYQWLIDRHLSSAELNDAKVLPQLHTLLWGNKRGV

SEQ ID NO: 32877 - protein, 235 aa, Planococcus maritimus
  REGION 1..235: note = tr|A0A1C7DYU0|A0A1C7DYU0_PLAMR 7-carboxy-7-deazaguanine synthase OS=Planococcus maritimus; OX = 192421 GN=queE PE=3 SV=1
MKIPVMEVFGPTIQGEGMVMGQKTMFVRTAGCDYSCSWCDSKFTWDGTGKSTAMAPDDIVTQLKQLGKDAFSHVTISGGNPALHKGIAELVALCRENGWRTAVETQGSIWQDWLTEIDDVTVSPKPPSSGMILDYSKLDAMLGRLSAAQASLKVVVFDEADFFFAEQLHLRYPAFPFFLQVGNDDTQTTDDEQLVQHLLGRYQWLIDRHLTSAPLNDAKVLPQLHTLLWGNKRGV

SEQ ID NO: 32878 - protein, 373 aa, unidentified
  source 1..373: note = Planococcus massiliensis
  REGION 1..373: note = tr|A0A098EM34|A0A098EM34_9BACL 7-carboxy-7-deazaguanine synthase OS=Planococcus massiliensis OX=1499687 GN=queE PE=4 SV=1
MNTVLKLKEITPQYDPWEAYMDIEQHGRLTLSSIEFTTTYLCNMRCEHCAVGYMLQHKDPDALPIDLLIARLEEIPHLRTISITGGEPMFSKKSVEQIVLPLMKYAHERGIRTQMNSNLTMPLERYMLIAPYLDVLHISHNWGTIDDFVDGGFANMERQPPRERRAAQFKRMIDNSRALAEAGVMVSAETMLNKRTLPHLAKIHKQVIEEMKCARHEVHPMYPSDFASQLEVLPLDETRKAIHQLLDERNEDVWMLFGTLPFYPCSMDDEDIQLLNRIRSSKNVTVRNDPDGRSRLNVNVFTGEVIVTDFGDTPPMGNIQTDSLPEMLDRWLERPLAKTIACHCPAVKCLGPNLLVKDAYYADQDFTKNKARI

SEQ ID NO: 32879 - protein, 235 aa, Planococcus plakortidis
  REGION 1..235: note = tr|A0A1C7E546|A0A1C7E546_9BACL 7-carboxy-7-deazaguanine synthase OS=Planococcus plakortidis OX=1038856 GN=queE PE=3 SV=1
MKIPVMEVFGPTIQGEGMVMGQKTMFVRTAGCDYSCSWCDSKFTWDGTGKSVMMTADDIAQQLEDLGKDSFSHVTISGGNPALHKGIAELVALCQENGWRTAVETQGSIWQDWLSEIDEVTVSPKPPSSGMILDYSKLDAMLGKLSSSQASLKVVVFDEADFFFAEQLHLRYPSFPFFLQVGNDDTQTSEDEKLVQHLLGRYQWLIDRHLASVSLNDAKVLPQLHTLLWGNKRGV

SEQ ID NO: 32880 - protein, 235 aa, Planococcus rifietoensis
  REGION 1..235: note = tr|A0A0U2N3R9|A0A0U2N3R9_9BACL 7-carboxy-7-deazaguanine synthase OS=Planococcus rifietoensis OX=200991 GN=queE PE=3 SV=1
MKIPVMEVFGPTIQGEGMVMGQKTMFVRTAGCDYSCSWCDSKFTWDGTGKSTAMTAADIVRQLEELGKDAFSHVTISGGNPALHKGIAELVASCQEKGWRTAVETQGSVWQDWLLEIDEVTVSPKPPSSGMILDYSKLDAMLGKLSSSQASLKVVVFDEADFFFAEQLHLRYPSFPFFLQVGNDDTQTTEDDKLVQHLLGRYQWLIDRHLVSAPLNDAKVLPQLHTLLWGNKRGV

SEQ ID NO: 32881 - protein, 235 aa, unidentified
  source 1..235: note = Planococcus salinus
  REGION 1..235: note = tr|A0A3M8PAW0|A0A3M8PAW0_9BACL 7-carboxy-7-deazaguanine synthase OS=Planococcus salinus; OX = 1848460 GN=queE PE=3 SV=1
MKIPVMEVFGPTIQGEGMVMGQKTMFVRTAGCDYSCSWCDSKFTWDGTGKSKAMKPAEIIEELERIGGHAFSHVTISGGNPALHKGIGELVELCHEQEWKVGIETQASIWQDWLTEIDDITLSPKPPSSGMKTDFEKLDLFIRNLTGRNASLKVVIFDENDFAYAENLHLRYPDVPFFLQVGNDDSATSDNTRLVSNLLECYEWLVNLTVQSSIMNNAKVLPQLHTLVWGNKRGV

SEQ ID NO: 32882 - protein, 235 aa, Planococcus sp.
  REGION 1..235: note = tr|A0A5C5T4P3|A0A5C5T4P3_9BACL 7-carboxy-7-deazaguanine synthase OS=Planococcus sp. CPCC 101016 OX=2599617 GN=queE PE=3 SV=1
MRIPVMEIFGPTIQGEGMVMGQKTMFVRTAGCDYSCSWCDSKFTWDGTGKSISKQPADIVEELLQIGGKAFSHVTISGGNPALHKGIGELVDLCHQQGWKVAVETQASIWQDWLVEIDDITLSPKPPSSGMKTDFAKLDLYIENLKNANVSLKVVVFDRNDFAYAEMLHQRYPNVPFFLQTGNEDTATTDDSQLVADLLQRYEQLIDYHVQSPIMNDAKVLPQLHTLVWGNKRGV

SEQ ID NO: 32883 - protein, 235 aa, Planococcus sp.; identical to SEQ ID NO: 32874
  REGION 1..235: note = tr|A0A5B0CUU1|A0A5B0CUU1_9BACL 7-carboxy-7-deazaguanine synthase OS=Planococcus sp. ANT_H30 OX=2597347 GN=queE PE=3 SV=1

SEQ ID NO: 32884 - protein, 235 aa, Planomicrobium glaciei
  REGION 1..235: note = tr|A0A518XPP6|A0A518XPP6_9BACL 7-carboxy-7-deazaguanine synthase OS=Planomicrobium glaciei OX=459472 GN=queE PE=3 SV=1
MRIPVMEVFGPTIQGEGMVMGQKTMFVRTAGCDYSCSWCDSKFTWDGTGKSVSKQPADIIEELKAIGGQAFSHVTISGGNPALHKGIAELVALCHENGWKVGVETQGSIWQDWMPAINDITISPKPPSSGMKTDFSKLDFFMDKLAGANASLKVVIFDEEDFKYAEDLHLRYPAVPFFLQTGNSDTATTDDAGLTAALLERYEWLIEQAVRSTIMNNAKVLPQLHTLVWGNKRGV

SEQ ID NO: 32885 - protein, 235 aa, Planomicrobium glaciei
  REGION 1..235: note = tr|A0A1G8GVS6|A0A1G8GVS6_9BACL 7-carboxy-7-deazaguanine synthase OS=Planomicrobium glaciei OX=459472 GN=queE PE=3 SV=1
MRIPVMEVFGPTIQGEGMVMGQKTMFVRTAGCDYSCSWCDSKFTWDGTGKSGSKEPEDIIGELKAIGGQAFSHVTISGGNPALHKGIAELVALCHENGWKVGVETQGSIWQDWMPAIDDITISPKPPSSGMKTDFSKLDFFMDKLAGANASLKVVIFDEDDFKYAEDLHLRYPAVPFFLQTGNSDTATTDDAGLTAALLERYEWLIEQAVRSTIMNNAKVLPQLHTLVWGNKRGV

SEQ ID NO: 32886 - protein, 235 aa, unidentified
  source 1..235: note = Planomicrobium soli
  REGION 1..235: note = tr|A0A2P8GAQ3|A0A2P8GAQ3_9BACL 7-carboxy-7-deazaguanine synthase OS=Planomicrobium soli; OX = 1176648 GN=queE PE=3 SV=1
MKIPVMEVFGPTIQGEGMVMGQKTMFVRTAGCDYSCAWCDSSFTWDGTGKSVSKQPQEIIEELRQIGGESFSHVTISGGNPALHKGIGELVDLCHQNGWKVAVETQGSMWQEWLRNIDDITISPKPPSSGMKTDFGKLDFFMENLADANASLKVVIFDEEDFKYAEDVHLRYPMVPFFLQTGNSDTVTTDDARLVQDLLERYEWLIDISVNSTIMNDAKVLPQLHTLVWGNKRGV

SEQ ID NO: 32887 - protein, 235 aa, Planomicrobium sp.
  REGION 1..235: note = tr|A0A4Z1B3H0|A0A4Z1B3H0_9BACL 7-carboxy-7-deazaguanine synthase OS=Planomicrobium sp. Y50 OX=2213011 GN=queE PE=3 SV=1
MKIPVMEVFGPTIQGEGMVIGQKTMFVRTAGCDYSCSWCDSSFTWDGTGKSSSQQPSEIIEELKRIGGSRFSHVTISGGNPLLHKGIGELISLCHDEGLKVAVETQATIWQDWLLEVDDITLSPKPPSSGMVTDFDKLDVFMEKLLDSNASLKIVVFDETDFAFAGQLHLRYPAVPFFLQVGNDDISTTDDARLVTGLLERYEWLIDLSTNSSIMNDVKVLPQLHALVWGNKRGV

SEQ ID NO: 32888 - protein, 235 aa, Planomicrobium sp.
  REGION 1..235: note = tr|A0A5C5UM02|A0A5C5UM02_9BACL 7-carboxy-7-deazaguanine synthase OS=Planomicrobium sp. CPCC 101110 OX=2599619 GN=queE PE=3 SV=1
MKIPVMEVFGPTIQGEGMIMGQKTMFVRTAGCDYSCAWCDSSFTWDGTGKSVSKKPHEIIEELRQIGGEAFSHVTISGGNPALHKGIGELVDLCHENGWKVAVETQGSMWQDWLRSVDDITLSPKPPSSGMKTDFGKLDAIMEKLAESNASLKVVVFDEEDFKYAEDVHLRYPRVPFFLQTGNSDTVTTDDSRLVRDLLERYEWLIDHSVRSPIMNDAKVLPQLHTLVWGNKRGV

SEQ ID NO: 32889 - protein, 241 aa, Planomonospora sphaerica
  REGION 1..241: note = tr|A0A171DJ25|A0A171DJ25_9ACTN 7-carboxy-7-deazaguanine synthase OS=Planomonospora sphaerica OX=161355 GN=queE PE=3 SV=1
MTDLMTAPGTMGRQTLLVAERFGPTLQGEGPSSGVPAVFVRLSRCNLSCGYCDTPFTWDTSRFDLRAETTRMTVDDVTAWALDSGVGLVVITGGEPLLQQEELVPLVGTLTGAGRRVEIETNGTVLPHPRLLVDGVGFNVSPKLTNAHLPEGKRIIAEALEVLAASGRAVFKFVAAAVSDLEEIEQLQRRFGLGEVWVMPEGTTGEQVITRARLLVEEVIARGWSLSLRTHVVLWGDERGR

SEQ ID NO: 32890 - protein, 235 aa, Planomonospora sphaerica
  REGION 1..235: note = tr|A0A171DIQ5|A0A171DIQ5_9ACTN 7-carboxy-7-deazaguanine synthase OS=Planomonospora sphaerica OX=161355 GN=queE PE=3 SV=1
MSERRFGAQKLIVSEIFGPTFQGEGYSLGRRCGFLRLGHCNLACSWCDTPYTWDWHRFSPESELSRLDVTEVAARIENMAVPLLVISGGEPMLQQAGLVSLFAHLPPGLAVEIETNGTVAPEPAVTERVSRFTVSPKLTHAAMSRQRRIRPAVLHAFAATDKATFKFVAASPYDLDEIETLTRELDLPDVYVMPEGRDPDQLMERMRALAPAVQERSWSLTTRLHVLLWGDRRAV

SEQ ID NO: 32891 - protein, 234 aa, Plantibacter flavus
  REGION 1..234: note = tr|A0A4U3FMV0|A0A4U3FMV0_9MICO 7-carboxy-7-deazaguanine synthase OS=Plantibacter flavus; OX = 150123 GN=queE PE=3 SV=1
MTRSLFVNEVFRSLQGEGPSTGKPAVFLRLANCNLACVWCDTRYSWDWNMYPADQERHEEEPATVARRLLEHLREVPLLVVTGGEPLLQQPAIVALLENLRSVLPNLRVEIETNGTIAPSDGICDAIDLFVVSPKLSNSAMPEKRRIRLRALKGFPRSKLVLKFVVAKVEDFVEISAIVAAAQVDSRSVWVMPEGTDSETIVRGMKSLSGPAMDVGYSLSTRLHVLLWGDQRGR

SEQ ID NO: 32892 - protein, 213 aa, Plasticicumulans acidivorans
  REGION 1..213: note = tr|A0A317MZI3|A0A317MZI3_9GAMM 7-carboxy-7-deazaguanine synthase OS=Plasticicumulans acidivorans OX=886464 GN=queE PE=3 SV=1
MSYAVKEIFYTLQGEGAQAGRAAVFCRFAGCNLWSGREADRAGAVCRFCDTDFVGVDGDGGGKFASARELAAVIAMHWPWGGGGRPYVVCTGGEPLLQLDAELIAALHARGFEVAVETNGTQPAPAGLDWICVSPKAGAPLQLTRGDELKLVYPQREAQAQPECFAGLDFRHFFLQPLDDADRLAATAACVEYCREHPQWRVSLQTHKLLGIP

SEQ ID NO: 32893 - protein, 215 aa, unidentified
  source 1..215: note = Plasticicumulans lactativorans
  REGION 1..215: note = tr|A0A4R2L902|A0A4R2L902_9GAMM 7-carboxy-7-deazaguanine synthase OS=Plasticicumulans lactativorans OX=1133106 GN=queE PE=3 SV=1
MGYAVKEIFYTLQGEGVRSGRPAVFCRFSGCNLWSGREADRARATCRFCDTDFVGTDGPGGGRFAGAAALAAAIAAQWPRATHPKARPYVVCTGGEPLLQLDAALIEALHARGFEVAVETNGTLPAPPGLDWICVSPKADAALALRAGDELKLVHPQAEPEAQPERFVDLDFAHFLLQPLDGPQRAAATAACVAYCLAHPPWRVSLQTHKLLDIP

SEQ ID NO: 32894 - protein, 223 aa, Plautia stali
  REGION 1..223: note = tr|U3U5H9|U3U5H9_9ENTR 7-carboxy-7-deazaguanine synthase OS=Plautia stali symbiont OX=891974 GN=queE PE=3; SV = 1
MFYPINEMFQTLQGEGFYTGVPAIFIRLQGCPVGCSWCDTKHTWETRADLETSLGDILVKTVESDAWGSADAATLIETIQRQGWTARHLVITGGEPAIFDLRPLTEALETAGFQCQIETSGTHEVHCSAATWVTVSPKVNMRGGYDVLPQALQRADEIKHPVARERDVEALDALLAGLQDEKKRIVALQPISRGEAATRLCIETCIVRNWRLSMQTHKYLNIA

SEQ ID NO: 32895 - protein, 195 aa, unidentified
  source 1..195: note = Pleionea mediterranea
  REGION 1..195: note = tr|A0A316G1G7|A0A316G1G7_9GAMM 7-carboxy-7-deazaguanine synthase OS=Pleionea mediterranea; OX = 523701 GN=queE PE=3 SV=1
MGLPTVFIRLTGCPLRCHYCDTEYAFTGGEYMSLDEILSKVASFNPKYITVTGGEPLAQKAPCEELMTRLCDNGYSVSIETSGAMDISLVDPRVNVVLDLKTPDSGEMSKNLWSNIERLKPSDEVKFVICSRKDYDWARMKVNELCLAQKCDVLFSPSFGQQAATQLADWIVADNLPVRFQVQLHKILWNDEPGH

SEQ ID NO: 32896 - protein, 261 aa, Plesiocystis pacifica
  REGION 1..261: note = tr|A6G3T9|A6G3T9_9DELT 7-carboxy-7-deazaguanine synthase OS=Plesiocystis pacifica SIR-1 OX=391625 GN=queE; PE = 3 SV=1
MGEHPAVADLKPERSPSLRVQERFVSIQGEGSLVGVRSSFVRVSGCNLRCVWCDTPRTSWAPEGERASLDALVDWCGAPGQPRHVVLTGGEPLLFPACAELSARLRAAGHHLTIETAGSLWCEGVEADLMSISPKLSHSTPWARAAAEGKPSLAQRHEDARLDLEVLARLMAAAPWQLKFVVRTASDEALLADLAEIDALVDALAVPPALRDRVLLMPEGRDLNALSSGYARVDAVTRERHSPYRLGLRLHIHLYGDTPGT

SEQ ID NO: 32897 - protein, 233 aa, Plesiomonas shigelloides
  REGION 1..233: note = tr|A0A2P1VN80|A0A2P1VN80_PLESH 7-carboxy-7-deazaguanine synthase OS=Plesiomonas shigelloides OX=703 GN=queE PE=3 SV=1
MLYPINEVFQTLQGEGVYTGVPAIFVRLQGCPVECSWCDTKHTWQLDADQRLSDPALILKTEDSASWCSMTISDLQTLFTEQGYTAKHVVITGGEPCLYDLTPLTTQLEAAGFQCQIETSGTYEIRCSEQTWVTVSPKVGMRGGCQVRTDALLRADEIKHPVARESDIEALDQLLTQREQSLGADAASAHSKTPVICLQPISQKPQATELCIRTCIARNWRLSVQTHKYLSIA

SEQ ID NO: 32898 - protein, 233 aa, Plesiomonas shigelloides
  REGION 1..233: note = tr|R8AUN8|R8AUN8_PLESH 7-carboxy-7-deazaguanine synthase OS=Plesiomonas shigelloides 302-73 OX=1315976; GN = queE PE=3 SV=1
MLYPINEVFQTLQGEGVYTGVPAIFVRLQGCPVECSWCDTKHTWQLDADQRLSDPALILKTEDSASWCSMTISDLQTLFTEQGYTAKHVVITGGEPCLYDLTPLTTQLEAAGFQCQIETSGTYEIRCSEQTWVTVSPKVGMRGGCQVRTDALLRADEIKHPVARESDIEALDQLLAQREQSLGADAASAHSKTPVICLQPISQKPQATELCIRTCIARNWRLSVQTHKYLSIA

SEQ ID NO: 32899 - protein, 204 aa, Pleurocapsa sp.
  REGION 1..204: note = tr|A0A2T1CDH5|A0A2T1CDH5_9CYAN 7-carboxy-7-deazaguanine synthase OS=Pleurocapsa sp. CCALA 161 OX=2107688 GN=queE PE=3 SV=1
MNTATKSITYPIVETFHSLQGEGYWTGVNAFFIRLGGCDVHCPWCDTKHSWNSQSHPQQSASNLTSKAQAVNPAIVIITGGEPLMHDLFPLTTALKNAGLQVHLETSGAHALTGDFDWITFSPKQFKAPHFSIYDRASELKVVVTSEFDLKWAEQQASLVSKSTLCYLQPEWNSPESKSLIFDYILQHPQWRLSLQTHKLLNIQ

SEQ ID NO: 32900 - protein, 205 aa, Pleurocapsa sp.
  REGION 1..205: note = tr|K9T6E8|K9T6E8_9CYAN 7-carboxy-7-deazaguanine synthase OS=Pleurocapsa sp. PCC 7327 OX=118163 GN=queE; PE = 3 SV=1
MKTTIIETITYPIVETFHSVQGEGAWTGVSAFFIRLGGCDVYCPWCDQKESWKAKRHPQRSLVELATEAKAANPAIIIITGGEPLMHDLNPLTRQLRKLGLRVHLETSGAHPFSGQFDWVTFSPKQYKLPHNSIYDRVSELKVVVTNPEDLQWAEQQATQIPPEALKYLQPEWNTPQSQQIIFDYVLQHPEWRISLQMHKFLGVR

SEQ ID NO: 32901 - protein, 223 aa, unidentified
  source 1..223: note = Pluralibacter gergoviae
  REGION 1..223: note = tr|A0A251ZJC1|A0A251ZJC1_PLUGE 7-carboxy-7-deazaguanine synthase OS=Pluralibacter gergoviae OX=61647 GN=queE PE=3 SV=1
MQYPINEMFQTLQGEGYFTGVPAIFIRLQGCPVGCAWCDTKHTWDKLSDREVSLFSVLAKTKENDKWGAAGAEELLTAIVRQGWTARHVVITGGEPCIHDLTPLTELLEQNGYSCQIETSGTHEVRCSRDTWVTVSPKVNMRGRYDVLSQALYRADEIKHPVGRTRDIEALDELLETIADDKPRIIALQPISQKEDATRLCIETCIARNWRLSMQTHKYLNIA

SEQ ID NO: 32902 - protein, 223 aa, unidentified
  source 1..223: note = Pluralibacter gergoviae
  REGION 1..223: note = tr|A0A089R0A4|A0A089R0A4_PLUGE 7-carboxy-7-deazaguanine synthase OS=Pluralibacter gergoviae OX=61647 GN=queE PE=3 SV=1
MQYPINEMFQTLQGEGYFTGVPAIFIRLQGCPVGCAWCDTKHTWDKLSDREVSLFSVLAKTKENDKWGAAGAEELLTAIVRQGWTARHVVITGGEPCIHDLTPLTELLEQNGYSCQIETSGTHEVRCSRDTWVTVSPKVNMRGGYDVLSQALYRADEIKHPVGRTRDIEALDELLETIADDKPRIIALQPISQKEDATRLCIETCIARNWRLSMQTHKYLNIA

SEQ ID NO: 32903 - protein, 215 aa, unidentified
  source 1..215: note = Pokkaliibacter plantistimulans
  REGION 1..215: note = tr|A0A318C136|A0A318C136_9GAMM 7-carboxy-7-deazaguanine synthase OS=Pokkaliibacter plantistimulans OX=1635171 GN=queE PE=3 SV=1
MAGKKRYQIKEAFYTLQGEGAHSGRPAVFCRFTGCNLWSGKEKHRATAVCQFCDTDFIGTDGQNGGQFDSADALARHIHGLWPITTEGQKYVVCTGGEPLLQLDPELIEAFHQLGFEIAIESNGTLAAPAGIDWICISPKADAELQQQTGHELKLVYPQLLAMPERFTHLDFQHFYLQPMDGPDREANTRAAIAYCLAHPQWRLSLQTHKYLGID

SEQ ID NO: 32904 - protein, 209 aa, unidentified
  source 1..209: note = Polaribacter atrinae
  REGION 1..209: note = tr|A0A176TB83|A0A176TB83_9FLAO 7-carboxy-7-deazaguanine synthase OS=Polaribacter atrinae; OX = 1333662 GN=queE PE=3 SV=1
MDKNTKDLVDKGIMLPLMEEFYTIQGEGAHTGTAAYFIRVGGCDVGCHWCDVKESWNAELHPPTLADTIVDNVKKYAETVVITGGEPLMWSMDYITDLLQKNNIRTHIETSGAYSFSGKWNWFCLSPKKTKMPLAECYPEADELKMIIHNTSDFAFAEQEAAKVGAKCQLYLQPEWSKKEKMTALIVDYVMKNPKWKISLQTHKYLNIP

SEQ ID NO: 32905 - protein, 209 aa, Polaribacter butkevichii
  REGION 1..209: note = tr|A0A2P6CFJ5|A0A2P6CFJ5_9FLAO 7-carboxy-7-deazaguanine synthase OS=Polaribacter butkevichii OX=218490 GN=queE PE=3 SV=1
MDKNTKDLVNKGIMLPLMEEFYTIQGEGAHTGTAAYFIRVGGCDVGCHWCDVKESWNAELHPPTLADTIVNNVKKHANTVVITGGEPLMWSMDYITESLQKNNIRTHIETSGAYSFSGKWNWFCLSPKKTKMPLAECYPEADELKMIIHNTSDFAFAEQEAAKVGPKCQLYLQPEWSKKEKMTALIVDYVMKNPKWKISLQTHKYLNIP

SEQ ID NO: 32906 - protein, 210 aa, Polaribacter dokdonensis
  REGION 1..210: note = tr|A0A0N0CFP7|A0A0N0CFP7_9FLAO 7-carboxy-7-deazaguanine synthase OS=Polaribacter dokdonensis DSW-5 OX=1300348 GN=queE PE=3 SV=1
MMDKKTKDLVDKGIMLPLMEEFYTIQGEGSHTGTAAYFIRVGGCDVGCHWCDVKESWNADLHPPTMAESIIDNVKKYTNTVVITGGEPLMWSMDYITELLQKNNIKTHIETSGAYSFSGKWDWFCLSPKKTKLPLAENYREADELKMIIHNKSDFDFAEEQAAKVGKKCQLFLQPEWSKKEKMTALIVDYVMKNPKWKVSLQTHKYLNIP

SEQ ID NO: 32907 - protein, 209 aa, Polaribacter filamentus
  REGION 1..209: note = tr|A0A2S7KUS6|A0A2S7KUS6_9FLAO 7-carboxy-7-deazaguanine synthase OS=Polaribacter filamentus OX=53483 GN=queE PE=3 SV=1
MDKKTKDLVDQGIMLPLMEEFYTIQGEGSHTGTAAYFIRVGGCDVGCHWCDVKESWNADLHPPTLADTIVKNVTKHANTVVITGGEPLMWSMDYITELLQKNNIKTHIETSGAYSFSGKWDWFCLSPKKNKLPLEEVYKEADELKMIIHNNSDFDFAEQEAAKVGKRCQLFLQPEWSKKEKMTPLIVDYVMKNPKWKISLQTHKYLNIP

SEQ ID NO: 32908 - protein, 209 aa, Polaribacter gangjinensis
  REGION 1..209: note = tr|A0A2S7WEP0|A0A2S7WEP0_9FLAO 7-carboxy-7-deazaguanine synthase OS=Polaribacter gangjinensis OX=574710 GN=queE PE=3 SV=1
MDTNTKELVNQGKMLPLMEAFYTIQGEGYHTGKAAYFIRVGGCDVGCHWCDVKESWNAELHPPTSVETIVENAKKYSDTIVITGGEPLMWSMDYLTNLLQKNNMKTHIETSGAYSFSGKWDWFCLSPKKTKLPLDEVYNEADELKMIIHNKSDFDFAEQQAAKVSEKCELFLQPEWSKKEKMTSEIVDYVMKNSKWKISLQTHKYLNIP

SEQ ID NO: 32909 - protein, 209 aa, Polaribacter glomeratus
  REGION 1..209: note = tr|A0A2S7WXM9|A0A2S7WXM9_9FLAO 7-carboxy-7-deazaguanine synthase OS=Polaribacter glomeratus OX=102 GN=queE PE=3 SV=1
MDKKTKDLVNQGIMLPLMEEFYTIQGEGSHTGTAAYFIRLGGCDVGCHWCDVKESWNADLHPPTLADTIVNNVTKHANTVVITGGEPLMWSMDYITEKLQKNNIRTHIETSGAYSFSGKWDWFCLSPKKNKLPLEEVYKEADELKMIIHNNSDFDFAEQEAAKVGKKCQLYLQPEWSKKEKMTPLIVDYVMKNPKWKISLQTHKYLNIP

SEQ ID NO: 32910 - protein, 209 aa, Polaribacter irgensii
  REGION 1..209: note = tr|A4C271|A4C271_9FLAO 7-carboxy-7-deazaguanine synthase OS=Polaribacter irgensii 23-P OX=313594 GN=queE; PE = 3 SV=1
MDTKTQDLVNKGIMLPLMEEFYTIQGEGCHTGTAAYFIRVGGCDVGCHWCDVKESWNADLHPPTLADTIVENVKKHANTVVITGGEPLMWSMDYITESLQKNSIKTHIETSGAYAFSGKWDWFCLSPKKTKMPLDECYPEADELKMIIHNKSDFIFAEQEAEKVGQKCQLYLQPEWSKKEKMTALIVAYVMKNPKWKISLQTHKFLNIP

SEQ ID NO: 32911 - protein, 209 aa, unidentified
  source 1..209: note = Polaribacter porphyrae
  REGION 1..209: note = tr|A0A2S7WTK1|A0A2S7WTK1_9FLAO 7-carboxy-7-deazaguanine synthase OS=Polaribacter porphyrae OX=1137780 GN=queE PE=3 SV=1
MDKETKELVDKGIMLPLMEEFYTIQGEGSHTGTAAYFIRVGGCDVGCHWCDVKESWNADLHPPTLADTIVDNVKKYADTVVITGGEPLMWSMDYITNLLLENNIKTHIETSGAYSFSGKWDWFCLSPKKTKLPLTENYREADELKMIIHNKSDFDFAEEQAAKVGKKCQLFLQPEWSKKEKMTEQIVDYVMKNPKWKISLQTHKYLNIP

SEQ ID NO: 32912 - protein, 209 aa, unidentified
  source 1..209: note = Polaribacter reichenbachii
  REGION 1..209: note = tr|A0A1B8TS07|A0A1B8TS07_9FLAO 7-carboxy-7-deazaguanine synthase OS=Polaribacter reichenbachii OX=996801 GN=queE PE=3 SV=1
MDKKTKDLVDKGIMLPLMEEFYTIQGEGSHTGTAAYFIRVGGCDVGCHWCDVKESWNADLHPPTLADTIVDNVKKYANTVVITGGEPLMWSMDYITENLQKNNIKTHIETSGAYSFSGKWDWFCLSPKKTKLPLDECYTQADELKMIIHNKSDFDFAEQEAAKVAEKCQLFLQPEWSKKEKMTEQIVDYVMKNPKWKISLQTHKYLNIP

SEQ ID NO: 32913 - protein, 209 aa, unidentified
  source 1..209: note = Polaribacter sejongensis
  REGION 1..209: note = tr|A0A2K8VN70|A0A2K8VN70_9FLAO 7-carboxy-7-deazaguanine synthase OS=Polaribacter sejongensis OX=985043 GN=queE PE=3 SV=1
MDKNTKDLVDKGIMLPLMEEFYTIQGEGAHTGTAAYFIRVGGCDVGCHWCDVKESWNAELHPPTLADTIVDNVKKYANTVVITGGEPLMWSMDYITENLQKNNIRTHIETSGAYSFSGKWNWFCLSPKKTKMPLAECYPEADELKMIIHNKSDFDFAEQEAAKVGAKCQLYLQPEWSKKEKMTAEIVDYVMKNPKWKISLQTHKYLNIP

SEQ ID NO: 32914 - protein, 209 aa, Polaribacter sp.
  REGION 1..209: note = tr|A0A395K273|A0A395K273_9FLAO 7-carboxy-7-deazaguanine synthase OS=Polaribacter sp. WD7; OX = 2269061 GN=queE PE=3 SV=1
MDKNTQDLVDKGIMLPLMEEFYTIQGEGAHTGTAAYFIRVGGCDVGCHWCDVKESWNADLHPPTLADTIVKNVKKYANTVVITGGEPLMWSMDYITNLLQKNHIKTHIETSGAYSFSGKWDWFCLSPKKTKLPIQENYREADELKMIIHNNSDFHFAEQEAVKVGKKCQLFLQPEWSKKEKMTEEIVDYVMKNPKWRISLQTHKYLNIP

SEQ ID NO: 32915 - protein, 209 aa, Polaribacter sp.
  REGION 1..209: note = tr|A0A1Y0M4D3|A0A1Y0M4D3_9FLAO 7-carboxy-7-deazaguanine synthase OS=Polaribacter sp. SA4-10 OX=754397 GN=queE PE=3 SV=1
MDNKTRNLVDKGIMLPLMEEFYTIQGEGAHTGTAAYFIRVGGCDVGCHWCDVKESWNADLHPPTLTETIVDNVKKYATTVVITGGEPLMWSMDYITNLLQENNIKTHIETSGAYSFSGKWDWFCLSPKKNKLPLDEVYREANELKMIIHNQSDFIFAEEQAAKVGEKCQLFLQPEWSKKEKMTAQIVGYVMENPKWKISLQTHKYLNIP

SEQ ID NO: 32916 - protein, 209 aa, unidentified
  source 1..209: note = Polaribacter vadi
  REGION 1..209: note = tr|A0A1B8TZS2|A0A1B8TZS2_9FLAO 7-carboxy-7-deazaguanine synthase OS=Polaribacter vadi; OX = 1774273 GN=queE PE=3 SV=1
MDKNTQNLVDKGIMLPLMEEFYTIQGEGSHTGTAAYFIRVGGCDVGCHWCDVKESWNADLHPPTLADTIVENVKKFAKTVVITGGEPLMWSMDYITELLQKNYIKTHIETSGAYSFSGKWDWFCLSPKKTKLPLEENYREADELKMIIHNQSDFIFAEEQAAKVGKKCQLFLQPEWSKKEKMTEQIVEYVMKNPKWKISLQTHKYLNIP

SEQ ID NO: 32917 - protein, 211 aa, Polaromonas naphthalenivorans
  REGION 1..211: note = tr|A1VL34|A1VL34_POLNA 7-carboxy-7-deazaguanine synthase OS=Polaromonas naphthalenivorans (strain CJ2); OX = 365044 GN=queE PE=3 SV=1
MSYQVKEIFYTLQGEGSHAGRPAIFCRFAGCNLWSGREPDRATAVCRFCDTDFVGTDGTLGGKFKNAEALAGCIEAQWPAGDSAHRFVVMTGGEPLLQVDGALIAALHARGFVIAVETNGTIAAPPGIDWICVSPKAGAPWIQREGHELKVVWPQPALDWAELEAARFTHRYLQPMDNPAWRNNTEACIALCLENPAWRLSLQTHKITGIR

SEQ ID NO: 32918 - protein, 210 aa, Polaromonas sp.
  REGION 1..210: note = tr|A0A1S8FCD9|A0A1S8FCD9_9BURK 7-carboxy-7-deazaguanine synthase OS=Polaromonas sp. A23; OX = 1944133 GN=queE PE=3 SV=1
MSYQVKEIFYTLQGEGGNAGRPAVFCRFAGCNLWSGREQDRATAVCRFCDTDFVGTDGTLGGKFADAESLARQIEALWPASAGHRLVVMTGGEPLLQLDAALIAALHARSFEIAVETNGSIAAPAGIDWLCVSPKAGAPWVQREGQELKLVWPQPGFDLPELEAANFSQRYLQPMDNAQRADNTQACIALCMQRPAWRLSLQTHKITGIR

SEQ ID NO: 32919 - protein, 211 aa, Polaromonas sp.
  REGION 1..211: note = tr|A0A068YQB0|A0A068YQB0_9BURK 7-carboxy-7-deazaguanine synthase OS=Polaromonas sp. CG9_12 OX=1504672 GN=queE PE=3 SV=1
MGYQVKEIFYTLQGEGSHAGRPAVFCRFAGCNLWSGREQDRATAVCRFCDTDFVGTDGTLGGKFRDADALAGQIEAQWPVGDSAHRFVVMTGGEPLLQVDGALIEALHARGFQIAVETNGTIAAPPGIDWVCVSPKAGAPWVQREGDELKVVWPQPALDWAELQAARFTHRYLQPMDNPDRLRNTEACIALCLAQPAWRLSLQTHKITGIR

SEQ ID NO: 32920 - protein, 210 aa, unidentified
  source 1..210: note = [Polyangium] brachysporum
  REGION 1..210: note = tr|A0A0G3BBI5|A0A0G3BBI5_9BURK 7-carboxy-7-deazaguanine synthase OS=[Polyangium] brachysporum OX=413882 GN=queE PE=3 SV=1
MAYQVKEIFYTLQGEGANAGRPAVFCRFAGCNLWSGREADRASAVCRFCDTDFVGTDGTFGGRYADAAALAAAVAGQWTGRGGRRLVVLTGGEPLLQVDTALIDALHEAGFEIAIETNGSIAAPEGIDWICVSPKAGAPLHQTRGQELKVVVPQPGLDLDALATLPFEHRFLQAMDGPDRVRNTEWAVQHCLTDPRWRLSVQTHKVLNIR

SEQ ID NO: 32921 - protein, 217 aa, Polyangium fumosum
  REGION 1..217: note = tr|A0A4U1J8Q5|A0A4U1J8Q5_9DELT 7-carboxy-7-deazaguanine synthase OS=Polyangium fumosum; OX = 889272 GN=queE PE=3 SV=1
MKEDSLVIHEIYSSIQGESTFAGLPCTFVRLTGCNLRCAWCDTTQAFYGGKRMPRSEVREKALAFGTPLVELTGGEPLLQPGAIPLLQELCDAGRTVLVETSGEADISRVDPRVHKIMDLKAPGSGETHRNRWSNLTHITPRDEIKFVLSDRVDYEWMRSVIHERELAQLGCTLLASAVWGKLSPKDLVAWVLEDALLVRVQVQLHKVIWGADTQGV

SEQ ID NO: 32922 - protein, 217 aa, Polyangium sp.
  REGION 1..217: note = tr|A0A4U1HA83|A0A4U1HA83_9DELT 7-carboxy-7-deazaguanine synthase OS=Polyangium sp. SDU3-1; OX = 2567896 GN=queE PE=3 SV=1
MKEDSLVVHEIYASIQGESTFAGLPCTFVRLTGCNLRCAWCDTTQAFKGGKRMRREDVRERALSFNTPLVELTGGEPLLQPGAIPLLAELCDAGRTVLVETSGEADVSRVDRRVHKIMDLKPPGSGESHRNRWSNLEHIGARDEIKFVLTDRRDYEWMRDTIAGRELGRLGCTLLASPVWGKLDPKNLVDWVLADGLLVRVQIQLHKVIWGAEAQGV

SEQ ID NO: 32923 - protein, 221 aa, unidentified
  source 1..221: note = Polycyclovorans sp.
  REGION 1..221: note = tr|A0A2E2J9L5|A0A2E2J9L5_9GAMM 7-carboxy-7-deazaguanine synthase OS=Polycyclovorans sp.; OX = 2024852 GN=queE PE=3 SV=1
MSPASGEAGGRLKITEIFRSLQGESDSVGWPTVFVRLTGCPLRCHYCDTAYAFHGGAWKSLDEIVGTVRDLATRHVCVTGGEPLAQKPVLTLMTRLSDAGHAVSIETSGALDISGIDRRVRRVMDLKTPDSGEVARNRWENLSDLRMEDEVKFVICSRADYDWANQMIDQHRLLARTRVLYSPSADQLPARQLADWILEDRREVRFQTQLHKALWGATPGR

SEQ ID NO: 32924 - protein, 211 aa, unidentified
  source 1..211: note = Polymorphobacter sp.
  REGION 1..211: note = tr|A0A4Y9EQD0|A0A4Y9EQD0_9SPHN 7-carboxy-7-deazaguanine synthase OS=Polymorphobacter sp. DJ1R-1 OX=2511025 GN=queE PE=3 SV=1
MTYAVKELFLTLQGEGAQAGRRAVFLRFAGCNLWSGREADRATAVCRFCDTDFVGTGPDGGKFKTAQALADAAAASWGAAREHSLIVCTGGEPLLQLDAPLIDALHAHGFRIAVETNGTIAAPPGLDWICVSPKANAPLVQRSGQELKLVYPQAEPEAQPEAFTDLPFDHFFLQPMDGPDAAANTQAAIAYCLAHPRWRLGLQTHKLTGLR

SEQ ID NO: 32925 - protein, 217 aa, unidentified
  source 1..217: note = Polynucleobacter aenigmaticus
  REGION 1..217: note = tr|A0A254Q6L6|A0A254Q6L6_9BURK 7-carboxy-7-deazaguanine synthase OS=Polynucleobacter aenigmaticus OX=1743164 GN=queE PE=3 SV=1
MYTVKELFPTLQGEGAHTGRAAVFCRFAGCNLWSGREEDRSTAVCQFCDTDFVGSNGAGGGKFETAVLLADTIEEVWNSTSAGPQQRYVVFTGGEPLLQLDTALIDALHAKGFTVAIETNGTIKVPKGVDWVCISPKAGSDLLVLQADEIKVVIPQIGHSPIETLLARFEKMDYRNRFLQAMDGPNLQENMALAVRLCQKRPLWRLSVQTHKMIGIR

SEQ ID NO: 32926 - protein, 217 aa, unidentified
  source 1..217: note = Polynucleobacter asymbioticus
  REGION 1..217: note = tr|A0A1J0D6P8|A0A1J0D6P8_9BURK 7-carboxy-7-deazaguanine synthase OS=Polynucleobacter asymbioticus OX=576611 GN=queE PE=3 SV=1
MYTVKEIFPTLQGEGAHAGRAAVFCRFAGCNLWSGREEDRATAICQFCDTDFVGSDGLGGGKFETANDLANAIVLAWKSTSAGPQQRYVVFTGGEPLLQLDEVLIEVLHKKGFEVAIETNGTLKVPKGVDWVCVSPKAGAELIVLQANEMKLVVPQNGHESLEQLMGRFEKMDYRNRFLQPMDGPNLKSNTELAVGLCQKRPLWRLSIQSHKLIGIR

SEQ ID NO: 32927 - protein, 217 aa, unidentified
  source 1..217: note = Polynucleobacter asymbioticus
  REGION 1..217: note = tr|A4SYR8|A4SYR8_POLAQ 7-carboxy-7-deazaguanine synthase OS=Polynucleobacter asymbioticus (strain DSM 18221 / CIP 109841 / QLW-P1DMWA-1) OX=312153 GN=queE PE=3; SV = 1
MYTVKEIFPTLQGEGAHAGRAAVFCRFAGCNLWSGREEDRATAICQFCDTDFVGSDGLGGGKFETANDLANAIELAWKSTSAGPQQRYVVFTGGEPLLQLDEVLIEVLHKKGFEVAIETNGTLKVPKGVDWVCVSPKAGAELIVLQANEMKLVVPQNGHESLEQLMGRFEKMDYRNRFLQPMDGPNLKSNTELAVGLCQKRPLWRLSIQSHKLIGIR

SEQ ID NO: 32928 - protein, 218 aa, unidentified
  source 1..218: note = Polynucleobacter campilacus
  REGION 1..218: note = tr|A0A254PXA0|A0A254PXA0_9BURK 7-carboxy-7-deazaguanine synthase OS=Polynucleobacter campilacus OX=1743163 GN=queE PE=3 SV=1
MVYTVKELFPTLQGEGAHAGRAAVFCRFAGCNLWSGREEDRATATCKFCDTDFVGSDGDGGGKFETAQDLVNAIESSWTSTSAGPQQRYVVLTGGEPLLQLDEELIEKLHQKGFEIAIETNGTIKVPKGVDWVCVSPKAGSDLIVLQANELKLVIPQEGHDSLEKLLARFEKMDYRNRFLQPMDGANLKINTELAISLCQKRPLWRLSLQSHKLIGIR

SEQ ID NO: 32929 - protein, 217 aa, Polynucleobacter cosmopolitanus
  REGION 1..217: note = tr|A0A229FRF2|A0A229FRF2_9BURK 7-carboxy-7-deazaguanine synthase OS=Polynucleobacter cosmopolitanus OX=351345 GN=queE PE=3 SV=1
MTYSVKEIFLTLQGEGAHAGRAAVFCRFSGCNLWSGREEERASAVCQFCDTDFVGTDGEGGGKFESAELLAWAIDQMWGLGDPHHKYVVFTGGEPLLQLDDVLIEALHSHGFKIAIETNGTIRVPAGIDWICVSPKHGADLVQVQGDELKLVIPQAGHAGQLPQLLARFEKMSFKHHFLQALDGPNKEANTDLAIKICQSRPLWRLSTQTHKLLGIR

SEQ ID NO: 32930 - protein, 217 aa, unidentified
  source 1..217: note = Polynucleobacter duraquae
  REGION 1..217: note = tr|A0A0E3ZM08|A0A0E3ZM08_9BURK 7-carboxy-7-deazaguanine synthase OS=Polynucleobacter duraquae OX=1835254 GN=queE PE=3 SV=1
MYTVKELFPTLQGEGAHAGRAAVFCRFSGCNLWSGREEDRAAAVCQFCDTDFVGSDGAGGGKFETASLLADTIEDVWSSTSAGPQQRYVVFTGGEPLLQLDTALIDALHAKGFAIAIETNGTIKVPKGVDWVCVSPKAGSELIVLQADEMKLVIPQAGHASIETLLARFEKMDYRNRFLQAMDGPNLQENLALAVRLCQKRPLWRLSVQTHKIIGIR

SEQ ID NO: 32931 - protein, 218 aa, unidentified
  source 1..218: note = Polynucleobacter hirudinilacicola
  REGION 1..218: note = tr|A0A210RWX5|A0A210RWX5_9BURK 7-carboxy-7-deazaguanine synthase OS=Polynucleobacter hirudinilacicola OX=1743166 GN=queE PE=3 SV=1
MVYTVKELFPTLQGEGTHTGRAAVFCRFAGCNLWSGREEDRATAICKFCDTDFVGSDGDGGGKFESAIDLANAIESAWKSTSAGPQQRYVVFTGGEPLLQLDDELIAKLHEKGFEIAIETNGTIKVPKGVDWVCVSPKAGSDLIVLQANELKLVIPQEGQDSLEKLLARFEKMDYRNRFLQPMDGPNLKTNTELAISLCQKRPLWRLSLQSHKLIGIR

SEQ ID NO: 32932 - protein, 217 aa, unidentified
  source 1..217: note = Polynucleobacter meluiroseus
  REGION 1..217: note = tr|A0A240E3B8|A0A240E3B8_9BURK 7-carboxy-7-deazaguanine synthase OS=Polynucleobacter meluiroseus OX=1938814 GN=queE PE=3 SV=1
MYTVKELFPTLQGEGAHAGRAAIFCRFAGCNLWSGREEDRATAVCQFCDTDFVGSDGAGGGKFENAELLANAIEDAWLSTGAGPQQRYVVFTGGEPLLQLDAALIEALHGKGFSIAIETNGTIKVPKGIDWVCVSPKAGSDLIVLQADEIKLVIPQSGHQALESLLARFEGMDYRNRFLQPMDGLTLKENTALAVRLCQKRPLWRLSVQAHKMIGIR

SEQ ID NO: 32933 - protein, 198 aa, Polynucleobacter necessarius
  REGION 1..198: note = tr|B1XTX4|B1XTX4_POLNS 7-carboxy-7-deazaguanine synthase OS=Polynucleobacter necessarius subsp. necessarius (strain STIR1) OX=452638 GN=queE PE=3 SV=1
MYTVKEPFPILQGEGAHAGRAAVFCRFAGCNLWSGREEDRGAAICQFCDTDFVGSDGLGGGKFETANALADAIESSWRSTSAGPQQRYVVFTGGEPLLQLDDELIAALHQKGFAVAIETNGTIKIPKGIDWVCVSPKAGSELIVLQADELKLVVPQQDHSELEKIVARFEKMDYRNRFLQPMDGPGLKSNTELAVSLC

SEQ ID NO: 32934 - protein, 217 aa, unidentified
  source 1..217: note = Polynucleobacter paneuropaeus
  REGION 1..217: note = tr|A0A2Z4JT82|A0A2Z4JT82_9BURK 7-carboxy-7-deazaguanine synthase OS=Polynucleobacter paneuropaeus OX=2527775 GN=queE PE=3 SV=1
MYTIKELFPTLQGEGAHTGRAAVFCRFTGCNLWSGREEDRATAVCQFCDTDFVGFDGDGGGKFETAESLAAAIELAWLSTKAGPQQRYVVFTGGEPLLQLDKALIDALHHKAFEVAIETNGTLKVPAGVDWVCVSPKAGADLVVLQADEMKLVIPQVGHDNLENLLGRFEKMDYRNRFLQPMDGAQLAENTQLAIQLCQKRPLWRLSMQTHKIIGIR

SEQ ID NO: 32935 - protein, 218 aa, unidentified
  source 1..218: note = Polynucleobacter paneuropaeus
  REGION 1..218: note = tr|A0A2Z4JQ31|A0A2Z4JQ31_9BURK 7-carboxy-7-deazaguanine synthase OS=Polynucleobacter paneuropaeus OX=2527775 GN=queE PE=3 SV=1
MMYTVKELFPTLQGEGAHTGRAAVFCRFTGCNLWSGREEDRATAVCQFCDTDFVGFDGDGGGKFETAESLANAIELAWLSTKAGPQQRYVVFTGGEPLLQLDKALIDALHHKAFEVAIETNGTLKVPAGVDWVCVSPKAGADLVVLQADEMKLVIPQAGHDNLENLLGRFEKMDYRNRFLQPMDGAQLAENTQLAIQLCQKRPLWRLSVQTHKIIGIR

SEQ ID NO: 32936 - protein, 217 aa, Polynucleobacter sp.
  REGION 1..217: note = tr|A0A258X3Q1|A0A258X3Q1_9BURK 7-carboxy-7-deazaguanine synthase OS=Polynucleobacter sp. 16-46-70 OX=1970421 GN=queE PE=3 SV=1
MYTVKELFPTLQGEGAHAGRAAVFCRFAGCNLWSGREEDRATAVCQFCDTDFVGSDGDGGGKFATAPELADAIENAWTSTSAGPQQRYVVFTGGEPLLQLDAPLIDALHAKGFLIAIETNGTLKVPKGVDWVCVSPKAGSHLVVLQADEIKLVIPQQGHTAIEALLARFEKMDYRNRFLQAMDGPLQQKNLALAIRLCQKRPLWRLSLQTHKIVGIR

SEQ ID NO: 32937 - protein, 217 aa, Polynucleobacter sp.
  REGION 1..217: note = tr|A0A1G3CRD1|A0A1G3CRD1_9BURK 7-carboxy-7-deazaguanine synthase OS=Polynucleobacter sp. GWA2_45_21 OX=1801989 GN=queE PE=3 SV=1
MYTVKELFPTLQGEGAHAGRAAVFCRFAGCNLWSGREEDRATAVCQFCDTDFVGSDGVGGGKFETAPQLADAIEEVWTSTSAGPQQRYVVFTGGEPLLQLDTDLIDALHAKGFTVAIETNGTIKVPKGVDWVCVSPKTGSELIVLQADEIKLVIPQQGHVAIETLLARFEKMDYRNRFLQAMDGPNLQENLALAVRLCQKRPLWRLSVQTHKMIGIR

SEQ ID NO: 32938 - protein, 217 aa, unidentified
  source 1..217: note = Polynucleobacter sphagniphilus
  REGION 1..217: note = tr|A0A1R0HG18|A0A1R0HG18_9BURK 7-carboxy-7-deazaguanine synthase OS=Polynucleobacter sphagniphilus OX=1743169 GN=queE PE=3 SV=1
MYTVKELFPTLQGEGAHAGRAAVFCRFAGCNLWSGREEDRQTAICQFCDTDFVGSDGFGGGKFQTAQALADAIELSWKSTSAGPQQRYVVFTGGEPLLQIDQDLIEAVHAKGFSIAIETNGTIKVPKGIDWVCVSPKAGADLIVLQADEIKLVIPQAGHDALETLLARFEKMDYRNRFLQAMDGPNLKDNIQLAVRLCQKRPLWRLSVQTHKVIGIR

SEQ ID NO: 32939 - protein, 217 aa, unidentified
  source 1..217: note = Polynucleobacter victoriensis
  REGION 1..217: note = tr|A0A212T023|A0A212T023_9BURK 7-carboxy-7-deazaguanine synthase OS=Polynucleobacter victoriensis OX=2049319 GN=queE PE=3 SV=1
MTYSVKELFLTIQGEGAQTGRAAVFCRFSGCNLWTGREEDRSSAICQFCDTDFVGTDGDGGGKFETATQLASRINDTWGDGDPHHKYVVFTGGEPLLQLDKSLIDELHQLGFKIAIETNGTMRAPAGIDWICVSPKHGSDLLQVQGDELKLVIPQFGHEGKLPQLLARFEKMSFKHHFLQPLDGPNKAANTELAIKICQSRPLWRLSTQTHKILGIR

SEQ ID NO: 32940 - protein, 217 aa, unidentified
  source 1..217: note = Polynucleobacter wuianus
  REGION 1..217: note = tr|A0A191UE40|A0A191UE40_9BURK 7-carboxy-7-deazaguanine synthase OS=Polynucleobacter wuianus OX=1743168 GN=queE PE=3 SV=1
MYTVKELFPTLQGEGAHAGRAAVFCRFAGCNLWSGREEDRASAVCQFCDTDFVGSDGLGGGKFETPKDLADAIEAAWKSTSAGPQQRYVVFTGGEPLLQLDEELISALHQKGFEVAIETNGTIKVPKGVDWVCVSPKAGSDLIVLQANELKLVVPQAGHDSLEKLMARFEKMDYRNRFLQPMDGPMLKNNTELAVGLCQKRPLWRLSVQSHKLIGIR

SEQ ID NO: 32941 - protein, 238 aa, Pontibacillus chungwhensis
  REGION 1..238: note = tr|A0A0A2URT6|A0A0A2URT6_9BACI 7-carboxy-7-deazaguanine synthase OS=Pontibacillus chungwhensis BH030062 OX=1385513 GN=queE PE=3 SV=1
MSKLPVLEIFGPTIQGEGMVVGRKTMFVRTAGCDYSCAWCDSAFTWDGSAKEDIRLLTAEEIFHELKQVGGGSFDHVTISGGNPGLLKHMGKLVDLLHENGCEVALETQGSKWQDWFTSIDDLTISPKPPSSMMKTDWQKLDDIIEQLDPQTTSLKVVVFDEEDLEYAKGVHKRYPGIPFFVQVGNDDTDEADDTKLMHHLLGKYEWLIEQVMASTELNRVRVLPQVHALLWGNRRGV

SEQ ID NO: 32942 - protein, 242 aa, Pontibacillus halophilus
  REGION 1..242: note = tr|A0A0A5IDP6|A0A0A5IDP6_9BACI 7-carboxy-7-deazaguanine synthase OS=Pontibacillus halophilus JSM 076056 = DSM 19796 OX=1385510 GN=queE PE=3; SV = 1
MSSIPVLEIFGPTIQGEGMVVGRKTMFVRTAGCDYRCSWCDSAFTWDGSAKDDIRKLSAEDIYEELYTIGGDKFDHVTVSGGNPALLKDMGILVDLLHDKGCEVALETQGSRYQEWFTKIDDLTLSPKPPSSGMETNWVKLDGILHELEQAGRVDKASLKVVVFDEADLEYAKDVHARYPHVDFFLQVGNDDTEEQNDEVLMYKLLKKYEWLIERTMESDALNRVRVLPQVHALLWGNRRGV

SEQ ID NO: 32943 - protein, 243 aa, Pontibacillus marinus
  REGION 1..243: note = tr|A0A0A5GC15|A0A0A5GC15_9BACI 7-carboxy-7-deazaguanine synthase OS=Pontibacillus marinus BH030004 = DSM 16465 OX=1385511 GN=queE PE=3 SV=1
MSKLPVLEIFGPTIQGEGMVIGRKTMFVRTAGCDYRCSWCDSAFTWDGSAKDEIRKMSADDIFNELKELGGTRFNHVTISGGNPALLAGMDALVEQLHDHSIEVALETQGSKWQDWMGNIDDLTISPKPPSSMMKTDFGKLDAIINELRSQDRVEKHTSLKVVVFNDEDFEYAVHVHERYPDVPFFLQVGNDDTSTADDDNLTRDLLNKYEWLINKTMEDARMNNVRVLPQLHTFVWGNSRGV

SEQ ID NO: 32944 - protein, 242 aa, Pontibacillus yanchengensis
  REGION 1..242: note = tr|A0A0A2TRY3|A0A0A2TRY3_9BACI 7-carboxy-7-deazaguanine synthase OS=Pontibacillus yanchengensis Y32 OX=1385514 GN=queE PE=3 SV=1
MNKFPVLEIFGPTIQGEGMVVGRKTMFVRTAGCDYSCAWCDSAFTWDGSAKDEIQKLTAPEIINALEKNGGDCFDHVTISGGNPALLKHLNELIDRLHDKGCEVALETQGSKWQEWFLTIDDLTISPKPPSSGMSTNWEVLDGIIAKLEGAGRTSHTSLKVVIFNEEDLEYAKYVHKRYPNLAFFVQVGNEALDESDDQNLALHLLNQYEWLIDRVMHSRELNHVRVLPQVHALLWGNRRGV

SEQ ID NO: 32945 - protein, 217 aa, Pontibacter actiniarum
  REGION 1..217: note = tr|A0A1X9YQU2|A0A1X9YQU2_9BACT 7-carboxy-7-deazaguanine synthase OS=Pontibacter actiniarum OX=323450 GN=queE PE=3 SV=1
MEELKTVKTASIHQVPKDGSRLPLMEAFYTIQGEGGNTGTAAYFIRLGGCDVGCHWCDVKESWDAELHPLTPVADIVAAAAAYPGKAVVITGGEPLLYNLKPLTEQLQAQGIKTYIETSGAYPVSGSWDWICLSPKKFKAPDATVYPFANELKVIIFNKSDFKWAEEHAALVGPHCQLYLQPEWSKASEITPLIVEYVKNNPQWRVSLQTHKYMDIP

SEQ ID NO: 32946 - protein, 224 aa, Pontibacter akesuensis
  REGION 1..224: note = tr|A0A1I7FU49|A0A1I7FU49_9BACT 7-carboxy-7-deazaguanine synthase OS=Pontibacter akesuensis OX=388950 GN=queE PE=3 SV=1
MGEDESTLEEVKTTNTASIHQVPKDGSRLPLMEAFYTIQGEGGNTGVASFFIRLGGCDVGCHWCDVKESWDAEQHPLTEINAIVAAAEAYPGKNIVITGGEPLLYNLGPLTAHLQQQGFKNCIETSGAYPLSGTWDWICLSPKKFKAPHSSVYPFAHELKVVIFNKSDFKWAEEHAAQVGAHCQLYLQPEWSRATEMTPLIVEYVKNNPKWRVSLQTHKYMDIP

SEQ ID NO: 32947 - protein, 224 aa, unidentified
  source 1..224: note = Pontibacter chinhatensis
  REGION 1..224: note = tr|A0A1I2MFZ1|A0A1I2MFZ1_9BACT 7-carboxy-7-deazaguanine synthase OS=Pontibacter chinhatensis OX=1436961 GN=queE PE=3 SV=1
MALDFTALEELNVIKTASIHQVPKDGSELPLMEAFYTIQGEGGNTGTAAYFIRLGGCDVGCHWCDVKESWDAEAHPLTPIEAIVETAAAYPGKAVVITGGEPLLYNLGPLTEQLQARGIKTYIETSGAYPISGSWDWICLSPKKFKQPDPSVYPFAHELKVIIFNKSDFKWAEEHAASVGEHCRLYLQPEWSKAAEMTPLIVEYVKNNPKWRVSLQTHKYMDIP

SEQ ID NO: 32948 - protein, 215 aa, unidentified
  source 1..215: note = Pontibacter diazotrophicus
  REGION 1..215: note = tr|A0A3D8LHL7|A0A3D8LHL7_9BACT 7-carboxy-7-deazaguanine synthase OS=Pontibacter diazotrophicus OX=1400979 GN=queE PE=3 SV=1
MTKAYKTASIHTVPKDGSELPLMEAFYTIQGEGANSGTAAYFIRLGGCDVGCHWCDVKESWDAEQHPLTKTEEIVTMADAFPGKAVVITGGEPLLYNMQPLTEQLQARGIQTLIETSGAYPISGVWDWVCLSPKKFKAPDATVYPFANELKVIIFNRSDFKWAEEHAALVGEHCKLYLQPEWSKAHDIMPLIVEYVKENPKWRVSLQTHKYMDIP

SEQ ID NO: 32949 - protein, 217 aa, unidentified
  source 1..217: note = Pontibacter indicus
  REGION 1..217: note = tr|A0A1R3WVI8|A0A1R3WVI8_9BACT 7-carboxy-7-deazaguanine synthase OS=Pontibacter indicus; OX = 1317125 GN=queE PE=3 SV=1
METTKAYKTASIHTVPKDGSELPLMEAFYTIQGEGGNTGTAAYFIRLGGCDVGCHWCDVKESWDAEQHPLTPIPEIVATAKTFPGKTVVVTGGEPLLYNLNPLTAGLQEAGIRTMIETSGAYPLSGYWDWVCLSPKKFKAPDASVYPFADELKVIIFNKSDFAWAEEHAARVGADCKLYLQPEWSKATQLMPLIVEYVKNNPQWRVSLQTHKYMDIP

SEQ ID NO: 32950 - protein, 217 aa, Pontibacter korlensis
  REGION 1..217: note = tr|A0A0E3ZIC5|A0A0E3ZIC5_9BACT 7-carboxy-7-deazaguanine synthase OS=Pontibacter korlensis; OX = 400092 GN=queE PE=3 SV=1
MEETKTFKTASIHQVPKDGSLLPLMEAFYTIQGEGGNTGTAAYFIRLGGCDVGCHWCDVKESWDAEQHPLTPIEDIVETAAAYPGKAVVITGGEPLLYNLAPLTEQLQARGIKTFIESSGAYAVSGNWDWFCLSPKKFKQPDPSVYPFADELKVVIFNKSDFKWAEEHAAKVGESCSLYLQPEWSKAQEITPLIVEYVKNNPKWRVSLQTHKYMDIP

SEQ ID NO: 32951 - protein, 217 aa, unidentified
  source 1..217: note = Pontibacter lucknowensis
  REGION 1..217: note = tr|A0A1N6WHU1|A0A1N6WHU1_9BACT 7-carboxy-7-deazaguanine synthase OS=Pontibacter lucknowensis OX=1077936 GN=queE PE=3 SV=1
METTKAYKTASIHSVPKDGSELPLMEAFYTIQGEGGNTGTAAYFIRLGGCDVGCHWCDVKESWDAEQHPLTPIGEIVTTAKTFPGKTVVVTGGEPLLYNLNPLTAGLQEAGIRTMIETSGAYPLSGYWDWVCLSPKKFKAPDASVYPFADELKVIIFNKSDFAWAEEHAARVGAECKLYLQPEWSKAGQLMPLIVEYVKNNPQWRVSLQTHKYMDIP

SEQ ID NO: 32952 - protein, 224 aa, unidentified
  source 1..224: note = Pontibacter mucosus
  REGION 1..224: note = tr|A0A2T5YM40|A0A2T5YM40_9BACT 7-carboxy-7-deazaguanine synthase OS=Pontibacter mucosus; OX = 1649266 GN=queE PE=3 SV=1
MALDFTALEELNVIKTASIHQVPKDGSELPLMEAFYTIQGEGGNTGTAAYFIRLGGCDVGCHWCDVKESWDAEAHPLTPIESIVETAAAYPGKAVVITGGEPLLYNLGPLTEQLQARGIKTYIETSGAYPISGSWDWVCLSPKKFKQPDPSVYPFAHELKVIIFNKSDFKWAEEHAASVGEHCKLYLQPEWSKAAEMTPLIVEYVKNNPKWRVSLQTHKYMDIP

SEQ ID NO: 32953 - protein, 217 aa, unidentified
  source 1..217: note = Pontibacter ramchanderi
  REGION 1..217: note = tr|A0A2N3V2B2|A0A2N3V2B2_9BACT 7-carboxy-7-deazaguanine synthase OS=Pontibacter ramchanderi OX=1179743 GN=queE PE=3 SV=1
METTKAYKTASIHTVPKDGSELPLMEAFYTIQGEGGNTGTAAYFIRLGGCDVGCHWCDVKESWDAEQHPLTPIPDIVATAKTFPGKTVVVTGGEPLLYNLGPLTAGLQEEGIRTMIETSGAYPLIGHWDWVCLSPKKFKAPDASVYPFADELKVIIFNKSDFAWAEEHAARVGANCKLYLQPEWSKATQLMPLIVEYVKNNPQWRVSLQTHKYMDIP

SEQ ID NO: 32954 - protein, 217 aa, Pontibacter sp.
  REGION 1..217: note = tr|A0A364RFM1|A0A364RFM1_9BACT 7-carboxy-7-deazaguanine synthase OS=Pontibacter sp. 2b14; OX = 2080288 GN=queE PE=3 SV=1
MEVTKAYKTASIHQVPKDGSELPLMEAFYTIQGEGANTGTAAYFIRLGGCDVGCHWCDVKESWDAESHPLTPTSEIVSMASPFPGKTVVITGGEPLLYNLLPLTSQLQQQGIRTMIETSGAHPVSGQWDWICLSPKKFKAPDLSVYPVADELKVIIFNKSDFAWAEEHAARVGEKCKLYLQPEWSKATELTPLIVEYVKNNPQWRVSLQTHKYMDIP

SEQ ID NO: 32955 - protein, 217 aa, Pontibacter sp.
  REGION 1..217: note = tr|A0A5C8KB59|A0A5C8KB59_9BACT 7-carboxy-7-deazaguanine synthase OS=Pontibacter sp. GY10130 OX=2603253 GN=queE PE=3 SV=1
MDSIKPLKTASIHQVPKDGSSLPLMEAFYTIQGEGANTGCAAYFIRLGGCDVGCHWCDVKESWDAELHPLTQVEEIVRTAEQFPGKAVVVTGGEPLLYNLNPLTSLLQEQGIQTFIETSGAYPLSGYWDWVCLSPKKFKAPDASVYPFADELKVIIFNKSDFAWAEEHAAKVGLKTRLYLQPEWSKAEQLMPQIVDYVKNNPKWRVSLQTHKYMDIP

SEQ ID NO: 32956 - protein, 193 aa, unidentified
  source 1..193: note = Pontibacter ummariensis
  REGION 1..193: note = tr|A0A239F8D9|A0A239F8D9_9BACT 7-carboxy-7-deazaguanine synthase OS=Pontibacter ummariensis OX=1610492 GN=queE PE=3 SV=1
MEAFYTIQGEGANTGTAAYFIRLGGCDVGCHWCDVKESWDAEQHPLTLTEDIVSAANSYPGKTVVITGGEPLLYNLAPLTSQLQQEGIKTLVETSGAYPVSGNWDWVCLSPKKFKAPDASVYPFADELKVVIFNKSDFKWAEAHAAQVGEHCKLYLQPEWSKAADLMPLIVEYVKQNPKWRVSLQTHKYMDIP

SEQ ID NO: 32957 - protein, 193 aa, unidentified
  source 1..193: note = Pontibacter virosus
  REGION 1..193: note = tr|A0A2U1AUV7|A0A2U1AUV7_9BACT 7-carboxy-7-deazaguanine synthase OS=Pontibacter virosus; OX = 1765052 GN=queE PE=3 SV=1
MEAFYTIQGEGGNTGTAAYFIRLGGCDVGCHWCDVKESWDAELHPLTPINEIVETAKTFPGKTVVVTGGEPLLYNLHPLTAGLQDAGIRTMIETSGAYPLSGHWDWVCLSPKKFKAPDASVYPFADELKVIIFNKSDFAWAEEHAARVGATCKLYLQPEWSKAGQLMPLIVEYVKNNPQWRVSLQTHKYMDIP

SEQ ID NO: 32958 - protein, 210 aa, Ponticaulis sp.
  REGION 1..210: note = tr|A0A2E0U3H7|A0A2E0U3H7_9RHOB 7-carboxy-7-deazaguanine synthase OS=Ponticaulis sp.; OX = 2020902 GN=queE PE=3 SV=1
MAYAVKEIFKTLQGEGAHAGRTVVFCRFSGCNLWSGRDQDRASAQCSFCDTDFVGVDGTGGGRFADAELLAQTIANEWAGSNESRYVVLTGGEPLLQVDAPLVDALHRHGFEIGVETNGTRPAPEGIDWICVSPKGENELVLRSGNELKLVFPQAGAPPERFEDLEFEHFFLQPMDCAEAGQCLDDTIHYCLENPRWRLSLQSHKLVGIR

SEQ ID NO: 32959 - protein, 251 aa, Ponticaulis sp.
  REGION 1..251: note = tr|A0A2E0U7X6|A0A2E0U7X6_9RHOB 7-carboxy-7-deazaguanine synthase OS=Ponticaulis sp.; OX = 2020902 GN=queE PE=3 SV=1
MADDTLWLAVDDQGQPEIFASVQGEGPSLGSPRTFIRLSGCNLHCVWCDTAYTWNWEGTAFDHETGRKFAPENERIVQTIDEIVSRVADTSPSGIVITGGEPLMQKGRLAPLITAIKEACGPVWVEIETNGSVLPTRDLIPLINQFNVSPKLSHSGNDMAVAQREQSLTAFAALPSSWFKFVISEPGDVEEVLRISDRYKIAHDRVFLMPLGTSSKDIRDRSGWIIDKCLKHGFRFTDRLHIHIFGDTRGT

SEQ ID NO: 32960 - protein, 244 aa, Porphyrobacter dokdonensis
  REGION 1..244: note = tr|A0A1A7BFP1|A0A1A7BFP1_9SPHN 7-carboxy-7-deazaguanine synthase OS=Porphyrobacter dokdonensis DSW-74 OX=1300349 GN=queE PE=3 SV=1
MNLVLATDDNAESEIFASLQGEGPSMGVPVAFVRLSRCNLACTWCDTAYTWRFEGDNRPHRDGIAYDRKANQVTLSPQETAARIAALGQNRLVITGGEPLLQAGALAEMLAHLPDMAVEIETNGTVAPPARLDIRVDQYNVSPKLAHSGNPAELALIPERLDAWATDPRAFLKFVIAAPEDVDEVVALHRRYRFRPERVFLMAEGTDSERLRERQAWLSDLCLKHGFRMSDRMHIHLYGDTRGT

SEQ ID NO: 32961 - protein, 243 aa, unidentified
  source 1..243: note = Porphyrobacter mercurialis
  REGION 1..243: note = tr|A0A0B2BZ57|A0A0B2BZ57_9SPHN 7-carboxy-7-deazaguanine synthase OS=Porphyrobacter mercurialis OX=1572751 GN=queE PE=3 SV=1
MLVLATTTPGEPEIFASLQGEGPSIGRSVAFVRLSRCNLACRWCDTPYTWHFSGDNRPHRDGVTHDRAANQLTLSEEEVARRIAAFGKPRLVVTGGEPLLQGKALARMLAHLPDMAVEVETNGTIAPHADLDPLIGQYNVSPKLAHSGNTADLALPPERLAQWAAEPRAIFKFVIAEPADLEEVLALAFRYAIPNQRIWLMAEGTDTVTLATRQRWLAELCLQHDMNLSPRLHIALYGDTRGT

SEQ ID NO: 32962 - protein, 244 aa, Porphyrobacter neustonensis
  REGION 1..244: note = tr|A0A192D046|A0A192D046_9SPHN 7-carboxy-7-deazaguanine synthase OS=Porphyrobacter neustonensis OX=1112 GN=queE PE=3 SV=1
MNLTLATDDTGGPEIFASLQGEGPSAGMPVAFVRLSRCNLACTWCDTAYTWHFEGDNRPHRDCVTFDRKANQVTLSPGETAARIAALGQNRLVITGGEPLLQAGALAEMLAHLPDHTVEIETNGTVAPPARLDIRVDQYNVSPKLSHSGNPADLALLPERLDAWAAEPRAFLKFVVAAPADVDEVLALQRRYRFRPERVFLMAEGTDSATQRERQAWLSDLCLKHGFRMSDRLHIHLYGDTRGT

SEQ ID NO: 32963 - protein, 244 aa, Porphyrobacter sanguineus
  REGION 1..244: note = tr|A0A1M7RYU2|A0A1M7RYU2_9SPHN 7-carboxy-7-deazaguanine synthase OS=Porphyrobacter sanguineus OX=198312 GN=queE PE=3 SV=1
MNLTLATDDTGGPEIFASLQGEGPSAGVPVGFVRLSRCNLACTWCDTAYTWRFEGDNRPHRDGIVFDRRANQVTLSPAEVAARIAALGQNRLVITGGEPLLQAGALAEMLEHLPDIAVEIETNGTVAPPVRLDIRVDQYNVSPKLAHSGNPGDLALIPERLDAWAADPRAFMKFVIAAPEDVAEVLELQRRYRFRPERVFLMAEGTDSAAQRERQAWLSGLCLQHGFRMSDRLHIHLYGDTRGT

SEQ ID NO: 32964 - protein, 244 aa, Porphyrobacter sp.
  REGION 1..244: note = tr|A0A0N1AYM3|A0A0N1AYM3_9SPHN 7-carboxy-7-deazaguanine synthase OS=Porphyrobacter sp. AAP60 OX=1523423 GN=queE PE=3 SV=1
MNLTLATDDTGGPEIFASLQGEGPSQGVPVAFVRLSRCNLACVWCDTAYTWHFEGDNRPHRDGTTFERRANQVTLSPAETATRIAALGQNRLVITGGEPLLQAGALAEMLAHLPDMSVEIETNGTVAPPARLDIRVDQYNVSPKLAHSGNPADLALIPERLDAWATDPRAFLKFVIAAPEDVAEVLELQRRYRFRPERVFLMAEGTSTAAQRERQAWLSDLCLQHGFRMSDRLHIHLYGDTRGT

SEQ ID NO: 32965 - protein, 244 aa, Porphyrobacter sp.
  REGION 1..244: note = tr|A0A2N4WS02|A0A2N4WS02_9SPHN 7-carboxy-7-deazaguanine synthase OS=Porphyrobacter sp. TH134 OX=2067450 GN=queE PE=3 SV=1
MNLTLATDDNGGPEIFASLQGEGPSAGMPVAFVRLSRCNLACTWCDTAYTWRFEGDNRPHRDGIAFDRRANQVTLTPAETAERIAALGQKRLVITGGEPLLQAGALAEMLAYLPDISVEIETNGTVAPPARLDVRVDQYNVSPKLAHSGNPADLALIPERLDAWATDPRAFLKFVIAAPDDVAEVLALQQRYRFRPKRVFLMAEGTDSAAQRERQVWLSDLCLKHGFRMSDRLHIHLYGDTRGT

SEQ ID NO: 32966 - protein, 193 aa, unidentified
  source 1..193: note = Porphyromonadaceae bacterium
  REGION 1..193: note = tr|A0A353QCE9|A0A353QCE9_9PORP 7-carboxy-7-deazaguanine synthase OS=Porphyromonadaceae bacterium OX=2049046 GN=queE PE=3 SV=1
MNLTVNELFYSLQGEGGRAGEASIFIRLTKCNLACSFCDTDFETGTKMSLDEIAAHIRPFAAKWIVWTGGEPTLQLTDEKVAFFKEKGYRQAIETNGTRRIPAGIDYITCSPKLHFERVKTIIPQADELRFPMQKGDPLPDISILPVAKRYFLSPIFDGQHVIEENVAYCVSLIKENPIWSLSLQIHKLIGIP

SEQ ID NO: 32967 - protein, 193 aa, unidentified; identical to SEQ ID NO: 32725
  source 1..193: note = Porphyromonadaceae bacterium
  REGION 1..193: note = tr|A0A1I7HRL9|A0A1I7HRL9_9PORP 7-carboxy-7-deazaguanine synthase OS=Porphyromonadaceae bacterium KHP3R9 OX=1855398 GN=queE PE=3 SV=1

SEQ ID NO: 32968 - protein, 201 aa, Porphyromonas asaccharolytica
  REGION 1..201: note = tr|F4KJI7|F4KJI7_PORAD 7-carboxy-7-deazaguanine synthase OS=Porphyromonas asaccharolytica (strain ATCC 25260 / DSM 20707 / BCRC 10618 / JCM 6326 / LMG 13178 / VPI 41 98) OX=879243 GN=queE PE=3 SV=1
MQPLPVNEIFYSLQGEGGQMGRAMLFVRLSGCNLTCDYCDTDFAGHQLMTASEILAQLGSYPCRDILWTGGEPTLALREEHIAFFHEHGYRQSIETNGTRPMPQGLDYVTCSPKPEAISGLRERFVDNYPDGIDEVRWPLQLGAPLPPPIEQLAEARRYYVSPVEETGVEMSAVVARCMDFVLAHPEWRLSVQLHKLLGFR

SEQ ID NO: 32969 - protein, 197 aa, Porphyromonas catoniae
  REGION 1..197: note = tr|L1NET0|L1NET0_9PORP 7-carboxy-7-deazaguanine synthase OS=Porphyromonas catoniae F0037 OX=1127696; GN = queE PE=3 SV=1
MLVNEIFYSLQGEGLNMGRASIFIRLSKCNLSCSFCDTEFESGVEMTLEEVRDRIAQWPGKRIIWTGGEPTLQLTEEIVAYFKALGYHQSIETNGTRRPPRGLDYITCSPKKEAMCLLSRNFPDGVNEFRFPIGKDIDLPPNISDLPPAEAYLLSPIFVGETQGDVDSSAVELCVDYILKHPEWRLSIQMHKLIHIP

SEQ ID NO: 32970 - protein, 197 aa, Porphyromonas catoniae
  REGION 1..197: note = tr|Z4WWB4|Z4WWB4_9PORP 7-carboxy-7-deazaguanine synthase OS=Porphyromonas catoniae ATCC 51270 OX=887901; GN = queE PE=3 SV=1
MLVNEIFYSLQGEGLNMGRASIFIRLSKCNLSCSFCDTEFESGVEMTLEEVRDRIAQWPGKRIIWTGGEPTLQLTEEIVAYFKALGYHQSIETNGTRRPPRGLDYITCSPKREAMRLLSHNFPDGVNEFRFPIGKDIDLPPNISDLPPAEAYLLSPIFVGETQGDVDSSAVELCVDYILKHPEWRLSIQMHKLIHIP

SEQ ID NO: 32971 - protein, 200 aa, Porphyromonas circumdentaria
  REGION 1..200: note = tr|A0A1T4Q273|A0A1T4Q273_9PORP 7-carboxy-7-deazaguanine synthase OS=Porphyromonas circumdentaria OX=29524 GN=queE PE=3 SV=1
MKLLINEIFYSLQGEGAQMGFPMIFIRFSMCNLRCSYCDTDFKEYTEMTLEELYQAISSYPARNILWTGGEPTLSLTEEIVEYFHQKGYRQSIETNGTHPVPQNLDYITCSPKPEAFHLLRKNFPNGVSEWRFPFGPETPLPPNIEELPKALNYFLSPIFSPEEGTITPYPIALNACIDYIKEHPEWRLSIQLHKLIGIQ

SEQ ID NO: 32972 - protein, 201 aa, Porphyromonas crevioricanis
  REGION 1..201: note = tr|A0A2X4SEP0|A0A2X4SEP0_9PORP 7-carboxy-7-deazaguanine synthase OS=Porphyromonas crevioricanis OX=393921 GN=queE PE=3 SV=1
MKPLLVKEIFYSLQGEGGRSGRPSVFVRLSGCNLDCSFCDTDFAHGRPMQVHEIAQAIATYPSREMIWTGGEPSLQLTDEHIAYFAVLGYYQAIETNGTHTLPQGLDYISCSPKHRDWSLLARIFPKGVSEWRFLIEATGELPPHESLLPAAHHYCVSPVFQTQPKGDMADPQALKRCIEYCLAHPRWQLSIQLHKLIGIA

SEQ ID NO: 32973 - protein, 201 aa, Porphyromonas crevioricanis
  REGION 1..201: note = tr|A0A0A2FPA0|A0A0A2FPA0_9PORP 7-carboxy-7-deazaguanine synthase OS=Porphyromonas crevioricanis OX=393921 GN=queE PE=3 SV=1
MKPLLVKEIFYSLQGEGGRSGRPSIFVRLSGCNLDCSFCDTDFAHGRPMQVHEIAQAIATYPSREMIWTGGEPSLQLTDEHIAYFAVLGYYQAIETNGTHTLPQGLDYISCSPKHRDWSLLARIFPKGVSEWRFLIEATGELPPHESLLPAAHHYCVSPVFQTQPKGDMADPQALKRCIEYCLAHPRWQLSIQLHKLIGIA

SEQ ID NO: 32974 - protein, 212 aa, Porphyromonas endodontalis
  REGION 1..212: note = tr|C3JCW4|C3JCW4_POREA 7-carboxy-7-deazaguanine synthase OS=Porphyromonas endodontalis (strain ATCC 35406 / BCRC 14492 / JCM 8526 / NCTC 13058 / HG 370) OX=553175; GN = queE PE=3 SV=1
MPCVLPPIAMLDHLELPVNEIFYSLQGEGAQVGLPMVFIRLSSCNLRCSYCDTDFSSFTPMSLEAIVAELASFPTHNILWTGGEPTLHLTEEVVGFFHQKGYRQSIETNGTRPVPRGIDYITCSAKPESFPHLWENFPHGVDEWRFPFGASAPLPPAIESLPPARTYCLSPIYEPGEAILQPPHALEECIEYIKQHPTWRLSIQLHKIIGIQ

SEQ ID NO: 32975 - protein, 197 aa, Porphyromonas gingivalis
  REGION 1..197: note = tr|A0A212GB51|A0A212GB51_PORGN 7-carboxy-7-deazaguanine synthase OS=Porphyromonas gingivalis SJD12 OX=1297567 GN=queE PE=3 SV=1
MLVNEIFHSLQGEGANTGRAAVFVRLAGCNLACPYCDTDFAQGKKKSLEEIARSIEHYPTRFLIWTGGEPTLQLTEEATAYFHRLGYYQAIETNGTRPVPKGIDYISCSPKPEAIGKLKENFPDGVGEFRFPLGSDTPLPPPIDELPTAQHYLVSPIFAGDDAMEPDPSAITRCVEFVKAFPAWRLSIQMHKLIHIP

SEQ ID NO: 32976 - protein, 197 aa, Porphyromonas gingivalis
  REGION 1..197: note = tr|W1R7U1|W1R7U1_PORGN 7-carboxy-7-deazaguanine synthase OS=Porphyromonas gingivalis SJD2 OX=1211023; GN = queE PE=3 SV=1
MLVNEIFHSLQGEGANTGRAAVFVRLAGCNLACPYCDTDFAQGKKMSLEEIARSIEHYPTRFLIWTGGEPTLQLTEEATAYFHRLGYYQAIETNGTRPVPKGIDYISCSPKPEAIGKLKENFPDGVGEFRFPLGSDTPLPPPIDELPTAQHYLVSPIFAGDDAMEPDPSAITRCVEFVKAFPAWRLSIQMHKLIHIP

SEQ ID NO: 32977 - protein, 200 aa, Porphyromonas gingivicanis
  REGION 1..200: note = tr|A0A0A2G6U9|A0A0A2G6U9_9PORP 7-carboxy-7-deazaguanine synthase OS=Porphyromonas gingivicanis OX=266762 GN=queE PE=3 SV=1
MKLHINEIFYSLQGEGAQMGLPMIFIRFSGCNLRCSYCDTDFEDYTEMTLDELSTAISVYPAHNILWTGGEPSLYLTEEIVDYFHKRGYRQSIETNGTHPVPTNLDYITCSPKPESLSLLHRNFPNGVNEWRFPFGTEAPLPPRINELPKAQNYFLSPIFSTDENTITQRPLALSACIEYIKQHPQWRLSIQLHKLIGIA

SEQ ID NO: 32978 - protein, 197 aa, Porphyromonas gulae
  REGION 1..197: note = tr|A0A0A2EEF3|A0A0A2EEF3_9PORP 7-carboxy-7-deazaguanine synthase OS=Porphyromonas gulae; OX = 111105 GN=queE PE=3 SV=1
MLVNEIFHSLQGEGANTGRAAVFVRLAGCNLVCPYCDTDFIQGKKMSLEEIARSIEHYPTRFLIWTGGEPTLQLTEEATAYFHRLGYYQAIETNGTRPVPKGIDYISCSPKPEAIGKLKENFPDGVGEFRFPLGSDTPLPPPIDELPTAQHYLVSPIFTGDDAMEPDPFAITRCVEFVKAFPAWRLSIQMHKLIHIP

SEQ ID NO: 32979 - protein, 202 aa, Porphyromonas levii
  REGION 1..202: note = tr|A0A4Y8WSD1|A0A4Y8WSD1_9PORP 7-carboxy-7-deazaguanine synthase OS=Porphyromonas levii; OX = 28114 GN=queE PE=3 SV=1
MKERTLKLVELFESLQGEGANTGRLVVFVRLTGCNLSCSFCDTAYNMMTLELTPSELLARIQTDFPHCKSIIWTGGEPTLQLTQEIVQLFKASGYWQALESNGLKAAPLGLDYITLSPKGNTRPQVLEQYRDRQVGEVRIAIADGDALPVIEELPQAEHYFLSPIFDGDTIIPANVSHCEALIRRDPRWRLSLQTHKLIGIR

SEQ ID NO: 32980 - protein, 197 aa, unidentified
  source 1..197: note = Porphyromonas loveana
  REGION 1..197: note = tr|A0A2U1F6J3|A0A2U1F6J3_9PORP 7-carboxy-7-deazaguanine synthase OS=Porphyromonas loveana; OX = 1884669 GN=queE PE=3 SV=1
MFVNEIFYSLQGEGANAGCAAVFVRLAGCNLACSYCDTDFVDGREMSPGAIAQHIGQYPARFLIWTGGEPTLQLTDEITAYFHELGYYQAIETNGTRPLPKGIDYISCSPKPEAIMLLDRNFPDGVDEFRFPLGIDTPLPPSVDALPPARHYLVSPIFVGDDAMQLDPAAVERCVAFVKATPPWRFSVQMHKLIHIP

SEQ ID NO: 32981 - protein, 200 aa, Porphyromonas macacae
  REGION 1..200: note = tr|A0A0A2E5S1|A0A0A2E5S1_9PORP 7-carboxy-7-deazaguanine synthase OS=Porphyromonas macacae; OX = 28115 GN=queE PE=3 SV=1
MKKLNIKEIFYSLQGEGLNTGRAAIFIRLSGCNLKCSYCDTDFKNGIPMSVEEIEKVIDEYPGRLIIWTGGEPTLQLTDEITAYFKNAGYEQAIETNGTRTVPTGIDYITCSPKPEAIPFLKSNFPNGVDEFRFPVGSRGTLPPDIGVLPPARAYMVSPIFSGNKNMEIDQEAVERCLQFIMENPEWRLSIQLHKLLDFQ

SEQ ID NO: 32982 - protein, 200 aa, Porphyromonas macacae
  REGION 1..200: note = tr|A0A379DID5|A0A379DID5_9PORP 7-carboxy-7-deazaguanine synthase OS=Porphyromonas macacae; OX = 28115 GN=queE PE=3 SV=1
MKKLNIKEIFYSLQGEGLNTGRAAIFIRLSGCNLKCSYCDTDFKNGIPMSVEEIEKVIDEYPGRLIIWTGGEPTLQLTDEITAYFKNAGYEQAIETNGTRTVPTGIDYITCSPKPEAIPFLKSNFPNGVDEFRFPVGSRGTLPPDIGVLPPARAYMVSPIFSGNKNMEIDREAVERCLQFIMENPKWRLSIQLHKLLDFQ

SEQ ID NO: 32983 - protein, 230 aa, Porphyromonas somerae
  REGION 1..230: note = tr|A0A134B1V5|A0A134B1V5_9PORP 7-carboxy-7-deazaguanine synthase OS=Porphyromonas somerae; OX = 322095 GN=queE PE=3 SV=1
MQDEGAVRGMPCLISGELRESSYLCTQITPTTFMLINEIFYSLQGEGVHMGKASIFIRLSRCNLRCSFCDTEFDSGTEMTIEELREAIAPYPGRRIIWTGGEPTLQLTEETVAYFKALGYHQSIETNGTRRPPAGLDYITCSPKKEAMQLLHRNFPDGVGEFRFPVGSPADLPPAVSELPPAGAYLLSPIFVGETQSEADKAAIELCVSHILEHPEWQLSLQMHKLIHIP

SEQ ID NO: 32984 - protein, 197 aa, Porphyromonas sp.
  REGION 1..197: note = tr|A0A0A2E4N8|A0A0A2E4N8_9PORP 7-carboxy-7-deazaguanine synthase OS=Porphyromonas sp. COT-239 OH1446 OX=1515613 GN=queE PE=3 SV=1
MLINEIFYSLQGEGINVGRAAIFIRLSRCNLCCSFCDTDFDEGVEMSDEAIAKAIAPYPARFIIWTGGEPTLQLQRESVAYFKALGYTQAIETNGTRPVPEGIDYITCSPKAPAMQRLKSNFPQGVSELRFPVGKAEDLPPSIEELPHSEAYLLSPIFSGEDAMQLDPKAVELCVEYIKAHPEWRLSLQTHKLIHIR

SEQ ID NO: 32985 - protein, 181 aa, Porphyromonas sp.
  REGION 1..181: note = tr|A0A073IA71|A0A073IA71_9PORP 7-carboxy-7-deazaguanine synthase OS=Porphyromonas sp. 31_2 OX=658663 GN=queE PE=3 SV=1
MRKINEIFYSLQGEGFHTGTPAVFVRFSGCNLRCSFCDTRHEEGVMMTDEEIVEKVSSFPARIVILTGGEPSLWIDKALISRLREAGKQICIETNGTRPLPDGIDWVTCSPKENAPVVLERIDEIKVVYTGQDLSAYAEIPARYHFLQPCSCQNTKEVVDYILRHPRWRLSLQTHKLIDIQ

SEQ ID NO: 32986 - protein, 201 aa, Porphyromonas uenonis
  REGION 1..201: note = tr|C2M9Z6|C2M9Z6_9PORP 7-carboxy-7-deazaguanine synthase OS=Porphyromonas uenonis 60-3 OX=596327 GN=queE; PE = 3 SV=1
MQSLPVNEIFYSLQGEGGQMGRAMLFVRLSGCNLACDYCDTDFAGHRLMTVAEILAKLESYPCRDILWTGGEPTLALREEHIAFFHEQGYRQSIETNGTRPVPRGLDYVTCSPKAEAISGLRERFVDNYPDGIDEVRWPLQLGAPLPPPIEQLVQARRYYVSPVEETGVEMSAVVARCMDFVLAHPEWRLSVQLHKLLGFR

SEQ ID NO: 32987 - protein, 215 aa, unidentified
  source 1..215: note = Porticoccaceae bacterium
  REGION 1..215: note = tr|A0A2E0VK14|A0A2E0VK14_9GAMM 7-carboxy-7-deazaguanine synthase OS=Porticoccaceae bacterium OX=2026782 GN=queE PE=3 SV=1
MNDSLRITEIFYSLQGETSTVGLPTVFVRLTGCPLRCVYCDTEYAFYGGERMGMDSIMEQVHALNASHVTVTGGEPLAQPNCQLLLTRLCDEGFEVSLETSGALTTEAVDTRVAVILDLKTPASGEVGRNLYDNIARLKARDEVKFVICDRRDYEWAKLKIDEYGLRDRAGNILFSPSHGTLKPRELADWIVEDRLAVRLQVQLHKLLWDDQPGY

SEQ ID NO: 32988 - protein, 213 aa, unidentified
  source 1..213: note = Porticoccaceae bacterium
  REGION 1..213: note = tr|A0A351NTG0|A0A351NTG0_9GAMM 7-carboxy-7-deazaguanine synthase OS=Porticoccaceae bacterium OX=2026782 GN=queE PE=3 SV=1
MSYAVKEIFYSLQGEGAHAGRPAIFCRFTGCNLWSGKEKHRAEAICQFCDTDFVGTDGDGGGTFVDAKSLASRVRSFWPESITDDVHPYVICTGGEPLLQLDEALVSAFHTEGIEVAIETNGTIVVPEGIDWVCVSPKFGADLVVESGNEIKLVYPQNGHQPSDFANLQFDYFFLQPMFEHQENNNVQLTVDYCLKHPRWSLSLQTHKLLGLQ

SEQ ID NO: 32989 - protein, 216 aa, Porticoccus sp.
  REGION 1..216: note = tr|A0A2E5C4Y0|A0A2E5C4Y0_9GAMM 7-carboxy-7-deazaguanine synthase OS=Porticoccus sp.; OX = 2024853 GN=queE PE=3 SV=1
MTPTSVRITEIFYSLQGESATVGLPTVFVRLTGCPLRCHYCDTEYAFYGGERRSIEQILEEVSTFKASRVCVTGGEPLAQKSCLLLLTALCDKGYQVSLETAGALSIAEVDPRVTKVMDLKTPASGEVNRNLYENIAYLKPSDQIKFVICDRQDYEWARMKLDEFSLSDCVTDILFSPSFGQQDATELAEWVLNDRLPVRFQLQLHKLLWKDAPGH

SEQ ID NO: 32990 - protein, 216 aa, Porticoccus sp.
  REGION 1..216: note = tr|A0A2E2VYV4|A0A2E2VYV4_9GAMM 7-carboxy-7-deazaguanine synthase OS=Porticoccus sp.; OX = 2024853 GN=queE PE=3 SV=1
MNPTSVRITEIFYSLQGESSTVGLPTVFVRLTGCPLRCHYCDTEYAFYGGERRSIEQILEEVSTFKASRVCVTGGEPLAQKSCLSLLTALCDKGYQVSLETAGALSIAEVDPRVTKVVDLKTPASGEVNRNLYENIAYLKPSDQIKFVICDRRDYEWARMKLDELSLPGCVTDILFSPSFGQQDATELAEWVLNDRLPVRFQLQLHKLLWKDAPGH

SEQ ID NO: 32991 - protein, 222 aa, unidentified
  source 1..222: note = Pradoshia eiseniae
  REGION 1..222: note = tr|A0A2S7N066|A0A2S7N066_9BACI 7-carboxy-7-deazaguanine synthase OS=Pradoshia eiseniae; OX = 2064768 GN=queE PE=3 SV=1
MFRVIERFISIDGEGPTSGELAAFIRFEGCNLRCTWCDTAYSWDGSCPHEEQSTEDIYHYIKESGARNVTLTGGEPLLQKDIIPLLDLLSSDRTLHIHIETNGAIDIGQYKDRYPSGNIHFIVDYKLPASGMQMTMKEKNFEYVSRDDVYKFVIASDNDLRETWRIVNKHELTKRCRVFLSPVVESIEPKRIVEFMISRKWHDIKLQVQVHKVIWPKDMRGV

SEQ ID NO: 32992 - protein, 223 aa, Pragia fontium
  REGION 1..223: note = tr|A0A0G3CR16|A0A0G3CR16_9GAMM 7-carboxy-7-deazaguanine synthase OS=Pragia fontium; OX = 82985 GN=queE PE=3 SV=1
MSYPVNELFQTLQGEGYFTGVPAIFIRLQSCPVGCSWCDTKHTWEKLADRQRPIGEILVKTVESDQWSEVSAHELLAILQQPHYTARHVVITGGEPCLYDLKPLTELLEQHGFSCQIETSGTQQIKCSDDTWVTVSPKINMRGGLPVISQALHRADEIKHPVARERDIEELDQLLTMLNDSKQRVIALQPISQGKRATELCIETCIARNWRLSMQTHKYLGIE

SEQ ID NO: 32993 - protein, 223 aa, Pragia fontium
  REGION 1..223: note = tr|A0A379DP02|A0A379DP02_9GAMM 7-carboxy-7-deazaguanine synthase OS=Pragia fontium; OX = 82985 GN=queE PE=3 SV=1
MSYPVNELFQTLQGEGYFTGVPAIFIRLQSCPVGCSWCDTKHTWEKLADRQRPIGEILVKTVESDQWSEVSAHELLAILQQPHYTARHVVITGGEPCLYDLKPLTELLEQHGFSCQIETSGTQPIKCSDDTWVTVSPKINMRGGLPVISQALHRADEIKHPVARERDIEELDQLLTMLNDSKQRVIALQPISQGKRATELCIETCIARNWRLSMQTHKYLGIE

SEQ ID NO: 32994 - protein, 223 aa, Pragia sp.
  REGION 1..223: note = tr|A0A411WLW2|A0A411WLW2_9GAMM 7-carboxy-7-deazaguanine synthase OS=Pragia sp. CF-458; OX = 2498113 GN=queE PE=3 SV=1
MSYPVNELFQTLQGEGFFTGVPAIFIRLQACPVGCSWCDTKHTWEKIADRQQSMDDILAKTQESDSWGEASASQLLAILQQPHYTARHVVITGGEPCLYDLLPLTSLLELHGFQCQIETSGTQPVICSTNTWVTVSPKVDMRGGLNVIPQALIRADEIKHPVARERDIEQLDELLATLSDNKKRVIALQPISQNPRATELCIKTCIERNWRLSMQTHKYLGIE

SEQ ID NO: 32995 - protein, 219 aa, unidentified
  source 1..219: note = Prauserella endophytica
  REGION 1..219: note = tr|A0A4U2IN71|A0A4U2IN71_9PSEU 7-carboxy-7-deazaguanine synthase OS=Prauserella endophytica OX=1592324 GN=queE PE=3 SV=1
MLTERFESFQGEGPWTGQRCVFVRFSRCNLRCGFCDTPESWDWSRYNPAEVSDRVPIAELVSWVRERGVDMMVITGGEPMLQRTAMTALARGLANVRVQVETNGTIAPTPELASLVDLWVVSPKLANSGMTYSARIKPEALSALAATDRAVFKFVVVEPDRDLDEIAQLVEEHQLAPVWVMPEGTTQEKVLAGMDALYGPATDRGWNVSTRLHILTGAR

SEQ ID NO: 32996 - protein, 240 aa, Prauserella sp.
  REGION 1..240: note = tr|A0A318LUR7|A0A318LUR7_9PSEU 7-carboxy-7-deazaguanine synthase OS=Prauserella sp. YIM 121212 OX=1477506 GN=queE PE=3 SV=1
MKLPVVPDAERDLVINEMFGPTFQGEGPSTGRYARFIRLFGCHISCVWCDSAQTHDQRRYDLAAEQRIVSIEDVLSWLSGGPAGLVVITGGEPLLQPRVVERLVNAIRERQLATDIEIETSGTIAPTALIASAVTRFNVSPKLAHSRLRRHQRIRPTVLKDLTASGKASWKFVAQDVDDLDEIQELVSTYDLHPVWVMPEGTDSTTVLARMRVLADPVLAHGWNLSTRLHTLLWENDRGR

SEQ ID NO: 32997 - protein, 229 aa, Prauserella sp.
  REGION 1..229: note = tr|A0A318LFU4|A0A318LFU4_9PSEU 7-carboxy-7-deazaguanine synthase OS=Prauserella sp. YIM 121212 OX=1477506 GN=queE PE=3 SV=1
MAPERVEGSAILTEKFESFQGEGPWTGQRCVFVRFSRCNLRCGYCDTPESWDWSRYNPVEVSDRVPVAELVSWVRERGVDMMVITGGEPMLQQPAMTALARGLADIRVQVETNGTVAPTPELTSLVDLWVVSPKLANSGMTYSTRIKPEALSALVATDRAVFKFVVTEPDRDLDEIAQLVEEHHLAPVWVMPEGTTQEKVLAGMDALYGRATERGWNVSTRLHILTGAR

SEQ ID NO: 32998 - protein, 194 aa, Prevotella bivia
  REGION 1..194: note = tr|A0A096ABT6|A0A096ABT6_9BACT 7-carboxy-7-deazaguanine synthase OS=Prevotella bivia DNF00320 OX=1401068 GN=queE PE=3 SV=1
MKINEIFYSIQGEGFYAGTPAIFVRFAQCNLNCAFCDTDFVRFTEMAEEEIVAEVCRIGNPATHVILTGGEPSLQVTASLCDKLHEAGKVIHIETNGTHAVAEGIDFITCSPKLEYCKHAELCVQRIDELKVVFTGKNDMALYENIQAQHYFLQPCDVGNDAENGRIIAATVGYCKANPKWNISVQIHKVLAIR

SEQ ID NO: 32999 - protein, 194 aa, Prevotella bivia
  REGION 1..194: note = tr|A0A137ST60|A0A137ST60_9BACT 7-carboxy-7-deazaguanine synthase OS=Prevotella bivia; OX = 28125 GN=queE PE=3 SV=1
MKINEIFYSIQGEGFYAGTPAIFVRFAQCNLNCAFCDTDFVRFTEMTEEEIVAEVCRIGNPATHVILTGGEPSLQVTASLCDKLHEAGKVIHIETNGTHAVAEGIDFITCSPKLEYCKHAELCVQRIDELKVVFTGKNDMALYENIQAQHYFLQPCDVGNDAENGRIIAATVGYCKANPKWNISVQIHKVLAIR

SEQ ID NO: 33000 - protein, 196 aa, Prevotella bryantii
  REGION 1..196: note = tr|D8DYC1|D8DYC1_PREBR 7-carboxy-7-deazaguanine synthase OS=Prevotella bryantii B14 OX=752555 GN=queE PE=3; SV = 1
MKKINEIFYSLQGEGRHTGRAAIFIRFSGCNLKCSFCDTDFKDYQEMSDEDILYKVEELRKDKIKDAGQPKPMIILTGGEPTMQVDGAFIDMFHAAGYFVAMESNGTKEPPKQLDWLTVSPKEHVKVAQCDELKCIFDGEHQVDTFGIKAYYYYLQPCDTGDAQKNQEILSACVAYIEQHPKWRLSLQTHKLIGFK

SEQ ID NO: 33001 - protein, 196 aa, Prevotella bryantii
  REGION 1..196: note = tr|A0A255STX7|A0A255STX7_PREBR 7-carboxy-7-deazaguanine synthase OS=Prevotella bryantii; OX = 77095 GN=queE PE=3 SV=1
MKKINEIFYSLQGEGRHTGRAAIFIRFSGCNLKCSFCDTDFKDYQEMSDEDILYKVEELRKDKIKDAGQPKPMIILTGGEPTMQVDGAFIDMFHAAGYFVAMESNGTKEPPKQLDWLTVSPKEHVKVAQCDELKCIFDGEHQVDTFGIKAYYYYLQPCDTGDAQRNQEILSACVAYIEQHPKWRLSLQTHKLIGFK

SEQ ID NO: 33002 - protein, 206 aa, Prevotella buccae
  REGION 1..206: note = tr|D3HV37|D3HV37_9BACT 7-carboxy-7-deazaguanine synthase OS=Prevotella buccae D17 OX=575611 GN=queE PE=3; SV = 1
MKRYRINEIFYSLQGEGRNTGRAAVFVRFSGCNLACSFCDTDFRAYREMTSDEVVNTVKGILPSFVDNRSGEGVGTARSSVLVVLTGGEPTLQVDFDLIDALHHAGFPEVAMESNGTKEPPPNLDWLTVSPKEQVSVNRCNELKCLFDESGRADDCGIRADFYYLQPCDTGDPVRNAEIIAACTEYIKQHPKWQLSLQTHKLIGFK

SEQ ID NO: 33003 - protein, 210 aa, Prevotella buccae
  REGION 1..210: note = tr|E6K736|E6K736_9BACT 7-carboxy-7-deazaguanine synthase OS=Prevotella buccae ATCC 33574 OX=873513 GN=queE; PE = 3 SV=1
MSRAMKRYRINEIFYSLQGEGRNTGRAAVFVRFSGCNLACSFCDTDFRAYREMTSDEVVNTVKGILPSFVDNRSGEGVGTARSSVLVVLTGGEPTLQVDFDLIDALHHAGFPEVAMESNGTKEPPPNLDWLTVSPKEQVSVNRCNELKCLFDESGRADDCGIRADFYYLQPCDTGDPVRNAEIIAACTEYIKQHPKWQLSLQTHKLIGFK

SEQ ID NO: 33004 - protein, 199 aa, Prevotella buccalis
  REGION 1..199: note = tr|D1W7N4|D1W7N4_9BACT 7-carboxy-7-deazaguanine synthase OS=Prevotella buccalis ATCC 35310 OX=679190; GN = queE PE=3 SV=1
MNCDARTYKVNEIFYSLQGEGHHAGRAAVFVRFAKCNLHCWFCDTNFDTFTEMSAQQIIENVQQYAPCHFVVITGGEPTLQVTPELLQLFHIHGYYVSMETNGTHPIPKGVDWVTCSPKKAFIEAGDVHIKQANEIKVVYDGIHPISTFGIESEERYVQPCDVGDELRNKEIMQQAIQFVKTHPQWKLSLQLHKLIGIQ

SEQ ID NO: 33005 - protein, 199 aa, Prevotella buccalis
  REGION 1..199: note = tr|A0A095ZNS5|A0A095ZNS5_9BACT 7-carboxy-7-deazaguanine synthase OS=Prevotella buccalis DNF00853 OX=1401074 GN=queE PE=3 SV=1
MNRDVRTYKVNEIFYSLQGEGHHAGRAAVFVRFAKCNLNCWFCDTNFDTFTEMSAQQIIENVQQYAPCNFVVITGGEPTLQVTPELLQLFHVHGYYVSMETNGTHPIPKGVDWVTCSPKKAFIEAGNVHIKQANEIKVVYDGIHPISTFGIEAEERYVQPCDVGDELRNKEIMQQAIQFVKTHPQWKLSLQLHKLIGIQ

SEQ ID NO: 33006 - protein, 195 aa, unidentified
  source 1..195: note = Prevotella colorans
  REGION 1..195: note = tr|A0A2U0UID5|A0A2U0UID5_9BACT 7-carboxy-7-deazaguanine synthase OS=Prevotella colorans; OX = 1703337 GN=queE PE=3 SV=1
MTSYKINEIFYSLQGEGRWAGRAALFVRFSKCNLACPFCDTDFVTYRELSGADIVAALGRYPLCRFVVLTGGEPTLQVDPELLRRLHERGYYVAMETNGTNPIPEGVDWVTCSPKAAFVKGGLPRVGAVDELKVVFDGRQEVSDFGIEAAVRYVQPCDTGDARRNKAILAEAVAFVKDHPEWQLSLQQHKLIGIR

SEQ ID NO: 33007 - protein, 194 aa, Prevotella copri
  REGION 1..194: note = tr|A0A229I979|A0A229I979_9BACT 7-carboxy-7-deazaguanine synthase OS=Prevotella copri; OX = 165179 GN=queE PE=3 SV=1
MYKVNEIFYSLQGEGRWSGRPAVFVRMSGCNLKCPFCDTDFKGYKEMSAEDILAACQEKGGDCRFIVLTGGEPTLQVDAELIHLLHQKGYYLSMETNGTHMVPEGIDWITCSPKLDFTEGGELALKKVDELKLVFDGAHEVSNYGLEATCQYLQPCDVGNDARNRFILSGCIDYVKRHPEWQLSLQMHKIVGIR

SEQ ID NO: 33008 - protein, 187 aa, Prevotella maculosa
  REGION 1..187: note = tr|H1HIZ2|H1HIZ2_9BACT 7-carboxy-7-deazaguanine synthase OS=Prevotella maculosa OT 289 OX=999422 GN=queE; PE = 3 SV=1
MYRVNEIFYSLQGEGRNTGRAAVFIRFSGCNLKCSFCDTDFDAYREISVEDIVAAIRQWKQAAFIVLTGGEPTLQADKKLIDSLHAEGFCVAMESNGTKQPPPGLDWLTVSPKVRPVVTRCNELKCIFDGRKPVDDFGIEADYYYLQPCDTGDDVQNKALTQACIHYIISHPKWRLSLQTHKMIGFK

SEQ ID NO: 33009 - protein, 196 aa, Prevotella multisaccharivorax
  REGION 1..196: note = tr|F8NB11|F8NB11_9BACT 7-carboxy-7-deazaguanine synthase OS=Prevotella multisaccharivorax DSM 17128; OX = 688246 GN=queE PE=3 SV=1
MSKTYRVNDIFYSLQGEGRNTGRAAVFVRFSGCNLRCPFCDTDFTNYEELTASKILSRMKELSYLCTEGMPMVVLTGGEPTLQADEALIDYIHAAGFSFVAMESNGTHEPPKNLDWLTVSPKGNVTIKHCNELKVLFDGSTDPQRYEINAGLYYLQPLDSGEKKVNVRIMRQCVDYIMRHPQWRLSLQTHKLIGVK

SEQ ID NO: 33010 - protein, 190 aa, Prevotella oris
  REGION 1..190: note = tr|D7ND70|D7ND70_9BACT 7-carboxy-7-deazaguanine synthase OS=Prevotella oris C735 OX=563008 GN=queE PE=3; SV = 1
MKKTYKVNEIFYSLQGEGRNTGRAAVFIRFSGCNLKCSFCDTDFKLYHEMTAEAIVDAVREWKTAGFVVLTGGEPTLQVDSQLIDALHAEGFYVAMESNGTNVPPANLDWLTISPKEHVVVTECNELKCIFDGQKPVDDLGIEADYYYLQPCDVGNDVQNRAITQACIRYIASHPKWRLSLQTHKMIGFQ

SEQ ID NO: 33011 - protein, 190 aa, Prevotella oris
  REGION 1..190: note = tr|A0A3S4T492|A0A3S4T492_9BACT 7-carboxy-7-deazaguanine synthase OS=Prevotella oris; OX = 28135 GN=queE PE=3 SV=1
MKKTYKVNEIFYSLQGEGRNTGRAAVFIRFSGCNLKCSFCDTDFKLYHEMTAEAIVDAVREWKTAGFVVLTGGEPTLQVDSKLIDALHAEDFYVAMESNGTNVPPPNLDWLTISPKEHVVVTECNELKCIFDGQKPVDDLGIEADYYYLQPCDVGNDVQNRAITQACIRYIASHPKWRLSLQTHKMIGFQ

SEQ ID NO: 33012 - protein, 190 aa, Prevotella salivae
  REGION 1..190: note = tr|U2KTW9|U2KTW9_9BACT 7-carboxy-7-deazaguanine synthase OS=Prevotella salivae F0493 OX=1395125 GN=queE; PE = 3 SV=1
MRKTYNVNEIFFSLQGEGRNTGRCAVFIRFSGCNLKCSFCDTDFKSYREMTVDDIISAISKWKKAGFVVLTGGEPTLQVDDKLIDALHASGFYVAMESNGTRVPPQNLDWLTVSPKGSVVVTKCNELKCIFDGESMVDDAGIQADYYYLQPCDVGDKTKNQVILQACISYILSHPKWRLSLQTHKMIGIQ

SEQ ID NO: 33013 - protein, 199 aa, Prevotella sp.
  REGION 1..199: note = tr|A0A1H4E968|A0A1H4E968_9BACT 7-carboxy-7-deazaguanine synthase OS=Prevotella sp. tc2-28; OX = 1761888 GN=queE PE=3 SV=1
MNMIEKEYMVNEIFYSLQGEGRWAGRAAIFIRFSGCNLKCPFCDTDFASYKKMKAKDILKELLEYSQCNFVVLTGGEPTLQVTEDFVDMLHANGYYVAMETNATREVPRNINWITASPKKAYVSGGSVWLTKADEVKVVYDAVQEPDAFGISAKEYYIQPCDTGDKEMNDYIIKKCVEWVKNHPKWKLSLQQQKILKVR

SEQ ID NO: 33014 - protein, 194 aa, Prevotella sp.
  REGION 1..194: note = tr|A0A255T4X6|A0A255T4X6_9BACT 7-carboxy-7-deazaguanine synthase OS=Prevotella sp. P3-122; OX = 2024223 GN=queE PE=3 SV=1
MRTYRVNDIFYSLQGEGHNAGRAAVFVRLSGCNLACPFCDTDFTSYETLTAAEIVGRVQALVPAGSVRPMVVLTGGEPTLQADEALVGAFHGAGFGTVAMETNGTMLPPASIDWLTVSPKTPVTVDRCDELKCIFGPDGILCDADIEATYRYVQPCDTGDAAANAEIIARCVDFVRLNPQWRLSLQTHKLAGFK

SEQ ID NO: 33015 - protein, 199 aa, Prevotella timonensis
  REGION 1..199: note = tr|A0A2K0XNI4|A0A2K0XNI4_9BACT 7-carboxy-7-deazaguanine synthase OS=Prevotella timonensis; OX = 386414 GN=queE PE=3 SV=1
MNHDVRTYKVNEIFYSLQGEGHHAGKAAVFVRFAKCNLHCSFCDTNFDEYTEMSAQQIIENVQQYAPCNFVVITGGEPTLQVTATLLQIFHVHGYYVSMETNGTHPIPKGVDWITCSPKKAFIEAGDVQIKQANEIKVVYDGIHPISTFGIEAEERYVQPCDVGDESRNKEILQEAIQFVKTHPQWKLSLQLHKLIGIQ

SEQ ID NO: 33016 - protein, 199 aa, Prevotella timonensis
  REGION 1..199: note = tr|A0A098YRX1|A0A098YRX1_9BACT 7-carboxy-7-deazaguanine synthase OS=Prevotella timonensis S9-PR14 OX=1401062 GN=queE PE=3 SV=1
MNHDVRTYKVNEIFYSLQGEGHHAGKAAVFVRFAKCNLHCSFCDTNFDEYTEMSTQQIIENVQQYAPCNFVVITGGEPTLQVTATLLQLFHVHGYYVSMETNGTHPIPKGVDWITCSPKKAFIEAGDVQIKQANEIKVVYDGIHPISTFGIEAEERYVQPCDVGDESRNKEILQKAIQFVKTHPQWKLSLQLHKLIGIQ

SEQ ID NO: 33017 - protein, 232 aa, unidentified
  source 1..232: note = Prevotellaceae bacterium
  REGION 1..232: note = tr|A0A316NVW1|A0A316NVW1_9BACT 7-carboxy-7-deazaguanine synthase OS=Prevotellaceae bacterium OX=2049047 GN=queE PE=3 SV=1
MYRVNTIYPAFMGEQNCFGIGQCCVFVRFSGCNIRCYESTLGVTCDTPEALCGTCGTDMTTKEIIERLREYNIRTICLTGGEPLLQKPIELLSALSKNGFAVVVETNGTLSIEPYRHVENISFVMDYKAPSAGVKSFCHENFYYLRKRDYIKFVLYDDADYEDMKIICERMKGKVNLVAGLFWGAKIGYVELANRILRDRLPLNLNMQVHKMMVLYDEYPEAVRTLAVPKEL

SEQ ID NO: 33018 - protein, 190 aa, unidentified
  source 1..190: note = Prevotellaceae bacterium
  REGION 1..190: note = tr|A0A316NLJ9|A0A316NLJ9_9BACT 7-carboxy-7-deazaguanine synthase OS=Prevotellaceae bacterium OX=2049047 GN=queE PE=3 SV=1
MSKFYKVNDIFYTLQGEGFYTGVPAIFIRFAECNLRCDFCDTDFKESLEMTLGDLEMTLAQYPAKHVVLTGGEPSLQTDEELLQMLHAEGYYVQIETNGTNELPENIDWITMSPKSLNPKLKECDELKVIYEGQPLEKYFAIKAKHYFLQPCSSGDVKNDGEITHATVNVCLKDPRWRLSLQTQNYIGIK

SEQ ID NO: 33019 - protein, 215 aa, unidentified
  source 1..215: note = Pricia antarctica
  REGION 1..215: note = tr|A0A1G7A391|A0A1G7A391_9FLAO 7-carboxy-7-deazaguanine synthase OS=Pricia antarctica; OX = 641691 GN=queE PE=3 SV=1
MVKNEVSAHEVSELVDQGLLLPLMEEFYTIQGEGFHKGTAAYFIRIGGCDVGCHWCDVKESWNAETHPPTEIYKIVENAAKYSDTIVVTGGEPLMWDMQPLTEALKAKNLNIHIETSGAYPLTGIWDWICLSPKKNKLPEGRIYDEAHELKVIVYNKHDLIFAEQEAAKSNKNCILYLQPEWSVRDKVTPMIVDYVMANPKWKVSLQTHKYLNIP

SEQ ID NO: 33020 - protein, 225 aa, Prochlorococcus marinus
  REGION 1..225: note = sp|Q7V9H9|QUEE_PROMA 7-carboxy-7-deazaguanine synthase OS=Prochlorococcus marinus (strain SARG / CCMP1375 / SS120) OX=167539 GN=queE PE=3 SV=1
MSTCLPIVERFHSLQGEGLHFGKSAFFIRLGGCKVGCPWCDTKESWSIATHQEATVEELSKEAAIAQSQGAAILVITGGEPLHHNLNALCKTIQDFTSHNSRETMPIHLETSGVDEITGLINWITLSPKRHALPKKSLLRACDEIKVVIHQKEDLLFAEEMANQSIKERQISKKTSDENHKISQPHLFLQPGWNSKEGTQLTIEYIKSHPQWRLSLQTHKWLGVL

SEQ ID NO: 33021 - protein, 226 aa, Prochlorococcus marinus
  REGION 1..226: note = tr|A2CDX9|A2CDX9_PROM3 7-carboxy-7-deazaguanine synthase OS=Prochlorococcus marinus (strain MIT 9303); OX = 59922 GN=nrdG PE=3 SV=1
MTGNLPVVETFHSIQGEGAHVGRSAFFIRLAGCDVGCSWCDTKHSWNSRNHPQIAVEQLAVETATAAKNGAAFVVLTGGEPLQHNIAPLCEALHRATETNPDGPLPIHLETSGVNQLSGVPTWITLSPKRHAPPRTDLLAACHELKVVVHERGDLNFAESMAQAALAARKNDDASQSRLSNASKEPLLFLQPGWATTTGQQLAFEHVQSHPHWRLSMQTHKWLGIR

SEQ ID NO: 33022 - protein, 227 aa, Prochlorococcus sp.
  REGION 1..227: note = tr|A0A0A2CG84|A0A0A2CG84_9PROC 7-carboxy-7-deazaguanine synthase OS=Prochlorococcus sp. MIT 0701 OX=1499502 GN=queE PE=3 SV=1
MHSTLPVVESFHSIQGEGAHAGRSAFFIRLAGCDVGCSWCDTKHSWNSRNHPEIALEQLAEETATAAKNGAAFVVLTGGEPLHHNIDPLCAALRKATAGENNKALAIHLETSGVNPLSGKPNWITLSPKRHAPPHPELLAHCHELKVVINNQEDIHFAEAMAAAALKARKLPNSPEDISADDQGDELLLLLQPSWNNPEAQQVAINFVKAHCQWRLSVQTHKWLGVR

SEQ ID NO: 33023 - protein, 226 aa, Prochlorococcus sp.
  REGION 1..226: note = tr|A0A163AK01|A0A163AK01_9PROC 7-carboxy-7-deazaguanine synthase OS=Prochlorococcus sp. MIT 1306 OX=1799667 GN=queE PE=3 SV=1
MTGNLPVVETFHSIQGEGAHVGRSAFFIRLAGCDVGCSWCDTKHSWNSRNHPEITLEQLAVETATAAKDGAAFVVLTGGEPLQHNIAPLCEALHRATETNPDGPLAIHLETSGVNQLSGVPTWITLSPKRHAPPRTDLLAACHELKVVVHETDDLNFAEVMAKAALEARKNDNASQSRLSNTSKEPLLFLQPGWATTTGQQLAFEHVQSHPYWRLSMQTHKWLGIR

SEQ ID NO: 33024 - protein, 186 aa, unidentified
  source 1..186: note = Prochlorothrix hollandica
  REGION 1..186: note = tr|A0A0M2Q448|A0A0M2Q448_PROHO 7-carboxy-7-deazaguanine synthase OS=Prochlorothrix hollandica PCC 9006 = CALU 1027 OX=317619 GN=queE PE=3 SV=1
MQGEGHWAGHSAFFIRLGGCDVGCSWCDTKHSWDASRHRSRSIAELVAAAAAVPSAHVIVTGGEPTLHDLQPLTQALRAAGCQPHLETSGAYPLRGDFQWVTLSPKTVRSPHPSLYGQVHELKVVVADRSDLEWAESQAALVSPTVVKFLQPEWSSPQSQALVYDYVLHHPTWRISLQTHKILKVR

SEQ ID NO: 33025 - protein, 236 aa, Prolinoborus fasciculus; identical to SEQ ID NO: 27386
  REGION 1..236: note = tr|A0A2U3MED3|A0A2U3MED3_9NEIS 7-carboxy-7-deazaguanine synthase OS=Prolinoborus fasciculus OX=1056810 GN=queE PE=3 SV=1

SEQ ID NO: 33026 - protein, 289 aa, unidentified
  source 1..289: note = Prolixibacter denitrificans
  REGION 1..289: note = tr|A0A2P8CGE8|A0A2P8CGE8_9BACT 7-carboxy-7-deazaguanine synthase OS=Prolixibacter denitrificans OX=1541063 GN=queE PE=3 SV=1
MAASLLLVNNGIFPITRDAEGKLLTDVPATGLQHPGTIQGEGKLVGTASLFIRLSGCNLRCMWNIPGGGVSACDTPDSSFDVSKNQLWKVDEIIETVRHNLGDMCHVVITGGEPTIQHRSLKELCRRLKEEFDVLITIETNGTLFDEELARHIDLFSISPKLSDSLVTEEKLKQLPQQLAEKVAAAPSQKTPCPDVIQQYIDVCLNSNGEKDFQLKFVMSGSENTESIHEEVLNHISGWKPSDILAMPLGGNHQTLGKTSLRVLETAIQHGWRYCPRIHIDLFGDKPGV

SEQ ID NO: 33027 - protein, 285 aa, unidentified
  source 1..285: note = Prolixibacteraceae bacterium
  REGION 1..285: note = tr|A0A4U2LF50|A0A4U2LF50_9BACT 7-carboxy-7-deazaguanine synthase OS=Prolixibacteraceae bacterium JC036 OX=2528631 GN=queE PE=3 SV=1
MKQITLVKNGVFPITHDENGDILSDRPKTELSIAGTIQGEGKLAGVPSLFVRTAGCNLRCMWSLDDGNVSPCDTWNSSFDIQGAETIDVDKVVNLLRENKNNIQHLVITGGEPMLQTYPLITLCRQIKEEQGLHITLETNATIFNEELAQYIDLFSLSPKLKNSIPTQAKSSRLGLELNSQQERHAILYRQIEVIQQFIDYSNTHQKDIQIKFVVGNSDDEHEINNEFLKELSDWKSEDILIMNLGGNTEEIGQSVSPAIEMSIRNGWRYTPRLHIDLFGNKEGV

SEQ ID NO: 33028 - protein, 235 aa, unidentified
  source 1..235: note = Prolixibacteraceae bacterium
  REGION 1..235: note = tr|A0A3C2D7H2|A0A3C2D7H2_9BACT 7-carboxy-7-deazaguanine synthase OS=Prolixibacteraceae bacterium OX=2053594 GN=queE PE=3 SV=1
MLTDDTYYVSEYFQSIQGEGNYSGVNSLFIRFQHCNLRCSWCDTKYTWNKHSGAYKLFTQTELKEIITGNMGTNVIFTGGEPTLYRLDQLVVSDMKFHVESNGTIIPNQALNIQMEDGSVFSRMAMDEKVISEFNWVISPKLSNSFQEINEEAIAFWANNDWCIFKFIARNRKDLIEINAFADKYAIARKKVFVGIEGTTLASQIKPELVDDIINFGFNFSPRLHVMIWRNVHGK

SEQ ID NO: 33029 - protein, 244 aa, Propionispira arboris
  REGION 1..244: note = tr|A0A1H6W5U2|A0A1H6W5U2_9FIRM 7-carboxy-7-deazaguanine synthase OS=Propionispira arboris; OX = 84035 GN=queE PE=3 SV=1
MIVQANIVEVFSSIQGEGKYVGYRQVFVRFSGCNLKCKYCDTLVSHAPYKYCMTEKDAGLRQFIQLKNPVPVALLAEHINHLLLTPHHSISFTGGEPLYRADFIHALAAHLDCKLFLETNGTLVGELAKVIDDIAIISMDIKLPSITGKELWNEHRDFLMLARQKELYIKLVVSAETTWEEFHKAIDLIKDIDSSIPFIIQPVTPVNGCNACSADDVLQYQKCALEVLQDVRVIPQTHKMIGQM

SEQ ID NO: 33030 - protein, 241 aa, Propionispora hippei
  REGION 1..241: note = tr|A0A1M6AV42|A0A1M6AV42_9FIRM 7-carboxy-7-deazaguanine synthase OS=Propionispora hippei DSM 15287 OX=1123003 GN=queE PE=3 SV=1
MNTLQLIELFSSIQGEGPYIGYRQLFLRLAGCNAACIFCDTSESRSIPTTCMLEQTPGQRDFTVLPNPVPVDALAHRVNRLSQTGHHSVSITGGEPLCQSEALLQLLPLLQGRIYLETNGTLPEELAKVLPYIDIVSMDIKLPSTSGREYWQEHRRFLTLASQKEVFVKIVVSSLTGEKEFLEAIHLIGSADVMLPLILQPVTHAALAVETEQIVKWQERALDYLPNVRVIPQTHKYLGVL

SEQ ID NO: 33031 - protein, 197 aa, Propionispora sp.
  REGION 1..197: note = tr|A0A0K8JDB8|A0A0K8JDB8_9FIRM 7-carboxy-7-deazaguanine synthase OS=Propionispora sp. 2/2-37 OX=1677858 GN=queE PE=3 SV=1
MSGSYPVIELFESIQGEGYFQGLGAGFIRLAGCNLRCSWCDTRQALTLEKAALMTIDEILRAGRFTQPRVIITGGEPTLHDLGPLVKALKSVGKYVCLETNGTNPVPAEWGIDWITASPKPDSNYVLRCRADELKYVVDSTFAAAVVSAGAVPAERIYLQIEGGKAESAAKAYQIVMENPHLQLRVGTQLHKMIHVE

SEQ ID NO: 33032 - protein, 241 aa, Propionispora vibrioides
  REGION 1..241: note = tr|A0A1H8NK57|A0A1H8NK57_9FIRM 7-carboxy-7-deazaguanine synthase OS=Propionispora vibrioides OX=112903 GN=queE PE=3 SV=1
MNTLQLIESFSSIQGEGPYIGYRQLFLRLAGCNAACIFCDTSESRGIPATCMLEQTPGQRDFTVLPNPVPVDALAHRVNHLSKAGHHSVSITGGEPLCQSEALLQLLPLLQGRIYLETNGTLPEELAKVLPYIDIVSMDIKLPSTSGREYWQEHHRFLTLASQKEVFVKIVVSSLTGEGEFLEAIHLISSVDVMLPLILQPVTHAALAIETERIVKWQERALDYLPNVRVIPQTHKYLGVL

SEQ ID NO: 33033 - protein, 219 aa, Propionivibrio dicarboxylicus
  REGION 1..219: note = tr|A0A1G8LGQ3|A0A1G8LGQ3_9RHOO 7-carboxy-7-deazaguanine synthase OS=Propionivibrio dicarboxylicus OX=83767 GN=queE PE=3 SV=1
MVARDESLTLRVSEIFYSLQGEASRIGLPTVFVRLTGCPLRCSWCDTTHAFTGGARMSLDAILHRVAEFGTRHVCVTGGEPLAQTACLVLLTALCDAGYDVSLETSGALDVSAVDSRVSRIVDLKAPSSGETEKNLWANLACLTAADEIKFVVADRQDYEWTRQVIRDNRLEGVCPLLISPVQGAIGPQMLAEWVLADRLPVRFQLQLHKLLWGNMQGK

SEQ ID NO: 33034 - protein, 232 aa, Prosthecobacter debontii
  REGION 1..232: note = tr|A0A1T4WKX8|A0A1T4WKX8_9BACT 7-carboxy-7-deazaguanine synthase OS=Prosthecobacter debontii OX=48467 GN=queE PE=3 SV=1
MRISEIFYSVQGEGSLTGVPSVFVRTSGCNLRCTWCDTPYASWKPEGPEMPTAEIMAEVLRHPARHVVVTGGEPLIAKGIHELLAAFHQAGKHITIETAGTILPEGIPVDLASISPKLANSTPSVEKAGAAWVQRHEQTRLQPAVLKAWLEHAPDYQLKFVISSEADLQEAQTVIDSIGLPVPPEKVLLMPEGTSMEAMRSRYSLLVAACLSHGYRLSPRLHIELFGNKRGT

SEQ ID NO: 33035 - protein, 231 aa, Prosthecobacter fusiformis
  REGION 1..231: note = tr|A0A4R7S5V0|A0A4R7S5V0_9BACT 7-carboxy-7-deazaguanine synthase OS=Prosthecobacter fusiformis OX=48464 GN=queE PE=3 SV=1
MRISEIFYSVQGEGSLTGVPSVFVRTSGCNLRCTWCDTPYASWQPEGPEMTLDAILAEVMKHPARHVVVTGGEPMVAKDIREFLTRLHQAGKHITVETAGTVSPADLHVDLASISPKLANSTPTVEKAGPWAARHEQTRLQPAVLREWLEQAVDYQLKFVISTEADLAEAQAVVANIGLPVPPDKVLLMPEGVSMEAMRSRYDLLVHACLTHGYRLSPRLHIELFGNTRGT

SEQ ID NO: 33036 - protein, 222 aa, Prosthecochloris aestuarii
  REGION 1..222: note = tr|B4S3I1|B4S3I1_PROA2 7-carboxy-7-deazaguanine synthase OS=Prosthecochloris aestuarii (strain DSM 271 / SK 413) OX=290512 GN=queE PE=3 SV=1
MNRTLLINEIFLSIQGESSRAGYPCVFVRLTGCSSRCTWCDTRYAMTNGTTTSLQNIIDTIAGFKTPLVEITGGEPLEQENVYPLMQQLCNRGYNVMLETGGFHPVSRVDHRVHKIIDLKPPSSGSSSNNHETNIRIALKAPPAEQALFEFKIVIAGKEDYEWATRLLQRTRINEHCPVVMGTVFSELSPAILASWILKDHLNVRMQLQLHKYIWPPDMRGV

SEQ ID NO: 33037 - protein, 223 aa, unidentified
  source 1..223: note = Prosthecochloris marina
  REGION 1..223: note = tr|A0A317T5V5|A0A317T5V5_9CHLB 7-carboxy-7-deazaguanine synthase OS=Prosthecochloris marina OX=2017681 GN=queE PE=3 SV=1
MSETLLVNEIFLSIQGESTYAGWPCIFTRLSGCDSSCTWCDTRYASGKEGKNMTITEIINQIESYDTPLIEITGGEPLLQENVYALMRQLCDRGHTLLLETGGFVPVDRVDPRVHKIIDLKAPSSGESEKNCLKNIEYVIASSVLQKKTFEFKLIIASRQDYEWAKNLLSSWGLTDHCTVLMGTVFGRLDPAELAKWILEDHLHVKLQLQLHKYIWNPDTRGV

SEQ ID NO: 33038 - protein, 224 aa, Prosthecochloris sp.
  REGION 1..224: note = tr|A0A1B1Q3Z1|A0A1B1Q3Z1_9CHLB 7-carboxy-7-deazaguanine synthase OS=Prosthecochloris sp. CIB 2401 OX=1868325 GN=queE PE=3 SV=1
MNGQTLRVNELFGSIQGESRHAGWPCAFVRLSGCSADCRWCDTRYAVTEEGILMTLEEIVGQVTSMDFPLVEVTGGEPLEQEHTPELLRLLADKGFRVLLETGGLHQVRGIDPRVYPVIDLKPPSSGISHRIEQDNLHLALGRKPGRPQDMEFKIVVADREDYLWAKELLARHHLTEHATVSMGTVFGALPPSELASWIIQDRLPVRMQLQIHKYIWPPHSRGK

SEQ ID NO: 33039 - protein, 222 aa, Prosthecochloris sp.; identical to SEQ ID NO: 33036
  REGION 1..222: note = tr|A0A369R4Q6|A0A369R4Q6_9CHLB 7-carboxy-7-deazaguanine synthase OS=Prosthecochloris sp. ZM OX=2283143 GN=queE PE=3 SV=1

SEQ ID NO: 33040 - protein, 224 aa, Prosthecochloris vibrioformis; identical to SEQ ID NO: 33038
  REGION 1..224: note = tr|A0A5C4S3P0|A0A5C4S3P0_PROVB 7-carboxy-7-deazaguanine synthase OS=Prosthecochloris vibrioformis OX=1098 GN=queE PE=3 SV=1

SEQ ID NO: 33041 - protein, 193 aa, unidentified
  source 1..193: note = Proteiniphilum saccharofermentans
  REGION 1..193: note = tr|A0A1R3SRW4|A0A1R3SRW4_9BACT 7-carboxy-7-deazaguanine synthase OS=Proteiniphilum saccharofermentans OX=1642647 GN=queE PE=3 SV=1
MNLNVNEIFYSLQGEGGRSGQPSIFIRLAKCNLTCSFCDTDFERGVKMTTDEVLREIEQYSCKWIIWTGGEPTLQLNDAVVALFKEKGYLQAIETNGTRRVPEGIDYITCSPKQQFEKVRELIPEVDELRFPIQKGDPLPDVTILPKAKHHFLSPIFDNHNIIQENIDYCVSLVKENPLWALSLQIHKLIGIR

SEQ ID NO: 33042 - protein, 193 aa, Proteiniphilum sp.
  REGION 1..193: note = tr|A0A3M8EFT1|A0A3M8EFT1_9BACT 7-carboxy-7-deazaguanine synthase OS=Proteiniphilum sp. X52 OX=2382159 GN=queE PE=3 SV=1
MNLNVNEIFYSLQGEGGRSGQPSIFIRLAKCNLSCSFCDTDFERGVKLTTDELLREIEQYGCKWIIWTGGEPTLQLNDAVVALFKEKGYLQAIETNGTRRVPEGIDYITCSPKQQFEKVRELIPEVDELRFPIQKGDPLPDISILPKARYHFLSPIFDNHCIIRENIDYCVSLVKENPMWALSLQIHKLIGIR

SEQ ID NO: 33043 - protein, 209 aa, unidentified
  source 1..209: note = Proteobacteria bacterium
  REGION 1..209: note = tr|A0A1W9HM37|A0A1W9HM37_9PROT 7-carboxy-7-deazaguanine synthase OS=Proteobacteria bacterium SG_bin6 OX=1827383 GN=queE PE=3 SV=1
MSYAVKEMFLTLQGEGVHAGRRAVFIRFAGCNLWSGREADRASAVCRFCDTDFVGTDGDGGGKFVDATGLAGAAARLWGDAEGAFCVLTGGEPMLQVDDALVEALHAAGFTIAIETNGTLPVHPGIDWVCVSPKAGSAVVQRRGDELKLVWPQPGSNLDVIEAWDFRHWLIQPMDSDTAVANREAAIALVLSRPKWRLSLQTHKLLGLR

SEQ ID NO: 33044 - protein, 209 aa, unidentified
  source 1..209: note = Proteobacteria bacterium
  REGION 1..209: note = tr|A0A1W9INF4|A0A1W9INF4_9PROT 7-carboxy-7-deazaguanine synthase OS=Proteobacteria bacterium HN_bin10 OX=1827386 GN=queE PE=3 SV=1
MTYSVKEVFYTLQGEGARAGRAAVFVRFAGCNLWSGREQDRASAICQFCDTEFVGTDGDGGGKFETAEALADAAAALWPGGGAPYVVCTGGEPLLQLDAPLIAALHARGFEIAIETNGTISAPAGIDWVCVSPKANAELVQRTGNELKLVYPQSGCDPSQFEDMPFEHFFLSPMDNVAREANTQAAIAYCLAHPRWRLSLQTHKFIGVR

SEQ ID NO: 33045 - protein, 223 aa, Proteus hauseri
  REGION 1..223: note = tr|V6MIK7|V6MIK7_PROHU 7-carboxy-7-deazaguanine synthase OS=Proteus hauseri ZMd44 OX=1312367 GN=queE PE=3; SV = 1
MQYPINEVFQTLQGEGVFTGVPALFVRLQGCPVGCSWCDTKHTWEKEDEKKVPLGDIPIKTQESDAWGEASVTQILSLFQQQGYSAKHVVITGGEPCLYDLRPLTEGLEQAGFGCQIETSGTHDILCSEKTWVTLSPKVGMKGGFTVLPSAINRANEIKHPVGREKDIEALDALLVLRTEHPAPVVALQPISCKESATALCIKTCIERNWRFSMQTHKYLNIA

SEQ ID NO: 33046 - protein, 223 aa, Proteus hauseri
  REGION 1..223: note = tr|A0A410X718|A0A410X718_PROHU 7-carboxy-7-deazaguanine synthase OS=Proteus hauseri; OX = 183417 GN=queE PE=3 SV=1
MQYPINEMFQTLQGEGIFTGVPALFVRLQGCPVGCSWCDTKHTWEKEEEKKVPIGDIPIKTQESDAWGNATVDEILALFQQQGYSARHVVITGGEPCLYDLRPLTEGLEQAGFNCQIETSGTHDILCSEQTWVTLSPKVGMRGGFTVLPSAINRANEIKHPVGRQKDIEALDALLTLRTSLPAPVVALQPISCKNSATKLCIETCIARNWRFSMQTHKYLNIA

SEQ ID NO: 33047 - protein, 223 aa, Proteus mirabilis
  REGION 1..223: note = tr|A0A379GE03|A0A379GE03_PROMI 7-carboxy-7-deazaguanine synthase OS=Proteus mirabilis; OX = 584 GN=queE PE=3 SV=1
MQYPINEVFQTLQGEGVFTGVPALFVRLQGCPVGCSWCDTKHTWEKEESKKVPLGDIPIKTQESDTWGIATVEDILSLFRQQRYSAKHVVITGGEPCLYDLRPLTEGLEKAGFDCQIETSGTHDILCSEATWVTLSPKVGMRGGLNVLSSAINRANEIKHPVAREKDIEALDDLLRLRTQQPMAIVALQPISCKESATALCIKTCIERNWRFSMQTHKYLNIA

SEQ ID NO: 33048 - protein, 223 aa, Proteus mirabilis
  REGION 1..223: note = tr|A0A1Z1SS28|A0A1Z1SS28_PROMI 7-carboxy-7-deazaguanine synthase OS=Proteus mirabilis; OX = 584 GN=queE PE=3 SV=1
MQYPINEVFQTLQGEGVFTGVPALFVRLQGCPVGCSWCDTKHTWEKEESKKVPLGDIPIKTQESDTWGIATVEDILSLFRQQRYSAKHVVITGGEPCLYDLRPLTEGLEKAGFDCQIETSGTHDILCSEATWVTLSPKVGMRGGLSVLSSAINRANEIKHPVAREKDIEALDDLLRLRTQQPMAIVALQPISCKESATALCIKTCIERNWRFSMQTHKYLNIA

SEQ ID NO: 33049 - protein, 223 aa, Proteus penneri
  REGION 1..223: note = tr|A0A379EQB8|A0A379EQB8_9GAMM 7-carboxy-7-deazaguanine synthase OS=Proteus penneri; OX = 102862 GN=queE PE=3 SV=1
MQYPINEVFQTLQGEGVFTGVPALFVRLQGCPVGCSWCDTKHTWEKEDEKKVLLGDIPIKTQESDTWGEASVAQILSLFQQQGYSAKHVVITGGEPCLYDLRPLTEGLEQAGFACQIETSGTHDILCSEKTWVTLSPKVGMKGGFTVLPSAINRANEIKHPVGREKDIEALDTLLTLRTEHPAPVVALQPISCKESATALCIKTCIERNWRFSMQTHKYLNIA

SEQ ID NO: 33050 - protein, 152 aa, Proteus penneri
  REGION 1..152: note = tr|C0AXF1|C0AXF1_9GAMM 7-carboxy-7-deazaguanine synthase OS=Proteus penneri ATCC 35198 OX=471881 GN=queE; PE = 3 SV=1
MQYPINEVFQTLQGEGVFTGVPALFVRLQGCPVGCSWCDTKHTWEKEDEKKVLLGDIPIKTQESDTWGEASVAQILSLFQQQGYSAKHVVITGGEPCLYDLRPLTEGLEQAGFACQIETSGTHDILCSEKTWVTLSPKVGMKGGIYSITQCH

SEQ ID NO: 33051 - protein, 223 aa, Proteus sp.
  REGION 1..223: note = tr|A0A5J6RSJ3|A0A5J6RSJ3_9GAMM 7-carboxy-7-deazaguanine synthase QueE OS=Proteus sp. CD3; OX = 1921565 GN=BTA34_13080 PE=4 SV=1
MQYPINEVFQTLQGEGVFTGVPALFVRLQGCPVGCSWCDTKHTWEKEDDKKVPLGDIPIKTQESDTWGEASVAQILSLFQQQGYSAKHVVITGGEPCLYDLRPLTEGLEQAGFACQIETSGTHDILCSEKTWVTLSPKVGMKGGFTVLPSAINRANEIKHPVGRAKDIEALDALLTLRTEHPAPVVALQPISCKESATALCIKTCIERNWRFSMQTHKYLNIA

SEQ ID NO: 33052 - protein, 223 aa, Proteus sp.; identical to SEQ ID NO: 30867
  REGION 1..223: note = tr|A0A1F2H5N3|A0A1F2H5N3_9GAMM 7-carboxy-7-deazaguanine synthase OS=Proteus sp. HMSC10D02; OX = 1581079 GN=queE PE=3 SV=1

SEQ ID NO: 33053 - protein, 223 aa, Proteus vulgaris
  REGION 1..223: note = tr|A0A292C979|A0A292C979_PROVU 7-carboxy-7-deazaguanine synthase OS=Proteus vulgaris; OX = 585 GN=queE PE=3 SV=1
MQYPINEVFQTLQGEGVFTGVPALFVRLQGCPVGCSWCDTKHTWEKEDQKKVPLGDISIKTQESDAWGEASVAQILSLFQQQGYSAKHVVITGGEPCLYDLRPLTEGLEQAGFACQIETSGTHDILCSEKTWVTLSPKVGMKGGFKVLTSAINRANEIKHPVGREKDIEALDALLTLRTEHPAPVVALQPISCKESATALCIKTCIERNWRFSMQTHKYLNIA

SEQ ID NO: 33054 - protein, 223 aa, Proteus vulgaris
  REGION 1..223: note = tr|A0A0G4QF26|A0A0G4QF26_PROVU 7-carboxy-7-deazaguanine synthase OS=Proteus vulgaris; OX = 585 GN=queE PE=3 SV=1
MQYPINEVFQTLQGEGVFTGVPALFVRLQGCPVGCSWCDTKHTWEKEDEKKVPLGDIPIKTQESDTWGEASVAEILSLFQQQGYSAKHVVITGGEPCLYDLRPLTQGLEQAGFACQIETSGTHDILCSEKTWVTLSPKVGMRGGFRVLSSAINRANEIKHPVGREKDIEALDTLLALRTEQPAPVVALQPISCKESATALCIKTCIERNWRFSMQTHKYLNIA

SEQ ID NO: 33055 - protein, 223 aa, Providencia alcalifaciens
  REGION 1..223: note = tr|A0A4R3NIP1|A0A4R3NIP1_9GAMM 7-carboxy-7-deazaguanine synthase OS=Providencia alcalifaciens OX=126385 GN=queE PE=3 SV=1
MKYPINEIFQTLQGEGVFTGVPAVFIRLQGCPVGCSWCDTKQTWDKEPAKESTLGDIALKTQDSDLWAMSDVESLIQLMQQNGYTAKHIVITGGEPCIYDLTNLTQSLEANGFQCQIETSGTYPIICTENTWVTVSPKVGMKGGLQVLEQAINRANEIKHPVAREKDIEALDQLLSLRTQGEPPIVALQPISQKVSATKLCIDTCIQRNWRLSIQAHKYLNIQ

SEQ ID NO: 33056 - protein, 223 aa, Providencia alcalifaciens
  REGION 1..223: note = tr|X6QF20|X6QF20_9GAMM 7-carboxy-7-deazaguanine synthase OS=Providencia alcalifaciens F90-2004 OX=1256987; GN = queE PE=3 SV=1
MKYPINEIFQTLQGEGVFTGVPAVFIRLQGCPVGCSWCDTKQTWDKEPAKESTLGDIALKTQDSDFWAMSDAESLIQLMLQNGYTAKHIVITGGEPCIYDLTALTQTLEANGFQCQIETSGTYPILCTENTWVTVSPKVGMKGGLQVLEQAINRANEIKHPVAREKDIEALDQLLSLRTQGQLPIVALQPISQKTSATKLCIDTCIQRNWRLSIQTHKYLNIQ

SEQ ID NO: 33057 - protein, 223 aa, Providencia burhodogranariea
  REGION 1..223: note = tr|K8X782|K8X782_9GAMM 7-carboxy-7-deazaguanine synthase OS=Providencia burhodogranariea DSM 19968; OX = 1141662 GN=queE PE=3 SV=1
MKYPINEIFQTLQGEGVFTGVPAVFIRLQGCPVGCSWCDTKHTWEKEENKETTLGDIALKNMDIDTWALANTYDLLNLMAKQGYTAKHIVITGGEPCIYDLGPLTSELEAQGFQCQIETSGTYPIQCSNQTWVTVSPKVGMKGGLQVLTESINRANEIKHPVARERDIEELDNLLSRRTEKVQPVVALQPISQKQSATKLCIDTCIARNWRLSIQTHKYLNIA

SEQ ID NO: 33058 - protein, 223 aa, Providencia heimbachae
  REGION 1..223: note = tr|A0A4D7JCQ5|A0A4D7JCQ5_9GAMM 7-carboxy-7-deazaguanine synthase OS=Providencia heimbachae OX=333962 GN=queE PE=3 SV=1
MKYPINEIFQTLQGEGVFTGVPAIFIRLQGCPVGCSWCDTKQTWEVETNKETVLGDIALKTLDNDEWAMADATALIALMTAKNYSAKHIVITGGEPCIYDLTPLTQLLELNGYQCQIETSGTYPIQCSETTWVTVSPKVGMKGGLQVLSQAVNRANEIKHPVAREKDIEALDNILALRTTKPAPIVALQPISQKASATRLCIDTCIERNWRLSIQTHKYLAIP

SEQ ID NO: 33059 - protein, 223 aa, Providencia heimbachae
  REGION 1..223: note = tr|A0A1B7JNN2|A0A1B7JNN2_9GAMM 7-carboxy-7-deazaguanine synthase OS=Providencia heimbachae ATCC 35613 OX=1354272 GN=queE PE=3 SV=1
MKYPINEIFQTLQGEGVFTGVPAIFIRLQGCPVGCSWCDTKQTWEVETNKETVLGDIALKTLDNDEWAMADATALIALMTAKNYSAKHIVITGGEPCIYDLTPLTQLLELNGYQCQIETSGTYPIQCSETTWVTVSPKVGMKGGLQVLSQAVNRANEIKHPVAREKDIEALDNILALRTIKPAPIVALQPISQKASATRLCIDTCIERNWRLSIQTHKYLAIP

SEQ ID NO: 33060 - protein, 223 aa, Providencia rettgeri
  REGION 1..223: note = tr|A0A2A5PZV8|A0A2A5PZV8_PRORE 7-carboxy-7-deazaguanine synthase OS=Providencia rettgeri; OX = 587 GN=queE PE=3 SV=1
MKYPINEIFQTIQGEGVFTGVPAVFIRLQGCPVGCSWCDTKQTWEKEQDKESTLGDIALKTIDSDAWAMADGEALVQLMKEKHFSAQHIVITGGEPCIYDLQPLTGILEQHGYQCQIETSGTYPIQCTDNTWVTVSPKVGMKGGLQVISQAVNRANEIKHPVAREKDIEALEKILALRTVETPPVVALQPISQKAAATKLCIETCIQRNWRLSIQTHKYLDIQ

SEQ ID NO: 33061 - protein, 223 aa, Providencia rettgeri; identical to SEQ ID NO: 33060
  REGION 1..223: note = tr|D4BZ97|D4BZ97_PRORE 7-carboxy-7-deazaguanine synthase OS=Providencia rettgeri DSM 1131 OX=521000; GN = queE PE=3 SV=1

SEQ ID NO: 33062 - protein, 230 aa, Providencia rustigianii
  REGION 1..230: note = tr|D1P4S3|D1P4S3_9GAMM 7-carboxy-7-deazaguanine synthase OS=Providencia rustigianii DSM 4541 OX=500637; GN = queE PE=3 SV=1
MDHFRSDMKYPINEIFQTLQGEGVFTGVPAVFIRLQGCPVGCSWCDTKQTWDKEPAKESTLGDIALKTQDNDLWAMADAEALIQLMQQSGYTAKHIVITGGEPCIYDLNPLTETLETNGFQCQIETSGTYPILCTEKTWVTVSPKVGMKGGLKVLNQAVDRANEIKHPVAREKDIEALDQLLARRTNNAPLIVALQPISQKVSATKLCIDTCIQRNWRLSIQTHKYLNIQ

SEQ ID NO: 33063 - protein, 223 aa, Providencia rustigianii
  REGION 1..223: note = tr|A0A379G6H6|A0A379G6H6_9GAMM 7-carboxy-7-deazaguanine synthase OS=Providencia rustigianii OX=158850 GN=queE PE=3 SV=1
MKYPINEIFQTLQGEGVFTGVPAVFIRLQGCPVGCSWCDTKQTWDKEPAKESTLGDIALKTQDNDLWAMADAEALIQLMQQSGYTAKHIVITGGEPCIYDLTPLTETLETNGFQCQIETSGTYPILCTEKTWVTVSPKVGMKGGLKVLNQAVDRANEIKHPVAREKDIEALDQLLARRTNNAPLIVALQPISQKVSATKLCIDTCIQRNWRLSIQTHKYLNIQ

SEQ ID NO: 33064 - protein, 223 aa, Providencia sneebia
  REGION 1..223: note = tr|K8W0U6|K8W0U6_9GAMM 7-carboxy-7-deazaguanine synthase OS=Providencia sneebia DSM 19967 OX=1141660; GN = queE PE=3 SV=1
MKYPINEIFQTLQGEGVFTGVPAVFIRLQGCPVGCSWCDTKHTWEKEHDKETTLGDIALKNLDVDTWALADAKELVNLMKQQGYTAKHIVITGGEPCIYDLTVLTNTLEEYGYQCQIETSGTYPIQCSSKTWVTVSPKVGMKGGLEVLTTSINRANEIKHPVARERDIEQLESLLARRTEGAEPIIALQPISQKASATKLCIDTCIARNWRLSIQTHKYLNIA

SEQ ID NO: 33065 - protein, 223 aa, Providencia sp.
  REGION 1..223: note = tr|A0A345M1R1|A0A345M1R1_9GAMM 7-carboxy-7-deazaguanine synthase OS=Providencia sp. WCHPHu000369 OX=2027290 GN=queE PE=3 SV=1
MKYPINEIFQTIQGEGVFTGVPAVFIRLQGCPVGCSWCDTKQTWEIEQDKESTLGDIALKTIDSDAWAMSDSEALIQLMKEKHFSAQHIVITGGEPCIYDLQPLTEALEQHGYQCQIETSGTYPIQCTNKTWVTVSPKVGMKGGLQVISQAVNRANEIKHPVAREKDIEALEKILALRTVEMPPVVALQPISQKTAATKLCIETCIQRNWRLSIQTHKYLDIQ

SEQ ID NO: 33066 - protein, 223 aa, Providencia sp.
  REGION 1..223: note = tr|A0A356DB25|A0A356DB25_PROSP 7-carboxy-7-deazaguanine synthase OS=Providencia sp.; OX = 589 GN=queE PE=3 SV=1
MKYPINEIFQTLQGEGVFTGVPAVFIRLQGCPVGCSWCDTKQTWEKDPSKETTLGDIALKTLDSDEWAMSDTNTLIDLMREKKYSAKHIVITGGEPCIYDLTLLTNELELNGYQCQIETSGTYPIQCSDNTWVTVSPKVGMKGGLKVLKQAVNRANEIKHPVAREKDIQALDELLAMRTLETPPVVALQPISQKASATKLCIDTCIERNWRLSIQTHKYLAIP

SEQ ID NO: 33067 - protein, 223 aa, Providencia stuartii
  REGION 1..223: note = tr|A0A140NK61|A0A140NK61_PROSM 7-carboxy-7-deazaguanine synthase OS=Providencia stuartii (strain MRSN 2154) OX=1157951 GN=queE PE=3 SV=1
MNYPINEIFQTLQGEGVFTGVPAVFIRLQGCPVGCSWCDTKHTWEKEESKATTLGDIALKTVDTDTWALADSHELINLMKKQGYTAKHIVITGGEPCIYDLLPLTCELENQGYQCQIETSGTYPIQCSDKTWVTVSPKVGMKGGLQVLTESINRANEIKHPVAREKDIEELDKLLAKRTEKHAPVVALQPISQKSLATKLCIDTCIARNWRLSIQTHKYLNIA

SEQ ID NO: 33068 - protein, 223 aa, Providencia stuartii; identical to SEQ ID NO: 33067
  REGION 1..223: note = tr|A0A379GJM9|A0A379GJM9_PROST 7-carboxy-7-deazaguanine synthase OS=Providencia stuartii; OX = 588 GN=queE PE=3 SV=1

SEQ ID NO: 33069 - protein, 215 aa, unidentified
  source 1..215: note = Unknown
  REGION 1..215: note = tr|A0A368DYG3|A0A368DYG3_9PROT 7-carboxy-7-deazaguanine synthase OS=PS1 clade bacterium; OX = 2175152 GN=queE PE=3 SV=1
MTYSVKEIYYTLQGEGAQSGRPAVFCRFAGCNLWSGLEADRAEAVCTFCDTDFIGTDGENGGKFTTAEELADKIATLWPDKDALADAYVVFTGGEPLLQLDTTLLEACKAHGFETAVETNGTQIAPANLDWICVSPKPNSPLAQDRGHELKFVYPQDTLSPYEFADYDFEHFFIQPMEVEDEEAYHHNIQASIVFCLQNPQWRLSLQTHKIIGIS

SEQ ID NO: 33070 - protein, 211 aa, Pseudacidovorax intermedius
  REGION 1..211: note = tr|A0A147H7I6|A0A147H7I6_9BURK 7-carboxy-7-deazaguanine synthase OS=Pseudacidovorax intermedius OX=433924 GN=queE PE=3 SV=1
MAYAVKEIFYTLQGEGAQAGRPAVFCRFAGCNLWSGREEDRATAQCRFCDTDFVGTDGTLGGKFATAELLADRIAACWPAPAHDHRFVVLTGGEPLLQVDDALVAALHAQGFAIAVETNGTLPAPAGIDWVCVSPKAGNPLVQRRGDELKLVWPQAGIDLAELESLDFGRRYLQPLDDPRRDTHTRECIDLCLARPLWRLSTQTHKVIGIR

SEQ ID NO: 33071 - protein, 211 aa, Pseudacidovorax intermedius
  REGION 1..211: note = tr|A0A370F8F0|A0A370F8F0_9BURK 7-carboxy-7-deazaguanine synthase OS=Pseudacidovorax intermedius OX=433924 GN=queE PE=3 SV=1
MAYAVKEIFYTLQGEGAQAGRPAVFCRFAGCNLWSGREEDRAGAQCRFCDTDFVGTDGTLGGKFATAELLADQVAACWPAPAHDHRFVVLTGGEPLLQVDDALVAALHARGFAIAIETNGTLPAPKGIDWICVSPKAGNALVQRRGDELKLVWPQAGIDLAQMEALDFGRHYLQPLDDPQRAAHTRACIDVCLQRPQWRLSTQTHKVIGIR

SEQ ID NO: 33072 - protein, 204 aa, unidentified
  source 1..204: note = Pseudanabaena biceps
  REGION 1..204: note = tr|L8MUL7|L8MUL7_9CYAN 7-carboxy-7-deazaguanine synthase OS=Pseudanabaena biceps PCC 7429 OX=927668; GN = queE PE=3 SV=1
MNRVNFANSLPIVETFHSLQGEGTWMGTNAFFIRLAGCDVGCPWCDTKISWNMKRHPQIAIADLVKQAIVVKPAIVVITGGEPLMHDLTELTAELKTQGLRVHLETSGSHPFSGNFDWVTFSPKRFKPPHASIYERVNELKIVVKDASDLIWAEHNAEKVAINVMKYLQAEWETPSSKDLVLQYVLSHANWCVSIQTHKLLGVR

SEQ ID NO: 33073 - protein, 204 aa, unidentified
  source 1..204: note = Pseudanabaena frigida
  REGION 1..204: note = tr|A0A2W4W688|A0A2W4W688_9CYAN 7-carboxy-7-deazaguanine synthase OS=Pseudanabaena frigida; OX = 945775 GN=queE PE=3 SV=1
MDKVQQIDRLPIVETFHSVQGEGTWMGVNAFFIRLAGCDVGCPWCDTKISWNVKRHPEIAIADLVSKAVNAKPAMVVITGGEPLMHDLTELTQQLKNQGLRVHLETSGSHLFSGNFDWVTFSPKQFKHPHASIYEKVSELKVVVKDESDLMWAEQNAARLLPNVVKYLQAEWETTSSKDLVMQYVLSHADWRVSIQTHKLLGVR

SEQ ID NO: 33074 - protein, 204 aa, Pseudanabaena sp.
  REGION 1..204: note = tr|A0A256BJR9|A0A256BJR9_9CYAN 7-carboxy-7-deazaguanine synthase OS=Pseudanabaena sp. SR411 OX=1980935 GN=queE PE=3 SV=1
MDKVNCLNHLPIVETFHSVQGEGAWMGTNAFFIRLAGCDVGCPWCDTKISWNLKRHPEIAIADLVDEAVNAKPAMVVITGGEPLMHDLNDLTRELKAQGLQIHLETSGSHPFSGIFDWVTFSPKQFKHPHASIYEHVSELKVVVKDASDLLWAEQNAARVPSHMVKYLQAEWETASSKDLVLQYVLSHPDWRVSIQTHKLLGVR

SEQ ID NO: 33075 - protein, 204 aa, Pseudanabaena sp.
  REGION 1..204: note = tr|A0A352JDC4|A0A352JDC4_9CYAN 7-carboxy-7-deazaguanine synthase OS=Pseudanabaena sp.; OX = 1153 GN=queE PE=3 SV=1
MTQIHHLTHLPVVETFHSVQGEGTWMGVNAFFIRLAGCDVGCPWCDTKISWNIKRHHQIEISDLVIEAVNAHPAIVIITGGEPLMHDLTELTRQLKDQGLRVHLETSGSHPFSGHFDWVTFSPKKFKFPHTSIYHQVSELKVIIKDASDLSWAEQNAARVPLSVVKYLQAEWETESSNELVMQYVLNHADWRISVQTHKLLGVR

SEQ ID NO: 33076 - protein, 208 aa, unidentified
  source 1..208: note = Pseudarcicella hirudinis
  REGION 1..208: note = tr|A0A1I5RZC7|A0A1I5RZC7_9BACT 7-carboxy-7-deazaguanine synthase OS=Pseudarcicella hirudinis OX=1079859 GN=queE PE=3 SV=1
MEMLKESPTQTLPVMEAFYTLQGEGFHQGKAAYFIRLGGCDVGCHWCDVKESWDINAHPHFSIEQIVAEAAQHEGRLAVVTGGEPLMHNLDELTKALHQAGIQTNIETSGVCETVSGDWDWICFSPKKFKSPNPDIFRKAHELKVIVYNQSDFEWAESFAEKVSENCILYLQPEWGRQEVMLPQIIEYIKHNPAWRISLQVHKFMNIP

SEQ ID NO: 33077 - protein, 215 aa, unidentified
  source 1..215: note = Pseudarcicella sp.
  REGION 1..215: note = tr|A0A2S2DUA0|A0A2S2DUA0_9BACT 7-carboxy-7-deazaguanine synthase OS=Pseudarcicella sp. HME7025 OX=2183547 GN=queE PE=3 SV=1
MQSNSKDIKSVLKRDAFEYPVMESFYTIQGEGKFQGHAAYFIRLGGCDVGCHWCDVKESWPIDTHPIKTVAELVQEASQFLGRIVVITGGEPLMHNLNPLTEALQEAGFRTHIETSGVGKQITGVWDWVCFSPKKFKEPNPGIFSLVDELKVVIFHPSDIAWSQTWTDKLPSESLWLMQPEWSKQADMNPLIVDFVKENPRWQISVQTHKFLQIP

SEQ ID NO: 33078 - protein, 223 aa, unidentified
  source 1..223: note = Pseudescherichia vulneris
  REGION 1..223: note = tr|A0A090UXJ3|A0A090UXJ3_PSEVU 7-carboxy-7-deazaguanine synthase OS=Pseudescherichia vulneris NBRC 102420 OX=1115515 GN=ygcF PE=3 SV=1
MQYPINEMFQTLQGEGYFTGVPAIFIRLQGCPVGCAWCDTKHTWDKLADREVSLYSVLAKTKESDKWGPASSEDLLAIIERQGYTARHVVITGGEPCIHDLIPLTMLLEKNGFSCQIETSGTHEVRTSTNTWVTVSPKVNMRGGYDILQQALDRADEIKHPVGRMRDVEALDELLATLHDDKPRVIALQPISQKEDATRLCIETCIARNWRLSMQTHKYLNIA

SEQ ID NO: 33079 - protein, 230 aa, unidentified
  source 1..230: note = Pseudidiomarina sp.
  REGION 1..230: note = tr|A0A443YXL1|A0A443YXL1_9GAMM 7-carboxy-7-deazaguanine synthase OS=Pseudidiomarina sp. R04H25 OX=2487740 GN=queE PE=3 SV=1
MLENPISTLYPINEIFQTIQGEGVFTGVPAIFIRLQGCPVGCPWCDTQHTWEQRESDQVEATEVVEKQQPSSNWASMTADEMVKLIEAKGYTAKHVVITGGEPAMFNLIPLGQALEQKGYQLQIETSGTFAIQVTPSTWVTVSPKLDMPGGYLVRPDCMKRANEIKYPVAMQKHIEQFDKLLKACPPRAEAIIALQPISQRPRATELAIKVCIERNWRLSAQLHKYLKIE

SEQ ID NO: 33080 - protein, 221 aa, unidentified
  source 1..221: note = Pseudoalteromonadaceae bacterium
  REGION 1..221: note = tr|A0A2D6VN69|A0A2D6VN69_9GAMM 7-carboxy-7-deazaguanine synthase; OS = Pseudoalteromonadaceae bacterium OX=2026783 GN=queE; PE = 3 SV=1
MYKINEVFETIQGEASFTGTPSIFLRLQGCPVGCAWCDTKQTWDVDNVYKVSLDDTVEKKADSDHWAEATAEQVLALFKERGYNAKHVVITGGEPCMYDLNPVCELLHANGYSTQIETSGTFEILVPEQTWVTVSPKINMRGGYKVLRSAMQRADEIKHPVAMQKHVEELEDLFLKTGVNPRLVYLQPISQKISATKLAIETCIAKNWRLSVQVHKYLGIS

SEQ ID NO: 33081 - protein, 221 aa, unidentified
  source 1..221: note = Pseudoalteromonadaceae bacterium
  REGION 1..221: note = tr|A0A2D7MVY6|A0A2D7MVY6_9GAMM 7-carboxy-7-deazaguanine synthase; OS = Pseudoalteromonadaceae bacterium OX=2026783 GN=queE; PE = 3 SV=1
MYKINEVFETIQGEASFTGTPSIFLRLQGCPVGCAWCDTKQTWEVDNVYKVSLDETVEKKADSDHWADASAEQVLELFKSRGYTAKHVVITGGEPCMYDLNPVCKLLHDNGFTTQIETSGTFEILAPEQTWVTVSPKINMRGGYEVLTSAMKRANEIKHPVAMQKHVEELEALFAKTGVNPKLVYLQPISQKVSATKLAIDTCIAKNWRLSVQVHKYLGIS

SEQ ID NO: 33082 - protein, 221 aa, Pseudoalteromonas agarivorans
  REGION 1..221: note = tr|A0A290RXG7|A0A290RXG7_9GAMM 7-carboxy-7-deazaguanine synthase OS=Pseudoalteromonas agarivorans DSM 14585 OX=1312369 GN=queE PE=3 SV=1
MYKINEVFETIQGEASFTGTPSIFLRLQGCPVGCAWCDTKQTWEVDNVYKVSLDETVEKKADSDHWADASAEQVLELFKSRGYTAKHVVITGGEPCMYDLNPVCKLLHDNGFTTQIETSGTFEILAPEQTWVTVSPKINMRGGYEVLTSAMKRANEIKHPVAMQKHVEELEELFAKTGVNPKLVYLQPISQKVSATKLAIDTCIAKNWRLSVQVHKYLGIS

SEQ ID NO: 33083 - protein, 221 aa, Pseudoalteromonas agarivorans; identical to SEQ ID NO: 33081
  REGION 1..221: note = tr|N6VTA5|N6VTA5_9GAMM 7-carboxy-7-deazaguanine synthase OS=Pseudoalteromonas agarivorans S816 OX=1307437; GN = queE PE=3 SV=1

SEQ ID NO: 33084 - protein, 221 aa, Pseudoalteromonas aliena
  REGION 1..221: note = tr|A0A1Q2H2V8|A0A1Q2H2V8_9GAMM 7-carboxy-7-deazaguanine synthase OS=Pseudoalteromonas aliena OX=247523 GN=queE PE=3 SV=1
MYKINEVFETIQGEASFTGTPSIFLRLQGCPVGCSWCDTKQTWDVDNVYKVSLDETVEKKADSDHWANASAEQILALFQSRGYTAKHVVITGGEPCMFDLNPVCNLLHEHGFSTQIETSGTFEILAPEQTWVTVSPKINMRGGYEVLTSAMKRANEIKHPVAMQKHVEELEELFAKTGVNPKLVYLQPISQKVSATKLAIDTCIAKNWRLSIQVHKYLGIS

SEQ ID NO: 33085 - protein, 221 aa, unidentified
  source 1..221: note = Pseudoalteromonas amylolytica
  REGION 1..221: note = tr|A0A1S1MS07|A0A1S1MS07_9GAMM 7-carboxy-7-deazaguanine synthase OS=Pseudoalteromonas amylolytica OX=1859457 GN=queE PE=3 SV=1
MYKINEIFETIQGEASYTGVPSIFLRLQGCPVGCAWCDTKQTWEIDPTYKISLDGTVEKKTDSQWWAEANAEQIIELFQQRGYLAKHVVITGGEPCMFDLVPLCERLHQQGYSTQIETSGTFEIKVPEQTWVTVSPKINMRGGYEVLASAMQRADEIKHPVAMQKHVEELEALFEQTGVTPKLVYLQPISQKAKATKLAIDTCMKKNWRLSVQVHKYIGIN

SEQ ID NO: 33086 - protein, 221 aa, Pseudoalteromonas arctica
  REGION 1..221: note = tr|A0A290S1I5|A0A290S1I5_9GAMM 7-carboxy-7-deazaguanine synthase OS=Pseudoalteromonas arctica A 37-1-2 OX=1117313 GN=queE PE=3 SV=1
MYKINEVFETIQGEASFTGTPSIFLRLQGCPVGCSWCDTKQTWDVDNVYKVSLDETVEKKADSDHWANASAEQILALFQSRGYTAKHVVITGGEPCMFDLNPVCNLLHEHGFSTQIETSGTFEILAPEQTWVTVSPKINMRGGYEVLTSTMKRANEIKHPVAMQKHVEELEELFAKTGVNPKLVYLQPISQKVSATKLAIDTCIAKNWRLSIQVHKYLGIS

SEQ ID NO: 33087 - protein, 248 aa, Pseudoalteromonas atlantica
  REGION 1..248: note = tr|Q15RM0|Q15RM0_PSEA6 7-carboxy-7-deazaguanine synthase OS=Pseudoalteromonas atlantica (strain T6c / ATCC BAA-1087) OX=342610 GN=queE PE=3 SV=1
MLMLSYPVDKSQITLSKTTGKLLNTYKINEVFESLQGEGAHTGVPSIFIRLQGCPVGCPWCDTKHTWEIDQNLKVAAPVVMAQNEDTAQWFEHTPEQLLALFKQHEYTASNIILTGGEPCMYDLTDLSSVLIENGFSVQIETSGTYEILTHPDTWVTVSPKVNMPGKRDVLKSAMHRANEIKHPVAMEKHIEELEHVLTLLVGSDNPKPLIYLQPISQQKRATELCIKTCIARNWRLSLQTHKFIGIE

SEQ ID NO: 33088 - protein, 221 aa, Pseudoalteromonas atlantica
  REGION 1..221: note = tr|A0A510ZRR8|A0A510ZRR8_PSEAF 7-carboxy-7-deazaguanine synthase OS=Pseudoalteromonas atlantica OX=288 GN=queE PE=3 SV=1
MYKINEVFETIQGEASFTGTPSIFLRLQGCPVGCAWCDTKQTWEVDNVYKVSLDETVEKKADSDHWADASAEQVLELFKSRGYTAKHVVITGGEPCMYDLNPVCKLLHDNGFTTQIETSGTFEILAPEQTWVTVSPKINMRGGYEVLTSAMKRANEIKHPVAMQKHVDELEALFAKTGVNPKLVYLQPISQKVSATKLAIDTCIAKNWRLSVQVHKYLGIS

SEQ ID NO: 33089 - protein, 221 aa, Pseudoalteromonas byunsanensis
  REGION 1..221: note = tr|A0A1S1N4G3|A0A1S1N4G3_9GAMM 7-carboxy-7-deazaguanine synthase OS=Pseudoalteromonas byunsanensis OX=327939 GN=queE PE=3 SV=1
MYKINEIFETIQGEASYTGVPSIFLRLQGCPVGCAWCDTKQTWEVDSTYKISLDGTVEKKTDSQWWAEANAEQILELFQMRGYLAKHVVITGGEPCMFDLVPLCELLHQHGYSTQIETSGTFEIKVPEQTWVTVSPKINMRGGYEVLASAMQRANEIKHPVAMQKHVEELEALFEQTGVTPKLVYLQPISQKAKATKLAIDTCMKKNWRLSVQVHKYIGIN

SEQ ID NO: 33090 - protein, 225 aa, Pseudoalteromonas carrageenovora
  REGION 1..225: note = tr|A0A2K4X804|A0A2K4X804_PSEVC 7-carboxy-7-deazaguanine synthase OS=Pseudoalteromonas carrageenovora IAM 12662 OX=1314868 GN=ygcF PE=3 SV=1
MRSLLYKINEVFETIQGEASFTGTPSIFLRLQGCPVGCSWCDTKQTWDVDNVYKVSLDETVEKKADSDHWADASAEQVLELFKSRGYTAKHVVITGGEPCMFDLNPVCNLLHEQGFTTQIETSGTFEILAPEQTWVTVSPKINMRGGYEVLTSAMKRANEIKHPVAMQKHVEELEALFAKTGVNPKLVYLQPISQKVSATKLAIDTCIAKNWRLSIQVHKYLGIS

SEQ ID NO: 33091 - protein, 221 aa, Pseudoalteromonas citrea
  REGION 1..221: note = tr|U1KSL2|U1KSL2_9GAMM 7-carboxy-7-deazaguanine synthase OS=Pseudoalteromonas citrea DSM 8771 OX=1117314; GN = queE PE=3 SV=1
MYKINEVFETIQGEASFTGVPSIFLRLQGCPVGCSWCDTKQTWDLNTEYLVSLDKTVEKKADSELWTEATSEQIVTLFKDKEYLAKHVVITGGEPCMYDLIPLCELLHDEGFSTQIETSGTFEIKAPAETWVTVSPKINMRGGYEVLTSAMKRADEIKHPVAMQKHVDELEALFTETGVTPRLVYLQPISQKAKATKLAIDTCMKKNWRLSVQVHKYIGIN

SEQ ID NO: 33092 - protein, 221 aa, Pseudoalteromonas denitrificans
  REGION 1..221: note = tr|A0A1I1IV26|A0A1I1IV26_9GAMM 7-carboxy-7-deazaguanine synthase OS=Pseudoalteromonas denitrificans DSM 6059 OX=1123010 GN=queE PE=3 SV=1
MYKINEIFQTIQGEASFTGTPSIFIRLQGCPVGCSWCDTKQTWEASDVYKVDLQKTVEKKADSELWADSSAQQVIDLIESKGYQAKHIVITGGEPCMFDLIPLCDLLHGNGFSTQLETSGTFEIKVPEKTWVTVSPKINMRGGYPVLKQAMLRANEIKHPIAMMKHVEELEALLTDMDIQPELIYLQPISQKAKATRLAVDICIAKNWRLSVQVHKYLGIN

SEQ ID NO: 33093 - protein, 221 aa, Pseudoalteromonas distincta; identical to SEQ ID NO: 33086
  REGION 1..221: note = tr|F3BKC1|F3BKC1_9GAMM 7-carboxy-7-deazaguanine synthase OS=Pseudoalteromonas distincta OX=77608 GN=queE; PE = 3 SV=1

SEQ ID NO: 33094 - protein, 221 aa, Pseudoalteromonas distincta
  REGION 1..221: note = tr|A0A5B0UJY6|A0A5B0UJY6_9GAMM 7-carboxy-7-deazaguanine synthase OS=Pseudoalteromonas distincta OX=77608 GN=queE PE=3 SV=1
MYKINEVFETIQGEASFTGTPSIFLRLQGCPVGCSWCDTKQTWDVDNVYKVSLDETVGKKADSDHWANASAEQILALFQSRGYTAKHVVITGGEPCMFDLNPVCNLLHEHGFSTQIETSGTFEILAPEQTWVTVSPKINMRGGYEVLTSAMKRANEIKHPVAMQKHVEELEELFAKTGVNPKLVYLQPISQKVSATKLAIDTCIAKNWRLSIQVHKYLGIS

SEQ ID NO: 33095 - protein, 221 aa, Pseudoalteromonas elyakovii; identical to SEQ ID NO: 33086
  REGION 1..221: note = tr|A0A558I5Y2|A0A558I5Y2_9GAMM 7-carboxy-7-deazaguanine synthase OS=Pseudoalteromonas elyakovii OX=81037 GN=queE PE=3 SV=1

SEQ ID NO: 33096 - protein, 221 aa, Pseudoalteromonas espejiana
  REGION 1..221: note = tr|A0A510XWM6|A0A510XWM6_9GAMM 7-carboxy-7-deazaguanine synthase OS=Pseudoalteromonas espejiana OX=28107 GN=queE PE=3 SV=1
MYKINEVFETIQGEASFTGTPSIFLRLQGCPVGCAWCDTKQTWEVDNVYKVSLDETVEKKADSDHWADASAEQVLELFKSRGYNAKHVVITGGEPCMFDLNPVCNLLHDNGFTTQIETSGTFEILAPEQTWVTVSPKINMRGGYEVLTSAMKRANEIKHPIAMQKHVEELEALFAKTGVNPKLVYLQPISQKVSATKLAIDTCIAKNWRLSVQVHKYLGIS

SEQ ID NO: 33097 - protein, 221 aa, unidentified; identical to SEQ ID NO: 33086
  source 1..221: note = Pseudoalteromonas fuliginea
  REGION 1..221: note = tr|A0A063KLM4|A0A063KLM4_9GAMM 7-carboxy-7-deazaguanine synthase OS=Pseudoalteromonas fuliginea OX=1872678 GN=queE PE=3 SV=1

SEQ ID NO: 33098 - protein, 215 aa, Pseudoalteromonas haloplanktis
  REGION 1..215: note = tr|Q3IKE7|Q3IKE7_PSEHT 7-carboxy-7-deazaguanine synthase OS=Pseudoalteromonas haloplanktis (strain TAC 125) OX=326442 GN=queC PE=3 SV=1
MFETIQGEASYTGTPSIFLRLQGCPVGCSWCDTKQTWDVDNVYKVSLDETVEKKADSDHWAQASAANILALFQSRGYTAKHVVITGGEPCMYDLNPVCNLLHENGFSTQIETSGTFEILAPAQTWVTVSPKINMRGGFEVLTTAMQRANEIKHPVAMQKHVEELEELFVKTGVNPKLVYLQPISQKESATKLAIKTCIAKNWRLSIQVHKYLGIS

SEQ ID NO: 33099 - protein, 221 aa, Pseudoalteromonas issachenkonii
  REGION 1..221: note = tr|A0A290SG56|A0A290SG56_9GAMM 7-carboxy-7-deazaguanine synthase OS=Pseudoalteromonas issachenkonii OX=152297 GN=queE PE=3 SV=1
MYKINEVFETIQGEASFTGTPSIFLRLQGCPVGCSWCDTKQTWDVDNVYKVSLDDTVEKKADSDHWAEASAAQVLELFKSRGYTAKHVVITGGEPCMYDLNPVCNLLHDHGFSTQIETSGTFEILAPAQTWVTVSPKINMRGGYKVLSSAMQRADEIKHPVAMQKHVEELEELFVATGVNPKLVYLQPISQKTSATKLAIDTCIAKNWRLSIQVHKYLGIS

SEQ ID NO: 33100 - protein, 221 aa, Pseudoalteromonas lipolytica
  REGION 1..221: note = tr|A0A0P7ECF5|A0A0P7ECF5_9GAMM 7-carboxy-7-deazaguanine synthase OS=Pseudoalteromonas lipolytica OX=570156 GN=queE PE=3 SV=1
MYKINEVFETIQGEASFTGTPSIFLRLQGCPVGCAWCDTKQTWDVDNVYKVSLDDTVEKKADSDHWAEATAEQVLALFKKRGYNAKHVVITGGEPCMYDLNPVCELLHANGYSTQIETSGTFEILVPEQTWVTVSPKINMRGGYKVLRSAMQRADEIKHPVAMQKHVEELEDLFLKTGVNPRLVYLQPISQKISATKLAIETCIAKNWRLSVQVHKYLGIS

SEQ ID NO: 33101 - protein, 221 aa, Pseudoalteromonas lipolytica
  REGION 1..221: note = tr|Z5XN01|Z5XN01_9GAMM 7-carboxy-7-deazaguanine synthase OS=Pseudoalteromonas lipolytica SCSIO 04301; OX = 1452721 GN=queE PE=3 SV=1
MYKINEVFETIQGEASFTGTPSIFLRLQGCPVGCAWCDTKQTWDVDNVYRVSLDDTVEKKADSDHWAEASAEQILALFKERGYNAKHVVITGGEPCMYDLNPVCELLHANGYSTQIETSGTFEILVPEQTWVTVSPKINMRGGYKVLRSAMQRADEIKHPVAMQKHVEELEDLFLKTGVNPRLVYLQPISQKTSATKLAIETCIAKNWRLSVQVHKYLGIS

SEQ ID NO: 33102 - protein, 221 aa, Pseudoalteromonas luteoviolacea
  REGION 1..221: note = tr|A0A161ZH26|A0A161ZH26_9GAMM 7-carboxy-7-deazaguanine synthase OS=Pseudoalteromonas luteoviolacea DSM 6061 OX=1365250 GN=queE PE=3 SV=1
MYKINEVFETIQGEASFTGTPSIFVRLQGCPVGCAWCDTKQTWDVNPTYLVSLDKTVEKKSDSEWWANATAEEIVELLNVRGYTAKHIVITGGEPCMYDLTSLCETLHQAGYSTQVETSGTFEILVPDETWVTVSPKINMRGGYDVLTSAMQRADEIKHPVAMQKHIDELEALFDQTGVRPKLIYLQPISQKAKATKLAIDTCVKKNWRLSIQVHKYIGIN

SEQ ID NO: 33103 - protein, 221 aa, Pseudoalteromonas luteoviolacea
  REGION 1..221: note = tr|A0A0C1MUE5|A0A0C1MUE5_9GAMM 7-carboxy-7-deazaguanine synthase OS=Pseudoalteromonas luteoviolacea OX=43657 GN=queE PE=3 SV=1
MYKINEVFETIQGEASFTGTPSIFVRLQGCPVGCAWCDTKQTWDVNPTYLVSLDKTVEKKADSEWWANATPQEIIAIFEARNYTAKHIVITGGEPCMYDLNDLCNTLHQAGYTTQVETSGTFEVLVPKETWVTVSPKINMRGGYDVLTSAMQRADEIKHPVAMQKHIDELEALFEQTGVRPKLIYLQPISQKAKATKLAIDTCVKKNWRLSIQVHKYIGIN

SEQ ID NO: 33104 - protein, 221 aa, Pseudoalteromonas marina; identical to SEQ ID NO: 29390
  REGION 1..221: note = tr|U1KVJ9|U1KVJ9_9GAMM 7-carboxy-7-deazaguanine synthase OS=Pseudoalteromonas marina DSM 17587 OX=1117316; GN = queE PE=3 SV=1

SEQ ID NO: 33105 - protein, 221 aa, unidentified
  source 1..221: note = Pseudoalteromonas neustonica
  REGION 1..221: note = tr|A0A558IJD2|A0A558IJD2_9GAMM 7-carboxy-7-deazaguanine synthase OS=Pseudoalteromonas neustonica OX=1840331 GN=queE PE=3 SV=1
MYKINEIFETIQGEASFTGTPSIFLRLQGCPVGCAWCDTKQTWEVDNVYKVSLDDTVEKKADSDHWADASAEQIFNLFVDRAYRAKHVVITGGEPCMYDLNPVCELLHANGYSTQIETSGTFEILAPAQTWVTVSPKINMRGGYDVLTSAMQRADEIKHPIAMQKHVVELEELFAKTGVTPKLVYLQPISQKVSATKLAIETCIEKNWRLSVQVHKYLGIN

SEQ ID NO: 33106 - protein, 221 aa, Pseudoalteromonas nigrifaciens
  REGION 1..221: note = tr|A0A379HC71|A0A379HC71_9GAMM 7-carboxy-7-deazaguanine synthase OS=Pseudoalteromonas nigrifaciens OX=28109 GN=queE PE=3 SV=1
MYKINEVFETIQGEASYTGTPSIFLRLQGCPVGCSWCDTKQTWDVDNVYKVSLDETVEKKADSDHWAQASAANILALFQSRGYTAKHVVITGGEPCMYDLNPVCNLLHENGFSTQIETSGTFEILAPAQTWVTVSPKINMRGGFEVLTTAMQRANEIKHPVAMQKHVEELEELFVKTGVNPKLVYLQPISQKESATKLAIKTCIAKNWRLSIQVHKYLGIN

SEQ ID NO: 33107 - protein, 221 aa, Pseudoalteromonas peptidolytica
  REGION 1..221: note = tr|A0A510UEP8|A0A510UEP8_9GAMM 7-carboxy-7-deazaguanine synthase OS=Pseudoalteromonas peptidolytica OX=61150 GN=queE PE=3 SV=1
MYKVNEIFETIQGEASFTGTPSIFLRLQGCPVGCSWCDTKQTWETNDTFIVSLSETVEKKADSEFWANASADDILATFESRGYQAKHVVITGGEPCMFDLKPLCTLLHDKGYSTQIETSGTFEILAPQETWVTVSPKINMRGGYKVLPSAMARADEIKHPVAMQKHIEELERLFKDTNIEPKLVYLQPISQKAKATKLAIDNCKAKNWRLSVQVHKYLGIN

SEQ ID NO: 33108 - protein, 221 aa, Pseudoalteromonas phenolica
  REGION 1..221: note = tr|A0A4Q7IH37|A0A4Q7IH37_9GAMM 7-carboxy-7-deazaguanine synthase OS=Pseudoalteromonas phenolica OX=161398 GN=queE PE=3 SV=1
MYKVNEIFETIQGEASFTGVPSIFLRLQGCPVGCAWCDTKQTWETNDIYLVTLGETVEKKADSEKWANASIDDIINLFKERGYLAKHVVITGGEPCMYDLVPLCEQLHEAGYTTQIETSGTFEILAPESTWVTVSPKINMRGGYDVLTSAMQRANEIKHPIAMQKHVDELEALFEQTGVRPELIYLQPISQKAKATKLAIETCLKKNWRLSVQVHKYIGIN

SEQ ID NO: 33109 - protein, 221 aa, Pseudoalteromonas phenolica
  REGION 1..221: note = tr|A0A0S2K0M6|A0A0S2K0M6_9GAMM 7-carboxy-7-deazaguanine synthase OS=Pseudoalteromonas phenolica OX=161398 GN=queE PE=3 SV=1
MYKVNEIFETIQGEASFTGVPSIFLRLQGCPVGCAWCDTKQTWETNGTYLVTLGETVEKKADSEKWANASIDDIINLFKERGYLAKHVVITGGEPCMYDLVPLCEQLHVAGYTTQIETSGTFEILAPESTWVTVSPKINMRGGYDVLTSAMQRANEIKHPIAMQKHVDELEALFEQTGVRPELIYLQPISQKAKATKLAIETCLKKNWRLSVQVHKYIGIN

SEQ ID NO: 33110 - protein, 221 aa, unidentified
  source 1..221: note = Pseudoalteromonas piratica
  REGION 1..221: note = tr|A0A0A7EFB9|A0A0A7EFB9_9GAMM 7-carboxy-7-deazaguanine synthase OS=Pseudoalteromonas piratica OX=1348114 GN=queE PE=3 SV=1
MYKINEVFETIQGEASFTGCPSIFIRLQGCPVGCAWCDTKQTWHTDDTYLVDLADTVEKKADSDYFANCNAEQILALIRDKKYQAKHIVITGGEPCMYDLNPLCELLHENGFTTQIETSGTFEILAPSETWVTVSPKINMRGGYEVLKSAIHRANEIKHPVAMMRHVEELEDLFEAAGHTPALVYLQPISQKAKATRLAIEVCKAKNWRLSVQVHKYIGIA

SEQ ID NO: 33111 - protein, 221 aa, Pseudoalteromonas piscicida
  REGION 1..221: note = tr|A0A1Z3NIK3|A0A1Z3NIK3_PSEO7 7-carboxy-7-deazaguanine synthase OS=Pseudoalteromonas piscicida OX=43662 GN=queE PE=3 SV=1
MYKVNEIFETIQGEASFTGTPSIFLRLQGCPVGCAWCDTKQTWETNDTFIVSLDNTVEKKADSEWWANASADEILAIFESRGYQAKHVVITGGEPCMFDLRPLCELLHSKGYSTQIETSGTFEILAPAETWVTVSPKINMRGGYKVLPSAMARADEIKHPVAMQKHIEELEALFAQTGVEPKLVYLQPISQKAKATKLAIDNCKAKNWRLSVQVHKYLGIN

SEQ ID NO: 33112 - protein, 221 aa, Pseudoalteromonas piscicida
  REGION 1..221: note = tr|A0A2A5JP63|A0A2A5JP63_PSEO7 7-carboxy-7-deazaguanine synthase OS=Pseudoalteromonas piscicida OX=43662 GN=queE PE=3 SV=1
MYKVNEIFETIQGEASFTGTPSIFLRLQGCPVGCAWCDTKQTWETKDTFIVSLDNTVEKKADSEWWANASAEEILAIFEARGYQAKHVVITGGEPCMFDLVPLCNLLHAKGFSTQIETSGTFEILAPKETWVTVSPKINMRGGYKVLPSAMARADEIKHPVAMQKHIEELEALFAETGVQPKLVYLQPISQKAKATKLAIDNCKAKNWRLSVQVHKYLGIN

SEQ ID NO: 33113 - protein, 221 aa, unidentified
  source 1..221: note = Pseudoalteromonas porphyrae
  REGION 1..221: note = tr|A0A0N0LYU3|A0A0N0LYU3_9GAMM 7-carboxy-7-deazaguanine synthase OS=Pseudoalteromonas porphyrae OX=187330 GN=queE PE=3 SV=1
MYKINEIFETIQGEASFTGTPSIFLRLQGCPVGCAWCDTKQTWEVDNVFKVSLDETVEKKADSDHWADASAEQILALFAARGYRAKHVVITGGEPCMYDLNPVCNLLHENGFSTQIETSGTFEILAPAQTWVTVSPKINMRGGYEVLSAAMKRADEIKHPIAMQKHVEELEELFAKTGVSPKLVYLQPISQKVSATKLAIEICIEKNWRLSVQVHKYLGIS

SEQ ID NO: 33114 - protein, 221 aa, unidentified
  source 1..221: note = Pseudoalteromonas profundi
  REGION 1..221: note = tr|A0A3A3EJK4|A0A3A3EJK4_9GAMM 7-carboxy-7-deazaguanine synthase OS=Pseudoalteromonas profundi OX=1774956 GN=queE PE=3 SV=1
MYKINEVFETIQGEASFTGTPSIFLRLQGCPVGCAWCDTKQTWDVDNVYKVSLDETVEKKADSDHWAEATAEQVLALFKERGYNAKHVVITGGEPCMYDLNPVCELLHANGYSTQIETSGTFEILVPEQTWVTVSPKINMRGGYNVLRSAMQRADEIKHPVAMQKHVEELEDLFLKTGVNPRLVYLQPISQKTSATKLAIETCIAKNWRLSVQVHKYLGIS

SEQ ID NO: 33115 - protein, 221 aa, Pseudoalteromonas rubra
  REGION 1..221: note = tr|A0A4Q7E488|A0A4Q7E488_9GAMM 7-carboxy-7-deazaguanine synthase OS=Pseudoalteromonas rubra OX=43658 GN=queE PE=3 SV=1
MYKINEVFETIQGEASHTGVPSIFVRLQGCPVGCAWCDTKQTWEVDPVYLVSLEQTVEKKADSDYWANATPEQLLALFEERGYTAKHVVITGGEPCMYDLNPLCDALHANGYHTQVETSGTFEILVPKETWVTVSPKINMRGGYKVLTSAMQRADEIKHPVAMEKHVEELEALFEQTGVQPKLVYLQPISQKAKATKLAIDTCKQKNWRLSVQVHKYIGIS

SEQ ID NO: 33116 - protein, 215 aa, Pseudoalteromonas rubra
  REGION 1..215: note = tr|U1KLH0|U1KLH0_9GAMM 7-carboxy-7-deazaguanine synthase OS=Pseudoalteromonas rubra DSM 6842 OX=1117318; GN = queE PE=3 SV=1
MFETIQGEASHTGVPSIFVRLQGCPVGCAWCDTKQTWEVDPVYLVSLDQTVEKKADSDFWANATPEQLLALFEARGYTAKHVVITGGEPCMYDLNPLCDKLHAEGYQTQVETSGTFEILVPAQTWVTVSPKINMRGGYKVLASAMQRADEIKHPVAMEKHVEELEALFEETGVQPKLVYLQPISQKAKATKLAIDTCKQKNWRLSVQVHKYIGIS

SEQ ID NO: 33117 - protein, 221 aa, Pseudoalteromonas ruthenica
  REGION 1..221: note = tr|A0A0F4PT27|A0A0F4PT27_9GAMM 7-carboxy-7-deazaguanine synthase OS=Pseudoalteromonas ruthenica OX=151081 GN=queE PE=3 SV=1
MYQINEIFETIQGEASYTGTPSIFVRLQGCPVGCAWCDTKQTWDASDSYVVSLEQTVEKKADSQHWAHASAEDVLALFQQRGYLAKHVVITGGEPCLFDLNPLCELLHEHGYSTQIETSGTFAIKAPAQTWVTVSPKINMRGGYDVLASAMQRADEIKHPVAMQKHVDELEALFAQTGVAPKLVYLQPISQKAKATKLAIDTCIQKNWRLSVQVHKYIGIN

SEQ ID NO: 33118 - protein, 221 aa, Pseudoalteromonas sp.; identical to SEQ ID NO: 33117
  REGION 1..221: note = tr|A0A4Q6YCR5|A0A4Q6YCR5_9GAMM 7-carboxy-7-deazaguanine synthase OS=Pseudoalteromonas sp. CO325X OX=1777262 GN=queE PE=3 SV=1

SEQ ID NO: 33119 - protein, 221 aa, Pseudoalteromonas sp.
  REGION 1..221: note = tr|A0A4S1F6F4|A0A4S1F6F4_9GAMM 7-carboxy-7-deazaguanine synthase OS=Pseudoalteromonas sp. MEBiC 03607 OX=2563601 GN=queE PE=3 SV=1
MYKINEVFETIQGEASFTGTPSIFLRLQGCPVGCAWCDTKQTWDVDNVYKVSLDDTVEKKADSDHWAEASAEQVLALFKERGYNAKHVVITGGEPCMYDLNPVCELLHANGYSTQIETSGTFEILAPEQTWVTVSPKINMRGGYKVLRSAMQRADEIKHPVAMQKHVEELEDLFLKTGVNPRLVYLQPISQKQSATKLAIETCIEKNWRLSVQVHKYLGIS

SEQ ID NO: 33120 - protein, 221 aa, Pseudoalteromonas spongiae
  REGION 1..221: note = tr|A0A290T1Z3|A0A290T1Z3_9GAMM 7-carboxy-7-deazaguanine synthase OS=Pseudoalteromonas spongiae UST010723-006 OX=1117319 GN=queE PE=3 SV=1
MYKINEVFETIQGEASYTGCPSIFIRLQGCPVGCAWCDTKQTWHTDDTYLVDLSDTVEKKADSDYFANCTAEQILALIRDKQYQAKHIVITGGEPCMYDLNPLCDLLHENGFSTQIETSGTFDILAPATTWVTVSPKINMRGGYKVLKSAMQRANEIKHPVAMMRHVEELEELFAEAGHTPELVYLQPISQKAKATRLAIEVCKAKNWRLSVQVHKYIGIA

SEQ ID NO: 33121 - protein, 221 aa, Pseudoalteromonas tetraodonis
  REGION 1..221: note = tr|A0A290TJL6|A0A290TJL6_9GAMM 7-carboxy-7-deazaguanine synthase OS=Pseudoalteromonas tetraodonis OX=43659 GN=queE PE=3 SV=1
MYKINEVFETIQGEASFTGTPSIFLRLQGCPVGCSWCDTKQTWDVDNVYKVSLDDTVEKKADSDHWAEASASQVLELFKSRGYTAKHVVITGGEPCMYDLNPVCNLLHDHGFSTQIETSGTFEILAPAQTWVTVSPKINMRGGYKVLSSAMQRADEIKHPVAMQKHVEELEELFTATGVNPKLVYLQPISQKTSATKLAIDTCIVKNWRLSIQVHKYLGIS

SEQ ID NO: 33122 - protein, 221 aa, Pseudoalteromonas tetraodonis
  REGION 1..221: note = tr|A0A1E3WXZ5|A0A1E3WXZ5_9GAMM 7-carboxy-7-deazaguanine synthase OS=Pseudoalteromonas tetraodonis OX=43659 GN=queE PE=3 SV=1
MYKINEVFETIQGEASFTGTPSIFLRLQGCPVGCSWCDTKQTWDVDNVYKVSLDDTVEKKADSDHWAEASAAQVLELFKSRGYTAKHVVITGGEPCMYDLNPVCNLLHDHGFSTQIETSGTFEILAPAQTWVTVSPKINMRGGYKVLSSAMQRADEIKHPVAMQKHVEELEELFTATGVNPKLVYLQPISQKASATKLAIDTCIAKNWRLSIQVHKYLGIS

SEQ ID NO: 33123 - protein, 221 aa, Pseudoalteromonas translucida
  REGION 1..221: note = tr|A0A0U2WGZ4|A0A0U2WGZ4_9GAMM 7-carboxy-7-deazaguanine synthase OS=Pseudoalteromonas translucida KMM 520 OX=1315283 GN=queE PE=3 SV=1
MYKINEVFETIQGEASFTGTPSIFLRLQGCPVGCSWCDTKQTWDVDNVYKVSLDETVEKKADSDHWAQASAANILALFQSRGYTAKHVVITGGEPCMYDLNPVCNLLHENGFSTQIETSGTFEILAPAQTWVTVSPKINMRGGFEVLTTAMQRADEIKHPIAMQKHVEELEELFAKTGVNPKLVYLQPISQKESATKLAIKTCIAKNWRLSIQVHKYLGIS

SEQ ID NO: 33124 - protein, 221 aa, Pseudoalteromonas tunicata
  REGION 1..221: note = tr|A4CBB3|A4CBB3_9GAMM 7-carboxy-7-deazaguanine synthase OS=Pseudoalteromonas tunicata D2 OX=87626 GN=queE; PE = 3 SV=1
MYKINEIFETIQGEASFTGMPSIFVRLQGCPVGCAWCDTKQTWETSDTYKVDLQKTVEKKADSELWADVTVAQLLALFVEKGYQAKHIVITGGEPCMYDLVPLCEGLHAAGYGTQVETSGTFEIKVPAETWVTVSPKINMRGGYAVLKSAMQRANEIKHPIAMQRHVDELEQLMAECGVTPKLIYLQPISQKAKATQLAIEVCKAKNWRLSVQVHKYLGIN

SEQ ID NO: 33125 - protein, 221 aa, Pseudoalteromonas ulvae
  REGION 1..221: note = tr|A0A244CVE6|A0A244CVE6_9GAMM 7-carboxy-7-deazaguanine synthase OS=Pseudoalteromonas ulvae OX=107327 GN=queE PE=3 SV=1
MYKINEIFETIQGEASFTGVPAIFVRLQGCPVGCAWCDTKQTWETSDTYKVDLEKTVEKKADSELWADVSVAQLLAIFTEKGYRAKHIVITGGEPCMYDLNPLCEGLHAAGYDTQVETSGTFEIKVPAKTWVTVSPKINMRGGYPVLKSAMERANEIKHPIAMMKHVEELEQLIEACGVSPKLIYLQPISQKAKATQLAIEVCTQKNWRLSVQVHKYLGIN

SEQ ID NO: 33126 - protein, 254 aa, unidentified
  source 1..254: note = Pseudoarcobacter caeni
  REGION 1..254: note = tr|A0A363D0Z1|A0A363D0Z1_9PROT 7-carboxy-7-deazaguanine synthase OS=Pseudoarcobacter caeni OX=1912877 GN=queE PE=3 SV=1
MLEINEIFGPTIQGEGKLVGTPSIFIRFGKCNFKCEGFSVEYETPSGIKKCACDSFYAVDMEFRDTWTKYKSYEEIVSKVDTLLSKYPNNYKIDIVITGGEPLLYWNKEEFQKLLKHYINDGHKVTIETNASLNLNFEFDYQKYILFSMSVKLSNSLEPFKKRINKETIAKILTNTSESYLKFVIGKDFLQEANSEIQEILKDIPKCEVYLMPLGDTANEINKNCEDVINMAIENGFKYCDRLHIRVWDNKRGV

SEQ ID NO: 33127 - protein, 204 aa, unidentified
  source 1..204: note = Pseudobacter ginsenosidimutans
  REGION 1..204: note = tr|A0A4Q7MML9|A0A4Q7MML9_9BACT 7-carboxy-7-deazaguanine synthase OS=Pseudobacter ginsenosidimutans OX=661488 GN=queE PE=3 SV=1
MSTIVTTQLPVMEYFYTLQGEGYHQGRAAYFIRLGGCDVGCVWCDVKESWDASKHPLLSLETIVEGAAQFPGRIAIITGGEPLMHDLGPLTDALHDAGFQTHIETSGAHPLSGEWDWICLSPKKFKTPLPEILPLANELKVVVYNKSDFEWAEKYAAQVGPNCKLYLQPEWSKSQQVTPLIIDYIKDHPQWEFSLQLHKYIHVP

SEQ ID NO: 33128 - protein, 220 aa, unidentified
  source 1..220: note = Pseudobacteriovorax antillogorgiicola
  REGION 1..220: note = tr|A0A1Y6B6E8|A0A1Y6B6E8_9PROT 7-carboxy-7-deazaguanine synthase OS=Pseudobacteriovorax antillogorgiicola OX=1513793 GN=queE PE=3 SV=1
MNHTVESQSLVITEIYRSVQGESSYAGLPCTFVRLTGCPLRCRWCDTVYGFEGGQERSIGELVDDIKALGVPLVEITGGEPLAQKNTVGLMKALIEAGFQVICETGGSEPVEGVPPEVTLIMDLKCPGSGMADRNLWENLNHLKPSDEIKFVIANRDDFDWACHVISRHDLTSRFHCLMSVAFGLLAPAELVDWILDADINVRLNLQQHKYIWSPKKKGV

SEQ ID NO: 33129 - protein, 209 aa, unidentified
  source 1..209: note = Pseudobacteroides cellulosolvens
  REGION 1..209: note = tr|A0A0L6JN83|A0A0L6JN83_9FIRM 7-carboxy-7-deazaguanine synthase OS=Pseudobacteroides cellulosolvens ATCC 35603 = DSM 2933 OX=398512 GN=queE; PE = 3 SV=1
MKVNEIFLSIQGESIYAGFPTVFVRFSGCNLRCSYCDTAYAYEDGTDMEPEEVFEEIKKHYYKRVCVTGGEPLLQGDLEKLLVLLEDYSVTIETNGSMDIGLFKLDLKHSYVMDVKCPSSGASKEMNLLNFGLLSDRDEIKFVIGGKEDYEWAKAIIKEYYRKGIITFSPVFGKIEYCDLVDWMLRDKLNARFQIQLHKVIWGVDKRGV

SEQ ID NO: 33130 - protein, 222 aa, Pseudobutyrivibrio ruminis
  REGION 1..222: note = tr|A0A285RDV1|A0A285RDV1_9FIRM 7-carboxy-7-deazaguanine synthase OS=Pseudobutyrivibrio ruminis DSM 9787 OX=1123011 GN=queE PE=3 SV=1
MSVFNVVEKFVSINGEGQHAGELAVFIRLRGCNLSCSYCDTRWACTADAPAEEMTETQIVDYVISTGVKRVTLTGGEPLLSPHVIDLLKAFAANPDIFVEIETNGSVDIHPFACIDNPPAFTLDYKLAGSGMEDKMLLSNFDVLTAKDTVKFVCSDVSELDKVCKIVDDYRISDKCTCLISPVFGRIEPADMVDYLIDHKRNDIRLQLQLHKFIWDPNKRGV

SEQ ID NO: 33131 - protein, 222 aa, Pseudobutyrivibrio ruminis
  REGION 1..222: note = tr|A0A2G3DYJ7|A0A2G3DYJ7_9FIRM 7-carboxy-7-deazaguanine synthase OS=Pseudobutyrivibrio ruminis OX=46206 GN=queE PE=3 SV=1
MAVFNVVEKFVSINGEGQHAGELAVFIRLRGCNLSCSYCDTRWACTDEADAEAMSEDEIISYVKSTGVRRVTLTGGEPLLAEDIRVLLEAFSSEKNILVEIETNGSVFVGDFAKIDNPPAFTLDYKLAGSGMEDKMDLSNFKYLQKKDTVKFVCSNVSELDKVCEIVDEFSLSEKCTVLISPVFGRIEPADMVDYLIEHKRNDIRLQLQLHKFIWDPNKRGV

SEQ ID NO: 33132 - protein, 222 aa, Pseudobutyrivibrio sp.
  REGION 1..222: note = tr|A0A1I5D4C5|A0A1I5D4C5_9FIRM 7-carboxy-7-deazaguanine synthase OS=Pseudobutyrivibrio sp. JW11 OX=1855302 GN=queE PE=3 SV=1
MSVFNVVEKFVSINGEGQHAGELAVFIRLRGCNLSCSYCDTRWACTADAPAEEMTETQIVDYVISTGVKRVTLTGGEPLLSPHVIDLLKAFAENPDIFVEIETNGSVDIHPFACIDNPPAFTLDYKLAGSGMEDKMLLSNFDVLTAKDTVKFVCSDVSELDKVCKIVDDYRISDKCTCLISPVFGRIEPADMVDYLIDHKRNDIRLQLQLHKFIWDPNKRGV

SEQ ID NO: 33133 - protein, 222 aa, Pseudobutyrivibrio sp.
  REGION 1..222: note = tr|A0A1H3ZWZ0|A0A1H3ZWZ0_9FIRM 7-carboxy-7-deazaguanine synthase OS=Pseudobutyrivibrio sp. ACV-2 OX=1520801 GN=queE PE=3 SV=1
MAVFYVVEKFVSINGEGQHAGELAVFIRLRGCNLNCSYCDTRWAGSYDAPAEAMTEEEIIEYIKSTGVKRVTITGGEPLKARDIKDLLRALAAEHKLKVEIETNGSVSILEYAAIHNAPAFTLDYKLPGSGMEDKMDLSNFTFLQPKDTVKFVVSEVSELDRVCSLVDTYGLSDKCTVLISPVFGRIEPADMVNYLIEHKRNDIRLQLQLHKFIWDPNKRGV

SEQ ID NO: 33134 - protein, 222 aa, Pseudobutyrivibrio xylanivorans
  REGION 1..222: note = tr|A0A1G5S2C1|A0A1G5S2C1_PSEXY 7-carboxy-7-deazaguanine synthase OS=Pseudobutyrivibrio xylanivorans OX=185007 GN=queE PE=3 SV=1
MSVFFVVEKFVSINGEGQHAGELAVFIRLRGCNLACSYCDTRWACSYEAPAEQMTETEIIDYVKSTGINRVTLTGGEPLKARDIKDLLRAFAAEPELKVEIETNGSVNIVPFAAIPNAPAFTLDYKLAGSGMEDKMDLSNFAFLQPKDTVKFVCSDVSELDKVCELVDTYGLAMKCTVLISPVFGRIDPADMVNYLIEHKRNDIRLQLQLHKFIWDPDKRGV

SEQ ID NO: 33135 - protein, 222 aa, Pseudobutyrivibrio xylanivorans
  REGION 1..222: note = tr|A0A1M6FNF6|A0A1M6FNF6_PSEXY 7-carboxy-7-deazaguanine synthase OS=Pseudobutyrivibrio xylanivorans DSM 14809 OX=1123012 GN=queE PE=3 SV=1
MATYFVVEKFVSINGEGQHAGELAVFIRLRGCNLACSYCDTRWACSYEAPAEQMTETEIIDYVKSTGINRVTLTGGEPLKARDIKDLLRAFAAEPDIKVEIETNGSVNIVPFAAIPNAPAFTLDYKLAGSGMEDKMDLSNFAFLQPKDTVKFVCSDVSELDKVCELVDTYGLAMKCTVLISPVFGRIDPADMVDYLIKHKRNDIRLQLQLHKFIWDPEKRGV

SEQ ID NO: 33136 - protein, 223 aa, unidentified
  source 1..223: note = Pseudocitrobacter faecalis
  REGION 1..223: note = tr|A0A366FD55|A0A366FD55_9ENTR 7-carboxy-7-deazaguanine synthase OS=Pseudocitrobacter faecalis OX=1398493 GN=queE PE=3 SV=1
MQYPINEMFQTLQGEGYFTGVPAIFIRLQGCPVGCAWCDTKHTWEKLSDREVSLFSILAKTKESDKWGAAGEDDLLTAITRQGWTAKHVVITGGEPCIHDLIPLTTLLEQHGYSCQIETSGTHEVRCTHTTWVTVSPKVNMRGGYDVLSQALERADEIKHPVGRVRDIEALDELLETLTDDKQRVIALQPISQKEDATRLCIDTCIARNWRLSMQTHKYLNIA

SEQ ID NO: 33137 - protein, 223 aa, unidentified
  source 1..223: note = Pseudocitrobacter sp.
  REGION 1..223: note = tr|A0A5B0KCU5|A0A5B0KCU5_9ENTR 7-carboxy-7-deazaguanine synthase OS=Pseudocitrobacter sp. 73 OX=2605731 GN=queE PE=3 SV=1
MQYPINEMFQTLQGEGYFTGVPAIFIRLQGCPVGCAWCDTKHTWEKLSDREVSLFSILAKTKESDKWGAAGEDDLLTAIARQGWTAKHVVITGGEPCIHDLTPLTTLLEQNGYSCQIETSGTHEVRCTHTTWVTVSPKVNMRGGYDVLSQALERADEIKHPVGRVRDIEALDELLETLTDDKQRVIALQPISQKEDATRLCIDTCIARNWRLSMQTHKYLNIA

SEQ ID NO: 33138 - protein, 227 aa, unidentified
  source 1..227: note = Pseudodesulfovibrio hydrargyri
  REGION 1..227: note = tr|A0A1J5MYJ6|A0A1J5MYJ6_9DELT 7-carboxy-7-deazaguanine synthase OS=Pseudodesulfovibrio hydrargyri OX=2125990 GN=queE PE=4 SV=1
MSEPTGVWSYVRGFENMSLCDWPGRTSCIIFLGGCNLRCPTCHNFQLAWDMQSLPVLDPLRVKAYLRDRAGWLDGVTISGGEPTTVPGVGELAFEIKKTGMPVKMDSNGMRPEVVAELLEEKLVDTFAVDVKGPYAKYPALTGKAVSEIAARANMARIFAMAEAKPGAFYFRITQVPGLTQADIDVARSYLPPNHELKIQKYVPPRRTPEHAKPNHEERRPAGNLVD

SEQ ID NO: 33139 - protein, 193 aa, unidentified
  source 1..193: note = Pseudoflavitalea sp.
  REGION 1..193: note = tr|A0A3B7MV94|A0A3B7MV94_9BACT 7-carboxy-7-deazaguanine synthase OS=Pseudoflavitalea sp. 5GH32-13 OX=2315862 GN=queE PE=3 SV=1
MESFYTIQGEGYYQGKAAYFIRLGGCDVGCVWCDVKDSWDASRHPQQSIDEIVSAAAAYPGRMAVITGGEPLMHNLDTLTAALHEAGFQTNIETSGSSPLSGEWDWICLSPKKFKFPLPEILPLAHELKVVIFNKSDFAWAEKYAAQVSPTCKLYLAPEWDKSKEMTPLLIEYIKENPQWELSLQIHKYINVP

SEQ ID NO: 33140 - protein, 222 aa, Pseudofulvimonas gallinarii
  REGION 1..222: note = tr|A0A4S3KUC8|A0A4S3KUC8_9GAMM 7-carboxy-7-deazaguanine synthase OS=Pseudofulvimonas gallinarii OX=634155 GN=queE PE=3 SV=1
MDAAVEGRSAERLRITEIFHSLQGEADAVGWRTVFVRLTGCPLRCTWCDTTYSFHGGEWRDLDGILAEVASYDARHVCVTGGEPLAQKRCLLLLQRLCDAGYEVSLETSGALDVAAVDPRVRKVVDFKAPASGEQSRNLWANVEHLLPHDQVKFVLANRDDYDWAVDCLRAQALAERCQVLFSPVQGQLAPAALAEWILADRLPVRFQMQLHKLLWGDAKGR

SEQ ID NO: 33141 - protein, 211 aa, unidentified
  source 1..211: note = Pseudogulbenkiania ferrooxidans
  REGION 1..211: note = tr|U1AMR7|U1AMR7_9NEIS 7-carboxy-7-deazaguanine synthase OS=Pseudogulbenkiania ferrooxidans EGD-HP2; OX = 1388764 GN=queE PE=3 SV=1
MTTYTVKEIFYTLQGEGRQAGRAAVFCRFAGCNLWSGREEDRAKAVCQFCDTDFVGAGPDGGKFDGAAALAAHIAAEWPKDAGGAPYVVCTGGEPLLQLDAELVDALHAEGFEIAVETNGTVAAPAGLDWICVSPKAGSELKQRAGDELKLVYPQVAQMPETVAHLDFGTFYLQPMDGPDLAANTRAAIAYCMAHPQWRLSVQTHKVVNIR

SEQ ID NO: 33142 - protein, 209 aa, unidentified
  source 1..209: note = Pseudogulbenkiania ferrooxidans
  REGION 1..209: note = tr|B9Z1F9|B9Z1F9_9NEIS 7-carboxy-7-deazaguanine synthase OS=Pseudogulbenkiania ferrooxidans 2002 OX=279714; GN = queE PE=3 SV=1
MYTVKEIFYTLQGEGRQAGRAAVFCRFAGCNLWSGKERHRAKAICQFCDTDFVGTGPDGGKFKTAEQLAERIAGAWPAGAGGTPFVVCTGGEPLLQLDAPLIDALHARGFEIAVETNGTVAAPPGIDWLCVSPKAGAPLLQTSGHELKLVYPQPTLMPESVAGLAFQNFYLQPMDGPDVAANTRAAIAYCMAQPQWRLSVQTHKVLNIR

SEQ ID NO: 33143 - protein, 209 aa, Pseudogulbenkiania sp.
  REGION 1..209: note = tr|G2IYU5|G2IYU5_PSEUL 7-carboxy-7-deazaguanine synthase OS=Pseudogulbenkiania sp. (strain NH8B) OX=748280; GN = queE PE=3 SV=1
MYTVKEIFYTLQGEGRQAGRAAVFCRFAGCNLWSGKERHRTKAICQFCDTDFVGTGPDGGKFKSAEQLAERIASAWPAGAGGTPFVVCTGGEPLLQLDAPLIDALHARGFEIAVETNGTVAAPPGIDWLCVSPKAGAPLLQTSGHELKLVYPQPTLMPESVAGLAFQNFYLQPMDGPDVAANTRAAIAYCMAQPQWRLSVQTHKVLNIR

SEQ ID NO: 33144 - protein, 209 aa, Pseudogulbenkiania subflava
  REGION 1..209: note = tr|A0A1Y6BDJ8|A0A1Y6BDJ8_9NEIS 7-carboxy-7-deazaguanine synthase OS=Pseudogulbenkiania subflava DSM 22618 OX=1123014 GN=queE PE=3 SV=1
MYTVKEIFYTLQGEGRQAGRAAVFCRFAGCNLWSGKERHRAKAICQFCDTDFVGTGPDGGKFKTTEQLAERIAREWPAGAGGTPFVVCTGGEPLLQLDAALIDALHARGFEIAVETNGTVAAPPGIDWLCVSPKAGAPLLQTTGHELKLVYPQPTLPPESVAGLAFQNFYLQPMDGPDVVANTRAAIAYCMAQPQWRLSVQTHKVLQIR

SEQ ID NO: 33145 - protein, 222 aa, unidentified
  source 1..222: note = Pseudohaliea rubra
  REGION 1..222: note = tr|A0A095XSH4|A0A095XSH4_9GAMM 7-carboxy-7-deazaguanine synthase OS=Pseudohaliea rubra DSM 19751 OX=1265313 GN=queE PE=3 SV=1
MTAAVQPGATTLRLTEIFHSLQGEARTVGLPTVFVRLTGCPLRCVYCDTAYAFSGGELWDLPQVLDTVAGYGARYVTVTGGEPLAQPACLPLLSALCDAGYEVSLETSGAMPVGEVDARVVKVLDLKTPASGELARNDYGNIVHLTRNDQVKFVICDRADYDWACFKVDEYRLVERAGDVLFSPSHGQQDARELAEWILTDRLPVRLQLQLHKLLWNDEPGR

SEQ ID NO: 33146 - protein, 217 aa, unidentified
  source 1..217: note = Pseudohongiella acticola
  REGION 1..217: note = tr|A0A1E8CGK6|A0A1E8CGK6_9GAMM 7-carboxy-7-deazaguanine synthase OS=Pseudohongiella acticola OX=1524254 GN=queE PE=3 SV=1
MNKPLSLRINEIFFSLQGESSTVGLPTTFVRLTGCPLRCGYCDTEYAFHDGTVMPLTDILAQVEATGARYITVTGGEPLAQPGCLALLRELCDRGLRVSLETSGAMDIAEVDPRVTVVMDLKTPGSGECDRNLESNIGRLKRVDEVKFVICDRRDYEWSKAKIDQYDLGSRVQEILLSPSFEQLAYRDLAAWVLADRLPVRMQVQLHKIIWGDAPGH

SEQ ID NO: 33147 - protein, 213 aa, unidentified
  source 1..213: note = Pseudohongiella sp.
  REGION 1..213: note = tr|A0A355V965|A0A355V965_9GAMM 7-carboxy-7-deazaguanine synthase OS=Pseudohongiella sp.; OX = 1979412 GN=queE PE=3 SV=1
MNLRINEIFHSLQGESSTVGLPTTFVRLTGCPLRCGYCDTEYAFHEGQQKSLSDILEQVSANRAKHVCVTGGEPLAQPNCLPLLTLLCDNGFTVSLETSGAMDISAVDQRVNIVMDLKTPGSDECDRNLESNIAHLKSSDEVKFVICDRRDYEWAKAKIDQYDLRHRVREILLSPSYEQVKYAELAQWILEDKLAVRMQVQLHKIIWGEEPGR

SEQ ID NO: 33148 - protein, 213 aa, unidentified
  source 1..213: note = Pseudohongiella spirulinae
  REGION 1..213: note = tr|A0A0S2KE94|A0A0S2KE94_9GAMM 7-carboxy-7-deazaguanine synthase OS=Pseudohongiella spirulinae OX=1249552 GN=queE PE=3 SV=1
MNLRINEIFHSLQGESSTVGLPTTFVRLTGCPLRCGYCDTEYAFHEGRQLSFEQILQQVDDYGARHVCVTGGEPLAQPNCLPLLTALCDKGLQVSLETSGAMDIASVDSRVHVVMDLKTPGSNECDRNLESNIGCLKPIDEVKFVICDRRDYEWAKAKIDQYDLRNRVAEILLSPSFGQVAYRDLAQWIIDDRLPVRMQVQLHKIIWGEEPGR

SEQ ID NO: 33149 - protein, 215 aa, unidentified
  source 1..215: note = Pseudomonadaceae bacterium
  REGION 1..215: note = tr|A0A2E8IFT5|A0A2E8IFT5_9GAMM 7-carboxy-7-deazaguanine synthase OS=Pseudomonadaceae bacterium OX=1914538 GN=queE PE=3 SV=1
MQNTLRITEIFYSLQGETRTAGLPTVFVRLTGCPLRCQYCDTAYAFTGGEIMSLDSILARVAAYNPRYICVTGGEPLAQPNSIALLQQLCDAGYEVSLETSGALDVSSVDPRVSKVLDLKTPGSAEVARNRYDNIQWLSRNDQVKFVICSREDYSWAVSKLIEYRLNERAGEVLFSPSHAQVSARDLADWIVADNLPVRLQLQLHKILWDDAAGH

SEQ ID NO: 33150 - protein, 211 aa, unidentified
  source 1..211: note = Pseudomonadaceae bacterium
  REGION 1..211: note = tr|A0A4Q9R789|A0A4Q9R789_9GAMM 7-carboxy-7-deazaguanine synthase OS=Pseudomonadaceae bacterium P17C OX=2211397 GN=queE PE=3 SV=1
MTYSVKEIFYTLQGEGAQAGRPAVFCRFSGCNLWSGRERDRGTSICRFCDTDFIGTDGPGGGKFRQAEALASAIDAQWPGHAARNKYVVLTGGEPLLQVDQALTDALHARGFTIAVETNGTLALPDGIDWVCVSPKSSAELLITRGNELKLVYPQHDAMPDRFEALDFEVFYLQPMDAHGRQQNTLDAIDYCKSHPQWRLGLQQHKILMIP

SEQ ID NO: 33151 - protein, 224 aa, unidentified
  source 1..224: note = Pseudomonadales bacterium
  REGION 1..224: note = tr|A0A1G3D499|A0A1G3D499_9GAMM 7-carboxy-7-deazaguanine synthase OS=Pseudomonadales bacterium GWC2_63_15 OX=1817754 GN=queE PE=3 SV=1
MACLAVTPVADMTLRITEIFYSLQGETRTSGLPTVFVRLTGCPLRCQYCDTAYAFSGGELMTLDAIVERVASYNPRYVCVTGGEPLAQPNCAPLLQRLCDAGYEVSLETSGALDISVVDERVSRVVDLKTPGSAEVARNRYENIACITRNDQVKFVICSREDYDWAVSKLIEYGLDRRAGEVLFSPSHGQVDVRALADWIVADNLPVRLQLQLHKIIWNDAPGH

SEQ ID NO: 33152 - protein, 236 aa, unidentified; identical to SEQ ID NO: 27348
  source 1..236: note = Pseudomonadales bacterium
  REGION 1..236: note = tr|A0A1G3DMK9|A0A1G3DMK9_9GAMM 7-carboxy-7-deazaguanine synthase OS=Pseudomonadales bacterium RIFCSPHIGHO2_12_FULL_40_16 OX=1802006 GN=queE; PE = 3 SV=1

SEQ ID NO: 33153 - protein, 226 aa, Pseudomonas abietaniphila
  REGION 1..226: note = tr|A0A1G8ARP1|A0A1G8ARP1_9PSED 7-carboxy-7-deazaguanine synthase OS=Pseudomonas abietaniphila OX=89065 GN=queE PE=3 SV=1
MACLAVTPVAPMQDTLRITEVFYSLQGETRTAGLPTVFVRLTGCPLRCGYCDSEYAFTGGTLQTLDSLMEQVAGYRPRYVCVTGGEPLAQPNAIPLLKRLCDAGYEVSLETSGALDISKVDPRVSRVVDLKTPGSKEVTRNRYENIDLLTANDQVKFVICSREDYDWAVSKIIQYGLDRRAGEVLFSPVHRDLNVRDLADWIVADNLPVRLQLQLHKILWDDEPGR

SEQ ID NO: 33154 - protein, 210 aa, unidentified
  source 1..210: note = Pseudomonas acidophila
  REGION 1..210: note = tr|A0A2A4EYX7|A0A2A4EYX7_9PSED 7-carboxy-7-deazaguanine synthase OS=Pseudomonas acidophila OX=1912599 GN=queE PE=3 SV=1
MAYAVKEIFYTLQGEGANAGRPAVFCRFAGCNLWSGREEDRAAAVCRFCDTDFVGTDGENGGKYRSADELVAMIAAQWPQGEANRFVVCTGGEPMLQIDPPFVDALHAAGFEIAIETNGSLPVLETIDWICVSPKADAPLVVTKGNELKVVVPQDNQRLADYAKLEFDYFLVQPMDGPSRDINTKLAIDWCKRHPQWRLSMQTHKYLNIP

SEQ ID NO: 33155 - protein, 215 aa, Pseudomonas aeruginosa
  REGION 1..215: note = tr|A0A3M8IYY2|A0A3M8IYY2_PSEAI 7-carboxy-7-deazaguanine synthase OS=Pseudomonas aeruginosa OX=287 GN=queE PE=3 SV=1
MQQTLRITEIFYSLQGETRTAGLPTVFVRLTGCPLRCHYCDTAYAFSGGDVVSLDAIFERVAAYKPRYICVTGGEPLAQPNCISLLERLCDAGYEVSLETSGALDVSRVDPRVSKVLDLKTPGSGEVGRNRYENIPLLTDNDQVKFVVCSREDYDWAVSKLIEYRLDQRAGEVLFSPSHHQVSARELADWIVADNLPVRLQLQLHKILWNDEPGH

SEQ ID NO: 33156 - protein, 264 aa, Pseudomonas aeruginosa
  REGION 1..264: note = tr|A0A0A8RJ16|A0A0A8RJ16_PSEAI 7-carboxy-7-deazaguanine synthase OS=Pseudomonas aeruginosa OX=287 GN=queE PE=3 SV=1
MVSARLIFVPLHARPSGISSATTGYVPWRSFIYRNGGGRPVQSSRPWLNMQQTLRITEIFYSLQGETRTAGLPTVFVRLTGCPLRCHYCDTAYAFSGGDVVSLDAIFERVAAYKPRYICVTGGEPLAQPNCISLLERLCDAGYEVSLETSGALDVSRVDPRVSKVLDLKTPGSGEVGRNRYENIPLLTDNDQVKFVVCSREDYDWAVSKLIEYRLDQRAGEVLFSPSHHQVSARELADWIVADNLPVRLQLQLHKILWNDEPGH

SEQ ID NO: 33157 - protein, 215 aa, Pseudomonas agarici
  REGION 1..215: note = tr|A0A0X1T8R0|A0A0X1T8R0_PSEAA 7-carboxy-7-deazaguanine synthase OS=Pseudomonas agarici; OX = 46677 GN=queE PE=3 SV=1
MQDTLRITEIFYSLQGEARTAGLPTVFVRLTGCPLRCQYCDSAYAFSGGTLMTLDGILDQVAGYRPRYVCVTGGEPLAQPNVIPLLQRLCDAGYEVSLETSGSLDISAVDTRVSRVVDLKTPGSKEAHRNRYENIERLTANDQVKFVICSREDYDWSVSKLIQYGLEKRAGEVLFSPSHHDLPPRDLADWIVADNLPVRLQMQLHKYLWNDEPGR

SEQ ID NO: 33158 - protein, 215 aa, Pseudomonas alcaligenes
  REGION 1..215: note = tr|A0A142IWS7|A0A142IWS7_PSEAC 7-carboxy-7-deazaguanine synthase OS=Pseudomonas alcaligenes OX=43263 GN=queE PE=3 SV=1
MQTNLRITEIFYSLQGETNTSGLPTVFVRLTGCPLRCQYCDTAYAFSGGEIMSLEAILERVAAFKPRYVCVTGGEPLAQPNCIPLLEQLCDAGYRVSLETSGAMDIAPTDRRVSRVVDLKTPGSQEVARNLYGNLDQLTGNDQVKFVICSREDYDWAVSKLIEYRLEQRAGEVLFSPSHGQVDARALADWIVADNLPVRFQLQLHKILWNDEPGH

SEQ ID NO: 33159 - protein, 226 aa, Pseudomonas alcaligenes
  REGION 1..226: note = tr|U2Z478|U2Z478_PSEA4 7-carboxy-7-deazaguanine synthase OS=Pseudomonas alcaligenes (strain ATCC 14909 / DSM 50342 / JCM 20561 / NBRC 14159 / NCIMB 9945 / NCTC 10367/ 1577) OX=1215092 GN=queE PE=3 SV=1
MACFAVTPGALMQTNLRITEIFYSLQGETNTSGLPTVFVRLTGCPLRCQYCDTAYAFSGGEIMSLEAILERVAAFKPRYVCVTGGEPLAQPNCIPLLEQLCDAGYRVSLETSGAMDIASTDRRVSRVVDLKTPGSQEVARNLYSNLDELTGNDQVKVVICSREDYDWAVSKLIEYRLEQRAGEVLFSPSHGQVDARALADWIVSDNLPVRFQLQLHKILWNDEPGH

SEQ ID NO: 33160 - protein, 226 aa, Pseudomonas alcaliphila
  REGION 1..226: note = tr|A0A1G6VN38|A0A1G6VN38_9PSED 7-carboxy-7-deazaguanine synthase OS=Pseudomonas alcaliphila OX=101564 GN=queE PE=3 SV=1
MACFVITLVATMQETLRITEIFYSLQGETRTAGLPTVFVRLTGCPLRCQYCDTAYAFSGGEIVTLDSILDQVAAYRPRYVCVTGGEPLAQPNCIGLLTRLCDAGYEVSLETSGALDVSAVDPRVSKVLDLKTPGSAEVQRNRYENVQWLTRNDQVKFVICSREDYDWAVSKLIEYDLAARAGEVLFSPSHKQVDARALADWIVADNLPVRLQLQLHKILWNDEPGH

SEQ ID NO: 33161 - protein, 215 aa, Pseudomonas alcaliphila
  REGION 1..215: note = tr|A0A1L7G6W2|A0A1L7G6W2_9PSED 7-carboxy-7-deazaguanine synthase OS=Pseudomonas alcaliphila JAB1 OX=741155 GN=queE PE=3 SV=1
MQETLRITEIFYSLQGETRTAGLPTVFVRLTGCPLRCQYCDTAYAFSGGEIVTLDSILDQVAAYRPRYICVTGGEPLAQPNCIPLLARLCDAGYEVSLETSGALDVSAVDPRVSKVLDLKTPGSAEVQRNRYENVQWLTRNDQVKFVICSREDYDWAVSKLIEYDLAARAGEVLFSPSHKQVDARALADWIVADNLPVRLQLQLHKILWNDEPGH

SEQ ID NO: 33162 - protein, 215 aa, unidentified
  source 1..215: note = Pseudomonas alkylphenolica
  REGION 1..215: note = tr|A0A077FCT7|A0A077FCT7_9PSED 7-carboxy-7-deazaguanine synthase OS=Pseudomonas alkylphenolica OX=237609 GN=queE PE=3 SV=1
MQDTLRITEVFYSLQGETRTAGLPTVFVRLTGCPLRCQYCDSEYAFSGGTVRTLDSILEQVAGFKPRYVCVTGGEPLAQPNAIPLLTQLCDAGYEVSLETSGALDISRVDPRVSRVVDLKTPGSEEAHRNRYENIELLTANDQVKFVICSREDYDWAVSKLIQYGLEKRAGEVLFSPSHHQVSATDLADWIVADNLPVRFQMQLHKLLWNDEPGR

SEQ ID NO: 33163 - protein, 215 aa, unidentified
  source 1..215: note = Pseudomonas alkylphenolica
  REGION 1..215: note = tr|A0A443ZW34|A0A443ZW34_9PSED 7-carboxy-7-deazaguanine synthase OS=Pseudomonas alkylphenolica OX=237609 GN=queE PE=3 SV=1
MQDTLRITEVFYSLQGETRTAGLPTVFVRLTGCPLRCQYCDSEYAFSGGSIRTLDSILEQVAGFKPRYVCVTGGEPLAQPNAIPLLKQLCDAGYDVSLETSGALDISKVDARVSRVVDLKTPGSEEVHRNRYENIELLTANDQVKFVICSREDYDWAVSKLIQYGLEKRAGEVLFSPSHHQVSATDLADWIVADNLPVRFQMQLHKLLWNDEPGR

SEQ ID NO: 33164 - protein, 218 aa, Pseudomonas amygdali
  REGION 1..218: note = tr|A0A3M2WFZ3|A0A3M2WFZ3_PSEA0 7-carboxy-7-deazaguanine synthase OS=Pseudomonas amygdali pv. morsprunorum OX=129138 GN=queE PE=3 SV=1
MADMQETLRITEIFHSLQGETRTAGLPTVFVRLTGCPLRCQYCDSAYAFSGGTIQTLDDIVGQVASYRPRYVCVTGGEPLAQPNAIPLLKRLCDAGYEVSLETSGALDISAVDPRVSRVVDLKTPGSKEVARNRYENMELLTPNDQVKFVICSREDYDWAVSKLIQYGLDRRAGEVLFSASHHELKGRDLADWIVADNLPVRLQMQLHKILWDDEPGR

SEQ ID NO: 33165 - protein, 218 aa, Pseudomonas amygdali
  REGION 1..218: note = tr|A0A0P9SBZ8|A0A0P9SBZ8_PSEA0 7-carboxy-7-deazaguanine synthase OS=Pseudomonas amygdali pv. eriobotryae OX=129137 GN=queE PE=3 SV=1
MADMQDTLRITEIFHSLQGETRTAGLPTVFVRLTGCPLRCQYCDSAYAFSGGTIQTLDDIVGQVAAYRPRYVCVTGGEPLAQPNAIPLLKRLCDAGYEVSLETSGALDISAVDPRVSRVVDLKTPGSKEVSRNRYENIELLTRNDQVKFVICSREDYDWAVSKLIQYGLERRAGEVLFSASHHELKGRDLADWIVADNLPVRLQMQLHKILWDDEPGR

SEQ ID NO: 33166 - protein, 215 aa, Pseudomonas anguilliseptica
  REGION 1..215: note = tr|A0A1H5EME0|A0A1H5EME0_PSEAG 7-carboxy-7-deazaguanine synthase OS=Pseudomonas anguilliseptica OX=53406 GN=queE PE=3 SV=1
MQDTLRITEIFYSLQGETRTAGLPTVFVRLTGCPLRCQYCDTAYAFSGGEIMSLDAIFEQVAGYKPRYICVTGGEPLAQPNCIALLKRLCDAGYEVSLETSGALDVSAVDPRVSKVLDLKTPGSVEVARNRYENIELLTPNDQVKFVICSREDYDWAVSKLIQYRLAERVSEVLMSPSHHELDARSLAEWIIADNLPVRLQMQLHKILWNDEPGH

SEQ ID NO: 33167 - protein, 215 aa, Pseudomonas antarctica
  REGION 1..215: note = tr|A0A172Z6V3|A0A172Z6V3_9PSED 7-carboxy-7-deazaguanine synthase OS=Pseudomonas antarctica OX=219572 GN=queE PE=3 SV=1
MQDTLRITEVFYSLQGETRTAGLPTVFVRLTGCPLRCQYCDSAYAFSGGTVRTLDDILEQVAGFKPRYVCVTGGEPLAQPNAIPLLKQLCDAGYEVSLETSGALDISAVDSRVSRVVDLKTPGSKEAHRNLYENIDLLTANDQVKFVICSRDDYDWAASKLIQYGLDRRAGEVLFSPSHHDLNARDLADWVVADNLPVRLQLQLHKYLWNDEPGR

SEQ ID NO: 33168 - protein, 215 aa, Pseudomonas antarctica
  REGION 1..215: note = tr|A0A1G9XVH7|A0A1G9XVH7_9PSED 7-carboxy-7-deazaguanine synthase OS=Pseudomonas antarctica OX=219572 GN=queE PE=3 SV=1
MQDTLRITEVFYSLQGETRTAGLPTVFVRLTGCPLRCQYCDSAYAFSGGTVRTLDDILEQVAGFKPRYVCVTGGEPLAQPNAIPLLKQLCDAGYEVSLETSGALDISAVDPRVSRVVDLKTPGSKEAHRNLYDNMDLLTANDQVKFVICSRDDYDWAASKLIQYGLDRRAGEVLFSPSHHDLNARDLADWVVADNLPVRLQLQLHKYLWNDEPGR

SEQ ID NO: 33169 - protein, 226 aa, Pseudomonas argentinensis
  REGION 1..226: note = tr|A0A1I3K797|A0A1I3K797_9PSED 7-carboxy-7-deazaguanine synthase OS=Pseudomonas argentinensis OX=289370 GN=queE PE=3 SV=1
MACFAVTPVAPMKDTLRITEIFFSLQGEARTAGLPTVFVRLTGCPLRCQYCDTAYAFSGGELLTLDAILEQVASYRPRYVCVTGGEPLAQPNCIPLLEKLCDAGYEVSLETSGALDVSAVDPRVSKVVDLKTPGSAEMGRNRYENIVHLRPHDQVKFVICSREDYDWSVSKVIQYGLAERVSEVLFSPSHGQVSGRQLAEWVIADNLPVRMQLQLHKILWNDEPGH

SEQ ID NO: 33170 - protein, 210 aa, Pseudomonas argentinensis
  REGION 1..210: note = tr|A0A1I3GKS8|A0A1I3GKS8_9PSED 7-carboxy-7-deazaguanine synthase OS=Pseudomonas argentinensis OX=289370 GN=queE PE=3 SV=1
MTYSVKEIFYTLQGEGLRAGRPAVFCRFAGCNLWSGREIDRSRAVCQFCDTDFVGTNGTLGGKYLTAEALAERVSSLWPVAQEHRYVVLTGGEPLMQVDETLIASLHDQGFEIAVETNGTILAPAGIDWICVSPKAGADWVQRSGHELKLVYPQPGLLPDAISDSDFQYYLLQPMDGPMQKQNTRSAIAYCQANTKWRLSVQTHKILEIR

SEQ ID NO: 33171 - protein, 215 aa, Pseudomonas arsenicoxydans
  REGION 1..215: note = tr|A0A502HZQ2|A0A502HZQ2_9PSED 7-carboxy-7-deazaguanine synthase OS=Pseudomonas arsenicoxydans OX=702115 GN=queE PE=3 SV=1
MQDTLRITEVFYSLQGETRTAGLPTVFVRLTGCPLRCQYCDSAYAFTGGTLRPLDDILEQVAGFRPRYVCVTGGEPLAQPNAIPLLKQLCDAGYEVSLETSGALDISAVDSRVSRVVDLKTPGSKEAHRNRYENIELLTPNDQVKFVICSREDYDWAVSKLIQYGLDRRAGEVLFSPSHHDLNARDLADWVVADNLPVRLQLQLHKYLWNDEPGR

SEQ ID NO: 33172 - protein, 215 aa, Pseudomonas arsenicoxydans
  REGION 1..215: note = tr|A0A4P6G9U6|A0A4P6G9U6_9PSED 7-carboxy-7-deazaguanine synthase OS=Pseudomonas arsenicoxydans OX=702115 GN=queE PE=3 SV=1
MQDTLRITEVFYSLQGETRTAGLPTVFVRLTGCPLRCQYCDSAYAFTGGTVRTLDDILEQVAGFRPRYVCVTGGEPLAQPNAIPLLKQLCDAGYEVSLETSGALDISAVDSRVSRVVDLKTPGSKEAHRNRYENIELLTPNDQVKFVICSREDYDWAVSKLIQYGLDQRAGEVLFSPSHHDLNARDLADWVVADNLPVRLQLQLHKYLWNDEPGR

SEQ ID NO: 33173 - protein, 215 aa, Pseudomonas asplenii
  REGION 1..215: note = tr|A0A2J7UYJ3|A0A2J7UYJ3_9PSED 7-carboxy-7-deazaguanine synthase OS=Pseudomonas asplenii; OX = 53407 GN=queE PE=3 SV=1
MQDTLRITEVFYSLQGETRTAGLPTVFVRLTGCPLRCQYCDSAYAFSGGTVRTLDDILEQVAGFRPRYVCVTGGEPLAQPNAIPLLKQLCDAGYEVSLETSGALDVSAVDPRVSRVVDLKTPDSKEAHRNRYENIELLTPNDQVKFVICSRDDYDWAVSKLIQYGLDRRAGEVLFSPSHHDLNARDLADWVVADNLPVRLQLQLHKYLWNDEPGR

SEQ ID NO: 33174 - protein, 215 aa, Pseudomonas asplenii
  REGION 1..215: note = tr|A0A438LD65|A0A438LD65_9PSED 7-carboxy-7-deazaguanine synthase OS=Pseudomonas asplenii; OX = 53407 GN=queE PE=3 SV=1
MQDTLRITEVFYSLQGETRTAGLPTVFVRLTGCPLRCQYCDSAYAFSGGTLMTLDSLLTQVADYRPRYVCVTGGEPLAQPNAIPLLKQLCDAGYSVSLETSGALDISAVDTRVSRVLDLKTPGSKESHRNRYENIELLTPNDQVKFVICSREDYDWAVSKLIQYGLERRAGEVLFSPSHHDLPARELADWIVADNLPVRLQMQLHKYLWNDEPGR

SEQ ID NO: 33175 - protein, 215 aa, unidentified
  source 1..215: note = Pseudomonas asturiensis
  REGION 1..215: note = tr|A0A1M7LY46|A0A1M7LY46_9PSED 7-carboxy-7-deazaguanine synthase OS=Pseudomonas asturiensis OX=1190415 GN=queE PE=3 SV=1
MQDTLRITEIFHSLQGETRTAGLPTVFVRLTGCPLRCQYCDSAYAFTGGTIQSLDDIMGQVAAYRPRYVCVTGGEPLAQPNAIALLKRLCDEGYEVSLETSGALDISAVDPRVSRVVDLKTPGSKEVTRNRYENMELLTPNDQVKFVICSREDYDWAVSKLIQYGLDRRAGEVLFSASHHELKSRELADWIVADNLPVRLQMQLHKYLWDDEPGR

SEQ ID NO: 33176 - protein, 215 aa, Pseudomonas avellanae
  REGION 1..215: note = tr|A0A261WL40|A0A261WL40_9PSED 7-carboxy-7-deazaguanine synthase OS=Pseudomonas avellanae; OX = 46257 GN=queE PE=3 SV=1
MQETLRITEIFHSLQGETRTAGLPTVFVRLTGCPLRCQYCDSAYAFSGGTIQTLDDIVGQVASYRPRYVCVTGGEPLAQPNAIPLLKRLCDAGYEVSLETSGALDISAVDPRVSRVVDLKTPGSKEVARNRYENMELLTPNDQVKFVICSREDYDWAVSKLIQYGLDRRAGEVLFSASHHELKGRDLADWIVADNLPVRLQMQLHKILWDDEPGR

SEQ ID NO: 33177 - protein, 218 aa, Pseudomonas avellanae
  REGION 1..218: note = tr|A0A3M5T3M1|A0A3M5T3M1_9PSED 7-carboxy-7-deazaguanine synthase OS=Pseudomonas avellanae; OX = 46257 GN=queE PE=3 SV=1
MADMQETLRITEIFHSLQGETRTAGLPTVFVRLTGCPLRCQYCDSAYAFSGGTIQTLDDILGQVASYRPRYVCVTGGEPLAQPNAIPLLKRLCDAGYEVSLETSGALDISAVDPRVSRVVDLKTPGSKEVARNRYENMALLTPNDQVKFVICSREDYDWAVSKLIQYGLDRRAGEVLFSASHHELKGRDLADWIVADNLPVRLQMQLHKILWDDEPGR

SEQ ID NO: 33178 - protein, 215 aa, Pseudomonas azotoformans
  REGION 1..215: note = tr|A0A127HQV6|A0A127HQV6_PSEAZ 7-carboxy-7-deazaguanine synthase OS=Pseudomonas azotoformans OX=47878 GN=queE PE=3 SV=1
MQDTLRITEVFYSLQGETRTAGLPTVFVRLTGCPLRCQYCDSAYAFSGGTVRTLDDILEQVAGYKPRYVCVTGGEPLAQPNAIPLLKQLCDAGYEVSLETSGALDISAVDPRVSRVVDLKTPDSKEAHRNRYENIELLTANDQVKFVICSRDDYDWANSKLIQYGLDRRAGEVLFSPSHHDLNARDLADWVVADNLPVRLQLQLHKYLWNDEPGR

SEQ ID NO: 33179 - protein, 215 aa, Pseudomonas azotoformans
  REGION 1..215: note = tr|A0A4Q0HSN9|A0A4Q0HSN9_PSEAZ 7-carboxy-7-deazaguanine synthase OS=Pseudomonas azotoformans OX=47878 GN=queE PE=3 SV=1
MQDTLRITEVFYSLQGETRTAGLPTVFVRLTGCPLRCQYCDSAYAFSGGTVRTLDDILEQVAGYRPRYVCVTGGEPLAQPNAIPLLKQLCDAGYEVSLETSGALDISAVDPRVSRVVDLKTPDSKEAHRNRYENMDLLTANDQVKFVICSRDDYDWATSKLIQYGLERRAGEVLFSPSHHDLNARDLADWVVADNLPVRLQLQLHKYLWNDEPGR

SEQ ID NO: 33180 - protein, 215 aa, Pseudomonas baetica
  REGION 1..215: note = tr|A0A2N0DIG2|A0A2N0DIG2_9PSED 7-carboxy-7-deazaguanine synthase OS=Pseudomonas baetica; OX = 674054 GN=queE PE=3 SV=1
MQDTLRITEVFYSLQGETRTAGLPTVFVRLTGCPLRCQYCDSAYAFSGGTIRTLDDILEQVAGVRPRYVCVTGGEPLAQPNAIPLLKQLCDAGYEVSLETSGALDISAVDTRVSRVVDLKTPGSKEAHRNRYENIELLTPNDQVKFVICSREDYDWAVSKLIQYGLDRRAGEVLFSPSHHDLNARDLADWVVADNLPVRLQLQLHKYLWNDEPGR

SEQ ID NO: 33181 - protein, 226 aa, Pseudomonas balearica
  REGION 1..226: note = tr|A0A1G9QH85|A0A1G9QH85_9PSED 7-carboxy-7-deazaguanine synthase OS=Pseudomonas balearica DSM 6083 OX=1123016 GN=queE PE=3 SV=1
MACLAVTPVADMQQTLRITEIFYSLQGETRTSGLPTVFVRLTGCPLRCHYCDTAYAFSGGETMTLDAIVDEVARHRPRYVCVTGGEPLAQPNCVPLLQRLCEAGYEVSLETSGALDISATDRRVSRVLDLKTPGSGEVRRNRYENIAELTANDQVKFVICSREDYDWAVSKLIEYGLDRRAGEVLFSPSHGQVDVRDLADWIVADNLPVRLQLQLHKIIWNDEPGH

SEQ ID NO: 33182 - protein, 215 aa, unidentified
  source 1..215: note = Pseudomonas batumici
  REGION 1..215: note = tr|A0A0C2ETR2|A0A0C2ETR2_9PSED 7-carboxy-7-deazaguanine synthase OS=Pseudomonas batumici; OX = 226910 GN=queE PE=3 SV=1
MQDTLRITEVFYSLQGETRTAGLPTVFVRLTGCPLRCQYCDSAYAFSGGTLMTLDSLLEQVAGYRPRYVCVTGGEPLAQPNAIPLLKQLCDAGYSVSLETSGALDISAVDTRVSRVLDLKTPGSKESHRNRYENIELLTPNDQVKFVICSREDYDWAVSKLIQYGLDKRAGEVLFSPSHHDLPARELADWIVADNLPVRLQMQLHKYLWNDEPGR

SEQ ID NO: 33183 - protein, 238 aa, Pseudomonas bauzanensis
  REGION 1..238: note = tr|A0A4U0YN74|A0A4U0YN74_9PSED 7-carboxy-7-deazaguanine synthase OS=Pseudomonas bauzanensis OX=653930 GN=queE PE=3 SV=1
MIAVSEIFGPTIQGEGALIGLPTVFVRTGGCDFRCSWCDTLYAVEPRFKKDWQSMDAKAILAEVNQLSGGEPILVTLSGGNPALQPLEELLQLGHRQGHRFAMETQGSKAQTWFNQLDHLTLSPKPPSSDMPFRRERFESCLAAAGADTNVSLKLVIADEVDYQWARALAADYPHLPLYLQPCNTAPATPEQPERETDLDALNTQLRWLVERVTTDHWYRPRVLPQLHVLIWNNERGV

SEQ ID NO: 33184 - protein, 238 aa, Pseudomonas bauzanensis
  REGION 1..238: note = tr|A0A1I4P3Z2|A0A1I4P3Z2_9PSED 7-carboxy-7-deazaguanine synthase OS=Pseudomonas bauzanensis OX=653930 GN=queE PE=3 SV=1
MIAVSEIFGPTIQGEGALIGLPTVFVRTGGCDFRCSWCDTLYAVEPRFKKDWQSMDAEAILTEVNQLSGGEPILVTLSGGNPALQPLEELLQLGHRQGHRFAMETQGSKAQTWFNQLDHLTLSPKPPSSDMPFRRERFESCLAAAGADTNVSLKLVIADEVDYQWARALAADYPHLPLYLQPCNTAPATPEQPERETDLDALNTQLRWLVERVTTDHWYRPRVLPQLHVLIWNNERGV

SEQ ID NO: 33185 - protein, 226 aa, Pseudomonas benzenivorans
  REGION 1..226: note = tr|A0A1G7WFY0|A0A1G7WFY0_9PSED 7-carboxy-7-deazaguanine synthase OS=Pseudomonas benzenivorans OX=556533 GN=queE PE=3 SV=1
MACLAVTPVADMQETLRITEIFYSLQGETRTAGLPTVFVRLTGCPLRCQYCDTAYAFSGGEIMSLDAILERVAGYKPRYICVTGGEPLAQPNCIPLLERLCDAGYQVSLETSGALDVSAVDPRVSKVLDLKTPGSAEVARNRYENIERLTSNDQVKFVICSREDYDWAVTKLIQYRLHERAGEVLFSPSHHELSARALADWIVTDNLPVRLQMQLHKILWDDEPGH

SEQ ID NO: 33186 - protein, 226 aa, Pseudomonas borbori
  REGION 1..226: note = tr|A0A1I5LH10|A0A1I5LH10_9PSED 7-carboxy-7-deazaguanine synthase OS=Pseudomonas borbori; OX = 289003 GN=queE PE=3 SV=1
MACLAVTPVADMQDTLRITEIFYSLQGETRTAGLPTVFVRLTGCPLRCQYCDTAYAFSGGEVMSLDAIVEQIAGYQPRYICVTGGEPLAQPNCIPLLKRLCDAGYQVSLETSGALDVSAVDPRVSKVLDLKTPGSAEVARNRYENIELLTVNDQVKFVICSREDYDWAVTKLIQYRLHQRAGEVLFSPSHHELSARLLADWIVADNLPVRLQMQLHKILWNDEPGH

SEQ ID NO: 33187 - protein, 215 aa, Pseudomonas brassicacearum
  REGION 1..215: note = tr|F2KKW0|F2KKW0_PSEBN 7-carboxy-7-deazaguanine synthase OS=Pseudomonas brassicacearum (strain NFM421); OX = 994484 GN=queE PE=3 SV=1
MQDTLRITEVFYSLQGETRTAGLPTVFVRLTGCPLRCQYCDSAYAFSGGTLRTLDDILEQVASYRPRYVCVTGGEPLAQPNAIPLLKQLCDAGYEVSLETSGALDISAVDPRVSRVVDLKTPGSKEAHRNRYENIELLTPNDQVKFVICSREDYDWAVSKLIQYGLDQRAGEVLLSPSHHDLSARDLADWVVADNLPVRLQLQLHKYLWNDEPGR

SEQ ID NO: 33188 - protein, 215 aa, Pseudomonas brassicacearum
  REGION 1..215: note = tr|A0A423GMB6|A0A423GMB6_9PSED 7-carboxy-7-deazaguanine synthase OS=Pseudomonas brassicacearum OX=930166 GN=queE PE=3 SV=1
MQDTLRITEVFYSLQGETRTAGLPTVFVRLTGCPLRCQYCDSAYAFTGGTVRPLDDILEQVAGFRPRYVCVTGGEPLAQPNAIPLLKQLCDAGYEVSLETSGALDISAVDPRVSRVLDLKTPGSKEAHRNLYENIALLTANDQVKFVICSREDYDWAVSKLIQYGLDQRAGEVLFSPSHHDLSARELADWIVADNLPVRLQLQLHKYLWNDEPGR

SEQ ID NO: 33189 - protein, 215 aa, Pseudomonas brenneri
  REGION 1..215: note = tr|A0A4R6YXS6|A0A4R6YXS6_9PSED 7-carboxy-7-deazaguanine synthase OS=Pseudomonas brenneri; OX = 129817 GN=queE PE=3 SV=1
MQDTLRITEVFYSLQGETRTAGLPTVFVRLTGCPLRCQYCDSAYAFSGGTIRTLDDILEQVAGYKPRYVCVTGGEPLAQPNAIPLLKQLCDAGYEVSLETSGALDISAVDPRVSRVVDLKTPDSKEAHRNRYENIELLTANDQVKFVICSRDDYDWANSKLIQYGLDRRAGEVLFSPSHHDLNARDLADWVVADNLPVRLQLQLHKYLWNDEPGR

SEQ ID NO: 33190 - protein, 215 aa, Pseudomonas brenneri
  REGION 1..215: note = tr|A0A5B2UTM5|A0A5B2UTM5_9PSED 7-carboxy-7-deazaguanine synthase OS=Pseudomonas brenneri; OX = 129817 GN=queE PE=3 SV=1
MQDTLRITEVFYSLQGETRTAGLPTVFVRLTGCPLRCQYCDSAYAFSGGTIRTLDDILEQVAGFRPRYVCVTGGEPLAQPNAIPLLKQLCDAGYEVSLETSGALDISAVDPRVSRVVDLKTPDSKEAHRNRYENIDLLTANDQVKFVICSRDDYDWANSKLIQYGLDRRAGEVLFSPSHHDLNARDLADWVVADNLPVRLQLQLHKYLWNDEPGR

SEQ ID NO: 33191 - protein, 215 aa, unidentified; identical to SEQ ID NO: 33178
  source 1..215: note = Pseudomonas canadensis
  REGION 1..215: note = tr|A0A423EVX0|A0A423EVX0_9PSED 7-carboxy-7-deazaguanine synthase OS=Pseudomonas canadensis OX=915099 GN=queE PE=3 SV=1

SEQ ID NO: 33192 - protein, 218 aa, Pseudomonas cannabina
  REGION 1..218: note = tr|A0A0P9MKW6|A0A0P9MKW6_PSECA 7-carboxy-7-deazaguanine synthase OS=Pseudomonas cannabina; OX = 86840 GN=queE PE=3 SV=1
MADMQDTLRITEIFHSLQGETRTAGLPTVFVRLTGCPLRCQYCDSAYAFSGGTVQALDDIIEQVACYRPRYVCVTGGEPLAQPNAIPLLKRLCDAGYEVSLETSGALDISAVDPRVSRVVDLKTPGSKEVARNRYENIELLTANDQVKFVLCSREDYDWAVSKLIQYGLDRRAGEVLFSASHHELKGRDLADWIVADNLPVRLQMQLHKILWDDEPGR

SEQ ID NO: 33193 - protein, 218 aa, Pseudomonas cannabina
  REGION 1..218: note = tr|A0A3M3R295|A0A3M3R295_PSECA 7-carboxy-7-deazaguanine synthase OS=Pseudomonas cannabina; OX = 86840 GN=queE PE=3 SV=1
MADMQDTLRITEIFHSLQGETRTAGLPTVFVRLTGCPLRCQYCDSAYAFSGGTVQALDDIIEQVASYRPRYVCVTGGEPLAQPNAIPLLKRLCDAGYEVSLETSGALDISAVDPRVSRVVDLKTPGSKEVARNRYENIELLTPNDQVKFVLCSREDYDWAVSKLIQYGLDRRAGEVLFSASHHELKGRDLADWIVADNLPVRLQMQLHKILWDDEPGR

SEQ ID NO: 33194 - protein, 215 aa, unidentified
  source 1..215: note = Pseudomonas capeferrum
  REGION 1..215: note = tr|A0A084CJC9|A0A084CJC9_9PSED 7-carboxy-7-deazaguanine synthase OS=Pseudomonas capeferrum OX=1495066 GN=queE PE=3 SV=1
MQDTLRITEVFYSLQGETRTAGLPTVFVRLTGCPLRCQYCDSAYAFSGGTLRTLDSIMEQVAGFKPRYVCVTGGEPLAQPNALPLLQQLCDAGYEVSLETSGALDISGTDTRVSRVVDLKTPGSEESHRNRYENIEHLTRNDQVKFVICSREDYDWAVSKLIQYNLAERAGEVLFSPSHHQVRASDLADWIIADNLPVRFQLQLHKLLWNDEPGR

SEQ ID NO: 33195 - protein, 218 aa, Pseudomonas caricapapayae
  REGION 1..218: note = tr|A0A3M6GE40|A0A3M6GE40_9PSED 7-carboxy-7-deazaguanine synthase OS=Pseudomonas caricapapayae OX=46678 GN=queE PE=3 SV=1
MADMQDTLRITEIFHSLQGETRTAGLPTVFVRLTGCPLRCQYCDSAYAFSGGTIQTLDDIVGQVASYRPRYVCVTGGEPLAQPNAIPLLKRLCDAGYEVSLETSGALDISAVDPRVSRVVDLKTPGSKEVARNRYENMALLTPNDQVKFVICSREDYDWAVSKLIQYGLDGRAGEVLFSASHHELKSRDLADWIVADNLPVRLQMQLHKILWDDEPGR

SEQ ID NO: 33196 - protein, 218 aa, Pseudomonas caricapapayae
  REGION 1..218: note = tr|A0A0P9PDH5|A0A0P9PDH5_9PSED 7-carboxy-7-deazaguanine synthase OS=Pseudomonas caricapapayae OX=46678 GN=queE PE=3 SV=1
MADMQDTLRITEIFHSLQGETRTAGLPTVFVRLTGCPLRCQYCDSAYAFSGGTIQTLDDIVGQVASYRPRYVCVTGGEPLAQPNAIPLLKRLCDAGYEVSLETSGALDSSAVDPRVSRVVDLKTPGSKEVARNRYENMALLTPNDQVKFVICSREDYDWAVSKLIQYGLDGRAGEVLFSASHHELKSRDLADWIVADNLPVRLQMQLHKILWDDEPGR

SEQ ID NO: 33197 - protein, 215 aa, unidentified
  source 1..215: note = Pseudomonas caspiana
  REGION 1..215: note = tr|A0A1Y3NTH3|A0A1Y3NTH3_9PSED 7-carboxy-7-deazaguanine synthase OS=Pseudomonas caspiana; OX = 1451454 GN=queE PE=3 SV=1
MQETLRITEVFYSLQGETRTAGLPTVFVRLTGCPLRCQYCDSAYAFSGGTIQTLDDILGQVADYRPRYVCVTGGEPLAQPNAIPLLKRLCDAGYEVSLETSGALDISAVDPRVSRVVDLKTPGSMEVTRNRYENIELLTPNDQVKFVLCSREDYDWAVSKLIQYGLERRAGEVLFSPSHHQLNARDLADWIVADNLPVRLQMQLHKFLWNDEPGR

SEQ ID NO: 33198 - protein, 215 aa, unidentified
  source 1..215: note = Pseudomonas caspiana
  REGION 1..215: note = tr|A0A502J4C0|A0A502J4C0_9PSED 7-carboxy-7-deazaguanine synthase OS=Pseudomonas caspiana; OX = 1451454 GN=queE PE=3 SV=1
MQDTLRITEVFYSLQGETRTAGLPTVFVRLTGCPLRCQYCDSAYAFTGGTIRTLDDILEQVAGFRPRYVCVTGGEPLAQPNAIPLLKQLCDAGYEVSLETSGALDISAVDPRVSRVVDLKTPGSKEAHRNRYENIELLTPNDQVKFVICSREDYDWAVSKLIQYGLDQRAGEVLFSPSHHDLNARDLADWVVADNLPVRLQLQLHKYLWNDEPGR

SEQ ID NO: 33199 - protein, 215 aa, Pseudomonas cedrina; identical to SEQ ID NO: 33179
  REGION 1..215: note = tr|A0A2S9DB23|A0A2S9DB23_PSECE 7-carboxy-7-deazaguanine synthase OS=Pseudomonas cedrina; OX = 651740 GN=queE PE=3 SV=1

SEQ ID NO: 33200 - protein, 215 aa, Pseudomonas cedrina
  REGION 1..215: note = tr|A0A1V2KJH8|A0A1V2KJH8_PSECE 7-carboxy-7-deazaguanine synthase OS=Pseudomonas cedrina subsp. cedrina OX=76762 GN=queE PE=3 SV=1
MQDTLRITEVFYSLQGETRTAGLPTVFVRLTGCPLRCQYCDSAYAFSGGTVRTLDDILEQVAGYKPRYVCVTGGEPLAQPNAIPLLKQLCDAGYEVSLETSGALDISAVDPRVSRVVDLKTPGSKEAHRNRYENIDLLTANDQVKFVICSRDDYDWANSKLIQYGLDRRAGEVLFSPSHHDLNARDLADWVVADNLPVRLQLQLHKYLWNDEPGR

SEQ ID NO: 33201 - protein, 215 aa, unidentified
  source 1..215: note = Pseudomonas cerasi
  REGION 1..215: note = tr|A0A193SLV1|A0A193SLV1_9PSED 7-carboxy-7-deazaguanine synthase OS=Pseudomonas cerasi; OX = 1583341 GN=queE PE=3 SV=1
MQDTLRITEIFHSLQGETRTAGLPTVFVRLTGCPLRCQYCDSAYAFSGGTIQTLDDILGQVASYRPRYVCVTGGEPLAQPNAIPLLKRLCDAGYEVSLETSGALDISAVDPRVSRVVDLKTPGSKEVSRNRYENMELLTAKDQVKFVICSREDYDWAVSKLIQYGLDRRAGEVLFSASHHELKGRDLADWIVADNLPVRLQMQLHKILWDDEPGR

SEQ ID NO: 33202 - protein, 226 aa, unidentified
  source 1..226: note = Pseudomonas chengduensis
  REGION 1..226: note = tr|A0A1G6MKM3|A0A1G6MKM3_9PSED 7-carboxy-7-deazaguanine synthase OS=Pseudomonas chengduensis OX=489632 GN=queE PE=3 SV=1
MACFVITLVATMQETLRITEIFYSLQGETRTAGLPTIFVRLTGCPLRCQYCDTAYAFSGGEIVTLDSILDQVAAYRPRYVCVTGGEPLAQPNCIPLLARLCDAGYEVSLETSGALDVSAVDARVSKVLDLKTPGSAEVQRNRYENVQWLTRNDQVKFVICSREDYDWAVSKLIEYDLAARAGEVLFSPSHKQVDARALADWIVADNLPVRLQLQLHKILWNDEPGH

SEQ ID NO: 33203 - protein, 213 aa, unidentified
  source 1..213: note = Pseudomonas chloritidismutans
  REGION 1..213: note = tr|V4Q5P7|V4Q5P7_PSECO 7-carboxy-7-deazaguanine synthase OS=Pseudomonas chloritidismutans AW-1 OX=1263865; GN = queE PE=3 SV=1
MTLRITEIFYSLQGETRTSGLPTVFVRLTGCPLRCQYCDTAYAFSGGELMTLDAIVERVASYNPRYVCVTGGEPLAQPNCVPLLQRLCDAGYEVSLETSGALDISVVDERVSRVVDLKTPGSAEVARNRYENIACITRNDQVKFVICSREDYDWAVSKLIEYGLDRRAGEVLFSPSHGQVDVRALADWIVADNLPVRLQLQLHKIIWNDAPGH

SEQ ID NO: 33204 - protein, 215 aa, Pseudomonas chlororaphis
  REGION 1..215: note = tr|A0A1E1G2T9|A0A1E1G2T9_9PSED 7-carboxy-7-deazaguanine synthase OS=Pseudomonas chlororaphis subsp. aurantiaca OX=86192 GN=queE PE=3 SV=1
MQDTLRITEVFYSLQGETRTAGLPTVFVRLTGCPLRCQYCDSAYAFSGGTIRTLESILEQVAGFRPRYVCVTGGEPLAQPNAIPLLKQLCDAGYEVSLETSGALDISAVDPRVSRVLDLKTPGSQEAQRNRYENIELLTPNDQVKFVICSREDYDWAVSKLIQYGLERRAGEVLFSPSHHDLNARDLADWIVADNLPVRLQLQLHKYLWNDEPGR

SEQ ID NO: 33205 - protein, 215 aa, Pseudomonas chlororaphis
  REGION 1..215: note = tr|A0A3G7FDX0|A0A3G7FDX0_9PSED 7-carboxy-7-deazaguanine synthase OS=Pseudomonas chlororaphis subsp. piscium OX=1513890 GN=queE PE=3 SV=1
MQDTLRITEVFYSLQGETRTAGLPTVFVRLTGCPLRCQYCDSAYAFSGGTIRTLESILEQVAGFRPRYVCVTGGEPLAQPNAIPLLKQLCDAGYEVSLETSGALDISAVDPRVSRVLDLKTPGSEEVQRNRYENIELLTPNDQVKFVICSREDYDWAVSKLIQYGLERRAGEVLFSPSHHDLNARDLADWIVADNLPVRLQLQLHKYLWNDEPGR

SEQ ID NO: 33206 - protein, 215 aa, Pseudomonas cichorii
  REGION 1..215: note = tr|A0A3M4MC20|A0A3M4MC20_PSECI 7-carboxy-7-deazaguanine synthase OS=Pseudomonas cichorii; OX = 36746 GN=queE PE=3 SV=1
MQDTLRITEIFYSLQGETRTAGLPTVFVRLTGCPLRCQYCDSAYAFTGGKIQTLDDILEQVAAYRPRYVCVTGGEPLAQPNAIPLLERLCDAGYQVSLETSGALDISAVDTRVSRVVDLKTPGSKEVTRNRYENMELLTPNDQVKFVICSRDDYDWAVSKLIQYGLDKRAGEVLFSASHHELKGRDLADWIVADNLPVRLQMQLHKILWDDEPGR

SEQ ID NO: 33207 - protein, 218 aa, Pseudomonas cichorii
  REGION 1..218: note = tr|A0A3M3TJA2|A0A3M3TJA2_PSECI 7-carboxy-7-deazaguanine synthase OS=Pseudomonas cichorii; OX = 36746 GN=queE PE=3 SV=1
MAHMQDTLRITEIFYSLQGETRTAGLPTVFVRLTGCPLRCQYCDSAYAFSGGKILTLDDILEQVAAYRPRYVCVTGGEPLAQPNAIPLLERLCDAGYEVSLETSGALDISAVDSRVSRVVDLKTPGSKEVARNRYENMELLTPNDQVKFVICSRDDYDWAVSKLIQYGLDKRAGEVLFSASHHELKGRDLADWIVADNLPVRLQMQLHKILWDDEPGR

SEQ ID NO: 33208 - protein, 215 aa, Pseudomonas citronellolis
  REGION 1..215: note = tr|A0A1A9K943|A0A1A9K943_9PSED 7-carboxy-7-deazaguanine synthase OS=Pseudomonas citronellolis OX=53408 GN=queE PE=3 SV=1
MQQTLRITEIFYSLQGEARTVGLPTVFVRLTGCPLRCQYCDSAYAFSGGEIRSLDSILETVAGYRPRYVCVTGGEPLAQPNCLPLLQRLCDAGYSVSLETSGALDIAATDRRVSRVLDLKTPGSGEVRRNRYENVAELTGNDQVKFVLCSREDYDWAVSKLIEYRLDERAGEVLFSPSHHQMAPRELADWIVADNLPVRFQMQLHKILWNDEPGR

SEQ ID NO: 33209 - protein, 226 aa, Pseudomonas citronellolis
  REGION 1..226: note = tr|A0A4Z0IEK3|A0A4Z0IEK3_9PSED 7-carboxy-7-deazaguanine synthase OS=Pseudomonas citronellolis OX=53408 GN=queE PE=3 SV=1
MACVAVTPVADMQQTLRITEIFYSLQGEARTVGLPTVFVRLTGCPLRCQYCDSAYAFSGGEIRSLDSILETVAGYRPRYVCVTGGEPLAQPNCLPLLQRLCDAGYSVSLETSGALDIAATDRRVSRVLDLKTPGSGEVRRNRYENIAELTGNDQVKFVLCSREDYDWAVSKLIEYRLDERAGEVLFSPSHHQLAPRELADWIVADNLPVRFQMQLHKILWNDEPGR

SEQ ID NO: 33210 - protein, 215 aa, unidentified
  source 1..215: note = Pseudomonas coleopterorum
  REGION 1..215: note = tr|A0A1H5F332|A0A1H5F332_9PSED 7-carboxy-7-deazaguanine synthase OS=Pseudomonas coleopterorum OX=1605838 GN=queE PE=3 SV=1
MQDTLRITEVFYSLQGETRTAGLPTVFVRLTGCPLRCQYCDSAYAFSGGTQRTLDSLMEQVASYKPRYVCVTGGEPLAQPNAIPLMQRLCDAGYEVSVETSGALDISAVDTRVSRVLDLKTPGSLEVHRNRYENIELLTRNDQVKFVLCSREDYDWAVSKLIQYGLDQRAGEVLFSPSKDQLRATDLADWIVADNLPVRLQMQLHKLLWNDEPGR

SEQ ID NO: 33211 - protein, 210 aa, unidentified
  source 1..210: note = Pseudomonas coleopterorum
  REGION 1..210: note = tr|A0A1H5DYE1|A0A1H5DYE1_9PSED 7-carboxy-7-deazaguanine synthase OS=Pseudomonas coleopterorum OX=1605838 GN=queE PE=3 SV=1
MTYSIKEIFYTLQGEGLRAGRPAVFCRFSGCNLWSGREADRSQAVCQFCDTDFAGTNGTLGGKYLTAENLVEQIASQWPVGQAHRYVVLTGGEPLLQVDDALIDALHNQDFEVAVETNGTIAAPTGIDWICVSPKAGTEWVQRSGDELKLVYPQPGLLPDTITTNDFKYYLLQPMDGPLQRQNTRSAIAYCQANTTWRLSVQTHKILEIR

SEQ ID NO: 33212 - protein, 226 aa, Pseudomonas composti
  REGION 1..226: note = tr|A0A1I5NBR9|A0A1I5NBR9_9PSED 7-carboxy-7-deazaguanine synthase OS=Pseudomonas composti; OX = 658457 GN=queE PE=3 SV=1
MACFVITHVATMQETLRITEIFYSLQGETRTAGLPTVFVRLTGCPLRCQYCDTAYAFSGGEIVTLDSILDQVSAYRPRYVCVTGGEPLAQPNCIPLLTRLCDAGYEVSLETSGALDVSAVDPRVSKVLDLKTPGSAEVQRNRYENIQWLTRNDQVKFVICSREDYDWAVSKLIEHGLAARADEVLFSPSHQQVDARALAEWIVVDNLPVRLQLQLHKILWNDEPGH

SEQ ID NO: 33213 - protein, 218 aa, Pseudomonas congelans
  REGION 1..218: note = tr|A0A0N8R127|A0A0N8R127_9PSED 7-carboxy-7-deazaguanine synthase OS=Pseudomonas congelans; OX = 200452 GN=queE PE=3 SV=1
MADMQDTLRITEIFHSLQGETRTAGLPTVFVRLTGCPLRCQYCDSAYAFSGGTIQTLDDILGQVASYRPRYVCVTGGEPLAQPNAIPLLKRLCDAGYEVSLETSGALDISAVDPRVSRVVDLKTPGSKEVSRNRYENMELLTANDQVKFVICSREDYDWAVSKLIQYGLDRRAGEVLFSASHHELKGRDLADWIVADNLPVRLQMQLHKILWDDEPGR

SEQ ID NO: 33214 - protein, 218 aa, unidentified
  source 1..218: note = Pseudomonas coronafaciens
  REGION 1..218: note = tr|A0A0P9KQB3|A0A0P9KQB3_9PSED 7-carboxy-7-deazaguanine synthase OS=Pseudomonas coronafaciens pv. atropurpurea OX=129135 GN=queE PE=3 SV=1
MADMQDTLRITEIFHSLQGETRTAGLPTVFVRLTGCPLRCQYCDSAYAFSGGTIQTLNDIVGQVASYRPRYVCVTGGEPLAQPNAIPLLKRLCDAGYEVSLETSGALDISAVDPRVSRVVDLKTPGSKEVSRNRYENMELLTPNDQVKFVICSREDYDWAVSKLIQYGLERRAGEVLFSASHHELKGRDLADWIVADNLPVRLQMQLHKILWDDEPGR

SEQ ID NO: 33215 - protein, 218 aa, unidentified
  source 1..218: note = Pseudomonas coronafaciens
  REGION 1..218: note = tr|A0A0Q0DSU7|A0A0Q0DSU7_9PSED 7-carboxy-7-deazaguanine synthase OS=Pseudomonas coronafaciens pv. zizaniae OX=251700 GN=queE PE=3 SV=1
MADMQDTLRITEIFHSLQGETRTAGLPTVFVRLTGCPLRCQYCDSAYAFSGGTIQTLDDIVGQVASYRPRYVCVTGGEPLAQPNAIPLLKRLCDAGYEVSLETSGALDISAVDPRVSRVVDLKTPGSKEVSRNRYENMELLTPNDQVKFVICSREDYDWAVSKLIQYGLERRAGEVLFSASHHELKGRDLADWIVADNLPVRLQMQLHKILWDDEPGR

SEQ ID NO: 33216 - protein, 218 aa, Pseudomonas corrugata
  REGION 1..218: note = tr|A0A3M3EXG9|A0A3M3EXG9_9PSED 7-carboxy-7-deazaguanine synthase OS=Pseudomonas corrugata; OX = 47879 GN=queE PE=3 SV=1
MATMQDTLRITEVFYSLQGETRTAGLPTVFVRLTGCPLRCQYCDSAYAFSGGTLRTLDDILEQVASYRPRYVCVTGGEPLAQPNAIPLLKQLCDAGYEVSLETSGALDISAVDPRVSRVVDLKTPGSKEAHRNRYENIELLTPNDQVKFVICSREDYDWAVSKLIQYGLDQRAGEVLVSPSHHDLNARDLADWVVADNLPVRLQLQLHKYLWNDEPGR

SEQ ID NO: 33217 - protein, 215 aa, Pseudomonas costantinii
  REGION 1..215: note = tr|A0A1S2V1X7|A0A1S2V1X7_9PSED 7-carboxy-7-deazaguanine synthase OS=Pseudomonas costantinii OX=168469 GN=queE PE=3 SV=1
MQDTLRITEVFYSLQGETRTAGLPTVFVRLTGCPLRCQYCDSAYAFSGGTVRTLDDILEQVAGFKPRYVCVTGGEPLAQPNAIPLLKQLCDAGYEVSLETSGALDISAVDPRVSRVVDLKTPDSKEAHRNLYTNLDLLTPNDQVKFVICSRDDYDWAASKLIQYGLERRAGEVLFSPSHHDLNARDLADWVVADNLPVRLQLQLHKYLWNDEPGR

SEQ ID NO: 33218 - protein, 215 aa, Pseudomonas cremoricolorata
  REGION 1..215: note = tr|A0A089WML9|A0A089WML9_9PSED 7-carboxy-7-deazaguanine synthase OS=Pseudomonas cremoricolorata OX=157783 GN=queE PE=3 SV=1
MQDTLRITEVFYSLQGETRTAGLPTVFVRLTGCPLRCQYCDSAYAFTGGTQRTLDSLMEQVASFKPRHVCVTGGEPLAQPNALPLLQRLCDAGYEVNLETSGALDISATDVRVSRVVDLKTPGSLECHRNRYENMQHLTPNDQVKFVICSREDYDWAVSKLIEFDLAQRAGEVLFSPSHVQVNARDLADWIVADNLPVRFQLQLHKLLWNDEPGR

SEQ ID NO: 33219 - protein, 226 aa, Pseudomonas cuatrocienegasensis
  REGION 1..226: note = tr|A0A1H9LY55|A0A1H9LY55_9PSED 7-carboxy-7-deazaguanine synthase OS=Pseudomonas cuatrocienegasensis OX=543360 GN=queE PE=3 SV=1
MACFAVTPVAHMLDTLRITEIFYSLQGETRTAGLPTVFVRLTGCPLRCQYCDTAYAFSGGELMPLDTIVERVAGYRPRYVCVTGGEPLAQPGCIALLTRLCDAGYEVSLETSGALDVSAVDPRVSKVLDLKTPGSAEVGRNRYDNIALLTLNDQVKFVICSREDYDWAVSKLIEYRLAERAGEVLFSPSHQQVSARALADWIVADNLPVRLQLQLHKLLWNDEPGH

SEQ ID NO: 33220 - protein, 215 aa, unidentified
  source 1..215: note = Pseudomonas daroniae
  REGION 1..215: note = tr|A0A4Q9QIY6|A0A4Q9QIY6_9PSED 7-carboxy-7-deazaguanine synthase OS=Pseudomonas daroniae; OX = 2487519 GN=queE PE=3 SV=1
MKDTLRITEIFFSLQGETRTAGLPTVFVRLTGCPLRCQYCDTAYAFSGGEVLTLDAILEQVASYRPRYVCVTGGEPLAQPNCIPLLERLCDAGYDVSLETSGALDVSAVDARVSKVIDLKTPGSAEVARNRYENIEYLQPRDQVKFVICSREDYDWSVSKIIQYGLAERAGELLFSPSHQQVSGRELAEWVIADNLPVRMQLQLHKILWNDEPGH

SEQ ID NO: 33221 - protein, 215 aa, Pseudomonas deceptionensis
  REGION 1..215: note = tr|A0A0J6J7X1|A0A0J6J7X1_PSEDM 7-carboxy-7-deazaguanine synthase OS=Pseudomonas deceptionensis OX=882211 GN=queE PE=3 SV=1
MQDTLRITEVFYSLQGETRTAGLPTVFVRLTGCPLRCGYCDSAYAFSGGTVRPLDDILEQVASFRPRYVCVTGGEPLAQPNAIPLLKQLCDAGYEVSIETSGALDISAVDPRVSRVLDLKTPGSKESHRNLYENIALLTPNDQVKFVICSREDYDWAVSKLIEYGLERRAGEVLFSPSHHDLPARDLADWIVADNLPVRLQMQLHKYLWNDEPGR

SEQ ID NO: 33222 - protein, 226 aa, Pseudomonas delhiensis
  REGION 1..226: note = tr|A0A239MW69|A0A239MW69_9PSED 7-carboxy-7-deazaguanine synthase OS=Pseudomonas delhiensis OX=366289 GN=queE PE=3 SV=1
MACTAVTPVADMQQTLRITEIFYSLQGEARTVGLPTVFVRLTGCPLRCQYCDSAYAFSGGEIRSLDSILETVAGYRPRHVCVTGGEPLAQPNCLPLLQRLCDAGYAVSLETSGALDISATDRRVSRVLDLKTPGSGEVRRNRYENIAQLTGNDQVKFVLCSREDYDWAVSKLIEYRLDERAGEVLFSPSHHQLAPRELADWIVADNLPVRFQMQLHKLLWNDEPGR

SEQ ID NO: 33223 - protein, 215 aa, unidentified
  source 1..215: note = Pseudomonas denitrificans
  REGION 1..215: note = tr|A0A5J6R1T0|A0A5J6R1T0_PSEDE 7-carboxy-7-deazaguanine synthase QueE OS=Pseudomonas denitrificans OX=43306 GN=queE PE=4 SV=1
MQQTLRITEIFYSLQGETRTAGLPTVFVRLTGCPLRCNYCDTAYAFSGGEIQSLDAILDQVAQYRPRYVCVTGGEPLAQPNCIPLLERLCDAGYEVSLETSGALDISATDRRVSRILDLKTPGSGEVVRNRYENIGELTSNDQVKFVICSREDYDWAVSKLIEYRLEQRAGEVLFSPSHREVHARELAAWIVSDNLPVRLQLQLHKILWNDEPGH

SEQ ID NO: 33224 - protein, 215 aa, unidentified
  source 1..215: note = Pseudomonas donghuensis
  REGION 1..215: note = tr|A0A2M9VH80|A0A2M9VH80_9PSED 7-carboxy-7-deazaguanine synthase OS=Pseudomonas donghuensis OX=1163398 GN=queE PE=3 SV=1
MQDTLRITEVFYSLQGETRTAGLPTVFVRLTGCPLRCQYCDSEYAFSGGSIRTLDSILDQVAGYKPRYVCVTGGEPLAQPNAIPLLKQLCDAGYDVSLETSGALDISKVDTRVSRVVDLKTPGSEEVHRNRYENIELLTPNDQVKFVICSREDYDWAVSKLIQYGLEKRAGEVLFSPSHHQVNATDLADWIVADNLPVRFQMQLHKLLWNDEPGR

SEQ ID NO: 33225 - protein, 215 aa, unidentified
  source 1..215: note = Pseudomonas dryadis
  REGION 1..215: note = tr|A0A4Q9QY40|A0A4Q9QY40_9PSED 7-carboxy-7-deazaguanine synthase OS=Pseudomonas dryadis; OX = 2487520 GN=queE PE=3 SV=1
MKDTLRITEIFFSLQGETRTAGLPTVFVRLTGCPLRCQYCDTAYAFSGGEIMTLDAILDQVAKYRPRYVCVTGGEPLAQPNCLPLLERLCDAGYDVSLETSGALDVSQVDGRVSKVIDLKTPGSAEVARNRYENIQYLQPRDQVKFVICSREDYDWSVSKIIQYGLAERAGELLFSPSHQQVNGRELAEWVIADNLPVRMQLQLHKILWNDEPGH

SEQ ID NO: 33226 - protein, 227 aa, Pseudomonas duriflava
  REGION 1..227: note = tr|A0A562QPC1|A0A562QPC1_9PSED 7-carboxy-7-deazaguanine synthase OS=Pseudomonas duriflava; OX = 459528 GN=queE PE=3 SV=1
MACIAVTPVAFMQPNTLRITEIFYSLQGETRTAGLPTVFVRLTGCPLRCQYCDTAYAFSGGEILSLETILEKVASYRPRYVCVTGGEPLAQPNCLPLLSRLCDAGYEVSLETSGALDVEPVDARVVKVIDLKTPGSAEVSRNLYSNLEHVTSNDQVKFVICSREDYEWAVSKLIQYQLSDRVGEVLFSPSHQQVTPRQLAEWIVADNLPVRFQLQLHKLLWNDEPGH

SEQ ID NO: 33227 - protein, 210 aa, Pseudomonas duriflava
  REGION 1..210: note = tr|A0A562PZ10|A0A562PZ10_9PSED 7-carboxy-7-deazaguanine synthase OS=Pseudomonas duriflava; OX = 459528 GN=queE PE=3 SV=1
MTYSVKEIFYTLQGEGLRAGRPAVFCRFAGCNLWSGRETDRSKAVCQFCDTDFVGTNGTLGGKYQTAEILVEQISSLWPSGQEHRYVVLTGGEPLMQVDEAFIEALHDQGFEIAVETNGTIPVPQGIDWICVSPKAGSEWVQRSGHELKLVYPQPGLLPMAALDSNFHYYLLQPMDGPMQRQNTRSAIAYCQENTKWRLSVQTHKILEIR

SEQ ID NO: 33228 - protein, 215 aa, unidentified
  source 1..215: note = Pseudomonas endophytica
  REGION 1..215: note = tr|A0A0Q0XAQ0|A0A0Q0XAQ0_9PSED 7-carboxy-7-deazaguanine synthase OS=Pseudomonas endophytica OX=1563157 GN=queE PE=3 SV=1
MQDTLRITEVFYSLQGETRTAGLPTVFVRLTGCPLRCQYCDSAYAFSGGAVRALDSILQEVADFRPRYVCVTGGEPLAQPNAIPLLKQLCDAGYEVSIETSGALDISAVDPRVSRVLDLKTPGSKESHRNLYENIALLTPHDQIKFVICSREDYDWAVSKLIEYGLERRAGEVLFSPSHHDLKARDLADWIVADNLPVRLQMQLHKYLWNDEPGR

SEQ ID NO: 33229 - protein, 215 aa, unidentified
  source 1..215: note = Pseudomonas entomophila
  REGION 1..215: note = tr|A0A3Q8U2Q0|A0A3Q8U2Q0_9PSED 7-carboxy-7-deazaguanine synthase OS=Pseudomonas entomophila OX=312306 GN=queE PE=3 SV=1
MQDTLRITEVFYSLQGETRTAGLPTVFVRLTGCPLRCQYCDSAYAFSGGTLRSLDSILEQVAGFKPRYVCVTGGEPLAQPNALPLLRSLCDAGYEVSLETSGALDISGVDTRVSRVVDLKTPGSEESHRNRYENIELLTRNDQVKFVICSREDYDWAVSKLIQYNLTERAGEVLFSPSHHQVKASDLADWIVADNLPVRFQLQLHKLLWNDEPGR

SEQ ID NO: 33230 - protein, 215 aa, unidentified
  source 1..215: note = Pseudomonas entomophila
  REGION 1..215: note = tr|Q1I6F7|Q1I6F7_PSEE4 7-carboxy-7-deazaguanine synthase OS=Pseudomonas entomophila (strain L48) OX=384676; GN = queE PE=3 SV=1
MQDTLRITEVFYSLQGETRTAGLPTVFVRLTGCPLRCQYCDSAYAFSGGTVRTLDSILEQVAGFKPRYVCVTGGEPLAQPNALPLLQRLCDAGYEVSLETSGALDIAGTDTRVSRVVDLKTPGSEESHRNRYENIELLTRNDQVKFVICSREDYDWAVSKLIQFNLAERAGEVLFSPSHHQVSATDLADWIVADNLPVRFQLQLHKLLWNDEPGR

SEQ ID NO: 33231 - protein, 215 aa, Pseudomonas extremaustralis
  REGION 1..215: note = tr|A0A5C5QG14|A0A5C5QG14_9PSED 7-carboxy-7-deazaguanine synthase OS=Pseudomonas extremaustralis OX=359110 GN=queE PE=3 SV=1
MQDTLRITEVFYSLQGETRTAGLPTVFVRLTGCPLRCQYCDSAYAFSGGTVRSLDDILEQVAGYRPRYVCVTGGEPLAQPNAIPLLKQLCDAGYEVSLETSGALDISAVDPRVSRVVDLKTPGSKEAHRNRYENIELLTANDQVKFVICSREDYDWANSKLIQYGLDRRAGEVLYSPSHHDLNARDLADWVVADNLPVRLQLQLHKYLWNDEPGR

SEQ ID NO: 33232 - protein, 215 aa, Pseudomonas extremorientalis
  REGION 1..215: note = tr|A0A1H0PT74|A0A1H0PT74_9PSED 7-carboxy-7-deazaguanine synthase OS=Pseudomonas extremorientalis OX=169669 GN=queE PE=3 SV=1
MQDTLRITEVFYSLQGETRTAGLPTVFVRLTGCPLRCQYCDSAYAFSGGTVRTLDDILEQVAGYKPRYVCVTGGEPLAQPNAIPLLKQLCDAGYEVSLETSGALDISAVDPRVSRVVDLKTPDSKESHRNRYENIELLTANDQVKFVICSRDDYEWANSKLIQYGLDRRAGEVLFSPSHHDLNARDLADWVVADNLPVRLQLQLHKYLWNDEPGR

SEQ ID NO: 33233 - protein, 218 aa, Pseudomonas ficuserectae; identical to SEQ ID NO: 33165
  REGION 1..218: note = tr|A0A0P9SPU0|A0A0P9SPU0_9PSED 7-carboxy-7-deazaguanine synthase OS=Pseudomonas ficuserectae OX=53410 GN=queE PE=3 SV=1

SEQ ID NO: 33234 - protein, 226 aa, Pseudomonas flavescens
  REGION 1..226: note = tr|A0A1G8JE32|A0A1G8JE32_9PSED 7-carboxy-7-deazaguanine synthase OS=Pseudomonas flavescens OX=29435 GN=queE PE=3 SV=1
MACFAVTPVALMKDTLRITEIFFSLQGETRTAGLPTVFVRLTGCPLRCQYCDTAYAFSGGDVMTLDAILEQVAGYRPRYVCVTGGEPLAQPNCMPLLERLCDAGFEVSLETSGALDVSRVDARVSKVVDLKTPGSAEVGRNRYENIEYLQPRDQVKFVICSREDYDWSVSKIIQYGLADRVDELLFSPSHQEVSGRQLAEWVIADNLPVRMQLQLHKILWNDEPGH

SEQ ID NO: 33235 - protein, 238 aa, unidentified
  source 1..238: note = Pseudomonas flexibilis
  REGION 1..238: note = tr|A0A1N6RB44|A0A1N6RB44_9PSED 7-carboxy-7-deazaguanine synthase OS=Pseudomonas flexibilis OX=706570 GN=queE PE=3 SV=1
MIAISEIFGPTIQGEGALIGMPTVFVRTGGCDFRCSWCDTRYAVDPVFRADWQPMDAEAILAEINRLSGGEPILVTLSGGNPALQPLEPLLLLGQLQGHRFAMETQGSKAQPWFDALDYLTLSPKPPSSGMPFRQDRFDACLAAAGAETQVSLKLVIVDEADYQWARTLAANYPQLPLFLQPCNPTPATTEQPEREADTQALNAQLRWLVERIAADRWYRPRVLPQLHVLIWSNERGV

SEQ ID NO: 33236 - protein, 238 aa, unidentified
  source 1..238: note = Pseudomonas flexibilis
  REGION 1..238: note = tr|A0A0B3BYL9|A0A0B3BYL9_9PSED 7-carboxy-7-deazaguanine synthase OS=Pseudomonas flexibilis OX=706570 GN=queE PE=3 SV=1
MIAISEIFGPTIQGEGALIGMPTVFVRTGGCDFRCSWCDTRYAVDPAFRADWQPMDAEAILAEINRLSGGEPILVTLSGGNPALQPLEPLLLLGQLQGHRFAMETQGSKAQPWFDALDYLTLSPKPPSSGMPFRQDRFDACLAAAGAETQVSLKLVIVDEADYQWARALAANYPQLQLFLQPCNPTPATPEQPAREADTQALNAQLRWLVERIAADRWYRPRVLPQLHVLIWNNERGV

SEQ ID NO: 33237 - protein, 215 aa, unidentified
  source 1..215: note = Pseudomonas floridensis
  REGION 1..215: note = tr|A0A1X0MZ80|A0A1X0MZ80_9PSED 7-carboxy-7-deazaguanine synthase OS=Pseudomonas floridensis OX=1958950 GN=queE PE=3 SV=1
MQDTLRITEIFHSLQGETRTAGLPTVFVRLTGCPLRCQYCDSAYAFSGGTIQTLDDIMGQVAAYRPRYVCVTGGEPLAQPNAIPLLKRLCDEGYEVSLETSGALDISAVDPRVSRVVDLKTPGSMEVTRNRYENMELLTPNDQVKFVICSREDYDWAVSKLIQYGLDRRAGEVLFSASHHELKGRDLADWIVADNLPVRLQMQLHKFLWDDEPGR

SEQ ID NO: 33238 - protein, 215 aa, Pseudomonas fluorescens
  REGION 1..215: note = tr|A0A0D0TEF2|A0A0D0TEF2_PSEFL 7-carboxy-7-deazaguanine synthase OS=Pseudomonas fluorescens OX=294 GN=queE_1 PE=3 SV=1
MQDTLRITEVFYSLQGETRTAGLPTVFVRLTGCPLRCQYCDSAYAFSGGTVRTLDDILEQVAGYRPRYVCVTGGEPLAQPNAIPLLKRLCDAGYEVSLETSGALDISAVDPRVSRVVDLKTPDSKEAHRNRYENIDLLTANDQVKFVICSRDDYDWASSKLIQYGLERRAGEVLFSPSHHDLNARDLADWVVADNLPVRLQLQLHKYLWNDEPGR

SEQ ID NO: 33239 - protein, 215 aa, Pseudomonas fluorescens; identical to SEQ ID NO: 33179
  REGION 1..215: note = tr|A0A120G2T1|A0A120G2T1_PSEFL 7-carboxy-7-deazaguanine synthase OS=Pseudomonas fluorescens OX=294 GN=queE PE=3 SV=1

SEQ ID NO: 33240 - protein, 215 aa, Pseudomonas fragi
  REGION 1..215: note = tr|A0A1H2H5Q6|A0A1H2H5Q6_PSEFR 7-carboxy-7-deazaguanine synthase OS=Pseudomonas fragi; OX = 296 GN=queE PE=3 SV=1
MQDTLRITEVFYSLQGETRTAGLPTVFVRLTGCPLRCGYCDSAYAFSGGTVRPLDDILEQVASYRPRYVCVTGGEPLAQPNAIPLLKQLCDAGYEVSIETSGALDISAVDPRVSRVLDLKTPGSKESHRNLYENIALLTPNDQVKFVICSREDYDWAVSKLIEYGLERRAGEVLFSPSHHDLSARDLADWIVADNLPVRLQMQLHKYLWNDEPGR

SEQ ID NO: 33241 - protein, 215 aa, Pseudomonas fragi
  REGION 1..215: note = tr|A0A266LTN2|A0A266LTN2_PSEFR 7-carboxy-7-deazaguanine synthase OS=Pseudomonas fragi; OX = 296 GN=queE PE=3 SV=1
MQDTLRITEVFYSLQGETRTAGLPTVFVRLTGCPLRCGYCDSAYAFSGGTVRPLDDILEQVASFRPRYVCVTGGEPLAQPNAIPLLKQLCDAGYEVSIETSGALDISAVDPRVSRVLDLKTPGSKESHRNLYENIALLTPNDQVKFVICSREDYDWAVSKLIEYGLERRAGEVLFSPSHHDLSARDLADWIVADNLPVRLQMQLHKYLWNDEPGR

SEQ ID NO: 33242 - protein, 215 aa, Pseudomonas frederiksbergensis
  REGION 1..215: note = tr|A0A2S8HCD8|A0A2S8HCD8_9PSED 7-carboxy-7-deazaguanine synthase OS=Pseudomonas frederiksbergensis OX=104087 GN=queE PE=3 SV=1
MQDTLRITEVFYSLQGETRTAGLPTVFVRLTGCPLRCQYCDSAYAFTGGTLRTLDDILEQVAGFRPRYVCVTGGEPLAQPNAIPLLKQLCDAGYEVSLETSGALDISAVDPRVSRVVDLKTPGSKEAHRNRYENIELLTPNDQVKFVICSREDYDWAVSKLIQYGLSERAGEVLFSPSHHDLNARDLADWVVADNLPVRLQLQLHKYLWNDEPGR

SEQ ID NO: 33243 - protein, 215 aa, Pseudomonas frederiksbergensis
  REGION 1..215: note = tr|A0A423KEP3|A0A423KEP3_9PSED 7-carboxy-7-deazaguanine synthase OS=Pseudomonas frederiksbergensis OX=104087 GN=queE PE=3 SV=1
MQDTLRITEVFYSLQGETRTAGLPTVFVRLTGCPLRCQYCDSAYAFTGGTIRPLDDILEQVAGFRPRYVCVTGGEPLAQPNAIPLLKRLCDAGYEVSLETSGALDISAVDSRVSRVVDLKTPGSKEAHRNRYENIELLTPNDQVKFVICSREDYDWAVSKLIQYGLDRRAGEVLFSPSHHDLNARDLADWVVADNLPVRLQLQLHKYLWNDEPGR

SEQ ID NO: 33244 - protein, 226 aa, Pseudomonas fulva
  REGION 1..226: note = tr|F6AGX5|F6AGX5_PSEF1 7-carboxy-7-deazaguanine synthase OS=Pseudomonas fulva (strain 12-X) OX=743720; GN = queE PE=3 SV=1
MACLAVTPGAPMKDTLRITEIFFSLQGEARTAGLPTVFVRLTGCPLRCQYCDTAYAFSGGELLSLDAILEQVASYRPRYVCVTGGEPLAQPNCIPLLEKLCDAGYDVSLETSGALDVAAVDPRVSKVVDLKTPGSAEIGRNRYENIVHLQPRDQVKFVICSREDYDWSVSKVIQYDLPTRVGEVLFSPSHGQVSGRQLAEWVIADNLPVRMQLQLHKILWNDEPGH

SEQ ID NO: 33245 - protein, 215 aa, Pseudomonas fulva
  REGION 1..215: note = tr|A0A2V4JV29|A0A2V4JV29_9PSED 7-carboxy-7-deazaguanine synthase OS=Pseudomonas fulva; OX = 47880 GN=queE PE=3 SV=1
MQDTLRITEVFYSLQGETRTAGLPTVFVRLTGCPLRCQYCDSGYAFSGGTLRSLDSILEQVAGFKPRYVCVTGGEPLAQPNALPLLQRLCDAGYEVSLETSGALDIAGTDTRVSRVVDLKTPGSEESHRNRYENIEHLTPNDQVKFVICSREDYDWAVSKLIQYNLAERAGEVLFSPSHHQVSATDLADWIVADNLPVRFQLQLHKLLWNDEPGR

SEQ ID NO: 33246 - protein, 215 aa, unidentified
  source 1..215: note = Pseudomonas furukawaii
  REGION 1..215: note = tr|L8MFH4|L8MFH4_PSEFK 7-carboxy-7-deazaguanine synthase OS=Pseudomonas furukawaii OX=1149133 GN=queE PE=3; SV = 1
MHQTLRITEIFYSLQGETRTAGLPTVFVRLTGCPLRCQYCDTAYAFSGGDMITLDDILERVASYKPRYVCVTGGEPLAQPNCIPLLQRLCDAGYEVSLETSGALDVSSVDPRVSKVLDLKTPGSAEVGRNRYENIVHLTPNDQVKFVICSREDYDWAVSKLIEYRLEKRAGEVLFSPSHKQVNARDLADWIVADNLPVRLQLQLHKILWNDEPGH

SEQ ID NO: 33247 - protein, 215 aa, Pseudomonas fuscovaginae
  REGION 1..215: note = tr|A0A0N0E267|A0A0N0E267_9PSED 7-carboxy-7-deazaguanine synthase OS=Pseudomonas fuscovaginae OX=50340 GN=queE PE=3 SV=1
MQDTLRITEVFYSLQGETRTAGLPTVFVRLTGCPLRCQYCDSAYAFSGGSILSLDSILDQVASYRPRYVCVTGGEPLAQPNAIPLLKRLCDAGYEVSLETSGSMDISPVDTRVSRVVDLKTPGSKEVHRNRYENIELLTRNDQVKFVICSREDYDWSVSKLIQYGLEKRAGEVLFSPSHHDLSARDLADWIVADNLPVRLQMQLHKYLWNDEPGR

SEQ ID NO: 33248 - protein, 215 aa, Pseudomonas fuscovaginae
  REGION 1..215: note = tr|A0A1H6PFV8|A0A1H6PFV8_9PSED 7-carboxy-7-deazaguanine synthase OS=Pseudomonas fuscovaginae OX=50340 GN=queE PE=3 SV=1
MQDTLRITEVFYSLQGETRTAGLPTVFVRLTGCPLRCQYCDSAYAFSGGSLLSLDDILDQVAGYRPRYVCVTGGEPLAQPNVIPLLKRLCDAGYEVSLETSGSMDISAVDTRVSRVVDLKTPGSKEVHRNRYENIEQLTRNDQVKFVICSREDYDWSVSKLIQYGLEKRAGEVLFSPSHHDLPARELADWIVADNLPVRLQMQLHKYLWNDEPGR

SEQ ID NO: 33249 - protein, 233 aa, unidentified
  source 1..233: note = [Pseudomonas] geniculata
  REGION 1..233: note = tr|A0A0L8A687|A0A0L8A687_9GAMM 7-carboxy-7-deazaguanine synthase OS=[Pseudomonas] geniculata N1 OX=1167641 GN=queE PE=3 SV=1
MTAVTPSSAAATPSEIVQSPLPRLKITEIFTSLQGEADTAGWPTVFVRLTGCPLRCQYCDTAYAFHGGTWWDIDDIVAEVLAQGVRHVCVTGGEPLAQKRCLVLLQKLCDAGMDVSLETSGALDVSAVDPRVSRVVDIKTPGSAEVARNRWDNLPLLTARDQIKFVICSREDYDWAKSLLAEHDLVKRCTVFFSPSKGEITARQLADWIVEDRLPVRFQMQLHKILWNDEPGR

SEQ ID NO: 33250 - protein, 215 aa, Pseudomonas gessardii
  REGION 1..215: note = tr|A0A1V2JNV9|A0A1V2JNV9_9PSED 7-carboxy-7-deazaguanine synthase OS=Pseudomonas gessardii; OX = 78544 GN=queE PE=3 SV=1
MQDTLRITEVFYSLQGETRTAGLPTVFVRLTGCPLRCQYCDSAYAFSGGTIRTLDDILEQVAGFRPRYVCVTGGEPLAQPNAIPLLKQLCDAGYEVSLETSGALDISAVDPRVSRVVDLKTPDSKEAHRNRYENIELLTANDQVKFVICSRDDYDWANSKLIQYGLDRRAGEVLFSPSHHDLNARDLADWVVADNLPVRLQLQLHKYLWNDEPGR

SEQ ID NO: 33251 - protein, 215 aa, unidentified
  source 1..215: note = Pseudomonas gingeri
  REGION 1..215: note = tr|A0A2K1F647|A0A2K1F647_9PSED 7-carboxy-7-deazaguanine synthase OS=Pseudomonas gingeri NCPPB 3146 = LMG 5327 OX=707248 GN=queE PE=3 SV=1
MQDTLRITEVFYSLQGETRTAGLPTVFVRLTGCPLRCQYCDSAYAFSGGTLMSLDSILDQVAGYRPRYVCVTGGEPLAQPNAIPLLKRLCDAGYEVSLETSGSLDISAVDTRVSRVVDLKTPGSREAHRNRYENIELLTANDQVKFVICSREDYDWSVSKLIQYGLEKRAGEVLFSPSHHDLPARELADWIVADNLPVRLQMQLHKYLWNDEPGR

SEQ ID NO: 33252 - protein, 226 aa, Pseudomonas graminis
  REGION 1..226: note = tr|A0A4R7VYT5|A0A4R7VYT5_9PSED 7-carboxy-7-deazaguanine synthase OS=Pseudomonas graminis; OX = 158627 GN=queE PE=3 SV=1
MACLAVTPVAPMQDTLRITEVFYSLQGETRTAGLPTVFVRLTGCPLRCGYCDSEYAFTGGTIQTLDSLMEQVASYRPRYVCVTGGEPLAQPNAIPLLQRLCDAGYEVSLETSGALDISKVDPRVSRVVDLKTPGSKEVARNRYENIDLLTPNDQIKFVICSREDYDWAVSKIIQYGLDRRAGEVLFSPVHRDLNVRDLADWIVADNLPVRLQLQLHKILWNDEPGR

SEQ ID NO: 33253 - protein, 215 aa, Pseudomonas graminis
  REGION 1..215: note = tr|A0A1X0VLV6|A0A1X0VLV6_9PSED 7-carboxy-7-deazaguanine synthase OS=Pseudomonas graminis; OX = 158627 GN=queE PE=3 SV=1
MQDTLRITEIFHSLQGETRTAGLPTVFVRLTGCPLRCQYCDSAYAFSGGALQTLDDILGQVASYRPRYVCVTGGEPLAQPNAIPLLKRLCDAGYEVSLETSGALDISAVDPRVSRVVDLKTPGSKEVARNRYENMELLTSNDQVKFVICSREDYDWAVSKLIQYGLDRRAGEVLFSASHHELKGRDLADWIVADNLPVRLQMQLHKILWDDEPGR

SEQ ID NO: 33254 - protein, 215 aa, Pseudomonas grimontii
  REGION 1..215: note = tr|A0A1H1BGT6|A0A1H1BGT6_9PSED 7-carboxy-7-deazaguanine synthase OS=Pseudomonas grimontii; OX = 129847 GN=queE PE=3 SV=1
MQDTLRITEVFYSLQGETRTAGLPTVFVRLTGCPLRCQYCDSAYAFSGGTVRTLEDILEQVASYRPRYVCVTGGEPLAQPNAIPLLKQLCDAGYEVSLETSGALDISAVDPRVSRVVDLKTPGSKEVHRNRYENIELLTPNDQVKFVICSREDYDWANSKLIQYGLDRRAGEVLFSPSHHDLNARDLADWVVADNLPVRLQLQLHKYLWNDEPGR

SEQ ID NO: 33255 - protein, 215 aa, unidentified
  source 1..215: note = Pseudomonas guangdongensis
  REGION 1..215: note = tr|A0A1H2DUD6|A0A1H2DUD6_9PSED 7-carboxy-7-deazaguanine synthase OS=Pseudomonas guangdongensis OX=1245526 GN=queE PE=3 SV=1
MNQTLRITEIFYSLQGETRSAGLPTVFVRLTGCPLRCQYCDTAYAFSGGEIMTLEEILAQVAGYRPRYVCVTGGEPLAQPNCIALLTALCDAGYEVSLETSGALDIAPVDVRVSRVVDLKTPGSAEVGRNRYENMAELTRNDQVKFVACSREDYDWAVSKIIEYRLDARAGEVLMSPSHKELDARTLADWIVADNLPVRMQLQLHKYLWNDEPGH

SEQ ID NO: 33256 - protein, 215 aa, unidentified
  source 1..215: note = Pseudomonas guariconensis
  REGION 1..215: note = tr|A0A1G6XI44|A0A1G6XI44_9PSED 7-carboxy-7-deazaguanine synthase OS=Pseudomonas guariconensis OX=1288410 GN=queE PE=3 SV=1
MQDTLRITEVFYSLQGETRTAGLPTVFVRLTGCPLRCQYCDSAYAFSGGTVRTLDDILKQVAGFRPRYVCVTGGEPLAQPNALPLLQRLCDAGYEVSLETSGALDIAQVDPRVSRVVDLKTPGSEESHRNLYENIEHLTRNDQVKFVICSREDYDWAVSKLIQYNLAQRAGEVLFSPSHHQVSATDLADWIVADNLPVRFQLQLHKLLWNDEPGR

SEQ ID NO: 33257 - protein, 215 aa, unidentified
  source 1..215: note = Pseudomonas guariconensis
  REGION 1..215: note = tr|A0A2N5Q899|A0A2N5Q899_9PSED 7-carboxy-7-deazaguanine synthase OS=Pseudomonas guariconensis OX=1288410 GN=queE PE=3 SV=1
MQDTLRITEVFYSLQGETRTAGLPTVFVRLTGCPLRCQYCDSAYAFSGGTVRTLDDILEQVAGFRPRYVCVTGGEPLAQPNALPLLQRLCDAGYEVSLETSGALDIAQVDRRVSRVVDLKTPGSEESHRNLYENIEHLTRNDQVKFVICSREDYDWAVSKLIQYNLAQRAGEVLFSPSHHQVSATDLADWIVADNLPVRFQLQLHKLLWNDEPGR

SEQ ID NO: 33258 - protein, 226 aa, unidentified
  source 1..226: note = Pseudomonas guguanensis
  REGION 1..226: note = tr|A0A1H0XG06|A0A1H0XG06_9PSED 7-carboxy-7-deazaguanine synthase OS=Pseudomonas guguanensis OX=1198456 GN=queE PE=3 SV=1
MTCFVITPVATMQETLRITEIFYSLQGETRTAGLPTVFVRLTGCPLRCQYCDTAYAFSGGEIVTLDSILDQVAAYRPRYVCVTGGEPLAQPNCIPLLTRLCDAGYEVSLETSGALDVSAVDPRVSKVLDLKTPGSAEVQRNRYENIEWLTANDQVKFVICSREDYDWAVSRLIQYDLAARAGEVLFSPSHKQVDARALADWIVADNLPVRLQLQLHKILWNDEPGH

SEQ ID NO: 33259 - protein, 215 aa, Pseudomonas guineae
  REGION 1..215: note = tr|A0A1I3CCG9|A0A1I3CCG9_9PSED 7-carboxy-7-deazaguanine synthase OS=Pseudomonas guineae; OX = 425504 GN=queE PE=3 SV=1
MQDTLRITEIFYSLQGETRTAGLPTVFVRLTGCPLRCQYCDTAYAFSGGEMMSLDAIVEQVAGYKPRYICVTGGEPLAQPNCIALLKRLCDAGYEVSLETSGALDVSAVDPRVSKVLDLKTPGSAEVARNRYENIAMLTPNDQVKFVICSREDYDWAVSKLIQYGLDARVNEVLMSPSHHELEARALAEWIVADNLPVRLQMQLHKILWNDEPGH

SEQ ID NO: 33260 - protein, 215 aa, unidentified
  source 1..215: note = Pseudomonas helleri
  REGION 1..215: note = tr|A0A0J6J2Q6|A0A0J6J2Q6_9PSED 7-carboxy-7-deazaguanine synthase OS=Pseudomonas helleri; OX = 1608996 GN=queE PE=3 SV=1
MQDTLRITEVFYSLQGETRTAGLPTVFVRLTGCPLRCQYCDSAYAFSGGTVRSLDSILEQVADFRPRYVCVTGGEPLAQPNAIPLLKQLCDAGYDVSIETSGALDISAVDPRVSRVLDLKTPGSKESHRNLYENIALLTPHDQVKFVICSREDYDWAVSKLIEYGLERRAGEVLFSPSHHDLAARDLADWIVADNLPVRLQMQLHKYLWNDEPGR

SEQ ID NO: 33261 - protein, 215 aa, unidentified; identical to SEQ ID NO: 33173
  source 1..215: note = Pseudomonas helmanticensis
  REGION 1..215: note = tr|A0A4R7V3P1|A0A4R7V3P1_9PSED 7-carboxy-7-deazaguanine synthase OS=Pseudomonas helmanticensis OX=1471381 GN=queE PE=3 SV=1

SEQ ID NO: 33262 - protein, 215 aa, unidentified
  source 1..215: note = Pseudomonas hunanensis
  REGION 1..215: note = tr|A0A2I0C7Q4|A0A2I0C7Q4_9PSED 7-carboxy-7-deazaguanine synthase OS=Pseudomonas hunanensis OX=1247546 GN=queE PE=3 SV=1
MQDTLRITEVFYSLQGETRTAGLPTVFVRLTGCPLRCQYCDSAYAFSGGTIRTLDSILEQVAGFKPRYVCVTGGEPLAQPNALPLLQRLCDAGYEVSLETSGALDIAGTDTRVSRVVDLKTPGSEESHRNRYENIEQLTRNDQVKFVICSREDYDWAVSKLIQYNLAERAGEVLFSPSHHQVNASDLADWIVADNLPVRFQLQLHKLLWNDEPGR

SEQ ID NO: 33263 - protein, 215 aa, unidentified
  source 1..215: note = Pseudomonas hussainii
  REGION 1..215: note = tr|A0A1H7PSB2|A0A1H7PSB2_9PSED 7-carboxy-7-deazaguanine synthase OS=Pseudomonas hussainii; OX = 1429083 GN=queE PE=3 SV=1
MKDTLRITEVFYSLQGETRTLGLPTVFVRLTGCPLRCQYCDTAYAFAGGELMSLEAIVAKVASFNPRYVCVTGGEPLAQPNALPLLRLLCDAGYEVSLETSGAIDVTGVDPRVVKVLDLKTPGSAEVARNRYDNIALLNPHDQVKFVICSREDYDWAVSKLIEYRLAERVQDVLFSPSFSELDSRALADWIVSDNLPVRFQLQLHKILWQDEPGH

SEQ ID NO: 33264 - protein, 226 aa, Pseudomonas indica
  REGION 1..226: note = tr|A0A1G8W2M3|A0A1G8W2M3_9PSED 7-carboxy-7-deazaguanine synthase OS=Pseudomonas indica; OX = 137658 GN=queE PE=3 SV=1
MACFAVTPVADMQETLRITEIFYSLQGETRTAGLPTVFVRLTGCPLRCQYCDTAYAFSGGEIMTLDAILERVASYKPRYVCVTGGEPLAQPNCIPLLERLCDAGYEVSLETSGALDIAGVDSRVSRVVDLKTPGSAEVARNRYENLGLINRNDQVKFVLCSREDYDWAVSKLIEYRLDQRAGEVLFSPSHHELDARSLADWIVSDNLPVRLQLQLHKLLWNDEPGH

SEQ ID NO: 33265 - protein, 215 aa, unidentified
  source 1..215: note = Pseudomonas indoloxydans
  REGION 1..215: note = tr|A0A2T5PHB6|A0A2T5PHB6_9PSED 7-carboxy-7-deazaguanine synthase OS=Pseudomonas indoloxydans OX=404407 GN=queE PE=3 SV=1
MQETLRITEIFHSLQGETRTAGLPTVFVRLTGCPLRCQYCDTAYAFSGGEIVTLDSILDQVAAYRPRYVCVTGGEPLAQPNCITLLARLCDAGYEVSLETSGALDVSAVDARVSKVLDLKTPGSAEVQRNRYENVQWLTRNDQVKFVICSREDYDWAVSKLIEYDLAARAGEVLFSPSHKQVDVRALADWIVADNLPVRLQLQLHKILWNDEPGH

SEQ ID NO: 33266 - protein, 215 aa, Pseudomonas japonica
  REGION 1..215: note = tr|A0A239FIW6|A0A239FIW6_9PSED 7-carboxy-7-deazaguanine synthase OS=Pseudomonas japonica; OX = 256466 GN=queE PE=3 SV=1
MQDTLRITEVFYSLQGETRTAGLPTVFVRLTGCPLRCQYCDSAYAFNGGTIRTLDSILEQVASYRPRYVCVTGGEPLAQPNAIPLLQRLCDAGYDVSLETSGSIDISAVDTRVSRVVDLKTPGSAEVHRNRYENIELLTPNDQVKFVLCSREDYDWAVSKLIQYGLDKRAGEVLFSPSHHQLNATDLADWIVADNLPVRLQMQLHKLLWNDEPGR

SEQ ID NO: 33267 - protein, 215 aa, Pseudomonas jessenii
  REGION 1..215: note = tr|A0A2W0EKG3|A0A2W0EKG3_9PSED 7-carboxy-7-deazaguanine synthase OS=Pseudomonas jessenii; OX = 77298 GN=queE PE=3 SV=1
MQDTLRITEVFYSLQGETRTAGLPTVFVRLTGCPLRCQYCDSAYAFTGGTIRTLDDILEQVAGFRPRYVCVTGGEPLAQPNAIPLLKRLCDAGYEVSLETSGSIDISAVDSRVSRVVDLKTPGSKEAHRNRYENIELLTPNDQVKFVICSREDYDWSVSKLIQYGLDQRAGEVLFSPSHHDLNARDLADWVVADNLSVRLQLQLHKYLWNDEPGR

SEQ ID NO: 33268 - protein, 215 aa, Pseudomonas jessenii; identical to SEQ ID NO: 33173
  REGION 1..215: note = tr|A0A2V4KR85|A0A2V4KR85_9PSED 7-carboxy-7-deazaguanine synthase OS=Pseudomonas jessenii; OX = 77298 GN=queE PE=3 SV=1

SEQ ID NO: 33269 - protein, 226 aa, Pseudomonas jinjuensis
  REGION 1..226: note = tr|A0A1H0A6B9|A0A1H0A6B9_9PSED 7-carboxy-7-deazaguanine synthase OS=Pseudomonas jinjuensis OX=198616 GN=queE PE=3 SV=1
MACFAVTPVADMQQTLRITEIFYSLQGETRTAGLPTVFVRLTGCPLRCQYCDTAYAFNGGDIMSVDAILERVAAFKPRHVCVTGGEPLAQPNCIPLLQRLCDAGYEVSLETSGALDISATDRRVSRVVDLKTPGSGEVRRNRYENLDQLTGNDQVKFVICSRDDYDWAVSKLIEYRLEQRAGEVLFSPSHRQVDARALADWIVSDNLPVRLQLQLHKILWNDEPGH

SEQ ID NO: 33270 - protein, 215 aa, unidentified
  source 1..215: note = Pseudomonas kairouanensis
  REGION 1..215: note = tr|A0A4Z0ATS4|A0A4Z0ATS4_9PSED 7-carboxy-7-deazaguanine synthase OS=Pseudomonas kairouanensis OX=2293832 GN=queE PE=3 SV=1
MQDTLRITEVFYSLQGETRTAGLPTVFVRLTGCPLRCQYCDSAYAFSGGTVRTLDDILEQVAGYRPRYVCVTGGEPLAQPNAIPLLKQLCDAGYEVSLETSGALDISAVDPRVSRVVDLKTPDSKESHRNRYENMDLLTSNDQVKFVICSRDDYDWANSKLIQYGLDRRAGEVLFSPSHHDLNARDLADWVVADNLPVRLQLQLHKYLWNDEPGR

SEQ ID NO: 33271 - protein, 215 aa, Pseudomonas kilonensis
  REGION 1..215: note = tr|A0A1H5CT41|A0A1H5CT41_9PSED 7-carboxy-7-deazaguanine synthase OS=Pseudomonas kilonensis OX=132476 GN=queE PE=3 SV=1
MQDTLRITEVFYSLQGETRTAGLPTVFVRLTGCPLRCQYCDSAYAFSGGTLRTLDDILEQVASYRPRYVCVTGGEPLAQPNAIPLLKQLCDAGYQVSLETSGALDISAVDPRVSRVVDLKTPGSKEAHRNRYENIELLTPNDQVKFVICSREDYDWAVSKLIQYGLDQRAGEVLLSPSHHDLSARDLADWVVADNLPVRLQLQLHKYLWNDEPGR

SEQ ID NO: 33272 - protein, 215 aa, Pseudomonas kilonensis; identical to SEQ ID NO: 33187
  REGION 1..215: note = tr|A0A0F4XTI5|A0A0F4XTI5_9PSED 7-carboxy-7-deazaguanine synthase OS=Pseudomonas kilonensis OX=132476 GN=queE PE=3 SV=1

SEQ ID NO: 33273 - protein, 226 aa, Pseudomonas knackmussii
  REGION 1..226: note = tr|A0A024HE64|A0A024HE64_PSEKB 7-carboxy-7-deazaguanine synthase OS=Pseudomonas knackmussii (strain DSM 6978 / LMG 23759 / B13) OX=1301098; GN = queE PE=3 SV=1
MACSAVTPVADMQQTLRITEIFYSLQGEARTVGLPTVFVRLTGCPLRCQYCDSAYAFSGGEIQSLDAILEMVASYRPRYVCVTGGEPLAQPNCIPLLQRLCDAGYSVSLETSGALDISAVDPRVSRVLDLKTPGSAEVARNRYENIGLLTANDQVKFVLCSREDYDWAVSKLIEYRLDERAGEVLFSPSHHQLAPRDLADWIVADNLPVRFQMQLHKVLWNDEPGR

SEQ ID NO: 33274 - protein, 215 aa, Pseudomonas koreensis
  REGION 1..215: note = tr|A0A4Q4L9Q0|A0A4Q4L9Q0_9PSED 7-carboxy-7-deazaguanine synthase OS=Pseudomonas koreensis; OX = 198620 GN=queE PE=3 SV=1
MQDTLRITEVFYSLQGETRTAGLPTVFVRLTGCPLRCQYCDSAYAFSGGTVRTLDDILEQVAGYRPRYVCVTGGEPLAQPNAIPLLERLCDAGYEVSLETSGALDVSAVDPRVSRVVDLKTPGSKEAHRNRYENVELLTRNDQVKFVICSREDYDWAVSKLIQYGLDQRAGEVLFSPSHHDLNARELADWVVADNLPVRLQLQLHKYLWNDEPGR

SEQ ID NO: 33275 - protein, 215 aa, Pseudomonas koreensis
  REGION 1..215: note = tr|A0A1A9JIP8|A0A1A9JIP8_9PSED 7-carboxy-7-deazaguanine synthase OS=Pseudomonas koreensis; OX = 198620 GN=queE PE=3 SV=1
MQDTLRITEVFYSLQGETRTAGLPTVFVRLTGCPLRCQYCDSAYAFTGGTIRTLDDILEQVAGFRPRYVCVTGGEPLAQPNAIPLLKRLCDAGYEVSLETSGALDVSAVDPRVSRVVDLKTPGSKEAHRNRYENIELLTPNDQVKFVICSREDYDWAVSKLIQYGLDRRAGEVLFSPSHHDLNARDLADWVVADNLPVRLQLQLHKYLWNDEPGR

SEQ ID NO: 33276 - protein, 215 aa, unidentified
  source 1..215: note = Pseudomonas kribbensis
  REGION 1..215: note = tr|A0A345RUV8|A0A345RUV8_9PSED 7-carboxy-7-deazaguanine synthase OS=Pseudomonas kribbensis OX=1628086 GN=queE PE=3 SV=1
MQDTLRITEVFYSLQGETRTAGLPTVFVRLTGCPLRCQYCDSAYAFSGGTIRTLDDILEQVAGFRPRYVCVTGGEPLAQPNAIPLLKQLCDAGYEVSLETSGALDISAVDPRVSRVVDLKTPDSKEAHRNRYENIELLTPNDQVKFVICSRDDYDWAVSKLIQYGLDRRAGEVLFSPSHHDLNARDLADWVVADNLPVRLQLQLHKYLWNDEPGR

SEQ ID NO: 33277 - protein, 224 aa, unidentified
  source 1..224: note = Pseudomonas kunmingensis
  REGION 1..224: note = tr|A0A2N8SF21|A0A2N8SF21_9PSED 7-carboxy-7-deazaguanine synthase OS=Pseudomonas kunmingensis OX=1211807 GN=queE PE=3 SV=1
MACLAVTPVADMTLRITEIFYSLQGETRTSGLPTVFVRLTGCPLRCQYCDTAYAFSGGELMTLDAIVERVASYNPRYVCVTGGEPLAQPNCVPLLQRLCDAGYEVSLETSGALDISVVDERVSRVVDLKTPGSAEVARNRYENIACITRNDQVKFVICSREDYDWAVSKLIEYGLDRRAGEVLFSPSHGQVDVRALADWIVADNLPVRLQLQLHKIIWNDAPGH

SEQ ID NO: 33278 - protein, 215 aa, unidentified; identical to SEQ ID NO: 33179
  source 1..215: note = Pseudomonas lactis
  REGION 1..215: note = tr|A0A0R3CK50|A0A0R3CK50_9PSED 7-carboxy-7-deazaguanine synthase OS=Pseudomonas lactis; OX = 1615674 GN=queE PE=3 SV=1

SEQ ID NO: 33279 - protein, 215 aa, unidentified
  source 1..215: note = Pseudomonas lactis
  REGION 1..215: note = tr|I4K9M8|I4K9M8_9PSED 7-carboxy-7-deazaguanine synthase OS=Pseudomonas lactis OX=1615674 GN=queE PE=3 SV=1
MQDTLRITEVFYSLQGETRTAGLPTVFVRLTGCPLRCQYCDSAYAFSGGTVRTLDDILEQVAGYRPRYVCVTGGEPLAQPNAIPLLKQLCDAGYEVSLETSGALDISAVDSRVSRVVDLKTPDSKEAHRNRYENIDLLTANDQVKFVICSRDDYDWATSKLIQYGLERRAGEVLFSPSHHDLNARELADWVVADNLPVRLQLQLHKYLWNDEPGR

SEQ ID NO: 33280 - protein, 215 aa, unidentified
  source 1..215: note = Pseudomonas laurylsulfatiphila
  REGION 1..215: note = tr|A0A2S6FMQ6|A0A2S6FMQ6_9PSED 7-carboxy-7-deazaguanine synthase OS=Pseudomonas laurylsulfatiphila OX=2011015 GN=queE PE=3 SV=1
MQDTLRITEVFYSLQGETRTAGLPTVFVRLTGCPLRCQYCDSAYAFTGGTIRTLDDILEQVAGFRPRYVCVTGGEPLAQPNAIPLLKRLCDAGYEVSLETSGSIDISPVDSRVSRVVDLKTPGSKEAHRNRYENIELLTPNDQVKFVICSREDYDWSVSKLIQYGLDQRAGEVLFSPSHHDLNARELADWVVADNLPVRLQLQLHKYLWNDEPGR

SEQ ID NO: 33281 - protein, 211 aa, unidentified
  source 1..211: note = Pseudomonas laurylsulfatiphila
  REGION 1..211: note = tr|A0A2S6FJJ8|A0A2S6FJJ8_9PSED 7-carboxy-7-deazaguanine synthase OS=Pseudomonas laurylsulfatiphila OX=2011015 GN=queE PE=3 SV=1
MTYSIKEMFYTLQGEGNQAGRPAVFCRFSGCNLWSGREQDRANAICTFCDTDFVGSDGEGGNKFKTAEDLAYAIELLWPISHQRYKYVVLTGGEPLLQVDDALITALHNLEFTIAVETNGTISPPPGIDWICVSPKSTAQLKITKGDELKLVFPQPDSMPNQFEHLDFKNFYLQPMDGQNVKKNTEATIKYCKNNPKWRLGLQQHKILQIP

SEQ ID NO: 33282 - protein, 215 aa, unidentified
  source 1..215: note = Pseudomonas laurylsulfativorans
  REGION 1..215: note = tr|A0A2S3VH91|A0A2S3VH91_9PSED 7-carboxy-7-deazaguanine synthase OS=Pseudomonas laurylsulfativorans OX=1943631 GN=queE PE=3 SV=1
MQDTLRITEVFYSLQGETRTAGLPTVFVRLTGCPLRCQYCDSAYAFTGGTIRTLDDILEQVAGYRPRYVCVTGGEPLAQPNAIPLLRRLCDAGYEVSLETSGSIDISAVDSRVSRVVDLKTPGSKEAHRNRYENIELLTPNDQVKFVICSREDYDWSVSKLIQYGLDQRAGEVLFSPSHHDLNARDLADWVVADNLPVRLQLQLHKYLWNDEPGR

SEQ ID NO: 33283 - protein, 215 aa, Pseudomonas libanensis
  REGION 1..215: note = tr|A0A0R2Y8K8|A0A0R2Y8K8_9PSED 7-carboxy-7-deazaguanine synthase OS=Pseudomonas libanensis OX=75588 GN=queE PE=3 SV=1
MQDTLRITEVFYSLQGETRTAGLPTVFVRLTGCPLRCQYCDSAYAFSGGTVRTLDDILEQVASYRPRYVCVTGGEPLAQPNAIPLLKQLCDAGYEVSLETSGALDISAVDPRVSRVVDLKTPGSKEAHRNLYANMDLLTANDQVKFVICSRDDYDWASSKLIQYGLDRRAGEVLFSPSHHDLNARDLADWVVADNLPVRLQLQLHKYLWNDEPGR

SEQ ID NO: 33284 - protein, 215 aa, Pseudomonas lini; identical to SEQ ID NO: 33198
  REGION 1..215: note = tr|A0A423IXH4|A0A423IXH4_9PSED 7-carboxy-7-deazaguanine synthase OS=Pseudomonas lini; OX = 163011 GN=queE PE=3 SV=1

SEQ ID NO: 33285 - protein, 215 aa, Pseudomonas lini
  REGION 1..215: note = tr|A0A0J6K900|A0A0J6K900_9PSED 7-carboxy-7-deazaguanine synthase OS=Pseudomonas lini; OX = 163011 GN=queE PE=3 SV=1
MQDTLRITEVFYSLQGETRTAGLPTVFVRLTGCPLRCQYCDSAYAFTGGTIRTLDDILEQVAGFRPRYVCVTGGEPLAQPNAIPLLKQLCDAGYEVSLETSGALDISAVDPRVSRVVDLKTPGSKEAHRNRYENIELLTPNDQVKFVICSREDYDWAVSKLIQYGLDQRAGEVLFSPSHHDLNARHLADWVVADNLPVRLQLQLHKYLWNDEPGR

SEQ ID NO: 33286 - protein, 215 aa, unidentified
  source 1..215: note = Pseudomonas linyingensis
  REGION 1..215: note = tr|A0A1H7B4M6|A0A1H7B4M6_9PSED 7-carboxy-7-deazaguanine synthase OS=Pseudomonas linyingensis OX=915471 GN=queE PE=3 SV=1
MNQTLRITEIFHSLQGETRTVGLPTVFVRLTGCPLRCQYCDTAYAFSGGEVMTLEQILAQVASYKPRYVCVTGGEPLAQPNCIPLLEALCDAGYQVSLETSGALDIAPVDTRVSRVVDLKTPGSAEVGRNRYENMAELTGNDQVKFVICSREDYDWAVSKIIEYRLDQRAGELLMSPSHHELEARSLAEWIIADNLPVRLQLQLHKYLWNDEPGH

SEQ ID NO: 33287 - protein, 215 aa, Pseudomonas lundensis
  REGION 1..215: note = tr|A0A1D9IQ42|A0A1D9IQ42_9PSED 7-carboxy-7-deazaguanine synthase OS=Pseudomonas lundensis; OX = 86185 GN=queE PE=3 SV=1
MQDTLRITEVFYSLQGETRTAGLPTVFVRLTGCPLRCGYCDSAYAFSGGTVRPLEDILEQVASYRPRYVCVTGGEPLAQPNAIPLLTQLCDAGYEVSIETSGALDISAVDPRVSRVLDLKTPGSKESHRNLYENIALLTSNDQVKFVICSRDDYDWAVSKLIEYGLERRAGEVLFSPSHHDLSARDLADWIVADNLPVRLQMQLHKYLWNDEPGR

SEQ ID NO: 33288 - protein, 215 aa, Pseudomonas lundensis
  REGION 1..215: note = tr|A0A2C8ENW4|A0A2C8ENW4_9PSED 7-carboxy-7-deazaguanine synthase OS=Pseudomonas lundensis; OX = 86185 GN=queE PE=3 SV=1
MQDTLRITEVFYSLQGETRTAGLPTVFVRLTGCPLRCGYCDSAYAFSGGTVRPLEDILEQVASYRPRYVCVTGGEPLAQPNAIPLLTQLCDAGYEVSLETSGALDISAVDPRVSRVLDLKTPGSKESHRNLYENIALLTSNDQVKFVICSRDDYDWAVSKLIEYGLERRAGEVLFSPSHHDLSARDLADWIVADNLPVRLQMQLHKYLWNDEPGR

SEQ ID NO: 33289 - protein, 215 aa, Pseudomonas lurida
  REGION 1..215: note = tr|A0A2A9DIM1|A0A2A9DIM1_9PSED 7-carboxy-7-deazaguanine synthase OS=Pseudomonas lurida; OX = 244566 GN=queE PE=3 SV=1
MQDTLRITEVFYSLQGETRTAGLPTVFVRLTGCPLRCQYCDSAYAFSGGTVRTLDDILEQVAGYKPRYVCVTGGEPLAQPNAIPLLKQLCDAGYEVSLETSGALDISAVDPRVSRVVDLKTPGSKEAHRNRYENIELLTANDQVKFVICSRDDYDWANSKLIQYGLDRRAGEVLFSPSHHDLNARDLADWVVADNLPVRLQLQLHKYLWNDEPGR

SEQ ID NO: 33290 - protein, 215 aa, Pseudomonas lutea
  REGION 1..215: note = tr|A0A098STP8|A0A098STP8_9PSED 7-carboxy-7-deazaguanine synthase OS=Pseudomonas lutea; OX = 243924 GN=queE PE=3 SV=1
MQDTLRITEVFYSLQGETRTAGLPTVFVRLTGCPLRCGYCDSEYAFSGGTVQTLDSLMEQVASYRPRYVCVTGGEPLAQPNAIPLLQRLCDAGYEVSLETSGALDISKVDTRVSRVVDLKTPGSKEVARNRYENIELLTPNDQVKFVICSREDYDWAVSKIIQYGLERRAGEVLFSPVHRDLNVTDLADWIVADNLPVRLQLQLHKILWNDEPGR

SEQ ID NO: 33291 - protein, 216 aa, Pseudomonas luteola
  REGION 1..216: note = tr|A0A3R8YHM3|A0A3R8YHM3_PSELU 7-carboxy-7-deazaguanine synthase OS=Pseudomonas luteola; OX = 47886 GN=queE PE=3 SV=1
MQQNTLRITEIFYSLQGETRTAGLPTVFVRLTGCPLRCQYCDTAYAFSGGQIMSLDEIVERVAQYKPRYVCVTGGEPLAQPNCLPLLERLCDAGYEVSLETSGALDVAPVDRRVVKVVDLKTPGSAEVSRNLYDNIDHLTPSDQVKFVICSREDYEWAVSKLIQYRLDERVDEVLFSPSHQQVTPRQLAEWIVEDNLPVRFQLQLHKILWNDEPGH

SEQ ID NO: 33292 - protein, 216 aa, Pseudomonas luteola
  REGION 1..216: note = tr|A0A2X2C607|A0A2X2C607_PSELU 7-carboxy-7-deazaguanine synthase OS=Pseudomonas luteola; OX = 47886 GN=queE PE=3 SV=1
MQQNTLRITEIFYSLQGETRTAGLPTVFVRLTGCPLRCQYCDTAYAFSGGQIMSLDEIVERVAQYKPRYVCVTGGEPLAQPNCLPLLERLCDAGYEVSLETSGALDVAPVDRRVVKVVDLKTPGSAEVSRNLYDNIDHLTPNDQVKFVICSREDYEWAVSKLIQYRLDERVDEVLFSPSHQQVTPRQLAEWIVEDNLPVRFQLQLHKILWNDEPGH

SEQ ID NO: 33293 - protein, 215 aa, Pseudomonas mandelii; identical to SEQ ID NO: 33198
  REGION 1..215: note = tr|A0A502IMZ5|A0A502IMZ5_9PSED 7-carboxy-7-deazaguanine synthase OS=Pseudomonas mandelii; OX = 75612 GN=queE PE=3 SV=1

SEQ ID NO: 33294 - protein, 215 aa, Pseudomonas mandelii
  REGION 1..215: note = tr|A0A059L227|A0A059L227_9PSED 7-carboxy-7-deazaguanine synthase OS=Pseudomonas mandelii PD30 OX=1419583 GN=queE PE=3 SV=1
MQDTLRITEVFYSLQGETRTAGLPTVFVRLTGCPLRCQYCDSAYAFTGGTIRTLDDILEQVAGFRPRYVCVTGGEPLAQPNAIPLLKQLCDAGYEVSLETSGALDISAVDSRVSRVVDLKTPGSKEAHRNRYENIELLTPNDQVKFVICSREDYDWAVSKLIQYGLDQRAGEVLFSPSHHDLNARDLADWVVADNLPVRLQLQLHKYLWNDEPGR

SEQ ID NO: 33295 - protein, 218 aa, Pseudomonas marginalis
  REGION 1..218: note = tr|A0A3M4AS07|A0A3M4AS07_PSEMA 7-carboxy-7-deazaguanine synthase OS=Pseudomonas marginalis pv. marginalis OX=97473 GN=queE PE=3 SV=1
MATMQDILRITEVFYSLQGETRTAGLPTVFVRLTGCPLRCQYCDSAYAFSGGTVRTLDDILEQVAGYKPRYVCVTGGEPLAQPNAIPLLKQLCDAGYEVSLETSGALDISAVDPRVSRVVDLKTPGSKEAHRNRYENIELLTANDQVKFVICSRDDYDWANSKLIQYGLDRRAGEVLFSPSHHDLNARDLADWVVADNLPVRLQLQLHKYLWNDEPGR

SEQ ID NO: 33296 - protein, 215 aa, Pseudomonas marginalis
  REGION 1..215: note = tr|A0A0W0LTF8|A0A0W0LTF8_PSEMA 7-carboxy-7-deazaguanine synthase OS=Pseudomonas marginalis ICMP 11289 OX=1198318 GN=queE PE=3 SV=1
MQDTLRITEIFHSLQGETRTAGLPTVFVRLTGCPLRCQYCDSAYAFTGGTIHTLDDIMGQVATYRPRYVCVTGGEPLAQPNAIPLLKRLCDEGYEVSLETSGALDISAVDPRVSRVVDLKTPGSKEVTRNRYENMELLTPNDQVKFVICSREDYDWAVSKLIQYGLDRRAGEVLFSASHHELKGRDLADWIVADNLPVRLQMQLHKFLWDDEPGR

SEQ ID NO: 33297 - protein, 226 aa, Pseudomonas marincola
  REGION 1..226: note = tr|A0A1I7E7R1|A0A1I7E7R1_9PSED 7-carboxy-7-deazaguanine synthase OS=Pseudomonas marincola; OX = 437900 GN=queE PE=3 SV=1
MACLAVTPVALMQNTLRITEIFYSLQGETRTAGLPTVFVRLTGCPLRCQYCDTAYAFTGGEIMSLDNILARVAAYNPRYICVTGGEPLAQPNSIALLQQLCDAGYEVSLETSGALDVSSVDPRVSKVLDLKTPGSAEVARNRYDNIQWLSRNDQVKFVICSREDYSWAVSKLIEYRLNERAGEVLFSPSHAQVSARDLANWIVADNLPVRLQLQLHKILWDDAAGH

SEQ ID NO: 33298 - protein, 215 aa, Pseudomonas mediterranea
  REGION 1..215: note = tr|A0A0A4HRR6|A0A0A4HRR6_9PSED 7-carboxy-7-deazaguanine synthase OS=Pseudomonas mediterranea CFBP 5447 OX=1348058 GN=queE PE=3 SV=1
MQDTLRITEVFYSLQGETRTAGLPTVFVRLTGCPLRCQYCDSAYAFSGGTLRTLDDILEQVAGYRPRYVCVTGGEPLAQPNAIPLLKQLCDAGYEVSLETSGALDISAVDPRVSRVVDLKTPGSKEAHRNRYENIELLTPNDQVKFVICSREDYDWAVSKLIQYGLDKRAGEVLVSPSHHDLNARDLADWVVADNLPVRLQLQLHKYLWNDEPGR

SEQ ID NO: 33299 - protein, 218 aa, unidentified; identical to SEQ ID NO: 33165
  source 1..218: note = Pseudomonas meliae
  REGION 1..218: note = tr|A0A0P9YXT5|A0A0P9YXT5_9PSED 7-carboxy-7-deazaguanine synthase OS=Pseudomonas meliae; OX = 86176 GN=queE PE=3 SV=1

SEQ ID NO: 33300 - protein, 226 aa, Pseudomonas mendocina
  REGION 1..226: note = tr|A4XRS9|A4XRS9_PSEMY 7-carboxy-7-deazaguanine synthase OS=Pseudomonas mendocina (strain ymp) OX=399739; GN = queE PE=3 SV=1
MTCFVITPVATMQETLRITEIFYSLQGETRTAGLPTVFVRLTGCPLRCQYCDTAYAFSGGEIVTLDSILDQVAAYRPRYVCVTGGEPLAQPNCIPLLTRLCDAGYEVSLETSGALDVSAVDPRVSKVLDLKTPGSAEVQRNRYENIEWLTANDQVKFVICSREDYDWAVSKLIQYDLPARAGEVLFSPSHKQVEARALADWIVADNLPVRLQLQLHKILWNDEPGH

SEQ ID NO: 33301 - protein, 215 aa, Pseudomonas mendocina
  REGION 1..215: note = tr|A0A2R3QX80|A0A2R3QX80_PSEME 7-carboxy-7-deazaguanine synthase OS=Pseudomonas mendocina; OX = 300 GN=queE PE=3 SV=1
MQETLRITEIFYSLQGETRTAGLPTVFVRLTGCPLRCQYCDTAYAFSGGEIVTLDSIVDQVAAYRPRYVCVTGGEPLAQPNCIPLLTRLCDAGYEVSLETSGALDVSAVDSRVSKVLDLKTPGSAEVQRNRYENIQWLTRNDQVKFVICSREDYDWAVSKLIGHDLAARAGEVLFSPSHQQVDARALADWIIADNLPVRLQLQLHKILWNDEPGH

SEQ ID NO: 33302 - protein, 210 aa, unidentified
  source 1..210: note = [Pseudomonas] mesoacidophila
  REGION 1..210: note = tr|A0A2A4FE85|A0A2A4FE85_9BURK 7-carboxy-7-deazaguanine synthase OS=[Pseudomonas] mesoacidophila OX=265293 GN=queE PE=3 SV=1
MTYAVKEIFYTLQGEGANAGRPAVFCRFAGCNLWSGREEDRAEAACRFCDTDFVGTDGENGGKFKDAAALAAQVASLWPDGEAHRFVVCTGGEPMLQLDQPLVDALHAAGFEIAIETNGSLPVLDSIDWICVSPKADAPLVVTKGNELKVVIPQDNQRLADYAKLDFDYFLVQPMDGPSRDLNTKLAIDWCKRHPQWRLSMQTHKYLNIP

SEQ ID NO: 33303 - protein, 215 aa, Pseudomonas migulae
  REGION 1..215: note = tr|A0A1H5MIF9|A0A1H5MIF9_9PSED 7-carboxy-7-deazaguanine synthase OS=Pseudomonas migulae; OX = 78543 GN=queE PE=3 SV=1
MQDTLRITEVFYSLQGETRTAGLPTVFVRLTGCPLRCQYCDSAYAFSGGTVRTLDDILEQVAGFRPRYVCVTGGEPLAQPNAIPLLKQLCDAGYEVSLETSGALDISAVDSRVSRVVDLKTPGSKEAHRNRYENIELLTPNDQVKFVICSREDYDWAVSKLIQYGLDQRAGEVLFSPSHHDLNARDLADWVVADNLPVRLQLQLHKYLWNDEPGR

SEQ ID NO: 33304 - protein, 215 aa, Pseudomonas mohnii
  REGION 1..215: note = tr|A0A1H4RKR5|A0A1H4RKR5_9PSED 7-carboxy-7-deazaguanine synthase OS=Pseudomonas mohnii; OX = 395600 GN=queE PE=3 SV=1
MQDTLRITEVFYSLQGETRTAGLPTVFVRLTGCPLRCQYCDSAYAFTGGTIRTLDDILEQVAGFRPRYVCVTGGEPLAQPNAIPLLKRLCDAGYEVSLETSGSLDISAVDSRVSRVVDLKTPGSNEAHRNRYENIELLTPNDQVKFVICSREDYDWSVSKLIQYGLDRRAGEVLFSPSHHDLNARDLADWVVADNLPVRLQLQLHKYLWNDEPGR

SEQ ID NO: 33305 - protein, 215 aa, Pseudomonas monteilii
  REGION 1..215: note = tr|V9V3E1|V9V3E1_9PSED 7-carboxy-7-deazaguanine synthase OS=Pseudomonas monteilii SB3101 OX=1435058; GN = queE PE=3 SV=1
MQDTLRITEVFYSLQGETRTAGLPTVFVRLTGCPLRCQYCDSAYAFSGGTVRTLDSILEQVAGFKPRYVCVTGGEPLAQPNALPLLQRLCDAGYEVSLETSGALDIAGTDTRVSRVVDLKTPGSEESHRNRYENIEQLTRNDQVKFVICSREDYDWAVSKLIQYNLAERAGEVLFSPSHHQVNASELADWIVADNLPVRFQLQLHKLLWNDEPGR

SEQ ID NO: 33306 - protein, 215 aa, Pseudomonas monteilii; identical to SEQ ID NO: 33305
  REGION 1..215: note = tr|A0A136QD00|A0A136QD00_9PSED 7-carboxy-7-deazaguanine synthase OS=Pseudomonas monteilii; OX = 76759 GN=queE PE=3 SV=1

SEQ ID NO: 33307 - protein, 215 aa, Pseudomonas moorei; identical to SEQ ID NO: 33304
  REGION 1..215: note = tr|A0A4Q7HAG1|A0A4Q7HAG1_9PSED 7-carboxy-7-deazaguanine synthase OS=Pseudomonas moorei; OX = 395599 GN=queE PE=3 SV=1

SEQ ID NO: 33308 - protein, 215 aa, Pseudomonas moorei
  REGION 1..215: note = tr|A0A1H1HKR9|A0A1H1HKR9_9PSED 7-carboxy-7-deazaguanine synthase OS=Pseudomonas moorei; OX = 395599 GN=queE PE=3 SV=1
MQDTLRITEVFYSLQGETRTAGLPTVFVRLTGCPLRCQYCDSAYAFTGGTLRTLDDILEQVAGFRPRYVCVTGGEPLAQPNAIPLLKRLCDAGYQVSLETSGSLDISAVDSRVSRVVDLKTPGSKEAHRNRYENIELLTPNDQVKFVICSREDYDWSVSKLIQYGLDQRAGEVLFSPSHHDLNARDLADWVVADNLPVRLQLQLHKYLWNDEPGR

SEQ ID NO: 33309 - protein, 215 aa, Pseudomonas moraviensis
  REGION 1..215: note = tr|V8R658|V8R658_9PSED 7-carboxy-7-deazaguanine synthase OS=Pseudomonas moraviensis R28-S OX=1395516; GN = queE PE=3 SV=1
MQDTLRITEVFYSLQGETRTAGLPTVFVRLTGCPLRCQYCDSAYAFSGGTVRTLDDILEQVAGYRPRYVCVTGGEPLAQPNAIPLLERLCDAGYEVSLETSGALDVSAVDPRVSRVVDLKTPGSKEAHRNRYENIELLTRNDQVKFVICSREDYDWAVSKLIQYGLDQRAGEVLFSPSHHDLNARELADWVVADNLPVRLQLQLHKYLWNDEPGR

SEQ ID NO: 33310 - protein, 215 aa, Pseudomonas moraviensis; identical to SEQ ID NO: 33309
  REGION 1..215: note = tr|A0A3R8WJ92|A0A3R8WJ92_9PSED 7-carboxy-7-deazaguanine synthase OS=Pseudomonas moraviensis OX=321662 GN=queE PE=3 SV=1

SEQ ID NO: 33311 - protein, 215 aa, Pseudomonas mosselii
  REGION 1..215: note = tr|A0A2V4KGU3|A0A2V4KGU3_9PSED 7-carboxy-7-deazaguanine synthase OS=Pseudomonas mosselii; OX = 78327 GN=queE PE=3 SV=1
MQDTLRITEVFYSLQGETRTAGLPTVFVRLTGCPLRCQYCDSAYAFSGGTLRTLDSILEQVAGFRPRYVCVTGGEPLAQPNALPLLQRLCDAGYDVSLETSGALDISGVDIRVSRVVDLKTPGSEESHRNRYENIELLTGNDQVKFVICSREDYDWAVSKLIQYNLAERAGEVLFSPSHHQVSATDLADWIVADNLPVRFQLQLHKLLWNDEPGR

SEQ ID NO: 33312 - protein, 215 aa, Pseudomonas mosselii
  REGION 1..215: note = tr|A0A290HR44|A0A290HR44_9PSED 7-carboxy-7-deazaguanine synthase OS=Pseudomonas mosselii; OX = 78327 GN=queE PE=3 SV=1
MQDTLRITEVFYSLQGETRTAGLPTVFVRLTGCPLRCQYCDSAYAFSGGTIRTLDSILEQVAGFRPRYVCVTGGEPLAQPNALPLLQRLCDAGYDVSLETSGALDISGVDTRVSRVVDLKTPGSEESHRNRYENIELLTGNDQVKFVICSREDYDWAVSKLIQYNLVERAGEVLFSPSHHQVSATDLADWIVADNLPVRFQLQLHKLLWNDEPGR

SEQ ID NO: 33313 - protein, 215 aa, Pseudomonas mucidolens
  REGION 1..215: note = tr|A0A1H2LVI0|A0A1H2LVI0_9PSED 7-carboxy-7-deazaguanine synthase OS=Pseudomonas mucidolens OX=46679 GN=queE PE=3 SV=1
MQDTLRITEVFYSLQGETRTAGLPTVFVRLTGCPLRCQYCDSAYAFTGGTVRTLDDILEQVASYRPRYVCVTGGEPLAQPNAIALLKQLCDAGYEVSLETSGALDISAVDPRVSRVVDLKTPGSKEVNRNRYENLDLLTANDQVKFVICSREDYDWASSKLIQYGLDRRAGEVLFSPSHHDLNARDLADWVVADNLPVRLQLQLHKYLWNDEPGR

SEQ ID NO: 33314 - protein, 215 aa, unidentified
  source 1..215: note = Pseudomonas nabeulensis
  REGION 1..215: note = tr|A0A4Z0B980|A0A4Z0B980_9PSED 7-carboxy-7-deazaguanine synthase OS=Pseudomonas nabeulensis OX=2293833 GN=queE PE=3 SV=1
MQDTLRITEVFYSLQGETRTAGLPTVFVRLTGCPLRCQYCDSAYAFSGGTVRTLDDILEQVAGYRPRYVCVTGGEPLAQPNAIPLLKQLCDAGYEVSLETSGALDISAVDPRVSRVVDLKTPDSKESHRNRYENMDLLTANDQVKFVICSRDDYDWANSKLIQYGLDRRAGEVLFSPSHHDLNARDLADWVVADNLPVRLQLQLHKYLWNDEPGR

SEQ ID NO: 33315 - protein, 215 aa, Pseudomonas nitroreducens
  REGION 1..215: note = tr|A0A246FB65|A0A246FB65_9PSED 7-carboxy-7-deazaguanine synthase OS=Pseudomonas nitroreducens OX=46680 GN=queE PE=3 SV=1
MQQTLRITEIFYSLQGETRTAGLPTVFVRLTGCPLRCNYCDTAYAFSGGEIQTLDAILEQVAQYRPRYVCVTGGEPLAQPNCILLLERLCNAGYDVSLETSGALDISASDRRVSRILDLKTPGSGEVMRNRYENIGELTANDQVKFVICSREDYDWAVSKLIEYRLEQRAGEVLFSPSHREVDARALADWIVSDNLPVRLQLQLHKILWNDEPGH

SEQ ID NO: 33316 - protein, 226 aa, Pseudomonas nitroreducens
  REGION 1..226: note = tr|A0A239BSC2|A0A239BSC2_9PSED 7-carboxy-7-deazaguanine synthase OS=Pseudomonas nitroreducens OX=46680 GN=queE PE=3 SV=1
MACIAVTPVADMQQTLRITEIFYSLQGETRTAGLPTVFVRLTGCPLRCNYCDTAYAFSGGEIQSLDAILDQVARYRPRYICVTGGEPLAQPNCIPLLERLCHAGYEVSLETSGALDISATDRRVSRILDLKTPGSGEVARNRYENIGELTLNDQVKFVICSREDYDWAVSKLIEYRLDERAGEVLFSPSHRQVDARALADWIVSDNLPVRLQLQLHKILWNDEPGH

SEQ ID NO: 33317 - protein, 227 aa, Pseudomonas oleovorans
  REGION 1..227: note = tr|A0A3D9EG67|A0A3D9EG67_PSEOL 7-carboxy-7-deazaguanine synthase OS=Pseudomonas oleovorans OX=301 GN=queE PE=3 SV=1
MACVAVTPVASMQKDTLRLTEIFYSLQGEARTAGLPTVFVRLTGCPLRCHYCDTAYAFTGGEIHHLDAILEQVASYRPRHICVTGGEPLAQPNCLKLLEQLCDAGYEVSLETSGALDVSGVDGRVSKVVDLKTPGSGEVGRNLYANLDHLTPNDQVKFVICSREDYDWAVSKLIEYRLEQRAGEVLFSPSHGQVVPRELAEWIVADNLPVRFQLQLHKILWNDEPGH

SEQ ID NO: 33318 - protein, 215 aa, Pseudomonas oleovorans
  REGION 1..215: note = tr|A0A2S7FQ18|A0A2S7FQ18_PSEOL 7-carboxy-7-deazaguanine synthase OS=Pseudomonas oleovorans OX=301 GN=queE PE=3 SV=1
MQETLRITEIFYSLQGETRTAGLPTVFVRLTGCPLRCQYCDTAYAFSGGEIVTLDSILDQVAAYRPRYVCVTGGEPLAQPNCITLLARLCDAGYEVSLETSGALDVSAVDARVSKVLDLKTPGSAEVQRNRYENVQWLTRNDQVKFVICSREDYDWAVSKLIEYDLAARAGEVLFSPSHKQVDARALADWIVADNLPVRLQLQLHKILWNDEPGH

SEQ ID NO: 33319 - protein, 215 aa, Pseudomonas orientalis
  REGION 1..215: note = tr|A0A3G7X597|A0A3G7X597_9PSED 7-carboxy-7-deazaguanine synthase OS=Pseudomonas orientalis OX=76758 GN=queE PE=3 SV=1
MQDTLRITEVFYSLQGETRTAGLPTVFVRLTGCPLRCQYCDSAYAFSGGTVRALDDILEQVAGYRPRYVCVTGGEPLAQPNAIPLLKQLCDAGYEVSLETSGALDISAVDPRVSRVVDLKTPDSKEAHRNRYENMDLLTANDQVKFVICSRDDYDWATSKLIQYGLERRAGEVLFSPSHHDLNARDLADWVVADNLPVRLQLQLHKYLWNDEPGR

SEQ ID NO: 33320 - protein, 215 aa, Pseudomonas orientalis; identical to SEQ ID NO: 33179
  REGION 1..215: note = tr|A0A0R2ZWC0|A0A0R2ZWC0_9PSED 7-carboxy-7-deazaguanine synthase OS=Pseudomonas orientalis OX=76758 GN=queE PE=3 SV=1

SEQ ID NO: 33321 - protein, 215 aa, unidentified
  source 1..215: note = Pseudomonas oryzae
  REGION 1..215: note = tr|A0A1H1UPW7|A0A1H1UPW7_9PSED 7-carboxy-7-deazaguanine synthase OS=Pseudomonas oryzae; OX = 1392877 GN=queE PE=3 SV=1
MNQTLRITEIFFSLQGEARTVGLPTVFVRLTGCPLRCDYCDTAYAFSGGEIMTLEAILARVADYRPRHVCVTGGEPLAQPNCIPLLEALCDAGYEVSLETSGALDIAPVDTRVSRVVDLKTPGSGEVGRNRYENMAELTGNDQVKFVICSREDYDWAVSKLIEYRLDQRAGEVLLSPSHHQLQPRTLAEWIIADNLPVRLQLQLHKYLWNDEPGH

SEQ ID NO: 33322 - protein, 227 aa, Pseudomonas oryzihabitans
  REGION 1..227: note = tr|A0A0U4VQA0|A0A0U4VQA0_9PSED 7-carboxy-7-deazaguanine synthase OS=Pseudomonas oryzihabitans OX=47885 GN=queE PE=3 SV=1
MACVAVTPVASMQKDTLRLTEIFYSLQGEARTAGLPTVFVRLTGCPLRCQYCDTAYAFTGGEIHHLDAILEQVASYRPRHICVTGGEPLAQPNCLKLLEQLCDAGYEVSLETSGALDVSGVDVRVSKVMDLKTPASGEVGRNLYANIAQLTPNDQVKFVICSREDYDWAVSKLIEYRLDQRVGEVWFSPSHGQVVPRELAEWIVADNLPVRFQLQLHKILWNDEPGH

SEQ ID NO: 33323 - protein, 216 aa, Pseudomonas oryzihabitans
  REGION 1..216: note = tr|A0A178LE15|A0A178LE15_9PSED 7-carboxy-7-deazaguanine synthase OS=Pseudomonas oryzihabitans OX=47885 GN=queE PE=3 SV=1
MQKDTLRLTEIFYSLQGEARTVGLPTVFVRLTGCPLRCQYCDTAYAFTGGEIHHLDAILEQVASYRPRHVCVTGGEPLAQPNCLKLLEQLCDAGYEVSLETSGALDVSGVDVRVSKVVDLKTPGSGEMGRNLYANIAHLTPNDQVKFVICSREDYDWAVSKLIEYRLDQRAGEVWFSPSHGQVVPRELAEWIVADNLPVRFQLQLHKILWNDEPGH

SEQ ID NO: 33324 - protein, 226 aa, Pseudomonas otitidis
  REGION 1..226: note = tr|A0A1I0UKM1|A0A1I0UKM1_9PSED 7-carboxy-7-deazaguanine synthase OS=Pseudomonas otitidis; OX = 319939 GN=queE PE=3 SV=1
MACFAVTPVALMQQTLRITEIFYSLQGETRTAGLPTVFVRLTGCPLRCQYCDTAYAFNGGQLQSLDDILEQVAAYRPRHVCVTGGEPLAQPNCIPLLARLCDAGYEVSLETSGALDIAAVDTRVSRVLDFKTPGSAEVARNRYENIAQLTPNDQVKFVICSREDYDWAVSKLIEYRLEQRAGEVLFSPSHHQVDARQLADWIVADNLPVRLQLQLHKILWNDEPGH

SEQ ID NO: 33325 - protein, 215 aa, Pseudomonas palleroniana
  REGION 1..215: note = tr|A0A2L1JAE8|A0A2L1JAE8_9PSED 7-carboxy-7-deazaguanine synthase OS=Pseudomonas palleroniana OX=191390 GN=queE PE=3 SV=1
MQDTLRITEVFYSLQGETRTAGLPTVFVRLTGCPLRCQYCDSAYAFSGGTVRTLDDILEQVAGFKPRYVCVTGGEPLAQPNAIPLLKQLCDAGYEVSLETSGALDISAVDPRVSRVVDLKTPGSKEAHRNLYANMDLLTPNDQVKFVICSREDYDWATSKLIQYGLERRAGEVLFSPSHHDLNARDLADWVVADNLPVRLQLQLHKYLWNDEPGR

SEQ ID NO: 33326 - protein, 215 aa, Pseudomonas palleroniana
  REGION 1..215: note = tr|A0A1H5MEI9|A0A1H5MEI9_9PSED 7-carboxy-7-deazaguanine synthase OS=Pseudomonas palleroniana OX=191390 GN=queE PE=3 SV=1
MQDTLRITEVFYSLQGETRTAGLPTVFVRLTGCPLRCQYCDSAYAFSGGTVRTLADILEQVAGFKPRYVCVTGGEPLAQPNAIPLLKQLCDAGYEVSLETSGALDISAVDPRVSRVVDLKTPGSKEAHRNLYANMDLLTPNDQVKFVICSREDYDWATSKLIQYGLERRAGEVLFSPSHHDLNARDLADWVVADNLPVRLQLQLHKYLWNDEPGR

SEQ ID NO: 33327 - protein, 215 aa, Pseudomonas panacis
  REGION 1..215: note = tr|A0A1H4IMV5|A0A1H4IMV5_PSEPA 7-carboxy-7-deazaguanine synthase OS=Pseudomonas panacis; OX = 307251 GN=queE PE=3 SV=1
MQDTLRITEVFYSLQGETRTAGLPTVFVRLTGCPLRCQYCDSAYAFSGGTVRTLEDILEQVAGYRPRYVCVTGGEPLAQPNAIPLLKQLCDAGYEVSLETSGALDISAVDPRVSRVVDLKTPGSKEAHRNLYENLDLLTANDQVKFVICSRDDYDWASSKLIQYGLDRRAGEVLFSPSHHDLNARDLADWVVADNLPVRLQLQLHKYLWNDEPGR

SEQ ID NO: 33328 - protein, 226 aa, Pseudomonas panipatensis
  REGION 1..226: note = tr|A0A1G8GP23|A0A1G8GP23_9PSED 7-carboxy-7-deazaguanine synthase OS=Pseudomonas panipatensis OX=428992 GN=queE PE=3 SV=1
MACFAVMPVADMQQTLRITEIFYSLQGEARTVGLPTVFVRLTGCPLRCQYCDSAYAFSGGDIIALDAILERVAAYRPRYVCVTGGEPLAQPNCIPLLQRLCDAGYSVSLETSGALDISATDRRVSRILDLKTPGSGEVARNRYENIAELTPNDQVKFVICSREDYDWAVSKLIEYRLQERAGEVLFSPSYQQVEGRTLADWIVADNLPVRFQLQLHKILWNDEPGR

SEQ ID NO: 33329 - protein, 215 aa, Pseudomonas parafulva
  REGION 1..215: note = tr|A0A147GF69|A0A147GF69_9PSED 7-carboxy-7-deazaguanine synthase OS=Pseudomonas parafulva; OX = 157782 GN=queE PE=3 SV=1
MQDTLRITEVFYSLQGETRTAGLPTVFVRLTGCPLRCQYCDSAYAFSGGTLRSLDSILEQVAGFKPRYVCVTGGEPLAQPNALPLLQRLCDAGYEVSLETSGALDIAGTDTRVSRVVDLKTPGSEESHRNRYENIEHLTRNDQVKFVICSREDYDWAVSKLIQYNLAERAGEVLFSPSHHQVSATDLADWIVADNLPVRFQLQLHKLLWNDEPGR

SEQ ID NO: 33330 - protein, 215 aa, Pseudomonas parafulva
  REGION 1..215: note = tr|A0A0A7JXL5|A0A0A7JXL5_9PSED 7-carboxy-7-deazaguanine synthase OS=Pseudomonas parafulva; OX = 157782 GN=queE PE=3 SV=1
MQDTLRITEVFYSLQGETRTAGLPTVFVRLTGCPLRCQYCDSAYAFSGGTVRTLDDILEQVAGYRPRYVCVTGGEPLAQPNALPLLKRLCDAGFEVSLETSGALDISQVDTRVSRVVDLKTPGSQEAHRNLYANIDHLTANDQVKFVICSREDYDWAVSKLIQYNLDQRVSEVLFSPSHHQVSATDLADWIIADNLPVRFQLQLHKLLWNDEPGR

SEQ ID NO: 33331 - protein, 215 aa, unidentified
  source 1..215: note = Pseudomonas paralactis
  REGION 1..215: note = tr|A0A0R3A7N8|A0A0R3A7N8_9PSED 7-carboxy-7-deazaguanine synthase OS=Pseudomonas paralactis OX=1615673 GN=queE PE=3 SV=1
MQDTLRITEVFYSLQGETRTAGLPTVFVRLTGCPLRCQYCDSAYAFSGGTVRTLDDILEQVAGYRPRYVCVTGGEPLAQPNAIPLLKQLCDAGYEVSLETSGALDISAVDPRVSRVVDLKTPDSKEAHRNRYENIDLLTVNDQVKFVICSRDDYDWATSKLIQYGLERRAGEVLFSPSHHDLNARDLADWVVADNLPVRLQLQLHKYLWNDEPGR

SEQ ID NO: 33332 - protein, 219 aa, Pseudomonas pelagia
  REGION 1..219: note = tr|A0A2A4AVX0|A0A2A4AVX0_9PSED 7-carboxy-7-deazaguanine synthase OS=Pseudomonas pelagia; OX = 553151 GN=queE PE=3 SV=1
MTIDSSATLRMTEIFYSIQGESRSLGLPTVFVRLTGCPLRCQYCDTAYAFSGGELMSLEQILLQVASYRPRYVCVTGGEPLAQPSAIPLLQALCEAGYKVSLETSGALDVSTVDERVSRVVDIKTPDSDEMGRNLYANLALLGQHDQVKFVICSRSDYEWARFKLDEYALADSVGEVLFSPSHAQLTPRQLAEWIVEDNLPVRFQMQLHKYLWNDEPGH

SEQ ID NO: 33333 - protein, 252 aa, Pseudomonas peli
  REGION 1..252: note = tr|A0A1G4S807|A0A1G4S807_9PSED 7-carboxy-7-deazaguanine synthase OS=Pseudomonas peli; OX = 592361 GN=queE PE=3 SV=1
MLCNVKNFTRKFFRIQSAPLFPQRRRTACLAVTPVADMQDTLRITEIFYSLQGETRTAGLPTVFVRLTGCPLRCQYCDTAYAFSGGEIMSLDAIAQQVAGYKPRYICVTGGEPLAQPNCIPLLKRLCDAGYEVSLETSGALDVSAVDPRVSKVLDLKTPGSAEVARNRYENIDLLTPNDQVKFVICSREDYDWAVSKLIQYRLAERAGEVLMSPSHHELDARSLAEWIIADNLPVRLQMQLHKILWNDEPGH

SEQ ID NO: 33334 - protein, 215 aa, Pseudomonas plecoglossicida
  REGION 1..215: note = tr|S2KVH2|S2KVH2_9PSED 7-carboxy-7-deazaguanine synthase OS=Pseudomonas plecoglossicida NB2011 OX=1330531; GN = queE PE=3 SV=1
MQDTLRITEVFYSLQGETRTAGLPTVFVRLTGCPLRCQYCDSAYAFSGGTVRTLDSIMEQVAGFKPRYVCVTGGEPLAQPNALPLLQRLCDAGYEVSLETSGALDISATDVRVSRVVDLKTPGSEESHRNLYANIEHLTRNDQVKFVICSREDYDWAVSKLIQYNLAERAGEVLFSPSHHQVKASDLADWIVADNLPVRFQLQLHKLLWNDEPGR

SEQ ID NO: 33335 - protein, 215 aa, Pseudomonas plecoglossicida; identical to SEQ ID NO: 33305
  REGION 1..215: note = tr|A0A2A3LZH2|A0A2A3LZH2_9PSED 7-carboxy-7-deazaguanine synthase OS=Pseudomonas plecoglossicida OX=70775 GN=queE PE=3 SV=1

SEQ ID NO: 33336 - protein, 215 aa, Pseudomonas poae
  REGION 1..215: note = tr|A0A3Q9D693|A0A3Q9D693_9PSED 7-carboxy-7-deazaguanine synthase OS=Pseudomonas poae; OX = 200451 GN=queE PE=3 SV=1
MQDTLRITEVFYSLQGETRTAGLPTVFVRLTGCPLRCQYCDSAYAFSGGTVRTLDDILQQVAGYRPRYVCVTGGEPLAQPNAIPLLKQLCDAGYEVSLETSGALDISAVDPRVSRVVDLKTPGSKESHRNLYENMDLLTANDQVKFVICSRDDYDWASSKLIQYGLDRRAGEVLFSPSHHDLNARDLADWVVADNLPVRLQLQLHKYLWNDEPGR

SEQ ID NO: 33337 - protein, 215 aa, Pseudomonas poae
  REGION 1..215: note = tr|A0A423F8X3|A0A423F8X3_9PSED 7-carboxy-7-deazaguanine synthase OS=Pseudomonas poae; OX = 200451 GN=queE PE=3 SV=1
MQDTLRITEVFYSLQGETRTAGLPTVFVRLTGCPLRCQYCDSAYAFSGGTVRTLDDILAQVAGYKPRYVCVTGGEPLAQPNAIPLLKQLCDAGYEVSLETSGALDISAVDSRVSRVVDLKTPGSKEAHRNLYANLDLLTPNDQVKFVICSREDYDWATSKLIQYGLERRAGEVLFSPSHHDLNARDLADWVVADNLPVRLQLQLHKYLWNDEPGR

SEQ ID NO: 33338 - protein, 215 aa, Pseudomonas pohangensis
  REGION 1..215: note = tr|A0A1H2G3K5|A0A1H2G3K5_9PSED 7-carboxy-7-deazaguanine synthase OS=Pseudomonas pohangensis OX=364197 GN=queE PE=3 SV=1
MSETLRITEIFYSLQGETRTAGLPTVFVRLTGCPLRCQYCDTAYAFSGGELCTLQEILAQVATYQPRYVCVTGGEPLAQPNCIPLLQQLCDAGYQVSLETSGALDIAAVDPRVSRVLDLKTPDSQEVARNRYENIALLTAHDQVKFVICSRKDYDWAVSKLIEYRLEQRAGEVLFSPSQHELPARQLADWIIADNLPVRLQLQLHKILWNDVPGH

SEQ ID NO: 33339 - protein, 215 aa, unidentified
  source 1..215: note = Pseudomonas prosekii
  REGION 1..215: note = tr|A0A1H1ZXI4|A0A1H1ZXI4_9PSED 7-carboxy-7-deazaguanine synthase OS=Pseudomonas prosekii; OX = 1148509 GN=queE PE=3 SV=1
MQDTLRITEVFYSLQGETRTAGLPTVFVRLTGCPLRCQYCDSAYAFTGGTIRTLDDILEQVAGYRPRYVCVTGGEPLAQPNAIPLLKQLCDAGYEVSLETSGSIDISAVDSRVSRVVDLKTPGSKEAHRNRYENIDLLTPNDQVKFVICSREDYDWSVSKLIQYGLERRAGEVLFSPSHHDLNARELADWVVADNLPVRLQLQLHKYLWNDEPGR

SEQ ID NO: 33340 - protein, 215 aa, unidentified
  source 1..215: note = Pseudomonas protegens
  REGION 1..215: note = tr|A0A2T6GJ16|A0A2T6GJ16_9PSED 7-carboxy-7-deazaguanine synthase OS=Pseudomonas protegens; OX = 380021 GN=queE PE=3 SV=1
MQDTLRITEVFYSLQGETRTAGLPTVFVRLTGCPLRCQYCDSAYAFSGGTQRTLDSLLEQVAGFRPRYVCVTGGEPLAQPNAIPLLKQLCDAGYEVSLETSGALDISEVDQRVSRVLDLKTPGSKEAHRNRYENIELLTANDQVKFVICSREDYDWAVSKLIQYGLERRAGEVLFSPSHHDLSARDLADWIVADNLPVRLQLQLHKYLWNDEPGR

SEQ ID NO: 33341 - protein, 215 aa, unidentified
  source 1..215: note = Pseudomonas protegens
  REGION 1..215: note = tr|A0A423DN60|A0A423DN60_9PSED 7-carboxy-7-deazaguanine synthase OS=Pseudomonas protegens; OX = 380021 GN=queE PE=3 SV=1
MQDTLRITEVFYSLQGETRTAGLPTVFVRLTGCPLRCQYCDSAYAFSGGTQRTLDSLLEQVAGFRPRYVCVTGGEPLAQPNAIPLLKQLCDAGYEVSLETSGALDISAVDPRVSRILDLKTPGSEESHRNRYENIELLTANDQVKFVICSREDYDWAVSKLIQYGLERRAGEVLFSPSHHDLNARDLADWIVADNLPVRLQLQLHKYLWNDEPGR

SEQ ID NO: 33342 - protein, 226 aa, Pseudomonas pseudoalcaligenes
  REGION 1..226: note = tr|W6R051|W6R051_PSEP5 7-carboxy-7-deazaguanine synthase OS=Pseudomonas pseudoalcaligenes (strain CECT 5344) OX=1182590 GN=queE PE=3 SV=1
MACFVITLVATMQETLRITEIFYSLQGETRTAGLPTVFVRLTGCPLRCQYCDTAYAFSGGEIVTLDSILDQVAAYRPRYVCVTGGEPLAQPNCIALLARLCDAGYEVSLETSGALDVSAVDARVSKVLDLKTPGSAEVQRNRYENVQWLTRNDQVKFVICSREDYDWAVSKLIEYDLAARAGEVLFSPSHKQVDARALADWIVADNLPVRLQLQLHKILWNDEPGH

SEQ ID NO: 33343 - protein, 215 aa, Pseudomonas psychrophila
  REGION 1..215: note = tr|S6HYC4|S6HYC4_9PSED 7-carboxy-7-deazaguanine synthase OS=Pseudomonas psychrophila OX=122355 GN=queE; PE = 3 SV=1
MQDTLRITEVFYSLQGETRTAGLPTVFVRLTGCPLRCGYCDSAYAFSGGTVRPLDDILQQVADFRPRYVCVTGGEPLAQPNAISLLKQLCDAGYEVSIETSGALDISAVDPRVSRVLDLKTPGSKESHRNLYENIALLTPNDQVKFVICSREDYDWAVSKLIEYGLERRAGEVLFSPSHHDLPARDLADWIVADNLPVRLQMQLHKYLWNDEPGR

SEQ ID NO: 33344 - protein, 215 aa, Pseudomonas psychrophila
  REGION 1..215: note = tr|A0A3N2AAM2|A0A3N2AAM2_9PSED 7-carboxy-7-deazaguanine synthase OS=Pseudomonas psychrophila OX=122355 GN=queE PE=3 SV=1
MQDTLRITEVFYSLQGETRTAGLPTVFVRLTGCPLRCQYCDSAYAFSGGTVRSLDSILEQVADFRPRYVCVTGGEPLAQPNAIPLLKQLCDAGYDVSIETSGALDISAVDPRVSRVLDLKTPGSKESHRNLYENIALLTPHDQVKFVICSREDYDWAVSKLIEYGLEHRAGEVLFSPSHHDLPARDLADWIVADNLPVRLQMQLHKYLWNDEPGR

SEQ ID NO: 33345 - protein, 227 aa, Pseudomonas psychrotolerans
  REGION 1..227: note = tr|A0A147H6E0|A0A147H6E0_9PSED 7-carboxy-7-deazaguanine synthase OS=Pseudomonas psychrotolerans OX=237610 GN=queE PE=3 SV=1
MACLAVTPVASMQKDTLRLTEIFYSLQGEARTAGLPTVFVRLTGCPLRCQYCDTAYAFTGGEIHHLDAILEQVASYRPRHICVTGGEPLAQPNCLTLLEKLCDAGYEVSLETSGALDVSGVDPRVSKVVDLKTPGSGEVGRNLYANMAHLTSNDQVKFVICSREDYDWAVSKLIEYRLEQRAGEVLFSPSHGQVVPRELAEWIVADNLPVRFQLQLHKILWNDEPGH

SEQ ID NO: 33346 - protein, 227 aa, Pseudomonas psychrotolerans
  REGION 1..227: note = tr|A0A4Y5W331|A0A4Y5W331_9PSED 7-carboxy-7-deazaguanine synthase OS=Pseudomonas psychrotolerans OX=237610 GN=queE PE=3 SV=1
MACLAVTPVASMQKDTLRLTEIFYSLQGEARTAGLPTVFVRLTGCPLRCQYCDTAYAFTGGEIHHLDAILEQVASYRPRHICVTGGEPLAQPNCLTLLERLCDAGYEVSLETSGALDVSGVDTRVSKVVDLKTPGSGEMGRNLYANLDHLTSNDQVKFVICSREDYDWAVSKLIEYRLEQRAGEVLFSPSHGQVVPRELAEWIVADNLPVRFQLQLHKILWNDEPGH

SEQ ID NO: 33347 - protein, 226 aa, unidentified
  source 1..226: note = Pseudomonas punonensis
  REGION 1..226: note = tr|A0A1M7G169|A0A1M7G169_9PSED 7-carboxy-7-deazaguanine synthase OS=Pseudomonas punonensis OX=1220495 GN=queE PE=3 SV=1
MACFAVTPVAHMKDTLRITEIFFSLQGEARTAGLPTVFVRLTGCPLRCQYCDTAYAFSGGELLSLETILERVASYRPRYICVTGGEPLAQPNCIPLLEKLCDAGYEVSLETSGALDVSAVDPRVSKVVDLKTPGSAEMGRNRYENIEHLQPHDQVKFVICSREDYDWSVSKVIQYGLAERVDEVLFSPSHGQVSGRQLAEWVIADNLPVRMQLQLHKILWNDEPGH

SEQ ID NO: 33348 - protein, 215 aa, Pseudomonas putida
  REGION 1..215: note = tr|A0A2C5W845|A0A2C5W845_PSEPU 7-carboxy-7-deazaguanine synthase OS=Pseudomonas putida; OX = 303 GN=queE PE=3 SV=1
MQDTLRITEVFYSLQGETRTAGLPTVFVRLTGCPLRCQYCDSAYAFSGGTIRTLDDILEQVAEFRPRYVCVTGGEPLAQPNAIPLLKQLCDAGYVVSLETSGALDISAVDSRVSRVVDLKTPDSKEAHRNRYENIELLTPNDQVKFVICSRDDYDWAVSKLIQYGLDQRAGEVLFSPSHHDLNARDLADWVVADNLPVRLQLQLHKYLWNDEPGR

SEQ ID NO: 33349 - protein, 215 aa, Pseudomonas putida
  REGION 1..215: note = tr|Q88NI4|Q88NI4_PSEPK 7-carboxy-7-deazaguanine synthase OS=Pseudomonas putida (strain ATCC 47054 / DSM 6125 / NCIMB 11950 / KT2440) OX=160488 GN=queE PE=3 SV=1
MQDTLRITEVFYSLQGETRTAGLPTVFVRLTGCPLRCQYCDSAYAFSGGTVRTLDSILEQVAGFKPRYVCVTGGEPLAQPNALPLLQRLCDAGYEVSLETSGALDIAGTDTRVSRVVDLKTPGSEESHRNRYENIEQLTRNDQVKFVICSREDYDWAVSKLIQYNLAERAGEVLFSPSHHQVNASDLADWIVADNLPVRFQLQLHKLLWNDEPGR

SEQ ID NO: 33350 - protein, 215 aa, unidentified
  source 1..215: note = Pseudomonas reidholzensis
  REGION 1..215: note = tr|A0A383RYS4|A0A383RYS4_9PSED 7-carboxy-7-deazaguanine synthase OS=Pseudomonas reidholzensis OX=1785162 GN=queE PE=3 SV=1
MQDTLRITEVFYSLQGETRTAGLPTVFVRLTGCPLRCQYCDSAYAFTGGTVRTLDSIVEQVAGFRPRYVCVTGGEPLAQPNALPLLTRLCDAGYEVSLETSGALDIARVDPRVSRVVDLKTPGSEESHRNRYENIELLTRNDQVKFVICSREDYDWAVSKLIQYNLEQRAGEVLFSPSHHQVSASDLADWIVADNLPVRFQMQLHKHLWNDEPGR

SEQ ID NO: 33351 - protein, 215 aa, Pseudomonas reinekei
  REGION 1..215: note = tr|A0A1H0S478|A0A1H0S478_9PSED 7-carboxy-7-deazaguanine synthase OS=Pseudomonas reinekei; OX = 395598 GN=queE PE=3 SV=1
MQDTLRITEVFYSLQGETRTAGLPTVFVRLTGCPLRCQYCDSAYAFTGGTIRTLDDILEQVAGYRPRYVCVTGGEPLAQPNAIPLLKRLCDAGYEVSLETSGSIDISAVDSRVSRVVDLKTPGSKEAHRNRYENIELLTPNDQVKFVICSREDYDWSVSKLIQYGLDQRAGEVLFSPSHHDLNARDLADWVVADNLPVRLQLQLHKYLWNDEPGR

SEQ ID NO: 33352 - protein, 215 aa, Pseudomonas resinovorans
  REGION 1..215: note = tr|S6BLM4|S6BLM4_PSERE 7-carboxy-7-deazaguanine synthase OS=Pseudomonas resinovorans NBRC 106553; OX = 1245471 GN=queE PE=3 SV=1
MHQTLRITEIFYSLQGETRTAGLPTVFVRLTGCPLRCQYCDTAYAFSGGELMTLDAILERVAAYKPRYICVTGGEPLAQPNCIPLLQRLCDAGYDVSIETSGALDVSAVDPRVSKVVDLKTPGSAEVGRNRYENIAHLTANDQVKFVICSREDYDWAVSKLIEYRLEQRAGEVLFSPSHKEVSARDLADWIVADNLPVRLQLQLHKILWNDEPGH

SEQ ID NO: 33353 - protein, 215 aa, Pseudomonas rhizosphaerae; identical to SEQ ID NO: 33210
  REGION 1..215: note = tr|A0A089YSZ9|A0A089YSZ9_9PSED 7-carboxy-7-deazaguanine synthase OS=Pseudomonas rhizosphaerae OX=216142 GN=queE PE=3 SV=1

SEQ ID NO: 33354 - protein, 215 aa, Pseudomonas rhodesiae
  REGION 1..215: note = tr|A0A5C5NRG9|A0A5C5NRG9_9PSED 7-carboxy-7-deazaguanine synthase OS=Pseudomonas rhodesiae; OX = 76760 GN=queE PE=3 SV=1
MQDTLRITEVFYSLQGETRTAGLPTVFVRLTGCPLRCQYCDSAYAFSGGTVRTLDDILEQVAGFKPRYVCVTGGEPLAQPNAIPLLKQLCDAGYEVSLETSGALDISAVDPRVSRVVDLKTPDSKEAHRNRYENMDLLSVNDQVKFVICSRDDYDWAVSKLIQYGLERRAGEVLFSPSHHDLNARDLADWIVADNLPVRLQLQLHKYLWNDEPGR

SEQ ID NO: 33355 - protein, 215 aa, unidentified
  source 1..215: note = Pseudomonas sagittaria
  REGION 1..215: note = tr|A0A1I5VCE1|A0A1I5VCE1_9PSED 7-carboxy-7-deazaguanine synthase OS=Pseudomonas sagittaria OX=1135990 GN=queE PE=3 SV=1
MNQTLRITEIFHSLQGETRTVGLPTVFVRLTGCPLRCQYCDTAYAFSGGELMTLEQILEQVAGYRPRYVCVTGGEPLAQPNCIPLLKALCDAGYQVSLETSGALDIAPVDVRVSRVVDLKTPGSAEVGRNRYENMAELTRNDQVKFVICSREDYDWAVSKIIEYRLDQRAGELLMSPSHHELEARSLAEWIIADNLPVRLQLQLHKYLWNDEPGH

SEQ ID NO: 33356 - protein, 219 aa, unidentified
  source 1..219: note = Pseudomonas salegens
  REGION 1..219: note = tr|A0A1H2G177|A0A1H2G177_9PSED 7-carboxy-7-deazaguanine synthase OS=Pseudomonas salegens; OX = 1434072 GN=queE PE=3 SV=1
MTTELSSTLRITEIFHSLQGESRTIGLPTVFVRLTGCPLRCQYCDSAYAFNGGESMPLEHILQQVGAYRPRYVCVTGGEPLAQPGCLRLLRQLCDAGYQVSLETSGAMDVSAVDPRVSRVVDLKTPGSAEVGRNLYSNIALLGPQDQVKFVLCNRADYDWARFKLDEYGLAEQVGEVLFSPSHAELDARELADWIVADNLPVRFQLQLHKYLWNDQPGH

SEQ ID NO: 33357 - protein, 211 aa, Pseudomonas salomonii
  REGION 1..211: note = tr|A0A1H3U1S0|A0A1H3U1S0_9PSED 7-carboxy-7-deazaguanine synthase OS=Pseudomonas salomonii; OX = 191391 GN=queE PE=3 SV=1
MTYSIKEMFYTLQGEGNQAGRPSVFCRFSGCNLWSGREQDRANAVCTFCDTDFVGTDGEGGGKFKNAEALAHAIDSFWPISHQDHKYVVLTGGEPLLQVDDALINALYNLNFCIAVETNGTIVAPLGIDWLCVSPKSNAALKITTGDELKLVYPQKNSTPSMFEHLDFKHFYLQPMDGLKIVENTETAIRYCKSNPKWKLSLQCHKILAIP

SEQ ID NO: 33358 - protein, 215 aa, Pseudomonas salomonii
  REGION 1..215: note = tr|A0A1H3T049|A0A1H3T049_9PSED 7-carboxy-7-deazaguanine synthase OS=Pseudomonas salomonii; OX = 191391 GN=queE PE=3 SV=1
MQDTLRITEVFYSLQGETRTAGLPTVFVRLTGCPLRCQYCDSAYAFSGGTVRTLDDIIEQVAGFKPRYVCVTGGEPLAQPNAIPLLKRLCDAGYEVSLETSGALDISAVDARVSRVVDLKTPGSKEAHRNLYDNMDLLTANDQVKFVICSRDDYDWAASKLIQYNLDRRAGEVLFSPSHHDLNARDLADWVVADNLPVRLQLQLHKYLWNDEPGR

SEQ ID NO: 33359 - protein, 215 aa, Pseudomonas saponiphila
  REGION 1..215: note = tr|A0A1H4KGL6|A0A1H4KGL6_9PSED 7-carboxy-7-deazaguanine synthase OS=Pseudomonas saponiphila OX=556534 GN=queE PE=3 SV=1
MQDTLRITEVFYSLQGETRTAGLPTVFVRLTGCPLRCQYCDSAYAFSGGTQRTLDSLLEQVAGFRPRYVCVTGGEPLAQPNAIPLLKQLCDAGYEVSLETSGALDISEVDRRVSRVLDLKTPGSKEAHRNRYENIELLTVNDQVKFVICSREDYDWAVSKLIQYGLERRAGEVLFSPSHHDLSARDLADWIVADNLPVRLQLQLHKYLWNDEPGR

SEQ ID NO: 33360 - protein, 215 aa, unidentified
  source 1..215: note = Pseudomonas saudiphocaensis
  REGION 1..215: note = tr|A0A427EGP3|A0A427EGP3_9PSED 7-carboxy-7-deazaguanine synthase OS=Pseudomonas saudiphocaensis OX=1499686 GN=queE PE=3 SV=1
MQNTLRITEIFYSLQGEARTSGLPTVFVRLTGCPLRCQYCDSAYAFSGGEIMSLQAILERVASFNPRYICVTGGEPLAQPGCLPLLQQLCDAGYEVSLETSGALDISAVDERVSRVVDLKTPGSAEVGRNLYENINWLTSNDQVKFVICSREDYDWAVSKLIEYRLDERAGEVLFSPSYGQVDARALAEWIISDNLPVRMQLQLHKILWDDAPGH

SEQ ID NO: 33361 - protein, 215 aa, unidentified
  source 1..215: note = Pseudomonas saudiphocaensis
  REGION 1..215: note = tr|A0A078LQV2|A0A078LQV2_9PSED 7-carboxy-7-deazaguanine synthase OS=Pseudomonas saudiphocaensis OX=1499686 GN=queE PE=3 SV=1
MQNTLRITEIFYSLQGEARTSGLPTVFVRLTGCPLRCQYCDSAYAFSGGEIMSLQAILERVASFNPRYICVTGGEPLAQPGCLPLLQQLCDAGYEVSLETSGALDISAVDERVSRVVDLKTPGSAEVGRNLYENINWLTSNDQVKFVICSREDYDWAASKLIEYRLHERAGEVLFSPSYGQVDARALAEWIISDNLPVRMQLQLHKILWDDAPGH

SEQ ID NO: 33362 - protein, 218 aa, Pseudomonas savastanoi
  REGION 1..218: note = tr|A0A3M3TMK2|A0A3M3TMK2_PSESH 7-carboxy-7-deazaguanine synthase OS=Pseudomonas savastanoi pv. phaseolicola OX=319 GN=queE PE=3 SV=1
MADMQDTLRITEIFHSLQGETRTAGLPTVFVRLTGCPLRCQYCDSAYAFSGGTIQTLDDIVGQVAAYRPRYVCVTGGEPLAQPNAIPLLKRLCDAGYEVSLETSGALDISAIDPRVSRVVDLKTPGSKEVSRNRYENIELLTRNDQVKFVICSREDYDWAVSKLIQYGLERRAGEVLFSASHHELKGRDLADWIVADNLPVRLQMQLHKILWDDEPGR

SEQ ID NO: 33363 - protein, 218 aa, Pseudomonas savastanoi
  REGION 1..218: note = tr|A0A3M4RGW0|A0A3M4RGW0_PSESG 7-carboxy-7-deazaguanine synthase OS=Pseudomonas savastanoi pv. glycinea OX=318 GN=queE PE=3 SV=1
MAHMQETLRITEVFYSLQGETRTAGLPTVFVRLTGCPLRCQYCDSAYAFTGGTIQTLDDILGQVADYRPRYVCVTGGEPLAQPNAIPLLKRLCDAGYEVSLETSGALDIAAVDPRVSRVVDLKTPGSMEVTRNRYENIELLTPNDQVKFVLCSREDYDWAVSKLIQYGLERRAGEVLFSPSHHQLNARDLADWIVADNLPVRLQMQLHKFLWNDEPGR

SEQ ID NO: 33364 - protein, 215 aa, Pseudomonas segetis
  REGION 1..215: note = tr|A0A238ZPX1|A0A238ZPX1_9PSED 7-carboxy-7-deazaguanine synthase OS=Pseudomonas segetis; OX = 298908 GN=queE PE=3 SV=1
MQKTLRITEIFFSLQGETRTAGLPTVFVRLTGCPLRCQYCDTAYAFNGGELMSLDAIIEKVASYSPRYVCVTGGEPLAQPNCIALLERLCDAGFEVSLETSGALDVSAVDGRVSKVLDLKTPGSAEVARNRYENIDLLTPNDQVKFVICSREDYDWATTKLIQYRLNERAGEVLYSPSHHQVSARDLADWIVADNLPVRLQLQLHKILWNDEQGR

SEQ ID NO: 33365 - protein, 226 aa, Pseudomonas seleniipraecipitans
  REGION 1..226: note = tr|A0A1G7H7T7|A0A1G7H7T7_9PSED 7-carboxy-7-deazaguanine synthase OS=Pseudomonas seleniipraecipitans OX=640205 GN=queE PE=3 SV=1
MACFAVTPVALMKDTLRITEIFFSLQGETRTAGLPTVFVRLTGCPLRCQYCDTAYAFSGGEVLSLDDILEQVASYRPRYVCVTGGEPLAQPNCIPLLERLCDAGYEVSLETSGALDVSAVDTRVSKVVDLKTPGSAEMARNRYENIQYLQPRDQVKFVICSREDYDWSVSKLIQYGLADRVDEVLFSPSHQEVSGRQLAEWVIADNLPVRMQLQLHKILWNDEPGH

SEQ ID NO: 33366 - protein, 226 aa, unidentified
  source 1..226: note = Pseudomonas sihuiensis
  REGION 1..226: note = tr|A0A1H2L4U5|A0A1H2L4U5_9PSED 7-carboxy-7-deazaguanine synthase OS=Pseudomonas sihuiensis OX=1274359 GN=queE PE=3 SV=1
MACFVITLVATMQETLRITEIFYSLQGETRTAGLPTVFVRLTGCPLRCQYCDTAYAFSGGEIVTLDSILDQVAAYRPRYVCVTGGEPLAQPNCIPLLARLCDAGYEVSLETSGALDVSAVDARVSKVLDLKTPGSAEVQRNRYENVQWLTRNDQVKFVICSREDYDWAVSKLIEYDLAARAGEVLFSPSHKQVDARALADWIVADNLPVRLQLQLHKILWNDEPGH

SEQ ID NO: 33367 - protein, 215 aa, unidentified
  source 1..215: note = Pseudomonas silesiensis
  REGION 1..215: note = tr|A0A191Z306|A0A191Z306_9PSED 7-carboxy-7-deazaguanine synthase OS=Pseudomonas silesiensis OX=1853130 GN=queE PE=3 SV=1
MQDTLRITEVFYSLQGETRTAGLPTVFVRLTGCPLRCQYCDSAYAFTGGTVRPLDDILEQVAGFRPRYVCVTGGEPLAQPNAIPLLKQLCDAGYEVSLETSGALDISAVDPRVSRVVDLKTPGSKEAHRNRYENIELLTRNDQVKFVICSREDYDWAVSKLIQYGLDQRAGEVLFSPSHHDLNARDLADWVVADNLPVRLQLQLHKYLWNDEPGR

SEQ ID NO: 33368 - protein, 215 aa, Pseudomonas simiae
  REGION 1..215: note = tr|U1TQV0|U1TQV0_9PSED 7-carboxy-7-deazaguanine synthase OS=Pseudomonas simiae OX=321846 GN=queE PE=3 SV=1
MQDTLRITEVFYSLQGETRTAGLPTVFVRLTGCPLRCQYCDSAYAFSGGTVRTLDDILEQVAGYKPRYVCVTGGEPLAQPNAIPLLKQLCDAGYEVSLETSGALDISAVDPRVSRVVDLKTPDSKEAHRNRYENIELLTANDQVKFVICSRDDYDWANSKLIQYGLDRRAGEVLFSPSHHDLSARDLADWVVADNLPVRLQLQLHKYLWNDEPGR

SEQ ID NO: 33369 - protein, 215 aa, Pseudomonas simiae; identical to SEQ ID NO: 33178
  REGION 1..215: note = tr|A0A1N7UEB9|A0A1N7UEB9_9PSED 7-carboxy-7-deazaguanine synthase OS=Pseudomonas simiae; OX = 321846 GN=queE PE=3 SV=1

SEQ ID NO: 33370 - protein, 215 aa, unidentified
  source 1..215: note = Pseudomonas soli
  REGION 1..215: note = tr|A0A1H9A9X2|A0A1H9A9X2_9PSED 7-carboxy-7-deazaguanine synthase OS=Pseudomonas soli; OX = 1306993 GN=queE PE=3 SV=1
MQDTLRITEVFYSLQGETRTAGLPTVFVRLTGCPLRCQYCDSAYAFNGGTIRTLESILEQVAGFKPRYVCVTGGEPLAQPNALPLLQQLCDAGYEVSLETSGALDISGVDTRVSRVVDLKTPGSEESHRNRYENIELLTGNDQVKFVICSREDYDWAVSKLIQYNLAERAGEVLFSPSHHQVSATDLADWIVADNLPVRFQLQLHKLLWNDEPGR

SEQ ID NO: 33371 - protein, 215 aa, unidentified
  source 1..215: note = Pseudomonas soli
  REGION 1..215: note = tr|A0A2V4I7M2|A0A2V4I7M2_9PSED 7-carboxy-7-deazaguanine synthase OS=Pseudomonas soli; OX = 1306993 GN=queE PE=3 SV=1
MQDTLRITEVFYSLQGETRTAGLPTVFVRLTGCPLRCQYCDSAYAFSGGTVRTLDSIVEQVAGFKPRYVCVTGGEPLAQPNALPLLQRLCDAGYDVSLETSGALDISGVDTRVSRVVDLKTPGSEESHRNRYENIELLTGNDQVKFVICSREDYDWAVSKLIQYNLAERAGEVLFSPSHHQVSATDLADWIVADNLPVRFQLQLHKLLWNDEPGR

SEQ ID NO: 33372 - protein, 224 aa, unidentified
  source 1..224: note = Pseudomonas songnenensis
  REGION 1..224: note = tr|A0A482UF76|A0A482UF76_9PSED 7-carboxy-7-deazaguanine synthase OS=Pseudomonas songnenensis OX=1176259 GN=queE PE=3 SV=1
MACLAVTPVADMTLRITEIFYSLQGETRTSGLPTVFVRLTGCPLRCQYCDTAYAFSGGELMSIDAIVERVAAYKPRYVCVTGGEPLAQPNCVPLLQRLCDAGYEVSLETSGALDIAVVDERVSRVVDLKTPGSAEVARNRYENIASLTRNDQVKFVICSREDYDWAVSKLIEYGLDRRAGEVLFSPSHGQVDVRALADWIVADNLPVRLQLQLHKIIWNDAPGH

SEQ ID NO: 33373 - protein, 215 aa, Pseudomonas sp.; identical to SEQ ID NO: 33171
  REGION 1..215: note = tr|A0A0S4HYI8|A0A0S4HYI8_9PSED 7-carboxy-7-deazaguanine synthase OS=Pseudomonas sp. URMO17WK12:I11 OX=1283291 GN=queE_1 PE=3 SV=1

SEQ ID NO: 33374 - protein, 215 aa, Pseudomonas sp.
  REGION 1..215: note = tr|A0A1T1HUE9|A0A1T1HUE9_9PSED 7-carboxy-7-deazaguanine synthase OS=Pseudomonas sp. MF4836 OX=1960827 GN=queE PE=3 SV=1
MQDTLRITEVFYSLQGETRTAGLPTVFVRLTGCPLRCQYCDSAYAFSGGTLRTLDSILEQVAEFRPRYVCVTGGEPLAQPNAIPLLKQLCDAGYEVSLETSGALDISAVDSRVSRVLDLKTPGSEEVRRNRYENIDLLTPNDQVKFVICSREDYDWAVSKLIQYGLERRAGEVLFSPSHHDLNARDLADWVVADNLPVRLQLQLHKYLWNDEPGR

SEQ ID NO: 33375 - protein, 226 aa, Pseudomonas straminea
  REGION 1..226: note = tr|A0A1I1U6P8|A0A1I1U6P8_PSEOC 7-carboxy-7-deazaguanine synthase OS=Pseudomonas straminea; OX = 47882 GN=queE PE=3 SV=1
MACLAVTPGAPMKDTLRITEIFFSLQGEARTAGLPTVFVRLTGCPLRCQYCDTAYAFSGGELLTLDAILEQVASYRPRYVCVTGGEPLAQPNCIPLLEKLCDAGYDVSLETSGALDVAAVDPRVSKVVDLKTPGSAEMGRNRYENIVHLQPRDQVKFVICSREDYDWSVSKVIQYDLPARVGEVLFSPSHGQVSGRQLAEWVIADNLPVRMQLQLHKILWNDEPGH

SEQ ID NO: 33376 - protein, 224 aa, Pseudomonas stutzeri
  REGION 1..224: note = tr|L0GL61|L0GL61_PSEST 7-carboxy-7-deazaguanine synthase OS=Pseudomonas stutzeri RCH2 OX=644801 GN=queE; PE = 3 SV=1
MACLAVTPVADMTLRITEIFYSLQGETRTSGLPTVFVRLTGCPLRCQYCDTAYAFSGGELMSIDAIVERVAAYNPRYVCVTGGEPLAQPNCVPLLQRLCDAGYEVSLETSGALDISVVDERVSRVVDLKTPGSAEVARNRYENIASLTQNDQVKFVICSREDYDWAVSKLIEYGLDRRAGEVLFSPSHGQVDVRALADWIVADNLPVRLQLQLHKIIWNDAPGH

SEQ ID NO: 33377 - protein, 215 aa, Pseudomonas stutzeri
  REGION 1..215: note = tr|I4JI26|I4JI26_PSEST 7-carboxy-7-deazaguanine synthase OS=Pseudomonas stutzeri TS44 OX=477228 GN=queE; PE = 3 SV=1
MHQTLRITEIFYSLQGETRTSGLPTVFVRLTGCPLRCQYCDTAYAFNGGELMTLEAILERVAAYSPRYVCVTGGEPLAQPNCLPLLQRLCDVGYAVSLETSGALDIAGVDERVSRVLDLKTPGSAEVGRNRYENIALLTPSDQVKFVICSREDYDWAVSKLIEYRLEQRAGEVLFSPSHGQVDVRALADWIVSDNLPVRLQLQLHKIIWNDAPGH

SEQ ID NO: 33378 - protein, 215 aa, Pseudomonas synxantha
  REGION 1..215: note = tr|I4L4B3|I4L4B3_9PSED 7-carboxy-7-deazaguanine synthase OS=Pseudomonas synxantha BG33R OX=96901 GN=queE; PE = 3 SV=1
MQDTLRITEVFYSLQGETRTAGLPTVFVRLTGCPLRCQYCDSAYAFSGGTVRTLDDILEQVAGYRPRYVCVTGGEPLAQPNAIPLLKQLCDAGYEVSLETSGALDISAVDPRVSRVVDLKTPDSKEAHRNRYENIDLLTANDQVKFVICSRDDYDWATSKLIQYGLERRAGEVLFSPSHHDLNARELADWVVADNLPVRLQLQLHKYLWNDEPGR

SEQ ID NO: 33379 - protein, 215 aa, Pseudomonas synxantha; identical to SEQ ID NO: 33283
  REGION 1..215: note = tr|A0A0E3K4G8|A0A0E3K4G8_9PSED 7-carboxy-7-deazaguanine synthase OS=Pseudomonas synxantha; OX = 47883 GN=queE PE=3 SV=1

SEQ ID NO: 33380 - protein, 215 aa, Pseudomonas syringae
  REGION 1..215: note = tr|W0MZ43|W0MZ43_PSESX 7-carboxy-7-deazaguanine synthase OS=Pseudomonas syringae CC1557 OX=1357279 GN=queE; PE = 3 SV=1
MQDTLRITEIFHSLQGETRTAGLPTVFVRLTGCPLRCQYCDSAYAFSGGTLQTLDDIVEQVASYRPRYVCVTGGEPLAQPNAIPLLKRLCDAGYEVSLETSGALDISAVDPRVSRVVDLKTPGSKEVTRNRYENMELLTPNDQVKFVICSREDYDWAVSKLIQYGLDRRAGEVLFSASHHELKGRDLADWIVADNLPVRLQMQLHKILWDDEPGR

SEQ ID NO: 33381 - protein, 218 aa, Pseudomonas syringae
  REGION 1..218: note = tr|A0A0P9Y2E3|A0A0P9Y2E3_PSEYM 7-carboxy-7-deazaguanine synthase OS=Pseudomonas syringae pv. maculicola OX=59511 GN=queE PE=3 SV=1
MADMQETLRITEIFHSLQGETRTAGLPTVFVRLTGCPLRCQYCDSAYAFSGGTIQTLDDIIGQVASYRPRYVCVTGGEPLAQPNAIPLLKRLCDAGYEVSLETSGALDISAVDPRVSRVVDLKTPGSKEVARNRYENMALLTPNDQVKFVICSREDYDWAVSKLIQYGLDRRAGEVLFSASHHELKGRDLADWIVADNLPVRLQMQLHKILWDDEPGR

SEQ ID NO: 33382 - protein, 215 aa, Pseudomonas taeanensis
  REGION 1..215: note = tr|A0A0A1YFE2|A0A0A1YFE2_9PSED 7-carboxy-7-deazaguanine synthase OS=Pseudomonas taeanensis MS-3 OX=1395571 GN=queE PE=3 SV=1
MQKNLRITEIFYSLQGETRTAGLPTVFVRLTGCPLRCQYCDTAYAFSGGEVMSLDAIVEQIAGYKPRYICVTGGEPLAQPNCIPLLERLCDAGYEVSLETSGALDVSAVDPRVSKVLDLKTPGSAEVARNRYENIELLTPNDQVKFVICSREDYDWAVSKLIQYRLDQRAGEVWFSPSHQQLNARALADWIVADNLPVRLQMQLHKILWNDEPGH

SEQ ID NO: 33383 - protein, 211 aa, Pseudomonas taeanensis
  REGION 1..211: note = tr|A0A0A1YED9|A0A0A1YED9_9PSED 7-carboxy-7-deazaguanine synthase OS=Pseudomonas taeanensis MS-3 OX=1395571 GN=queE PE=3 SV=1
MTYSIKEMFYTLQGEGNQAGRPAVFCRFSGCNLWSGREQDRASAICTFCDTDFVGMDGMGGGKFTTANILALAIDSLWPISHQDHKYVVLTGGEPLLQVDDSLVEALHEHGFIVAVETNGTIIPPNGIDWVCVSPKSTAELKITQGDELKLVFPQTEALPEKFEHLTFNHFYLQPMDGPKAHRNTKLTIEYCKAHPKWKLGLQMHKALMIP

SEQ ID NO: 33384 - protein, 215 aa, Pseudomonas taetrolens
  REGION 1..215: note = tr|A0A0J6JR33|A0A0J6JR33_PSETA 7-carboxy-7-deazaguanine synthase OS=Pseudomonas taetrolens OX=47884 GN=queE PE=3 SV=1
MQDTLRITEVFYSLQGETRTAGLPTVFVRLTGCPLRCGYCDSAYAFSGGTIRTLDSILEQVADFRPRYVCVTGGEPLAQPNAIPLLKQLCDAGYEVSIETSGALDISAVDQRVSRVLDLKTPGSKESHRNLYENIALLTPNDQVKFVICSREDYDWAVSKLIEYGLERRAGEVLFSPSHHDLPARDLADWIVADNLPVRLQMQLHKYLWNDEPGR

SEQ ID NO: 33385 - protein, 218 aa, Pseudomonas taiwanensis
  REGION 1..218: note = tr|V7D5F3|V7D5F3_9PSED 7-carboxy-7-deazaguanine synthase OS=Pseudomonas taiwanensis SJ9 OX=1388762 GN=queE; PE = 3 SV=1
MASMQDTLRITEVFYSLQGETRTAGLPTVFVRLTGCPLRCQYCDSAYAFSGGTVRTLDSILEQVAGFKPRYVCVTGGEPLAQPNALPLLQRLCDAGYEVSLETSGALDIAGTDTRVSRVVDLKTPGSEESHRNRYENIEQLTRNDQVKFVICSREDYDWAVSKLIQYNLAERAGEVLFSPSHHQVNASELADWIVADNLPVRFQLQLHKLLWNDEPGR

SEQ ID NO: 33386 - protein, 215 aa, Pseudomonas thivervalensis
  REGION 1..215: note = tr|A0A176NRN0|A0A176NRN0_9PSED 7-carboxy-7-deazaguanine synthase OS=Pseudomonas thivervalensis OX=86265 GN=queE PE=3 SV=1
MQDTLRITEVFYSLQGETRTAGLPTVFVRLTGCPLRCQYCDSAYAFSGGTVRTLDDILEQVAGYRPRYVCVTGGEPLAQPNAIPLLKQLCDAGYEVSLETSGALDISAVDPRVSRVVDLKTPGSKEAHRNRYENIELLTPNDQVKFVICSREDYDWAVSKLIQYGLDQRAGEVLLSPSHHDLSARDLADWVVADNLPVRLQLQLHKYLWNDEPGR

SEQ ID NO: 33387 - protein, 215 aa, Pseudomonas tolaasii
  REGION 1..215: note = tr|A0A2N0DZU5|A0A2N0DZU5_PSETO 7-carboxy-7-deazaguanine synthase OS=Pseudomonas tolaasii NCPPB 2192 OX=564423 GN=queE PE=3 SV=1
MQDTLRITEVFYSLQGETRTAGLPTVFVRLTGCPLRCQYCDSAYAFSGGTVRTLDDILEQVAGFKPRYVCVTGGEPLAQPNAIPLLKQLCDAGYEVSLETSGALDISAVDPRVSRVVDLKTPGSKEAHRNLYDNMDLLTANDQVKFVICSRDDYDWAASKLIQYGLDRRAGEVLFSPSHHDLNARELADWVVADNLPVRLQLQLHKYLWNDEPGR

SEQ ID NO: 33388 - protein, 226 aa, Pseudomonas toyotomiensis
  REGION 1..226: note = tr|A0A1I5MSV9|A0A1I5MSV9_9PSED 7-carboxy-7-deazaguanine synthase OS=Pseudomonas toyotomiensis OX=554344 GN=queE PE=3 SV=1
MACFVITLVATMQETLRITEIFYSLQGETRTAGLPTVFVRLTGCPLRCQYCDTAYAFSGGEIVTLDSILDQVAAYRPRYICVTGGEPLAQPNCIPLLARLCDAGYEVSLETSGALDVSAVDARVSKVLDLKTPGSAEVQRNRYENIEWLTDNDQVKFVICSREDYDWAVSKLIEYDLAARAGEVLFSPSHKQVDARALADWIVADNLPVRLQLQLHKILWNDEPGH

SEQ ID NO: 33389 - protein, 215 aa, Pseudomonas toyotomiensis
  REGION 1..215: note = tr|A0A2G5G4R5|A0A2G5G4R5_9PSED 7-carboxy-7-deazaguanine synthase OS=Pseudomonas toyotomiensis OX=554344 GN=queE PE=3 SV=1
MQETLRITEIFYSLQGETRTAGLPTVFVRLTGCPLRCQYCDTAYAFSGGEIVTLDSILDQVAAYRPRYICVTGGEPLAQPNCIPLLARLCDAGYEVSLETSGALDVSAVDARVSKVLDLKTPGSAEVQRNRYENIEWLTDNDQVKFVICSREDYDWAVSKLIEYDLAARAGEVLFSPSHKQVDARALADWIVADNLPVRLQLQLHKILWNDEPGH

SEQ ID NO: 33390 - protein, 218 aa, Pseudomonas tremae; identical to SEQ ID NO: 33215
  REGION 1..218: note = tr|A0A0Q0BYB2|A0A0Q0BYB2_9PSED 7-carboxy-7-deazaguanine synthase OS=Pseudomonas tremae; OX = 200454 GN=queE PE=3 SV=1

SEQ ID NO: 33391 - protein, 215 aa, Pseudomonas trivialis
  REGION 1..215: note = tr|A0A0H5AE83|A0A0H5AE83_9PSED 7-carboxy-7-deazaguanine synthase OS=Pseudomonas trivialis; OX = 200450 GN=queE PE=3 SV=1
MQDTLRITEVFYSLQGETRTAGLPTVFVRLTGCPLRCQYCDSAYAFSGGTVRTLDDILKQVAGYKPRYVCVTGGEPLAQPNAIPLLKQLCDAGYEVSLETSGALDISAVDPRVSRVVDLKTPGSKEAHRNRYENIDLLTANDQVKFVICSRDDYDWANSKLIQYGLDRRAGEVLFSPSHHDLNARDLADWVVADNLPVRLQLQLHKYLWNDEPGR

SEQ ID NO: 33392 - protein, 215 aa, Pseudomonas trivialis
  REGION 1..215: note = tr|A0A0R2ZMN8|A0A0R2ZMN8_9PSED 7-carboxy-7-deazaguanine synthase OS=Pseudomonas trivialis; OX = 200450 GN=queE PE=3 SV=1
MQDTLRITEVFYSLQGETRTAGLPTVFVRLTGCPLRCQYCDSAYAFSGGTVRTLDDILEQVAGYRPRYVCVTGGEPLAQPNAIPLLKQLCDAGYEVSLETSGALDISTVDPRVSRVVDLKTPGSREAHRNLYENLDLLTANDQVKFVICSREDYDWANSKLIQYGLDRRAGEVLFSPSHHDLNARDLADWVVADNLPVRLQLQLHKYLWNDEPGR

SEQ ID NO: 33393 - protein, 215 aa, Pseudomonas umsongensis
  REGION 1..215: note = tr|A0A1H2C720|A0A1H2C720_9PSED 7-carboxy-7-deazaguanine synthase OS=Pseudomonas umsongensis OX=198618 GN=queE PE=3 SV=1
MQDTLRITEVFYSLQGETRTAGLPTVFVRLTGCPLRCQYCDSAYAFTGGTLRTLDDILEQVAGFRPRYVCVTGGEPLAQPNAIPLLKRLCDAGYEVSLETSGSIDISAVDSRVSRVVDLKTPGSKEAHRNRYENIELLTPNDQVKFVICSREDYDWSVSKLIQYGLDQRAGEVLFSPSHHDLNARDLADWVVADNLPVRLQLQLHKYLWNDEPGR

SEQ ID NO: 33394 - protein, 215 aa, Pseudomonas vancouverensis
  REGION 1..215: note = tr|A0A1H2P7C3|A0A1H2P7C3_9PSED 7-carboxy-7-deazaguanine synthase OS=Pseudomonas vancouverensis OX=95300 GN=queE PE=3 SV=1
MQDTLRITEVFYSLQGETRTAGLPTVFVRLTGCPLRCQYCDSAYAFTGGTIRTLDDILEQVAGFRPRYVCVTGGEPLAQPNAIPLLKRLCDAGYEVSLETSGSIDISAVDSRVSRVVDLKTPGSKEAHRNRYENIELLTPNDQVKFVICSREDYDWSVSKLIQYGLDQRAGEVLFSPSHHDLNARDLADWVVADNLPVRLQLQLHKYLWNDEPGR

SEQ ID NO: 33395 - protein, 215 aa, Pseudomonas veronii; identical to SEQ ID NO: 33327
  REGION 1..215: note = tr|A0A1D3K2R2|A0A1D3K2R2_9PSED 7-carboxy-7-deazaguanine synthase OS=Pseudomonas veronii 1YdBTEX2 OX=1295141 GN=queE PE=3 SV=1

SEQ ID NO: 33396 - protein, 215 aa, Pseudomonas veronii; identical to SEQ ID NO: 33327
  REGION 1..215: note = tr|A0A0R3B9D5|A0A0R3B9D5_9PSED 7-carboxy-7-deazaguanine synthase OS=Pseudomonas veronii; OX = 76761 GN=queE PE=3 SV=1

SEQ ID NO: 33397 - protein, 215 aa, unidentified
  source 1..215: note = Pseudomonas versuta
  REGION 1..215: note = tr|A0A0M4QQY6|A0A0M4QQY6_9PSED 7-carboxy-7-deazaguanine synthase OS=Pseudomonas versuta; OX = 1788301 GN=queE PE=3 SV=1
MQDTLRITEVFYSLQGETRTAGLPTVFVRLTGCPLRCQYCDSAYAFSGGTVRTLDSILEQVAGFRPRYVCVTGGEPLAQPNAIPLLKQLCDAGYEVSIETSGALDISAVDPRVSRVLDLKTPGSKESHRNLYENIALLTPNDQVKFVICSREDYDWAVSKLIEYGLERRAGEVLFSPSHHDLKASDLADWIVADNLPVRLQMQLHKYLWNDEPGR

SEQ ID NO: 33398 - protein, 215 aa, Pseudomonas viridiflava
  REGION 1..215: note = tr|A0A1Y6JNM7|A0A1Y6JNM7_PSEVI 7-carboxy-7-deazaguanine synthase OS=Pseudomonas viridiflava OX=33069 GN=queE PE=3 SV=1
MQDTLRITEIFHSLQGETRTAGLPTVFVRLTGCPLRCQYCDSAYAFTGGTIHTLDDIMGQVAAYRPRYVCVTGGEPLAQPNAIPLLKRLCDEGYEVSLETSGALDISAVDPRVSRVVDLKTPGSKEVTRNRYENMELLTPNDQVKFVICSREDYDWAVSKLIQYGLDRRAGEVLFSASHHELKGRELADWIVADNLPVRLQMQLHKFLWDDEPGR

SEQ ID NO: 33399 - protein, 215 aa, Pseudomonas viridiflava
  REGION 1..215: note = tr|A0A2G0YHJ6|A0A2G0YHJ6_PSEVI 7-carboxy-7-deazaguanine synthase OS=Pseudomonas viridiflava OX=33069 GN=queE PE=3 SV=1
MQDTLRITEIFHSLQGETRTAGLPTVFVRLTGCPLRCQYCDSAYAFTGGTIQTLDDIMGQVAAYRPRYVCVTGGEPLAQPNAIPLLKRLCDEGYEVSLETSGALDISAVDPRVSRVVDLKTPGSKEVTRNRYENMELLTPNDQVKFVICSREDYDWAVSKLIQYGLDRRAGEVLFSASHHELKGRDLADWIVADNLPVRLQMQLHKFLWDDEPGR

SEQ ID NO: 33400 - protein, 210 aa, Pseudomonas vranovensis
  REGION 1..210: note = tr|A0A423DU80|A0A423DU80_9PSED 7-carboxy-7-deazaguanine synthase OS=Pseudomonas vranovensis OX=321661 GN=queE PE=3 SV=1
MTYSVKEIFYTLQGEGLQAGRPAVFCRFTGCNLWSGREADRSQAVCQFCDTDFVGTNGTLGGKYLTAEALVERIFSQWPVGQTHRYVVLTGGEPLLQVDDDLINALHNQDFEVAVETNGTITAPSGIDWICVSPKAGTEWVQRSGDELKLVYPQPGLLPDTITANDFKYYLLQPMDGPLQRQNTRSAIAYCQANTKWRLSVQTHKILEIR

SEQ ID NO: 33401 - protein, 215 aa, Pseudomonas vranovensis
  REGION 1..215: note = tr|A0A423DSQ2|A0A423DSQ2_9PSED 7-carboxy-7-deazaguanine synthase OS=Pseudomonas vranovensis OX=321661 GN=queE PE=3 SV=1
MQDTLRITEVFYSLQGETRTAGLPTVFVRLTGCPLRCQYCDSEYAFSGGSIRSLDSILEQVAGFKPRYVCVTGGEPLAQPNAIPLLKQLCDAGYEVSLETSGALDISRVDTRVSRVVDLKTPGSEEVHRNRYENIELLTPNDQVKFVICSREDYDWAVSKLIQYGLEKRAGDVLFSPSHHQVSATDLADWIVADNLPVRFQMQLHKLLWNDEPGR

SEQ ID NO: 33402 - protein, 215 aa, unidentified
  source 1..215: note = Pseudomonas wadenswilerensis
  REGION 1..215: note = tr|A0A380T5P2|A0A380T5P2_9PSED 7-carboxy-7-deazaguanine synthase OS=Pseudomonas wadenswilerensis OX=1785161 GN=queE PE=3 SV=1
MQDTLRITEVFYSLQGETRTAGLPTVFVRLTGCPLRCQYCDSEYAFSGGSIRTLDSILEQVAGFKPRYVCVTGGEPLAQPNAIPLLKQLCDAGYDVSLETSGALDISRVDTRVSRVVDLKTPGSEEVHRNRYENIELLTRNDQVKFVICSREDYDWAVSKLIQYGLEKRAGEVLFSPSHHQVSATDLADWIVADNLPVRFQMQLHKLLWNDEPGR

SEQ ID NO: 33403 - protein, 215 aa, unidentified
  source 1..215: note = Pseudomonas weihenstephanensis
  REGION 1..215: note = tr|A0A0J6J4F2|A0A0J6J4F2_9PSED 7-carboxy-7-deazaguanine synthase OS=Pseudomonas weihenstephanensis OX=1608994 GN=queE PE=3 SV=1
MQDTLRITEVFYSLQGETRTAGLPTVFVRLTGCPLRCGYCDSAYAFSGGTVRSLDSILEQVAGFRARYVCVTGGEPLAQPNAIPLLKQLCDAGYEVSIETSGALDISAVDPRVSRVLDLKTPDSKESHRNLYDNIALLTRHDQVKFVICSRDDYDWAVSKLIEYGLERRAGEVLFSPSHHDLPARDLADWIVADNLPVRLQMQLHKYLWNDEPGR

SEQ ID NO: 33404 - protein, 215 aa, Pseudomonas xanthomarina
  REGION 1..215: note = tr|A0A1C2DQT4|A0A1C2DQT4_9PSED 7-carboxy-7-deazaguanine synthase OS=Pseudomonas xanthomarina OX=271420 GN=queE PE=3 SV=1
MHHTLRITEIFYSLQGETRTSGLPTVFVRLTGCPLRCQYCDSAYAFSGGEIMSLETILERVAAYKPRYVCVTGGEPLAQPACQALLQRLCDAGYEVSLETSGALSIAEIDQRVSRVVDLKTPGSGEVGRNLYANVEHLSRNDQVKFVICSREDYDWAVSKLIEYRLDARAGEVLFSPSYGQIDLRALADWIVSDNLPVRLQLQLHKILWNDAPGH

SEQ ID NO: 33405 - protein, 224 aa, Pseudomonas xanthomarina; identical to SEQ ID NO: 33277
  REGION 1..224: note = tr|A0A098FT09|A0A098FT09_9PSED 7-carboxy-7-deazaguanine synthase OS=Pseudomonas xanthomarina OX=271420 GN=queE PE=3 SV=1

SEQ ID NO: 33406 - protein, 219 aa, Pseudomonas xinjiangensis
  REGION 1..219: note = tr|A0A1H1UGX7|A0A1H1UGX7_9PSED 7-carboxy-7-deazaguanine synthase OS=Pseudomonas xinjiangensis OX=487184 GN=queE PE=3 SV=1
MPDQSNPTLRLTEIFYSIQGESRTLGLPTVFVRLTGCPLRCNYCDTAYAFSGGEVMSLDAILDKVRSFSPRYICVTGGEPLAQPNCLTLLQQLCDAGYEVSLETSGALDVSGVDTRISRVMDLKTPDSGEAHRNLYTNVEHLGLNDQVKFVICSRDDYDWARFQTDRFQLPGRVGEVLFSPSHGQVEARQLAEWIVADNLPVRFQMQLHKYLWNDEPGH

SEQ ID NO: 33407 - protein, 215 aa, unidentified
  source 1..215: note = Pseudomonas yamanorum
  REGION 1..215: note = tr|A0A143GCJ0|A0A143GCJ0_9PSED 7-carboxy-7-deazaguanine synthase OS=Pseudomonas yamanorum; OX = 515393 GN=queE PE=3 SV=1
MQDTLRITEVFYSLQGETRTAGLPTVFVRLTGCPLRCQYCDSAYAFSGGTVRTLDDILEQVAGYRPRYVCVTGGEPLAQPNAIPLLKQLCDAGYEVSLETSGALDISAVDPRVSRVVDLKTPGSKEAHRNRYENIELLTANDQVKFVICSREDYDWATSKLIQYGLDRRAGEVLFSPSHHDLNARDLADWVVADNLPVRLQLQLHKYLWNDEPGR

SEQ ID NO: 33408 - protein, 216 aa, unidentified; identical to SEQ ID NO: 33292
  source 1..216: note = Pseudomonas zeshuii
  REGION 1..216: note = tr|A0A1M6AHW8|A0A1M6AHW8_9PSED 7-carboxy-7-deazaguanine synthase OS=Pseudomonas zeshuii; OX = 1076620 GN=queE PE=3 SV=1

SEQ ID NO: 33409 - protein, 215 aa, unidentified
  source 1..215: note = Pseudomonas zhaodongensis
  REGION 1..215: note = tr|A0A365PXQ5|A0A365PXQ5_9PSED 7-carboxy-7-deazaguanine synthase OS=Pseudomonas zhaodongensis OX=1176257 GN=queE PE=3 SV=1
MDHTLRITEIFHSLQGETRTTGLPTVFVRLTGCPLRCQYCDTAYAFGGGEVIPLDAILARVAAYRPRYVCVTGGEPLAQPSCIPLLRHLCDAGYEVSLETSGALDISATDVRVSRVVDLKTPGSAEVARNRYENIGHLTRNDQVKFVICSREDYDWAVTKLIEYRLETRAGEVLFSPSHGQVEARALADWIVADNLPVRLQLQLHKILWNDAAGH

SEQ ID NO: 33410 - protein, 215 aa, unidentified
  source 1..215: note = Pseudomonas zhaodongensis
  REGION 1..215: note = tr|A0A3M2HVT8|A0A3M2HVT8_9PSED 7-carboxy-7-deazaguanine synthase OS=Pseudomonas zhaodongensis OX=1176257 GN=queE PE=3 SV=1
MHHTLRITEIFFSLQGETRTSGLPTVFVRLTGCPLRCQYCDTAYAFSGGEIMPLDVILQQVASYNPRYVCVTGGEPLAQPNCLPLLRQLCDAGYEVSLETSGALDISNTDERVSRVVDLKTPGSAESGRNLYDNIGHLTANDQIKFVICSREDYDWAVSKLIEYRLDARVAEVLFSPSQGQLDARLLAEWIVADNLPVRLQLQLHKILWNDAPGH

SEQ ID NO: 33411 - protein, 241 aa, Pseudonocardia autotrophica
  REGION 1..241: note = tr|A0A1Y2MGK1|A0A1Y2MGK1_PSEAH 7-carboxy-7-deazaguanine synthase OS=Pseudonocardia autotrophica OX=2074 GN=queE PE=3 SV=1
MTAYRGVLRPGASELLVSEVFGPTLQGEGPSAGRAAVFLRLGMCNLACAWCDTSYTWDRSSHDLAAELRTTAVVDLVRDVLSRAAPLVVVTGGEPLLQRTTLLSFVRAVSAAGRRVEFETSGSVAPGGLATLVDRFVVSPKLSNSRQSERARLRWGVLHEFAALRSTEFKFVVSSPSDLAEVDEIAARLALAPQRIWVMPEGTTREAVIDGLAALAPGVNRRGWSLSGRMHVLLWGNERAR

SEQ ID NO: 33412 - protein, 239 aa, Pseudonocardia sp.
  REGION 1..239: note = tr|A0A1B1ZWJ8|A0A1B1ZWJ8_9PSEU 7-carboxy-7-deazaguanine synthase OS=Pseudonocardia sp. HH130630-07 OX=1690815 GN=queE PE=3 SV=1
MAAPSGRPARAADPGQGELLLAERFVSVQGEGPLCGQRCAFVRLSRCNLACTWCDTPETWDWRRYDPAAVTVRAGVGEVADWVGGVGVDLLVLTGGEPLLQQPGLGALLDQVSAQVRVQVETNGTRVPEPGLADRVDLWVVSPKLANSGMPIERRLVPAALEALRATGRAAFKFVVSDPAVDVAEIAALVGRYGLGPVWVMPEATTPSAVVEGTAALLETAAEHGWNLSTRLHVLAGAR

SEQ ID NO: 33413 - protein, 147 aa, unidentified
  source 1..147: note = Pseudopedobacter saltans
  REGION 1..147: note = tr|A0A2W5F7H8|A0A2W5F7H8_9SPHI 7-carboxy-7-deazaguanine synthase QueE (Fragment); OS = Pseudopedobacter saltans OX=151895 GN=DI598_01750 PE=3; SV = 1
MESFYTIQGEGFYQGHAAYFIRLGGCDVGCVWCDVKDSWDADIHPKFSIEEIVSKALEEVGGNAQNIVAVVTGGEPLMHQLDGLTDALQAAGFQTNIETSGAHPLSGHWDWICLSPKKFKAPLEEVIQAANELKVIVYNKSDFAWAE

SEQ ID NO: 33414 - protein, 207 aa, unidentified
  source 1..207: note = Pseudopedobacter saltans
  REGION 1..207: note = tr|F0SBI7|F0SBI7_PSESL 7-carboxy-7-deazaguanine synthase OS=Pseudopedobacter saltans (strain ATCC 51119 / DSM 12145 / JCM 21818 / LMG 10337 / NBRC 100064 / NCIMB 136 43) OX=762903 GN=queE PE=3 SV=1
MKNNIPEDGSMLPLMEEFYTIQGEGFNTGKAAYFIRLGGCDVGCHWCDVKESWDAELHPLTSADKIVENAEKYPGKAVVITGGEPLLYNLDYLTAKLKEKGILTFIETSGAYPISGSWDWVCLSPKKFKSPSPNIAQHADELKIIVFNKSDFEWAEAHARTVGDKCKLYLQPEWSKSQDMLPLIIEYVKENPKWEISLQTHKYLNIP

SEQ ID NO: 33415 - protein, 207 aa, Pseudosphingobacterium domesticum
  REGION 1..207: note = tr|A0A1H7HNA1|A0A1H7HNA1_9SPHI 7-carboxy-7-deazaguanine synthase; OS = Pseudosphingobacterium domesticum OX=407022 GN=queE; PE = 3 SV=1
MSNQVPADGTLLPLMEEFYTIQGEGYHTGKAAYFIRLGGCDVGCHWCDVKESWDADLHPLTKADTIIEHATRHPAKTVVITGGEPLIYNLDYLTKGLQEAGIKTFMETSGAYPLSGFWDWICLSPKKFKEARPDVIAAAGELKVIVFNKSDFDWAEQYAAQIPIGRKLYLQPEWSKAAQMTPLIIEYVKANPKWEISLQTHKYLNIP

SEQ ID NO: 33416 - protein, 240 aa, unidentified
  source 1..240: note = Pseudovibrio axinellae
  REGION 1..240: note = tr|A0A165UN78|A0A165UN78_9RHOB 7-carboxy-7-deazaguanine synthase OS=Pseudovibrio axinellae OX=989403 GN=queE PE=3 SV=1
MTKLSISEIFGPTIQGEGALIGEPTIFVRAGGCDYRCSWCDTLHAVDSAYRHTWQQMDSLDAWQRIEELSSGQPITISLSGGNPAIQDFSELIRLGKAKGYKFAIETQGSVARDWFAELDTLVLSPKPPSSGETVDWNKFDACLDAALNTVACVIKIVIFNNADYEWAKTVSERYSYMPIYLQPGNHTPPEPEDDDATIDMDGIMDRMHWLVEKTVADKWFKPRILPQLHVLLWGNKRGV

SEQ ID NO: 33417 - protein, 240 aa, Pseudovibrio denitrificans
  REGION 1..240: note = tr|A0A1I6XPK4|A0A1I6XPK4_9RHOB 7-carboxy-7-deazaguanine synthase OS=Pseudovibrio denitrificans OX=258256 GN=queE PE=3 SV=1
MSKLSISEIFGPTIQGEGALIGEPTVFVRAGGCDYRCSWCDTLHAVDSAYRHTWDQMDSEDVWKKVEELSCGQPITVSLSGGNPAIQDFSKLIALGKAKGYKFAIETQGSVARDWFADLDTLVLSPKPPSSGEIVNWDKFDACLDAALNTATCVIKVVVFDDVDYDWAKDVSERYPYLPMYLQPGNHTPPPPEDDDATIDMDGIMDRMHWLVDKTVSDQWFKPRILPQLHVLLWGNKRGV

SEQ ID NO: 33418 - protein, 240 aa, Pseudovibrio sp.
  REGION 1..240: note = tr|A0A1H1FAI9|A0A1H1FAI9_9RHOB 7-carboxy-7-deazaguanine synthase OS=Pseudovibrio sp. Tun.PSC04-5.I4 OX=1798213 GN=queE PE=3 SV=1
MTKLSISEIFGPTIQGEGALMGEPTVFVRTGGCDYRCVWCDTLHAVDSAYRHTWRPMEPEDVWSEVETLTGHTPLTVSLSGGNPAIQDFSKLIEMGKSKGYRFALETQGSVAKDWFAQLDTLVLSPKPPSSGETVDWIKFELCLTKAGDDTNSLLKIVVFDEVDYNWARKVHERFPHLPLYLQPGNHTPPPPDDEDARIDMDGVMERMHWLIEKTLADRWFTPRILPQLHVLLWGNKRGV

SEQ ID NO: 33419 - protein, 240 aa, Pseudovibrio sp.
  REGION 1..240: note = tr|A0A165UC62|A0A165UC62_9RHOB 7-carboxy-7-deazaguanine synthase OS=Pseudovibrio sp. Ad26; OX = 989410 GN=queE PE=3 SV=1
MSKLSISEIFGPTIQGEGALIGEPTVFVRAGGCDYRCSWCDTLHAVDSAYRHTWDQMDSADVWHKIEELSGHQPITVSLSGGNPAIQDFSQVISLGKAKGYKFAVETQGSVARDWFADLDTLVLSPKPPSSGETVNWDKFDACLDAAINSATCVIKVVVFDDVDYDWAKQVGERYPYLPMYLQPGNHTPPPPEDDDAQIDMDGIMDRMHWLVDKTVSDQWFKPRILPQLHVLLWGNKRGV

SEQ ID NO: 33420 - protein, 227 aa, unidentified
  source 1..227: note = Pseudoxanthomonas composti
  REGION 1..227: note = tr|A0A4Q1JVS7|A0A4Q1JVS7_9GAMM 7-carboxy-7-deazaguanine synthase OS=Pseudoxanthomonas composti OX=2137479 GN=queE PE=3 SV=1
MNAAAIPSEIVQSPLDRLKITEIFLSLQGEADAAGWPTVFVRLTGCPLRCQYCDTAYAFHGGTWWEIEDILAEVARHGVRHVCVTGGEPLAQKRCIGLLQRLCDAGLDVSLETSGALDIGAVDPRVSRVLDIKTPGSAEEHRNRWENLPLLTARDQVKFVLCSRADYEWARELVLREALHQRCMVLFSPSKSEVTPRELADWIVADRLPVRFQMQLHKLLWNDEPGR

SEQ ID NO: 33421 - protein, 226 aa, Pseudoxanthomonas dokdonensis
  REGION 1..226: note = tr|A0A0R0CY80|A0A0R0CY80_9GAMM 7-carboxy-7-deazaguanine synthase OS=Pseudoxanthomonas dokdonensis OX=344882 GN=queE PE=3 SV=1
MNAVAPPAVATPAADRLKLTEIFLSLQGEANTAGWPTVFVRLTGCPLRCQYCDTAYAFQGGQWWNIDDILAEVARHGVRHVCVTGGEPLAQKRCIQLLQKLCDAGYQVSLETSGALDISEVDTRVSRVVDLKTPDSLEMHRNLLDNIAQLTPHDQVKFVLCSRGDYEWAKQMLQQHQLPQRCDVLFSPSKSELSPRELADWIVADRLPVRFQMQLHKLLWNDEPGR

SEQ ID NO: 33422 - protein, 229 aa, Pseudoxanthomonas indica
  REGION 1..229: note = tr|A0A1T5LH98|A0A1T5LH98_9GAMM 7-carboxy-7-deazaguanine synthase OS=Pseudoxanthomonas indica OX=428993 GN=queE PE=3 SV=1
MSAVDPTEPAVPPASSQERLKLTEIFLSLQGEANAVGWPTVFVRLTGCPLRCQYCDTEYAFYGGQWWDIDAILAEVARHGVRHVCVTGGEPLSQKRCLVLLRRLCDAGYDVSLETSGAIDIAEVDSRVSRVVDLKTPGSREMARNRLENLPLLTARDQVKFVLCGREDYEWARDMLTEHRLAERCDVLFSPSKSELAPRDLADWIVADRLPVRFQMQLHKLLWNDEPGR

SEQ ID NO: 33423 - protein, 227 aa, Pseudoxanthomonas sp.
  REGION 1..227: note = tr|A0A4Q8LGE3|A0A4Q8LGE3_9GAMM 7-carboxy-7-deazaguanine synthase OS=Pseudoxanthomonas sp. NML171200 OX=2480816 GN=queE PE=3 SV=1
MNAAAVPSHIEQSPQDRLKITEIFVSLQGEADAAGWPTVFVRLTGCPLRCQYCDTAYAFHGGTWWEIEDILAEVARAGVRHVCVTGGEPLAQKRCIGLLARLCDAGYDVSLETSGALDVSQVDPRVSRVVDIKTPGSAEEHRNRWDNLPLLTARDQVKFVLCSRADYEWARQVVREHALDQRCAVLLSPSKDQVSPRALADWIVEDRLPVRFQMQLHKLLWNDEPGR

SEQ ID NO: 33424 - protein, 145 aa, Pseudoxanthomonas sp.
  REGION 1..145: note = tr|A0A426H5B8|A0A426H5B8_9GAMM 7-carboxy-7-deazaguanine synthase QueE (Fragment); OS = Pseudoxanthomonas sp. SGD-10 OX=2493089 GN=EIM50_24365; PE = 4 SV=1
TDTIVEHAAQYPGKAVVVTGGEPLIYNLDYLTSKLKDRGILTFIETSGAYPLSGNWDWICLSPKKFKSPIANIAQHANELKIIVFNKSDFAWAEEHAKAVSNDCKLYLQPEWSKSQEMLPLIIDYVKNNPKWEISLQTHKYLNIP

SEQ ID NO: 33425 - protein, 229 aa, Pseudoxanthomonas spadix
  REGION 1..229: note = tr|G7UPU5|G7UPU5_PSEUP 7-carboxy-7-deazaguanine synthase OS=Pseudoxanthomonas spadix (strain BD-a59); OX = 1045855 GN=queE PE=3 SV=1
MNATAAALPGDIEQSPQERLKITEIFLSLQGEADAVGWPTVFVRLTGCPLRCSYCDTAYAFHGGTWWEIDDILAEVARQGVRHVCVTGGEPLAQKRCIGLLERLCDAGHEVSLETSGAIDVSQVDPRVSRVVDIKTPGSGELHRNRWQNLALLSARDQLKFVLCGRSDYEWARALVREHALSGRCSVLFSPSKDQLSPRDLADWIVEDRLPVRFQMQLHKLLWNDEPGR

SEQ ID NO: 33426 - protein, 229 aa, Pseudoxanthomonas spadix
  REGION 1..229: note = tr|A0A3M6PX17|A0A3M6PX17_9GAMM 7-carboxy-7-deazaguanine synthase OS=Pseudoxanthomonas spadix OX=415229 GN=queE PE=3 SV=1
MNATAAALPGDIEQSPQERLKITEIFLSLQGEADAVGWPTVFVRLTGCPLRCSYCDTAYAFHGGTWWEIDDILAEVARQGVRHVCVTGGEPLAQKRCIGLLERLCDAGHEVSLETSGAIDVSQVDPRVSRVVDIKTPGSGELHRNRWENLALLSARDQLKFVLCGRSDYEWARALVREHALSGRCSVLFSPSKDQLSPRDLADWIVEDRLPVRFQMQLHKLLWNDEPGR

SEQ ID NO: 33427 - protein, 219 aa, Pseudoxanthomonas suwonensis
  REGION 1..219: note = tr|E6WQT3|E6WQT3_PSEUU 7-carboxy-7-deazaguanine synthase OS=Pseudoxanthomonas suwonensis (strain 11-1); OX = 743721 GN=queE PE=3 SV=1
MNTQLPQDRLRITEIFLSLQGEANAAGWPTVFVRLTGCPLRCQYCDTAYAFHGGQWWEIDAILAEVARHGVRHVCVTGGEPLAQKRCLDLLRRLCDAGHDVSLETSGALDIAGVDPRVSRVVDLKTPGSAEMARNRLENIPLLTARDQVKFVLCGRADYEWARDMVAEHGLSARCDVLFSPSKGQLEARDLADWIVADRLPVRFQMQLHKILWNDEPGR

SEQ ID NO: 33428 - protein, 219 aa, Pseudoxanthomonas suwonensis
  REGION 1..219: note = tr|A0A0E3Z385|A0A0E3Z385_9GAMM 7-carboxy-7-deazaguanine synthase OS=Pseudoxanthomonas suwonensis OX=314722 GN=queE PE=3 SV=1
MDTAAPQNRLRLTEIFLSLQGEANAAGWPTVFVRLTGCPLRCQYCDTAYAFHGGQWWEIDDILAEVARHGVRHVCVTGGEPLAQKRCLDLLRRLCDAGYDVSLETSGALDIAGVDPRVSRVVDLKTPGSAEMARNRLENLPLLTARDQVKFVLCGRGDYEWARDMLAEHRLAERCDVLFSPSKSELAPRELADWIVADRLPVRFQMQLHKLLWNDEPGR

SEQ ID NO: 33429 - protein, 230 aa, Pseudoxanthomonas taiwanensis
  REGION 1..230: note = tr|A0A562CX12|A0A562CX12_9GAMM 7-carboxy-7-deazaguanine synthase OS=Pseudoxanthomonas taiwanensis J19 OX=935569 GN=queE PE=3 SV=1
MATGPWAYNCPMNTPTPQNRLRITEIFLSLQGEANAAGWPTVFVRLTGCPLRCQYCDTAYAFHGGQWWEIDDILAEVARHGVRHVCVTGGEPLAQKRCLDLLRRLCDAGYDVSLETSGALDIAGVDPRVSRVVDLKTPGSAEMARNRLENLPLLTARDQVKFVLCGRADYEWARDMVAEHGLAARCDVLFSPSKGQLEARDLADWIVADRLPVRFQMQLHKILWNDEPGR

SEQ ID NO: 33430 - protein, 227 aa, unidentified
  source 1..227: note = Pseudoxanthomonas wuyuanensis
  REGION 1..227: note = tr|A0A286D4K9|A0A286D4K9_9GAMM 7-carboxy-7-deazaguanine synthase OS=Pseudoxanthomonas wuyuanensis OX=1073196 GN=queE PE=3 SV=1
MNAASIPSEIVQSSSDRLKITEIFLSLQGEANAAGWPTVFVRLTGCPLRCQYCDTAYAFHGGQWWDIDAILAEVAGHGVRHVCVTGGEPLSQKRCLGLLRRLCDAGYDVSLETSGAIDITGVDARVSRVLDLKTPGSKEMARNRLENLALLTPRDQVKFVLCGRADYEWARDMVAQHRLAERCDVLFSPSKSELPPRELADWIVADRLPVRFQMQLHKLLWDDEPGR

SEQ ID NO: 33431 - protein, 210 aa, Pseudozobellia sp.
  REGION 1..210: note = tr|A0A3B0C3C5|A0A3B0C3C5_9FLAO 7-carboxy-7-deazaguanine synthase OS=Pseudozobellia sp. CCMM003 OX=2419782 GN=queE PE=3 SV=1
MVKDEVMTLVDKGLMLPLMEEFYTIQGEGYHKGTAAYFIRVGGCDVGCHWCDVKESWNADTHPPTAVESIVENAVKYSDTIVITGGEPLTWDMTPLTRALKNKNLKIHIETSGAYTLTGVWDWICLSPKKNKLPKPEIYGVAHELKVIVYNKHDFLFAEQEAAKVNENCILYLQPEWSVREKMIPLIVDYVMKDPKWIVSLQTHKYLNIP

SEQ ID NO: 33432 - protein, 210 aa, Pseudozobellia sp.
  REGION 1..210: note = tr|A0A2E5BL94|A0A2E5BL94_9FLAO 7-carboxy-7-deazaguanine synthase OS=Pseudozobellia sp.; OX = 2024854 GN=queE PE=3 SV=1
MLQEDVLREVDKGTLLPLMEEFYTIQGEGFHKGTAAYFIRVGGCDVGCHWCDVKESWNAGTHPPTAIESIVENAAKYSNTIVVTGGEPLTWNMEPLTTALKANNLTTHIETSGAYPLTGIWDWICLSPKKNKLPEERIYDVAHELKVIVYNKHDLIFAEEQAAKVNGECILYLQPEWSVRDKVVPLIVDYVMKNPKWKVSLQTHKYLNIP

SEQ ID NO: 33433 - protein, 210 aa, Pseudozobellia thermophila
  REGION 1..210: note = tr|A0A1M6MA74|A0A1M6MA74_9FLAO 7-carboxy-7-deazaguanine synthase OS=Pseudozobellia thermophila OX=192903 GN=queE PE=3 SV=1
MLEDEVLREVDKGRLLPLMEEFYTIQGEGFHKGTAAYFIRVGGCDVGCHWCDVKESWNAATHPPTPVEAIVENAAKYSNTIVVTGGEPLTWNMKPLTDALKAKNLQIHIETSGAYPLTGTWDWICLSPKKNKLPHKEVYDRAHELKVIVYNRHDLIFAEQEAAKVNDDCILYLQPEWSVRDKVTPLIVDYVMQHPKWKVSLQTHKYLNIP

SEQ ID NO: 33434 - protein, 221 aa, Psychrilyobacter sp.
  REGION 1..221: note = tr|A0A369Y0H4|A0A369Y0H4_9FUSO 7-carboxy-7-deazaguanine synthase OS=Psychrilyobacter sp. S5 OX=2283384 GN=queE PE=3 SV=1
MKHYNVVEKFISINGEGQRSGELAVFIRLAKCNLRCNYCDTMWANEENAPVTAMTKEDIYNYILDTKVKNITLTGGEPLLDREVKDLIEYIVKDKSLFLEIETNGSIDLNLFRSDAKNLSFTMDYKGPSSEMEKFMFIKNFETISHKDTVKFVVGDYNDLLKAKEIMEKYDLMNRCSVYFSSVYKKIELDEIVEFMKKFNLNGVRLQLQMHKFIWGNKQGV

SEQ ID NO: 33435 - protein, 236 aa, Psychrobacillus insolitus
  REGION 1..236: note = tr|A0A2W7MGN1|A0A2W7MGN1_9BACI 7-carboxy-7-deazaguanine synthase OS=Psychrobacillus insolitus OX=1461 GN=queE PE=3 SV=1
MEIFGPTIQGEGMVVGQKTMFVRTAGCDYSCSWCDSSFTWDGSGKHLIVQMTAEEIWSELKRLGGSGFSFVTISGGNPALLRNLDALIAILKENNIKIGVETQGSRWQEWLYDIDELTISPKPPSSGMTTDFSVLSDIFEKLNNQNNEQHTSLKIVVFNQVDYDYAKQVHLRYPTIPFYLQTGNDDITTTDNPQLISRLLGKYQELIDWVIEDEELRDVKVLPQLHALVWGNKRGV

SEQ ID NO: 33436 - protein, 242 aa, unidentified
  source 1..242: note = Psychrobacillus lasiicapitis
  REGION 1..242: note = tr|A0A544T6Y1|A0A544T6Y1_9BACI 7-carboxy-7-deazaguanine synthase OS=Psychrobacillus lasiicapitis OX=1636719 GN=queE PE=3 SV=1
MSKVPVMEIFGPTIQGEGMVVGQKTMFVRTAGCDYSCSWCDSSFTWDGSGKHLIVQMTAEEIWAELKRLGGDGFSFVTISGGNPVLLRNLEALIVLLKANNIKIGVETQGSKWQEWLYEIDELTISPKPPSSGMTTDFSVLSSIIEKLNNRNSEQHISLKIVIFNEEDYEYAKQVHLRYPAIPFYFQVGNDDSTTTDNPSLVNHLLKKYEELIDRVVGDQELRDVKVLPQLHTLVWGNKRGV

SEQ ID NO: 33437 - protein, 236 aa, Psychrobacillus psychrodurans
  REGION 1..236: note = tr|A0A1I4X821|A0A1I4X821_9BACI 7-carboxy-7-deazaguanine synthase OS=Psychrobacillus psychrodurans OX=126157 GN=queE PE=3 SV=1
MEIFGPTIQGEGMVVGQKTMFVRTAGCDYSCSWCDSSFTWDGSGKHLIVQMTAEEIWSELVRLGGNGFSFVTVSGGNPALLRKLDELIAILKENNIKIGVETQGSRWQEWLCDIDELTISPKPPSSGMITDFSVLSDIIEKLNARNSKQHISLKIVVFNKEDYEYAKQVHLRYSTIPFYLQIGNDDITTTDNPQLISHLLEKYQELIDWVIKDEELRDVKVLPQLHALVWGNKRGV

SEQ ID NO: 33438 - protein, 242 aa, unidentified
  source 1..242: note = Psychrobacillus soli
  REGION 1..242: note = tr|A0A544TGM1|A0A544TGM1_9BACI 7-carboxy-7-deazaguanine synthase OS=Psychrobacillus soli; OX = 1543965 GN=queE PE=3 SV=1
MSKVPVMEIFGPTIQGEGMVVGQKTMFVRTAGCDYSCSWCDSSFTWDGSGKHLIVQMTAEEIWSELKRLGGNGFSFVTISGGNPALLRNLESLIAVLKENDIKIGVETQGSKWQEWLHEIDELTISPKPPSSGMITDFSVLSDIIRKLKNRNSEQHISLKIVVFNQADYEYAKQVHLRYPTIPFYLQVGNDEITSTDNPQLISHLLEKYGVLIDRVIADEQLRDVKVLPQLHALVWGNKRGV

SEQ ID NO: 33439 - protein, 242 aa, Psychrobacillus sp.
  REGION 1..242: note = tr|A0A1H9VVW5|A0A1H9VVW5_9BACI 7-carboxy-7-deazaguanine synthase OS=Psychrobacillus sp. OK032 OX=1884358 GN=queE PE=3 SV=1
MSKVPVMEIFGPTIQGEGMVVGQKTMFVRTAGCDYSCSWCDSSFTWDGSGKHLIVQMTAEEIWSELKRLGGNGFSYVTLSGGNPALLRNLESVIAILKENDIKIGVETQGSKWQEWLHDIDELTISPKPPSSGMLTDFTVLTDILGKLKNRNSEQHISLKIVVFDQADYEYAKQVHLRYPTIPFYLQVGNDDITATDNPRLVNHLLEKYEELIDWVIADEELRDVKVLPQLHALVWGNKRGV

SEQ ID NO: 33440 - protein, 242 aa, Psychrobacillus sp.
  REGION 1..242: note = tr|A0A544TMJ0|A0A544TMJ0_9BACI 7-carboxy-7-deazaguanine synthase OS=Psychrobacillus sp. Z8 OX=2325572 GN=queE PE=3 SV=1
MSKVPVMEIFGPTIQGEGMVVGQKTMFVRTAGCDYSCTWCDSSFTWDGSGKHLIVQMTAEEIWSELKRLGGNGFSFVTISGGNPVLLRNLEALIAILKENEIKIGVETQGSKWQEWLYDIDELTISPKPPSSGMTTDFSVLTNIFEKLNNRNSEQHTSLKIVVFNQEDYEYAKQVHLRYPTIPFYLQVGNDDITTTDNPRLIHHLLEKYEALIDKVIADDELRDVKVLPQLHALVWGNKRGV

SEQ ID NO: 33441 - protein, 241 aa, Psychrobacter alimentarius
  REGION 1..241: note = tr|A0A144PP44|A0A144PP44_9GAMM 7-carboxy-7-deazaguanine synthase OS=Psychrobacter alimentarius OX=261164 GN=queE PE=3 SV=1
MSILRNATIPVTDPEAGLRLTEIFYSLQGEALTSGLPTIFVRLTGCPLRCVYCDTEYAFTGGERQSLDTIISMIKSHPCKRICLTGGEPLAQPNAIELMKRLLSEDYEISLETAGALTVENVPPAVSKVMDLKTPSSGEVDKNLWSNLDYLTQHDQIKFVIMNREDYEWAKAKLAEHKLNERVGTVWFSPMFNVGEDVDEDIGPDVPVLARELAEWILVDALPVRFQLQLHKIIWADAKGK

SEQ ID NO: 33442 - protein, 248 aa, Psychrobacter aquaticus
  REGION 1..248: note = tr|U4TBE9|U4TBE9_9GAMM 7-carboxy-7-deazaguanine synthase OS=Psychrobacter aquaticus CMS 56 OX=1354303; GN = queE PE=3 SV=1
MSESLLRTAAIPVTDPEAGLRLTEIFYSLQGEALTSGLPTIFVRLTGCPLRCVYCDTEYAFTGGERQSLEAIIATIKSYPCLRICLTGGEPLAQPNAIELMKRLLSEDYEISLETAGALTVENVPPAVSKVMDLKTPSSGEVDKNLWSNLDYLTQHDQIKFVIMNREDYDWAKAKLSEHQLDKRVGTVWFSPMFNVADDVDKAANREMSSPDVPVLARELAEWILKDALPVRFQLQLHKIIWADAKGK

SEQ ID NO: 33443 - protein, 244 aa, Psychrobacter arcticus
  REGION 1..244: note = tr|Q4FTR8|Q4FTR8_PSYA2 7-carboxy-7-deazaguanine synthase OS=Psychrobacter arcticus (strain DSM 17307 / 273-4) OX=259536 GN=queE PE=3 SV=1
MSELSLRTAAIPVTDPEAGLRLTEIFYSLQGEALTSGLPTIFVRLTGCPLRCVYCDTEYAFSGGERQSLETMMATIASFPCKRICLTGGEPLAQPNAIELMKRLLNDGYEISLETAGALTVENVPPTVSKVMDLKTPSSGEVDKNLWSNLDYLTQHDQIKFVIMNRADYDWAKAKLVEYKLNELVGTVWFSPMFNVAHEDTVNDNSPEVPVLARELAEWMLADALPVRFQLQLHKIIWADAKGK

SEQ ID NO: 33444 - protein, 244 aa, Psychrobacter cryohalolentis
  REGION 1..244: note = tr|Q1QCU6|Q1QCU6_PSYCK 7-carboxy-7-deazaguanine synthase OS=Psychrobacter cryohalolentis (strain K5); OX = 335284 GN=queE PE=3 SV=1
MSELSLRTAAIPVTDPEAGLRLTEIFYSLQGEALNSGLPTIFVRLTGCPLRCVYCDTEYAFSGGERQSLETIMATIASFPCKRICLTGGEPLAQPNAIELMKRLLNEGYEISLETAGALTVENVPPAVSKVMDLKTPSSGEVDKNLWSNLDYLTQHDQIKFVIMNRTDYDWAKAKLIDYKLNDLVGTVWFSPMFNVAHEDTANDNSPEVPVLARELAEWMLTDALPVRFQLQLHKIIWADAKGK

SEQ ID NO: 33445 - protein, 248 aa, Psychrobacter fozii
  REGION 1..248: note = tr|A0A2V4V306|A0A2V4V306_9GAMM 7-carboxy-7-deazaguanine synthase OS=Psychrobacter fozii; OX = 198480 GN=queE PE=3 SV=1
MSESLLRTAAIPVTDPEAGLRLTEIFYSLQGEAITSGLPTIFVRLTGCPLRCVYCDTEYAFTGGERQSLETIIETIKGYPCKRICLTGGEPLAQPNAIELMKRLLSDDYEISLETAGALTVENVPPAVSKVMDLKTLSSGEVDKNLWSNLDYLTQHDQIKFVIMNRADYDWAKEKLFEHKLNELVGTVWFSPMFNVADDISEDASKNFPSPEVPVLARELAEWMLADALPVRFQLQLHKIIWADAKGK

SEQ ID NO: 33446 - protein, 240 aa, Psychrobacter frigidicola
  REGION 1..240: note = tr|A0A5C7A727|A0A5C7A727_9GAMM 7-carboxy-7-deazaguanine synthase OS=Psychrobacter frigidicola OX=45611 GN=queE PE=3 SV=1
MSELSLRTSAIPVTDPEAGLRMTEIFYSLQGEALTSGLPTIFVRLTGCPLRCVYCDTEYAFSGGERQSLETIMATIGSYPCKRVCITGGEPLAQPNAIELIKRLLADDYEISLETAGALSVQNVPPAVSKVMDLKTPSSGESAKNLWSNLDYLTQHDQLKFVIMNRADYDWAKAKLFEYKLDKLVGTVWFSPMFNVAENDSSPDVPELARELAEWMLADALPVRFQLQLHKIIWADAKGK

SEQ ID NO: 33447 - protein, 243 aa, Psychrobacter immobilis
  REGION 1..243: note = tr|A0A2V2A5E6|A0A2V2A5E6_PSYIM 7-carboxy-7-deazaguanine synthase OS=Psychrobacter immobilis OX=498 GN=queE PE=3 SV=1
MSESLLRTAAIPVTDPEAGLRLTEIFYSLQGEALTSGLPTIFVRLTGCPLRCVYCDTEYAFTGGERQSLETIIETIKSYPCKRICLTGGEPLAQPNAIELMKRLLSDGYEISLETAGALTVANVPKAVSKVMDLKTPSSGEVDKNLWSNLDHLTQHDQIKFVIMNREDYDWAKTKLSEHKLNELVDTVWFSPMFNVAEDIDEEVSPDVPVLARELAEWMLADALPVRFQLQLHKIIWADAKGK

SEQ ID NO: 33448 - protein, 243 aa, Psychrobacter pacificensis
  REGION 1..243: note = tr|A0A1G6VMY8|A0A1G6VMY8_9GAMM 7-carboxy-7-deazaguanine synthase OS=Psychrobacter pacificensis OX=112002 GN=queE PE=3 SV=1
MSESLLRTAAIPVTDPEAGLRLTEIFYSLQGEALTSGLPTIFVRLTGCPLRCVYCDTEYAFTGGERQSLETIIDTIKNYPCKRICLTGGEPLAQPNAIELMKRLLSDGYEISLETAGALSVQNVPPAVSKVMDLKTPSSGEVDKNLWSNLDHLTEHDQIKFVIMNRTDYDWAKEKLVEHKLNELVGTVWFSPMFNVADDVDEALSPEVPVLARELAEWMLADALPVRFQLQLHKIIWADAKGK

SEQ ID NO: 33449 - protein, 245 aa, unidentified
  source 1..245: note = Psychrobacter pasteurii
  REGION 1..245: note = tr|A0A1R4EGY1|A0A1R4EGY1_9GAMM 7-carboxy-7-deazaguanine synthase OS=Psychrobacter pasteurii OX=1945520 GN=queE PE=3 SV=1
MTQNTPLRSQAIPVTDPESGLRMTEIFYSLQGEALTSGLPTVFVRLTGCPLRCVYCDTTYSFTGGERFSLDAIMADIGQYPCKRVCVTGGEPLAQPNCIALIKRLLEEGYEVSLETAGALSVAEVPDAVSKVMDIKTPSSGESDKNLWSNLEHLTQHDQLKFVIMNRSDYEWSKQKVAEYQLDKKVGTVWFSPMFNVHEDAQGDVAAVDVPSLARELAEWILEDALPVRLQLQLHKIIWADAKGK

SEQ ID NO: 33450 - protein, 242 aa, Psychrobacter phenylpyruvicus
  REGION 1..242: note = tr|A0A379LL32|A0A379LL32_9GAMM 7-carboxy-7-deazaguanine synthase OS=Psychrobacter phenylpyruvicus OX=29432 GN=queE PE=3 SV=1
MSNLRTTTIPVTDPEAGLRLTEIFYSLQGEALTSGLPTVFVRLTGCPLRCVYCDTTYSFSGGERFSLDEIMADIGQYPCKRVCVTGGEPLAQPNCIALIKRLLDEGYEVSLETAGALSVAEVPNAVSKVMDIKTPSSGESDKNLWSNLQYLTQNDQLKFVIMNRDDYEWSKQKVEEYQLDKKVGTVWFSPMFNVHQDAEGDVAAVDVPNLARELAEWILEDAIPVRLQLQLHKIIWADAKGK

SEQ ID NO: 33451 - protein, 242 aa, unidentified
  source 1..242: note = Psychrobacter piechaudii
  REGION 1..242: note = tr|A0A1R4GX84|A0A1R4GX84_9GAMM 7-carboxy-7-deazaguanine synthase OS=Psychrobacter piechaudii OX=1945521 GN=queE PE=3 SV=1
MSNLRTTTIPVTDPEAGLRMTEIFYSLQGEALTSGLPTVFVRLTGCPLRCVYCDTTYSFTGGERFSLDAIMADIGQYPCKRVCVTGGEPLAQPNCIALIKRLLDEDYEVSLETAGALSVAEVPDAVSKVMDIKTPSSGESDKNLWSNLEHLTQHDQLKFVIMNRDDYEWSKQKVEEYQLDKKVGTVWFSPMFNVHEDAAGDIAAVDVPNLARELAEWILEDAIPVRLQLQLHKIIWADAKGK

SEQ ID NO: 33452 - protein, 243 aa, Psychrobacter piscatorii
  REGION 1..243: note = tr|A0A0T6DQB8|A0A0T6DQB8_9GAMM 7-carboxy-7-deazaguanine synthase OS=Psychrobacter piscatorii OX=554343 GN=queE PE=3 SV=1
MSESLLRTAAIPVTDPEAGLRLTEIFYSLQGEALTSGLPTIFVRLTGCPLRCVYCDTEYAFTGGERQSLETIIDTIKNYPCKRICLTGGEPLAQPNAIELMKRLLSDGYEISLETAGALSVQNVPPAVSKVMDLKTPSSGEVDKNLWSNLDHLTEHDQIKFVIMNRTDYDWAKETLNQHQLNKLVGTVWFSPMFNVADDIDEALSPDVPVLARELAEWILADALPVRFQLQLHKIIWADAKGK

SEQ ID NO: 33453 - protein, 243 aa, Psychrobacter sp.
  REGION 1..243: note = tr|A0A1D9CXF6|A0A1D9CXF6_9GAMM 7-carboxy-7-deazaguanine synthase OS=Psychrobacter sp. AntiMn-1 OX=1720344 GN=queE PE=3 SV=1
MSESLLRTAAIPVTDPEAGLRLTEIFYSLQGEALTSGLPTIFVRLTGCPLRCVYCDTEYAFTGGERQSLETIIDTIKSYPCKRICLTGGEPLAQPNAIELMKRLLSDGYEISLETAGALSVQNVPPAVSKVMDLKTPSSGEVDKNLWSNLDHLTEHDQIKFVIMNRTDYDWAKEKLVEHKLNELVGTVWFSPMFNVADDVDETLSPEVPVLARELAEWMLADALPVRFQLQLHKIIWADAKGK

SEQ ID NO: 33454 - protein, 248 aa, Psychrobacter sp.
  REGION 1..248: note = tr|X0QTT5|X0QTT5_9GAMM 7-carboxy-7-deazaguanine synthase OS=Psychrobacter sp. JCM 18903 OX=1298610 GN=queE; PE = 3 SV=1
MSESLLRTAAIPVTDPEAGLRLTEIFYSLQGEALTSGLPTIFVRLTGCPLRCVYCDTEYAFTGGERQSLETIIETIKSYPCKRICLTGGEPLAQPNAIELMKRLLSDGYEISLETAGALTVANVPKAVSKVMDLKTPSSGEVDKNLWSNLDYLTQHDQIKFVIMNREDYDWAKTKLSEHKLNELVDTVWFSPMFNVAEDIDEEVSPDVPVLARELAEWMLADALPVRFQLQLHKIIWQMLKVNNSLII

SEQ ID NO: 33455 - protein, 244 aa, Psychrobacter urativorans
  REGION 1..244: note = tr|A0A0M4U7T6|A0A0M4U7T6_9GAMM 7-carboxy-7-deazaguanine synthase OS=Psychrobacter urativorans OX=45610 GN=queE PE=3 SV=1
MTKPSLRTSAIPVTDPEAGLRLTEIFYSLQGEAITSGLPTIFVRLTGCPLRCVYCDTEYAFTGGERQSLEAIMATIANFPCKRICLTGGEPLAQPNAIELMKRLLADGYEISLETAGALTVENVPTTVSKVMDLKTPSSGEVDKNLWSNLNYLTQHDQIKFVIMNRTDYDWAKSKLFEHNLDKLVGTVWFSPMFNVAQDDTLNDNSPEVPVLARELAEWMLADALPVRFQLQLHKIIWADAKGK

SEQ ID NO: 33456 - protein, 210 aa, Psychroflexus gondwanensis
  REGION 1..210: note = tr|N1WUV6|N1WUV6_9FLAO 7-carboxy-7-deazaguanine synthase OS=Psychroflexus gondwanensis ACAM 44 OX=1189619; GN = queE PE=3 SV=1
MQNEKIEDLVQKGVMLPLMEEFYTIQGEGYHTGTAAYFIRIGGCDVGCHWCDVKESWDPERHPPTQIGSIIENAKKYSNTIVITGGEPLTWDMSMLTQGLKDNGLSIHIETSGAYDLTGVWDWICLSPKKIKLPKPEIYSKVDELKVIIFNKHDFKFAEEQASQVGEDCELFLQPEWSVREKMTPQIVEYVMNHPQWRISLQTHKYLNIP

SEQ ID NO: 33457 - protein, 210 aa, unidentified
  source 1..210: note = Psychroflexus halocasei
  REGION 1..210: note = tr|A0A1H4ARY4|A0A1H4ARY4_9FLAO 7-carboxy-7-deazaguanine synthase OS=Psychroflexus halocasei OX=908615 GN=queE PE=3 SV=1
MLKKEIENLVDKGEMLPLMEQFYTIQGEGHHTGKAAYFIRVGGCDVGCHWCDVKESWNPDTHPPTHIDEIVSQAKSYSNTIVITGGEPLTWNMQPITSALKKEGLDIHIETSGAYPLTGIWDWICLSPKKMKLPQPEVYEKADELKVIVFNKHDFKFAEEQAAKISGNCQLYLQPEWSVREKMMPLIVDYVMKNPKWKISLQTHKYLEIP

SEQ ID NO: 33458 - protein, 211 aa, unidentified
  source 1..211: note = Psychroflexus salarius
  REGION 1..211: note = tr|A0A1M4U1C1|A0A1M4U1C1_9FLAO 7-carboxy-7-deazaguanine synthase OS=Psychroflexus salarius OX=1155689 GN=queE PE=3 SV=1
MLEKETKELVNKGEMLPLMEQFYTIQGEGHHTGTAAYFIRIGGCDVGCHWCDVKESWNPNTHPPTAISEIVNSAKLYSDTIVITGGEPLTWNMNPLTTQLKSLGLKVHIETSGAYQLTGYWDWICLSPKKIKLPKPEIYEVANELKVIIYNKHDLKFAEQQAELIKNSSCQLYLQPEWSVREKMMPMIVEYVMKYPKWKISLQTHKYLNIP

SEQ ID NO: 33459 - protein, 210 aa, Psychroflexus sediminis
  REGION 1..210: note = tr|A0A1G7WC28|A0A1G7WC28_9FLAO 7-carboxy-7-deazaguanine synthase OS=Psychroflexus sediminis OX=470826 GN=queE PE=3 SV=1
MQNSNIEKLVQKGVMLPLMEEFYTIQGEGYHTGTAAYFIRIGGCDVGCHWCDVKESWDPERHPPTQIGSIIENAKKYSNTIVITGGEPLTWDMTSLTEGLKANGLMIHIETSGAYDMTGVWDWICLSPKKIKLPKPEIYARVDELKVIIYNKHDFKFAEEQAEKVNDTCELFLQPEWSVREKMIPEIVEYVMKNPKWRISLQTHKYLNIP

SEQ ID NO: 33460 - protein, 210 aa, Psychroflexus sp.
  REGION 1..210: note = tr|A0A2M9TRE4|A0A2M9TRE4_9FLAO 7-carboxy-7-deazaguanine synthase OS=Psychroflexus sp. S27; OX = 1982757 GN=queE PE=3 SV=1
MLKKEIENLVDKGEMLPLMEQFYTIQGEGHHSGKAAYFIRVGGCDVGCHWCDVKESWSPDTHPPTHIDEIVSQAKANSNTIVITGGEPLTWDMSPLTSALKNEGLDIHIETSGAYPLTGIWDWICLSPKKMKLPESEIYSKADELKVIVFNKHDLKFAEEQAAKLSGKCELYLQPEWSVREKMMPLIVDYVMKNPKWKISLQTHKYLEIP

SEQ ID NO: 33461 - protein, 210 aa, Psychroflexus sp.
  REGION 1..210: note = tr|A0A2I0D7B9|A0A2I0D7B9_9FLAO 7-carboxy-7-deazaguanine synthase OS=Psychroflexus sp. MES1-P1E OX=2058320 GN=queE PE=3 SV=1
MQNEKIEDLVQKGVMLPLMEEFYTIQGEGYHTGTAAYFIRIGGCDVGCHWCDVKESWDPERHPPTQIGSIIENAKKYSNTIVITGGEPLTWDMSMLTQGLKDNELSIHIETSGAYDLTGVWDWICLSPKKNKLPKPEIYPKVDELKVIIFNKHDFKFAEEQASQVGDDCELFLQPEWSVREKMTPQIVEYVMKHPQWRISLQTHKYLNIP

SEQ ID NO: 33462 - protein, 223 aa, Psychroflexus torquis
  REGION 1..223: note = tr|K4IWB3|K4IWB3_PSYTT 7-carboxy-7-deazaguanine synthase OS=Psychroflexus torquis (strain ATCC 700755 / ACAM 623) OX=313595 GN=queE PE=3 SV=1
MFYFEKSFQYLCSMQNEKIEDLVQKGVMLPLMEEFYTIQGEGYHTGTAAYFIRIGGCDVGCHWCDVKESWDPERHPPTRIGSIIENAKKYSNTIVITGGEPLTWDMSMLTQGLKDNQLSIHIETSGAYDLTGVWDWICLSPKKNKLPKPEIYPKVDELKVIIFNKHDFKFAEEHASQVGEDCELFLQPEWSVREKMTPQIVEYVMKHPKWRISLQTHKYLNIP

SEQ ID NO: 33463 - protein, 246 aa, Psychromonas ingrahamii
  REGION 1..246: note = tr|A1STX4|A1STX4_PSYIN 7-carboxy-7-deazaguanine synthase OS=Psychromonas ingrahamii (strain 37) OX=357804; GN = queE PE=3 SV=1
MFTYLLRYTDKILLPIEHNKAMNQNYKVNELFQTIQGEGFNTGVPAIFLRLQGCDVGCAWCDTKHTWEINPDKQTELILLTGSSNESTRWANVNAREIVAEIKRLGYSANLVVITGGEPCLADLRELTTVLHEFDFKTQIETSGTYPVLVAPPTWVTLSPKVNMRAGKVVLQSALERADEIKHPVGTEKDIEQLDALLENLKSIEDKVICLQPISQKVKATLLCSQVCIERNWRLSVQMHKYLGID

SEQ ID NO: 33464 - protein, 225 aa, Psychromonas sp.
  REGION 1..225: note = tr|A0A4Y7ZXV8|A0A4Y7ZXV8_9GAMM 7-carboxy-7-deazaguanine synthase OS=Psychromonas sp. RZ22; OX = 2555643 GN=queE PE=3 SV=1
MIQNYKVNELFQTIQGEGFYTGVPAIFVRLQGCDVGCAWCDTKHTWEIDLAKKSDLILLTDKSNESDRWADVSAVDIVNEIKRLGYTANLIVITGGEPCMFDLRELTQVLHQFGFQTQVETSGTYPILVDVETWVTLSPKVNMRGKKVVLKEALQRANEIKHPVGTERDIEQLDILLSQLSSVKDKTICLQPISQKVNATALCMKTCIERNWRLSVQVHKYLQID

SEQ ID NO: 33465 - protein, 225 aa, Psychromonas sp.
  REGION 1..225: note = tr|A0A366WCL2|A0A366WCL2_9GAMM 7-carboxy-7-deazaguanine synthase OS=Psychromonas sp. B3M02 OX=2267226 GN=queE PE=3 SV=1
MSQNYKVNELFQTIQGEGFYTGVPAIFVRLQGCDVGCAWCDTKHTWEIDPDKKSDLVIVTDKSNESDRWADCSAKEIVDEIKRLGYTANLIVITGGEPCMYDLRELTQVLHEFGFSIQIETSGTYPVLVDQQTWVTLSPKVNMRGKKEVLKEALQRANEIKHPVGTEKDIEQLDALLAKLKSVDDKTISLQPISQKAKATALCMQVCIERNWRLSVQMHKYLQID

SEQ ID NO: 33466 - protein, 210 aa, Psychroserpens burtonensis
  REGION 1..210: note = tr|A0A5C7B523|A0A5C7B523_9FLAO 7-carboxy-7-deazaguanine synthase OS=Psychroserpens burtonensis OX=49278 GN=queE PE=3 SV=1
MTRTEQQDLIDKGLLLPLMEEFYTIQGEGFHKGTAAYFIRIGGCDVGCHWCDVKESWLAELHPPTETEKIVSNAVKYSNTIVVTGGEPLMWDMNPLTAQLKAKGLQTHIETSGAYKLSGTWDWICLSPKKMKLPTEKVYEKAHELKCIIYNKDDFRFAEEQAAKVNKDCILYLQPEWSKRDKVVPQIVNYVMKNPKWKVSLQTHKYLNIP

SEQ ID NO: 33467 - protein, 209 aa, Psychroserpens sp.
  REGION 1..209: note = tr|A0A4P7WXK5|A0A4P7WXK5_9FLAO 7-carboxy-7-deazaguanine synthase OS=Psychroserpens sp. NJDZ02 OX=2570561 GN=queE PE=3 SV=1
MKQEIQDLVNKGLMLPLMEEFYTIQGEGFHKGTAAYFIRIGGCDVGCHWCDVKESWNANLHPPTSTDVIVANAKKYSDTVVVTGGEPLTWDMTALTDKLKAEGCKIHIETSGAYQLTGQWDWICLSPKKMKLPTQGVYDKAHELKCIIYNKDDFKFAEEQAAKVNGDCILYLQPEWSKRDTMIPMIVDYVMANPKWKVSLQTHKYLNIP

SEQ ID NO: 33468 - protein, 224 aa, Psychrosphaera saromensis
  REGION 1..224: note = tr|A0A2S7UY48|A0A2S7UY48_9GAMM 7-carboxy-7-deazaguanine synthase OS=Psychrosphaera saromensis OX=716813 GN=queE PE=3 SV=1
MSKYKINEIFETIQGEGQYTGTASIFVRLQGCPVGCSWCDTKQTWDQLESDKQPLSTIIVKTSDDPTWCDVDDSTILNTFVEQAYRAKHVVITGGEPCMFDLNPLCELLHSKGYSTQIETSGTFEIQAPEQTWVTVSPKINMKGGYKILASCMQRANEIKHPIARQVHVDELEQLLIEAPIKENTLIYLQPISQKISSTELAIETCKEKNWRLSVQVHKYIGIS

SEQ ID NO: 33469 - protein, 236 aa, unidentified
  source 1..236: note = Puniceibacterium antarcticum
  REGION 1..236: note = tr|A0A2G8RET0|A0A2G8RET0_9RHOB 7-carboxy-7-deazaguanine synthase OS=Puniceibacterium antarcticum OX=1206336 GN=queE PE=3 SV=1
MSQLRIAEIFGPTIQGEGALIGEPTVFVRTGGCDYRCVWCDSLHAVDPAYRRTWAAMTTDGVWAEITRLSKGKPLTISLSGGNPAIQDFTQLILRGHSAGYRFACETQGSISKPWFADLDTLVLSPKPPSSGETVDWEAFEACLTAAEGAGLIVLKIVIFDDRDYAWAQMAAERYPALPLYLQPGNLEVDPAVPVDPQDLSDKLLWLVEKVMADGWFAPRVLPQLHVLLWGNKRGV

SEQ ID NO: 33470 - protein, 229 aa, unidentified; identical to SEQ ID NO: 32259
  source 1..229: note = Puniceicoccaceae bacterium
  REGION 1..229: note = tr|A0A2D7F4B3|A0A2D7F4B3_9BACT 7-carboxy-7-deazaguanine synthase OS=Puniceicoccaceae bacterium OX=2026784 GN=queE PE=3 SV=1
  VARIANT 46: note = Xaa can be any naturally occurring amino acid
  VARIANT 61: note = Xaa can be any naturally occurring amino acid
  VARIANT 139: note = Xaa can be any naturally occurring amino acid
  VARIANT 163: note = Xaa can be any naturally occurring amino acid
  VARIANT 178: note = Xaa can be any naturally occurring amino acid

SEQ ID NO: 33471 - protein, 222 aa, unidentified
  source 1..222: note = Puniceicoccaceae bacterium
  REGION 1..222: note = tr|A0A2E9IW68|A0A2E9IW68_9BACT 7-carboxy-7-deazaguanine synthase OS=Puniceicoccaceae bacterium OX=2026784 GN=queE PE=3 SV=1
MLPIHEQFYTFQGEGAHAGRAAYFIRTFGCPVHCPWCDSAGTWHPDYIPKKVQRSSVESLVTEVAKTKAEFVVITGGEPAIHNLQALVDALHAIGQTVHLETSGAFEIKGNFDWITLSPKRWKLPLAVNLERASEFKIIVDQAAEIEEYSEVIGATTKPVWLHPEWSKHNDAATLDAITEWVKTQGAPYRAGWQMHKHYAADLKDSRSAPAAPLGGDPKLGF

SEQ ID NO: 33472 - protein, 210 aa, Pusillimonas sp.
  REGION 1..210: note = tr|A0A4V6NF07|A0A4V6NF07_9BURK 7-carboxy-7-deazaguanine synthase OS=Pusillimonas sp. YR330 OX=2135726 GN=queE PE=3 SV=1
MTYSVKEIFLTLQGEGAQAGRPAVFCRFSGCNLWSGREEDRSTAQCRFCDTDFVGTDGTLGGKYKTAEQLADLIQGTWGGQKQHRFVVFTGGEPLLQLDAALIDALHDRGFEIAVETNGTVQPPAGIDWLCTSPKAGTEWIVRQGQELKLVFPQPGIDPADMEHLPFDEFWLQPMDGPDQAANTQAAIAYCLAHPRWRLSVQTHKLIGIR

SEQ ID NO: 33473 - protein, 210 aa, Pusillimonas sp.
  REGION 1..210: note = tr|A0A2N4UBE9|A0A2N4UBE9_9BURK 7-carboxy-7-deazaguanine synthase OS=Pusillimonas sp. JR1/69-2-13 OX=2045209 GN=queE PE=3 SV=1
MTYSVKEIFLTLQGEGGQAGRPAVFCRFSGCNLWSGREQDRSTAQCQFCDTDFIGTDGTLGGKYKTADLLADRIESVWGEQQRFRFVVFTGGEPLLQLDAPLIDAIHARGFEIAVETNGTVNPPAGIDWLCTSPKVGTDWIVRQGQELKLVFPQPGIDPAHLEDLPFDEFWLQPMDGPDQVANTQAAIEYCLAHPRWRLSIQTHKLIGIR

SEQ ID NO: 33474 - protein, 210 aa, unidentified
  source 1..210: note = Pustulibacterium marinum
  REGION 1..210: note = tr|A0A1I7F8G6|A0A1I7F8G6_9FLAO 7-carboxy-7-deazaguanine synthase OS=Pustulibacterium marinum OX=1224947 GN=queE PE=3 SV=1
MSKEEQLALVEKGEWLPLMEEFYTIQGEGFYKGTAAYFIRVGGCDVGCHWCDVKESWNADLHPPTAVSTIVENAASYSDTIVITGGEPLSWNMNPITKALKEKGLKIHIETSGAYELSGEWDWICLSPKKMKLPTEEVYKKANELKVIIYNQHDFKFAEEQAAQVSEDCILYMQPEWSKRDKMIPEIVEYVMKNPRWKVSLQTHKYLNIP

SEQ ID NO: 33475 - protein, 210 aa, unidentified
  source 1..210: note = Unknown
  REGION 1..210: note = tr|A0A1E4ZK00|A0A1E4ZK00_9BACT 7-carboxy-7-deazaguanine synthase OS=PVC group bacterium (ex Bugula neritina AB1) OX=1868283 GN=queE PE=3 SV=1
MLYVSEIYKSIQGESSHAGLPCVFIRLSGCHLRCNYCDTEHAFSKGDKFSIEDILKKVFEMKTRVVELTGGEPLLQQESLSLLRELCDRDYTVLLETSGSLSIKDLPKKVHVIMDIKTPSSDEGESFMMNNLSYLKHGDEVKFVLADRMDYDWAVETFEAYDIDVPILFSPVHGVLDPKILAGWILEDNLKVRMQIQIHKYIWGEDVEGV

SEQ ID NO: 33476 - protein, 219 aa, unidentified
  source 1..219: note = Pyrinomonas methylaliphatogenes
  REGION 1..219: note = tr|A0A0B6WXU8|A0A0B6WXU8_9BACT 7-carboxy-7-deazaguanine synthase OS=Pyrinomonas methylaliphatogenes OX=454194 GN=queE PE=3 SV=1
MVTMSTLRVTEIFRSIQGESTHAGRPCAFVRLTGCPMRCVWCDSTYTFTGGERMTIDAILEQVRAFDCRLVEVTGGEPLAQRASLELIRRLCDEGYEVLIETGGYFSTEEVDPRAAIILDVKCPASGEAERNHWPNLERLRADKDEVKFVIADRGDWDFARDIIARYDLERRAHAILISPVWGAVDLQMMAEWIISSGLDVRMQLQMHKIIWGPEARGV

SEQ ID NO: 33477 - protein, 240 aa, unidentified
  source 1..240: note = Quasibacillus thermotolerans
  REGION 1..240: note = tr|A0A0F5I983|A0A0F5I983_9BACI 7-carboxy-7-deazaguanine synthase OS=Quasibacillus thermotolerans OX=1221996 GN=queE PE=3 SV=1
MRKIPVLEIFGPTVQGEGAVIGRKTMFVRTAGCDYRCAWCDSAFTWDGSAKDQIRLLTPEETWSELVRLAGRSCDHVTISGGNPALLPQIADLAALLKKEGVQTALETQGSRWQDWFYDIDDLTISPKPPSSGMDTDFEQLTAIIGQLKKREKAVSLKVVIFDEQDLSFAKKVHELYPEVPFFLQTGNGQLSEQDSSALLPYLVNRYEWLIDQVMSDADWKNVRVLPQLHTFVWGNKQGV

SEQ ID NO: 33478 - protein, 212 aa, unidentified
  source 1..212: note = Quisquiliibacterium sp.
  REGION 1..212: note = tr|A0A5C8NS34|A0A5C8NS34_9BURK 7-carboxy-7-deazaguanine synthase OS=Quisquiliibacterium sp. CC-CFT501 OX=2498847 GN=queE PE=3 SV=1
MTYSVKEMFYTLQGEGAQAGRPAVFCRFAGCNLWSGREEDRADAVCTFCDTDFVGTDGQGGGKFRTAAELARAIAAKWPADDDSGRRYVVCTGGEPLLQLDEPLIDALHAEGFEVAVETNGTQPAPKGLDWICVSPKAGAPVVLTEGDELKLVYPQPLAMPERFESLGFTHFFLQPMDGPDQEANTRAAIAYCLAHPRWRLSLQTHKIVGID

SEQ ID NO: 33479 - protein, 223 aa, Rahnella aquatilis
  REGION 1..223: note = tr|H2IV81|H2IV81_RAHAC 7-carboxy-7-deazaguanine synthase OS=Rahnella aquatilis (strain ATCC 33071 / DSM 4594 / JCM 1683 / NBRC 105701 / NCIMB 13365 / CIP 78.65); OX = 7 45277 GN=queE PE=3 SV=1
MQYPINEMFETLQGEGYFTGVPAIFVRLQGCPVGCSWCDTKHTWDKIADREVDMQRILVKTEESDAWGNATSEQLLDIIARQGYTARHVVITGGEPCIYDLTELTSLLEKSGFSCQIETSGTHEVRCSVNTWVTVSPKVNMRGGYDILPQALKRADEVKHPVARQRDIDALDALLETLTDSKARIIALQPISQKEEATRLCIATCIARNWRLSMQTHKYLNIA

SEQ ID NO: 33480 - protein, 223 aa, Rahnella aquatilis
  REGION 1..223: note = tr|H8NR46|H8NR46_RAHAQ 7-carboxy-7-deazaguanine synthase OS=Rahnella aquatilis HX2 OX=1151116 GN=queE PE=3; SV = 1
MQYPINEMFETLQGEGYFTGVPAIFVRLQGCPVGCSWCDTKHTWDKIADREVDMQRILVKTEESDAWGNATSEQLLEVIAQQGYTARHVVITGGEPCIYDLTELTSLLEKSGFSCQIETSGTHEVRCSVNTWVTVSPKVNMRGGYDILPQALKRADEVKHPVARQRDIDALDALLETLTDSKARIIALQPISQKEEATRLCIATCIARNWRLSMQTHKYLNIA

SEQ ID NO: 33481 - protein, 223 aa, unidentified
  source 1..223: note = Rahnella inusitata
  REGION 1..223: note = tr|A0A419M5F9|A0A419M5F9_9GAMM 7-carboxy-7-deazaguanine synthase OS=Rahnella inusitata; OX = 58169 GN=queE PE=3 SV=1
MQYPINEMFETLQGEGYFTGVPAIFVRLQGCPVGCSWCDTKHTWDKIADREVDMQRILVKTEESDAWGNSTSEQLLDIIAQQGYTARHIVITGGEPCIYDLMPLTMLLEKNGFSCQIETSGTHEVRCSVNTWVTVSPKVNMRGGYDILPQALKRADEVKHPVARQRDIDALDALLETLTDSKARIIALQPISQKEEATKLCIATCIARNWRLSMQTHKYLNIA

SEQ ID NO: 33482 - protein, 223 aa, Rahnella sp.
  REGION 1..223: note = tr|A0A2N0VZX0|A0A2N0VZX0_9GAMM 7-carboxy-7-deazaguanine synthase OS=Rahnella sp. AA; OX = 2057180 GN=queE PE=3 SV=1
MQYPINEMFETLQGEGYFTGVPAIFVRLQGCPVGCSWCDTKHTWDKIADREVDMQRILVKTEESDAWGNATSEQLLDVIAQQGYTARHVVITGGEPCIYDLTELTSLLEKNGFSCQIETSGTHEVRCSVNTWVTVSPKVNMRGGYDILPQALKRADEVKHPVARQRDIDALEALLETLTDSKSRIIALQPISQKEEATKLCIATCIAKNWRLSMQTHKYLNIA

SEQ ID NO: 33483 - protein, 223 aa, Rahnella sp.
  REGION 1..223: note = tr|A0A4R2YWX3|A0A4R2YWX3_9GAMM 7-carboxy-7-deazaguanine synthase OS=Rahnella sp. JUb53; OX = 2485128 GN=queE PE=3 SV=1
MQYPINEMFETLQGEGYFTGVPAIFVRLQGCPVGCSWCDTKHTWDKIADREVDMQRILVKTEESDAWGNATSEQLLEVIAQQGYTARHVVITGGEPCIYDLTELTSLLEKNGFSCQIETSGTHEVRCSVNTWVTVSPKVNMRGGYDILPQALKRADEVKHPVARQRDIDALDALLETLTDSKARIIALQPISQKEEATRLCIATCIARNWRLSMQTHKYLNIA

SEQ ID NO: 33484 - protein, 223 aa, unidentified
  source 1..223: note = Rahnella woolbedingensis
  REGION 1..223: note = tr|A0A419N4U5|A0A419N4U5_9GAMM 7-carboxy-7-deazaguanine synthase OS=Rahnella woolbedingensis OX=1510574 GN=queE PE=3 SV=1
MQYPINEMFETLQGEGYFTGVPAIFVRLQGCPVGCSWCDTKHTWDKIADREVDMQRILVKTQESDAWGNATSEQLLDVIVQQGYTARHVVITGGEPCIYDLTELTSLLEKNGFSCQIETSGTHEVRCSVNTWVTVSPKVNMRGGYDIVLQALKRADEVKHPVARQRDIDALDELLETLTDSKARIIALQPISQKEEATRLCIATCIARNWRLSMQTHKYLNIA

SEQ ID NO: 33485 - protein, 251 aa, unidentified
  source 1..251: note = Raineya orbicola
  REGION 1..251: note = tr|A0A2N3ID87|A0A2N3ID87_9BACT 7-carboxy-7-deazaguanine synthase OS=Raineya orbicola; OX = 2016530 GN=queE PE=3 SV=1
MLQIAQLDKKPEIFYSIQGEGKSIGKPSIFIRLSLCNLYCFWCDTDYTWNWEGTNYPHLNDKNPNYQKFNKADSIIKLTEKQIIAEIQKYNCHRLIFTGGEPLVQQKKLLSLLAQLKKQNPQYHIEFETNGTIIPIPELEALTNQYNVSLKLENSKVRLQERLKPKAIHFFAQNDKANFKFVVDSPKDLDEILEIIQKYAIFHDKVYLMPQGTKPAILRKKQQWLVEICKQYQFNYTDRLHILIYGDKRGI

SEQ ID NO: 33486 - protein, 212 aa, Ralstonia insidiosa
  REGION 1..212: note = tr|A0A191ZWP1|A0A191ZWP1_9RALS 7-carboxy-7-deazaguanine synthase OS=Ralstonia insidiosa; OX = 190721 GN=queE PE=3 SV=1
MTYAVKEIFYTLQGEGANTGRAAVFCRFAGCNLWSGREADRATAVCKFCDTDFVGTDGTQGGKYTTADALADAVVAEWPADATGGKPLVICTGGEPLLQLDKPLIDALHARGFEIAIETNGTIAVPEGIDWVCVSPKMGSELVVTRGDELKVVIPQDGQDLDAYERLDFQHLFLQAMDGPLARQNTALAVELCQRRPRWRLSLQTHKMLGIR

SEQ ID NO: 33487 - protein, 212 aa, Ralstonia mannitolilytica
  REGION 1..212: note = tr|A0A2N5LAM2|A0A2N5LAM2_9RALS 7-carboxy-7-deazaguanine synthase OS=Ralstonia mannitolilytica OX=105219 GN=queE PE=3 SV=1
MTYAVKEIFYTLQGEGANTGRAAVFCRFAGCNLWSGREADRATAVCQFCDTDFVGTDGTQGGKYATADALADTVAAEWPASATGGKPLVICTGGEPLLQLDTPLIDALHARGFEIAIETNGTIAVPEGIDWVCVSPKMGSELVVTRGDELKVVIPQDGQDLDAYERLDFQHFFLQAMDGPLARQNTAAAVELCQRRPRWRLSLQTHKMLGIR

SEQ ID NO: 33488 - protein, 212 aa, Ralstonia mannitolilytica
  REGION 1..212: note = tr|A0A160BPL7|A0A160BPL7_9RALS 7-carboxy-7-deazaguanine synthase OS=Ralstonia mannitolilytica OX=105219 GN=queE PE=3 SV=1
MTYAVKEIFYTLQGEGANTGRAAVFCRFAGCNLWSGREADRATAVCQFCDTDFVGTDGTQGGKYTTADALADTVAAEWPASATGGKPLVICTGGEPLLQLDKPLIDALHARGFEIAIETNGTIAVPDGIDWVCVSPKMGSELVVTRGDELKVVIPQDGQDLDAYERLDFQHFFLQAMDGPLARQNTAAAVELCQRRPRWRLSLQTHKMLGIR

SEQ ID NO: 33489 - protein, 212 aa, Ralstonia pickettii
  REGION 1..212: note = tr|R0CUB5|R0CUB5_RALPI 7-carboxy-7-deazaguanine synthase OS=Ralstonia pickettii OR214 OX=1264675 GN=queE; PE = 3 SV=1
MTYAVKEIFYTLQGEGANTGRAAVFCRFAGCNLWSGREADRATAVCQFCDTDFVGTDGTQGGKYTTAEALADTVAAEWPANATGGKPLVICTGGEPLLQLDKPLIDALHARGFEIAIETNGTIAMPEGIDWVCVSPKMGSELVVTRGDELKVVIPQDGQDLDAYERLDFQHFFLQAMDGPLARQNTAAAVELCQRRPRWRLSLQTHKMLGIR

SEQ ID NO: 33490 - protein, 212 aa, Ralstonia pickettii
  REGION 1..212: note = tr|C6BHS5|C6BHS5_RALP1 7-carboxy-7-deazaguanine synthase OS=Ralstonia pickettii (strain 12D) OX=428406; GN = queE PE=3 SV=1
MTYAVKEIFYTLQGEGANTGRAAVFCRFAGCNLWSGREADRATAVCQFCDTDFVGTDGTQGGKYTTADALADTVAAEWPASATGGKPLVICTGGEPLLQLDKPLIDALHARGFEIAIETNGTITVPEGIDWVCVSPKMGSELVVTRGDELKVVIPQDGQDLDAYERLDFQHFFLQAMDGPLARQNTAAAVELCQRRPRWRLSLQTHKMLGIR

SEQ ID NO: 33491 - protein, 212 aa, unidentified
  source 1..212: note = Ralstonia pseudosolanacearum
  REGION 1..212: note = tr|A0A454TLK3|A0A454TLK3_9RALS 7-carboxy-7-deazaguanine synthase OS=Ralstonia pseudosolanacearum OX=1310165 GN=queE PE=3 SV=1
MTYAVKEIFYTLQGEGANTGRAAVFCRFAGCNLWSGREADRAAAICQFCDTDFVGTDGTLGGKYPTADALANAVAAQWPAAATGGRPLVVCTGGEPLLQLDRPLIDALHARGFEIAIETNGTLAVPDGIDWVCVSPKMGAELVVTRGDELKVVIPQSGQDLDAYERLDFRHFFLQPMDGPLARQNTALAVELCQRRPRWHLSLQTHKMLGIR

SEQ ID NO: 33492 - protein, 212 aa, unidentified
  source 1..212: note = Ralstonia pseudosolanacearum
  REGION 1..212: note = tr|A0A223GLX8|A0A223GLX8_9RALS 7-carboxy-7-deazaguanine synthase OS=Ralstonia pseudosolanacearum OX=1310165 GN=queE PE=3 SV=1
MTYAVKEIFYTLQGEGANTGRAAVFCRFAGCNLWSGREADRAAAICQFCDTDFVGTDGTLGGKYPTADALADTVAAQWPAAATGGRPLVVCTGGEPLLQLDRPLIDALHARGFEIAIETNGTLAVPDGIDWVCVSPKMGAELVVTRGDELKVVIPQPGQDLDAYERLDFRHFFLQPMDGPLARRNTALAVELCQRRPRWHLSLQTHKMLGIR

SEQ ID NO: 33493 - protein, 212 aa, Ralstonia solanacearum
  REGION 1..212: note = tr|F6G1S0|F6G1S0_RALS8 7-carboxy-7-deazaguanine synthase OS=Ralstonia solanacearum (strain Po82); OX = 1031711 GN=nrdG PE=3 SV=1
MTYAVKEIFYTLQGEGANTGRAAVFCRFAGCNLWSGREADRAAAVCQFCDTDFVATDGTLGGKYATANALADLVAAQWPADATGGQPLVVCTGGEPLLQLDRPLIDALHARGFEIAVETNGTVAVPEGIDWVCVSPKMGAELVVTRGDELKVVIPQPGQDLDAYERLDFRHFFLQPMDGPLARQNTALAVELCQRRPRWHLSLQTHKMLGIR

SEQ ID NO: 33494 - protein, 212 aa, Ralstonia solanacearum
  REGION 1..212: note = tr|A0A0S4UDR0|A0A0S4UDR0_RALSL 7-carboxy-7-deazaguanine synthase OS=Ralstonia solanacearum OX=305 GN=queE PE=3 SV=1
MTYAVKEIFYTLQGEGANTGRAAVFCRFAGCNLWSGREADRAAAICQFCDTDFVGTDGTLGGKYPTADALADTVAAQWPAAATGGRPLVVCTGGEPLLQLDRPLIDALHARGFEIAIETNGTLAVPDGIDWVCVSPKMGAELVVTRGDELKVVIPQPGQDLDAYERLDFRHFFLQPMDGPLARQNTALAVELCQRRPRWHLSLQTHKMLGIR

SEQ ID NO: 33495 - protein, 211 aa, Ralstonia sp.
  REGION 1..211: note = tr|A0A1H0SE00|A0A1H0SE00_9RALS 7-carboxy-7-deazaguanine synthase OS=Ralstonia sp. 25mfcol4.1 OX=1761899 GN=queE PE=3 SV=1
MTYAVKEIFYTLQGEGANAGRAAVFCRFSGCNLWTGREEDRARAVCQFCDTDFVGTDGTRGGKYKTADELAAVVASEWPQGAGGTPLVVCTGGEPLLQLDAPLIDALHAQGFEIAIETNGTIEVPAGIDWVCVSPKMGSELVVKKGDELKVVMPQAGQDFAAYEQLDFRYFLVQAMDGPLARQNTAAAVDFCQRHPRWRLSLQTHKLLGIR

SEQ ID NO: 33496 - protein, 212 aa, Ralstonia sp.
  REGION 1..212: note = tr|A0A100HX90|A0A100HX90_9RALS 7-carboxy-7-deazaguanine synthase OS=Ralstonia sp. NT80; OX = 1218247 GN=nrdG PE=3 SV=1
MTYAVKEIFYTLQGEGANTGRAAVFCRFAGCNLWSGREADRATAVCKFCDTDFVGTDGTQGGKYTTADALADTVAAEWPADAKGGKPLVICTGGEPLLQLDKPLIDALHARGFEIAIETNGTIAVPEGIDWVCVSPKMGSELVVTRGDELKVVIPQDGQDLDAYERLDFQHLFLQAMDGPLARQNTALAVELCQRRPRWRLSLQTHKMLGIR

SEQ ID NO: 33497 - protein, 212 aa, Ralstonia syzygii
  REGION 1..212: note = tr|G3A8B5|G3A8B5_9RALS 7-carboxy-7-deazaguanine synthase OS=Ralstonia syzygii R24 OX=907261 GN=queE PE=3; SV = 1
MTYAVKEIFYTLQGEGANTGRAAVFCRFAGCNLWSGREADRATAICQFCDTDFVGTDGTQGGKYPTADALADTVAAQWPADATGGRPLVVCTGGEPLLQLDRLLIDALHARGFEIAIETNGTLAVPDGIDWVCVSPKMGAELVVTRGDELKVVIPQQDQDLDAYERLDFRHFFLQPMDGPLAHQNTALAVDLCQRRPRWHLSLQTHKMLGIR

SEQ ID NO: 33498 - protein, 223 aa, unidentified
  source 1..223: note = Raoultella electrica
  REGION 1..223: note = tr|A0A514EM96|A0A514EM96_9ENTR 7-carboxy-7-deazaguanine synthase OS=Raoultella electrica; OX = 1259973 GN=queE PE=3 SV=1
MQYPINEMFQTLQGEGYFTGVPAIFIRLQGCPVGCAWCDTKHTWDKLADREVSLFSILAKTKESDKWGPASGEDLLAIIGRQDWTARHVVITGGEPCIHDLTPLTMLLEQNGFSCQIETSGTHEVRCSPNTWVTVSPKVNMRGGYDVLSQALLRADEIKHPVGRVRDIEALDELLETLTDDKPRIIALQPISQKEDATRLCIETCIARNWRLSMQTHKYLNIA

SEQ ID NO: 33499 - protein, 223 aa, Raoultella ornithinolytica
  REGION 1..223: note = tr|A0A4R2XRS2|A0A4R2XRS2_RAOOR 7-carboxy-7-deazaguanine synthase OS=Raoultella ornithinolytica OX=54291 GN=queE PE=3 SV=1
MQYPINEMFQTLQGEGYFTGVPAIFIRLQGCPVGCAWCDTKHTWDKLADREVSLFSILAKTKESDKWGPASGEDLLAIVGRQGWTARHVVITGGEPCIHDLTPLTTLLEHNGFSCQIETSGTHEVRCSPRAWVTVSPKVNMRGGYDVLSQALLRADEIKHPVGRVRDIEALDELLETLTDDKPRIIALQPISQKEDATRLCIETCIARNWRLSMQTHKYLNIA

SEQ ID NO: 33500 - protein, 223 aa, Raoultella ornithinolytica
  REGION 1..223: note = tr|A0A1Y6GCS5|A0A1Y6GCS5_RAOOR 7-carboxy-7-deazaguanine synthase OS=Raoultella ornithinolytica OX=54291 GN=queE PE=3 SV=1
MQYPINEMFQTLQGEGYFTGVPAIFIRLQGCPVGCAWCDTKHTWDKLADREVSLFSILAKTKESDKWGPASGEDLLAIIGRQDWTARHVVITGGEPCIHDLTPLTMLLEQNGFSCQIETSGTHEVRCSPRTWVTVSPKVNMRGGYDVLSQALLRADEIKHPVGRVRDIEALDELLETLSDDKPRIIALQPISQKEDATRLCIETCIARNWRLSMQTHKYLNIA

SEQ ID NO: 33501 - protein, 223 aa, Raoultella planticola
  REGION 1..223: note = tr|A0A2X2EAG6|A0A2X2EAG6_RAOPL 7-carboxy-7-deazaguanine synthase OS=Raoultella planticola; OX = 575 GN=queE PE=3 SV=1
MQYPINEMFQTLQGEGYFTGVPAIFIRLQGCPVGCAWCDTKHTWDKLADREVSLFSILAKTKESDKWGPASGEDLLAIIGRQDWTARHVVITGGEPCIHDLTPLTTLLEQNGFSCQIETSGTHEVRCSPNTWVTVSPKVNMRGGYDVLSQALLRADEIKHPVGRVRDIEALDELLETLSDEKPRIIALQPISQKDDATRLCIETCIARNWRLSMQTHKYLNIA

SEQ ID NO: 33502 - protein, 83 aa, Raoultella planticola
  REGION 1..83: note = tr|A0A485BQU2|A0A485BQU2_RAOPL 7-carboxy-7-deazaguanine synthase OS=Raoultella planticola; OX = 575 GN=queE_3 PE=4 SV=1
MRGGYDVLSQALLRADEIKHPVGRVRDIEALDELLETLSDEKPRIIALQPISQKDDATRLCIETCIARNWRLSMQTHKYLNIA

SEQ ID NO: 33503 - protein, 223 aa, Raoultella sp.
  REGION 1..223: note = tr|A0A3N2EGN6|A0A3N2EGN6_9ENTR 7-carboxy-7-deazaguanine synthase OS=Raoultella sp. BIGb0399 OX=2485119 GN=queE PE=3 SV=1
MQYPINEMFQTLQGEGYFTGVPAIFIRLQGCPVGCAWCDTKHTWDKLADREVSLFSILAKTKESDKWGPASGEDLLAIIGRQGWTARHVVITGGEPCIHDLTPLTVLLEQNGFSCQIETSGTHEVRCSPHTWVTVSPKVNMRGGYDVLSQALQRADEIKHPVGRVRDIEALDELLETLTDDKPRIIALQPISQKEDATRLCIETCIARNWRLSMQTHKYLNIA

SEQ ID NO: 33504 - protein, 223 aa, Raoultella sp.
  REGION 1..223: note = tr|A0A4R3ZDF6|A0A4R3ZDF6_9ENTR 7-carboxy-7-deazaguanine synthase OS=Raoultella sp. BIGb0138 OX=2485115 GN=queE PE=3 SV=1
MQYPINEMFQTLQGEGYFTGVPAIFIRLQGCPVGCAWCDTKHTWDKLADREVSLFSILAKTKESDKWGPASGEDLLAIVGRQDWTARHVVITGGEPCIHDLTPLTALFEQNGFSCQIETSGTHEVRCTPNTWVTVSPKVNMRGGYDVLSQALQRADEIKHPVGRVRDIEALDELLATLSDEKSRIIALQPISQKDDATRLCIETCIARNWRLSMQTHKYLNIA

SEQ ID NO: 33505 - protein, 120 aa, Raoultella terrigena
  REGION 1..120: note = tr|A0A3P8KTJ2|A0A3P8KTJ2_RAOTE 7-carboxy-7-deazaguanine synthase OS=Raoultella terrigena; OX = 577 GN=queE_2 PE=4 SV=1
MTTLLEHNGFSCQIETSGTHEVRCSPRAWVTVSPKVNMRGGYDVLSQALLRADEIKHPVGRVRDIEALDELLETLTDDKPRIIALQPISQKEDATRLCIETCIARNWRLSMQTHKYLNIA

SEQ ID NO: 33506 - protein, 223 aa, Raoultella terrigena
  REGION 1..223: note = tr|A0A1V2BPW6|A0A1V2BPW6_RAOTE 7-carboxy-7-deazaguanine synthase OS=Raoultella terrigena; OX = 577 GN=queE PE=3 SV=1
MQYPINEMFQTLQGEGYFTGVPAIFIRLQGCPVGCAWCDTKHTWDKLADREVSLFSILAKTKESDKWGPASGEDLLAIIGRQGWTARHVVITGGEPCIHDLTPLTTLLEHNGFSCQIETSGTHEVRCSPRAWVTVSPKVNMRGGYDVLSQALLRADEIKHPVGRVRDIEALDELLETLTDDKPRIIALQPISQKEDATRLCIETCIARNWRLSMQTHKYLNIA

SEQ ID NO: 33507 - protein, 208 aa, unidentified; identical to SEQ ID NO: 29543
  source 1..208: note = Raphidiopsis brookii
  REGION 1..208: note = tr|D4TM47|D4TM47_9CYAN 7-carboxy-7-deazaguanine synthase OS=Raphidiopsis brookii D9 OX=533247 GN=queE PE=3; SV = 1

SEQ ID NO: 33508 - protein, 208 aa, unidentified
  source 1..208: note = Raphidiopsis curvata
  REGION 1..208: note = tr|A0A1Z4VCN9|A0A1Z4VCN9_9CYAN 7-carboxy-7-deazaguanine synthase OS=Raphidiopsis curvata NIES-932 OX=1973482 GN=queE PE=3 SV=1
MSILEIKLPIHETFQSTVQGEGYWTGSLVDFIRLSGCPLSCPWCDTGYGDGGANLPRFERTIGELLAEIKSPRIVISGGEPFIHKHLPELVEALLDAGKQVSIETSGSFWQEVPLSAWITLSPKEHINPKYPVQNQFWSRANEAKIVIETGQEIEFYQEQLSAHPDLCVYLQPEWNSSSKSLALILQLLQQQPDYKLSLQTHKYIGLQ

SEQ ID NO: 33509 - protein, 206 aa, Reichenbachiella agariperforans
  REGION 1..206: note = tr|A0A1M6R652|A0A1M6R652_9BACT 7-carboxy-7-deazaguanine synthase OS=Reichenbachiella agariperforans OX=156994 GN=queE PE=3 SV=1
MSYVPKISEKLPIMEIFYSIQGEGYYAGTPAIFIRLGGCDVGCVWCDVKESWDEKDHPFFTVKEIIEQIQDYPCKTIIVTGGEPLMYDMTELTTALKEKGYQLNIETSGAYPMSGVWDWVCFSPKKFKAPDQSVYAAASELKAIAFNKSDFKFAEEHAEQVNDRCKLYLQPEWSKADKMTPEIIEYVKAHSQWNISLQTHKYLDIR

SEQ ID NO: 33510 - protein, 206 aa, Reichenbachiella faecimaris
  REGION 1..206: note = tr|A0A1W2GJQ8|A0A1W2GJQ8_9BACT 7-carboxy-7-deazaguanine synthase OS=Reichenbachiella faecimaris OX=692418 GN=queE PE=3 SV=1
MAFVPKISEKLPIMEIFYSIQGEGFHSGKPAVFVRLGGCDVGCVWCDVKESWNEEDHPFFTIDEILVELSQYPCKTLIITGGEPLMYDLKELTEKLKSEGYQLHIETSGAYPMTGTWDWVCFSPKKFKAPHKSVYSQAHELKAIVFNKSDFKFAEEHAANVEEKCMLYLQPEWGKADQMTEKIIDYAKAHPQWNISLQTHKYLNIP

SEQ ID NO: 33511 - protein, 206 aa, Reichenbachiella sp.
  REGION 1..206: note = tr|A0A2G5KYT1|A0A2G5KYT1_9BACT 7-carboxy-7-deazaguanine synthase OS=Reichenbachiella sp. 5M10 OX=1889772 GN=queE PE=3 SV=1
MSYVPKISEKLPIMEIFYSIQGEGYYAGTPAIFIRLGGCDVGCVWCDVKESWDEKDHPFFTVKEIVDQIQDYPCKTIIVTGGEPLMYDMTELTTALKAKEYQLNIETSGAYPMSGVWDWVCFSPKKFKAPDQSVYAAASELKAIAFNKSDFKFAEEHAEQVNDRCKLYLQPEWSKADKMTPEIIEYVKAHSQWNISLQTHKYLDIR

SEQ ID NO: 33512 - protein, 217 aa, Reinekea blandensis
  REGION 1..217: note = tr|A4BJS1|A4BJS1_9GAMM 7-carboxy-7-deazaguanine synthase OS=Reinekea blandensis MED297 OX=314283 GN=queE; PE = 3 SV=1
MTYSVKEMFYTLQGEGFHTGRPAVFCRFSGCNLWNGREKDRATSICRFCDTDFVGTDGQNGGKFREARELAQRIADFWPADQAHRFVVFTGGEPALQLDETLIAALHDVGFECAVESNGTLPLPPSLDWVCISPKGSAEVVIEACDELKLVFPQADAQPERFSHIHAQHRFLSPLNDWTQAQLSPAQNNNTQACVQYCLEHPQWRLTLQTHKVLNID

SEQ ID NO: 33513 - protein, 210 aa, unidentified
  source 1..210: note = Reinekea forsetii
  REGION 1..210: note = tr|A0A2K8KRI2|A0A2K8KRI2_9GAMM 7-carboxy-7-deazaguanine synthase OS=Reinekea forsetii; OX = 1336806 GN=queE PE=3 SV=1
MFYTLQGEGFHTGRPAVFCRFTGCNLWSGREQDRAQSVCQFCDTDFVGTDGQNGGKFKQPADLAQAIATQWPSGRGHRFVVFTGGEPALQLDDRLIAELHRLDFVCAVETNGTLALPDAVDWVCISPKGVAQVALTRCNELKLVYPQVDAPPERFTELQADYRYLSPINDYREQTIVPARNHATQACIDYCLSHPEWHLTLQAHKIVNID

SEQ ID NO: 33514 - protein, 217 aa, Reinekea marinisedimentorum
  REGION 1..217: note = tr|A0A4R3I9J6|A0A4R3I9J6_9GAMM 7-carboxy-7-deazaguanine synthase OS=Reinekea marinisedimentorum OX=230495 GN=queE PE=3 SV=1
MTYSVKEMFYSLQGEGHHSGRPSVFCRFAGCNLWNGKEASRATSVCTFCDTDFIGTDGQNGGKFKTEAALAEAIESLWPENAGNRFVVFTGGEPALQLTPALIRELQQRGFECAVESNGTLPLPTELDWVCISPKGSSEVVITECDELKLVYPQQNALPERFAAVKARYRYLSPLNDWTQSSLLASSHGNTQQCIEYCLQNPQWRLTLQSHKILNID

SEQ ID NO: 33515 - protein, 215 aa, Reinekea sp.
  REGION 1..215: note = tr|A0A5C8Z6M0|A0A5C8Z6M0_9GAMM 7-carboxy-7-deazaguanine synthase OS=Reinekea sp. SSH23; OX = 2593301 GN=queE PE=3 SV=1
MAYSVKEMFYSLQGEGHHSGRPSIFCRFAGCNLWNGKEASREQSVCSFCDTDFIGTDGQNGGKFRTEQALVEAIEALWPEQAEHKYVVFTGGEPALQLTNELIIALQKRGFECAVESNGTLPLPSQLDWVCISPKGSAEITVTECDELKLVFPQEAAMPERFTDIKARYRYLSPLNDWQQSTLIFNSNTQATIDYCLAHPQWRLTLQSHKILHID

SEQ ID NO: 33516 - protein, 241 aa, Reyranella sp.
  REGION 1..241: note = tr|A0A522Z8K2|A0A522Z8K2_9PROT 7-carboxy-7-deazaguanine synthase OS=Reyranella sp.; OX = 1929291 GN=queE PE=3 SV=1
MSAIRISEIFGPTVQGEGALIGKPTVFVRTGGCDYRCTWCDTLYAVLPEYRHDWRPMEPEAILAKVDDLTGGAPVLVTISGGNPAIQPLGPLIEQGHARGHRFAMETQGSVAAAWFATLDHLVLSPKPPSSGMETDWSAFHACLAAAQGGPQTVLKVAVFDEADYAFARAASARHPSLPVYLSIGNHTPGEPNEAGRDGVDQKGLMARFRWLVDRVAQDRWFAATVLPQLHVLAWGNERGV

SEQ ID NO: 33517 - protein, 221 aa, Rheinheimera nanhaiensis
  REGION 1..221: note = tr|I1E1P3|I1E1P3_9GAMM 7-carboxy-7-deazaguanine synthase OS=Rheinheimera nanhaiensis E407-8 OX=562729; GN = ygcF PE=3 SV=1
MYKVNEVFETIQGEGSFTGAPAIFIRLQGCPVGCSWCDTKHTWEIKPELKQSLGDIVIKTAETEHWAAVTPADLLQLFVAKGYQAKHVVITGGEPCMFDLNPLCEALHNAGYSTQIETSGTFDIKAPAQTWVTVSPKVNMAGGYKVLQSALDRANEIKHPVAMQKHIDELLQLLQHTDTAAKLIYLQPISQQQRATELAIAMCKQHNWRLSVQVHKYIGIS

SEQ ID NO: 33518 - protein, 221 aa, Rheinheimera pacifica
  REGION 1..221: note = tr|A0A1H6NIP1|A0A1H6NIP1_9GAMM 7-carboxy-7-deazaguanine synthase OS=Rheinheimera pacifica; OX = 173990 GN=queE PE=3 SV=1
MYKVNEVFETIQGEGSFTGAAAIFIRLQGCPVGCSWCDTKHTWDIKDELAMPLGDIVIKTAETEHWAQVTAAELLARFIQEGYQAKHVVITGGEPCMYDLNPLCELLHQNGYSTQIETSGTFTIKAPAQTWVTVSPKVNMAGGYKVLQSALDRANEIKHPVAMEKHVDELLQLLQHTDTKAKLIYLQPISQQRRATELAIAMCKKHNWRLSVQVHKYLGIS

SEQ ID NO: 33519 - protein, 221 aa, unidentified
  source 1..221: note = Rheinheimera salexigens
  REGION 1..221: note = tr|A0A1E7Q6Q3|A0A1E7Q6Q3_9GAMM 7-carboxy-7-deazaguanine synthase OS=Rheinheimera salexigens OX=1628148 GN=queE PE=3 SV=1
MYKVNEIFQTIQGEGSFTGIAAIFIRLQGCPVGCSWCDTKQTWHIDPQLSQSITQVVAKTAETAHWASQTAEQILDLFKNQEYQAKHVVITGGEPCMYDLIPLCQLLHDNGYSTQIETSGTFEIKAPAKTWVTVSPKVNMAGGYKVLQSALDRADEIKHPVAMEKHVDELIALLVDTNISDKLIYLQPISQQRRATELAIAMCTKHNWRLSVQVHKYLGIS

SEQ ID NO: 33520 - protein, 221 aa, Rheinheimera sp.
  REGION 1..221: note = tr|A0A3S2TNQ5|A0A3S2TNQ5_9GAMM 7-carboxy-7-deazaguanine synthase OS=Rheinheimera sp. YQF-1 OX=2499626 GN=queE PE=3 SV=1
MYKVNEIFETIQGEGSYTGTPAIFLRLQGCPVGCSWCDTKQTWEIDPELQLSPAAILEKKADSDHWCSLTSAEVVQLFADKSYRAKHVVITGGEPCMYDLRPLCELLHSQGFSTQIETSGTFEVLAPDSTWVTVSPKVNMKGGYQVLRTAMERANEIKHPVAMEKHVEELLALLQGLDLTNKLVYLQPISQKAKATQLAIEFCKQHNWRLSVQVHKYLGIN

SEQ ID NO: 33521 - protein, 221 aa, Rheinheimera sp.
  REGION 1..221: note = tr|A0A486XMS1|A0A486XMS1_9GAMM 7-carboxy-7-deazaguanine synthase OS=Rheinheimera sp. BAL341 OX=1708203 GN=queE PE=3 SV=1
MYKVNEVFETIQGEGSFTGAPAIFIRLQGCPVGCSWCDTKHTWEIKDELRQPLGDIVIKTAETEHWASVRAEDIVALFSKEGYQAKHVVITGGEPCMYDLNPLCELLHQAGYSTQIETSGTFEIKAPAQTWVTVSPKVNMAGGYKVLQSALDRANEIKHPVAMEKHIDELLQLLQHTDAAAKLIYLQPISQQRRATELAIAKCKQHNWRLSVQIHKYLGIS

SEQ ID NO: 33522 - protein, 222 aa, unidentified
  source 1..222: note = Rheinheimera tuosuensis
  REGION 1..222: note = tr|A0A285IT05|A0A285IT05_9GAMM 7-carboxy-7-deazaguanine synthase OS=Rheinheimera tuosuensis OX=1323745 GN=queE PE=3 SV=1
MLYKVNEIFETIQGEGSFTGVPAIFVRLQGCPVGCAWCDTKHTWLVNPELEVKLDKVMAKAADTEQWTSLSAEQMLTLFESEGYQARHVVITGGEPCMYDLKPLCNTLHNAGYQTQIETSGTFEILVPPESWVTVSPKVNMKGGYKVLQSALDRADEIKHPVAMDKHIEQLLQLLNDTDTGNKLIYLQPISQQAKATALAIAYCKKYNWRLSVQVHKYLGIE

SEQ ID NO: 33523 - protein, 212 aa, Rhizobacter sp.
  REGION 1..212: note = tr|A0A0Q6X0Q3|A0A0Q6X0Q3_9BURK 7-carboxy-7-deazaguanine synthase OS=Rhizobacter sp. Root1221 OX=1736433 GN=queE PE=3 SV=1
MATYSVKEIFYTLQGEGANAGRPAVFCRFAGCNLWTGREADRANATCRFCDTDFVGTDGVGGGKFAGAQALADRIASFWPDPSHANRFVVLTGGEPLLQVDPVLLDALHGHGFTIAMETNGTLPAPDGIDWLCVSPKAGADWVQRRGSELKVVWPQPGLDLDVLEQADFTHRYLQPMDGPLQARHIELCIAQCLARPAWRLSLQTHKVTGIR

SEQ ID NO: 33524 - protein, 211 aa, Rhizobacter sp.
  REGION 1..211: note = tr|A0A1M7NPR6|A0A1M7NPR6_9BURK 7-carboxy-7-deazaguanine synthase OS=Rhizobacter sp. OV335; OX = 1500264 GN=queE PE=3 SV=1
MTYAVKEIFYTLQGEGAQAGRPAVFCRFAGCNLWSGREQDRASAVCQFCDTDFVGTNGVGGGKFDTALALAQAVASHWPVPHTGRPFVVCTGGEPLLQLDDALVDAFHAQGFEIAVETNGTQPAPKGLDWICVSPKADAELVLTHGHELKLVFPQAKAMPERFTSLQFEHFFLQPMDGLERKRNTEQAVAYCLAHPLWHLSVQTHKYIGIA

SEQ ID NO: 33525 - protein, 244 aa, unidentified
  source 1..244: note = Rhizobiaceae bacterium
  REGION 1..244: note = tr|A0A4U5ZK35|A0A4U5ZK35_9RHIZ 7-carboxy-7-deazaguanine synthase OS=Rhizobiaceae bacterium LC148 OX=1120689 GN=queE PE=3 SV=1
MTGADARIRISEIFGPTIQGEGVLIGQPTVFVRTGGCDYRCGWCDTLHAVDSAYRDEWKPMSVEAIWAEVERLSGGVPLTVSLSGGNPAIQPLGPLIEHGNRRGYRFALETQGSIAKGWFENLDTLVLSPKPPSSGMETDWHALQNCLDMAASKPQTVLKIVVFDDADYAFARHAAARFPHLPVYLQPGNHTPPPPDDDEAVVDIDGVMDRMLWLVGKVTEDRWFAARVLPQLHVLLWGNRRGV

SEQ ID NO: 33526 - protein, 215 aa, unidentified
  source 1..215: note = Rhizobiales bacterium
  REGION 1..215: note = tr|A0A424IJP5|A0A424IJP5_9RHIZ 7-carboxy-7-deazaguanine synthase OS=Rhizobiales bacterium TMED83 OX=1986857 GN=queE PE=3 SV=1
MSYAVKEIFYTLQGEGAQAGRPTVFCRFAGCNLWSGLERDRATAQCRFCDTDFVGTDGQNGGKFADAESLAQAIAAQWPEATPGADALIVFTGGEPCLQLDTALLEAVAAQGFETAVETNGTLAVPRQIDWICVSPKPETVLEQTSGHELKFVYPQETLSPEQFAHLDFEHFFLQPMDVEDAQTRWHNVQAAIAYCLQNPQWRLSLQTHKIIGLD

SEQ ID NO: 33527 - protein, 211 aa, unidentified
  source 1..211: note = Rhizobiales bacterium
  REGION 1..211: note = tr|A0A259K6L9|A0A259K6L9_9RHIZ 7-carboxy-7-deazaguanine synthase OS=Rhizobiales bacterium 39-66-18 OX=1970553 GN=queE PE=3 SV=1
MAYAVKEMFKTLQGEGAQAGRAAVFCRFAGCNLWSGREQDRDTAICRFCDTDFIGMDGDGGGRFADAEALADALVRVWGAGGYERRYVVFTGGEPLLQLDSALVAAAHARGFEIAIETNGTLAPPDGIDWICVSPKAGADLVLKRGQELKLVYPQSGIVPDTLDGLDFAHFFLQPMDGPRRVENTAAAVAYCLDHPRWRLSVQTHKMVGIP

SEQ ID NO: 33528 - protein, 242 aa, unidentified
  source 1..242: note = Rhizobium acidisoli
  REGION 1..242: note = tr|A0A0N1MDU2|A0A0N1MDU2_9RHIZ 7-carboxy-7-deazaguanine synthase OS=Rhizobium acidisoli; OX = 1538158 GN=queE PE=3 SV=1
MSGETIRVSEIFGPTIQGEGALIGLPTVFVRTGGCDYRCSWCDSLHAVDSAFRDQWLPMSVEAVWQEVTKLSGGRPLTVSLSGGNPAIQPLGPLIEFGHSQGYRFALETQGSVARDWFRDLDMLVLSPKPPSSGMLTDWDEVDNCLRLAAGGPDIVLKIVVFDDADYAFAREAGERYPAIPLFLQPGNRTPPPPDDDDARIDIDGVMDRMHWLVEKVTADRWFAPRVLPQLHVLLWGNKRGV

SEQ ID NO: 33529 - protein, 242 aa, unidentified
  source 1..242: note = Rhizobium aethiopicum
  REGION 1..242: note = tr|A0A1C3YCI7|A0A1C3YCI7_9RHIZ 7-carboxy-7-deazaguanine synthase OS=Rhizobium aethiopicum; OX = 1138170 GN=queE PE=3 SV=1
MSAETIRVSEIFGPTIQGEGALIGLPTVFVRTGGCDYRCSWCDSLHAVDSAFRDQWASMSVEAIWREVTKLSDGKPMTVSLSGGNPAIQPLGPLIELGHSEGYRFALETQGSVARNWFRDLDILVLSPKPPSSGMQTHWGEVDNCLRLAAGGPEIALKIVVFDDVDYAFAREVGQRYPYIPLYLQPGNHTPPPPEDDDARIDIDGVMDRMHWLVEKVTADRWFAPRVLPQLHVLLWGNKRGV

SEQ ID NO: 33530 - protein, 210 aa, unidentified
  source 1..210: note = Rhizobium album
  REGION 1..210: note = tr|A0A2U2DK55|A0A2U2DK55_9RHIZ 7-carboxy-7-deazaguanine synthase OS=Rhizobium album; OX = 2182425 GN=queE PE=3 SV=1
MSYAVKELFKTLQGEGAQAGRAAVFCRFAGCNLWSGREEDRHKAVCQFCDTDFIGTDGDGGGKFRDAEQLASAIARTWGDAETRRYVVFTGGEPLLQLDQTLIAAVHSYGFEIAIETNGTIEPPEGIDWICVSPKAGAPLNLKTGSELKLVYPQASLLPDDLPDLAFEHYFLQPMDGPDRVENIAAVTAFCLENPRWRLSLQTHKMIGIP

SEQ ID NO: 33531 - protein, 245 aa, unidentified
  source 1..245: note = Rhizobium altiplani
  REGION 1..245: note = tr|A0A109JB75|A0A109JB75_9RHIZ 7-carboxy-7-deazaguanine synthase OS=Rhizobium altiplani; OX = 1864509 GN=queE PE=3 SV=1
MSGAREAQIRVSEIFGPTIQGEGVLIGLPTVFVRTGGCDYRCSWCDSLHAVDSEYRDQWLPMTVDGIWAEVTRLSGGKPLMVSLSGGNPAIQPLGGLIAHGHEQGYRFALETQGSVAKEWFADLDVLVLSPKPPSSGMATDWDAFEVCLKMAACGPDIALKIVVFDDRDYAYAREAAARYQDLPVYLQPGNHTPPPPDDDDARVDIDGIMDRMLWLVDKVTEDRWFEARVLPQLHVLLWGNKRGV

SEQ ID NO: 33532 - protein, 242 aa, unidentified
  source 1..242: note = Rhizobium anhuiense
  REGION 1..242: note = tr|A0A3S0RWK4|A0A3S0RWK4_9RHIZ 7-carboxy-7-deazaguanine synthase OS=Rhizobium anhuiense; OX = 1184720 GN=queE PE=3 SV=1
MSGGTIRVSEIFGPTIQGEGALIGLPTVFVRTGGCDYRCSWCDSLHAVDSAFRDQWIPMSPEAIWHKVTELSGAKPLTVSLSGGNPAIQPLRPLIELGHSQGYRFALETQGSIAQAWFRDLDVLVISPKPPSSGMPTDWDQVDNCLRLAAGGPEIALKIVVFDDADYAFAQRAGERYPQIPLFLQPGNHTPPPPDDDDARIDIDGVMDRMHWLVDKVTADQWFAARVLPQLHVLLWGNKRGV

SEQ ID NO: 33533 - protein, 245 aa, unidentified
  source 1..245: note = Rhizobium azibense
  REGION 1..245: note = tr|A0A4R7ZPI8|A0A4R7ZPI8_9RHIZ 7-carboxy-7-deazaguanine synthase OS=Rhizobium azibense; OX = 1136135 GN=queE PE=3 SV=1
MTVAREAQIRVSEIFGPTIQGEGVLIGLPTVFVRTGGCDYRCSWCDTLHAVDGEYRDQWRPMSVDDIWNEVLRLSGNKPLTVSLSGGNPAIQPLGPLIERGHSQGFRFALESQGSIAKDWFADLDVLVLSPKPPSSGMETDWRAFETCLKMAAEKPQLALKFVVFDDGDYLFARTAAARYPTLPVYLQPGNHTPPLPTDEEARVDIDGIMDRMLWLIDKVTEDQWFEARVLPQLHVLLWGNKRGV

SEQ ID NO: 33534 - protein, 245 aa, unidentified
  source 1..245: note = Rhizobium azibense
  REGION 1..245: note = tr|A0A4R3RXL5|A0A4R3RXL5_9RHIZ 7-carboxy-7-deazaguanine synthase OS=Rhizobium azibense; OX = 1136135 GN=queE PE=3 SV=1
MTIARTPEIRVSEIFGPTIQGEGILIGLPTVFVRTGGCDYRCSWCDTLHAVDSDYRDQWRPMSVDDIWQEVLRLSGNKPLTVSLSGGNPAIQPLGPLIERGHSQGFRFALESQGSIAKEWFSALDVLVLSPKPPSSGMETDWHSFEACLKMAAEKPQLALKIVVFDDRDYLFARTAAARYPTLPVYLQPGNHTPPAPGDEEARVDLDGIMDRMLWLVDKVTEDRWFEARVLPQLHVLMWGNKRGV

SEQ ID NO: 33535 - protein, 242 aa, unidentified
  source 1..242: note = Rhizobium esperanzae
  REGION 1..242: note = tr|A0A246DNM0|A0A246DNM0_9RHIZ 7-carboxy-7-deazaguanine synthase OS=Rhizobium esperanzae; OX = 1967781 GN=queE PE=3 SV=1
MSVETIRVSEIFGPTIQGEGALIGLPTVFVRTGGCDYRCSWCDSLHAVDSAFRDQWLPMSVEAIWQEVTKLSGGNPLTVSLSGGNPAIQPLGPLIELGHSKGYRFALETQGSFAQNWFRDLDVLVLSPKPPSSGMHTDWDQVDNCVRLSAGGPEIALKVVIFDDVDYAFAREVGQRYPYIPLYLQPGNHTPPPPEDEDARIDIDGVMDRMHWLVEKVTVDRWFAPRVLPQLHVLLWGNKRGV

SEQ ID NO: 33536 - protein, 242 aa, Rhizobium etli
  REGION 1..242: note = tr|F2AEZ0|F2AEZ0_RHIET 7-carboxy-7-deazaguanine synthase OS=Rhizobium etli CNPAF512 OX=993047 GN=queE PE=3; SV = 1
MSGESIRVSEIFGPTIQGEGALIGLPTVFVRTGGCDYRCSWCDSLHAVDSAFREQWIPMSTEAIWQEVTKLSAGRPMTVSLSGGNPAIQPLGPLIEFGHSQGYRFALETQGSIARNWFRDLDVLVLSPKPPSSGMLTDWDQVDNCLRLAAGGPEIALKIVVFDDDDYAFAREAGRRYPYIPLYLQPGNHTPPPPDDDDARIDIDGVMDRMHWLVEKVTADGWFAPRVLPQLHVLLWGNKRGV

SEQ ID NO: 33537 - protein, 242 aa, Rhizobium etli
  REGION 1..242: note = tr|A0A0A8GH12|A0A0A8GH12_RHIET 7-carboxy-7-deazaguanine synthase OS=Rhizobium etli bv. phaseoli str. IE4803 OX=1432049 GN=queE PE=3 SV=1
MSGETIRVSEIFGPTIQGEGALIGVPTVFVRTGGCDYRCSWCDSLHAVDSAFRDQWSPMSAEAIWQEVTKLSGGRPMTVSLSGGNPAIQPLGPLIELGHSQGYRFALETQGSVARNWFRDLDVLVLSPKPPSSGMSTNWGELGNCLRLTAGGPEIALKIVVFDDADYAFARQVGERYPYIPLYLQPGNHTPPPPDDDDARIDIDGVMDRMHWLVEKVTTDRWFAPRVLPQLHVLLWGNKRGV

SEQ ID NO: 33538 - protein, 245 aa, unidentified
  source 1..245: note = Rhizobium favelukesii
  REGION 1..245: note = tr|W6RFT0|W6RFT0_9RHIZ 7-carboxy-7-deazaguanine synthase OS=Rhizobium favelukesii OX=348824 GN=exsD PE=3; SV = 1
MSGARETQIRVSEIFGPTIQGEGILIGLPTVFVRTGGCDYRCSWCDSLHAVDSAYREQWLPMTVDGIWAEVTRLSGGKPLMVSLSGGNPAIQPLGGLIAHGHERGYRFALETQGSVAKEWFADLDVLVLSPKPPSSGMATDFDAFENCLGMAADGPEIALKIVVFDDRDYAYAREAATRYPDLPVYLQPGNHTPPPPDDDDARVDIDGIMDRMLWLVDKVTEDRWFEARVLPQLHVLLWGNKRGV

SEQ ID NO: 33539 - protein, 245 aa, unidentified
  source 1..245: note = Rhizobium fredii
  REGION 1..245: note = tr|A0A2L0HEJ7|A0A2L0HEJ7_RHIFR 7-carboxy-7-deazaguanine synthase OS=Rhizobium fredii; OX = 380 GN=queE PE=3 SV=1
MTVTRPAEIRVSEIFGPTIQGEGALIGLPTVFVRTGGCDYRCSWCDSLHAVDSAYRDEWRAMTVEEVWSEVTRLSGGVPVMVSLSGGNPAIQPLGPLIDRGHREGYRFALETQGSVARDWFANLDMLVLSPKPPSSGMETDWEAFDACLRSSRGKPQTALKIVVFDEVDYAYARSAAARHPQLPVYLQPGNHTPPPPDDEVAPIDIEGVMERMRWLVDRVSADKWFEVRVLPQLHVLIWGNRRGV

SEQ ID NO: 33540 - protein, 245 aa, unidentified
  source 1..245: note = Rhizobium fredii
  REGION 1..245: note = tr|A0A2A6M551|A0A2A6M551_RHIFR 7-carboxy-7-deazaguanine synthase OS=Rhizobium fredii; OX = 380 GN=queE PE=3 SV=1
MTGMRPAEIRVSEIFGPTIQGEGALTGLPTVFVRTGGCDYRCSWCDSLHAVDSAYRDQWRAMTTEEVWNEVTRLSGGLPVMVSLSGGNPAIQPLGALIARGHREGYRFALETQGSVARDWFAELDMLVLSPKPPSSGMETDWEAFDACLRMAEGKPQTVMKIVVFDEADYAYARAAAARCPHLPIYLQPGNHTPPPPEDDDAPIDIEGVMERMRWLVDRVIEDKWFEARVLPQLHVLIWGNRRGV

SEQ ID NO: 33541 - protein, 242 aa, unidentified
  source 1..242: note = Rhizobium freirei
  REGION 1..242: note = tr|N6V388|N6V388_9RHIZ 7-carboxy-7-deazaguanine synthase OS=Rhizobium freirei PRF 81 OX=363754 GN=exbD; PE = 3 SV=1
MSEARIRISEIFGPTIQGEGILIGLPTIFVRTGGCDYRCSWCDTLHAVDSDYRDQWQPMSVDQIWQEVTRLSGGKPLTISLSGGNPAIQPLGPLIARGHAEGYRFALETQGSVAKEWFAELDVLVLSPKPPSSGMMTDWAVFEDCLCMAGGKPQIALKIVVFDDLDYAYAQEAASRYPSLPLYLQPGNHTPPPADADDALVDIDGIVERMRWLVDKVSDDRWFEARVLPQLHVLIWGNKRGV

SEQ ID NO: 33542 - protein, 245 aa, Rhizobium gallicum
  REGION 1..245: note = tr|A0A1L5NXP5|A0A1L5NXP5_9RHIZ 7-carboxy-7-deazaguanine synthase OS=Rhizobium gallicum; OX = 56730 GN=queE PE=3 SV=1
MTVARKAEIRVSEIFGPTIQGEGILIGLPTVFVRTGGCDYRCSWCDTLHAVDSEYRDQWRAMSVDDIWQEVLRLSGNKPLTVSLSGGNPAIQPLGPLIERGHSEGFRFALESQGSIAKDWFADLDVLVLSPKPPSSGMETDWCAFEACLKMAAEKPQLALKIVVFDDRDYLFARTAAARYPTLPVYLQPGNHTPPPPADEEASVDIDGIMDRMLWLIDKVTEDRWFEARVLPQLHVLLWGNKRGV

SEQ ID NO: 33543 - protein, 245 aa, Rhizobium gallicum
  REGION 1..245: note = tr|A0A0B4XHK4|A0A0B4XHK4_9RHIZ 7-carboxy-7-deazaguanine synthase OS=Rhizobium gallicum bv. gallicum R602 OX=1418105 GN=queE PE=3 SV=1
MTVAREAQIRVSEIFGPTIQGEGVLIGLPTVFVRTGGCDYRCSWCDTLHAVDGEYRDQWRPMSVDDVWEEVLRLSGNKPLTVSLSGGNPAIQPLGPLIERGHSQGFRFALESQGSIAKNWFADLDVLVLSPKPPSSGMETDWRAFETCLKMATEKPQLALKFVVFDDGDYLFARTAAARYPTLPVYLQPGNHTPPLPTDEEARVDIDGIMDRMLWLIDKVTEDQWFEARVLPQLHVLLWGNKRGV

SEQ ID NO: 33544 - protein, 245 aa, unidentified
  source 1..245: note = Rhizobium grahamii
  REGION 1..245: note = tr|A0A370KLD3|A0A370KLD3_9RHIZ 7-carboxy-7-deazaguanine synthase OS=Rhizobium grahamii; OX = 1120045 GN=queE PE=3 SV=1
MSGAREAQIRVSEIFGPTIQGEGILIGLPTVFVRTGGCDYRCSWCDSLHAVDSEYRDQWLPMTVDGIWAEVTRLSGGKPLMVSLSGGNPAIQPLGGLIAHGHAQGYKFALETQGSVAKEWFADLDVLVLSPKPPSSGMATDWDAFEDCLRLAGNGPAIALKIVVFDDRDYAYAREAAARYPDLSVYLQPGNHTPPPPDDDDARVDIDGIMDRMLWLVDKVTEDRWFEARVLPQLHVLLWGNKRGV

SEQ ID NO: 33545 - protein, 245 aa, unidentified
  source 1..245: note = Rhizobium grahamii
  REGION 1..245: note = tr|S3HPW7|S3HPW7_9RHIZ 7-carboxy-7-deazaguanine synthase OS=Rhizobium grahamii CCGE 502 OX=990285 GN=queE; PE = 3 SV=1
MSGARQAQIRVSEIFGPTIQGEGVLIGLPTVFVRTGGCDYRCSWCDSLHAVDSEYRDQWLPMTVDGIWADVTRLSRGKPLMVSLSGGNPAIQPLGGLIAHGHAQGYKFALETQGSVTKEWFADLDVLVLSPKPPSSGMATDWDAFEDCLRLAGNGPAIALKIVVFDDRDYAYAREASARYPDLSVYLQPGNHTPPPPDDDDARVDIDGIMDRMLWLVDKVTEDRWFEARVLPQLHVLLWGNKRGV

SEQ ID NO: 33546 - protein, 210 aa, Rhizobium hainanense
  REGION 1..210: note = tr|A0A1C3WCG9|A0A1C3WCG9_9RHIZ 7-carboxy-7-deazaguanine synthase OS=Rhizobium hainanense; OX = 52131 GN=queE PE=3 SV=1
MSYAVKELFKTLQGEGAQAGRAAVFCRFAGCNLWSGREEDRHKAICQFCDTDFIGTDGDGGDKFRDAKELASAIARTWGGGTTGRYVVFTGGEPLLQIDEALIAAVHDHGFEIAIETNGTIEPPEGIDWICVSPKAGAPFNLRSGSELKLVYPQSALLPSDLPDLNFEHYFLQPMDGPAQLENIAAVTAFCLENPRWRLSLQTHKMIGIP

SEQ ID NO: 33547 - protein, 242 aa, Rhizobium hainanense
  REGION 1..242: note = tr|A0A1C3W2A8|A0A1C3W2A8_9RHIZ 7-carboxy-7-deazaguanine synthase OS=Rhizobium hainanense; OX = 52131 GN=queE PE=3 SV=1
MSEARIRVSEIFGPTIQGEGILIGLPTIFVRTGGCDYRCSWCDTLHAVDSDYRDQWQPMSVDEIWQEVMRLSGGKPLTISLSGGNPAIQLLGPLIARGHAEGYRFALETQGSLAKEWFAELDVLVLSPKPPSSGMATNWAAFDDCLRMAGERPQIALKIVIFDDLDYEYAREAATRYSHLPVYLQPGNHTPPPADAEDALVDIDGIVERMRWLVEKVGNDRWFEARVLPQLHVIIWGNRRGV

SEQ ID NO: 33548 - protein, 242 aa, unidentified
  source 1..242: note = Rhizobium hidalgonense
  REGION 1..242: note = tr|A0A2A6K464|A0A2A6K464_9RHIZ 7-carboxy-7-deazaguanine synthase OS=Rhizobium hidalgonense OX=1538159 GN=queE PE=3 SV=1
MSAGTIRVSEIFGPTIQGEGVLIGLPTVFVRTGGCDYRCSWCDSLHAVDSAYRDQWIPMAVDAIWQEVTRLSGGRPMTISLSGGNPAIQPLGPLIELGHSQGYRFALETQGSVARDWFRDLDVLVLSPKPPSSGMLTDWGEIDNCLRHAAGGPEIALKIVVFDDVDYAFAQRVGERYPYIPLFLQPGNHTPPPPDDDDARIDIDGLMDRMHWLIDKVTADGWFAPRVLPQLHVLLWGNKRGV

SEQ ID NO: 33549 - protein, 231 aa, unidentified
  source 1..231: note = Rhizobium ipomoeae
  REGION 1..231: note = tr|A0A4S8NT06|A0A4S8NT06_9RHIZ 7-carboxy-7-deazaguanine synthase OS=Rhizobium ipomoeae; OX = 1210932 GN=queE PE=3 SV=1
MKGKNPLRRQERDDGQTLWIQEVFYTLQGEGPYSGQPSVFVRTCGCNLRCYWCDTDFESSTWRPSLEDLLQAIDAVCPAFCDLIVITGGEPFRQNIGPLVETLLTRGKRVQIETNGTLWLDLPLSDRLTIVCSPKTSSLHPKLVPRISAYKYVVAAGDADPQDGLPINSTQKQDAEMRLFRHDGHVGAIYVMPRDDNDEVLNRRNRDFCAELALQHGYRLCLQTHKLLNLR

SEQ ID NO: 33550 - protein, 245 aa, unidentified
  source 1..245: note = Rhizobium jaguaris
  REGION 1..245: note = tr|A0A387FXI9|A0A387FXI9_9RHIZ 7-carboxy-7-deazaguanine synthase OS=Rhizobium jaguaris; OX = 1312183 GN=queE PE=3 SV=1
MSEARETRIRVSEIFGPTIQGEGILIGLPTVFVRTGGCDYRCFWCDTLHAVDRDYRDQWQPMSVDEIWQEVTRLSGGKPLTVSLSGGNPAIQPLGPLIARGHDHGYSFALETQASIAKEWFADLDVLVLSPKPPSSGMATDWDAFDDCLRQAADRPQIALKIVVFDDRDYAYARDASARYPRLPVYLQPGNHTPPPPETDDAAIDIDGILDRMRWLVDRVTADGWFEARVLPQLHVLLWGNKRGV

SEQ ID NO: 33551 - protein, 210 aa, unidentified
  source 1..210: note = Rhizobium jaguaris
  REGION 1..210: note = tr|A0A387G0C9|A0A387G0C9_9RHIZ 7-carboxy-7-deazaguanine synthase OS=Rhizobium jaguaris; OX = 1312183 GN=queE PE=3 SV=1
MSYIVKELFKTLQGEGAQAGRAAVFCRFSGCNLWSGREEDRHKALCQFCDTDFVGTDGYGGGKFQDAASLAGAIAATWGKIERNRYVVFTGGEPLLQLDAALIGAVRAVGFAIAIETNGTMEPPKGIDWICVSPKAGAPLELRSGSELKLVYPQVDLFPDDLPDVHFDQYFLQPMDGPDRARNTAAVTEFCLQNPHWRLSLQTHKMIGMP

SEQ ID NO: 33552 - protein, 242 aa, unidentified
  source 1..242: note = Rhizobium laguerreae
  REGION 1..242: note = tr|A0A4R3PXI2|A0A4R3PXI2_9RHIZ 7-carboxy-7-deazaguanine synthase OS=Rhizobium laguerreae; OX = 1076926 GN=queE PE=3 SV=1
MSGGTIRVSEIFGPTIQGEGALIGLPTVFVRTGGCDYRCSWCDSLHAVDSAFRNQWIPMSVETIWHEVMKLSGGKPLTVSLSGGNPAIQPLRPLIELGHSQGYRFALETQGSVAQAWFRDLDILVISPKPPSSGMLTDWDQVDNCLQLAAGGPEVALKIVVFDDADYAFAQQAGQRYPQIPLFLQPGNHTPPPPEDDDARIDLDGVMDRMHWLVERVTADQWFEVRVLPQLHVLLWGNKRGV

SEQ ID NO: 33553 - protein, 242 aa, unidentified
  source 1..242: note = Rhizobium laguerreae
  REGION 1..242: note = tr|A0A1S9H2M9|A0A1S9H2M9_9RHIZ 7-carboxy-7-deazaguanine synthase OS=Rhizobium laguerreae; OX = 1076926 GN=queE PE=3 SV=1
MSGGTIRVSEIFGPTIQGEGALIGLPTVFVRTGGCDYRCSWCDSLHAVDSAFRNQWIPMSVETIWQEVMKLSGGKPLTVSLSGGNPAIQPLRPLIELGHTQGYRFALETQGSVAQGWFRDLDTLVISPKPPSSGMLTDWDQVDNCLQLAAGGPEVALKVVVFDEPDYAFAQQAGQRYPQIPLFLQPGNHTPPPPEDDDARIDLDGVMDRMHWLVERVTADQWFEVRVLPQLHVLLWGNKRGV

SEQ ID NO: 33554 - protein, 242 aa, Rhizobium leguminosarum
  REGION 1..242: note = tr|A0A2K9Z8K3|A0A2K9Z8K3_RHILE 7-carboxy-7-deazaguanine synthase OS=Rhizobium leguminosarum OX=384 GN=queE PE=3 SV=1
MSVGSIRVSEIFGPTIQGEGALIGLPTVFVRTGGCDYRCSWCDSLHAVDSAFRDQWIPMSTEAVWHKVTELSGGKPLTVSLSGGNPAIQPLRPLIELGHSQGYRFALETQGSVAQAWFRDLDILVISPKPPSSGMLTDWGQVDHCLQLASGEPEVALKIVVFDDTDYEFAQRAGQRYPQIPLFLQPGNHTPPPPDDDDARIDIDGVMDRMHWLVAKVTADQWFTARVLPQLHVLLWGNKRGV

SEQ ID NO: 33555 - protein, 242 aa, Rhizobium leguminosarum
  REGION 1..242: note = tr|A0A2Z4YJ39|A0A2Z4YJ39_RHILE 7-carboxy-7-deazaguanine synthase OS=Rhizobium leguminosarum OX=384 GN=queE PE=3 SV=1
MSVGSIRVSEIFGPTIQGEGALIGLPTVFVRTGGCDFRCSWCDSLHAVDSAFRDQWIPMSTEAVWHKVTELSGGKPLTVSLSGGNPAIQPLRPLIELGHSQGYRFALETQGSVAQAWFRDLDILVISPKPPSSGMLTDWDQVDHCLQLAAGGPEVALKIVVFDDADYEFAQRAGRRYPQIPLFLQPGNHTPPPPDDEDARIDIDGVMDRMHWLVERVTADQWFAVRVLPQLHVLLWGNKRGV

SEQ ID NO: 33556 - protein, 245 aa, Rhizobium loessense
  REGION 1..245: note = tr|A0A1G4UAV3|A0A1G4UAV3_9RHIZ 7-carboxy-7-deazaguanine synthase OS=Rhizobium loessense; OX = 158890 GN=queE PE=3 SV=1
MTVARKAEIRVSEIFGPTIQGEGILIGLPTVFVRTGGCDYRCSWCDTLHAVDSEYRDQWRAMSVDDIWQEVLRLSGNKPLTVSLSGGNPAIQPLGPLIERGHSEGFRFALESQGSIAKDWFADLDVLVLSPKPPSSGMETDWRAFEACLTMAAEKPQLALKIVVFDDRDYLFARTAAARYPTLPVYLQPGNHTPPPPADEEASVDIDGIMDRMLWLIDKVTEDRWFEARVLPQLHVLLWGNKRGV

SEQ ID NO: 33557 - protein, 211 aa, unidentified
  source 1..211: note = Rhizobium loti
  REGION 1..211: note = tr|A0A1B4YSM5|A0A1B4YSM5_RHILI 7-carboxy-7-deazaguanine synthase OS=Rhizobium loti OX=381; GN = queE PE=3 SV=1
MSYAVKEIFYTLQGEGRNAGRAAVFCRFAGCNLWSGREGDRAKAFCGFCDTDFVGVDGPGGGHFDTARELALAVEQAWRGSGTGQRPVVLTGGEPLLQIDEELLEALHSLAFEIAVETNGTIPTLAGIDWLCVSPKCNARLVVMAGDELKLVYPQIGAEPEHFEVLAFEHLLLQPMDGPEREANTAAAVAYCLANPRWRLSLQTHKFLGIP

SEQ ID NO: 33558 - protein, 245 aa, unidentified
  source 1..245: note = Rhizobium loti
  REGION 1..245: note = tr|M5AM43|M5AM43_RHILI 7-carboxy-7-deazaguanine synthase OS=Rhizobium loti OX=381 GN=queE PE=3 SV=1
MTCALHPGIRVSEIFGPTIQGEGVLIGLPTVFVRTGGCDYRCSWCDSLHAVDRRFRHDWEMMTPEAVWQKVIALSGGQPVMVSLSGGNPAIQPLGHLIDRGHGEGYRFALESQGSVSKQWFADLDVLVLSPKPPSSEMTTDWAAFDACLEAAQAKPQMALKLVVFDEDDYAYAKDAAARYPQLPVYLQPGNHTPPRPGNEDGFIDFAGVMRRMEWLVEKVTRDRWFEARVLPQLHVLLWGNKRGV

SEQ ID NO: 33559 - protein, 242 aa, Rhizobium lusitanum
  REGION 1..242: note = tr|A0A1C3WJH8|A0A1C3WJH8_9RHIZ 7-carboxy-7-deazaguanine synthase OS=Rhizobium lusitanum; OX = 293958 GN=queE PE=3 SV=1
MSEARIRVSEIFGPTIQGEGILIGLPTIFVRTGGCDYRCSWCDTLHAVDSDYRDQWRPMSVEEVWLEVTRLSGGRPLTISLSGGNPAIQPLGPLIAHGHREGYRFALETQGSVAKEWFAELDTLVLSPKPPSSGMVTDWDAFDDCLRMAAEKPQVALKIVVFDDVDYAYARSAASRYPQLPVYLQPGNHTPPPPDADDAIVDIEGVMERMRWLVDKVSDDRWFEARVLPQLHVFIWGNKRGV

SEQ ID NO: 33560 - protein, 245 aa, unidentified
  source 1..245: note = Rhizobium meliloti
  REGION 1..245: note = tr|A0A437GFL7|A0A437GFL7_RHIML 7-carboxy-7-deazaguanine synthase OS=Rhizobium meliloti; OX = 382 GN=queE PE=3 SV=1
MIHTRSDEIRVSEIFGPTIQGEGVLIGLPTVFVRSGGCDFRCSWCDSLHAVDSSYRHEWQKMSTEEVWQEIVRLSGGEAVMVSLSGGNPAIQPFGDLIARGLEKGYRFALETQGSLARDWFAALDVLVLSPKPPSSGMETDWEALDDCRRSAGSKPQTVLKFVVFDETDYAYARAAAARQPDLPVYLQPGNHTPPPADQADAPIDIDGVMERMRWLVDRVVADRWFGARVLPQLHVLIWGNRRGV

SEQ ID NO: 33561 - protein, 245 aa, unidentified
  source 1..245: note = Rhizobium meliloti
  REGION 1..245: note = tr|A0A222HXI1|A0A222HXI1_RHIML 7-carboxy-7-deazaguanine synthase OS=Rhizobium meliloti; OX = 382 GN=queE PE=3 SV=1
MIHTRSNEIRVSEIFGPTIQGEGVLIGLPTVFVRSGGCDYRCSWCDSLHAVDSNYRHEWQTMSTEEVWQEIVRLSGGEAVMVSLSGGNPAIQPLGDLIGRGHEKGYRFALETQGSVARDWFAALDVLVLSPKPPSSGMETDWEALDDCLRSAGNKPQTVLKFVVFDEADYAYAMTAAARHPHLPVYLQPGNHTPPPAEEADAPIDIDGVMERMRWLVDRVVADRWFEARVLPQLHVLIWGNRRGV

SEQ ID NO: 33562 - protein, 245 aa, unidentified
  source 1..245: note = Rhizobium mesoamericanum
  REGION 1..245: note = tr|K0PRE7|K0PRE7_9RHIZ 7-carboxy-7-deazaguanine synthase OS=Rhizobium mesoamericanum STM3625 OX=1211777; GN = queE PE=3 SV=1
MSGTREAQIRVSEIFGPTIQGEGVLIGLPTVFVRMGGCDYRCSWCDSLHAVDSEYRDQWLPMTVDGIWAEVTRLSGGKPLMVSLSGGNPAIQPLGGLIAHGHDHGYSFALETQGSVAKQWFADLDVLVLSPKPPSSGMATDWNAFEDCLEMAADGPNIALKIVVFDDRDYAYAREAAARYPDLYVYLQPGNHTPPPPNDDGARVDTDGIMDRMLWLVDKVTKDRWFEARVLPQLHVLLWGNKRGV

SEQ ID NO: 33563 - protein, 242 aa, Rhizobium miluonense
  REGION 1..242: note = tr|A0A1C3VMR0|A0A1C3VMR0_9RHIZ 7-carboxy-7-deazaguanine synthase OS=Rhizobium miluonense; OX = 411945 GN=queE PE=3 SV=1
MSEARIRVSEIFGPTIQGEGILIGLPTIFVRTGGCDYRCSWCDTLHAVDSDYRDQWQPMSVDEIWQEVTRLSGGKPLTISLSGGNPAIQPLGPLIARGHTEGYRFALETQGSVAKEWFAELDVLVLSPKPPSSGMATSWADFDDCLRMAGGKPQIALKIVVFDDVDYAYARDASLRYPHLPLYLQPGNHTPPPADADDALVDIDGIVERMRWLVDKVGDDKWFEARVLPQLHVLIWGNKRGV

SEQ ID NO: 33564 - protein, 245 aa, Rhizobium mongolense
  REGION 1..245: note = tr|A0A559TH42|A0A559TH42_9RHIZ 7-carboxy-7-deazaguanine synthase OS=Rhizobium mongolense USDA 1844 OX=1079460 GN=queE PE=3 SV=1
MTVAREAGIRVSEIFGPTIQGEGILIGLPTVFVRTGGCDYRCSWCDTLHAVDSEYRDQWRAMSVDAIWQEVLRLSGNKPLTVSLSGGNPAIQPLGPLIERGHSEGFRFALESQGSIAKDWFADLDVLVLSPKPPSSGMETDWRAFEACLKMAAEKPQLALKIVVFDDRDYLFARTAAARYPTLPVYLQPGNHTPPPPADEEASVDINGIMDRMLWLIDKVTEDRWFEARVLPQLHVLLWGNKRGV

SEQ ID NO: 33565 - protein, 242 aa, Rhizobium multihospitium
  REGION 1..242: note = tr|A0A1C3XAG9|A0A1C3XAG9_9RHIZ 7-carboxy-7-deazaguanine synthase OS=Rhizobium multihospitium OX=410764 GN=queE PE=3 SV=1
MSGALIRVSEIFGPTIQGEGILIGLPTIFVRTGGCDYRCTWCDTLHAVDSDYRDQWRPMPVDEIWQEVTRLSGGKPLTISLSGGNPAIQPLGSLIVRGHAEGYRFALETQGSLAKEWFAELDVLVLSPKPPSSGMTTDWTAFDDCLRMAGNGPQIALKIVIFDDLDYEYAREAAARYPQLPVYLQPGNHTPPPADAEDALVDIDGIVERMRWLVEKVGDDRWFDARVLPQLHVIIWGNRRGV

SEQ ID NO: 33566 - protein, 251 aa, unidentified
  source 1..251: note = Rhizobium nepotum
  REGION 1..251: note = tr|A0A0D8KI15|A0A0D8KI15_9RHIZ 7-carboxy-7-deazaguanine synthase OS=Rhizobium nepotum 39/7 OX=1368418 GN=queE PE=3 SV=1
MTAAARKVAARETAIRISEIFGPTIQGEGPLIGLPTVFVRTGGCDYRCSWCDTLHAVDSAYRETWLPMSVEAIWQEVRRLSGGVPLTVSLSGGNPAIQSLGQLIAKGHGEGYRFALETQGSIAKDWFADLDHLVLSPKPPSSGMETDWQAFADCLTAAGDGPQVALKIVVFDDADYAYAKAASARFPHLPVYLQPGNHTPPPPDDDDARVDIDGVMDRMLWLVDKANEDRWFSARVLPQLHVLLWGNKRGV

SEQ ID NO: 33567 - protein, 241 aa, unidentified
  source 1..241: note = Rhizobium oryziradicis
  REGION 1..241: note = tr|A0A1Q8ZRR6|A0A1Q8ZRR6_9RHIZ 7-carboxy-7-deazaguanine synthase OS=Rhizobium oryziradicis OX=1867956 GN=queE PE=3 SV=1
MGNQIRISEIFGPTIQGEGVLIGQPTVFVRTGGCDYRCSWCDSLHAVDSQFRDAWQPMDVDAIWADVEHLSGGVPLMVSLSGGNPAIQPLDGLIAHGHQRGYRFALETQGSIARDWFADLDVLVLSPKPPSSGMETDWIALDDCLNKAGTKPQTVLKFVVFDEADYAYAKAASARYPHLPTYLQPGNHTPPPPEAVDAVIDMDGIMSRVHWLVDRVMQDRWFAATVLPQLHVLLWGNKRGV

SEQ ID NO: 33568 - protein, 242 aa, Rhizobium phaseoli
  REGION 1..242: note = tr|A0A0M3GQH0|A0A0M3GQH0_9RHIZ 7-carboxy-7-deazaguanine synthase OS=Rhizobium phaseoli Ch24-10 OX=1128399 GN=exsD PE=3 SV=1
MSGESIRVSEIFGPTIQGEGALIGLPTVFVRTGGCDYRCSWCDSLHAVDSAFRDQWIPMSTEAIWQEVTKLSAGRPMTVSLSGGNPAIQPLGPLIEFGHSQGYRFALETQGSVARNWFRDLDVLVLSPKPPSSGMLADWDQVDNCLRLAAGGPEIALKIVVFDDDDYAFAQEAGQRYPYIPLYLQPGNHTPPPPDDDDARIDIDGVMDRMHWLVEKVTADGWFAPRVLPQLHVLLWGNKRGV

SEQ ID NO: 33569 - protein, 242 aa, Rhizobium phaseoli
  REGION 1..242: note = tr|A0A2U3CU56|A0A2U3CU56_9RHIZ 7-carboxy-7-deazaguanine synthase OS=Rhizobium phaseoli; OX = 396 GN=queE PE=3 SV=1
MSGESIRVSEIFGPTIQGEGALIGLPTVFVRTGGCDYRCSWCDSLHAVDSAFRDQWIPMSTEAIWQEVTKLSAGRPMTVSLSGGNPAIQPLGPLIEFGHSQGYRFALETQGSIARNWFRDLDVLVLSPKPPSSGMLTDWDQVDNCLRLAAGGPEIALKIVVFDDDDYAFARETGRRYPYIPLYLQPGNHTPPPPDDDSARIDIDGVMDRMHWLVEKVTADGWFAPRVLPQLHVLLWGNKRGV

SEQ ID NO: 33570 - protein, 242 aa, Rhizobium pisi
  REGION 1..242: note = tr|A0A3R9AZ44|A0A3R9AZ44_9RHIZ 7-carboxy-7-deazaguanine synthase OS=Rhizobium pisi; OX = 574561 GN=queE PE=3 SV=1
MSVETIRVSEIFGPTIQGEGALIGLPTVFVRTGGCDYRCSWCDSLHAVDSAFRDQWIPMSTEAVWLEVKKLSGGKPMTVSLSGGNPAIQPLGPLIELGHSQGYRFALETQGSVARDWFRDLDMLVLSPKAPSSGMSTDWEQVDNCLRLAAGGPEIALKIVVFNDADYVFAQQVGQRYPYVPLFLQPGNHTPPPPDDDDARVDIDGVMDRMHWLVEKVTADRWFSVRVLPQLHVLLWGNKRGV

SEQ ID NO: 33571 - protein, 242 aa, Rhizobium pisi
  REGION 1..242: note = tr|A0A4V2LHD7|A0A4V2LHD7_9RHIZ 7-carboxy-7-deazaguanine synthase OS=Rhizobium pisi; OX = 574561 GN=queE PE=3 SV=1
MSVETIRVSEIFGPTIQGEGALIGLPTVFVRTGGCDYRCSWCDSLHAVDSAFRDQWIPMSTEAVWLEVKKLSGGKPMTVSLSGGNPAIQPLGPLIELGHSQGYRFALETQGSVARDWFRDLDMLVLSPKAPSSGMSTDWEQVDNCLRLAAGGPEIALKIVVFNDADYVFAQQVGQRYPYVPLFLQPGNHTPPPPDDDDARVDIDGVMDRMHWLVEKVTADRWFSVRVMPQLHVLLWGNKRGV

SEQ ID NO: 33572 - protein, 251 aa, Rhizobium pusense
  REGION 1..251: note = tr|A0A4U1JYD3|A0A4U1JYD3_9RHIZ 7-carboxy-7-deazaguanine synthase OS=Rhizobium pusense; OX = 648995 GN=queE PE=3 SV=1
MTAARQKSAAKDTTIRISEIFGPTIQGEGLLIGLPTVFVRTGGCDYRCSWCDTLHAVDSDYRDTWKPMPVDAIWQEVRRLSGGVPLTISLSGGNPAIQPLGSLIAKGHGEGYRFALETQGSIAKDWFADLDHLVLSPKPPSSGMGTDWQAFEDCLAAAGEGPQVALKIVVFDDADYAYAKAASARFPYLPVYLQPGNHTPPPPDDDDARVDIDGVMERMLWLVDKVSEDRWFSARVLPQLHVLLWGNKRGV

SEQ ID NO: 33573 - protein, 251 aa, Rhizobium pusense
  REGION 1..251: note = tr|A0A1L9D040|A0A1L9D040_9RHIZ 7-carboxy-7-deazaguanine synthase OS=Rhizobium pusense; OX = 648995 GN=queE PE=3 SV=1
MTAARQKSAAKDTTIRISEIFGPTIQGEGLLIGLPTVFVRTGGCDYRCSWCDTLHAVDSDYRDTWKPMPVDAIWQEVRRLSGGVPLTVSLSGGNPAIQPLGSLIAKGHGEGYRFALETQGSIAKDWFADLDHLVLSSKPPSSGMGTDWQAFEDCLAAAGEGPQVALKIVVFDDADYAYAKAASARFPYLPVYLQPGNHTPPPPDDDDARVDIDGVMERMLWLVDKVSEDRWFSARVLPQLHVLLWGNKRGV

SEQ ID NO: 33574 - protein, 251 aa, Rhizobium radiobacter
  REGION 1..251: note = tr|A0A1B9SWR5|A0A1B9SWR5_RHIRD 7-carboxy-7-deazaguanine synthase OS=Rhizobium radiobacter; OX = 358 GN=queE PE=3 SV=1
MTAAARKVAAKETAIRISEIFGPTIQGEGPLIGLPTVFVRTGGCDYRCSWCDTLHAVDSEYRDTWKPMPVEAIWQEVRRLSGGVPLTVSLSGGNPAIQPLGALIAKGQGEGYRFALETQGSIAKDWFADLDHLVLSPKPPSSGMETDWQAFENCLTAAGDGPQVALKIVVFDDADYAYAKAASARFPRLPVYLQPGNHTPPPPDDDDARVDIEGVMDRMLWLVDKVSEDRWFSARVLPQLHVLLWGNKRGV

SEQ ID NO: 33575 - protein, 251 aa, Rhizobium radiobacter; identical to SEQ ID NO: 27508
  REGION 1..251: note = tr|A0A4D7Y0U0|A0A4D7Y0U0_RHIRD 7-carboxy-7-deazaguanine synthase OS=Rhizobium radiobacter; OX = 358 GN=queE PE=3 SV=1

SEQ ID NO: 33576 - protein, 246 aa, Rhizobium selenitireducens
  REGION 1..246: note = tr|A0A376ABV8|A0A376ABV8_9RHIZ 7-carboxy-7-deazaguanine synthase OS=Rhizobium selenitireducens ATCC BAA-1503 OX=1336235 GN=queE PE=3 SV=1
MKSTAVGEVLRIAEIFGPTIQGEGPLIGQPTVFVRTGGCDYRCMWCDSLHAVDPHYRHDWTAMSAEAVLERINMLSGDVPLLVSLSGGNPAIQDFAGLIRIGHTAGHRFALETQGSICRDWFAALNNLVLSPKPPSSGMQTDWAALEDCLRAAGDGPEIALKIVVFNEDDYAYARGVGARYPHISLYLQPGNHTPPPPEAEDAPIDVEGVMERMRWLVNKLAEDRWFTPRVLPQLHVLLWGNKRGV

SEQ ID NO: 33577 - protein, 242 aa, unidentified
  source 1..242: note = Rhizobium sophoriradicis
  REGION 1..242: note = tr|A0A2A5KJC7|A0A2A5KJC7_9RHIZ 7-carboxy-7-deazaguanine synthase OS=Rhizobium sophoriradicis OX=1535245 GN=queE PE=3 SV=1
MSAETIRVSEIFGPTIQGEGALIGLPTVFVRTGGCDYRCSWCDSLHAVDSAYRDQWSPMSAEAIWQEVTKLSGGRPMTISLSGGNPAIQPLGPLIELGHSQGYRFALETQGSVARNWFRDLDVLVLSPKPPSSGMSTNWGELGNCLRLTAGGPEIALKIVVFDDADYAFARQVGERYPYIPLYLQPGNHTPPPPDDDDARIDIDGVMDRMHWLVEKVTADRWFAPRVLPQLHVLLWGNKRGV

SEQ ID NO: 33578 - protein, 242 aa, unidentified
  source 1..242: note = Rhizobium sophoriradicis
  REGION 1..242: note = tr|A0A3R9BV81|A0A3R9BV81_9RHIZ 7-carboxy-7-deazaguanine synthase OS=Rhizobium sophoriradicis OX=1535245 GN=queE PE=3 SV=1
MSAETIRVSEIFGPTIQGEGALIGLPTVFVRTGGCDYRCSWCDSLHAVDSAYRDQWSPMSAEAIWQEVTKLSGGRPMTVSLSGGNPAIQPLGPLIELGHSQGYRFALETQGSVARNWFRDLDVLVLSPKPPSSGMSTNWGELGNCLRLTAGGPEIALKIVVFDDADYAFARQVGERYPYIPLYLQPGNHTPPPPDDDDARIDIDGVMDRMHWLVEKVTADGWFAPRVLPQLHVLLWGNKRGV

SEQ ID NO: 33579 - protein, 242 aa, Rhizobium sp.
  REGION 1..242: note = tr|A0A235B1V5|A0A235B1V5_9RHIZ 7-carboxy-7-deazaguanine synthase OS=Rhizobium sp. N4311; OX = 1703972 GN=queE-2 PE=3 SV=1
MSGETIRVSEIFGPTIQGEGALIGLPTVFVRTGGCDYRCSWCDSLHAVDSAFRDQWIPMSTEAIWQEVTKLSAGRPMTVSLSGGNPAIQPLGPLIEFGHSQGYRFALETQGSVARNWFRDLDMLVLSPKPPSSGMLTDWEEVDNCLRLAAGGPEIALKIVVFDDDDYAFAREAGRRYPYVPLYLQPGNHTPPPPDDNDARIDIDGVMDRMHWLVEKVTVDGWFSPRVLPQLHVLLWGNKRGV

SEQ ID NO: 33580 - protein, 244 aa, Rhizobium sp.
  REGION 1..244: note = tr|A0A1I1CTF6|A0A1I1CTF6_9RHIZ 7-carboxy-7-deazaguanine synthase OS=Rhizobium sp. NFR07; OX = 1566262 GN=queE PE=3 SV=1
MTGSVETIRISEIFGPTIQGEGMLIGQPTVFVRTGGCDYRCSWCDTLHAVDSAYRHDWTPMDAETIWKEVRRLSGDTPLMVSLSGGNPAIQPLKPLIRRGKNDGYRFAIETQGSVARDWFADLDVLVLSPKPPSSGMETNWDAVTDCLAAAGKAPRIALKFVVFDDADYDFARAASRRYPELPVYLQPGNHTPPPPDDDDARIDLDGIMDRMLWLVDKVTGDRWFSATVLPQLHVLLWGNKRGV

SEQ ID NO: 33581 - protein, 251 aa, unidentified
  source 1..251: note = Rhizobium straminoryzae
  REGION 1..251: note = tr|A0A549SQZ8|A0A549SQZ8_9RHIZ 7-carboxy-7-deazaguanine synthase OS=Rhizobium straminoryzae OX=1387186 GN=queE PE=3 SV=1
MGGVSSVTEAGGSLIRVSEIFGPTIQGEGVLIGQPTVFVRTGGCDFRCSWCDSLHAVESRFRADWQSMSVAAIWSEVERLSGGRPLMVSLSGGNPAIQPLGGLIAHGHARGYRFALETQGSIARDWFADLDVLVLSPKPPSSGMAFDPQALLASVEAASGGPRTVLKFVIFDEADFAFAWEVAALCRSLPVYLQPGNHTPPPPETDDAVIDLDGIMGRMHWLLDRVMAEGWFAATVLPQLHVLLWGNRRGV

SEQ ID NO: 33582 - protein, 245 aa, Rhizobium sullae
  REGION 1..245: note = tr|A0A4R3QHB8|A0A4R3QHB8_RHISU 7-carboxy-7-deazaguanine synthase OS=Rhizobium sullae; OX = 50338 GN=queE PE=3 SV=1
MSAARETHIRVSEIFGPTIQGEGILIGLPTVFVRTGGCDYRCSWCDTLHAVDSDYRDQWHPMSVDDIWQEVVRLSGNKPLTVSLSGGNPAIQPLRPLLERGHEDGYRFALETQGSVAKDWFADLDVLVLSPKPPSSGMETDWSAFGACLRMAGKKPQLALKIVIFDDRDYLYARAAAARYPRLPVYLQPGNHTPPPPADDNAKVDIDGIMDRMLWLIDKVTEDRWFEARVLPQLHVLLWGNKRGV

SEQ ID NO: 33583 - protein, 245 aa, Rhizobium sullae
  REGION 1..245: note = tr|A0A2N0DF60|A0A2N0DF60_RHISU 7-carboxy-7-deazaguanine synthase OS=Rhizobium sullae; OX = 50338 GN=queE PE=3 SV=1
MSAARETHIRVSEIFGPTIQGEGILIGLPTVFVRTGGCDYRCSWCDTLHAVDSDYRDQWHPMSVDDIWQEVVRLSGNKPLTVSLSGGNPAIQPLRPLLERGHEDGYRFALETQGSVAKDWFADLDVLVLSPKPPSSGMETDWSAFGACLRMAGKKPQLALKIVIFDDRDYLYARAAAARYPRLPVYLQPGNHTPPPPADDDAKVDIDGIMDRMRWLIDKVTEDRWFEARVLPQLHVLLWGNKRGV

SEQ ID NO: 33584 - protein, 248 aa, Rhizobium taibaishanense
  REGION 1..248: note = tr|A0A1Q9A4Y1|A0A1Q9A4Y1_9RHIZ 7-carboxy-7-deazaguanine synthase OS=Rhizobium taibaishanense OX=887144 GN=queE PE=3 SV=1
MSGPNLASETAIRISEIFGPTIQGEGVLIGQPTVFVRTGGCDYRCSWCDSLHAVETRFRHDWQAMGVEAIWADVEQLSGGEPLMVSLSGGNPAIQPLGPLIAHGHRRGYRFALETQGSIARDWFADLDVLVLSPKPPSSGMETDWAALADCLAAAGDGPQIVLKFIVFDEADYAYAKAAAARHPQVSVYLQPGNHTPPPPEDDDARIDMEGIMTRMHWLVDRVVEDRWFAARVLPQLHVLLWGNKRGV

SEQ ID NO: 33585 - protein, 245 aa, Rhizobium tibeticum
  REGION 1..245: note = tr|A0A1H8TZX9|A0A1H8TZX9_9RHIZ 7-carboxy-7-deazaguanine synthase OS=Rhizobium tibeticum; OX = 501024 GN=queE PE=3 SV=1
MSGARETQIRVSEIFGPTIQGEGILIGLPTVFVRTGGCDYRCSWCDSLHAVDNAYREQWVPMTVDGIWAEVTRLSGGKPLMVSLSGGNPAIQPLGGLIAHGHERGYSFALETQGSVAKEWFADLDVLVLSPKPPSSGMATDFDAFENCLGMAADGPEIALKIVVFDDRDYAYAREAATRYPDLPVYLQPGNHTPPPPDDDDARVDIDGIMDRMLWLVDKVTEDRWFEARVLPQLHVLLWGNKRGV

SEQ ID NO: 33586 - protein, 242 aa, Rhizobium tropici
  REGION 1..242: note = tr|L0LUH6|L0LUH6_RHITR 7-carboxy-7-deazaguanine synthase OS=Rhizobium tropici CIAT 899 OX=698761 GN=queE; PE = 3 SV=1
MSEAPIRVSEIFGPTIQGEGILIGLPTIFVRTGGCDYRCSWCDTLHAVDSDYRDQWRPMSVDEIWQEVTRLSGGKPLTISLSGGNPAIQPLGPLIARGHAEGYRFALETQGSLAREWFAELDVLVLSPKPPSSGMATDWTAFDDCLRMAGDGPQIALKIVIFDDLDYEYARDAAARYPRLPVYLQPGNHTPPPADAGDAIVDIDGIVERMRWLVDKVSSDQWFDARVLPQLHVLIWGNKRGV

SEQ ID NO: 33587 - protein, 242 aa, Rhizobium tropici
  REGION 1..242: note = tr|A0A5B0VRV7|A0A5B0VRV7_RHITR 7-carboxy-7-deazaguanine synthase OS=Rhizobium tropici; OX = 398 GN=queE PE=3 SV=1
MSEARIRVSEIFGPTIQGEGILIGLPTIFVRTGGCDYRCSWCDTLHAVDSDYRDQWLPMSVDEIWSEVTRLSGGKPLTISLSGGNPAIQPLGPLIAHGHAEGYRFALETQGSLAKDWFAELDVLVLSPKPPSSGMATDWGAFDDCLRMASHKPQVALKIVVFDDVDYAYAREAASRYPGLPLYLQPGNHTPPPPEADDAIVDIEGIVERMRWLVDKVSSDRWFEARVLPQLHVLIWGNKRGV

SEQ ID NO: 33588 - protein, 271 aa, Rhizobium tubonense
  REGION 1..271: note = tr|A0A2W4D018|A0A2W4D018_9RHIZ 7-carboxy-7-deazaguanine synthase OS=Rhizobium tubonense; OX = 484088 GN=queE PE=3 SV=1
MVQGTAAGDLSRAGERDDKDLGGVPAVTRSRPLEIRVSEIFGPTIQGEGVLIGLPTVFVRTGGCDFRCSWCDSLHAVDSRYRDEWRPMSTEEVWREVKNLSGDKPLMVSLSGGNPAIQPLGELIARGHGEGYRFALETQGSVAKDWFADLDVLVFSPKPPSSGMGTDWRTLDACLEMAAGKPQIVLKMIVFDNADFAYAKDVAARYPHLPVYLQPGNHTPPSPDVEDDFVDIDGLMERMQWLIDKVVEAKWFEARVLPQLHVMLWGNRRGV

SEQ ID NO: 33589 - protein, 245 aa, unidentified
  source 1..245: note = Rhizobium tumorigenes
  REGION 1..245: note = tr|A0A2W4D2P0|A0A2W4D2P0_9RHIZ 7-carboxy-7-deazaguanine synthase OS=Rhizobium tumorigenes; OX = 2041385 GN=queE PE=3 SV=1
MRLESETPIRISEIFGPTIQGEGVLIGLPTVFVRTGGCDYRCTWCDSLHAVESAFRDTWAPMSVDDIWQEVRRLSGHRPLTVSLSGGNPAIQPLAPLIARGHGEGYRFALETQGSIAKPWFSDLDVLVLSPKPPSSGMDTDWDALQHCLDAAGGRPETVLKFVVFDDADYAYARDAAARHPHLPVYLQPGNHTPPKGTEENAVIDLDGITDRMLWLIDRVTEDGWFAARVLPQLHVILWGNRRGV

SEQ ID NO: 33590 - protein, 242 aa, Rhizobium vallis
  REGION 1..242: note = tr|A0A432PAZ4|A0A432PAZ4_9RHIZ 7-carboxy-7-deazaguanine synthase OS=Rhizobium vallis; OX = 634290 GN=queE PE=3 SV=1
MSAETIRVSEIFGPTIQGEGALIGLPTVFVRTGGCDYRCCWCDSLHAVDSAFRDQWIPMSTEAVWQEVKKLSGDKPLTVSLSGGNPAIQPLGPLIELGHSRGYRFALETQGSVARDWFRNLDMLILSPKPPSSGMSTDWEQVDDCLRLAAGGPEIALKIVVFDDADYAFAQLAGERYPYVPLFLQPGNHTPPPPDDADARVDIDGVMDRMHWLIEKVTADRWFSVRVLPQLHVLLWGNKRGV

SEQ ID NO: 33591 - protein, 211 aa, Rhizomicrobium sp.
  REGION 1..211: note = tr|A0A177QBM3|A0A177QBM3_9PROT 7-carboxy-7-deazaguanine synthase OS=Rhizomicrobium sp. SCGC AG-212-E05 OX=1799655 GN=queE PE=3 SV=1
MTYSVKEIYYTLQGEGAQTGRAAVFLRFAGCNLWSGVEKDRPDATCRFCDTDFVGTDGPGGGKFVDAPALARAVAAAWPREARGKPYVVCTGGEPLLQLDSAAIAALKEQGFEIGIETNGTLLPPPGIDWICVSPKADAEQKLMRGNELKLIYPQAGAPPERFAGQDFQNFFLQPMDNEQRAANTEAATAYCLAHPQWRLSLQTHKLIGIR

SEQ ID NO: 33592 - protein, 210 aa, unidentified
  source 1..210: note = Rhizorhabdus dicambivorans
  REGION 1..210: note = tr|A0A2A4FTB9|A0A2A4FTB9_9SPHN 7-carboxy-7-deazaguanine synthase OS=Rhizorhabdus dicambivorans OX=1850238 GN=queE PE=3 SV=1
MASYAVKEMFLTLQGEGVQVGRRAVFLRFAGCNLWTGREEDRATAVCTFCDTDFVGLDGDHGGRYPDADALADRAAALWGDFPEPFVVMTGGEPLLQIDAALVAALKARGFEMAVETNGTQPAPDGIDWICVSPKQGSDVVLRRGNELKLVWPQPGLDPDELAGWDFDHFLLQPMDGPNLSSAREAAIRFVLEHPRWRLSTQTHKVVGIR

SEQ ID NO: 33593 - protein, 210 aa, unidentified
  source 1..210: note = Rhizorhabdus sp.
  REGION 1..210: note = tr|A0A521T1L1|A0A521T1L1_9SPHN 7-carboxy-7-deazaguanine synthase OS=Rhizorhabdus sp.; OX = 1968843 GN=queE PE=3 SV=1
MASYAVKEMFLTLQGEGMQVGRRAVFLRFTGCNLWSGREEDRATATCNFCDTDFVGMDGDRGGRYADADALADQAAALWADMPEPFIVMTGGEPLLQVDDALIAALKARSFEIAVETNGTQPVPDGIDWICVSPKQGSDIILRRGNELKLVWPQPGLNPDELATWDFSHFLIQPMDGANLPAARASAIDYVMAHPKWRLSTQTHKVVGIR

SEQ ID NO: 33594 - protein, 237 aa, unidentified
  source 1..237: note = Rhodanobacter denitrificans
  REGION 1..237: note = tr|A0A2W5KSZ0|A0A2W5KSZ0_9GAMM 7-carboxy-7-deazaguanine synthase OS=Rhodanobacter denitrificans OX=666685 GN=queE PE=3 SV=1
MLPAPIRLDAEPHAIDTAPAPRVRGERLRLTEIFLSVQGEADAAGWPTVFVRLTGCPLRCTWCDTAYAFHGGQWWTIESILAEVARHGARHVCVTGGEPLAQKRCLILLRRLCDAGYEVSLETSGAIDVGPVDPRVRKVVDLKAPGSGELERNRWDNLTHLAPHDQVKFVLADRADYEWARETVRRYALAARCMVLFSPVHGSLAPRDLAEWILADGLPVRFQLQLHKLLWGEESGR

SEQ ID NO: 33595 - protein, 230 aa, unidentified
  source 1..230: note = Rhodanobacter denitrificans
  REGION 1..230: note = tr|A0A368KK84|A0A368KK84_9GAMM 7-carboxy-7-deazaguanine synthase OS=Rhodanobacter denitrificans OX=666685 GN=queE PE=3 SV=1
MSGHDAREASGTPAAAVAERLRITEIFHSIQGEADAIGWRTVFVRLTGCPLRCVWCDTEYSFYGGNWHAIDDILAEVATHGAKHVCVTGGEPLAQKRCLILLRKLCDAGYEVSLETSGALDVSAVDPRVRKVLDLKAPDSGESGRNLWSNLDHLLPHDQIKIVIASRADYEWARAMLAEHALADRCMVLFSPVHGAVEPRDLAEWIIADKLPVRFQLQLHKLLWNDARGK

SEQ ID NO: 33596 - protein, 210 aa, Rhodanobacter fulvus
  REGION 1..210: note = tr|I4VY04|I4VY04_9GAMM 7-carboxy-7-deazaguanine synthase OS=Rhodanobacter fulvus Jip2 OX=1163408 GN=queE; PE = 3 SV=1
MRITEIFHSLQGEADAIGWRTVFVRLTGCPLRCVWCDTEYSFHGGQWHDIDAILAEVARHDVGHVCVTGGEPLAQKRCLILLQKLCDVGYEVSLETSGALDVSAVDPRVRKVMDLKAPGSGESARNLWSNLAFLHQRDQVKIVIASRADYDWACSVLVEHALAARCMVLFSPVHGAISPRQLADWIIEDRLPVRFQLQLHKLLWNDAAGH

SEQ ID NO: 33597 - protein, 223 aa, unidentified
  source 1..223: note = Rhodanobacter glycinis
  REGION 1..223: note = tr|A0A5B9E7T6|A0A5B9E7T6_9GAMM 7-carboxy-7-deazaguanine synthase OS=Rhodanobacter glycinis OX=582702 GN=queE PE=3 SV=1
MAPDAPTSVVGERLRITEIFHSIQGEADAIGWRTVFVRLTGCPLRCVWCDTEYAFHGGGWRDIDDILAEVASHGAPRVCVTGGEPLAQKRCLILLQRLCDAGYQVSLETSGALDVSAVDTRVHKVMDLKAPDSGESARNLWSNLEHLLPHDQVKVVIASRADYEWARGVVAEHALDRRCMVLFSPVWGKVQPRELAEWIIEDKLPVRFQLQLHKLLWDDAAGR

SEQ ID NO: 33598 - protein, 230 aa, unidentified
  source 1..230: note = Rhodanobacter glycinis
  REGION 1..230: note = tr|A0A1I4BE82|A0A1I4BE82_9GAMM 7-carboxy-7-deazaguanine synthase OS=Rhodanobacter glycinis OX=582702 GN=queE PE=3 SV=1
MVGSSETMAPEAPTSAVGERLRITEIFHSIQGEADAIGWRTVFVRLTGCPLRCVWCDTEYAFHGGGWRDIDDILVEVASHGAPRVCVTGGEPLAQKRCLILLQRLCDAGYRVSLETSGALDVSAVDPRVHKVMDLKAPDSGESARNLWSNLEHLLPHDQVKVVIASRADYEWARGVVAEHALDRRCMVLFSPVWGKVQPRELAEWIIEDKLPVRFQLQLHKLLWDDAAGH

SEQ ID NO: 33599 - protein, 229 aa, Rhodanobacter lindaniclasticus
  REGION 1..229: note = tr|A0A4S3K7K3|A0A4S3K7K3_9GAMM 7-carboxy-7-deazaguanine synthase OS=Rhodanobacter lindaniclasticus OX=75310 GN=queE PE=3 SV=1
MNGEEARVGSATPAVAAERLRITEIFHSIQGEADAIGWRTVFVRLTGCPLRCVWCDTEYSFHGGDWHAIDDILAEVARHGAKHVCVTGGEPLAQKRCLILLRKLCDAGYEVSLETSGALDVSAVDPRVHKVMDLKAPDSGESGRNLWSNLDHLLAHDQIKIVLASRGDYEWARAMLTEHGLTDRCMVLFSPVHGAVEPRELAEWILADKLDVRFQLQLHKLLWNDAKGK

SEQ ID NO: 33600 - protein, 230 aa, Rhodanobacter sp.
  REGION 1..230: note = tr|A0A1V3P7V1|A0A1V3P7V1_9GAMM 7-carboxy-7-deazaguanine synthase OS=Rhodanobacter sp. C05; OX = 1945855 GN=queE PE=3 SV=1
MNGNSASVDVSTPAPAATERLRITEIFHSIQGEADAIGWRTVFVRLTGCPLRCVWCDTEYSFYGGDWHAIDDILAEVASHGAKHVCVTGGEPLAQKRCLILLQKLCDAGYEVSLETSGALDVSAVDPRVHKVMDLKAPDSGESKRNLWSNLEHLLPHDQIKIVIASRADYEWARAMLDEHALANRCMVLFSPVHGAVQPRELAEWIIADKLSVRFQLQLHKLLWNDAAGH

SEQ ID NO: 33601 - protein, 223 aa, Rhodanobacter sp.
  REGION 1..223: note = tr|A0A522HBW2|A0A522HBW2_9GAMM 7-carboxy-7-deazaguanine synthase OS=Rhodanobacter sp.; OX = 1883446 GN=queE PE=3 SV=1
MVPTTAAVKAPARLRITEIFHSIQGEADAIGWRTVFVRLTGCPLRCVWCDTEYSFHGGDWHAIDDILAEVATHGAKHVCVTGGEPLAQKRCLILLRKLCDAGYQVSLETSGALDVSAVDPRVRKVMDLKAPGSGESRRNLWSNLDHLLPHDQIKIVLASRADYEWACAMLAEHALADRCMVLFSPVHGAVEPRDLAEWILADKLPVRFQLQLHKLLWNDAAGK

SEQ ID NO: 33602 - protein, 230 aa, Rhodanobacter spathiphylli
  REGION 1..230: note = tr|I4VYN6|I4VYN6_9GAMM 7-carboxy-7-deazaguanine synthase OS=Rhodanobacter spathiphylli B39 OX=1163407; GN = queE PE=3 SV=1
MSGHDAQQASATPAAAVPERLRITEIFHSIQGEADAIGWRTVFVRLTGCPLRCVWCDTEYSFHGGDWHGIDEILAEVASHGARHVCVTGGEPLAQKRCLILLQRLCDAGYEVSLETSGALDVSAVDPRVRKVMDLKAPGSGESARNLWSNLDHLLPHDQIKIVIASREDYEWSCAMLAEHRLADRCMVLFSPVWGKVEPRELAEWIIADRLPVRFQLQLHKLLWNDAAGR

SEQ ID NO: 33603 - protein, 230 aa, Rhodanobacter thiooxydans
  REGION 1..230: note = tr|A0A154QJ75|A0A154QJ75_9GAMM 7-carboxy-7-deazaguanine synthase OS=Rhodanobacter thiooxydans OX=416169 GN=queE PE=3 SV=1
MSGHDAREASGTPAAAVAGRLRITEIFHSIQGEADAIGWRTVFVRLTGCPLRCVWCDTEYAFHGGNWHAIDDILAEVATHGAKHVCVTGGEPLAQKRCLILLRKLCDAGYEVSLETSGALDVSAVDPRVHKVMDLKAPGSGESARNLWSNLDHLLPHDQVKIVIASRADYEWACAVLAERTLADRCMVLFSPVWSKVEPRELAEWIIADKLPVRFQLQLHKLLWNDARGK

SEQ ID NO: 33604 - protein, 231 aa, unidentified
  source 1..231: note = Rhodanobacteraceae bacterium
  REGION 1..231: note = tr|A0A2Z6E797|A0A2Z6E797_9GAMM 7-carboxy-7-deazaguanine synthase OS=Rhodanobacteraceae bacterium Dysh456 OX=2010829 GN=queE PE=3 SV=1
MQVEAASPARPAASDRARRGLLRISEIFHSIQGEADAIGWPTVFVRLTGCPLRCTWCDTEYAFHGGQWLAIDDVLAQVAGYGARHVCVTGGEPLAQKRCLALLARLCDAGHEVSLETSGALDVSRVDPRVRKVLDLKAPGSSESDRNLWSNLAHLRPHDQVKIVIASRDDYEWARDAVAAHALDRRCMVLFSPVHGAVEPRALAEWILADRLPVRFQLQLHKLLWNDARGK

SEQ ID NO: 33605 - protein, 210 aa, unidentified
  source 1..210: note = Rhodanobacteraceae bacterium
  REGION 1..210: note = tr|A0A522RUW8|A0A522RUW8_9GAMM 7-carboxy-7-deazaguanine synthase OS=Rhodanobacteraceae bacterium OX=2052182 GN=queE PE=3 SV=1
MYAIKEIFYTLQGEGFNAGRPAVFCRFSGCNLWSGREADRATSICNFCDTDFVGTNGVNGGKYPDAAAVAGKITSLWPAGQTENRFVVFTGGEPLLQLDTPVLDAMHAQGFECAVETNGTLEAPAGLDWITVSPKSTAPVKLKRASELKLVYPQPTALPERFAGFPATHFFLQPMDGPRIADNTRAAVEYCKAHPHWRLSLQTHKYLGIP

SEQ ID NO: 33606 - protein, 208 aa, unidentified
  source 1..208: note = Rhodobacteraceae bacterium
  REGION 1..208: note = tr|A0A3N9QCE8|A0A3N9QCE8_9RHOB 7-carboxy-7-deazaguanine synthase OS=Rhodobacteraceae bacterium CH30 OX=2490538 GN=queE PE=3 SV=1
MYTVKEIFYTLQGEGVHAGRAAVFCRFSGCNLWSGREVDRAKSICRFCDTDFVGVGPDGGRFACSAALADQICRQWQGLGGTPYVVFTGGEPLLQLDEALIAALHERGFEVGVETNGTLDAPAGIDWLCVSPKAGADWVQRHGDEIKLVYPQAGLLPHDVDTTGFAHAWLQPMDDCARADNTSAAIDYCMRAPHWRLSLQGHKLVGIR

SEQ ID NO: 33607 - protein, 235 aa, unidentified
  source 1..235: note = Rhodobacteraceae bacterium
  REGION 1..235: note = tr|A0A2E7Q5J1|A0A2E7Q5J1_9RHOB 7-carboxy-7-deazaguanine synthase OS=Rhodobacteraceae bacterium OX=1904441 GN=queE PE=3 SV=1
MTLRIAEIFGPTIQGEGALIGEPTVFVRAGGCDYRCSWCDSLHAVESKYRHTWTPMESDAVWERIEQLSGGQPLTISLSGGNPAIQDFGPLIALGRAKGYRFACETQGSVAREWFSDLDTLVLSPKPPSSGEEVDWDAFTACRTAGAGARLQVMKIVIFDDADYNWARDAHARHPDLALYLQPGNPEVDPGVPVDPQALADRLGWLTEKAMADGWFAPRILPQLHVLIWGNKRGV

SEQ ID NO: 33608 - protein, 236 aa, unidentified
  source 1..236: note = Rhodobacterales bacterium
  REGION 1..236: note = tr|B6B7B2|B6B7B2_9RHOB 7-carboxy-7-deazaguanine synthase OS=Rhodobacterales bacterium Y4I OX=439496; GN = queE PE=3 SV=1
MTTLRIAEIFGPTIQGEGALIGEPTVFVRAGGCDYRCSWCDSMHAVDSAYRHDWAVKTPEDVMAEVRRLSGGKPLTVSISGGNPAIQDFAPVIAIGKEEGYRFACETQGSVSQPWFADLDTLVLSPKPPSSGEKTDWHKFTCCLHQAKGCGQAVMKIVVFDDTDYAWAKAAAERHPELPLYLQPGNPEVDPEQPVDLNQATDRLLWLIEKVTGDGWFTPRVLPQLHVLVWGNKRGV

SEQ ID NO: 33609 - protein, 271 aa, unidentified
  source 1..271: note = Rhodobacterales bacterium
  REGION 1..271: note = tr|A0A259M822|A0A259M822_9RHOB 7-carboxy-7-deazaguanine synthase OS=Rhodobacterales bacterium 34-62-10 OX=1970561 GN=queE PE=3 SV=1
MVQVAPTGNRGGAGQRDAEDLGGIPAVNYAVADEIRISEIFGPTIQGEGALIGQPTVFVRTGGCDYRCAWCDSLHAVDSRFRADWRAMSTEEVLDQVRTLSGDQPLMVSLSGGNPAIQPLGPLIRQGQAEGYRFALETQGSVSRDWFADLDVLVLSPKPPSSVMTTDWAALRACVESAVAGPQIVLKFVVFDAEDYAYARDAATRFPGLPVYLQPGNHTPPGPQDDDAFIDTDGILQRMGWLVDRVMADRWFAAHVLPQLHVLLWGNKRGV

SEQ ID NO: 33610 - protein, 215 aa, unidentified
  source 1..215: note = Rhodobiaceae bacterium
  REGION 1..215: note = tr|A0A2E6U2B0|A0A2E6U2B0_9RHIZ 7-carboxy-7-deazaguanine synthase OS=Rhodobiaceae bacterium OX=2026785 GN=queE PE=3 SV=1
MSYSVKEIFFTLQGEGAQAGRPAVFCRFSGCNLWSGREEDRATAQCTFCDTDFVGTDGQNGGKFPDADALANAIAGSWPEDPAGPDAYVVFTGGEPCLQLDTPLLQALKARNFECAVETNGTLDVPQEVDWICVSPKPRSDLAQTHGHELKFVYPQEELSPDQFADLDFEHFYLQPMDTSEAETSWHNVQAAIAYCLQNPQWRLSLQSHKIVGLD

SEQ ID NO: 33611 - protein, 215 aa, unidentified
  source 1..215: note = Rhodobiaceae bacterium
  REGION 1..215: note = tr|A0A2D7FSU5|A0A2D7FSU5_9RHIZ 7-carboxy-7-deazaguanine synthase OS=Rhodobiaceae bacterium OX=2026785 GN=queE PE=3 SV=1
MSYAVKEIFYTLQGEGGQAGRPAVFCRFAGCNLWSGLERDRATAQCRFCDTDFVGTDGQNGGKFADAQALVEAIAAQWPEAEPGADALVVFTGGEPCLQLDAALLEAVAAQGFETAVETNGTLPVPTQIDWICVSPKPESTLVQQAGHELKFVYPQETLSPEQFEHLDFEHFFLQPMDVDDDETRWHNIQAAIAYCLQNPQWRLSLQTHKIIGLD

SEQ ID NO: 33612 - protein, 209 aa, Rhodoblastus acidophilus
  REGION 1..209: note = tr|A0A212RIW4|A0A212RIW4_RHOAC 7-carboxy-7-deazaguanine synthase OS=Rhodoblastus acidophilus OX=1074 GN=queE PE=3 SV=1
MAYSVKELFLTLQGEGGHAGRAAVFCRFAGCNLWSGREADREMSVCRFCDTDFVGTDGENGGKYEAEALADLIAGIWVGGDADRFVVFTGGEPLLQLDEPLLEAVRARGFFTAVESNGTVPAPEGVDWLCVSPKAGAPLRVRAGQELKLVFPQKWAEPEQFESLEFEHFFLQPMDGPERDENTRLAVEYCLLHPRWRLSLQTHKLIGIP

SEQ ID NO: 33613 - protein, 209 aa, Rhodoblastus sphagnicola
  REGION 1..209: note = tr|A0A2S6NGQ0|A0A2S6NGQ0_9RHIZ 7-carboxy-7-deazaguanine synthase OS=Rhodoblastus sphagnicola OX=333368 GN=queE PE=3 SV=1
MAYSVKEIFLTLQGEGGQAGRAAVFCRFAGCNLWSGREADRAAAACRFCDTDFIGIDGENGGRFADCEALAERIAQIWGDADNRFVVFTGGEPLLQLDAPLLEAVKARGFFIAVESNGTVPAPEGIDWLCVSPKAGAPLRVAAGQELKLVFPQQRAEPELFEALDFAHFFLQPMDGPDREANTGRAVAWCLAHPRWRLSLQTHKLIGIP

SEQ ID NO: 33614 - protein, 242 aa, Rhodococcus qingshengii
  REGION 1..242: note = tr|A0A4R6A145|A0A4R6A145_9NOCA 7-carboxy-7-deazaguanine synthase OS=Rhodococcus qingshengii OX=334542 GN=queE PE=3 SV=1
MSKLPIFEIFGPTIQGEGMVVGQVTMFVRTAGCDYSCSWCDSAFTWNGSARDDIRQMTAEEIWTELIALGGDNFSFVTISGGNPALLKNLDSLIDLLKEKQITIGIETQGSKWQDWFLKIDELTISPKPPSSRMETNLEILDSIFINLDENQFENNVSLKVVIFDEDDLEYAKMIHNRYKGIPFYLSVGNDDITNPNNQELIQKLLLKYEWLVNQVVVDNQLNNVRVLPQLHALLWGNKRGV

SEQ ID NO: 33615 - protein, 208 aa, Rhodococcus sp.
  REGION 1..208: note = tr|A0A2S7TWV7|A0A2S7TWV7_9NOCA 7-carboxy-7-deazaguanine synthase OS=Rhodococcus sp. SAORIC-690 OX=1923970 GN=queE PE=3 SV=1
MFYTLQGEGAQAGRAAVFCRFAGCNLWTGREEDRATAVCKFCDTDFVGTDGVGGGKFKDAVTLARAIANTYQGGQGTAKPYVVFTGGEPTLQLDTSLIDAVHANGFEIAIETNGTLPVPSGVDWICVSPKFGSELVQTSGHELKVVVPQLGQDLNALGRLQFEHYFVQAMDDSDPVKKSRNLQVAIQTCLDKPQWRLSVQTHKVIGMP

SEQ ID NO: 33616 - protein, 211 aa, Rhodococcus wratislaviensis
  REGION 1..211: note = tr|X0PXP8|X0PXP8_9NOCA 7-carboxy-7-deazaguanine synthase OS=Rhodococcus wratislaviensis NBRC 100605; OX = 1219028 GN=queE PE=3 SV=1
MSYKVKEIFYTLQGEGMHAGRPAVFCRFTSCNLWTGRESDRHRAICKFCDTDFVGTDGPGGGKFATASDLASAIADKWPASDTDHRMVVCTGGEPLLQLDEPLTAALHERGFYIAVETNGTQTPPPGIDWLCVSPKQGAELVVHAGDELKLVFPQVGSDPHLYESLAFKSFRLQPMDGEEVAANTASAVEYCMTHPKWQLSLQTHKFLGIP

SEQ ID NO: 33617 - protein, 158 aa, unidentified
  source 1..158: note = Rhodocyclaceae bacterium
  REGION 1..158: note = tr|A0A3D3U495|A0A3D3U495_9RHOO 7-carboxy-7-deazaguanine synthase QueE OS=Rhodocyclaceae bacterium OX=1898103 GN=DIT50_09325 PE=4 SV=1
MVAEVRARGVRTVCVTGGEPLAQPAVHQLLRALADAGYDVSLETSGALPIADVDPRVAVVMDLKAPGSGEHEKNLWQNLVALKPTDEIKIVIADRADYEWAKMVIAEHRLTERCAVLLSPVANALPPHQLAEWIVADKLPVRFQLQLHKVLWGEERGR

SEQ ID NO: 33618 - protein, 212 aa, unidentified
  source 1..212: note = Rhodocyclaceae bacterium
  REGION 1..212: note = tr|A0A524B8H6|A0A524B8H6_9RHOO 7-carboxy-7-deazaguanine synthase OS=Rhodocyclaceae bacterium OX=1898103 GN=queE PE=3 SV=1
MALRLTEIFFSLQGEASRVGLPTVFVRLTGCPLRCTWCDTTYSFTGGEPATVASILAEVAKYPARQVCVTGGEPLSQKECLLLLTALCDAGYDVSLETSGALDIADVDPRVARIMDLKAPDSGECAKNRWENLVHLTPRDEIKIIIASDADYRWACEQIRSHRLDTLCPVLLSPAQGQFEARDLAERILGDGLNVRFQIQLHKLLWGNMKAK

SEQ ID NO: 33619 - protein, 223 aa, unidentified
  source 1..223: note = Rhodocyclales bacterium
  REGION 1..223: note = tr|A0A3L6LZ70|A0A3L6LZ70_9RHOO 7-carboxy-7-deazaguanine synthase OS=Rhodocyclales bacterium GT-UBC OX=2316108 GN=queE PE=3 SV=1
MAGRPSPRVSVVALRITEIFYSLQGEASRVGLPTVFVRLTGCPLRCVWCDTTYSFTGGEAASVESVLAEVARYPARQVCVTGGEPLSQKDCLPLLQALCDAGYDVSLETSGAIDIAAVDARVSRIMDLKAPGSGEVDKNRWENLGCLNNRDEVKIIIASRDDYEWARQVLSEHQLERRCPVLFSPAQGLVEPAELAAWILEDGLDVRFQMQLHKLLWGNMKGK

SEQ ID NO: 33620 - protein, 217 aa, unidentified
  source 1..217: note = Rhodocyclales bacterium
  REGION 1..217: note = tr|A0A2M7Y5Q9|A0A2M7Y5Q9_9RHOO 7-carboxy-7-deazaguanine synthase OS=Rhodocyclales bacterium CG_4_9_14_3_um_filter_68_10 OX=1974089 GN=queE; PE = 3 SV=1
MSEPRLRLRVSEIFHSIQGESTRAGLPSAFVRLTGCPLRCRWCDTQYAFSGGEALALSEILERVRAFGAAHVCVTGGEPLAQPGCLRLLRELCEAGYRVSLETSGALDISGVDPRVARIMDLKAPGSGEEAKNRWENLECLGAGDEIKIVLAGEADYRWASEQIRTRDLARRCEVLLSPIQGALPLRLLAEWILRDRLPVRLQVQLHKLIWDEPRGH

SEQ ID NO: 33621 - protein, 211 aa, unidentified
  source 1..211: note = Rhodoferax ferrireducens
  REGION 1..211: note = tr|Q21V73|Q21V73_RHOFT 7-carboxy-7-deazaguanine synthase OS=Rhodoferax ferrireducens (strain ATCC BAA-621 / DSM 15236 / T118) OX=338969 GN=queE PE=3 SV=1
MTYSVKEIFYTLQGEGHHAGRPAVFCRFAGCNLWSGAEDSRASAVCQFCDTDFVGTDGEGGGKFRDAETLAAAINQLWPASYPASKYVVFTGGEPLLQLNAALIDAMHDAGFEVAIETNGTLPVPEGVDWVCVSPKMGSALVVRAGNEIKVVIPQAGQVLDDYACLAFDHYFVQAMDGPLQKENLRMAIDYCKAHPQWKLSLQTHKLLQIP

SEQ ID NO: 33622 - protein, 211 aa, unidentified
  source 1..211: note = Rhodoferax koreense
  REGION 1..211: note = tr|A0A1P8JPZ6|A0A1P8JPZ6_9BURK 7-carboxy-7-deazaguanine synthase OS=Rhodoferax koreense; OX = 1842727 GN=queE PE=3 SV=1
MGYQVKEIFYTLQGEGANAGRPAVFCRFAGCNLWSGREEDRSKAVCQFCDTDFVGTDGTSGGKYATAELLAEQIAAFWPAGDATHRFTVLTGGEPLLQVDDALVAALHARGFRIAVESNGTVVAPEGIDWLCISPKAGAQLVQKQGDELKVVWPQAGLDLPALAQLPFRHHYLQPMDGPLQKTNTGLCIAACMAQPAWKLSVQTHKFTGIR

SEQ ID NO: 33623 - protein, 211 aa, Rhodoferax sp.
  REGION 1..211: note = tr|A0A3D5VQE0|A0A3D5VQE0_9BURK 7-carboxy-7-deazaguanine synthase OS=Rhodoferax sp.; OX = 50421 GN=queE PE=3 SV=1
MTYQVKEIFYTLQGEGSNAGRPAVFCRFAGCNLWTGREQDRASAVCQFCDTDFVGTDGTLGGKFKSAQALAERIAAQWPDTDAAHRFVVLTGGEPLLQVDAALIEALHAQGFQIAVETNGTIAAPEGIDWICVSPKAGSTWVQRSGHELKLVWPQAGITLAECEAADFLHRYLQPMDNLLRADNTRACIAQCLERPQWRLSLQTHKITGIR

SEQ ID NO: 33624 - protein, 211 aa, Rhodoferax sp.
  REGION 1..211: note = tr|A0A515EM89|A0A515EM89_9BURK 7-carboxy-7-deazaguanine synthase OS=Rhodoferax sp. Gr-4; OX = 2527691 GN=queE PE=3 SV=1
MAYSVKEIFYTLQGEGAQQGRAAVFCRFAGCNLWSGREEDRSSAVCQFCDTDFVGTDGTGGGKFATADALADAVAAAWGPTGPSYRMVVLTGGEPLLQVDVALTQALHARGFFIAVETNGTIAAPEGLDWICVSPKSDAPLAQTSGSELKLVFPQKGVDPARFTGLAFEHFYLQPMDSPLRADHTAQAIAYCQAHPQWRLGVQTHKTIGIR

SEQ ID NO: 33625 - protein, 217 aa, unidentified
  source 1..217: note = Rhodohalobacter barkolensis
  REGION 1..217: note = tr|A0A2N0VKI2|A0A2N0VKI2_9BACT 7-carboxy-7-deazaguanine synthase OS=Rhodohalobacter barkolensis OX=2053187 GN=queE PE=3 SV=1
MFKKEKAAKINLEDTNELDLFEYPLMEDFYTIQGEGSHTGRPAYFIRTAGCDVNCWWCDVKDSWDEEKHPRVKTEEIVKRAVESGAEFAVITGGEPLLHNLEPLTIRLKQAGLQTHIETSGSSPLTGQLDWITLSPKRFKKPLDEVFPYVDELKVVVLTNKDLAWAEENAKKCPSNTQLLLQPEWDTPKSIPLIVEYVKKNPQWGISLQTHKFINVP

SEQ ID NO: 33626 - protein, 200 aa, unidentified
  source 1..200: note = Rhodohalobacter sp.
  REGION 1..200: note = tr|A0A371QNT3|A0A371QNT3_9BACT 7-carboxy-7-deazaguanine synthase OS=Rhodohalobacter sp. SW132 OX=2293433 GN=queE PE=3 SV=1
MDAVEYPLVEDFYTIQGEGAHTGRAAYFIRTAGCDVNCWWCDVKESWDEEKHPMTRTGDIVKRAVDSGAEFAVITGGEPLLHNLEPLSVRLKQEGLDVHIETSGSSPLSGQLDWVTLSPKRFKKPLDENFPYVDELKVVVLKNKDIEWAELNAKKCPPSTQLLLQPEWETPSSVKLIVDYVKKNPQWGISLQTHKFMNVP

SEQ ID NO: 33627 - protein, 213 aa, unidentified
  source 1..213: note = Rhodomicrobium udaipurense
  REGION 1..213: note = tr|A0A037UZN0|A0A037UZN0_9RHIZ 7-carboxy-7-deazaguanine synthase OS=Rhodomicrobium udaipurense JA643 OX=858455 GN=queE PE=3 SV=1
MYTVKEIFPTLQGEGAQVGRAAVFLRFAGCNLWTGQHKDKSKAFCRFCDTDFVGYDGPNGGKFETADQLADIVLGMWNSLTKGKTASPYVVCTGGEPTLQLDTPMIDALKKRGFTVAIESNGTRPAPRGLDWICISPKAGVPLAQREGNELKLVYPQTGALPQLFERLKFEHFFLQPMDGPQHRDNIEAAIRYCMANPPWRLSMQMHKLVGIR

SEQ ID NO: 33628 - protein, 213 aa, Rhodomicrobium vannielii; identical to SEQ ID NO: 33627
  REGION 1..213: note = tr|E3I3N5|E3I3N5_RHOVT 7-carboxy-7-deazaguanine synthase OS=Rhodomicrobium vannielii (strain ATCC 17100 / ATH 3.1.1 / DSM 162 / LMG 4299) OX=648757 GN=queE PE=3 SV=1

SEQ ID NO: 33629 - protein, 208 aa, Rhodonellum psychrophilum
  REGION 1..208: note = tr|U5BWJ4|U5BWJ4_9BACT 7-carboxy-7-deazaguanine synthase OS=Rhodonellum psychrophilum GCM71 = DSM 17998; OX = 1123057 GN=queE PE=3 SV=1
MEKKTAVAAGTMLPLMEAFYTIQGEGTFSGTPAYFIRLGGCDVGCVWCDVKASWEAAKWPVLPIEEIVEGALQYPGRLVVITGGEPLMYNLDPLTRLLKENGFTTNIETSGAHPFSGDFDWVCFSPKKFKTPHPSIYAVADELKVVVFHKSDFDFAEKHAVLVRENCRKLLQPEWSKSDLFINSIIDYVKSHPNWKVSLQTHKFMEIP

SEQ ID NO: 33630 - protein, 257 aa, unidentified
  source 1..257: note = Rhodopirellula bahusiensis
  REGION 1..257: note = tr|A0A2G1W2R7|A0A2G1W2R7_9PLAN 7-carboxy-7-deazaguanine synthase OS=Rhodopirellula bahusiensis OX=2014065 GN=queE PE=3 SV=1
MKSVDHSVDVLPAENLAETPGDARASASSLLISETFVSLQGEGELTGTESVFIRTSGCNLRCWFCDTPYASWKPEGTSQSIESLLHLVAESGVKHVVLTGGEPLIAKGMVSLVDQLRAAGNHVTIETAGTVDPGVSCDLLSLSPKLRASTPDAADHARWAKLHAERRLPIDTMKQLIRSAKATQVKFVVDSSEEMAEIDEVVGQLAVPAHSVWLMPQGISVEQLDAARPWLEPLAESRGYRYCDRMQIRWYGNRRGT

SEQ ID NO: 33631 - protein, 257 aa, Rhodopirellula baltica
  REGION 1..257: note = sp|Q7UVG8|QUEE_RHOBA 7-carboxy-7-deazaguanine synthase OS=Rhodopirellula baltica (strain DSM 10527 / NCIMB 13988 / SH1) OX=243090 GN=queE PE=3 SV=1
MKSVDHPVDVLPAEHSAETPGDARASESSLLISETFVSRQGEGELTGTESVFIRTSGCNLRCWFCDTPYASWKPEGTRQTIEDLLQLVAKSGVKHVVLTGGEPLIAKGIVSLIDQLRSAGNHVTIETAGTVDPGARCDLLSLSPKLRASTPDAKDHPRLAKMHAERRLPINTMKQLIQSAEATQVKFVVDSADELPEIDEVVRQLEIAADAVYLMPQGISVEQLDAARPWLEPMAISRGYQYCDRMQIRWFGNRRGT

SEQ ID NO: 33632 - protein, 257 aa, Rhodopirellula baltica
  REGION 1..257: note = tr|K5CXN3|K5CXN3_RHOBT 7-carboxy-7-deazaguanine synthase OS=Rhodopirellula baltica SH28 OX=993517 GN=queE; PE = 3 SV=1
MKSVDHPVDVLPAEHSAETPGDARASASSLLISETFVSRQGEGELTGTESVFIRTSGCNLRCWFCDTPYASWKPEGTRQTIENLLQLVAESGVKHVVLTGGEPLIAKGIVSLIDQLRSAGNHVTIETAGTVDPGARCDLLSLSPKLRASTPDAKDHPRLAKMHAERRLPIDTMKQLIQSAEATQVKFVVDSADELPEIDEVVRQLEIAADAVYLMPQGISVEQLDAARPWLEPMAISRGYQYCDRMQIRWYGNRRGT

SEQ ID NO: 33633 - protein, 278 aa, unidentified
  source 1..278: note = Rhodopirellula europaea
  REGION 1..278: note = tr|M2A7H9|M2A7H9_9PLAN 7-carboxy-7-deazaguanine synthase OS=Rhodopirellula europaea 6C OX=1263867 GN=queE; PE = 3 SV=1
MSRKEAVSLTWFGSLLETRCRLKSVDHPVDVLPAEDSAETPGDSCAPASSLLISETFVSRQGEGELTGTESVFIRTSGCNLRCWFCDTPYASWKPEGARLTVDDLLQLVADSGVKHVVLTGGEPLIAKGIVSLIDQLRVAGNHVTIETAGTVDPGVRCDLLSLSPKLRASTPDEKDHPRWAKLHAERRLPINTMKQLIQSAEATQVKFVVDSADELPEIDEVVRQLEISADSVYLMPQGISVEQLDTARPWLEPMATLRGYQYCDRMQIRWYGNRRGT

SEQ ID NO: 33634 - protein, 272 aa, unidentified
  source 1..272: note = Rhodopirellula europaea
  REGION 1..272: note = tr|M5SA91|M5SA91_9PLAN 7-carboxy-7-deazaguanine synthase OS=Rhodopirellula europaea SH398 OX=1263868; GN = queE PE=3 SV=1
MSLTWFGSLLETRCRLKSVDHPVDVLPAEDSAETPGDSCAPASSLLISETFVSRQGEGELTGTESVFIRTSGCNLRCWFCDTPYASWKPEGTRQTVDDLLQLVADSGVKHVVLTGGEPLIAKGIVSLIDQLRVAGNHVTIETAGTVDPGVQCDLLSLSPKLRASTPDEKDHPRWAKLHAERRLPIGTMKQLIQSAEATQVKFVVDSADELPEIDEVVRQLEISADSAYLMPQGISVEQLDTARPWLEPMATLRGYQYCDRMQIRWYGNRRGT

SEQ ID NO: 33635 - protein, 272 aa, unidentified
  source 1..272: note = Rhodopirellula islandica
  REGION 1..272: note = tr|A0A0J1B800|A0A0J1B800_RHOIS 7-carboxy-7-deazaguanine synthase OS=Rhodopirellula islandica OX=595434 GN=queE PE=3 SV=1
MSLTWFGSLLETRCRLKSVDQSVDVLPAEDSAETPGDPRARPSTLLISETFVSRQGEGQLTGTNSVFIRTSGCNLRCWFCDTPYASWKPEGAPQTIESLLNLVADSEANHVVLTGGEPLIAKGIVGLTDRLRAAGNHVTIETAGTVDPGVRCDLLSLSPKLRASTPDEKEHPRWAKLHSERRLPIDTMKQLIRSADATQVKFVVDSAEELAEIDEVVGQLGVDADLVWLMPQGISVEQLDAVRPWLEPMAESRGYRYCDRMQIRWYGNRRGT

SEQ ID NO: 33636 - protein, 213 aa, unidentified
  source 1..213: note = Rhodopirellula maiorica
  REGION 1..213: note = tr|M5RZD2|M5RZD2_9PLAN 7-carboxy-7-deazaguanine synthase OS=Rhodopirellula maiorica SM1 OX=1265738 GN=queE; PE = 3 SV=1
MTGTNSFFVRTSGCNLRCWFCDTPYASWRPEGDRVSIATLVESISESGVRHVVLTGGEPLLPKESVLLCEMLRARGHHITIETAGTIDREIACDLMSISPKFRTSAPDADQHPRWNELHEQRRMPIGTMQMLIQQSADYQVKFVVDGERDLQELQEIISQLGVPATKVWVMPQGVSNDELDKAATWLRPWTAERGFQYCDRMQIRWYGNRRGT

SEQ ID NO: 33637 - protein, 320 aa, unidentified
  source 1..320: note = Rhodopirellula sallentina
  REGION 1..320: note = tr|M5UJ27|M5UJ27_9PLAN 7-carboxy-7-deazaguanine synthase OS=Rhodopirellula sallentina SM41 OX=1263870; GN = queE PE=3 SV=1
MVKRVERLKEREHAVPALLYPDISLRKGATACADNGAGPHHVSEPSTPTPRSASPATQNRRLRIAETFTSLQGEGRLTGVPSFFIRTSGCNLRCWFCDTPYASWNPEGDRLSIESLVNAAVESSISPDAAALPTDGSIDDPDSAHATGPANAPIAVRHVVLTGGEPLVAAGFPELAAALREAGMHVTVETAGTVDVDFPCNLLSLSPKLRASRPDPEAHPKWSRRHEERRMPVATMRSLIERSPAVQVKFVVDSPEEFGEIEEVVTDLRIDAADVWIMPQGVSVEQLDDAAKWLTPWASQQGYQYCDRMQIRWYGNRRGT

SEQ ID NO: 33638 - protein, 293 aa, Rhodopirellula sp.
  REGION 1..293: note = tr|M5SVJ2|M5SVJ2_9PLAN 7-carboxy-7-deazaguanine synthase OS=Rhodopirellula sp. SWK7 OX=595460 GN=queE PE=3; SV = 1
MVKRFEILKEREQGVPALLYPDATSRKGDSAPSDASLVASNTRLRIAETFTSRQGEGRLTGVPSFFIRTSGCNLRCWFCDTPYASWNPEGERFTIDSLLNDAQNASMPMADDRATDEDSSRGTETSIRVQHVVLTGGEPLIAAGFPELATTLQNAGFHVTVETAGTVDVDFHCDLLSLSPKLRGSTPDAAEHPKWSQTHEERRMPVTTMRQLISRSPNVQVKFVVDSPDEFDEILGVVADLEVAASDVWIMPQGVTVEQLDAAATWLAPWASEHEFEYCDRMQIRWYGNRRGT

SEQ ID NO: 33639 - protein, 213 aa, Rhodopirellula sp.
  REGION 1..213: note = tr|A0A255R871|A0A255R871_9PLAN 7-carboxy-7-deazaguanine synthase OS=Rhodopirellula sp. MGV OX=2023130 GN=queE PE=3 SV=1
MTGTDSFFIRTSGCNLRCWFCDTPYASWNPSGETQSVRQLLDAAKHSGTRHVVLTGGEPLLPSSIESLCRALFQQDFHVTIETAGTIDKPIACDLLSLSPKLADSTPDADKHPRWSQLHEARRMPIDTMRRLIDAAKDFQLKFVVSSQEQFREIDSIVKALAITANDVYIMPQGVTVEAMDKAQQELRPTTEASGYQYCDRMQIRWYGNRRGT

SEQ ID NO: 33640 - protein, 243 aa, Rhodoplanes sp.
  REGION 1..243: note = tr|A0A127EVF3|A0A127EVF3_9RHIZ 7-carboxy-7-deazaguanine synthase OS=Rhodoplanes sp. Z2-YC6860 OX=674703 GN=queE PE=3 SV=1
MKETIRISEIFGPTVQGEGPLIGRPAVFVRTGGCDYRCAWCDTLYAVLPEYRSEWTPMTPEQIVARIDDLTAGHPIPVTLTGGNPATQPLEPLIELGRARGHGFAVETQGSVAAPWFAALDWLILSPKPPSSGMTTDWDALDACLGAAGQGPRVVLKVVVFDDADFAYAKDLSSRHPTLPVYLQVGNPAPLIAADGRQSEDADMDDLGARLRWLIGRVTDDRWFSATVLPQLHVLAWGNRRGV

SEQ ID NO: 33641 - protein, 210 aa, Rhodopseudomonas faecalis
  REGION 1..210: note = tr|A0A318TKQ1|A0A318TKQ1_9BRAD 7-carboxy-7-deazaguanine synthase OS=Rhodopseudomonas faecalis OX=99655 GN=queE PE=3 SV=1
MSYAVKEIFLTLQGEGAQAGRAAVFCRFSGCNLWSGREQDRGKADCQFCDTDFVGTDGTLGQRYQNAAELAEAIAAQWLGAEAERYVVLTGGEPLLQVDAALIDALHDLGFSVGLETNGTMLPPDGIDWICVSPKAGTELVLQHGDELKLVFPQAGAEPERFARLPFEYFSLQPLDGPDAAAHTQAAIDYCLHHPQWRLSVQTHKVIGIR

SEQ ID NO: 33642 - protein, 210 aa, Rhodopseudomonas palustris
  REGION 1..210: note = tr|Q2J0V2|Q2J0V2_RHOP2 7-carboxy-7-deazaguanine synthase OS=Rhodopseudomonas palustris (strain HaA2); OX = 316058 GN=queE PE=3 SV=1
MSYAVKEIFLTLQGEGAHAGRASVFCRFAGCNLWTGREQDRHDAVCQFCDTDFVGTDGTLGGRYGDAGKLADTIAAQWVGADTDRYVVITGGEPLLQLDAELIDALHKQGFEVGVETNGTIEPPAGIDWLCVSPKAGTQIRVQCGNELKLVYPQPDAMPEQFTSLDFERFSLQPMDGPDRDDNTRRAIDYCLRHPQWRLSVQTHKVIGIR

SEQ ID NO: 33643 - protein, 210 aa, Rhodopseudomonas palustris
  REGION 1..210: note = tr|E6VGE8|E6VGE8_RHOPX 7-carboxy-7-deazaguanine synthase OS=Rhodopseudomonas palustris (strain DX-1); OX = 652103 GN=queE PE=3 SV=1
MSYAVKEIFLTLQGEGAHAGRAAVFCRFAGCNLWTGREQDRDEATCKFCDTDFIGTDGTLGGRYAGAELLADTIAEQWTGDPRKRYVVITGGEPLLQLDGELIAALHTRGFAIGVETNGTIEPPDGIDWLCVSPKAGAELRIRRGDELKLVYPQPGAMPEQFAALDFERFSLQPMDGPERDDNTTRAIAYCLMHPQWRLSLQTHKITGIR

SEQ ID NO: 33644 - protein, 210 aa, unidentified
  source 1..210: note = Rhodopseudomonas pentothenatexigens
  REGION 1..210: note = tr|A0A336JLH3|A0A336JLH3_9BRAD 7-carboxy-7-deazaguanine synthase OS=Rhodopseudomonas pentothenatexigens OX=999699 GN=queE PE=3 SV=1
MSYAVKEIFLTLQGEGAHAGRAAVFCRFAGCNLWSGRDQDRDEATCKFCDTDFVGTDGTLGGRYADAALLADVIAAQWTGSARDRYVVITGGEPLLQLDAELIDALHARGFEIGVETNGTIEPPAGIDWLCVSPKAGAELRIRRGDELKLVYPQPGAMPDQFAALDFARFSLQPMDGPDRDDNTTRAIAYCLQHPQWRLSLQTHKVTGIR

SEQ ID NO: 33645 - protein, 210 aa, unidentified
  source 1..210: note = Rhodopseudomonas pseudopalustris
  REGION 1..210: note = tr|A0A1H8NY52|A0A1H8NY52_9BRAD 7-carboxy-7-deazaguanine synthase OS=Rhodopseudomonas pseudopalustris OX=1513892 GN=queE PE=3 SV=1
MSYAVKEIFLTLQGEGAHAGRASVFCRFAGCNLWTGREQDRDQAVCRFCDTDFVGTDGTLGGRYTDAGELAGAIAAQWAGAEVDRYVVITGGEPLLQLDAELIAALQKQGFAIGVETNGTIEPPPGIDWLCVSPKAGAELRVKRGNELKLVYPQPGAMPEQFAALDFERFSLQPMDGPARDEHTRLAIAYCLRHPQWRLSVQTHKTIGIR

SEQ ID NO: 33646 - protein, 210 aa, Rhodopseudomonas sp.
  REGION 1..210: note = tr|A0A0N1BX34|A0A0N1BX34_9BRAD 7-carboxy-7-deazaguanine synthase OS=Rhodopseudomonas sp. AAP120 OX=1523430 GN=queE PE=3 SV=1
MSYAVKEIFLTLQGEGAHAGRASVFCRFAGCNLWTGREQDRDQAVCKFCDTDFVGTDGTLGGRYADADQLAAVIAAQWIGDDHDRYVVITGGEPLLQLDAELIDALHKQGFAIGVETNGTIEPPHGIDWVCVSPKAGAPLRVQRGNELKLVYPQAGAMPDQFHHLAFERFALQPMDGPRQLDNTREAIDYCLRHPQWRLSVQTHKVIGIR

SEQ ID NO: 33647 - protein, 246 aa, unidentified
  source 1..246: note = Rhodospirillaceae bacterium
  REGION 1..246: note = tr|A0A1Z8LM52|A0A1Z8LM52_9PROT 7-carboxy-7-deazaguanine synthase OS=Rhodospirillaceae bacterium TMED8 OX=1986645 GN=queE PE=3 SV=1
MKKYKYSECFLSIQGEGKYTGVPSVFLRFWGCNFTCEGFKCDTEYSWHKDYNHMLKRASAGELMCEIEKLCPAFTETYHLVITGGEPMLSQSAFVEILYLLEKNGNLPSYVTIETNGTQMPRLAAAESISDVRELLWSVSPKLSISGENWINAIQPDVVAAYAEISKCGQLKYVVDGSAKCWDEVEIATQAFRDAGVEFPVWIMPVGATTEQLSQNQEQICIDTVTRGYNFSPRAHAWIFGDKPGT

SEQ ID NO: 33648 - protein, 209 aa, unidentified; identical to SEQ ID NO: 31350
  source 1..209: note = Rhodospirillaceae bacterium
  REGION 1..209: note = tr|A0A357V077|A0A357V077_9PROT 7-carboxy-7-deazaguanine synthase OS=Rhodospirillaceae bacterium OX=1898112 GN=queE PE=3 SV=1

SEQ ID NO: 33649 - protein, 211 aa, unidentified
  source 1..211: note = Rhodospirillales bacterium
  REGION 1..211: note = tr|A0A1G3I8N0|A0A1G3I8N0_9PROT 7-carboxy-7-deazaguanine synthase OS=Rhodospirillales bacterium RIFCSPLOWO2_12_FULL_58_28 OX=1802022 GN=queE; PE = 3 SV=1
MSYAVKEMFYSLQGEGAQSGRAAVFCRFAGCNLWSGREDDRASATCSFCDTDFIGVDGGGGGRFRTADKLARAAFALWPKTTTGRPMVVCTGGEPFLQLDKKLIAAFHDAGFEVAAETNGALPAPDGLDWVCVSPKAGSNLVLTAGDELKLVYPQPDADPRWYENLDFRHFFLQPMDGAELAKNTESAMRFCLERPKWRLSLQIQKQLGIR

SEQ ID NO: 33650 - protein, 241 aa, unidentified
  source 1..241: note = Rhodospirillales bacterium
  REGION 1..241: note = tr|A0A259MHI2|A0A259MHI2_9PROT 7-carboxy-7-deazaguanine synthase OS=Rhodospirillales bacterium 39-66-50 OX=1970570 GN=queE PE=3 SV=1
MSTIRISEIFGPTVQGEGALIGKPTVFVRTGGCDYRCSWCDTLYAVLPEYRHDWRPLTPDAILAKVDALTGGTPVLVTISGGNPAIQPLGPLIEQGHARGHRFAMETQGSVAAGWFATLDHLVLSPKPPSSGMDTDWSAFDACLAAAAGGPHTVLKVAVFDEADYAFARAAAARHPSLPVYLSVGNHTPGEPNEAGRDGVDQKGLMARFRWLVDRVGQDRWFAATVLPQLHVLAWGNERGV

SEQ ID NO: 33651 - protein, 235 aa, Rhodospirillum rubrum
  REGION 1..235: note = sp|Q2RSY6|QUEE_RHORT 7-carboxy-7-deazaguanine synthase OS=Rhodospirillum rubrum (strain ATCC 11170 / ATH 1.1.1 / DSM 467 / LMG 4362 / NCIB 8255 / S1) OX=269796; GN = qu eE PE=3 SV=1
MFGRNPARGPDPGDGESLWIQEVFYTLQGEGPFSGQPSVFVRTAGCNLRCAWCDTDFESSAWKPPLPELLAVIDSRRPRVCDLVVLTGGEPLRQEVGPLVRALLARGLRVQIETNGTLWRDLPFGPGLSIVCSPKTRTLDPQLVPRIDAFKYVIAAGETDPTDGLPALSTQHPGRAERLFRPPPGVPVFVMPRDDHGTPARPGRGEDDNLAEAAASALRFGYRLCVQVHKILKIA

SEQ ID NO: 33652 - protein, 209 aa, Rhodothalassium salexigens
  REGION 1..209: note = tr|A0A4R2PVG8|A0A4R2PVG8_RHOSA 7-carboxy-7-deazaguanine synthase OS=Rhodothalassium salexigens DSM 2132 OX=1188247 GN=queE PE=3 SV=1
MAYAVKELFLTLQGEGGQAGRPAVFCRFAGCNLWSGREADRAGAVCRFCDTDFVGTDGQNGGRYAGPDLVAAAAALWPAGRDRRLVVCTGGEPLLQLDAALIARFHDAGFEVAVESNGTVAAPAGIDWLCVSPKAGAPLVQTRGQELKLVYPQPGAEPERFADLDFAHRFLQPMDGPALADNTRQAIAYCLANPRWRLSVQTHKVLGID

SEQ ID NO: 33653 - protein, 233 aa, unidentified
  source 1..233: note = Rhodothermaceae bacterium
  REGION 1..233: note = tr|A0A2E3R1H8|A0A2E3R1H8_9BACT 7-carboxy-7-deazaguanine synthase OS=Rhodothermaceae bacterium OX=2026787 GN=queE PE=3 SV=1
MAASPAGPKRYAVKALWRTVQGEGTQAGRAAVFVRLAGCNLWSGFEADRTRDAARSGADCPLWCDTEFTPPGAVKLSAADLARAAAEAGGAVRFCVLTGGEPLLQADAALLRALHAEGFVVAVETNGTQRLADAFGEDPADHPDWVVCSPKLPEAQLPLEACDELKLVVPDYRPEAYASMATRVREHAGRRALWLQPEDGPRLTEATRLALDLVFQDPRWRVSVQTHKALGVD

SEQ ID NO: 33654 - protein, 192 aa, unidentified
  source 1..192: note = Rhodothermaceae bacterium
  REGION 1..192: note = tr|A0A424HNK7|A0A424HNK7_9BACT 7-carboxy-7-deazaguanine synthase OS=Rhodothermaceae bacterium TMED105 OX=1986665 GN=queE PE=3 SV=1
MEHFYTIQGEGAHTGRAAYFIRLAGCDVGCSWCDVKESWQEEGHPILSIQTLVDAVVESGAKMVVITGGEPLLHDLDPLTDALQACNISLHIETSGSSPFSGTFDWVTLSPKKFKHPVPDVYPIVAELKVVVVNQKDFQWAEQHAAMCPESTQLYLQPEWQTPQAMGWIVNYVKEHPHWNISLQTHKYLDVP

SEQ ID NO: 33655 - protein, 193 aa, unidentified
  source 1..193: note = Rhodothermaeota bacterium
  REGION 1..193: note = tr|A0A2A5X396|A0A2A5X396_9BACT 7-carboxy-7-deazaguanine synthase OS=Rhodothermaeota bacterium MED-G19 OX=1986240 GN=queE PE=3 SV=1
MESFYSIQGEGFHSGKPAYFIRLSGCDVNCHWCDVKESWKISKDQYMHIDDIVKKVSKSCADIVVITGGEPLMHDLTILTKTLKDNDKKVHIETSGTHSLKGDYDWICFSPKKFKEPLEDFFSISDELKVIIYNRSDFKWAEELSKKVSQKTELIMQPEWSKEELISPLILDYIKSNPKWRISVQTHKYLNVQ

SEQ ID NO: 33656 - protein, 203 aa, unidentified
  source 1..203: note = Rhodothermaeota bacterium
  REGION 1..203: note = tr|A0A2A5XB53|A0A2A5XB53_9BACT 7-carboxy-7-deazaguanine synthase OS=Rhodothermaeota bacterium MED-G18 OX=1986239 GN=queE PE=3 SV=1
MKRGSKNLPVMESFYSIQGEGYHSGKPAYFVRLAGCDVKCSWCDVKDSWSNSADQFVHVQDIVKEINQYSTDLVIITGGEPFFHDLGPLTNLLKENGKMVHVETSGTEKFSGEFDWICLSPKRFKKPLENFYEISDELKVIIYQDSDFRWAERISSRMKKDTKRLLQPEWSVENTVNPKILNFIKENPKWRISLQTHKYLKVD

SEQ ID NO: 33657 - protein, 233 aa, Rhodothermus marinus
  REGION 1..233: note = tr|D0MDN0|D0MDN0_RHOM4 7-carboxy-7-deazaguanine synthase OS=Rhodothermus marinus (strain ATCC 43812 / DSM 4252 / R-10) OX=518766 GN=queE PE=3 SV=1
MRSYRVKEIWKTLQGEGFFAGRPAVFVRFVGCNLWSGRDEDRARDARRTGADCPRWCDTDFRKEGSRAYTADELVAAMQEVGGPIQFCVLTGGEPLLQLDAALMRALKAAGYFVAIETNGTISLREACTDPETGQVVAPDWIVCSPKLPEDRLALEYFDELKLVVPDYRPEQYARFARRARPHRVGGRRIPLLWLQPEDGPRLAEAQRCAVELALAHPDWRVSVQTHKILGVP

SEQ ID NO: 33658 - protein, 233 aa, Rhodothermus marinus
  REGION 1..233: note = tr|G2SH20|G2SH20_RHOMG 7-carboxy-7-deazaguanine synthase OS=Rhodothermus marinus (strain SG0.5JP17-172); OX = 762570 GN=queE PE=3 SV=1
MRSYRIKAIWKTLQGEGFFAGRPAVFVRFVGCNLWSGRDEDRARDARRTGADCPRWCDTDFRKEGSRAYTADELVAAMQEVGGPIQFCVLTGGEPLLQLDAALMRALKAAGYFVAIETNGTISLREACTDPETGQVVAPDWIVCSPKLPEDRLALEYFDELKLVVPDYRPEQYARFARRARPHRVGGRRIPLLWLQPEDGPRLAEAQRCAVELALAHPDWRVSVQTHKILGVP

SEQ ID NO: 33659 - protein, 233 aa, Rhodothermus profundi
  REGION 1..233: note = tr|A0A1M6VWD0|A0A1M6VWD0_9BACT 7-carboxy-7-deazaguanine synthase OS=Rhodothermus profundi; OX = 633813 GN=queE PE=3 SV=1
MPTYRVKAIWKTLQGEGFFAGRPAVFVRFVGCNLWSGQERDRERDAQRTGADCPRWCDTDFRKAGSRPYTADELVAALQEVGGPIRFCVLTGGEPLLQLDASLMHALQAAGYFVAIETNGTVSLRQACTDPETGQLVAPDWIVCSPKLPEDRLALEYFDELKLIVPDYRPEQYARFARRARPHRVGGRRIPLLWLQPEDGPRLAEAQRCAVELALAHPEWRVSVQIHKVLGVD

SEQ ID NO: 33660 - protein, 219 aa, Rhodovarius sp.
  REGION 1..219: note = tr|A0A437MEE5|A0A437MEE5_9PROT 7-carboxy-7-deazaguanine synthase OS=Rhodovarius sp. CCP-6; OX = 1979269 GN=queE PE=3 SV=1
MSYAVKEIFYTLQGEGAQAGRPAVFCRFTGCNLWSGREEDRAEAVCRFCDTDFVGMDGTAGGRYPDAAALADTIAAHWPGGGAAPGSTAGGRPFVVCTGGEPLLQLDEPLVEALHARGFEVAVETNGTIAPAPAGLDWICVSPKAGAELRLTSGHELKLVIPQPGIDLEAMEKLDFQRFSLQPMDGADAERNTRSALELCLARPQWQLSLQTHKMLDIR

SEQ ID NO: 33661 - protein, 213 aa, unidentified
  source 1..213: note = Richelia intracellularis
  REGION 1..213: note = tr|M1X212|M1X212_9NOST Queuosine Biosynthesis QueE Radical SAM OS=Richelia intracellularis HM01 OX=1165095; GN = RINTHM_15680 PE=4 SV=1
MPEICRIENTPGLRDFQNHLNPVTPEKLLAWVQQQNKPFIHDSISLTGGETLIHTLFLIKFLPQVRDLTKLPIYLETGGHRPQQLAQLIPHLDLVGMDIKLPSVSGENHWQAHKEFLKLCYESKLEVFVKIIVSKNTELMDLKIAGEIVRNVNPGSPIFLQPVTPLDTPTGSINHNLISSPSPKQILMWQVLMKEFVKEVRVLPQTHKILNQL

SEQ ID NO: 33662 - protein, 267 aa, unidentified
  source 1..267: note = Richelia intracellularis
  REGION 1..267: note = tr|M1X0I5|M1X0I5_9NOST 7-carboxy-7-deazaguanine synthase OS=Richelia intracellularis HH01 OX=1165094; GN = queE PE=3 SV=1
MNIRNINQEHSAHLIEVFSGIQGEGLNVGTRQIFIRFALCDLRCHFCDSSNTWKMPEICRIENTPGLRDFQNHLNPVTPEKLLTWVQQQNKPFIHDSISLTGGETLIHTLFLIKFLPQVRDLTKLPVYLETGGHRPQQLAQLIPHLDLVGMDIKLPSVSGENHWQAHKEFLKLCYESKLEVFVKIIVSKNTELMDLKIAGEIVRNVNPGSPIFLQPVTPLDTPTGSINHNLISSPSPKQILMWQVLMKEFVKEVRVLPQTHKILNQL

SEQ ID NO: 33663 - protein, 267 aa, unidentified
  source 1..267: note = Richelia sp.
  REGION 1..267: note = tr|A0A3B9F723|A0A3B9F723_9NOST 7-carboxy-7-deazaguanine synthase OS=Richelia sp.; OX = 2053605 GN=queE PE=3 SV=1
MNIRNINQEHSAHLLEVFSGIQGEGLNVGTRQIFIRFALCDLRCHFCDSSNTWKMPEICRIENTPGLRDFQNHLNPVTPEKLLTWVQQQNKPFIHDSISLTGGETLIHTLFLIKFLPQVRDLTKLPVYLETGGHRPQQLAQLIPHLDLVGMDIKLPSVSGENHWQAHKEFLKLCYESKLEVFVKIIVSKNTELMDLKIAGEIVRNVNPGSPIFLQPVTPLDTPTGSINHNLISSPSPKQILMWQVLMKEFVKEVRVLPQTHKILNQL

SEQ ID NO: 33664 - protein, 225 aa, Rickettsia africae
  REGION 1..225: note = tr|C3PP48|C3PP48_RICAE 7-carboxy-7-deazaguanine synthase OS=Rickettsia africae (strain ESF-5) OX=347255; GN = nrdG PE=3 SV=1
MFGQNPKRSILNGDGTQLEVQSIFKTIQGEGIFVGCPAIFIRLGGCNLACNFCDTEFEDFDLVDIDKILNKVESLALNSKNEKSINLVVITGGEPMRQPIELLCQKLLDRDVKVQIETNGTLYRSLPKEVSIICSPKVGKTGYSKIREDLLPKISAVKFIVAKNILEYSLIPEVGQTSYNIPVFIQPMDQNNQRLNGENNELAVKLALESGARLSLQTHKFLNIP

SEQ ID NO: 33665 - protein, 225 aa, Rickettsia akari
  REGION 1..225: note = tr|A8GP86|A8GP86_RICAH 7-carboxy-7-deazaguanine synthase OS=Rickettsia akari (strain Hartford) OX=293614; GN = queE PE=3 SV=1
MFGQNPKRSILNGDGTTLEVQSIFKTIQGEGLFVGGPAIFIRLGGCNLACNFCDTEFEDFKLVDIVEILNKVESLALNSKNERAINLVVITGGEPMRQPIELLCQKLLDQDFKVQIETNGTLYRALPNEVYIICSPKAGKTGYSKIREDLLSQISAVKFIVAKNILEYNFIPEVGQTSYNIPVFIQPMDQNNQRLNDENNELAVKLALESGARLSLQTHKILGIE

SEQ ID NO: 33666 - protein, 225 aa, unidentified
  source 1..225: note = Rickettsia amblyommatis
  REGION 1..225: note = tr|A0A0F3QH68|A0A0F3QH68_RICAM 7-carboxy-7-deazaguanine synthase OS=Rickettsia amblyommatis str. Darkwater OX=1359166 GN=queE PE=3 SV=1
MFGQNPKRSILNGDGTKLEVQSIFKTIQGEGIFVGYPAIFIRLGGCNLACNFCDTEFEDFDLVDIDKILNKVESLALNSKNEKSINLVVITGGEPMRQPIELLCQKLLDRDVKVQIETNGTLYRSLPKEVSIICSPKAGKTGYSKIREDLLPKISAVKFIVAKHILEYSLIPEVGQTSYNIPVFIQPMDQNDQRLNGENNELAVKLALESGAILSLQTHKFLNIP

SEQ ID NO: 33667 - protein, 225 aa, unidentified; identical to SEQ ID NO: 33666
  source 1..225: note = Rickettsia amblyommatis
  REGION 1..225: note = tr|H8K2M2|H8K2M2_RICAG 7-carboxy-7-deazaguanine synthase OS=Rickettsia amblyommatis (strain GAT-30V); OX = 1105111 GN=queE PE=3 SV=1

SEQ ID NO: 33668 - protein, 225 aa, unidentified; identical to SEQ ID NO: 33664
  source 1..225: note = Rickettsia argasii
  REGION 1..225: note = tr|A0A0F3RF57|A0A0F3RF57_9RICK 7-carboxy-7-deazaguanine synthase OS=Rickettsia argasii T170-B OX=1268837 GN=queE PE=3 SV=1

SEQ ID NO: 33669 - protein, 225 aa, unidentified
  source 1..225: note = Rickettsia asembonensis
  REGION 1..225: note = tr|A0A0C2MN13|A0A0C2MN13_9RICK 7-carboxy-7-deazaguanine synthase OS=Rickettsia asembonensis OX=1068590 GN=queE PE=3 SV=1
MFGQNPKRSILNGDGTKLEVQSIFKTIQGESIFVGCPAIFIRLGGCNLACNFCDTEFEDFELVDIAEILNKVESLALNSKNEKSINLVVITGGEPMRQPIELLCQKLLDQNLKIQIETNGTLYRSLPNEVSIICSPKAGKNGYSKIREDLLPKISAVKFIVAKNILEYNFIPEVGQTSYNIPVFIQPMDQNDQRLNAENNELAVKLALESGARLSLQTHKFLGIE

SEQ ID NO: 33670 - protein, 225 aa, Rickettsia asiatica
  REGION 1..225: note = tr|A0A510G806|A0A510G806_9RICK 7-carboxy-7-deazaguanine synthase OS=Rickettsia asiatica; OX = 238800 GN=queE PE=3 SV=1
MFGQNPKRSILNGDGTKLEVQSIFKTIQGEGIFVGCPAIFIRLGGCNLACNFCDTEFEDFELVDIDKILNKVEGLVLNSKNEKSINLVVITGGEPMRQPIELLCWKLLDLDFKVQIETNGTLYRSLPNEVSIICSPKAGKNGYSKIREDLLPKISAVKFIVAKNIMEYSFIPEVGQIAYNIPVFIQPMDQNDQRLNDENNELAVKLVLESGARLSLQTHKFLGIE

SEQ ID NO: 33671 - protein, 225 aa, Rickettsia australis
  REGION 1..225: note = tr|H8K6U9|H8K6U9_RICAC 7-carboxy-7-deazaguanine synthase OS=Rickettsia australis (strain Cutlack); OX = 1105110 GN=queE PE=3 SV=1
MFGQNPKRSILNGDGTKLEVQSIFKTIQGEGIFVGCPAIFIRLGGCNLACNFCDTEFEDFKLVDIVEILNKVESLALNSTNERSINLVVITGGEPMRQPIELLCQKLLDQDFKVQIETNGTLYRSLPNEVYIICSPKAGKTGYSKIREDLLSQISALKFIVAKNILEYNFIPEVGQTSYNIPVFIQPMDQNNQRLNDENNELVVKLALESGARLSLQTHKILGIE

SEQ ID NO: 33672 - protein, 225 aa, Rickettsia bellii
  REGION 1..225: note = tr|A0A0F3QC75|A0A0F3QC75_RICBE 7-carboxy-7-deazaguanine synthase OS=Rickettsia bellii str. RML An4 OX=1359193 GN=queE PE=3 SV=1
MFGQNPKRGVLKGDGTQLQVQFIFKTIQGEGIFVGVPAIFIRLGGCNLACDFCDTEFENFETIKIDDILSKVNLLALNSKNEQSVKLVVITGGEPMRQPIELLCQKLLEQDFKVQIETNGTLYRSLPDEVSIICSPKAGKKGYSKIMEDLLPKISAVKFIIAKNILEYSLIPEIGQTAYNIPVFVQPMDQNDQKLNKENNELAVKLALESGARLSVQTHKFIGIE

SEQ ID NO: 33673 - protein, 225 aa, Rickettsia bellii
  REGION 1..225: note = tr|A0A0F3QJI8|A0A0F3QJI8_RICBE 7-carboxy-7-deazaguanine synthase OS=Rickettsia bellii str. RML Mogi OX=1359194 GN=queE PE=3 SV=1
MFGQNPKRGVLKGDGTQLQVQFIFKTIQGEGIFVGVPAIFIRLGGCNLACDFCDTEFENFETIKIDDILSKVNLLALNSKNEQSVKLVVITGGEPMRQPIELLCQKLLEQDFKVQIETNGTLYCSLPDEVSIICSPKAGKKGYSKIREDLLPKISAVKFIIAKNILEYSLIPEIGQTAYNIPVFVQPMDQNDQKLNKENNELAVKLALESGARLSVQTHKFIGIE

SEQ ID NO: 33674 - protein, 225 aa, unidentified
  source 1..225: note = Rickettsia buchneri
  REGION 1..225: note = tr|A0A067AJQ9|A0A067AJQ9_9RICK 7-carboxy-7-deazaguanine synthase OS=Rickettsia buchneri; OX = 1462938 GN=queE PE=3 SV=1
MFGQNPKRSILNGDGTKLEVQSIFKTIQGEGIFVGCPAIFIRLGGCNLACNFCDTEFEDFDLVDIDKILNKVEILALNSKNEKSINLVVITGGEPMRQPIELLCHKLLDLDFKVQIETNGTLYRSLPKGVSIICSPKAGKTGYSKIRENLLPKISAVKFIVAKNILEYSIIPEVGQTSYNIPVFIQPMDQNNQRLNDENNELAVKLALESGARLSLQTHKFLNIP

SEQ ID NO: 33675 - protein, 225 aa, Rickettsia canadensis
  REGION 1..225: note = tr|A8EY63|A8EY63_RICCK 7-carboxy-7-deazaguanine synthase OS=Rickettsia canadensis (strain McKiel); OX = 293613 GN=rpmI PE=3 SV=1
MFGQNPKRSILNGDGTKLEVKSIFKTIQGEGIFVGSPAIFVRLGGCNLACHFCDTEFEDFDLVDITEILNKVESLALNSKNEKSVNLVVITGGEPMRQPIALLCQKLLDRDFKVQIETNGTLYRSLPNEVSIICSPKAGQTGYSKIREDLLSQISAVKFIVAKNILEYSFIPEVGQTAYNIPVFVQPMDQNNPKLNDENNALAVKLALESGSKLSLQTHKFLGID

SEQ ID NO: 33676 - protein, 225 aa, Rickettsia conorii; identical to SEQ ID NO: 33664
  REGION 1..225: note = tr|Q92H39|Q92H39_RICCN 7-carboxy-7-deazaguanine synthase OS=Rickettsia conorii (strain ATCC VR-613 / Malish 7) OX=272944 GN=queE PE=3 SV=1

SEQ ID NO: 33677 - protein, 225 aa, unidentified
  source 1..225: note = Rickettsia endosymbiont
  REGION 1..225: note = tr|A0A0F3RA26|A0A0F3RA26_9RICK 7-carboxy-7-deazaguanine synthase OS=Rickettsia endosymbiont of Ixodes pacificus OX=1133329 GN=queE PE=3; SV = 1
MFGQNPKRSILNGDGTKLEVQSIFKTIQGEGIFVGCPAIFIRLGGCNLACNFCDTEFEDFDLVDIDKILNKVEILALNSKNEKSINLVVITGGEPMRQPIELLCHKLLDLDFKVQIETNGTLYRSLPKGVSIICSPKAGKTGYSKIRENLLPKISAVKFIVAKNILEYSLIPEVGQTSYNIPVFIQPMDQNDQRLNDENNELAVKLALESGARLSLQTHKFLNIP

SEQ ID NO: 33678 - protein, 225 aa, unidentified; identical to SEQ ID NO: 33664
  source 1..225: note = Rickettsia endosymbiont
  REGION 1..225: note = tr|A0A162VGE4|A0A162VGE4_9RICK 7-carboxy-7-deazaguanine synthase OS=Rickettsia endosymbiont of Proechinophthirus fluctus OX=1462733; GN = queE PE=3 SV=1

SEQ ID NO: 33679 - protein, 225 aa, Rickettsia felis
  REGION 1..225: note = tr|A0A0F3MRL4|A0A0F3MRL4_RICFI 7-carboxy-7-deazaguanine synthase OS=Rickettsia felis str. Pedreira OX=1359196 GN=queE PE=3 SV=1
MFGQNPKRSILNGDGTKLEVQSIFKTIQGEGIFVGCPAIFIRLGGCNLACNFCDTEFEDFKLVDIAEILNKVESLALNSKNEKSINLVVITGGEPMRQPIELLCQKLLDQDFKIQIETNGTLYRSLPNEVSIICSPKAGKNGYSKIREDLLPKISAVKFIIAKNILEYSLIPEVGQTSYNIPVFVQPMDQNDQSLNDENNELAVKLALESGARLSLQTHKFLGIE

SEQ ID NO: 33680 - protein, 225 aa, Rickettsia felis; identical to SEQ ID NO: 33679
  REGION 1..225: note = tr|Q4UMK6|Q4UMK6_RICFE 7-carboxy-7-deazaguanine synthase OS=Rickettsia felis (strain ATCC VR-1525 / URRWXCal2) OX=315456 GN=nrdG PE=3 SV=1

SEQ ID NO: 33681 - protein, 225 aa, Rickettsia heilongjiangensis; identical to SEQ ID NO: 33664
  REGION 1..225: note = tr|G0GYX4|G0GYX4_RICH0 7-carboxy-7-deazaguanine synthase OS=Rickettsia heilongjiangensis (strain ATCC VR-1524 / 054) OX=1032845 GN=queE PE=3 SV=1

SEQ ID NO: 33682 - protein, 225 aa, Rickettsia japonica; identical to SEQ ID NO: 33664
  REGION 1..225: note = tr|G4KL14|G4KL14_RICJY 7-carboxy-7-deazaguanine synthase OS=Rickettsia japonica (strain ATCC VR-1363 / YH); OX = 652620 GN=nrdG PE=3 SV=1

SEQ ID NO: 33683 - protein, 225 aa, Rickettsia japonica; identical to SEQ ID NO: 33664
  REGION 1..225: note = tr|A0A3B7DB67|A0A3B7DB67_RICJA 7-carboxy-7-deazaguanine synthase OS=Rickettsia japonica; OX = 35790 GN=queE PE=3 SV=1

SEQ ID NO: 33684 - protein, 225 aa, Rickettsia massiliae
  REGION 1..225: note = tr|H6QIJ3|H6QIJ3_RICMA 7-carboxy-7-deazaguanine synthase OS=Rickettsia massiliae str. AZT80 OX=1105112; GN = queE PE=3 SV=1
MFGQNPKRSILNGDGTKLEVQSIFKTIQGEGIFVGCPAIFIRLGGCNLACNFCDTEFEDFDLVDIDQILNKVESLALNSKNEKSINLVVITGGEPMRQPIELLCQKLLDRDVKVQIETNGTLYRSLPQEVAIICSPKAGKTGYSKIREELLPKISAVKFIVAKNILEYSLIPEVGQTSYNIPVFIQPMDQNDQRLNGENNELAVKLALESGARLSLQTHKFLNIP

SEQ ID NO: 33685 - protein, 231 aa, Rickettsia massiliae
  REGION 1..231: note = tr|A8F289|A8F289_RICM5 7-carboxy-7-deazaguanine synthase OS=Rickettsia massiliae (strain Mtu5) OX=416276; GN = nrdG PE=3 SV=1
MDNNLKMFGQNPKRSILNGDGTKLEVQSIFKTIQGEGIFVGCPAIFIRLGGCNLACNFCDTEFEDFDLVDIDQILNKVESLALNSKNEKSINLVVITGGEPMRQPIELLCQKLLDRDVKVQIETNGTLYRSLPQEVSIICSPKAGKTGYSKIREELLPKISAVKFIVAKNILEYSLIPEVGQTSYNIPVFIQPMDQNDQRLNGENNELAVKLALESGARLSLQTHKFLNIP

SEQ ID NO: 33686 - protein, 225 aa, unidentified; identical to SEQ ID NO: 33677
  source 1..225: note = Rickettsia monacensis
  REGION 1..225: note = tr|A0A0B7J1C3|A0A0B7J1C3_9RICK 7-carboxy-7-deazaguanine synthase OS=Rickettsia monacensis; OX = 109232 GN=queE PE=3 SV=1

SEQ ID NO: 33687 - protein, 225 aa, Rickettsia montanensis
  REGION 1..225: note = tr|H8KBP7|H8KBP7_RICMS 7-carboxy-7-deazaguanine synthase OS=Rickettsia montanensis (strain OSU 85-930); OX = 1105114 GN=queE PE=3 SV=1
MFGQNPKRSILNGDGTKLEVQSIFKTIQGEGIFVGCPAIFIRLGGCNLACNFCDTEFEDFDLVDIDKILNKVESLALNSKNEKSINLVVITGGEPMRQPIELLCHKLLDRDVKVQIETNGTLYRSLPKEVSIICSPKAGKTGYSKIREDLLPKISAVKFIVAKNILEYSLIPEVGQTSYNIPVFIQPMDQNDQRLNGENKELAVKLALESGARLSLQTHKFLNIP

SEQ ID NO: 33688 - protein, 225 aa, Rickettsia parkeri; identical to SEQ ID NO: 33664
  REGION 1..225: note = tr|A0A0F3QMX6|A0A0F3QMX6_RICPA 7-carboxy-7-deazaguanine synthase OS=Rickettsia parkeri str. Grand Bay OX=1359203 GN=queE PE=3 SV=1

SEQ ID NO: 33689 - protein, 225 aa, Rickettsia peacockii
  REGION 1..225: note = tr|C4K1L2|C4K1L2_RICPU 7-carboxy-7-deazaguanine synthase OS=Rickettsia peacockii (strain Rustic) OX=562019; GN = queE PE=3 SV=1
MFGQNPKRSILNGDGTQLEVQSIFKTIQGEGIFVGCPAIFIRLGGCNLACNFCDTEFEAFDLVDIDKILNKVESLALNSKNEKSINLVVITGGEPMRQPIELLCQKLLDRDVKVQIETNGTLYRSLPKEVSIICSPKVGKTSYSKIREDLLPKISAVKFIVAKNILEYSLIPEVGQTSYNIPVFIQPMDQNNQRLNGENNELAVKLALESGTRLSLQTHKFLNIP

SEQ ID NO: 33690 - protein, 225 aa, unidentified; identical to SEQ ID NO: 33664
  source 1..225: note = Rickettsia philipii
  REGION 1..225: note = tr|H6PUL0|H6PUL0_RICP3 7-carboxy-7-deazaguanine synthase OS=Rickettsia philipii (strain 364D) OX=481009; GN = queE PE=3 SV=1

SEQ ID NO: 33691 - protein, 234 aa, Rickettsia prowazekii
  REGION 1..234: note = sp|Q9ZCV2|QUEE_RICPR 7-carboxy-7-deazaguanine synthase OS=Rickettsia prowazekii (strain Madrid E); OX = 272947 GN=queE PE=3 SV=1
MNQRINSYKMFGHNPKRSILSGDGTKLEVQSIFKTIQGEGIFVGYPSIFIRLGGCNLACNFCDTEFEDFKLIDIDQILNKVKNLSLNSKNAKTINLVVITGGEPMRQPIGLLCQKLLDQDFKVQIETNGTLYRSLPKEVFIVCSPKVGKTGYNKIREDLLPQISAVKFIISKNIVEYSIIPEVGQSAYDIPVFVQSMDQNDKRLNNENNELAVKLALESGARLSLQTHKFLGIE

SEQ ID NO: 33692 - protein, 225 aa, Rickettsia prowazekii
  REGION 1..225: note = tr|D5AXK7|D5AXK7_RICPP 7-carboxy-7-deazaguanine synthase OS=Rickettsia prowazekii (strain Rp22) OX=449216; GN = nrdG PE=3 SV=1
MFGHNPKRSILSGDGTKLEVQSIFKTIQGEGIFVGYPSIFIRLGGCNLACNFCDTEFEDFKLIDIDQILNKVKNLSLNSKNAKTINLVVITGGEPMRQPIGLLCQKLLDQDFKVQIETNGTLYRSLPKEVFIVCSPKVGKTGYNKIREDLLPQISAVKFIISKNIVEYSIIPEVGQSAYDIPVFVQSMDQNDKRLNNENNELAVKLALESGARLSLQTHKFLGIE

SEQ ID NO: 33693 - protein, 225 aa, Rickettsia raoultii
  REGION 1..225: note = tr|A0A126E9Z0|A0A126E9Z0_9RICK 7-carboxy-7-deazaguanine synthase OS=Rickettsia raoultii; OX = 369822 GN=queE PE=3 SV=1
MFGQNPKRSILNGDGTKLEVQSIFKTIQGEGIFVGCPAIFIRLGGCNLACNFCDTEFEDFDLVDIDKILNKVESLALNSKNEKSINLVVITGGEPMRQPIELLCQKLLDRDVKVQIETNGTLYRSLPKEVSIICSPKAGKTGYSKIREDLLPKISAVKFIVAKNILEYSLIPEVGQTSYNIPVFIQPMDQNDQRLNGENNELAVKLALESGARLSLQTHKFLNIP

SEQ ID NO: 33694 - protein, 225 aa, Rickettsia rhipicephali
  REGION 1..225: note = tr|A0A0S2C9E6|A0A0S2C9E6_RICRH 7-carboxy-7-deazaguanine synthase OS=Rickettsia rhipicephali OX=33992 GN=queE PE=3 SV=1
MFGQNPKRSILNGDGTKLEVQSIFKTIQGEGIFVGCPAIFIRLGGCNLACNFCDTEFEDFDLVDIDQILNKVESLALNSKNEKSINLVVITGGEPMRQPIELLCQKLLDRDVKVQIETNGTLYRSLPQEVSIICSPKAGKTGYSKIREELLPKISAVKFIVAKNILEYSLIPEVGQTSYNIPVFIQPMDQNDQRLNGENNELAVKLALESGARLSLQTHKFLNIP

SEQ ID NO: 33695 - protein, 225 aa, Rickettsia rhipicephali; identical to SEQ ID NO: 33684
  REGION 1..225: note = tr|A0A0F3PE67|A0A0F3PE67_RICRH 7-carboxy-7-deazaguanine synthase OS=Rickettsia rhipicephali str. Ect OX=1359199 GN=queE PE=3 SV=1

SEQ ID NO: 33696 - protein, 225 aa, Rickettsia rickettsii; identical to SEQ ID NO: 33664
  REGION 1..225: note = tr|A0A0H3AX85|A0A0H3AX85_RICRS 7-carboxy-7-deazaguanine synthase OS=Rickettsia rickettsii (strain Sheila Smith) OX=392021 GN=queE PE=3 SV=1

SEQ ID NO: 33697 - protein, 225 aa, Rickettsia rickettsii; identical to SEQ ID NO: 33664
  REGION 1..225: note = tr|B0BUI8|B0BUI8_RICRO 7-carboxy-7-deazaguanine synthase OS=Rickettsia rickettsii (strain Iowa) OX=452659; GN = queE PE=3 SV=1

SEQ ID NO: 33698 - protein, 225 aa, Rickettsia sibirica; identical to SEQ ID NO: 33664
  REGION 1..225: note = tr|Q7P969|Q7P969_RICS2 7-carboxy-7-deazaguanine synthase OS=Rickettsia sibirica (strain ATCC VR-151 / 246); OX = 272951 GN=queE PE=3 SV=1

SEQ ID NO: 33699 - protein, 225 aa, Rickettsia slovaca; identical to SEQ ID NO: 33664
  REGION 1..225: note = tr|H8LQ45|H8LQ45_RICSL 7-carboxy-7-deazaguanine synthase OS=Rickettsia slovaca str. D-CWPP OX=1105109; GN = queE PE=3 SV=1

SEQ ID NO: 33700 - protein, 225 aa, Rickettsia sp.
  REGION 1..225: note = tr|A0A1C3EV46|A0A1C3EV46_9RICK 7-carboxy-7-deazaguanine synthase OS=Rickettsia sp. wb; OX = 1851512 GN=queE PE=3 SV=1
MFGQNPKRGILKGDGTELQVHSIFKTIQGEGIFVGVPAIFIRLGGCNLACDFCDTEFEDFKIIKIDDILFKVNLLTLNSKNEQSVKLVVITGGEPMRQPIELLCQKLLKQDFKVQIETNGTLYRSLPDKVSIICSSKAGKNGYSKIREDLLPKISAVKFIIAKNILEYSLIPEIGQTAYNIPVFVQPMDQNDQKLNKENNELAVKLALESGARLSIQTHKFIGIE

SEQ ID NO: 33701 - protein, 225 aa, Rickettsia sp.; identical to SEQ ID NO: 33700
  REGION 1..225: note = tr|A0A249E499|A0A249E499_9RICK 7-carboxy-7-deazaguanine synthase OS=Rickettsia sp. MEAM1 (Bemisia tabaci) OX=1182263 GN=queE PE=3 SV=1

SEQ ID NO: 33702 - protein, 231 aa, Rickettsia typhi
  REGION 1..231: note = tr|Q68WD2|Q68WD2_RICTY 7-carboxy-7-deazaguanine synthase OS=Rickettsia typhi (strain ATCC VR-144 / Wilmington) OX=257363 GN=queE PE=3 SV=1
MNNIVIMFGYNPKRSVLSGDGTKLEVQSIFKTIQGEGIFVGYPSIFIRLGGCNLACNFCDTEFEDFELIDIDQIINKVQNLSLNSKNSKTINLVVITGGEPMRQPIGLLCQKLLDQDFKVQIETNGTLYRSLPKGVFIVCSPKVGKTGYNKIREDLLPQVCAVKFIISKNIIEYSIIPEVGQSAYNIPVFVQSMDQNDKKLNAENNELAVKLALESGARLSLQIHKFLGIE

SEQ ID NO: 33703 - protein, 210 aa, unidentified
  source 1..210: note = Rickettsiales bacterium
  REGION 1..210: note = tr|A0A2E0F8A8|A0A2E0F8A8_9RICK 7-carboxy-7-deazaguanine synthase OS=Rickettsiales bacterium OX=2026788 GN=queE PE=3 SV=1
MYKVKEIFRSIQGEGFHTGKAAVFIRFSGCNLWNGLSKFRKKAVCNFCDTDFVGVDGQNGGNYSLEQLIKKTLEIWRQGRSTKKKFIILTGGEPLLQVDEKLINELKKKNFYIAVETNGTIKTKLKFDWVAVSPKENASWNLKRGDELKVVYPQNKINLKKALDLKFKYFFLQPMANEFKQTNIIKTINYCKSHKPWFPSFQIHKSLGIS

SEQ ID NO: 33704 - protein, 210 aa, unidentified
  source 1..210: note = Rickettsiales bacterium
  REGION 1..210: note = tr|A0A1Z9MWS9|A0A1Z9MWS9_9RICK 7-carboxy-7-deazaguanine synthase OS=Rickettsiales bacterium TMED211 OX=1986869 GN=queE PE=3 SV=1
MFFIKEIFKSIQGEGFFSGKSAVFVRFTGCNLWNGLVKDRENALCQFCDTDFLGTNGQNGGYYSLNDLLNKIDKIWNQKKLTNNKFIVLTGGEPMLQVNKKLVESLKKRGYFVSVETNGTIQFDIDFDWVCVSPKQRTKWKVISGDELKVIFPQQAFDLNMLKKLNFKYFFLQPMDNNKKQINIWNTINYCKSHKPWFPSFQLHKSLNIS

SEQ ID NO: 33705 - protein, 219 aa, unidentified
  source 1..219: note = Rickettsiales endosymbiont
  REGION 1..219: note = tr|A0A4Q7DKS5|A0A4Q7DKS5_9RICK 7-carboxy-7-deazaguanine synthase OS=Rickettsiales endosymbiont of Peranema trichophorum OX=2486577 GN=queE; PE = 3 SV=1
MAFGNNPKLPPDFGDGEFLKVVSIYYTIQGEGPYVGFPSVFVRLGGCNLACTFCDTEFDVYQEMHISKIVEKIQEYPHKPLIVITGGEPFRQTIGPLCTTLVSLGYHIQIESNGTLYREIPSNVEIVCSPKSLKGDVFYIAPGIYKHLTAYKFLISTSNQSYLHIPKVVHVDLLNKVYIQPIDELDQEKNAANLSLAIRLAMEHGYKLSLQIHKIINLP

SEQ ID NO: 33706 - protein, 222 aa, unidentified
  source 1..222: note = Rickettsiales endosymbiont
  REGION 1..222: note = tr|A0A3S8T120|A0A3S8T120_9RICK 7-carboxy-7-deazaguanine synthase OS=Rickettsiales endosymbiont of Stachyamoeba lipophora OX=2486578 GN=queE; PE = 3 SV=1
MFGNNPKRKPDLGSGESLDIQEILLTLQGEGPYQGQPAVFIRLGGCNLACHFCDTEFESFSNLNLNEITAKATQLSRNLETAKLIVITGGEPFRQNISLLCEQLIELGFLVQIETNGTLYQELPAGIKIICSPKNNSGKYHYIREDLLKRIDAFKFIIAQDQPNYNYVPEVGQTANNIPVYVQPMDEYDEAKNKQNTTYCLELALKHGYFFSIQLHKILDIA

SEQ ID NO: 33707 - protein, 210 aa, Riemerella anatipestifer
  REGION 1..210: note = tr|H8M9L8|H8M9L8_RIEAD 7-carboxy-7-deazaguanine synthase OS=Riemerella anatipestifer (strain ATCC 11845 / DSM 15868 / JCM 9532 / NCTC 11014) OX=693978 GN=queE PE=3 S V=1
MMTNTEKELLKLGKLLPVMEHFYTIQGEGAYTGKAAYFIRLGGCDVGCHWCDVKESWDPNLHPLMDAEEVAQIAANHSKTIVLTGGEPLMWNLEILTKKLKDLGCTIHIETSGAYEISGHIDWVCLSPKKTGLPKESIYAKANELKVIIFNNHDFKFAEEQASKVSQNCKFYLQSEWSKRDEMYPKITDYILENPKWQASVQTHKYLNIP

SEQ ID NO: 33708 - protein, 210 aa, Riemerella anatipestifer; identical to SEQ ID NO: 33707
  REGION 1..210: note = tr|A0A1S7DQU7|A0A1S7DQU7_RIEAN 7-carboxy-7-deazaguanine synthase OS=Riemerella anatipestifer OX=34085 GN=queE PE=3 SV=1

SEQ ID NO: 33709 - protein, 210 aa, unidentified
  source 1..210: note = Riemerella columbipharyngis
  REGION 1..210: note = tr|A0A1G7ADY1|A0A1G7ADY1_9FLAO 7-carboxy-7-deazaguanine synthase OS=Riemerella columbipharyngis OX=1071918 GN=queE PE=3 SV=1
MDNHLQETLLKKGRLLPVMEHFYTLQGEGAHAGVAAYFIRLGGCDVGCHWCDVKESWNAELHPLMDMEALAKNAAEHCKTIILTGGEPLMWNLSILTKKLKSLGCRIHIETSGAYPLSGEIDWICLSPKKTAMPKKEIYAKADELKMIIYNNNDFKFAEKQAALVNKDCKLYLQSEWSKREEMYPKITEFILKNPRWRASVQTHKYLNIP

SEQ ID NO: 33710 - protein, 212 aa, Riemerella sp.
  REGION 1..212: note = tr|A0A496P5H7|A0A496P5H7_9FLAO 7-carboxy-7-deazaguanine synthase OS=Riemerella sp.; OX = 2382126 GN=queE PE=3 SV=1
MSDFSSEQKILLNQGKMLPVMEHFYTIQGEGAHSGRAAYFIRLGGCDVGCHWCDVKESWDATLHPLMDAEEIAAIAAKHCKTIIITGGEPLMWDLNILTKKLKELGCTIHVETSGSHNLRGHIDWITLSPKKVKLPKEEIYQMADELKVVIFNNHDFKFAEEQAAKVSEKCKLYLQSEWSKREQNYPKITDYILQNPKWIASVQTHKYLNIP

SEQ ID NO: 33711 - protein, 210 aa, Rikenella microfusus
  REGION 1..210: note = tr|A0A379MRR7|A0A379MRR7_9BACT 7-carboxy-7-deazaguanine synthase OS=Rikenella microfusus; OX = 28139 GN=queE PE=3 SV=1
MTNEIYDLLDGGRLLPLVEDFYTIQGEGYHAGKPAYFIRLGGCDVGCRWCDAKFTWNAKLYPPTPIRDIVERAASLPAQAIVITGGEPTLYPLEPLTASLKDRGLEIFIETSGTNPLSGRIDWVCLSPKRQQPPLPEVLARADELKVIIETPDDIRWAEENASHVSGHCRLYLQPEWSRYREIVPVLVEYAKANPRWNISIQNHKFMHIP

SEQ ID NO: 33712 - protein, 206 aa, unidentified
  source 1..206: note = Rikenellaceae bacterium
  REGION 1..206: note = tr|A0A353R658|A0A353R658_9BACT 7-carboxy-7-deazaguanine synthase OS=Rikenellaceae bacterium OX=2049048 GN=queE PE=3 SV=1
MNSLLDEGNLLPLAEDFYTIQGEGYHTGKAAYFIRLGGCDVGCSWCDSKFTWNPKLYPPVPVTEIIARAVKCPTRSVVITGGEPLSYPLGILCKELKNNGMDIFLETSGSQPLSGEMDWICLSPKQNHPPLPEFYPLASELKVIITGPLDLEWAEFNRRKVGPQCHLYLQPEWSRREAVLPHIVSYIKANPSWKISLQTHKYIHIP

SEQ ID NO: 33713 - protein, 207 aa, unidentified
  source 1..207: note = Rikenellaceae bacterium
  REGION 1..207: note = tr|A0A3D4XFN4|A0A3D4XFN4_9BACT 7-carboxy-7-deazaguanine synthase OS=Rikenellaceae bacterium OX=2049048 GN=queE PE=3 SV=1
MKIPELDNGNLLPLAEAFYTIQGEGFNTGKAAYFIRLGGCDVGCNWCDAKETWNPGLYPPVEVDKIVADAIIHPAKSIVITGGEPLNYPLDILCRKLKNHGIEIFLETSGSSHISGNFDWICLSPKRKKPPVDEIYEMASELKIIVEDEVDFIWAEENRSRVKPDCLLYLQPEWSKSGEMMEKIVEYVKTNPCWNISLQTHKYMNIP

SEQ ID NO: 33714 - protein, 205 aa, unidentified
  source 1..205: note = Rippkaea orientalis
  REGION 1..205: note = tr|B7K251|B7K251_RIPO1 7-carboxy-7-deazaguanine synthase OS=Rippkaea orientalis (strain PCC 8801) OX=41431; GN = queE PE=3 SV=1
MKAIALTTITYPIVETFHSIQGEGVWMGVNAFFIRLAGCDVHCPWCDQKESWPVQPYPQQSLEALGEAAKRANPAIVIITGGEPLMHNLDPLTAQLRGLGLRVHLETSGSHPFSGQFDWVTFSPKPFKLPHESIYPQVDELKVVITSQEDLQWAEHQAAQVPLKTIKYLQPEWNTPESQQLIFDYVLHHPDWRISLQVHKFLGVS

SEQ ID NO: 33715 - protein, 211 aa, Rivibacter subsaxonicus
  REGION 1..211: note = tr|A0A4Q7VGA9|A0A4Q7VGA9_9BURK 7-carboxy-7-deazaguanine synthase OS=Rivibacter subsaxonicus OX=457575 GN=queE PE=3 SV=1
MSYSVKEVFYTLQGEGHHAGRPAVFCRFAGCNLWSGREVDRATAVCRFCDTEFVGTDGSGGGKFTSGADLAAHVASFWPLAAHAGRFVVLTGGEPLLQVDPELIDALHEQGFEIAVETNGTIAAPAGLDWICVSPKAGAPLVQRSGDELKVVVPQVGIDLAELEGLAFAHRRVQPMDGPDRVATTAYAVQWCLDHPGWHLSVQTHKVIGIR

SEQ ID NO: 33716 - protein, 210 aa, unidentified
  source 1..210: note = Rivicola pingtungensis
  REGION 1..210: note = tr|A0A318KK54|A0A318KK54_9NEIS 7-carboxy-7-deazaguanine synthase OS=Rivicola pingtungensis OX=1054498 GN=queE PE=3 SV=1
MSYTVKEIFYSLQGEGHHSGRPAVFCRFSGCNLWSGREEDRARAQCTFCDTDFVGVGPDGGKFADAQALARRIAGHWPAQGGGTPYVVCTGGEPLLQLDALLIDALHAQGFEVAVETNGTLPAPRGLDWICVSPKGKARLAQTWGHELKLVYPQADCTPEQVAHLDFRHFYLQALDDPAHPEHQQAALDYCLAHPRWKLSLQTHKWLRIR

SEQ ID NO: 33717 - protein, 268 aa, Rivularia sp.
  REGION 1..268: note = tr|K9RCI7|K9RCI7_9CYAN 7-carboxy-7-deazaguanine synthase OS=Rivularia sp. PCC 7116 OX=373994 GN=queE PE=3; SV = 1
MHPMTTTTAVNENASLIEVFSAIQGEGLNVGTRQIFIRFAFCDLRCHFCDSAHTWNAPATCRIEQTPGSRDFEICSNPVSLSMLIEWVERQNIPCLHDSISLTGGEPLLHARFLSKFLPKIRLTTGLPIYLESGGHRPQQLAMILPYLDSVGMDLKLPSVSGESRWQEHENFLQICYEAQIEIFVKIIISQNTNPAELKRSAELVAAVNPAIPVFLQPVTPLGSTEQLTDFPLIVPTPKQVIDWQALMKNFLKSVRVVPQTHKMINQL

SEQ ID NO: 33718 - protein, 210 aa, unidentified
  source 1..210: note = Robbsia andropogonis
  REGION 1..210: note = tr|A0A0F5K3D0|A0A0F5K3D0_9BURK 7-carboxy-7-deazaguanine synthase OS=Robbsia andropogonis; OX = 28092 GN=queE PE=3 SV=1
MTYSVKEVFHTLQGEGANAGRPAVFCRFSGCNLWTGREADRAEAVCQFCDTDFVGTDGENGGKYRTPADLVAVVAGLWPEGEGQRFIVCTGGEPLLQLDAALIDALHQAGFTIAIETNGTIPVPDGIDWVCVSPKMGSTLVVTRGDELKVVVPQPNQVLAQYLALDFTYFLVQPMDGPSRDMNTRLAIDWCKRHPRWWLSMQTHKYLNIA

SEQ ID NO: 33719 - protein, 210 aa, unidentified
  source 1..210: note = Robbsia sp.
  REGION 1..210: note = tr|A0A494YA38|A0A494YA38_9BURK 7-carboxy-7-deazaguanine synthase OS=Robbsia sp. DHC34; OX = 2419776 GN=queE PE=3 SV=1
MTYAVKEIFYTLQGEGANAGRPAVFCRFAGCNLWSGREQDRAEAVCQFCDTDFVGTDGENGGKYASAEALVARVASLWPEDEAYRFIVCTGGEPLLQIDATLIDALHAAGFTIAIETNGTLPVPDGIDWVCVSPKADAELVVTRGDELKVVVPQANQRLADYERLDFTYFMVQPMDNASRTLNTRLAIDWCKRHPRWRLSMQTHKYLNIP

SEQ ID NO: 33720 - protein, 210 aa, unidentified
  source 1..210: note = Robertkochia marina
  REGION 1..210: note = tr|A0A4V3UXY5|A0A4V3UXY5_9FLAO 7-carboxy-7-deazaguanine synthase OS=Robertkochia marina; OX = 1227945 GN=queE PE=3 SV=1
MEKSEVLALVDKGEMLPLMEEFYTIQGEGYHKGTAAYFIRVGGCDVGCHWCDVKESWNAATHPPTHVDHIVDNAARYSDTIVITGGEPLTWDMNPLTQKLKAKGLKIHIETSGAYPLTGTWDWICLSPKKMKLPKEEVYQKAHELKVIIYNRHDFTFAEEQAAKVNENCILYLQPEWSKREKMIPEIVDYVMKHPKWKVSLQTHKYLNIP

SEQ ID NO: 33721 - protein, 210 aa, Robiginitalea biformata
  REGION 1..210: note = tr|A4CLZ4|A4CLZ4_ROBBH 7-carboxy-7-deazaguanine synthase OS=Robiginitalea biformata (strain ATCC BAA-864 / HTCC2501 / KCTC 12146) OX=313596 GN=queE PE=3 SV=1
MEKAGVLAQVDKGLMLPLMEAFYTIQGEGFHKGTAAYFIRVGGCDVGCHWCDVKESWNADLHPPTAVDTIVRDAAAASDTIVVTGGEPLMWDMAPLTSRLKSRGMKIHIETSGAYPLTGTWDWICLSPKKNKAPVGDIHQRAHELKVIVYNRHDLKFAEEHAELTSPDCLLYLQPEWSVRERVTPLIVEYVMANPRWRVSLQTHKYLNIP

SEQ ID NO: 33722 - protein, 204 aa, Robiginitalea myxolifaciens
  REGION 1..204: note = tr|A0A1I6HGL3|A0A1I6HGL3_9FLAO 7-carboxy-7-deazaguanine synthase OS=Robiginitalea myxolifaciens OX=400055 GN=queE PE=3 SV=1
MDQVEAGTMLPLMEAFYTIQGEGFHKGTAAYFIRVGGCDVGCHWCDVKESWNATLHPPTGIDEIVTEARRYSNTIVITGGEPLTWDMGPLTSSLKQAGIAIHIETSGAYPLTGQWDWICLSPKKNMLPVGDIHKNAHELKVIVYNKHDLKFAEEQAAQVSPECMLYLQPEWSVREKVTPMIVDYVMENPRWRVSLQTHKYLNIP

SEQ ID NO: 33723 - protein, 209 aa, Robiginitomaculum sp.
  REGION 1..209: note = tr|A0A2G2FZI8|A0A2G2FZI8_9RHOB 7-carboxy-7-deazaguanine synthase OS=Robiginitomaculum sp.; OX = 2030823 GN=queE PE=3 SV=1
MTYSVKEMFLTLQGEGQQTGRPAVFLRFTGCNLWSGREQDRTKAVCQFCDTDFVGMDGTNGGQFQAADELARAAFALWPGGGEPLVVCTGGEPLLQLDPELIAALHVCGFAIAVETNGTLAAPDGIDWLCVSPKADAPLVQTCGDELKLVYPQTENQPGDFEHLEFTHFSLQPLENARVEENTKAAIAWCLSHPKWHLSLQTHKWTKIP

SEQ ID NO: 33724 - protein, 209 aa, Robiginitomaculum sp.
  REGION 1..209: note = tr|A0A2G2LX54|A0A2G2LX54_9RHOB 7-carboxy-7-deazaguanine synthase OS=Robiginitomaculum sp.; OX = 2030823 GN=queE PE=3 SV=1
MTYSVKEMFLTLQGEGAQAGRPAVFMRFTGCNLWSGREVDRHKAQCQFCDTDFIGMDGQNGAQFTTPTALARAAFALWPGGGKPYVVCTGGEPLLQLEAALIDALHKVGFEIAVETNGTLAAPTGIDWLCVSPKAGTELAQKSGNELKLVFPQKDQSPADFEHLDFDRFVLQPMDGPQIVEYTRSAVEYCLSHPHWGLSLQTHKWIGIS

SEQ ID NO: 33725 - protein, 223 aa, Robinsoniella sp.
  REGION 1..223: note = tr|A0A371AXK4|A0A371AXK4_9FIRM 7-carboxy-7-deazaguanine synthase OS=Robinsoniella sp. MCWD5 OX=1812858 GN=queE PE=3 SV=1
MEYYQIAERFVSINGEGIFAGQLAVFVRFKGCNLHCSYCDTLWANQKDCGTEELTREEIADYIKSTGIHHVTLTGGEPLLQNNIIQLIESLLEVSNVKIEIETNGSIDLLPIKQRFNERVTLTMDYKLPSSRMEQYMKIENLSSLQKEDVVKFVVSTIADLEHAKQVIYQNRLLEKTNVYISPVYGKIQLEDIVEWMKMNQLNKATLQMQLHKIIWGSEAKGV

SEQ ID NO: 33726 - protein, 209 aa, unidentified
  source 1..209: note = Rodentibacter genomosp.
  REGION 1..209: note = tr|A0A1V3J6S0|A0A1V3J6S0_9PAST 7-carboxy-7-deazaguanine synthase OS=Rodentibacter genomosp. 1 OX=1908264 GN=queE PE=3 SV=1
MEKLTNFDPHFNIVEIFESLQGEGFNTGMPSIFVRFGKCNLACPWCDTPYNQFERWSASQILAKVRSFSAKNIIITGGEPTIVPKIELLLDQFKADGYFLAIETNGLKAIPPQIDYIATSPKRLYMYKYEQRCIESADEVRVVADENVLPFCELIEQKIRAQHYYLSPCEIDGKMNLLETITQLGKLNQRTNKPKWQLSLQTHKLVGIE

SEQ ID NO: 33727 - protein, 209 aa, unidentified
  source 1..209: note = Rodentibacter genomosp.
  REGION 1..209: note = tr|A0A1V3JR87|A0A1V3JR87_9PAST 7-carboxy-7-deazaguanine synthase OS=Rodentibacter genomosp. 2 OX=1908266 GN=queE PE=3 SV=1
MKNQAVLEPHFNIVEIFESLQGEGFNTGMPSIFVRFGKCNLACPWCDTPYNQFERWSTSQILAKVRSFSAKNIIITGGEPTIVPKIELLLDQFKADGYFLAIETNGLKAIPSQIDYIATSPKRLYMHKYEQRCIESADEVRVVADENVLPFCELIEQKIRAQHYYLSPCDIDGKMNLLETITQLGKLNQRTNKPKWQLSLQTHKLVGIE

SEQ ID NO: 33728 - protein, 213 aa, unidentified
  source 1..213: note = Rodentibacter heidelbergensis
  REGION 1..213: note = tr|A0A1V3IBI3|A0A1V3IBI3_9PAST 7-carboxy-7-deazaguanine synthase OS=Rodentibacter heidelbergensis OX=1908258 GN=queE PE=3 SV=1
MKNQNILEPHFNIVEIFESLQGEGFNTGMPSIFVRFGKCNLTCPWCDTAYNQFERQSASQILAKVRSFSAKNIIITGGEPTIVPHIEYLLEQFKQEGYFLAIETNGLKPVPPQIDYIATSPKRLYAHKYEKQCLSIANEVRIVVDENILPFCELIEQKIQAEHYYLSPCEKEGKMNLLETITQLGQLNQRSHTHKWKPKWQLSLQTHKLVGIE

SEQ ID NO: 33729 - protein, 209 aa, unidentified
  source 1..209: note = Rodentibacter heylii
  REGION 1..209: note = tr|A0A1V3KPK9|A0A1V3KPK9_9PAST 7-carboxy-7-deazaguanine synthase OS=Rodentibacter heylii; OX = 1906744 GN=queE PE=3 SV=1
MKNQAVLEPHFNIVEIFESLQGEGFNTGMPSIFVRFGKCNLACPWCDTPYNQFERWSASQILAKVRSFSARNIIITGGEPTIVPKIELLLDQFKADGYFLAIETNGLKAIPPQIDYIATSPKRLYMHKYEQRCIESADEVRVVADENVLPFCELIEQKIRAQHYYLSPCDIDGKMNLLETITQLGKLNQRTNKPKWQLSLQTHKLVGIE

SEQ ID NO: 33730 - protein, 209 aa, unidentified
  source 1..209: note = Rodentibacter heylii
  REGION 1..209: note = tr|A0A1V3KBU7|A0A1V3KBU7_9PAST 7-carboxy-7-deazaguanine synthase OS=Rodentibacter heylii; OX = 1906744 GN=queE PE=3 SV=1
MSIKTIWEARYNIVEIFESLQGEGANTGMPCIFVRFGKCNLACPWCDTHYNRFESWTLGQILSKVRSFSAKNIIITGGEPTIVPHLAILLDELKKLGYFLAIETNGLKSIPPQIDYIATSPKRLYQHKYQIRCIPVADEVRIVADANVIEFCELIEARIEAKRYYLSPCEINGQMNLLETISQLGQLNQRLDKPKWQLSIQTHKLIGIE

SEQ ID NO: 33731 - protein, 211 aa, unidentified
  source 1..211: note = Rodentibacter mrazii
  REGION 1..211: note = tr|A0A1V3ICT5|A0A1V3ICT5_9PAST 7-carboxy-7-deazaguanine synthase OS=Rodentibacter mrazii; OX = 1908257 GN=queE PE=3 SV=1
MKNPAVSDSEPHFNIVEIFESLQGEGFNTGMPSIFVRFGKCNLACPWCDTSYNQFERQSASQILAKVRSFSAKNIIITGGEPTIVPKLEILLEQFKRLGYFLAIETNGLKPVPPQIDYIATSPKRLYTHKYEKQCIDFANEVRIVADENILSFCELIEQKIQAAHYYLSPCEIEGKMNLLETITQLGKLNQRTNKPKWQLSLQTHKLVGIE

SEQ ID NO: 33732 - protein, 209 aa, unidentified
  source 1..209: note = Rodentibacter myodis
  REGION 1..209: note = tr|A0A1V3JQZ7|A0A1V3JQZ7_9PAST 7-carboxy-7-deazaguanine synthase OS=Rodentibacter myodis; OX = 1907939 GN=queE PE=3 SV=1
MQNQYNLEPHFNIVEIFESLQGEGFNTGMPSIFVRFGKCNLACPWCDTPYNQFEPWSASQILAKVRSFSAKNIIITGGEPTIVPKIEFLLDQFKAEGYFLAIETNGLKPVPSQIDYIATSPKRLYAHKYTQRCIQFADEVRIVADENILSFCELIEQKIQAKHYYLSPCEIDGKMNLLETITQLGQLNQRPNKPKWQLSLQTHKLVGIE

SEQ ID NO: 33733 - protein, 209 aa, unidentified
  source 1..209: note = Rodentibacter pneumotropicus
  REGION 1..209: note = tr|A0A4S2QPG5|A0A4S2QPG5_9PAST 7-carboxy-7-deazaguanine synthase OS=Rodentibacter pneumotropicus OX=758 GN=queE PE=3 SV=1
MKNQAVLEPHFNIVEIFESLQGEGFNTGMPSIFVRFGKCNLACPWCDTAYNQFERQSASQILAKVRSFSAKNIIITGGEPTIVPHIEYLLEQFKQAGYFLAIETNGLKSVPPQIDYIATSPKRLYSHKYGKQCIAFADEVRIVVDENILPFCELIEQKIQAEHYYLSPCEVEGKMNLLETITQLGKINQRTNKPKWRLSLQTHKLVGIE

SEQ ID NO: 33734 - protein, 209 aa, unidentified
  source 1..209: note = Rodentibacter pneumotropicus
  REGION 1..209: note = tr|A0A4S2P6K7|A0A4S2P6K7_9PAST 7-carboxy-7-deazaguanine synthase OS=Rodentibacter pneumotropicus OX=758 GN=queE PE=3 SV=1
MKNQAVLEPHFNIVEIFESLQGEGFNTGMPSIFVRFGKCNLACPWCDTAYNQFERQSASQILAKVRSFSAKNIIITGGEPTIVPHIEYLLEQFKQAGYFLAIETNGLKSVPPQIDYIATSPKRLYSHKYGKQCVAFANEVRIVVDENILPFCELIEQKIQAEHYYLSPCEVEGKMNLLETITQLGKLNQRTNKPKWQLSLQTHKLVGIE

SEQ ID NO: 33735 - protein, 213 aa, unidentified
  source 1..213: note = Rodentibacter rarus
  REGION 1..213: note = tr|A0A1V3IJH1|A0A1V3IJH1_9PAST 7-carboxy-7-deazaguanine synthase OS=Rodentibacter rarus; OX = 1908260 GN=queE PE=3 SV=1
MKNQNILEPHFNIVEIFESLQGEGFNTGMPSIFVRFGKCNLTCPWCDTAYNQFERQSASQILAKVRSFSAKNIIITGGEPTIVPHIEYLLEQFKRAGYFLAIETNGLKPVPPQIDYIATSPKRLYAHKYEKQCLSVANEVRIVVDENILPFCELIEQKIQAEHYYLSPCEREGKMNLLETITQLGQLNQRSHTHKWKPKWQLSLQTHKLVGIE

SEQ ID NO: 33736 - protein, 209 aa, unidentified
  source 1..209: note = Rodentibacter ratti
  REGION 1..209: note = tr|A0A1V3LCN9|A0A1V3LCN9_9PAST 7-carboxy-7-deazaguanine synthase OS=Rodentibacter ratti; OX = 1906745 GN=queE PE=3 SV=1
MKNQRVLEPHFNIVEIFESLQGEGFNTGMPSIFVRFGKCNLTCPWCDTAYNQFERQSASQILAKVRSFSAKNIIITGGEPTIVPHIEYLLEQFKQAGYFLAIETNGLKPIPPQIDYIATSPKRLYAHKYEKQCIAFANEVRIVVDENILPFCELIEQKIQAEHYYLSPCEREGKMNLLDTITQLGKLNQRSNKPKWQLSLQTHKLAGIE

SEQ ID NO: 33737 - protein, 213 aa, unidentified
  source 1..213: note = Rodentibacter ratti
  REGION 1..213: note = tr|A0A1V3L800|A0A1V3L800_9PAST 7-carboxy-7-deazaguanine synthase OS=Rodentibacter ratti; OX = 1906745 GN=queE PE=3 SV=1
MKNQRVLEPHFNIVEIFESLQGEGFNTGMPSIFVRFGKCNLTCPWCDTAYNQFERQSASQILAKVRSFSAKNIIITGGEPTIVPHIEYLLEQFKQAGYFLAIETNGLKPVPPQIDYIATSPKGLYAHKYEKQCIASANEVRIVVDENILPFCELIEQKIQAEHYYLSPCEREGKMNLLETITLLGQLNQRSHTHKWKPKWQLSLQTHKLVGIE

SEQ ID NO: 33738 - protein, 209 aa, unidentified
  source 1..209: note = Rodentibacter sp.
  REGION 1..209: note = tr|A0A1V3JYZ3|A0A1V3JYZ3_9PAST 7-carboxy-7-deazaguanine synthase OS=Rodentibacter sp. Ppn85 OX=1908525 GN=queE PE=3 SV=1
MKNQAVLEPHFNIVEIFESLQGEGFNTGMPSIFVRFGKCNLACPWCDTPYNQFERQSASQILAKVRSFSAKNIIITGGEPTIVPKIEFLLDQFKADDYFLAIETNGLKAIPPQIDYIATSPKRLYMYKYEQRCIESADEVRVVADENVLPFCELMEQKIRAQHYYLSPCDIDGKMNLLETITQLGKLNQRTNKPKWQLSLQTHKLVGIE

SEQ ID NO: 33739 - protein, 213 aa, unidentified; identical to SEQ ID NO: 33735
  source 1..213: note = Rodentibacter trehalosifermentans
  REGION 1..213: note = tr|A0A1V3IT93|A0A1V3IT93_9PAST 7-carboxy-7-deazaguanine synthase OS=Rodentibacter trehalosifermentans OX=1908263 GN=queE PE=3 SV=1

SEQ ID NO: 33740 - protein, 209 aa, unidentified
  source 1..209: note = Rodentibacter trehalosifermentans
  REGION 1..209: note = tr|A0A1V3IPJ8|A0A1V3IPJ8_9PAST 7-carboxy-7-deazaguanine synthase OS=Rodentibacter trehalosifermentans OX=1908263 GN=queE PE=3 SV=1
MKNQNILEPHFNIVEIFESLQGEGFNTGMPSIFVRFGKCNLTCPWCDTAYNQFERQSASQILAKVRSFSAKNIIITGGEPTIVPHIEYLLEQFKRAGYFLAIETNGLKPVPPQIDYIATSPKRLYAHKYEKQCLSVANEVRIVVDENILPFCELIEQKIQAEHYYLSPCEREGKMNLLETITQLGQLNQRPNKPKWQLSLQTHKLVGIE

SEQ ID NO: 33741 - protein, 211 aa, Roseateles aquatilis
  REGION 1..211: note = tr|A0A246IY63|A0A246IY63_9BURK 7-carboxy-7-deazaguanine synthase OS=Roseateles aquatilis; OX = 431061 GN=queE PE=3 SV=1
MTYAVKEMFYTLQGEGAQAGRAAVFCRFAGCNLWTGREQDRAAAVCTFCDTEFVGTDGQGGGKFASADALAEAIAAKWPMDQPGKPYVVCTGGEPLLQLDGPLITALKALGFEIAVETNGTQPAPEGLDWICVSPKADAELVLTKGNELKLVYPQPLAMPERFAALDFDYFFLQPMDSVLQKQNTKAAVAYCMAHPRWRLSIQMHKVVGID

SEQ ID NO: 33742 - protein, 217 aa, Roseateles depolymerans
  REGION 1..217: note = tr|A0A2W5FA89|A0A2W5FA89_9BURK 7-carboxy-7-deazaguanine synthase OS=Roseateles depolymerans OX=76731 GN=queE PE=3 SV=1
MYSVKELFYTLQGEGAQAGRAAVFCRFAGCNLWSGREQDRASAVCTFCDTDFVGTDGEGGGKFATAEQLADVIASKWPRPASDEGQALPGRPYVVCTGGEPLLQLDEALINALHARGFEVAVETNGTQPAPPGLDWICVSPKADAPLVLTAGHELKLVYPQPLAQPERFARLNFQHFFLQPMDSVLQREHTRAAVDYCMKHPQWQLSVQMHKVVGIA

SEQ ID NO: 33743 - protein, 214 aa, Roseateles depolymerans
  REGION 1..214: note = tr|A0A0U3DV27|A0A0U3DV27_9BURK 7-carboxy-7-deazaguanine synthase OS=Roseateles depolymerans OX=76731 GN=queE PE=3 SV=1
MTYAVKEMFYTLQGEGAQAGRAAVFCRFAGCNLWSGREQDRADAVCTFCDTDFVGTDGQGGGKFATAEALADAVAAKWPQGPQGQAGRPYVVCTGGEPLLQLDTALIEALHARGFEVAVETNGTQPAPEGLDWICVSPKADAELVLTRGHELKLVYPQPLAQPERFAGLAFDHFFLQPMDSVLQKQHIKAAVAYCMDHPQWRLSIQMHKVVGID

SEQ ID NO: 33744 - protein, 217 aa, Roseateles sp.
  REGION 1..217: note = tr|A0A1H7KH85|A0A1H7KH85_9BURK 7-carboxy-7-deazaguanine synthase OS=Roseateles sp. YR242; OX = 1855305 GN=queE PE=3 SV=1
MTYAVKEMFYTLQGEGAQAGRAAVFCRFAGCNLWTGREQDRTAAVCTFCDTDFVGTDGQGGGKFTTAEALADAILAKWPGSGAGHAGTAGKPYVVCTGGEPLLQLDVPLIEALHSRGFEIAVETNGTQPAPEGLDWICVSPKADAELVLTQGHELKLVYPQPLAPPERFAHLAFDNFFLQPMDSVLQKQNMKAAVAYCMDHPQWRLSIQMHKVVGID

SEQ ID NO: 33745 - protein, 222 aa, Roseburia sp.
  REGION 1..222: note = tr|A0A1Q6U1I4|A0A1Q6U1I4_9FIRM 7-carboxy-7-deazaguanine synthase OS=Roseburia sp. CAG:197_41_10 OX=1897018 GN=queE PE=3 SV=1
MCKLDVVEKFVSINGEGTKAGQLAVFIRFKGCNLACEYCDTQWANQADAPAQQMTAGEIVDYVISTGVKNVTLTGGEPLLRDGIEDVIAQLADHMLNVEIETNGSISLKKICDLQKENVTFTMDYKLSCSGMEKSMCLDNFRILGKNDTVKFVVGCHDDLIKTKKIIDDYRLNGKCNLYISPVFGRIKLEDIVDFMKQNVMNNVNMQIQLHKVIWDPDKKGV

SEQ ID NO: 33746 - protein, 222 aa, Roseburia sp.
  REGION 1..222: note = tr|R5TGX2|R5TGX2_9FIRM 7-carboxy-7-deazaguanine synthase OS=Roseburia sp. CAG:50 OX=1262949 GN=queE PE=3; SV = 1
MTNYKVVEIFSSINGEGTRAGQLAVFVRMQGCNLNCTYCDTKWANEADAKFHWTSTEEILELLRSMEIKNVTITGGEPLLQEKIGELLEAMAKEENLRVEIETNGSVPLQPFAEIPNGPSFTMDYKLPGSGMEKYMLPENFAVLRAQDTVKFVVKDYEDLCRARDVIREYDLTEKCHVYLSPVYGQIELENIVNFMKDNRLNDVNMQLQMHKIIWDSEMRGV

SEQ ID NO: 33747 - protein, 251 aa, Roseibacillus sp.
  REGION 1..251: note = tr|A0A2E6SDF2|A0A2E6SDF2_9BACT 7-carboxy-7-deazaguanine synthase OS=Roseibacillus sp.; OX = 2024856 GN=queE PE=3 SV=1
MKIAQLSTGHPEIFHTLQGEGISTGVPAVFVRASQCNLHCLWCDTDYTWNWTGTPWPHEKDSEAGYQKFNRQQSQLEMTPTDVAGAIREHDCRRLVVTGGEPLVQQKEFTDVLKILRGWDPEWTFELETNGTIRPHEALDDLVNQYNVSPKLTNSGNPTRLRLVEEALAFFAASSKAWFKFVVSAASDLAEITALQDQLDLAPDRIVLMPEGRDATTLRTRRQWLADRCIEKGYRYSDRLHIQLWGNERGR

SEQ ID NO: 33748 - protein, 231 aa, Roseibacillus sp.
  REGION 1..231: note = tr|A0A2E7AI04|A0A2E7AI04_9BACT 7-carboxy-7-deazaguanine synthase OS=Roseibacillus sp.; OX = 2024856 GN=queE PE=3 SV=1
MLISELFYSVQGEGLLAGVPSVFVRTSGCNLRCRWCDTPYASSEPEGEQQTVEEIVARVQEHPARHVVLTGGEPMLAKGIGGLAGALKEAGYHITIETAATIEPDGIACDLASLSPKLSDSTPEADQFGEGWSKRHEELRIQQEVLDAWAEGYHCQFKFVVSESGEMGEIEEILQGITPRPEPGKVLLMPEGTDSEVLQERSQMVAELCKQTGYRFCPRLHIDLYGDTKGT

SEQ ID NO: 33749 - protein, 242 aa, Roseibium hamelinense
  REGION 1..242: note = tr|A0A562SMG0|A0A562SMG0_9RHOB 7-carboxy-7-deazaguanine synthase OS=Roseibium hamelinense; OX = 150831 GN=queE PE=3 SV=1
MSESLIRVSEIFGPTIQGEGALIGQPTVFVRTGGCDYRCSWCDTLHAVDSSYRHDWHPMDAAGIFAEVERLSGGTPLTVSLSGGNPAIQPLGGLILLGREKGYRFGLETQGSLAKDWFADLDVLTLSPKPPSSGMEPDWDAFQDCIAAAGANTRLALKIVIFNEADYAFAKDAVARHPDLPVYLQPGNHTPAAPAEDDTTIDMDGIMERMRWLIGKVSADRWFDATVLPQLHTLIWGNLKGV

SEQ ID NO: 33750 - protein, 247 aa, Roseibium sp.
  REGION 1..247: note = tr|E2CGX7|E2CGX7_9RHOB 7-carboxy-7-deazaguanine synthase OS=Roseibium sp. TrichSKD4 OX=744980 GN=queE PE=3; SV = 1
MADGHQSEKSIRISEIFGPTIQGEGALVGKPTVFVRTGGCDYRCSWCDTLHAVDAEYRHDWTPMSAAEIFTKVEELSGGIPLTVSLSGGNPAIQPLASLITLGKAKGYAFALETQGSVVKDWFAELDVLTLSPKPPSSGMKTDLAALDACVSAGGVATQIALKFAVMDEADYAFARQISTRHPALPVYLQPVNHTPPPPDTEDADIDMSGIMDRMRWLVERTMSDRWYSATLLPQLHVLIWGNLRGV

SEQ ID NO: 33751 - protein, 269 aa, unidentified
  source 1..269: note = Roseimaritima ulvae
  REGION 1..269: note = tr|A0A5B9QMN1|A0A5B9QMN1_9PLAN 7-carboxy-7-deazaguanine synthase OS=Roseimaritima ulvae; OX = 980254 GN=queE PE=3 SV=1
MNSPEKVLGFSHSSAASTRGNRSGASVLRVAECFDSIQGEGRLTGTPSHFIRLSGCNLRCWFCDTPYASWHPEGPGRSLDEIVRRAVESDCQHVVLTGGEPLMFKGVEELVARLRSAGLHLTIETAGTLAPDVSADLMSISPKLSSSTPTVARAAGLSHLQTVSGSTIARWEQMHEQRRWQPQAIEKLIAASVDYQIKFVLDSSADTTEVLQAVTDLALPADHVWIMPQAVSTAELAKQARWLQPWCETHGFRFCDRMQIHWYGNRRGT

SEQ ID NO: 33752 - protein, 231 aa, unidentified
  source 1..231: note = Roseimicrobium gellanilyticum
  REGION 1..231: note = tr|A0A366HGF3|A0A366HGF3_9BACT 7-carboxy-7-deazaguanine synthase OS=Roseimicrobium gellanilyticum OX=748857 GN=queE PE=3 SV=1
MRISEMFFSVQGEGRLAGVPSVFIRTSGCNLRCHWCDTPYASWNPEGEEMSVAEILAEVEKHPTRFVVVTGGEPMIAKGMPELLKALKDAGKHITIETAGTIAPEGVPCDLASLSPKLHHSTPSVAQAGQAWHDRHEKTRWQPEVVRAWCQAYEHQLKFVVGSEADCAEVEQMIAGAGVETPPENVLLMPEGKTVQGLHESALQVVEWCKQRGWRYCPRIHVDLYGNTRGT

SEQ ID NO: 33753 - protein, 235 aa, Roseinatronobacter monicus
  REGION 1..235: note = tr|A0A543KBE7|A0A543KBE7_9RHOB 7-carboxy-7-deazaguanine synthase OS=Roseinatronobacter monicus OX=393481 GN=queE PE=3 SV=1
MSLRIAEIFGPTIQGEGALIGEPTVFVRAGGCDYRCVWCDSLHAVDTAFRHQWQKMSAQAVWDDVRALSGGQPLTVSLSGGNPAIQDFAPLIALGKAKGYRFACETQGSIARPWFADLDTLVLSPKPPSGGEVMDWAAFELCVAAAGARPKTVLKIVIFDEVDYAWAKDAASRYPDLPLYLQPGNPDVDPDHAVDLAACTDRLLWLVDKVTQDRWFTARVLPQLHVLIWGNKRGV

SEQ ID NO: 33754 - protein, 235 aa, Roseinatronobacter thiooxidans
  REGION 1..235: note = tr|A0A2W7QL75|A0A2W7QL75_9RHOB 7-carboxy-7-deazaguanine synthase OS=Roseinatronobacter thiooxidans OX=121821 GN=queE PE=3 SV=1
MSLRISEIFGPTIQGEGVLIGAPTVFVRAGGCDYRCVWCDSMHAVDTAYRHQWQKMSAQAVWDEVRALSGGQPLTVSLSGGNPAIQDFGPLIALGKSDGYRFACETQGSVARQWFAELDTLVLSPKPPSSGEVVDWAAFESCLTMAQARPETVLKIVIFDETDYAWAREAAGRYPDLPLYLQPGNPDLDPQQSVDLAACTDRLLWLVEKVTADRWFAARVLPQLHVLLWGNKRGV

SEQ ID NO: 33755 - protein, 205 aa, Roseivirga echinicomitans
  REGION 1..205: note = tr|A0A150X0Y4|A0A150X0Y4_9BACT 7-carboxy-7-deazaguanine synthase OS=Roseivirga echinicomitans OX=296218 GN=queE PE=3 SV=1
MSKTKEIIQLPIMEAFYTIQGEGHFSGNSAYFIRLGGCDVGCVWCDVKDSWDASQWPKESVEEIVAKASAHPGRLAVVTGGEPLMYDMTDLTNQLHAAGFQTNIETSGAHPLSGNWDWLCFSPKKFKAPKEEFYAEADELKVIIYNKSDFKWAEGHAAKMNKDCLLYMQPEWDQSEKMLPEIIEYVKNNPKWKISLQTHKFMNIP

SEQ ID NO: 33756 - protein, 205 aa, Roseivirga ehrenbergii
  REGION 1..205: note = tr|A0A150XQQ6|A0A150XQQ6_9BACT 7-carboxy-7-deazaguanine synthase OS=Roseivirga ehrenbergii OX=279360 GN=queE PE=3 SV=1
MSKTMKTTQFPVMEAFYTIQGEGHFSGNSAYFIRLGGCDVGCVWCDVKDSWDASQWPKESVEEIVAKASVHPGRLAVVTGGEPLMYDMTDLTNQLHAAGFQTNIETSGAHPLSGNWDWLCFSPKKFKAPKEEFYAAADELKVIIYNKSDFKWAEAHAAKMSENSLLYMQPEWDQSEKMLPEIIEYVKNNPKWKISLQTHKFMNIP

SEQ ID NO: 33757 - protein, 205 aa, unidentified
  source 1..205: note = Roseivirga seohaensis
  REGION 1..205: note = tr|A0A0L8AGY2|A0A0L8AGY2_9BACT 7-carboxy-7-deazaguanine synthase OS=Roseivirga seohaensis subsp. aquiponti OX=1566026 GN=queE PE=3 SV=1
MSKTMKTTQLPVMEAFYTIQGEGHFSGNSAYFIRLGGCDVGCVWCDVKDSWDASQWPKESVEEIVAKASAHPGRLAVVTGGEPLMYDMTELTNQLHAAGFQTNIETSGAHPLSGNWDWLCFSPKKFKAPKEEFYAAADELKVIIYNKSDFKWAEAHAAKMSENSLLYMQPEWDQSEKMLPEIIEYVKNNPKWKISLQTHKFMNIP

SEQ ID NO: 33758 - protein, 205 aa, unidentified
  source 1..205: note = Roseivirga seohaensis
  REGION 1..205: note = tr|A0A150Y393|A0A150Y393_9BACT 7-carboxy-7-deazaguanine synthase OS=Roseivirga seohaensis; OX = 1914963 GN=queE PE=3 SV=1
MSKTMKTTQLPVMEAFYTIQGEGHFSGNSAYFIRLGGCDVGCVWCDVKDSWDASQWPKESVEEIVANASVHPGRLAVVTGGEPLMYDMTDLTNQLHAAGFQTNIETSGAHPLSGNWDWLCFSPKKFKAPKEEFYAAADELKVIIFNKSDFKWAEAHAAKMNENSLLYMQPEWDQSEKMLPEIIEYVKNNPKWKISLQTHKFMNIP

SEQ ID NO: 33759 - protein, 193 aa, Roseivirga sp.
  REGION 1..193: note = tr|A0A316KFE9|A0A316KFE9_9BACT 7-carboxy-7-deazaguanine synthase OS=Roseivirga sp. XM-24bin3 OX=2133949 GN=queE PE=3 SV=1
MEAFYTIQGEGHFTGNSAYFVRLGGCDVGCVWCDVKDSWDAEKWPAQSIQEIVAGAKQYKSKLVVVTGGEPLMYNLDSLTESLRSEGFHTNIETSGAHPLSGTWDWLCFSPKKFMKPRQEFYETADELKVVIYNKSDFKWAEEHAAKIRPECLLYLQPEWDKSDKMLPEIIDYVKDNPRWKISLQTHKFMQIP

SEQ ID NO: 33760 - protein, 209 aa, Roseivirga spongicola
  REGION 1..209: note = tr|A0A150WY71|A0A150WY71_9BACT 7-carboxy-7-deazaguanine synthase OS=Roseivirga spongicola; OX = 333140 GN=queE PE=3 SV=1
MTENKQVAELNGKLPIMEAFYTIQGEGHFTGNSAYFVRLGGCDVGCVWCDVKDSWDAEKWPAQSIGEIVAGAKQYKSKLVVVTGGEPLMYNLDSLTESLRSEGFHANIETSGAHPLSGTWDWLCFSPKKFMKPRQEFYETADELKVVIYNKSDFKWAEEHAAKIRPECLLYLQPEWDKSEKMLPEIIEYVKDNPRWKISLQTHKFMQIP

SEQ ID NO: 33761 - protein, 223 aa, unidentified
  source 1..223: note = Rosenbergiella nectarea
  REGION 1..223: note = tr|A0A1H9ITE9|A0A1H9ITE9_9ENTR 7-carboxy-7-deazaguanine synthase OS=Rosenbergiella nectarea OX=988801 GN=queE PE=3 SV=1
MLYPINEMFQTLQGEGFYTGAPAIFIRLQGCPVGCSWCDTKHTWEKYADQQQPLADIVHKMAESEAWADASVEQLLAVIAEQGWTAKHIVITGGEPALYDLTLLTEQFEQEGFQCQIETSGTHPIRCSVATWVTVSPKVNMRGGYDVLNSALLRANEVKHPVGRQRDIDALDLLLSQVPPSTQRIIALQPISCKKAATELCIATCIARNWRFSMQTHKYLNIA

SEQ ID NO: 33762 - protein, 236 aa, Roseobacter sp.
  REGION 1..236: note = tr|A0A2E9YTM5|A0A2E9YTM5_9RHOB 7-carboxy-7-deazaguanine synthase OS=Roseobacter sp.; OX = 1907202 GN=queE PE=3 SV=1
MSTLRIAEIFGPTIQGEGALIGEPTVFVRTGGCDYRCAWCDSLHAVDTSYRRTWMPMTPDAVWDRIVQLSLGKPLTVSLSGGNPAIQDFSEVIAQGHANGYRFACETQGSVAKPWFADLDTLVLSPKPPSSGETVDWKVFDACVNAAGPATTTVMKIVIFDDLDYAWAQDTAKRYPDLPLYLQPGNPQVDPSVSIAPQDLSDRLLWLVEKVMADSWFAPRVLPQLHVMLWGNKRGV

SEQ ID NO: 33763 - protein, 235 aa, Roseobacter sp.
  REGION 1..235: note = tr|A4EQD3|A4EQD3_9RHOB 7-carboxy-7-deazaguanine synthase OS=Roseobacter sp. SK209-2-6 OX=388739 GN=queE; PE = 3 SV=1
MTLRIAEIFGPTIQGEGALIGEPTVFVRAGGCDYRCSWCDSLHAVDSENRHDWAKMSADEVFDEVCRLSGGKPLTVSISGGNPAIQDFAPLIRLGHAAGYGFACETQGSIAKPWFGDLDTLVLSPKPPSSGEDTDWSSFDACLKAAEACEQVVMKIVIFDDADYAWAKEASARYPDLPLYLQPGNPEVDPELPVDLNQATDRLLWLIEKVTADQWYTPRVLPQLHVLVWGNKRGV

SEQ ID NO: 33764 - protein, 211 aa, Roseococcus sp.
  REGION 1..211: note = tr|A0A4R0YK71|A0A4R0YK71_9PROT 7-carboxy-7-deazaguanine synthase OS=Roseococcus sp. SYP-B2431 OX=2496640 GN=queE PE=3 SV=1
MSYAVKEIFYTLQGEGRQAGRPAVFCRFAGCNLWSGREEDRAASVCTFCDTDFVGLDGPGGGRFADAGALAAAIAGAWAGATHAERFVVLTGGEPLLQVDSPLVDALHAEGFVIAVETNGTIAPPQGLDWVCVSPKSGAPLAVTQGHELKLVFPQPSLEPRRFEAMDFTDFLLQPMDGPAQAENTAAAIAYCLAHPQWRLSLQTHKLLGIP

SEQ ID NO: 33765 - protein, 199 aa, unidentified
  source 1..199: note = Roseofilum reptotaenium
  REGION 1..199: note = tr|A0A1L9QPI8|A0A1L9QPI8_9CYAN 7-carboxy-7-deazaguanine synthase OS=Roseofilum reptotaenium AO1-A OX=1925591 GN=queE PE=3 SV=1
MKTYPIVETFHSIQGEGYWMGRNAFFIRLGGCDVGCWFCDTKESWPVDKHPQYSIEQLAEAVLAVNPSMIVITGGEPLMHNLDQLTQGLRSLCHLPLHLETSGAYPFSGTFDWVTFSPKQSKSPDRSMGTYADELKVVITGPEDLDWAKEQAQFVKPNAVKFLQPEWNSPETIDLAMQFVLHHPDWRISLQTHKFLGCP

SEQ ID NO: 33766 - protein, 210 aa, unidentified
  source 1..210: note = Roseomonas deserti
  REGION 1..210: note = tr|A0A1V2H4V5|A0A1V2H4V5_9PROT 7-carboxy-7-deazaguanine synthase OS=Roseomonas deserti; OX = 1817963 GN=queE PE=3 SV=1
MSYAVKEIFATLQGEGAQAGRPSVFCRFTGCNLWSGREQDRAKAVCQFCDTDFIGTDGEGGGRFADAEALAEAVLTAWPGGDAHRYVVFTGGEPLLQLDAALIAAMHERGFEIAVESNGTFVPPPGIDWLCVSPKAGAALTVAGGSELKLVFPQPALMPEAVQHLAFRHFYLQPMDGPDRLANTEAAVRYCLAHPQWRLSLQTHKLIGIP

SEQ ID NO: 33767 - protein, 210 aa, Roseomonas gilardii
  REGION 1..210: note = tr|A0A1L7ACS2|A0A1L7ACS2_9PROT 7-carboxy-7-deazaguanine synthase OS=Roseomonas gilardii; OX = 257708 GN=queE PE=3 SV=1
MSYAVKEIFATLQGEGAQAGRPSVFCRFAGCNLWNGREEDRAGAVCQFCDTDFVGMDGEGGGRFADAEALAAAIEAAWPGGPSHRYVVFTGGEPLLQLDAPLIAAVHARGFEIAVESNGTVEPPEGIDWLCVSPKAGAPLRVRRGSELKLVFPQPALMPDSLPPLEFRYFYLQPMDGPDRLAHTEAAVRYCLEHPQWRLSLQTHKLIGIP

SEQ ID NO: 33768 - protein, 210 aa, Roseomonas gilardii
  REGION 1..210: note = tr|A0A379NDV8|A0A379NDV8_9PROT 7-carboxy-7-deazaguanine synthase OS=Roseomonas gilardii subsp. rosea OX=243956 GN=queE PE=3 SV=1
MSYAVKEIFATLQGEGAQAGRPSVFCRFAGCNLWSGREEDRAGAVCRFCDTDFVGMDGEGGGRFPDAELLAAAIEAAWPGGASHRYVVFTGGEPLLQLDASLIAAVHARGFEIAVESNGTVEPPEGIDWLCISPKAGAPLKVRRGSELKLVFPQPSLMPDSLPPLEFRHFYLQPMDGPDRLAHTEAAVRYCLEHPQWRLSLQTHKLIGIP

SEQ ID NO: 33769 - protein, 210 aa, Roseomonas mucosa
  REGION 1..210: note = tr|A0A1S8D9H9|A0A1S8D9H9_9PROT 7-carboxy-7-deazaguanine synthase OS=Roseomonas mucosa; OX = 207340 GN=queE PE=3 SV=1
MSYAVKEIFATLQGEGAQAGRPSVFCRFAGCNLWSGREEDRAGAVCQFCDTDFIGMDGEGGGRFADAGALAAAIEAAWPGGASHRYVVFTGGEPLLQLDTHLIAAVHERGFEIAVESNGTVEPPEGIDWLCISPKAGAPLKVRCGSELKLVFPQPKLMPDSLPPLEFGHFYLQPMDGPDRLAHTEAAVRYCLEHPQWRLSLQTHKLIGIP

SEQ ID NO: 33770 - protein, 210 aa, Roseomonas mucosa
  REGION 1..210: note = tr|A0A4Y1MX06|A0A4Y1MX06_9PROT 7-carboxy-7-deazaguanine synthase OS=Roseomonas mucosa; OX = 207340 GN=queE PE=3 SV=1
MSYAVKEIFATLQGEGAQAGRPSVFCRFAGCNLWSGREEDRAGAVCQFCDTDFIGMDGEGGGRFADAGALAAAIEAAWPGGASHRYVVFTGGEPLLQLDTHLIAAVHERGFEIAVESNGTVEPPEGIDWLCISPKAGAPLKVRCGSELKLVFPQPMLMPDSLPPLEFGHFYLQPMDGPDRLAHTEAAVRYCLEHPQWRLSLQTHKLIGIP

SEQ ID NO: 33771 - protein, 210 aa, Roseomonas sp.
  REGION 1..210: note = tr|A0A2D2H537|A0A2D2H537_9PROT 7-carboxy-7-deazaguanine synthase OS=Roseomonas sp. FDAARGOS_362 OX=2018065 GN=queE PE=3 SV=1
MSYTVKEIFATLQGEGAQAGRPSVFCRFAGCNLWSGREEDRAGAVCQFCDTDFIGMDGEGGGRFADAGALAAAIEAAWPGGASHRYVVFTGGEPLLQLDTHLIAAVHERGFEIAVESNGTVEPPEGIDWLCISPKAGAPLKVRCGSELKLVFPQPKLMPDSLPPLEFGHFYLQPMDGPDRLAHTEAAVRYCLEHPQWRLSLQTHKLIGIP

SEQ ID NO: 33772 - protein, 210 aa, Roseomonas sp.; identical to SEQ ID NO: 33770
  REGION 1..210: note = tr|A0A1Q2YW90|A0A1Q2YW90_9PROT 7-carboxy-7-deazaguanine synthase OS=Roseomonas sp. TAS13; OX = 1926319 GN=queE PE=3 SV=1

SEQ ID NO: 33773 - protein, 237 aa, Roseovarius aestuarii
  REGION 1..237: note = tr|A0A1X7BN86|A0A1X7BN86_9RHOB 7-carboxy-7-deazaguanine synthase OS=Roseovarius aestuarii; OX = 475083 GN=queE PE=3 SV=1
MTRLRISEIFGPTIQGEGSVIGVPTVFVRAGGCDYRCSWCDSLHAVDSRYRHEWQPMTAEEIMGKVTELSGGQPLTISLSGGNPAIQDFGPLIRLGKTQGYSFAMETQGSVARDWFCELAPLILSPKPPSSGETVDWDAFDACIAAAVETESVMKIVIFDEDDYTWAREVAAGYPSLPLYLQPGNHTPPGPDSDAIDLPGIMTRYEWLIERALADRWFTPRILPQLHVLVWGNKRGV

SEQ ID NO: 33774 - protein, 239 aa, unidentified
  source 1..239: note = Roseovarius albus
  REGION 1..239: note = tr|A0A1X6ZJZ3|A0A1X6ZJZ3_9RHOB 7-carboxy-7-deazaguanine synthase OS=Roseovarius albus; OX = 1247867 GN=queE PE=3 SV=1
MSEKIRVSEIFGPTIQGEGAVIGVPTVFVRTGGCDFRCSWCDSLHAVDQEYRHTWAPMTSQSVLEAVADLSEGEPLMITLSGGNPAIQPLGELINLGQAQGYTFGMETQGSVVKDWFAKLDMLVLSPKPPSSGMETDWKMLARCVVQGAAQTVLKIVVFDDVDFSYAQEVAKRFPDLPIYLQPGNHTPPPPEDDDAEVDIEGIDDRMRWLVDRVVEKKWYSARVLPQLHVMLWGNKRGV

SEQ ID NO: 33775 - protein, 211 aa, unidentified
  source 1..211: note = Roseovarius atlanticus
  REGION 1..211: note = tr|A0A0T5NRM8|A0A0T5NRM8_9RHOB 7-carboxy-7-deazaguanine synthase OS=Roseovarius atlanticus OX=1641875 GN=queE PE=3 SV=1
MTYSVKEVFYTLQGEGANTGRPAVFCRFSGCNLWSGLERDRSTAICQFCDTDFVGTDGIGGGKFRTAEELADHVASTWPVSREGKKLVVCTGGEPVLQLDQALVDTLHTRGFEVAIETNGTLPMPEGIDWVCVSPKAGTEIVVKKGNELKAVYPQPGLDLEFLRGLDFKHFFLQPLDGADQQQALAQVLNYCLEHPEWRLSLQTHKILEIA

SEQ ID NO: 33776 - protein, 244 aa, unidentified
  source 1..244: note = Roseovarius atlanticus
  REGION 1..244: note = tr|A0A0T5NTK1|A0A0T5NTK1_9RHOB 7-carboxy-7-deazaguanine synthase OS=Roseovarius atlanticus OX=1641875 GN=queE PE=3 SV=1
MAVSEKHLIRVSEIFGPTIQGEGALIGQPTVFVRTGGCDFRCSWCDSMHAVDNEYRDTWKPMTPEAIMEEVARLSGGKPILITLSGGNPAIQPMAELIRLGQEQGCYFAMETQGSVVRGWFEALDMLVLSPKPPSSGMLTDWGLVAECVEAGQGTQTILKLVVFDEADFAYAREAAAMFPQLPVYLQPGNHTPPPPDDDTAVVDREGLEARMRWLIDRVTEEKWYDARVLPQLHVTLWGNMRGV

SEQ ID NO: 33777 - protein, 240 aa, unidentified
  source 1..240: note = Roseovarius azorensis
  REGION 1..240: note = tr|A0A1H7WIU5|A0A1H7WIU5_9RHOB 7-carboxy-7-deazaguanine synthase OS=Roseovarius azorensis; OX = 1287727 GN=queE PE=3 SV=1
MNDSIRVAEIFGPTIQGEGALIGLPTVFVRTGGCDYRCSWCDSLHAVDAAYRDTWKPMAVTDVMAEIERLSGGRPVMVTLSGGNPAIQPLGPLIRLGREKGYRFALETQGSVARGWFADLDMLVLSPKPPSSGMEMDWAMLGQCAEAADGAQTVLKIVVFDEADYRFAREVAEFLPLLAVYLQPGNHTPPPPDDDSAGVDQAGIDARMRWLVERVTADGWFEARVLPQLHVMLWGNRRGV

SEQ ID NO: 33778 - protein, 242 aa, unidentified
  source 1..242: note = Roseovarius gaetbuli
  REGION 1..242: note = tr|A0A1X6YEP8|A0A1X6YEP8_9RHOB 7-carboxy-7-deazaguanine synthase OS=Roseovarius gaetbuli; OX = 1356575 GN=queE PE=3 SV=1
MSSDNIIRVSEIFGPTIQGEGALIGVPTVFVRTGGCDYRCSWCDSLHAVEPEYRDTWKPMTSEAVMAEIKALSGSAPLMVSLSGGNPAIQPLGALIEMGQGKGYRFALETQGSVVRRWFSDLDMLVLSPKPPSSGMVVDWDIFADCVAAAKGAQSVLKIVVFDEVDYQWARDVAGRYPDLAVYLQPGNHTPPPPDDDAAMVDQIGIDARMRWLVDRVIEDRWFTAKVLPQLHVMLWGNKRGV

SEQ ID NO: 33779 - protein, 242 aa, Roseovarius halotolerans
  REGION 1..242: note = tr|A0A1X6YDV2|A0A1X6YDV2_9RHOB 7-carboxy-7-deazaguanine synthase OS=Roseovarius halotolerans OX=505353 GN=queE PE=3 SV=1
MSDETPLRVSEIFGPTIQGEGALIGVPTVFVRLGGCDYRCSWCDSLHAVESAYRESWIPMSAEAVMDEVARLSGGRPLLVSLSGGNPAIQPLAGLIGLGHDKGYCFALETQGSVARDWFRDLDMLVLSPKPPSSGMEVDWTAFQACVDAGQGADMVMKIVIFDETDYQWAQGVAARYPHLPLFLQPGNHTPPPPDDDHALVDQAGVDERMRWLVDKVTQDGWFQARVLPQLHVMLWGNKRGV

SEQ ID NO: 33780 - protein, 242 aa, Roseovarius indicus
  REGION 1..242: note = tr|A0A1I2DDB4|A0A1I2DDB4_9RHOB 7-carboxy-7-deazaguanine synthase OS=Roseovarius indicus; OX = 540747 GN=queE PE=3 SV=1
MTTRDTIRVSEIFGPTIQGEGALIGQPTVFVRTGGCDYRCSWCDSLHAVDSEYRDTWKAMPPEDILAEIEKLTGGKPIMVTLSGGNPATQPLDRLIEQGKAKGYSFAMETQGSVVKPWFADLQMLVLSPKPPSSGMGTDWRVVANCVRTAKAAPTVLKIVVFDEADYAFAREASERFRELPIYLQPGNHTPPPPEDDSATVDQEGIDERMRWLVDKVVEDKWYGARVLPQLHVMLWGNKRGV

SEQ ID NO: 33781 - protein, 248 aa, Roseovarius indicus
  REGION 1..248: note = tr|A0A0T5P390|A0A0T5P390_9RHOB 7-carboxy-7-deazaguanine synthase OS=Roseovarius indicus; OX = 540747 GN=queE PE=3 SV=1
MGRVPPMTTRDTIRVSEIFGPTIQGEGALIGQPTVFVRTGGCDYRCSWCDSLHAVDSEYRDTWKAMPPEDILAEIEKLTGGKPIMVTLSGGNPATQPLDRLIEQGKAKGYSFAMETQGSVVKPWFADLQMLVLSPKPPSSGMGTDWRVVANCVRTAKAAPTVLKIVVFDEADYAFAREASERFRELPIYLQPGNHTPPPPEDDSATVDQEGIDERMRWLVDKVVEDKWYGARVLPQLHVMLWGNKRGV

SEQ ID NO: 33782 - protein, 242 aa, unidentified
  source 1..242: note = Roseovarius litoreus
  REGION 1..242: note = tr|A0A1M7F508|A0A1M7F508_9RHOB 7-carboxy-7-deazaguanine synthase OS=Roseovarius litoreus; OX = 1155722 GN=queE PE=3 SV=1
MTDAAPIRVSEIFGPTIQGEGALIGVSTVFVRTGGCDYRCSWCDSLHAVDSAFRETWAPMTPGAIMAEVEKLSGGRPLLVSLSGGNPATQPLGEVIRLGHARGYGFALETQGSVAKDWFSELDMLVLSPKPPSSGMEVDWTAFDACIAAGQGADMVMKIVIFDETDYDWARKVAGRYPQLPLFLQPGNHTPPPPGDDAARVDQDGLDARMRWLVDHVTRDGWFEARVLPQLHVALWGNKRGV

SEQ ID NO: 33783 - protein, 248 aa, unidentified
  source 1..248: note = Roseovarius lutimaris
  REGION 1..248: note = tr|A0A1I5FEF3|A0A1I5FEF3_9RHOB 7-carboxy-7-deazaguanine synthase OS=Roseovarius lutimaris; OX = 1005928 GN=queE PE=3 SV=1
MGGIPSVTTGDKIRVSEIFGPTIQGEGALIGVPTVFVRTGGCDYRCSWCDSLHAVDAEYRDTWKPMAPAAVMAEIEALSGGAPLMVSLSGGNPAIQPLGALIELGQGKGYRFALETQGSLARPWFGDLDMLVLSPKPPSSGMPVDWQIFNHCVAAAAEAKTVLKIVVFDEQDYQWAREVAGHYPDLAVYLQPGNHTPPPPDDDAAVVDQEGVDARMRWLVDRVIEDRWFTAKVLPQLHVMLWGNKRGV

SEQ ID NO: 33784 - protein, 242 aa, unidentified
  source 1..242: note = Roseovarius marisflavi
  REGION 1..242: note = tr|A0A1M6VPD7|A0A1M6VPD7_9RHOB 7-carboxy-7-deazaguanine synthase OS=Roseovarius marisflavi OX=1054996 GN=queE PE=3 SV=1
MSSDNTIRVSEIFGPTIQGEGALIGVPTVFVRTGGCDYRCSWCDSLHAVESEYRDTWKPMTPEAVMAEIEALSGGAPLMVSLSGGNPAIQPLGALIKLGQGKGYRFALETQGSVARRWFSDLDMLVLSPKPPSSGMVVDWDIFADCVAAAKGAPSVLKIVVFDEIDYQWACDVAGRYPDLAVYLQPGNHTPPPPDDDAAMVDQIGIDARMRWLVDRVIEDRWFTAKVLPQLHVMLWGNKRGV

SEQ ID NO: 33785 - protein, 240 aa, Roseovarius mucosus
  REGION 1..240: note = tr|A0A1V0RTV1|A0A1V0RTV1_9RHOB 7-carboxy-7-deazaguanine synthase OS=Roseovarius mucosus; OX = 215743 GN=queE PE=3 SV=1
MTEAIRVSEIFGPTIQGEGALIGQPTVFVRTGGCDYRCVWCDSLHAVESAYRETWVPMSADAVLAEVARLSGGRPIMVTLSGGNPAIQPLGALIDLGHARGYRFAMETQGSVARDWFAALDMLVLSPKPPSSGMEVDWALFDDCVAAAKGAASVLKIVVFDEADYEWARAVAGRYPQLPLYLQPGNHTPPPPEDDAATVDQAGIDARMRWLVERVTGDGWFDAKVLPQLHVMLWGNKRGV

SEQ ID NO: 33786 - protein, 240 aa, Roseovarius mucosus
  REGION 1..240: note = tr|A0A0A0HQ00|A0A0A0HQ00_9RHOB 7-carboxy-7-deazaguanine synthase OS=Roseovarius mucosus DSM 17069 OX=1288298 GN=queE PE=3 SV=1
MSEAIRVSEIFGPTIQGEGALIGQPTVFVRTGGCDYRCSWCDSLHAVESAYRETWVPMSPDAVLAEVARLSDGRPIMVTLSGGNPAIQPLGALIDQGHARGYRFAMETQGSVARDWFAALDMLVLSPKPPSSGMEVDWALFDDCVAAAKGAARVLKIVVFDEADYQWARDVAGRYPDLPLYLQPGNHTPPPPEDDTATVDQAGIDDRMRWLVERVTADGWFDAKVLPQLHVMLWGNKRGV

SEQ ID NO: 33787 - protein, 240 aa, Roseovarius nanhaiticus
  REGION 1..240: note = tr|A0A1N7FP98|A0A1N7FP98_9RHOB 7-carboxy-7-deazaguanine synthase OS=Roseovarius nanhaiticus OX=573024 GN=queE PE=3 SV=1
MSDVLRISEIFGPTIQGEGALIGVPTVFVRTGGCDFRCVWCDSLHAVNSEYRHTWAPMSAVDVMAEIRRLSGGVPLTVTLSGGNPAIQPMGDLIEMGRAEGYGFAIETQGSVARDWFAQLDMLVLSPKPPSSEMETDWAILQDCIDAAKDAPTVLKIVVFDEADYAYARDVAARHPDLPIYLQPGNHTPPPPEDDSATVDQDGIDARMRWLVDRVIADHWHAARVLPQLHVMLWGNKRGV

SEQ ID NO: 33788 - protein, 236 aa, Roseovarius nubinhibens
  REGION 1..236: note = tr|A3SN30|A3SN30_ROSNI 7-carboxy-7-deazaguanine synthase OS=Roseovarius nubinhibens (strain ATCC BAA-591 / DSM 15170 / ISM) OX=89187 GN=queE PE=3 SV=1
MSSLRISEIFGPTIQGEGILIGEPTVFVRAGGCDYRCSWCDTPHAVDSEHRSSWTPMTTFDIWDEIQRLSDGQPLTVSLSGGNPAIQDFGPLIALGRAQGYRFACETQGSIARGWFNVLDTLVLSPKPPSSGERPDWEAFDACLRAGANAGRTILKIVIFDDEDYNWAKTVQARFPGLPLFLQPGNPEIDPAQPVDLPAMADRLRLLTERAMRDGWFSVRILPQLHVFIWGNQRGV

SEQ ID NO: 33789 - protein, 210 aa, Roseovarius nubinhibens
  REGION 1..210: note = tr|A0A348WIX9|A0A348WIX9_9RHOB 7-carboxy-7-deazaguanine synthase QueE (Fragment); OS = Roseovarius nubinhibens OX=314263 GN=queE PE=3 SV=1
FVRAGGCDYRCSWCDTPHAVDSEHRSSWTPMTTFDIWDEIQRLSDGQPLTVSLSGGNPAIQDFGPLIALGRAQGYRFACETQGSIARGWFNVLDTLVLSPKPPSSGERPDWEAFDACLRAGANAGRTILKIVIFDDEDYNWAKTVQARLPGLPLFLQPGNPEIDPAQPVDLPAMADRLRLLTERTMRDGWFSVRILPQLHVFIWGNQRGV

SEQ ID NO: 33790 - protein, 242 aa, Roseovarius pacificus
  REGION 1..242: note = tr|A0A1M7DFR8|A0A1M7DFR8_9RHOB 7-carboxy-7-deazaguanine synthase OS=Roseovarius pacificus; OX = 337701 GN=queE PE=3 SV=1
MSGEATIRVSEIFGPTIQGEGALIGVPTVFVRTGGCDYRCEWCDSLHAVEAEYRGTWTPMTAQEIMAEVVRLSGGKPLLVSLSGGNPAIQPLGEVIRQGHAQGYGFALETQGSVARDWFSDLDMLVLSPKPPSSGMQVDWPVFDACLQAGQGADMVMKIVIFDDTDYAWARDVAARYPQLPLFLQPGNHTPPPPDDDSATVDQDGVDERMRWLVDRVVQDRWYQARVLPQLHVMLWGNKRGV

SEQ ID NO: 33791 - protein, 248 aa, Roseovarius sp.
  REGION 1..248: note = tr|A0A365TZ91|A0A365TZ91_9RHOB 7-carboxy-7-deazaguanine synthase OS=Roseovarius sp. TE539; OX = 2249812 GN=queE PE=3 SV=1
MGGISPVTSEGTIRVAEVFGPTIQGEGALIGVPTVFVRTGGCDFRCSWCDSLHAVDSSYRDTWAAMSASEVMTRIEALSGARPLMVSLSGGNPAIQPLGRLIGMGRARGYRFALETQGTVARDWFANLDMLVLSPKPPSSGMDTDWALLRGCVDAAQGAQTVLKIVVFDEADYAYARDVAARYPQLPVYLQPGNHTPPPPEDDAATVDQDGVDARMRWLVERVTGDRWFEARVLPQLHVMLWGNKRGV

SEQ ID NO: 33792 - protein, 240 aa, Roseovarius sp.
  REGION 1..240: note = tr|A3W8B2|A3W8B2_9RHOB 7-carboxy-7-deazaguanine synthase OS=Roseovarius sp. 217 OX=314264 GN=queE PE=3 SV=1
MSDAIRVSEIFGPTIQGEGALIGQPTVFVRTGGCDYRCSWCDSLHAVESAYRETWVPMSAEAVMAEVVRLSGGRAIMVTLSGGNPAIQPLGALIDLGHAQGYRFAMETQGSVARDWFAALDMLVLSPKPPSSSMVVDWALFEECVAAAKGAASVLKIVVFDEVDYQWARQVAGRYPHLPLYLQPGNHTPPPPEDDAATVDQAGIDERMRWLVERVTGDGWFEAKVLPQLHVMLWGNKRGV

SEQ ID NO: 33793 - protein, 240 aa, Roseovarius tolerans
  REGION 1..240: note = tr|A0A0L6CUV7|A0A0L6CUV7_9RHOB 7-carboxy-7-deazaguanine synthase OS=Roseovarius tolerans; OX = 74031 GN=queE PE=3 SV=1
MSEAIRISEIFGPTIQGEGALIGEPTVFVRTGGCDYRCSWCDSLHAVNAEYRATWAPMPPAEVMAEVAHLSGDRPLMVTLSGGNPAIQPLGPLIEMGKAQGYRFAMETQGSVARDWFASLDMLVLSPKPPSSGMTVDWPVFEDCVTAAGTAPAVLKIVIFDEADYLWAQDVAARYPALPLYLQPGNHTPPPPEDDSAVVDQDGIDDRMRWLVDRVVADGWFAAKVLPQLHVMLWGNKRGV

SEQ ID NO: 33794 - protein, 246 aa, Roseovarius tolerans
  REGION 1..246: note = tr|A0A1H7XSK8|A0A1H7XSK8_9RHOB 7-carboxy-7-deazaguanine synthase OS=Roseovarius tolerans; OX = 74031 GN=queE PE=3 SV=1
MGGIPTVSEAIRISEIFGPTIQGEGALIGEPTVFVRTGGCDYRCSWCDSLHAVNAEYRTTWAPMPPAEVMAEVAHLSGDRPLMVTLSGGNPAIQPLGQLIEMGKAQGYRFAMETQGSVARDWFAALDMLVLSPKPPSSGMTVDWPVFEDCVTAAGTAPAVLKIVIFDETDYLWAQDVAARCPALPLYLQPGNHTPPPPEDDSAVVDQDGIDDRMRWLVERVVADGWFAAKVLPQLHVMLWGNKRGV

SEQ ID NO: 33795 - protein, 215 aa, Rothia sp.
  REGION 1..215: note = tr|A0A433E8I1|A0A433E8I1_9MICC 7-carboxy-7-deazaguanine synthase OS=Rothia sp. HSID18069; OX = 2419515 GN=queE PE=3 SV=1
MQDTLRITEVFYSLQGETRTAGPPTVFVRLTGCPLRCQYCDSAYAFSCGTVRTLDDILEQVAGFKPRYVCVTGGEPLAQPNAIPLLKQLCDAGYEVSLETSGALDISAVDPRVSRVVDLKTPGSKEAHRNLYANMDLLTPNDQVKFVICSREDYDWATSKLIQYGLERRAGEVLFSPSHHDLNARDLADWVVADNLPVRLQVQLHKYLWNDEPGR

SEQ ID NO: 33796 - protein, 223 aa, unidentified
  source 1..223: note = Rouxiella badensis
  REGION 1..223: note = tr|A0A1X0WKL8|A0A1X0WKL8_9GAMM 7-carboxy-7-deazaguanine synthase OS=Rouxiella badensis; OX = 1646377 GN=queE PE=3 SV=1
MQYPINEMFETLQGEGYFTGVPAIFIRLQGCPVGCSWCDTKHTWEKFADREVDMQRILVKTEESDAWGNATAEQLHQVIKNQGWTANHVVITGGEPCIYDLQPLTELLESLGYSCQIETSGTHEVRCSAKTWVTVSPKVNMRGGYDILPQALQRADEIKHPVARQRDIDALEVLLATLTDQKARIIALQPISQKEEATKLCIATCIAKNWRLSMQTHKYLNIA

SEQ ID NO: 33797 - protein, 223 aa, unidentified
  source 1..223: note = Rouxiella silvae
  REGION 1..223: note = tr|A0A1X0W5F5|A0A1X0W5F5_9GAMM 7-carboxy-7-deazaguanine synthase OS=Rouxiella silvae; OX = 1646373 GN=queE PE=3 SV=1
MQYPINEMFETLQGEGYFTGVPAIFIRLQGCPVGCSWCDTKHTWEKFADREVDMQRILVKTQESDAWGNASAEKLHQVIQNQGWTAKHIVITGGEPCIYNLEPLTELLEQEGYSCQIETSGTHEVRCSAKTWVTVSPKVNMRGGYDILPQALQRADEIKHPVARQRDIDALEQLLATLSDDKARIIALQPISQKEEATKLCIATCIAKNWRLSMQTHKYLNIA

SEQ ID NO: 33798 - protein, 271 aa, unidentified
  source 1..271: note = Rubellimicrobium roseum
  REGION 1..271: note = tr|A0A5C4N9S8|A0A5C4N9S8_9RHOB 7-carboxy-7-deazaguanine synthase OS=Rubellimicrobium roseum OX=687525 GN=queE PE=3 SV=1
MVQGAPARDRSGSRQRNTQDLGGVPALIEAYAEKIRISEIFGPTIQGEGALIGLPTVFVRTGGCDYRCSWCDSLHAVDSRFRADWRAMTAEEIFQEVRRLSDDRPLMVSLSGGNPAIQPLGGLIRLGHSAGYRFALETQGTVCRDWFADLDVLVLSPKPPSSGMETDWEALKACQESAAEGPRTVLKFVVFDAEDYAYARDAAARFPDLPVYLQPGNHTPPDPDEEDGLIDMDGLTRRLHWLVDKVTTDRWFDAHVLPQLHVLLWGNKRGV

SEQ ID NO: 33799 - protein, 274 aa, unidentified
  source 1..274: note = Rubidibacter lacunae
  REGION 1..274: note = tr|U5D6D8|U5D6D8_9CHRO 7-carboxy-7-deazaguanine synthase OS=Rubidibacter lacunae KORDI 51-2 OX=582515; GN = queE PE=3 SV=1
MTTTVPATEPTNTAAAVLTVDRANLVEVFSAIQGEGSNVGTRQIFIRFARCDLRCHFCDSARTWGTPATCRIEATPGARDFETHANPVTRSQLLAWVVRQHVPGLHDSISLTGGEPLLHASFLQTFLPEVRRLGLPIYLETGGHHPQQLSAVLPFLDAVGADLKLPSVSGEQRWQAHADFLKRCCDAGVEVFAKLIVSDRTDRADLERAAAIVAGTSPEIPVFLQPVTPLAEPLAVGAISPPTPAQVLAWQALLKQQLACVRVVPQTHKAIGQL

SEQ ID NO: 33800 - protein, 241 aa, unidentified; identical to SEQ ID NO: 32847
  source 1..241: note = Rubinisphaera brasiliensis
  REGION 1..241: note = tr|F0SMR4|F0SMR4_RUBBR 7-carboxy-7-deazaguanine synthase OS=Rubinisphaera brasiliensis (strain ATCC 49424 / DSM 5305 / JCM 21570 / NBRC 103401 / IFAM 1448); OX = 756272GN=queE PE=3 SV=1

SEQ ID NO: 33801 - protein, 226 aa, unidentified
  source 1..226: note = Rubinisphaera sp.
  REGION 1..226: note = tr|A0A2E9VM28|A0A2E9VM28_9PLAN 7-carboxy-7-deazaguanine synthase OS=Rubinisphaera sp.; OX = 2024857 GN=queE PE=3 SV=1
MLISEIFASIQGEGQFTGTPSVFIRASGCNLRCHFCDTPYASWNPEGVEMSVAEVVKTASEWWHPHVVITGGEPMIFKQMPELTAALKRNDRFITIETAGTALMDVEADLMSISPKRSNSTPAAITGWKERHNERRHRPDVIRSLLESYECQFKFVIDQAEDIEDVLDYLSEFPEIDHEKVWLMPQAIEANVLNEKLHWLQPLAMEHGFHLSSRLQIQQFGNRRGT

SEQ ID NO: 33802 - protein, 234 aa, Rubricoccus marinus
  REGION 1..234: note = tr|A0A259U495|A0A259U495_9BACT 7-carboxy-7-deazaguanine synthase OS=Rubricoccus marinus; OX = 716817 GN=queE PE=3 SV=1
MAPSAASGEKTYRVRALWRTLQGEGFWAGRPAVFVRLVACNMWSGYEADRARDAERNGADCPLWCDTAFTKEGSVRLTASDLADAVVATGDGVTFCVLTGGEPLLQADAALIRALHARGVTVAVETNGTLSLAGAFGDEADWPDWIVCSPKLAAARLEIETCDELKLVVPDYRPEAYRPLAQRVRERSLAGPLLWLQPEDGPRFEAAARLAVDLALADPRWRVSVQGHKALGVD

SEQ ID NO: 33803 - protein, 270 aa, unidentified
  source 1..270: note = Rubripirellula obstinata
  REGION 1..270: note = tr|A0A5B1CG63|A0A5B1CG63_9PLAN 7-carboxy-7-deazaguanine synthase OS=Rubripirellula obstinata OX=406547 GN=queE PE=3 SV=1
MESSSQTEFSHAESDRTRGTSHDVVRGTIDDATRGTSHDVATLKISETFQSCQGEGKLTGTDSFFIRTSGCNLRCHFCDTPYASWNPTGDQLPIDQLVAMAVETGLQHVVLTGGEPMLPIQITSLCELLRDAGMHVTIETAGTIDRELVCDLASISPKLENSTPDSQQHPRWSELHQQRRMPIEVMRSVIDRSIDHQIKFVVTSLDDFAEINSVVRQLDVDADAVWIMPEGVTIEAMDAAASWLKPYCDDTGYRYCDRMQIRWFGNRRGT

SEQ ID NO: 33804 - protein, 255 aa, unidentified
  source 1..255: note = Rubritalea profundi
  REGION 1..255: note = tr|A0A2S7TYP2|A0A2S7TYP2_9BACT 7-carboxy-7-deazaguanine synthase OS=Rubritalea profundi; OX = 1658618 GN=queE PE=3 SV=1
MNSATLKLAVLNGKPEIFHTLQGEGVSTGVPSIFVRSSLCNLHCAWCDTDYTWNWEGTPWTHENDQVAGYSKFKKSDYILECEVAEVAKLVQQFCCKNLILTGGEPLLQQAGWIALIQILLAADPDYRFEVETNGTQLPNPKMAEAIDQFNVSAKLSNSGNDAKLRDNPKAMQWFANSPKAWFKFVIQDPQDLSEMQQLEQKYSIPRERILLMPEGRDEETLRQRRLWLADLCRDHGYRFSDRLHIQLWGSKRGV

SEQ ID NO: 33805 - protein, 254 aa, Rubritalea squalenifaciens
  REGION 1..254: note = tr|A0A1M6LXQ7|A0A1M6LXQ7_9BACT 7-carboxy-7-deazaguanine synthase OS=Rubritalea squalenifaciens DSM 18772 OX=1123071 GN=queE PE=3 SV=1
MSCTLKLAVLNGQPEIFHTLQGEGVSMGVPSIFIRSSLCNLHCTWCDTDYTWNWEGTPWTHENDALPGYKKFSKADYIQEVSIEEVANILSHYPCKNVILTGGEPLLQQAGWEDLITHLRNIDPDYRFEVETNGTQLPNSFLQEAIDQWNVSPKLSNSGNAENLRLNEASLAYFASSPKAWFKFVVQNEQDLEEIQEIEKRFSIPRSRILLMPEGRDEETLNQRRLWLADLCRDHGYRFSDRLHIQLWGSKRGV

SEQ ID NO: 33806 - protein, 233 aa, unidentified
  source 1..233: note = Rubrivirga marina
  REGION 1..233: note = tr|A0A271J508|A0A271J508_9BACT 7-carboxy-7-deazaguanine synthase OS=Rubrivirga marina; OX = 1196024 GN=queE PE=3 SV=1
MAASPAGGKRYAVKALWRTVQGEGTQAGRAAVFVRLAGCNLWSGLERDRQRDAARSGADCPLWCDTEFAPPGAVKLSAADLARAAAEAGGAVRFCVLTGGEPLLQADAALVRALRAEGFTVAVETNGTQRLADAFGGDPANRPDWVVCSPKLPEAELALEACDELKLVVPDYRPDAYGAFAERVRAHGGRRALWLQPEDGPRLAEATRLALDLVFEDPRWRVSVQTHKALGVD

SEQ ID NO: 33807 - protein, 233 aa, unidentified
  source 1..233: note = Rubrivirga sp.
  REGION 1..233: note = tr|A0A271JEB3|A0A271JEB3_9BACT 7-carboxy-7-deazaguanine synthase OS=Rubrivirga sp. SAORIC476 OX=1961794 GN=queE PE=3 SV=1
MAASPAGPKRYAVKALWRTVQGEGTQAGRAAVFVRLAGCNLWSGFEADRTRDAARSGADCPLWCDTEFTPPDAVKLSAADLARAAAEAGGAVRFCVLTGGEPLLQADAALLRALHAERFVVAVETNGTQRLADAFGEDPADHPDWVVCSPKLPEAQLPLEACDELKLVVPDYRPEAYASMATRVREHAGRRALWLQPEDGPRLTEATRLALDLVFQDPRWRVSVQTHKALGVD

SEQ ID NO: 33808 - protein, 220 aa, Rubrivivax sp.
  REGION 1..220: note = tr|A0A519ZJ61|A0A519ZJ61_9BURK 7-carboxy-7-deazaguanine synthase OS=Rubrivivax sp.; OX = 50259 GN=queE PE=3 SV=1
MSYSVKEIFYTLQGEGTHAGRPAVFCRFAGCNLWSGREQDRATAICRFCDTDFVGTDGLGGGKFADAAQLAARVASFWPAGPAGDQGQRFVVLTGGEPLLQVDAELIDALHAQGFEIAVETNGTIQAPPGLDWICVSPKAGSTLVQTSGHELKLVVPQLGFDEAALARFEAMDFVQRRVQPMDSASPEARLAATEWAVQWCLDHPRWLLSVQTHKTLGIR

SEQ ID NO: 33809 - protein, 217 aa, Rubrivivax sp.
  REGION 1..217: note = tr|A0A519I9K0|A0A519I9K0_9BURK 7-carboxy-7-deazaguanine synthase OS=Rubrivivax sp.; OX = 50259 GN=queE PE=3 SV=1
MYSVKELFYTLQGEGAQAGRAAVFCRFAGCNLWTGREQDRATAVCTFCDTDFIGTDGEGGGKFATADALADTIAKAWPRGTEGDASHDRGRPYVVCTGGEPLLQLDTPLIDALHARGFEIAVETNGTQPAPPGLDWICVSPKADAPLVLTSGHELKLVYPQPLAQPERFAALDFQHFFLQPMDSVLKREHTKAAVDYCMQHPQWRLSVQMHKVVGIA

SEQ ID NO: 33810 - protein, 134 aa, Ruegeria atlantica
  REGION 1..134: note = tr|A0A0P1EKS8|A0A0P1EKS8_9RHOB 7-carboxy-7-deazaguanine synthase OS=Ruegeria atlantica; OX = 81569 GN=queE_2 PE=4 SV=1
MDTQAVWSEIQRLSGGRPLTVSLSGGNPAIQDFGPLIQQGKAEGYAFACETQGSIAKPWFADLAMLVLSPKPPSSGEDMDWKAFDACLNVRPAQAVLKIVIFDDTDFNWARSVTDRYPDLPLYLQPGNRSGQPG

SEQ ID NO: 33811 - protein, 178 aa, Ruegeria atlantica
  REGION 1..178: note = tr|A0A0N7LQ25|A0A0N7LQ25_9RHOB 7-carboxy-7-deazaguanine synthase OS=Ruegeria atlantica; OX = 81569 GN=queE PE=4 SV=1
METQAVWSEVQRLSGGRPLTVSLSGGNPAIQDFGPLIWQGKAEGYAFVCETQGSIAKPWFSDLAMLVLSPNPPSSGENMDWTAFGACLNVRPAQTVLKIVIFDDMDFNWARSVADRYPDLPLYLQPGNPEADPASPVDLNNATSRMEWLIDKTLNAGWFAPRILPQLHVLIWGNKRGV

SEQ ID NO: 33812 - protein, 236 aa, unidentified
  source 1..236: note = Ruegeria denitrificans
  REGION 1..236: note = tr|A0A0P1IPW9|A0A0P1IPW9_9RHOB 7-carboxy-7-deazaguanine synthase OS=Ruegeria denitrificans OX=1715692 GN=queE PE=3 SV=1
MTRLRIAEIFGPTIQGEGALIGEPTVFVRTGGCDYRCSWCDSMHAVDTAFRHDWASMSTDAVWDRVHTLSGGRPLTVSLSGGNPAIQNFGPLIARGRAEGYRFACETQGSIAKPWFSNLDTLVLSPKPPTSGESVDWSAFAACIDAAQPGPKVVMKIVIFDEADYDWARSVADRYPTLPLYLQPGNAEVDPELPVDPKTLSDRLLWLVEKVTADGWFTPRVLPQLHVLLWGNKRGV

SEQ ID NO: 33813 - protein, 239 aa, unidentified
  source 1..239: note = Ruegeria intermedia
  REGION 1..239: note = tr|A0A1M5AW76|A0A1M5AW76_9RHOB 7-carboxy-7-deazaguanine synthase OS=Ruegeria intermedia; OX = 996115 GN=queE PE=3 SV=1
MKPLRIAEIFGPTIQGEGAVIGVATVFVRAGGCDYRCSWCDSLHAVDSAYRHEWTPMTPEQIWAQVEALSGGTPLTVSLSGGNPAIQDFGPLIALGRSKGYDFVMETQGSVAQDWFRDLSTLILSPKPPSSGETVDWARFEDCIARAEGTPTVMKIVVFDEDDYHWARATAARFPALPLYLQPGNHTPPPPDSEDAEIDMDGIMSRYEWLIDKTLGDCWFTPTILPQLHVLIWGNKRGV

SEQ ID NO: 33814 - protein, 235 aa, unidentified
  source 1..235: note = Ruegeria litorea
  REGION 1..235: note = tr|A0A1Y5TRX1|A0A1Y5TRX1_9RHOB 7-carboxy-7-deazaguanine synthase OS=Ruegeria litorea R37; OX = 1200284 GN=queE PE=3 SV=1
MTLRIAEIFGPTIQGEGALIGEPTVFIRAGGCDYRCSWCDSMHAVDSAYRHAWTPLSDNAVWDQVRDLSGGRPLTVSISGGNPAIQDFSGVIALGKAEGYRFACETQGSIAKPWFAELDTLVLSPKPPSSGETVDWAAFENCLTAAKGCRNIVLKIVIFDDADYAWAQQVAKNHPDLPLYLQPGNPEVDPNQPVDLQVTTDRLLWLIEKVTGDGWFTPRVLPQLHVLVWGNKRGV

SEQ ID NO: 33815 - protein, 239 aa, Ruegeria marina
  REGION 1..239: note = tr|A0A1G7C094|A0A1G7C094_9RHOB 7-carboxy-7-deazaguanine synthase OS=Ruegeria marina; OX = 639004 GN=queE PE=3 SV=1
MTTLRIAEIFGPTIQGEGAVIGAPTVFVRAGGCDYRCAWCDSLHAVDSAYRDTWAPMTTEEVWAEVERLSGGVPLTVSLSGGNPAIQDFGPLIEMGKEQGYRFALETQGSVARNWFRELSPLILSPKPPSSGETVDWERFGDCIAQARNAVTVIKIVVFDEADYLWAREVAARYPHLPIYLQPGNHTPPPPDEHDAAIDMDGIMARYEWLIGRALADRWFTPTILPQLHVLVWGNKRGV

SEQ ID NO: 33816 - protein, 245 aa, unidentified
  source 1..245: note = Ruegeria marisrubri
  REGION 1..245: note = tr|A0A0X3TR27|A0A0X3TR27_9RHOB 7-carboxy-7-deazaguanine synthase OS=Ruegeria marisrubri; OX = 1685379 GN=queE PE=3 SV=1
MGGVSAVKPLRIAEIFGPTIQGEGAVIGVPTVFVRAGGCDYRCSWCDSLHAVDSAYRHDWTPMTPEQVWAQVETLSGGAPLTVSLSGGNPAIQDFGPLIALGRSKGYDFVMETQGSVAQDWFRELSTLILSPKPPSSGETVDWARFEDCVARAEGAPTVMKIVVFDDDDYHWARAAADRFPSLPLYLQPGNHTPPPPDAEDAAIDMDGIMSRYEWLIDKTLGDRWFTPTILPQLHVLIWGNRRGV

SEQ ID NO: 33817 - protein, 235 aa, unidentified
  source 1..235: note = Ruegeria mediterranea
  REGION 1..235: note = tr|A0A2R8C6M2|A0A2R8C6M2_9RHOB 7-carboxy-7-deazaguanine synthase OS=Ruegeria mediterranea M17 OX=1200281 GN=queE PE=3 SV=1
MTLRIAEIFGPTIQGEGALIGEPTVFIRAGGCDYRCCWCDSMHAVDSAYRHEWAPLSDRAVWDQVRDLSGGRPLTVSISGGNPAIQDFSGVIAMGKAEGYRLACETQGSIAKPWFADLDTLVLSPKPPSSGETPDWAAFESCLTAAKGCRSIVLKIVIFDDADYTWAQQVAANHPDLPLYLQPGNPEVDPSQPVDLQVTTDRLLWLIEKVTGDGWFTPRVLPQLHVLVWGNKRGV

SEQ ID NO: 33818 - protein, 239 aa, Ruegeria pomeroyi
  REGION 1..239: note = tr|Q5LM11|Q5LM11_RUEPO 7-carboxy-7-deazaguanine synthase OS=Ruegeria pomeroyi (strain ATCC 700808 / DSM 15171 / DSS-3) OX=246200 GN=queE PE=3 SV=1
MTTLRIAEIFGPTIQGEGAVIGAPTVFVRAGGCDYRCSWCDSLHAVDSAYRDTWTAMTTEQVWAEVARLSGGVPLTVSLSGGNPAIQDFGPLIEMGKAQGYRFALETQGSVARGWFRELSPLILSPKPPSSGETVDWDRFADCIARARDAVTVIKIVVFDEADYLWAREVAARFPNLPIYLQPGNHTPPPPDAEDAAIDMDGIMARYEWLIGRALSDRWFTPTILPQLHVLVWGNKRGV

SEQ ID NO: 33819 - protein, 233 aa, Ruegeria sp.
  REGION 1..233: note = tr|A0A366XBH1|A0A366XBH1_9RHOB 7-carboxy-7-deazaguanine synthase OS=Ruegeria sp. A3M17; OX = 2267229 GN=queE PE=3 SV=1
MTLKISEIFGPTVQGEGALIGQPTVFVRSGGCDFRCSWCDSLHAVDSAYRHDWAAMETQAVWSEVQRLSGGRPLTVSLSGGNPAIQDFGPLIQQGKAEGYAFACETQGSIAKPWFADLAMLVLSPKPPSSGEDMDWTAFDACLNVRPAQTVLKIVIFDDTDFNWARSVADRHPDLPLYVQPGNPETDPASPVDLTNATSRMDWLIDKTLNAGWFAPRILPQLHVLIWGNKHGV

SEQ ID NO: 33820 - protein, 235 aa, Ruegeria sp.; identical to SEQ ID NO: 32730
  REGION 1..235: note = tr|B7QQ99|B7QQ99_9RHOB 7-carboxy-7-deazaguanine synthase OS=Ruegeria sp. R11 OX=439497 GN=queE PE=3 SV=1

SEQ ID NO: 33821 - protein, 217 aa, unidentified
  source 1..217: note = Rufibacter immobilis
  REGION 1..217: note = tr|A0A3M9MQX5|A0A3M9MQX5_9BACT 7-carboxy-7-deazaguanine synthase OS=Rufibacter immobilis; OX = 1348778 GN=queE PE=3 SV=1
METTLDIKIASIHTVPTDGTKLPLMEHFYTIQGEGYHTGKAAYFIRLGGCDIGCHWCDVKESWDANLHPLTDTDWIVQQAEQYPGKAVVVTGGEPLLYNLDYLTSELQKRGIQTFIETSGAYPLSGHWDWICLSPKKFKGPHASVLPHAGELKVIVFNKSDFAWAEEHAAQVGPNTRLYLQPEWSKAPQMMPLIVDYVKENPKWRISLQTHKFLNIP

SEQ ID NO: 33822 - protein, 193 aa, unidentified
  source 1..193: note = Rufibacter sp.
  REGION 1..193: note = tr|A0A3M9MC27|A0A3M9MC27_9BACT 7-carboxy-7-deazaguanine synthase OS=Rufibacter sp. R-22-1c-1 OX=2487040 GN=queE PE=3 SV=1
MEHFYTIQGEGYHTGKAAYFIRLGGCDIGCHWCDVKESWDANLHPLTDTDWIVQQAEQYPGKAVVVTGGEPLLYNLDYLTTELHKRGIQTFIETSGAYPLSGQWDWICLSPKKFKGPHPSVLPHAGELKVIVFNKSDFAWAEEHAAMVGPETRLYLQPEWSKADQMMPQIVEYVKSNPKWRISLQTHKFLNIP

SEQ ID NO: 33823 - protein, 214 aa, unidentified
  source 1..214: note = Rufibacter sp.
  REGION 1..214: note = tr|A0A127B6T8|A0A127B6T8_9BACT 7-carboxy-7-deazaguanine synthase OS=Rufibacter sp. DG15C; OX = 1379909 GN=queE PE=3 SV=1
MLEIKTASVHTVPKDGTKLPLMEHFYTIQGEGYHTGKAAYFIRLGGCDIGCHWCDVKESWDANLHPLTDTDWIVQQAIQYPGKAVVVTGGEPLLYNLDYLTNELQKRGVQTFIETSGAYPLSGTWDWICLSPKKFKGPHPNVLPHAGELKVIVFNKTDFAWAEEHAAYVGPETRLYLQPEWSKAEQIMPLIVEYVKENPKWQVSLQTHKFLNIP

SEQ ID NO: 33824 - protein, 217 aa, unidentified
  source 1..217: note = Rufibacter tibetensis
  REGION 1..217: note = tr|A0A0P0CVA9|A0A0P0CVA9_9BACT 7-carboxy-7-deazaguanine synthase OS=Rufibacter tibetensis; OX = 512763 GN=queE PE=3 SV=1
MEAIVDRKIASVYTVPKDGTKLPLMEHFYTIQGEGYHTGKAAYFIRLGGCDIGCHWCDVKESWDANLHPLTDTDWIVQQAEQYPGKAVVVTGGEPLLYNLDYLTSELQKRGIQTFIETSGAYPLSGTWDWICLSPKKFKGPHPTVQPQAGELKVIVFNKSDFAWAEEHAAQVGPETRLFLQPEWSKADQMMPLIVEYVKNNPKWRISLQTHKFLNIP

SEQ ID NO: 33825 - protein, 211 aa, Rugamonas rubra
  REGION 1..211: note = tr|A0A1I4R326|A0A1I4R326_9GAMM 7-carboxy-7-deazaguanine synthase OS=Rugamonas rubra; OX = 758825 GN=queE PE=3 SV=1
MTYSIKESFYTLQGEGAHAGRPAVFCRFSGCNLWSGRESDRATAVCQFCDTDFVGTDGDGGGKFATPAALAARIDGLWPAAYPANKYVVFTGGEPLLQLDAALIAALHAAGFEIAIETNGTLPVPPGVDWVCVSPKMGATLVVRQGDEIKVVVPQAGQDLAAYEGLRFEHFFVQPMDGPLAAFNTTLAIETCKRNPTWKLSLQTHKLLQIP

SEQ ID NO: 33826 - protein, 227 aa, unidentified
  source 1..227: note = Rugosibacter aromaticivorans
  REGION 1..227: note = tr|A0A0C5J6T6|A0A0C5J6T6_9RHOO 7-carboxy-7-deazaguanine synthase OS=Rugosibacter aromaticivorans OX=1565605 GN=queE PE=3 SV=1
MSVATTQPTASSVRSDALRVTEIFHSIQGESSRVGLPTVFIRLTGCPLRCTWCDTEYAFHGGGTIPIDAILAQVAEFHCTTVCVTGGEPLAQKNCLPLLVALCEAGYSVSLETSGALDIGGIDPRVSRIMDIKAPGSGETTKNRWENLDLLTAHDELKLVLASREDYEWAITACHQHRLFERCPVLFSPVQGQLEAGQLAQWIIDDKLPVRFQLQLHKVLWGNTPGR

SEQ ID NO: 33827 - protein, 227 aa, unidentified
  source 1..227: note = Rugosibacter sp.
  REGION 1..227: note = tr|A0A522Y6Q7|A0A522Y6Q7_9RHOO 7-carboxy-7-deazaguanine synthase OS=Rugosibacter sp.; OX = 1914450 GN=queE PE=3 SV=1
MSVATTQPTASSVRSDTLRVTEIFHSIQGESSRVGLPTVFIRLTGCPLRCTWCDTEYAFHGGGTIPIDAILAQVAEFHCTTVCVTGGEPLAQKNCLPLLVALCEAGYSVSLETSGALDIGGIDPRVSRIMDIKAPGSGETTKNRWENLDLLTAHDELKLVLASREDYEWAITACHQHRLFERCPVLFSPVQGQLEAGQLAQWIIDDKLPVRFQLQLHKVLWGNTPGR

SEQ ID NO: 33828 - protein, 230 aa, unidentified
  source 1..230: note = Rugosibacter sp.
  REGION 1..230: note = tr|A0A522XNM0|A0A522XNM0_9RHOO 7-carboxy-7-deazaguanine synthase OS=Rugosibacter sp.; OX = 1914450 GN=queE PE=3 SV=1
MSAVTLAAIQPAAPSVRSDTLRITEIFHSIQGESSRVGLPTVFIRLTGCPLRCTWCDTEYAFHGGGAMSIDAILAQVAEFNCATICVTGGEPLAQKNCLPLLGALCDADYSVSLETSGALDISGIDPRVSRIMDVKAPGSGEVTKNRWENLDLLTPHDELKLVLASREDYEWAMAACHQRRLFARCPVLFSPVQGQLEAGQLAQWIIDDKLPVRFQLQLHKVLWGNTPGR

SEQ ID NO: 33829 - protein, 248 aa, unidentified
  source 1..248: note = Ruminiclostridium papyrosolvens
  REGION 1..248: note = tr|U4R382|U4R382_9FIRM 7-carboxy-7-deazaguanine synthase OS=Ruminiclostridium papyrosolvens C7 OX=1330534; GN = queE PE=3 SV=1
MNLQQFEQSRMPIIEIFNSVSGEGVSAGSVMTFVRVAGCNLRCDYCDTKYSYNEFSNDIQELKPNEIVNILDNYNCKNVLCTGGEPLELNKVKRYLPLYLALKGFKVRIETNGSYPLYSKTELNDFVEDTNFLKLNYALDVKCPDSGMSNYNIYNENFKLLGSDDEIKFIVGSRRDLEFAFETIKEHRNILSQTGVTINFSPVFGKLDCIEIVNMLKEKNAYFEEYELTVRLSLQIHKFIWPLEARGV

SEQ ID NO: 33830 - protein, 249 aa, unidentified
  source 1..249: note = Ruminiclostridium papyrosolvens
  REGION 1..249: note = tr|F1TE88|F1TE88_9FIRM 7-carboxy-7-deazaguanine synthase OS=Ruminiclostridium papyrosolvens DSM 2782; OX = 588581 GN=queE PE=3 SV=1
MKLQDFEQRRIPIIEIFNSVSGEGISAGSVVTFVRAAGCNLRCNYCDTKYSYNELGNGIQVLKPDGIVNILESYNCKNVLCTGGEPLELNKAKRYLPLYLASKGFKVRIETNGSCPLYSKTELNDFAVDNISFLTLNYALDVKCPDSGMSNYNIYNENFELLGPEDEIKFIVGTRRDLKFAFETIKEYSNILSKTGVTINFLPVFGKLEAIEIVNMLKENNAYFEKYGLNVRLSLQIHKFIWPPEARGV

SEQ ID NO: 33831 - protein, 210 aa, unidentified; identical to SEQ ID NO: 30648
  source 1..210: note = Ruminiclostridium sp.
  REGION 1..210: note = tr|A0A3B8KMR1|A0A3B8KMR1_9FIRM 7-carboxy-7-deazaguanine synthase OS=Ruminiclostridium sp.; OX = 2053608 GN=queE PE=3 SV=1

SEQ ID NO: 33832 - protein, 223 aa, unidentified
  source 1..223: note = Ruminiclostridium sufflavum
  REGION 1..223: note = tr|A0A318XIR7|A0A318XIR7_9FIRM 7-carboxy-7-deazaguanine synthase OS=Ruminiclostridium sufflavum DSM 19573 OX=1121337 GN=queE PE=3 SV=1
MKYRVAEKFISINGEGNAAGQLAVFIRFAGCNLNCSYCDTKWANNVTGVKYNEFSEEDIFYYIKETGVENVTLTGGEPLLQEGIIQLLSLLSADGTLRVEIETNGSIELNKFINIKPRRPVFTMDYKLGSSEMETAMKTGNFELLCRQDTVKFVAGSIGDLETAKELIAKYHLTHKCQVHFSPVFGKIDMQTIVEFIKKNKMNGVRLQPQIHKIIWHPDMRGV

SEQ ID NO: 33833 - protein, 224 aa, unidentified
  source 1..224: note = Ruminococcaceae bacterium
  REGION 1..224: note = tr|A0A354HIY2|A0A354HIY2_9FIRM 7-carboxy-7-deazaguanine synthase OS=Ruminococcaceae bacterium OX=1898205 GN=queE PE=3 SV=1
MGTFRLAEHFISINGEGCKAGELALFLRFTGCNLRCSWCDTMWANGKDAPYTAVTTKDLVKTAEEAFSAGVRNITLTGGEPLLQPDIAELITALAETGMRTEIETNGAVLLKPFAGAQRPVFTMDYKLPSSGMERFMLTENFDLLNEQDSVKFVIGSGEDLERASQIIDEYRLAEKHCTLFFSPVFGKIEPAEMVEFMKERGLGSVRLQLQLHKFIWDPEKRGV

SEQ ID NO: 33834 - protein, 219 aa, unidentified
  source 1..219: note = Ruminococcaceae bacterium
  REGION 1..219: note = tr|A0A1G4W4B2|A0A1G4W4B2_9FIRM 7-carboxy-7-deazaguanine synthase OS=Ruminococcaceae bacterium P7 OX=1200751 GN=queE PE=3 SV=1
MYQVVEQFVSINGEGVCAGELAAFIRFKGCNLNCSYCDTKWANQTNAPYTEKTADELLAWAGGTGVCNITLTGGEPLLQTNIGELISLLIQNGFRVEIETNGSVFIGDLAESEHRPVFTMDYKLPESGMEQAMDCGNFGYLNGDDTVKFVAGSQNDLTRALEVTEKYQLRERCHVYFSPVFGKIDPAEMVAFMKENQLNGVRLQLQLHKFIWDPEKRGV

SEQ ID NO: 33835 - protein, 222 aa, Ruminococcus albus
  REGION 1..222: note = tr|E9S9P1|E9S9P1_RUMAL 7-carboxy-7-deazaguanine synthase OS=Ruminococcus albus 8 OX=246199 GN=queE PE=3; SV = 1
MEQLFSLAEHFISINGEGQRAGELALFLRFTGCDLRCVWCDTLWAVPKDAPHKDKDLRSLLDIARDAVSHGVRNVTLTGGEPLMQKGIVRLFEALLDMGLRVEIETNGSVALAPFIRDKRPDFNMDYKLPDSGMESRMIIDNISLLQANDTLKFVCASHRDLLRAYEVIQQTKPKCKVYFSPVFGKIEPADMVEFIKEKGLGEVRLQLQLHKFIWDPQKRGV

SEQ ID NO: 33836 - protein, 224 aa, Ruminococcus albus
  REGION 1..224: note = tr|A0A1I1NHV6|A0A1I1NHV6_RUMAL 7-carboxy-7-deazaguanine synthase OS=Ruminococcus albus; OX = 1264 GN=queE PE=3 SV=1
MGTFKLVESFVSINGEGRFAGELALFMRFAGCNLQCDWCDTKWANSADVAYTEKTVSQLADIAKSAAEEYGLHRVTLTGGEPLLQKDIAELINALNDIGIDVEIETNGSVPIVPVAEKSGVRPEFTMDYKLPSSGMESRMCLENLPQLKDSDTLKFVCASREDLERAAEVLEEYKPVCKVYLSPVFGRIEPKDMVEFMKEKKLGRVNLQLQLHKFIWDPNERGV

SEQ ID NO: 33837 - protein, 226 aa, Ruminococcus callidus
  REGION 1..226: note = tr|U2JR98|U2JR98_9FIRM 7-carboxy-7-deazaguanine synthase OS=Ruminococcus callidus ATCC 27760 OX=411473; GN = queE PE=3 SV=1
MRCENMNRLAVVEKFVSINGEGTHAGELAVFLRFRGCNLNCGFCDTKWANAADAPATEESAEELVEYVRQTGVQNVTLTGGEPLLQPHIGELITALGALGYRVEIETNGSVALEPFAALAFRPCFTMDYKLPDSGMESAMKPENFDLLRSQDAVKFVVGSRSDLNRALEVIRQYALTAKCTVFFSPVFGAIEPVEIVEFLEEHKLNRVRLQLQLHKLIWDPQKRGV

SEQ ID NO: 33838 - protein, 219 aa, Ruminococcus flavefaciens
  REGION 1..219: note = tr|A0A1H6KTH4|A0A1H6KTH4_RUMFL 7-carboxy-7-deazaguanine synthase OS=Ruminococcus flavefaciens OX=1265 GN=queE PE=3 SV=1
MLPVVEKFISINGEGAHAGELAAFIRFRGCNLCCSYCDTVWANCESAPADYETPEEIAEWVAEKGVENVTLTGGEPLMQKECDAVAELLMKQGCRVEIETNGSIYLGRLADAEYRPVFTMDYKLPSSGMEEFMCRDNFRLLGEHDTVKFVSGSKEDLERAAEIIEEYGLVGRCHVYISPVFGEIDPADIVTFMEERKMNGVRLQLQLHKFIWEPSRRGV

SEQ ID NO: 33839 - protein, 219 aa, Ruminococcus flavefaciens
  REGION 1..219: note = tr|A0A1H7LRH2|A0A1H7LRH2_RUMFL 7-carboxy-7-deazaguanine synthase OS=Ruminococcus flavefaciens OX=1265 GN=queE PE=3 SV=1
MLPVVEKFISINGEGAHAGELAAFIRFRGCNLCCSYCDTCWANTENAPAEFESADELARWVAETGVHNVTLTGGEPLLHKEAGELAELLIEKGCRVEIETNGSISLERLAAAKSRPVFTMDYKLPSSGMEEFMCKNNFRLLGCHDTVKFVSGSTDDLERAAELIKEYRLTERCHVFISPVFGEIDPADIVSFMEEHMMNGVRLQLQLHKFIWEPTRRGV

SEQ ID NO: 33840 - protein, 224 aa, Ruminococcus gnavus
  REGION 1..224: note = tr|A0A415S9L1|A0A415S9L1_RUMGN 7-carboxy-7-deazaguanine synthase OS=Ruminococcus gnavus; OX = 33038 GN=queE PE=3 SV=1
MKDDVRFEITEIFQTIQGEGILQGVPSIFIRFAECNLRCRWCDTTKEGIKKELLSWEEIDKQISQYTANHIVITGGEPMLYEDIKYLIGMLKNKGYHITVETNGTIYRKTSCDLVSISPKLKHSGNDSMNLKTIYPDVINQYINNNGYQLKFVVRDFEEDFNEVKEILKELPQVNYDKVLIMALSSSKADLERVQKQVIRLCIQNNLRYTTRLQLHVWDGENEI

SEQ ID NO: 33841 - protein, 221 aa, Ruminococcus lactaris
  REGION 1..221: note = tr|B5CRQ8|B5CRQ8_9FIRM 7-carboxy-7-deazaguanine synthase OS=Ruminococcus lactaris ATCC 29176 OX=471875; GN = queE PE=3 SV=1
MKVVEKFISINGEGRRAGELAVFIRFKGCNLNCSYCDTKWANEPACDYEELSPDDICEYVSETGIKNVTLTGGEPLLQKDIRSLVEKLLNKSDIRVEIETNGAVDIAPLANAFSKEKLSLTMDYKLPSSGCEEKMILSNMEVLRKQDTVKFVSGSVKDLECAEKIIGKFHLTERCQVFISPVFGSIEPVEIVNFMTSKRMNDVRLQIQMHKVIWNPEERGV

SEQ ID NO: 33842 - protein, 221 aa, Ruminococcus lactaris; identical to SEQ ID NO: 33841
  REGION 1..221: note = tr|A0A3E4LHH0|A0A3E4LHH0_9FIRM 7-carboxy-7-deazaguanine synthase OS=Ruminococcus lactaris; OX = 46228 GN=queE PE=3 SV=1

SEQ ID NO: 33843 - protein, 216 aa, Ruminococcus sp.
  REGION 1..216: note = tr|A0A373SQ83|A0A373SQ83_9FIRM 7-carboxy-7-deazaguanine synthase OS=Ruminococcus sp. AF25-17 OX=2293164 GN=queE PE=3 SV=1
MKVVEKFTSINGEGTRAGELAVFIRFKGCNLRCSYCDTMWANEPDCPYEEETPEEILNYVLGTGIRNVTLTGGEPLLQKDIRELIHLLLQAGLQVEIETNGAVDLSAFCEERPVFTMDYKLPSSGCEEYMITENMGLLGKDDTVKFVCGSKKDLLKALDVIQTYNLTNRCHVYLSPVFGSIEPVQIVEFMLKHRLNGVRLQIQMHKVIWDPNERGV

SEQ ID NO: 33844 - protein, 216 aa, Ruminococcus sp.
  REGION 1..216: note = tr|A0A373PZ11|A0A373PZ11_9FIRM 7-carboxy-7-deazaguanine synthase OS=Ruminococcus sp. AM57-5 OX=2293227 GN=queE PE=3 SV=1
MKVVEKFTSINGEGTRAGELAVFIRFKGCNLRCSYCDTMWANEPDCQYKEETPEEILNYVLETGIRNVTLTGGEPLLQKDIRELIHLLLQAGLQVEIETNGAVDLSAFCEERPVFTMDYKLPSSGCEEYMITENMELLGKDDTVKFVCGSQEDLLKALDVIQTYNLTNRCHVYLSPVFGSIEPVQIVEFMLKHQLNGVCLQIQMHKVIWDPNERGV

SEQ ID NO: 33845 - protein, 216 aa, unidentified
  source 1..216: note = [Ruminococcus] torques
  REGION 1..216: note = tr|A0A564UHH8|A0A564UHH8_9FIRM 7-carboxy-7-deazaguanine synthase OS=[Ruminococcus] torques OX=33039 GN=queE PE=3 SV=1
MKVVEKFTSINGEGTRAGELAVFVRFKGCNLRCSYCDTMWANEPDCPYEEETPEEILNYVLGTGIRNVTLTGGEPLLQKDIRELIYLLLQAGLQVEIETNGAVDLSAFCEERPVFTMDYKLPSSGCEEYMIVENMELLGKDDTVKFVCGSQKDLLKALDVIQIYNLTNRCHVYLSPVFGSIEPVQIVEFMLKHRLNGVRLQIQMHKVIWDPNERGV

SEQ ID NO: 33846 - protein, 216 aa, unidentified
  source 1..216: note = [Ruminococcus] torques
  REGION 1..216: note = tr|A0A174ZG94|A0A174ZG94_9FIRM 7-carboxy-7-deazaguanine synthase OS=[Ruminococcus] torques OX=33039 GN=queE PE=3 SV=1
MKVVEKFTSINGEGTRAGELAVFVRFKGCNLRCSYCDTMWANESDCPYEEETPEEILNYVLGTGIRNVTLTGGEPLLQKDIRELIYLLLQAGLQVEIETNGAVDLSAFCEERPVFTMDYKLPSSGCEEYMITENMELLGKDDTVKFVCGSQEDLLKALDVIQTYNLTNRCHVYLSPVFGSIEPVQIVEFMLKHRLNGVRLQIQMHKVIWDPNERGV

SEQ ID NO: 33847 - protein, 236 aa, Rummeliibacillus sp.
  REGION 1..236: note = tr|A0A3N6AAE2|A0A3N6AAE2_9BACL 7-carboxy-7-deazaguanine synthase OS=Rummeliibacillus sp. TYF005 OX=2058214 GN=queE PE=3 SV=1
MKIPVIEIFGPTIQGEGRKIGQKTMFVRTAGCDYRCHWCDSAFTWDGSEKNRIRLLDAEEIYDELKEIAGNNFQYVTISGGNPALIGKPMAEFIQLLRKDNIKVGLETQGSKWQEWFRLVDDLTISPKPPSSGMVTDLIVLDEIISRLPLEALSLKVVVFDDNDFLFAKRIHKRYPTAEFFLSVGNHNPNETGDIYPRLLKSLEWLWEKVIKDPEMNTVRALPQLHALVWSNKREV

SEQ ID NO: 33848 - protein, 193 aa, Runella sp.
  REGION 1..193: note = tr|A0A3C0UUF2|A0A3C0UUF2_9BACT 7-carboxy-7-deazaguanine synthase OS=Runella sp.; OX = 1960881 GN=queE PE=3 SV=1
MEAFYTLQGEGYHSGKAAYFIRLGGCDVGCVWCDVKESWDADIHPKHTLTQIVNEALQYPARMAVVTGGEPLMYDLGALTTELHNAGFETNIETSGAHPFSGTWDWVCFSPKKFKNPHESIYAQANELKVVVYHKSDFEFAEYHAARVNKDCVLLLQPEWSRMQEMTPLIVEYVKQHPQWRVSLQTHKYMDIP

SEQ ID NO: 33849 - protein, 200 aa, Runella sp.
  REGION 1..200: note = tr|A0A344TPT4|A0A344TPT4_9BACT 7-carboxy-7-deazaguanine synthase OS=Runella sp. HYN0085; OX = 2259595 GN=queE PE=3 SV=1
MNEVLPLMEAFYTLQGEGYHNGKAAYFIRLGGCDVGCVWCDVKESWDVEAHPKVSIKDMVEEALKHPARMAVVTGGEPLMHNLEPLTEALQAAGFHTNIETSGAHPMSGRWDWVCFSPKKFKAPHPSVYAQAHELKVIVYNKTDFEFAEQHAALVNKECVLLLQPEWSRVQEMTPLIVEYVKQHPQWRVSLQTHKYMDIP

SEQ ID NO: 33850 - protein, 213 aa, unidentified
  source 1..213: note = Ruthia magnifica
  REGION 1..213: note = tr|A1AW81|A1AW81_RUTMC 7-carboxy-7-deazaguanine synthase OS=Ruthia magnifica subsp. Calyptogena magnifica; OX = 413404 GN=queE PE=3 SV=1
MINIKLNINEIFYSLQGEGREVGLPSVFIRLTGCPLRCTYCDTEYAFKGNNLMAIDEIIKKIKQYDTPYICVTGGEPLAQKNCCLLLNELVKNNYQVSLETSGSINIQDVNVSVSIVMDIKTPDSGEFEQNKYTNIKKLTTKDQLKFVIRSRADFDWSVAILSQYPTAAGTLFSPVFGDITPTQLADWILDQQLNVRMQLQLHKLLWGDEKGK

SEQ ID NO: 33851 - protein, 247 aa, Saccharibacillus sp.
  REGION 1..247: note = tr|A0A4Y6UX42|A0A4Y6UX42_9BACL 7-carboxy-7-deazaguanine synthase OS=Saccharibacillus sp. ATSA2 OX=2583377 GN=queE PE=3 SV=1
MNVSASSRPIPVLEVFGPTIQGEGMSIGRKTMFVRTAGCDYRCSWCDSKFTWDGSAKDQIRMLSPEQIVDELLDLGGDTFDHVTISGGNPLLLPQIAYLIQELHGRGIRTAVETQGSRWQDWLVRIDEVTLSPKPPSSGMETDFDVLDDIVARLREASGRRDLCLKIVIFDEEDLTYARFVHKRYPDVPFILQTGNPQVAGEVQDHVSSLLQRYEWLIGRLSDLPDLKDARALPQLHTLVWGNKRGV

SEQ ID NO: 33852 - protein, 251 aa, Saccharibacillus sp.
  REGION 1..251: note = tr|A0A254NTA7|A0A254NTA7_9BACL 7-carboxy-7-deazaguanine synthase OS=Saccharibacillus sp. O23 OX=2009338 GN=queE PE=3 SV=1
MSDSVSKKTTERAIPVLEIFGPTIQGEGMAIGRKTMFVRTAGCDYRCSWCDSKFTWDGSAKDEIRMLSAEEILAKLLELGGDTFDHVTISGGNPLLLPQIALLVQRLHERGIRVAVETQGSRWQDWLVRIDEVTLSPKPPSSGMETDFEILDSIVSRLSEAPGRRDLCIKIVIFDEDDLTYARDVHRRYPNVPFILQTGNPQVSHESDDHVSSLLRRYEWLIGRLSDLPDLKDARALPQLHTLVWGNKRGV

SEQ ID NO: 33853 - protein, 225 aa, Saccharibacter sp.
  REGION 1..225: note = tr|A0A060QBC7|A0A060QBC7_9PROT 7-carboxy-7-deazaguanine synthase OS=Saccharibacter sp. AM169 OX=1343158 GN=queE PE=3 SV=1
MHPERSCPTSLPMPYIVKELFATLQGEGAHSGRAAIFCRFTGCNLWSGREEDRHKAQCTFCDTDFIGTDGPGGGRFATAEALAAALDDCWLAHTADVTRRYVVFTGGEPLLQLDAALIAATRARGFTIAVETNGSLPAPEGIDWVCVSPKPGQPLKQTHGHELKLVYPQDTLTPEQFAACDFQHFWLQPMDGPDRPANTEKAVRYCQTHPQWRLSLQTHKLIGIP

SEQ ID NO: 33854 - protein, 277 aa, unidentified
  source 1..277: note = Saccharicrinis carchari
  REGION 1..277: note = tr|A0A521B8G5|A0A521B8G5_9BACT 7-carboxy-7-deazaguanine synthase OS=Saccharicrinis carchari OX=1168039 GN=queE PE=3 SV=1
MLVGEGVFPIVMDAKGNAIAEVPATGWNLSGTVQGEGKLAGTPSLFIRLATCNLRCIWQMDDGSFCRCDTAYASFHPDDKKAWTVEEIVKVVKHNIGAMQHVVITGGEPLLQKKGVLALCKSIKEELNLHITIETNGTIFDQELTQFVDLFSISPKLSNSVPSAQKLKFYNEAETGSSRFHHEVRRNLNALQSYIDTAQDLQLKFVVAKQSDADEITKDYLKVLQRYNKNDIMLMPLGATQHEITKSNPIVLQMCLQNGWKYTPRIHIDIFGSKQGV

SEQ ID NO: 33855 - protein, 259 aa, unidentified
  source 1..259: note = Saccharicrinis fermentans
  REGION 1..259: note = tr|W7Y0Y6|W7Y0Y6_9BACT 7-carboxy-7-deazaguanine synthase OS=Saccharicrinis fermentans DSM 9555 = JCM 21142; OX = 869213 GN=queE PE=3 SV=1
MIVEEKIEKEEVVSNNIHSAQLVLVGEGVFPITRDADMKAVDCVPNTGLAISGTIQGEGKLAGTPSLFIRLASCNLRCIWQMEDGSLCKCDTSYASFHPEDKKTWSVEEVVNTLKNNMGQIKHVVISGGEPLLQKKGVAALCKMIKEKLHLHITLETNGTIFDKEVAQYIDLFSISPKLSNSVPSKEKLQFYREDETGASKYHHEVRRNLKVLQSYIYFANVTSKDVQLKFVVGKASDADEIKKDYLDLLLGYSRKILC

SEQ ID NO: 33856 - protein, 240 aa, Saccharomonospora marina
  REGION 1..240: note = tr|H5WZ64|H5WZ64_9PSEU 7-carboxy-7-deazaguanine synthase OS=Saccharomonospora marina XMU15 OX=882083; GN = queE PE=3 SV=1
MKLPAVSDVDRELVVNETFGPTFQGEGPSTGRYAHFVRLFGCHLSCIWCDSPQTHDATRCDLADEQRVLSIEDILSWLAAGPADLLVVTGGEPLLQPHVVGRLLGAIRERALATDIEIETSGTIAPTDMITSAVTRFNVSPKLSHSGLRRHQRIRPAVLRDLADSGKAVWKFVVQALDDLDEIQELVDTYGLHPVWVMPEGTDSSTVLARMRMLADPVLARRWNLSTRLHTLLWENDRGR

SEQ ID NO: 33857 - protein, 211 aa, Saccharomonospora sp.
  REGION 1..211: note = tr|A0A4P7CAP7|A0A4P7CAP7_9PSEU 7-carboxy-7-deazaguanine synthase OS=Saccharomonospora sp. 31sw OX=2528243 GN=queE PE=3 SV=1
MTYLIKEIVYTLQGEGSHTGRPAVFCRFSRCNLWTGFEKDRYRAICKFCDTDFVGTDGVGGGRFSTADELADAVEAAWPSDARNNRFVVCTGGEPLLQLDAAAIDALHHRGFEVAVETNGTRTPPAGVDWLCVSPKIGADLVVTSGDELKLVYPQAGGDPAQFEHLDFRSFRLQPLDDEDRQSHTEAAVEYCMKNPRWSLSLQTHKYLGIR

SEQ ID NO: 33858 - protein, 240 aa, Saccharomonospora sp.
  REGION 1..240: note = tr|A0A1Q9UVP1|A0A1Q9UVP1_9PSEU 7-carboxy-7-deazaguanine synthase OS=Saccharomonospora sp. CUA-673 OX=1904969 GN=queE PE=3 SV=1
MTTPRPSVARPLLVSECFGPTVQGEGPSAGKPAVFIRLSRCNLSCPGCDTPYTWDWSRFDPRRESRRMSVDDLYRWVTTQLVDLVVISGGEPLLQQESLRPLVRSLAEAGHRIEIETNGTVVPNSDIIDSVDQFNVSPKTSAFAGTAVEWDARINPEALRVFTSSKKSIFKFVVTQEGDLDEISQYTEEFDLSPLWVMPEGTTREQVLDRMSWLAEEAVRRSWNLSTRLHILLWGDERGR

SEQ ID NO: 33859 - protein, 216 aa, Saccharophagus degradans
  REGION 1..216: note = tr|Q21HP3|Q21HP3_SACD2 7-carboxy-7-deazaguanine synthase OS=Saccharophagus degradans (strain 2-40 / ATCC 43961 / DSM 17024) OX=203122 GN=queE PE=3 SV=1
MADSGLRITEIFHSLQGEARTVGLPTVFVRLTGCPLRCHYCDSEYAFHGGERLSFEQILEQVAGFGAKYVCVTGGEPLAQPGCIDLLSRLCDLGYNVSLETSGAMDVSKVDHRVSIVLDLKTPASGEQDKNLYTNIPLLKLKDQVKFVICDRGDYDWARFQLDQLQLVSKVGDVLFSPSFEQLAPKQLAEWILDDRLPVRFQMQLHKQLWGDTPGV

SEQ ID NO: 33860 - protein, 211 aa, Saccharospirillum sp.
  REGION 1..211: note = tr|A0A2T6E4T5|A0A2T6E4T5_9GAMM 7-carboxy-7-deazaguanine synthase OS=Saccharospirillum sp. MSK14-1 OX=1897632 GN=queE PE=3 SV=1
MFYTLQGEGAQAGRPAVFCRFTGCNLWSGRDQDRATAVCTFCDTDFLGTDGPGGGRFADAQSLSRAIAALWPEETDGTPYVVFTGGEPSLQLTEALIDQLHSAHFECAIETNGTRPLPANLDWICVSPKGNSEVIIQRCNELKLVYPQPEAPPERFASIEASYRFLSPLNPFDAAQIAPAQQSSTRAAIDYCLAHPQWRLTVQMHKVVNIA

SEQ ID NO: 33861 - protein, 245 aa, Saccharothrix australiensis
  REGION 1..245: note = tr|A0A495VWY3|A0A495VWY3_9PSEU 7-carboxy-7-deazaguanine synthase OS=Saccharothrix australiensis OX=2072 GN=queE PE=3 SV=1
MTAARTAGPDDVLVVNEIFGPTVQGEGPSAGTRCAFLRLGGCNLTCSWCDTPYTWDWKGVSEHGRPHDPRAELHPMRAHEVLDRLRAFGVGLVVVSGGEPLTQQHRLRHVLAGLRRAGVEVEVETNGTIPPSPELVELGVWFNVSPKLRHSGVDPARALVGEALTEFAACGRGRFKFVCRDRADLVEVAEVVDAHGLSPVWIMPLGRSADAVLAGLRELADATVRRGWNLTPRLHVLAWEDRRGV

SEQ ID NO: 33862 - protein, 211 aa, Saccharothrix espanaensis
  REGION 1..211: note = tr|K0JXB9|K0JXB9_SACES 7-carboxy-7-deazaguanine synthase OS=Saccharothrix espanaensis (strain ATCC 51144 / DSM 44229 / JCM 9112 / NBRC 15066 / NRRL 15764); OX = 1179773GN=queE PE=3 SV=1
MTYLVKEIFYTLQGEGAHSGRPAVFCRFSRCNLWTGHEKDRARAVCRFCDTDFVGIDGPGGGRFATPAELADAVEAAWPTLGKARRFVVCTGGEPLLQLDEVAVQTLHERGFEVAVETNGTRVPPPGIDWLCVSPKVGAELVVESGDELKFVYPQEGVNPARFEHLDFRSFRLQPLDDHNLDDNTKAAISYCLANPRWSLSLQTHKYLGTR

SEQ ID NO: 33863 - protein, 237 aa, Saccharothrix sp.
  REGION 1..237: note = tr|A0A0F0HLS1|A0A0F0HLS1_9PSEU 7-carboxy-7-deazaguanine synthase OS=Saccharothrix sp. ST-888 OX=1427391 GN=queE PE=3 SV=1
METRRVEAGPGRGLLVAESFGPTFQGEGPSVGQQALFIRLSRCNLHCPGCDTPETWDWSRYNPREVATRHSVEDLAAWVTSRPLARIVLTGGEPLLQQDQLVGLARLLPGHRIEVETNGTIVPLPELVSLVEAFNVSPKLADFAAPGDRRINNQALRALASCGKARFKFVVQDESELNEVAALVDEFSLTDVWVMPEGTSSATVLAGMRKLADAVLEYGWNLSTRLHILIWEAQRGR

SEQ ID NO: 33864 - protein, 211 aa, Saccharothrix sp.
  REGION 1..211: note = tr|A0A1V2Q612|A0A1V2Q612_9PSEU 7-carboxy-7-deazaguanine synthase OS=Saccharothrix sp. ALI-22-I OX=1933778 GN=queE PE=3 SV=1
MTYLIKEIFFTLQGEGSHAGRPAVFCRFSRCNLWTGLEKDRYRAICKFCDTDFVGTDGTGGGRFATPDELAEAVERAWPSDARDNRFVVCTGGEPLLQLDAAAVDAFHVRGFEVAVETNGTRVPPAGIDWLCVSPKIGADLVVTSGDELKLVYPQVGGDPAQFEHLDFRSFRLQPLDDRERESHTRAAVEYCMKNPRWSLSLQTHKYLGIR

SEQ ID NO: 33865 - protein, 211 aa, Saccharothrix variisporea
  REGION 1..211: note = tr|A0A495X900|A0A495X900_9PSEU 7-carboxy-7-deazaguanine synthase OS=Saccharothrix variisporea OX=543527 GN=queE PE=3 SV=1
MTYLVKEIFYTLQGEGTHAGRPAVFCRFSRCNLWTGLEKDRYRAICKFCDTDFVGTDGTGGGRFSTADDLAEAVESAWPSEARENRFVVCTGGEPLLQLDDAAVAALHERGFEVAVETNGTRVPPVGVDWLCVSPKIGAELVVTGGDELKLVYPQVGGDPAQFEHLDFRTFRLQPLDDAERDSHTRAAVEYCMKNPRWSLSLQTHKYLGIR

SEQ ID NO: 33866 - protein, 234 aa, Saccharothrix variisporea
  REGION 1..234: note = tr|A0A495X6D2|A0A495X6D2_9PSEU 7-carboxy-7-deazaguanine synthase OS=Saccharothrix variisporea OX=543527 GN=queE PE=3 SV=1
MNTLSLAPERAEGSAILTEKFESFQGEGPWTGQRCVFVRFSRCNLRCGYCDTPESWDWSRYNPAEVSARVPVAELVSWVRERGVDLMVITGGEPMLQQPAMTALARGLADVRVQVETNGTVAPTPELASLVDLWVVSPKLANSGMPYSTRIKPDALSALVATDRAVFKFVVTEPDRDLDEIAHLVEEHQLAPVWVMPEGTTREKVLAGMDALYHRATERGWNVSTRLHILTGAR

SEQ ID NO: 33867 - protein, 210 aa, Salegentibacter agarivorans
  REGION 1..210: note = tr|A0A1I2LLU7|A0A1I2LLU7_9FLAO 7-carboxy-7-deazaguanine synthase OS=Salegentibacter agarivorans OX=345907 GN=queE PE=3 SV=1
MITEETKALVDDGIMLPLMEEFYTIQGEGFHKGTAAYFIRIGGCDVGCHWCDVKESWDPNIHPPTHIGEIVEKAVASSKTIVITGGEPLTWDMTRLTGALKAKGCDIHIETSGAYKLTGQWDWICLSPKKIKLPTEEIYPLAHELKVIIFNKHDFKFAEEQAEKVSENCILYLQPEWSNRDKMMPLIVDFVMKHPKWKVSLQTHKYLNIP

SEQ ID NO: 33868 - protein, 210 aa, unidentified
  source 1..210: note = Salegentibacter echinorum
  REGION 1..210: note = tr|A0A1M5GQ94|A0A1M5GQ94_9FLAO 7-carboxy-7-deazaguanine synthase OS=Salegentibacter echinorum OX=1073325 GN=queE PE=3 SV=1
MITEETKTLVDDGIMLPLMEEFYTIQGEGYHKGTAAYFIRIGGCDVGCHWCDVKESWDPAIHPPTHIGEIVEHAIAKSKTIVITGGEPLTWDMTRLTGALKAKGCAIHIETSGAYKLTGQWDWICLSPKKIKLPTEEIYPLANELKVIVFNKHDFKFAEEQAAKVSKDCHLYLQPEWSNREKMMPQIVDFVMENPKWKVSLQTHKYLNIP

SEQ ID NO: 33869 - protein, 210 aa, Salegentibacter flavus
  REGION 1..210: note = tr|A0A1I4XTQ4|A0A1I4XTQ4_9FLAO 7-carboxy-7-deazaguanine synthase OS=Salegentibacter flavus OX=287099 GN=queE PE=3 SV=1
MITEDTRRLVDEGIMLPLMEEFYTIQGEGFHKGTAAYFIRIGGCDVGCHWCDVKESWDAGLHPPTHIGKIIENATAYSDTVVVTGGEPLTWDMTQLTQGLKNKGSKIHIETSGAYKLSGQWDWICLSPKKKKLPTDEIYPLANELKMIIFNKHDFKFAEEQAAKVSEDCILYLQPEWSKRDKMMPLIVDYVMKNPKWKVSLQTHKYLNIP

SEQ ID NO: 33870 - protein, 210 aa, Salegentibacter holothuriorum
  REGION 1..210: note = tr|A0A1T5CH92|A0A1T5CH92_9FLAO 7-carboxy-7-deazaguanine synthase OS=Salegentibacter holothuriorum OX=241145 GN=queE PE=3 SV=1
MITEETKALVDDGIMLPLMEEFYTIQGEGFHKGTAAYFIRIGGCDVGCHWCDVKESWDPSIHPPTHIGEIVEKAVSNSKTIVITGGEPLTWDMTRLTGALKAKGCDIHIETSGAYKLTGQWDWICLSPKKIKLPTEEIYPLAHELKVIIFNKHDFKFAEEQAEKVSENCILYLQPEWSNRDKMMPLIVDFVMKNPKWKVSLQTHKYLNIP

SEQ ID NO: 33871 - protein, 210 aa, Salegentibacter mishustinae
  REGION 1..210: note = tr|A0A0Q9Z6C7|A0A0Q9Z6C7_9FLAO 7-carboxy-7-deazaguanine synthase OS=Salegentibacter mishustinae OX=270918 GN=queE PE=3 SV=1
MITEETKALVDDGIMLPLMEEFYTIQGEGFHKGTAAYFIRIGGCDVGCHWCDVKESWDPSIHPPTHIGEIVEKAVASSKTIVITGGEPLTWDMTRLTGALKAKGCDIHIETSGAYKLTGQWDWICLSPKKIKLPTEEIYPLAHELKVIIFNKHDFKFAEEQAEKVSENCILYLQPEWSNRDKMMPLIVDFVMKNPKWKVSLQTHKYLNIP

SEQ ID NO: 33872 - protein, 210 aa, Salegentibacter salarius; identical to SEQ ID NO: 33871
  REGION 1..210: note = tr|A0A2N0U0R0|A0A2N0U0R0_9FLAO 7-carboxy-7-deazaguanine synthase OS=Salegentibacter salarius OX=435906 GN=queE PE=3 SV=1

SEQ ID NO: 33873 - protein, 210 aa, Salegentibacter salegens
  REGION 1..210: note = tr|A0A1M7I388|A0A1M7I388_9FLAO 7-carboxy-7-deazaguanine synthase OS=Salegentibacter salegens OX=143223 GN=queE PE=3 SV=1
MITEETKALVDDGIMLPLMEEFYTIQGEGFHKGTAAYFIRIGGCDVGCHWCDVKESWDPNIHPPTHIGEIVEKAVASSKTIVITGGEPLTWDMTRLTGALKDKGCDIHIETSGAYKLTGQWDWICLSPKKIKLPTEEIYPLAHELKVIIFNKHDFKFAEEQAEKVSENCILYLQPEWSNRDKMMPLIVDFVMKNPKWKVSLQTHKYLNIP

SEQ ID NO: 33874 - protein, 210 aa, Salegentibacter salinarum
  REGION 1..210: note = tr|A0A2N0TPA5|A0A2N0TPA5_9FLAO 7-carboxy-7-deazaguanine synthase OS=Salegentibacter salinarum OX=447422 GN=queE PE=3 SV=1
MITEETKALVDDGIMLPLMEEFYTIQGEGFHKGTAAYFIRIGGCDVGCHWCDVKESWDPSIHPPTHIGEIVEKAVASSKTIVITGGEPLTWDMTRLTGALKAKGCDIHIETSGAYKLTGQWDWICLSPKKIKLPTEEIYPLAHELKVIIFNKHDFKFAEEQAEKVSENCILYLQPEWSNREKMMPLIVDYVMKNPKWKVSLQTHKYLNIP

SEQ ID NO: 33875 - protein, 210 aa, Salegentibacter sp.
  REGION 1..210: note = tr|A0A4R6FRU9|A0A4R6FRU9_9FLAO 7-carboxy-7-deazaguanine synthase OS=Salegentibacter sp. 24 OX=2183986 GN=queE PE=3 SV=1
MITEETKALVDDGIMLPLMEEFYTIQGEGFHKGTAAYFIRIGGCDVGCHWCDVKESWDPSIHPPTHIGKIVEKAVASSKTIVITGGEPLTWDMTRLTGALKSKGCDIHIETSGAYKLTGQWDWICLSPKKIKLPTQEIYPLAHELKVIIFNKHDFQFAEEQAAKVSKNCILYLQPEWSNREKMMPLIVDFVMKNPKWKVSLQTHKYLNIP

SEQ ID NO: 33876 - protein, 210 aa, Salegentibacter sp.; identical to SEQ ID NO: 33867
  REGION 1..210: note = tr|A0A1L6QZG2|A0A1L6QZG2_9FLAO 7-carboxy-7-deazaguanine synthase OS=Salegentibacter sp. T436 OX=1729720 GN=queE PE=3 SV=1

SEQ ID NO: 33877 - protein, 239 aa, unidentified
  source 1..239: note = Salibacterium halotolerans
  REGION 1..239: note = tr|A0A1I5T421|A0A1I5T421_9BACI 7-carboxy-7-deazaguanine synthase OS=Salibacterium halotolerans OX=1884432 GN=queE PE=3 SV=1
MKKVPVLEIFGPTIQGEGMVIGRKTMFLRTGGCDYRCSWCDSAFTWDGSQKPDILDASDIVEWLEMEGGSFFNHVTISGGNPALHEGLGEVNRLLQEKGIQTAVETQGSFWQEWMTEIDDVTISPKPPSSGMKTNWEHLDMYISRLKDRETKKVSLKVVIFDDTDLSYAADVHERYPEVEMFLQTGNDEISTADDQWLLSHLLNRYEWLVEQVLHSNRLNDVKVLPQLHTLLWGNKQGV

SEQ ID NO: 33878 - protein, 239 aa, unidentified
  source 1..239: note = Salibacterium qingdaonense
  REGION 1..239: note = tr|A0A1I4IF39|A0A1I4IF39_9BACI 7-carboxy-7-deazaguanine synthase OS=Salibacterium qingdaonense OX=266892 GN=queE PE=3 SV=1
MKKVPVLEIFGPTIQGEGMVIGRKTMFLRTGGCDYRCSWCDSAFTWDGSQKPDLLEASDIVERLEMEGGSFFNHVTISGGNPALHEGLGEVNRLLQEKGIQTAVETQGSFWQEWMTEIDDVTISPKPPSSGMKTNWEQLDAYIRRLKDRDTKKVSLKVVIFDDTDLSYAADVHERYPEVEMFLQTGNDELSTADDQWLLSHLLTRYEWLVEQVLHANRLNDVKVLPQLHTLLWGNKQGV

SEQ ID NO: 33879 - protein, 240 aa, unidentified
  source 1..240: note = Salilacibacter sp.
  REGION 1..240: note = tr|A0A514LL67|A0A514LL67_9ACTN 7-carboxy-7-deazaguanine synthase OS=Salilacibacter sp. NKC3-5 OX=2502791 GN=queE PE=3 SV=1
MSGKIPVLEIFGPTIQGEGMVAGQKTMFVRTGGCDYRCAWCDSAFTWDGSQKATPMKADDILAELEQIAGDRFSHVTISGGNPALHSGIDALVERFREKGIASAVETQGSFWQDWLLAVDEVTVSPKPPSSKMTTDWSRLDTFMKRLAEEQVGHHSLKVVIFDEEDLTYAKQVHERYPDVLFYLQVGNDDLETPEPARLRDHLLEKYEWLVVRVMDERQLNDVRVLPQIHALLWGNKQGV

SEQ ID NO: 33880 - protein, 242 aa, Salimicrobium flavidum
  REGION 1..242: note = tr|A0A1N7IR52|A0A1N7IR52_9BACI 7-carboxy-7-deazaguanine synthase OS=Salimicrobium flavidum OX=570947 GN=queE PE=3 SV=1
MAKFPVLEIFGPTIQGEGMVVGRKTMFVRTAGCDYSCSWCDSAFTWDGSAKEEIEKLEADEIITRLQEEGGDHFDHVTISGGNPALLARLDELIDPLHELGIEVALETQGSRWQDWFTTIDDLTISPKPPSSNMNTNWETLDLILRKLRKAGRSRNVSLKVVIFDKEDLAYAEYVHKRYPNLAFFLQVGNDDLEEDSPSDLASTLLLKYEWLIDQVMASSALNRVRVLPQVHALVWGNKRGV

SEQ ID NO: 33881 - protein, 242 aa, Salimicrobium halophilum
  REGION 1..242: note = tr|A0A1G8T6W8|A0A1G8T6W8_9BACI 7-carboxy-7-deazaguanine synthase OS=Salimicrobium halophilum OX=86666 GN=queE PE=3 SV=1
MAKFPVLEIFGPTIQGEGMVVGRKTMFVRTAGCDYSCAWCDSAFTWDGSAKEEIEKLEADEIIARLQEEGGDHFDHVTISGGNPALLARLDELIDPLHELGIEVALETQGSRWQDWFTEIDDLTISPKPPSSKMNTNWETLDLILEKLDDAGRSKNVSLKVVIFDKEDLAYAEYVHKRYPNLSFFLQVGNDDLEEDSPSGLASTLLSKYEWLIDQVMASSALNRVRVLPQVHTLVWGNKRGV

SEQ ID NO: 33882 - protein, 240 aa, Salinibacter sp.
  REGION 1..240: note = tr|A0A2P6C057|A0A2P6C057_9BACT 7-carboxy-7-deazaguanine synthase OS=Salinibacter sp. 10B; OX = 1923971 GN=queE PE=3 SV=1
MPRPFSAPSYRVKHVFQTVQGEGFWVGRPALFVRLVSCNMWSGYEADRARDADRTGADCPRWCDTDFTKEGASTLTADQLTDQMREIGGPAIDFCVLTGGEPLLQADAALVHALHEAGYEVALETNGTVPLADAFGNDNSEQLHTPDWVTCSPKRPEDQLALERYDELKLIVPDYRPSNYAQFAEHATPHSINGRERRLLWLQPEDGPRLEEAQAMAVDLALKHPEWRVSTQTHKVLNVK

SEQ ID NO: 33883 - protein, 240 aa, Salinicoccus alkaliphilus
  REGION 1..240: note = tr|A0A1M7EZD1|A0A1M7EZD1_9STAP 7-carboxy-7-deazaguanine synthase OS=Salinicoccus alkaliphilus DSM 16010 OX=1123231 GN=queE PE=3 SV=1
MMKVPVLEIFGPTFQGEGAVIGQKTMFVRTAGCDYQCSWCDSKFTWDGSQQENIRMMTADDIFASLDALAEGNYNHVTISGGNPLLLKNLREFVESAKAKGVKLAVETQGTMYQDWLQGIDDVTISPKPPSSGMVTDYGKLDYIFTKLDESGTAYNLKVVIFDEEDFEYAVHMHQKYAKVDFYLQVGNPYLDGEDIENHTEKLLNRYENLVDRTMRDSRVNDVRVLPQLHTLLWSNKQGV

SEQ ID NO: 33884 - protein, 239 aa, Salinicoccus halodurans
  REGION 1..239: note = tr|A0A0F7HJC3|A0A0F7HJC3_9STAP 7-carboxy-7-deazaguanine synthase OS=Salinicoccus halodurans OX=407035 GN=queE PE=3 SV=1
MMKVPVLEIFGPTFQGEGAVIGRKTMFVRTAGCDYSCSWCDSAFTWDGSQKENIRMMSPEDIFGSLDELAEGNYNHVTISGGNPALLKNMEAFVEKAKGKGIELAMETQGTVFQEWMKQVDDVTVSPKPPSSNMNTDFDRLDRVLAGLDGGDGSYNLKVVVFDDGDFEYAATVHLKYPSIPFYLQVGNPYLGNNVENHTQKLLERYGELVEKTMEDPRMNDARVLPQLHTLLWSNKQGV

SEQ ID NO: 33885 - protein, 239 aa, unidentified
  source 1..239: note = Salinicoccus kekensis
  REGION 1..239: note = tr|A0A285URR4|A0A285URR4_9STAP 7-carboxy-7-deazaguanine synthase OS=Salinicoccus kekensis; OX = 714307 GN=queE PE=3 SV=1
MKIPVLEIFGPTFQGEGAVIGQKTMFVRTAGCDYQCSWCDSKFTWDGSQKENIRMMTAEDIFASLDALAKDNYSHVTISGGNPLLLKNLSDFVEKAKSKNIRLAVETQGTMYQDWLQMIDDVTISPKPPSSGMVTDYGKLEHIFAKLDESGTSYNLKVVIFDDADFEYAADLHRKYRDVAFYLQVGNPYLDGESVDNHTEKLLSRYEDLVDRTMNDKRMNEVRVLPQLHTLLWSNKQGV

SEQ ID NO: 33886 - protein, 240 aa, Salinicoccus qingdaonensis
  REGION 1..240: note = tr|A0A1G9DKH9|A0A1G9DKH9_9STAP 7-carboxy-7-deazaguanine synthase OS=Salinicoccus qingdaonensis OX=576118 GN=queE PE=3 SV=1
MMKIPVLEIFGPTFQGEGAVIGQKTMFVRTAGCDYQCSWCDSKFTWDGSQKENIRMMSADDIFESLDTLAENNYNHVTISGGNPLLLKNLQAFVEQAKEKGIQLAVETQGSMYQDWLQLIDDVTISPKPPSSGMETDYGRLEYIFTKLDESETSYNLKIVIFDEEDFEYAADMHRRYPDKAFYLQVGNPYLDGESVDNHTEKLLSRYEKLVDMTMNDSRMNNVRVLPQLHTLLWSNRQGV

SEQ ID NO: 33887 - protein, 238 aa, Salinicoccus roseus
  REGION 1..238: note = tr|A0A3N4TA17|A0A3N4TA17_9STAP 7-carboxy-7-deazaguanine synthase OS=Salinicoccus roseus; OX = 45670 GN=queE PE=3 SV=1
MKVPVLEIFGPTFQGEGAVIGQKTMFVRTAGCDYSCSWCDSAFTWDGSQKDKIRMMDGDDILAALDDLAPGNYNHVTISGGNPALLKNMQDFVEKAKARGIKLAVETQGTMFQEWLAVIDDVTISPKPPSSGMDTDFRKLERVMAGLDEGTAHYNLKVVVFDEKDFEYAADVHGKYPHVDFYLQVGNPYLGDNVEGHTFKLLERYEWLVDMAMADPRMNDAKVLPQLHTLLWSNKQGV

SEQ ID NO: 33888 - protein, 239 aa, Salinicoccus roseus
  REGION 1..239: note = tr|A0A0C2HJ47|A0A0C2HJ47_9STAP 7-carboxy-7-deazaguanine synthase OS=Salinicoccus roseus; OX = 45670 GN=queE PE=3 SV=1
MMKVPVLEIFGPTFQGEGAVIGQKTMFVRTAGCDYSCSWCDSAFTWDGSQKDKIRMMDGDDILAALDDLAPGNYNHVTISGGNPALLKNMQDFVEKAKARGIKLAVETQGTVFQEWLAVIDDVTISPKPPSSGMDTDFRKLERVMAGLDEGPAHYNLKVVVFDEKDFEYAADVHGKYPHVDFYLQVGNPYLGDNVEGHTFKLLERYERLVDMAMADPRMNDAKVLPQLHTLLWSNKQGV

SEQ ID NO: 33889 - protein, 239 aa, unidentified
  source 1..239: note = Salinicoccus sediminis
  REGION 1..239: note = tr|A0A0M2SJY1|A0A0M2SJY1_9STAP 7-carboxy-7-deazaguanine synthase OS=Salinicoccus sediminis OX=1432562 GN=queE PE=3 SV=1
MMKVPVLEIFGPTFQGEGAVIGQKTMFVRTAGCDYSCSWCDSAFTWDGSQKENIRMMTSEDIFRSLDGLAAGNYNHVTISGGNPALLKNLEPFVTAAKDRGIALAMETQGTVFQEWMGRVDDVTVSPKPPSSGMETDFDRLDRVLAGLEAGYGAYNLKVVVFDKRDFEYAAYVHMKYPSVPFYLQTGNPYLGENVVNHTEKLLGRYGELVEMTMGDARMNDARVLPQLHTLLWSNKQGV

SEQ ID NO: 33890 - protein, 239 aa, Salinicoccus sp.
  REGION 1..239: note = tr|A0A558AQY9|A0A558AQY9_9STAP 7-carboxy-7-deazaguanine synthase OS=Salinicoccus sp. CT19; OX = 2493691 GN=queE PE=3 SV=1
MMKVPVLEIFGPTFQGEGAVIGQKTMFVRTAGCDYSCSWCDSAFTWDGSQKENIRMMTADEILASLDHLAAGNYNHVTISGGNPALLKNMQEFVTKAKERGIRLAVETQGTVYQEWLSEIDDVTISPKPPSSGMVTDFEKLERVMAGLDQGPAHYNLKVVVFDEKDFEYAADVHQKYPDVDFYLQVGNPYLGDNVDNHTTRLLERYEKLVDMTMADARMNNAKVLPQLHTLLWSNKQGV

SEQ ID NO: 33891 - protein, 217 aa, Salinicola socius
  REGION 1..217: note = tr|A0A1Q8SPE6|A0A1Q8SPE6_9GAMM 7-carboxy-7-deazaguanine synthase OS=Salinicola socius; OX = 404433 GN=queE PE=3 SV=1
MYSVKEAFYTLQGEGAQAGRASVFCRFTGCNLWSGRERDRARSQCTFCDTDFVGTDGQNGGQFGDADALASHLERLWPASAPGRHRRYVVFTGGEPLLQLDTALIDAMHARGFEIAVETNGTLPAPEGIDWICVSPKSDTTLRQIQGDELKLIHPQPGVDPEAFAELNFTHFLLQPMDLAPGAIVTDANPMTATVEYCMRHPQWRLSLQTHKIAGID

SEQ ID NO: 33892 - protein, 217 aa, Salinicola sp.
  REGION 1..217: note = tr|A0A2D8P014|A0A2D8P014_9GAMM 7-carboxy-7-deazaguanine synthase OS=Salinicola sp.; OX = 1978524 GN=queE PE=3 SV=1
MYSVKEAFYTLQGEGAQAGRASVFCRFTGCNLWSGRERDRARSQCTFCDTDFVGTDGQNGGQFPDADALATHLATLWQAPEEANSSRYVVFTGGEPLLQLDAALIDAMHAHGFEVAVETNGTLSPPEGIDWICVSPKSDTTLRLTRGNELKLVYPQAGVDPANFAGLDFTHFFLQPMDLSPVAIVSDGDPMAATVEYCLRHPQWRLSLQTHKIAGID

SEQ ID NO: 33893 - protein, 217 aa, Salinicola sp.
  REGION 1..217: note = tr|A0A1Q8T3K8|A0A1Q8T3K8_9GAMM 7-carboxy-7-deazaguanine synthase OS=Salinicola sp. MH3R3-1 OX=1928762 GN=queE PE=3 SV=1
MYSVKEAFYTLQGEGAQAGRASVFCRFTGCNLWSGRERDRATSQCTFCDTDFVGTDGQNGGQFADAAALASHLECLWPTSVSGRHRRYVVFTGGEPLLQLDTALIETMHARGFEIAVETNGTLPAPLGIDWICVSPKSDNALRQTRGDELKLVHPQAGIDPETFAELDFTHFFLQPMDLAPGAIVSDASPMEATVDYCMRHPQWRLSLQTHKIAGID

SEQ ID NO: 33894 - protein, 210 aa, Salinimicrobium catena
  REGION 1..210: note = tr|A0A1H5NG05|A0A1H5NG05_9FLAO 7-carboxy-7-deazaguanine synthase OS=Salinimicrobium catena OX=390640 GN=queE PE=3 SV=1
MKENEINELVAAGEMLPLMEEFYTIQGEGYHKGTAAYFVRIGGCDVGCHWCDVKESWNAKLHPPTEVDRIVENAVKYSKTVVVTGGEPLTWDMTKLTSGLKAKGAKIHIETSGAYPLTGIWDWICLSPKKIKLPTETVYKKANELKVIIFNKHDFKFAEEQAARVNEDCILYLQPEWSNREKMIPLIVDYVMQNPKWKVSLQTHKYLNIP

SEQ ID NO: 33895 - protein, 210 aa, unidentified
  source 1..210: note = Salinimicrobium sediminis
  REGION 1..210: note = tr|A0A285X694|A0A285X694_9FLAO 7-carboxy-7-deazaguanine synthase OS=Salinimicrobium sediminis OX=1343891 GN=queE PE=3 SV=1
MNEQEVNALVERGEMLPLMEDFYTIQGEGFHKGTAAYFIRIGGCDVGCHWCDVKESWNAKLHPPTGVDQIVEKALKSSKTIVVTGGEPLTWNMEPLTSRLKARGAKIHIETSGAYPMTGTWDWICLSPKKIKLPTPEIYEVADELKVIVFNKHDFQFAEEQAAKVNRNCILYLQPEWSNREKMMPLIVDYVMQNPQWKVSLQTHKYLNIP

SEQ ID NO: 33896 - protein, 226 aa, unidentified
  source 1..226: note = Salinimonas sediminis
  REGION 1..226: note = tr|A0A346NK29|A0A346NK29_9ALTE 7-carboxy-7-deazaguanine synthase OS=Salinimonas sediminis; OX = 2303538 GN=queE PE=3 SV=1
MTTQQLSINEVFETIQGEGFHTGVPAIFLRLQGCPVGCPWCDTKHTWTLDDAFLTTAEAVVEKPQESEAYFDADENAVLALFEQLKYTAKHVVITGGEPCMYDLIPLTRLLHQHGYSTQIETSGTYEVKCDDDTWVTVSPKVDMKGGMPVLTSALQRANEIKHPVAMERHVEELDALLARLGGQLPAHICLQPISQQQRATDLVIKTCIERNWRLSLQTHKYIGIE

SEQ ID NO: 33897 - protein, 215 aa, Salinimonas sp.
  REGION 1..215: note = tr|A0A5B7YI29|A0A5B7YI29_9ALTE 7-carboxy-7-deazaguanine synthase OS=Salinimonas sp. KX18D6 OX=2572577 GN=queE PE=3 SV=1
MFETIQGEGVYTGVPSIFIRLQGCPVGCPWCDTKHTWTLDDAFLTTSDNVITKTKESEAFFNTDGQSILTLFSQQGYKAKHIVITGGEPCMYDLTEVTSLLHDNGYSTQIETSGTYEVRCAPETWVTVSPKVDMKGGLPVLESALNRANEIKHPVAMQKHIEELDALLAKLDKPCSHVCLQPISQQERATELAIKTCIARNWRLSLQTHKYIGIE

SEQ ID NO: 33898 - protein, 223 aa, unidentified
  source 1..223: note = Saliniradius amylolyticus
  REGION 1..223: note = tr|A0A2S2E1D2|A0A2S2E1D2_9ALTE 7-carboxy-7-deazaguanine synthase OS=Saliniradius amylolyticus OX=2183582 GN=queE PE=3 SV=1
MSLKLNEVFESIQGEGAYTGVPSIFVRLQGCPVGCPWCDTQHTWSVDLEDKRSEQQVMKESGDSRHWFSSDAEQLMALFKRQGYQARHVVLTGGEPAMYDLRDLTQTLHQHGFSTQIETSGTFELQISPETWVTLSPKVDMKGGYPVLDSVLAVAHEIKHPVAMERHVEELKALLARPATNLDALVYLQPISQQKRATELAIRTCIAENWRLSLQTHKFIGIE

SEQ ID NO: 33899 - protein, 213 aa, unidentified
  source 1..213: note = Salinisphaera halophila
  REGION 1..213: note = tr|A0A423PMA4|A0A423PMA4_9GAMM 7-carboxy-7-deazaguanine synthase OS=Salinisphaera halophila YIM 95161 OX=1051139 GN=queE PE=3 SV=1
MDALRITEIFCSLQGEARDAGALTTFVRLTGCPLRCHYCDTAYAFSGGDWMPLDAIIQRVRSLGARQVCVTGGEPLAQPNCAALVGRLCDAGYRVSVETAGALDIRAVDSRASRVVDIKTPDSGEAARNRWDNIEALTDHDQLKFVICSRADYVWARDRVAELHLPAGCDVWFSPSSEQMPARDLADWIVADRLPVRFQLQLHKQLWGEAPGR

SEQ ID NO: 33900 - protein, 238 aa, Salinisphaera hydrothermalis
  REGION 1..238: note = tr|A0A084IKJ6|A0A084IKJ6_SALHC 7-carboxy-7-deazaguanine synthase OS=Salinisphaera hydrothermalis (strain C41B8) OX=1304275 GN=queE PE=3 SV=1
MPDVLDVRSDGLRRDGVRESRWPQREDALRITEIFCSLQGEAKAAGRVCTFIRLTGCPLRCHYCDTAYAFHGGEWTRLDEIINQVEAFGARDVCVTGGEPLAQPNVAPLVRRLCDAGYDVSVETAGALDIRPIDERASRVVDIKTPDSGEAARNRWDNIAALTDHDQLKFVICSRADYEWSKARLAEITPPAGCIVWFSPSHGEITARDLADWIVADRLPVRFQLQLHKQLWGDAPGH

SEQ ID NO: 33901 - protein, 233 aa, unidentified
  source 1..233: note = Salinisphaera japonica
  REGION 1..233: note = tr|A0A423PLX1|A0A423PLX1_9GAMM 7-carboxy-7-deazaguanine synthase OS=Salinisphaera japonica YTM-1 OX=1209778 GN=queE PE=3 SV=1
MDRASARRLDGISDSRWAERIDALRITEIFCSLQGEANDAGRVCTFVRLTGCPLRCHYCDTAYAFQGGEWQKIDAIIEQIKAFGAHHVCVTGGEPLAQPNAVPLIARLCDAGYAVSVETAGALDIRPVDTRASRVVDIKTPASGEATRNRWDNIEVLTGHDQLKFVICSRADYEWARARLGEIDVPAGCTVWFSPSAGEITARGLADWIVADRLPVKFQMQLHKLLWGDAPGY

SEQ ID NO: 33902 - protein, 237 aa, unidentified
  source 1..237: note = Salinisphaera orenii
  REGION 1..237: note = tr|A0A423PJU8|A0A423PJU8_9GAMM 7-carboxy-7-deazaguanine synthase OS=Salinisphaera orenii MK-B5 OX=856730 GN=queE PE=3 SV=1
MPVALSPGAGAARAPRAAGRRPERVDALRITEIFCSLQGEARDAGALTTFVRLTGCPLRCHYCDTAYAFSGGDWMPLDAIMQRVRTLEARHVCVTGGEPLAQPNCAALVGRLCNAGYRVSVETAGALDIRAVDSRASRVVDIKTPDSGEAARNRWDNIEALTGHDQLKFVICSRADYVWARDRVAELQLPAGCDVWFSPSSEQMPARDLADWIVADRLPVRFQLQLHKQLWGEAPGR

SEQ ID NO: 33903 - protein, 240 aa, Salinisphaera shabanensis
  REGION 1..240: note = tr|U2FZA9|U2FZA9_9GAMM 7-carboxy-7-deazaguanine synthase OS=Salinisphaera shabanensis E1L3A OX=1033802; GN = queE PE=3 SV=1
MLFKDVDESHEPCFASEAQESGEGLCAMSYSVKEMFLTLQGEGAQTGRASLFCRFSGCNLWTGREKDRDKAICQFCDTDFVGVDGPGGGRFKTAQALAERAAQIWRETANAGGTPYIVCTGGEPLLQLDNALIDALHAVGFEIAVETNGTLKAPPSIDWICVSPKAGSTLVQTHGNELKLVWPQPAFALEQFEALDFERFYLQPMDGPVREANVARCIDTALRRPQWRLSLQTHKMIGIA

SEQ ID NO: 33904 - protein, 213 aa, Salinisphaera sp.
  REGION 1..213: note = tr|A0A2E9AH56|A0A2E9AH56_9GAMM 7-carboxy-7-deazaguanine synthase OS=Salinisphaera sp.; OX = 1914330 GN=queE PE=3 SV=1
MSYAVKEMFLTLQGEGAQTGRASLFCRFAGCNLWSGREKDRGHAICQFCDTDFVGVDGPGGGRFKNAEALAERAREIWDETANQGGTPYIVCTGGEPLLQLDDSLIDALHAVGFEIAVETNGTLKASPAIDWVCVSPKAGSTLVQTHGNELKLVWPQPGFTLEQFETLAFERFYLQPMDGPAREANVATCIETALGRPQWRLSLQTHKMIGIA

SEQ ID NO: 33905 - protein, 255 aa, Salinisphaera sp.
  REGION 1..255: note = tr|A0A3A5J7B9|A0A3A5J7B9_9GAMM 7-carboxy-7-deazaguanine synthase OS=Salinisphaera sp. Q1T1-3 OX=2321229 GN=queE PE=3 SV=1
MRPVRPRPNSTRSAADQAVSDIIDADRRRNTRGVAESRWPQRVDALRITEIFCSLQGEANGAGRVCTFIRLTGCPLRCHYCDTAYAFHGGEWMPLDAIVARAEALGATDICVTGGEPLAQPNVIPLVARLCDAGYAVSVETAGALDIRSIDTRASRVVDIKTPGSGEDRRNRWDNIEALTDHDQLKFVICSRADYEWARDTWRGLSLPAGATVWFSPSAGEITARDLADWIVADRIDVRFQLQLHKLLWGDAPGH

SEQ ID NO: 33906 - protein, 210 aa, unidentified
  source 1..210: note = Salinisphaeraceae bacterium
  REGION 1..210: note = tr|A0A2D4SFT4|A0A2D4SFT4_9GAMM 7-carboxy-7-deazaguanine synthase OS=Salinisphaeraceae bacterium OX=2026789 GN=queE PE=3 SV=1
MRVTEVFLSLQGEARAAGLPTVFVRLTGCPLRCHYCDTAYAFHGGERQSVDSLLQRIRDHGVADVCVTGGEPLAQPGASLLIRSLCDAGFSVAVETSGVLNIDRADRRASRIMDLKTPASGELKRNDYGNIERLTGHDQVKFVVCDRADFDWACMQIREHGLTDRCPVWLSPSHGQLEAAQLAEWLIDSRLPVRLQLQLHKQLWGNEPGR

SEQ ID NO: 33907 - protein, 239 aa, Salinispora arenicola
  REGION 1..239: note = tr|A0A542XMM9|A0A542XMM9_9ACTN 7-carboxy-7-deazaguanine synthase OS=Salinispora arenicola; OX = 168697 GN=queE PE=3 SV=1
MVTAMAQARAAGDLLVTEMFGPTVQGEGPSIGRRAVFVRLSGCHLSCSWCDTAYTWDTTRYNLDEHRRQAPVADILTWVRASGADMVVLTGGEPLLQQAALVNLAGPLYRSGIRVEVETSGTVAPSRRLLVSVTAFNVSPKLANSGVAERARLRPPALGAMVASGKATFKFVAVGRRDLDEIAELERTYSLTPIWVMPEGRTPDEVLRRARDLADDVISRGWNLSTRLHVLLWGDQRGR

SEQ ID NO: 33908 - protein, 221 aa, unidentified
  source 1..221: note = Salinivibrio kushneri
  REGION 1..221: note = tr|A0A4P8H5A2|A0A4P8H5A2_9GAMM 7-carboxy-7-deazaguanine synthase OS=Salinivibrio kushneri; OX = 1908198 GN=queE PE=3 SV=1
MYRVNEIFETIQGEGTFTGVPSVFVRLQGCPVGCAWCDTKQTWETDEKDRKDKIFIIDKSEDSPAWCWLSADAITADILSRYHARHIVITGGEPCLYDLKPLTHALEAAGCQCQIETSGTYPIEASANTWVTVSPKINMRGKLPVLKEAMARANEVKHPVGTEKDIDQLDALLTTCPPPDTATIALQPVSQKARATQLCIDTCIQRGWRLSIQTHKYLAIA

SEQ ID NO: 33909 - protein, 221 aa, unidentified
  source 1..221: note = Salinivibrio kushneri
  REGION 1..221: note = tr|A0A1V3GH14|A0A1V3GH14_9GAMM 7-carboxy-7-deazaguanine synthase OS=Salinivibrio kushneri; OX = 1908198 GN=queE PE=3 SV=1
MYRVNEIFETIQGEGTFTGVPSVFVRLQGCPVVCAWCDTKQTWETDDKDQKDKIFIIDKSEDSPAWCWLSADAIATDILSRYHARHIVITGGEPCLYDLRPLTHALEAAGCQCQIETSGTYPVEASTNTWVTVSPKINMRGKLPVLKEAMARANEVKHPVGTEKDIDQLDALLADCPAPETATIALQPVSQKARATQLCIDTCIQRGWRLSIQTHKYLAIA

SEQ ID NO: 33910 - protein, 221 aa, Salinivibrio sharmensis
  REGION 1..221: note = tr|A0A1V3H0V7|A0A1V3H0V7_9GAMM 7-carboxy-7-deazaguanine synthase OS=Salinivibrio sharmensis OX=390883 GN=queE PE=3 SV=1
MYRVNEIFETIQGEGTFTGVPSVFVRLQGCPVGCAWCDTKQTWETDEKDQKDKIFIIDKSEDSPAWCWLSADAIVADILNRYHARHIVITGGEPCLYDLRPLTHALEAAGCQCQIETSGTYPVEASANTWVTVSPKINMRGKLPVLKEAMARANEVKHPVGTEKDIDQLDALLADCPPADTATIALQPVSQKARATQLCIDTCIQRGWRLSIQTHKYLAIA

SEQ ID NO: 33911 - protein, 221 aa, Salinivibrio sp.
  REGION 1..221: note = tr|A0A1V3I3C8|A0A1V3I3C8_9GAMM 7-carboxy-7-deazaguanine synthase OS=Salinivibrio sp. IB872 OX=1766123 GN=queE PE=3 SV=1
MYRVNEIFETIQGEGTFTGVPSVFVRLQGCPVGCAWCDTKQTWETDDNDQQDKIFIIDKSEDSPAWCWLSAKDIATEITQRYQAKHIVITGGEPCLYDLVPLTEALEAVGCQCQIETSGTYEVKASPQTWVTVSPKINMRGKLPVLASAMARANEIKHPVGTEKDIAQLDILLEHCPPSPKATIALQPVSQKPRATKLCIDTCIARGWRLSIQTHKYLNIA

SEQ ID NO: 33912 - protein, 221 aa, Salinivibrio sp.
  REGION 1..221: note = tr|A0A0F5ASQ3|A0A0F5ASQ3_9GAMM 7-carboxy-7-deazaguanine synthase OS=Salinivibrio sp. KP-1; OX = 1406902 GN=queE PE=3 SV=1
MYRVNEIFETIQGEGTFTGVPSVFVRLQGCPVGCAWCDTKQTWETDEKDQKDKIFIIDKSEDSPAWCWLDGNAITADILSRYHARHIVITGGEPCLYDLRPLTHALEAAGCQCQIETSGTYPIHASANTWVTVSPKIHMRGKLPVLKEAMARANEVKHPVGTEKDIDQLDALLATCPPADTATIALQPVSQKARATQLCIDTCIQRGWRLSIQTHKYLSIA

SEQ ID NO: 33913 - protein, 217 aa, unidentified
  source 1..217: note = Salinivirga cyanobacteriivorans
  REGION 1..217: note = tr|A0A0S2HXL6|A0A0S2HXL6_9BACT 7-carboxy-7-deazaguanine synthase OS=Salinivirga cyanobacteriivorans OX=1307839 GN=queE PE=3 SV=1
MAKSQKSYQKVDLKLLEGGKKLPLVESFYSIQGEGHHTGKPAYFIRVGGCDIACHWCDSKISWNADMHPLVSVDEIVNQVLNTPARSVVVTGGEPAMYPLNPLSTLIRRNNISNFLESSGAYEITGQWDWICISPKHNKHPLKQNLERADELKIVIFSQSDFDFAEQWKKEVSADCKLLLQPEYSQFKKMAPLMVEYVKAHPEWNISLQSHKYLDIP

SEQ ID NO: 33914 - protein, 216 aa, unidentified
  source 1..216: note = Salinivirgaceae bacterium
  REGION 1..216: note = tr|A0A2N5ZVM5|A0A2N5ZVM5_9BACT 7-carboxy-7-deazaguanine synthase OS=Salinivirgaceae bacterium OX=2053305 GN=queE PE=3 SV=1
MVSKELYTRVDKSITQNGINLPLVEEFYSIQGEGYHSGKAAYFIRVGGCDIACHWCDSKLSWNAKLHPLVSIEDIVSKVLETPAQSVVVTGGEPGIYNLEPLSNLLRKNKINNFLETSGAYKLSGEWDWICLSPKKNKEPLTENLQLAHELKVVIFDDTDFEFAEKWKSQVNEDCKLLLQPEYSQFDKMAPKMVEYVKNNPDWNISLQSHKYLNIP

SEQ ID NO: 33915 - protein, 242 aa, unidentified
  source 1..242: note = Salipaludibacillus aurantiacus
  REGION 1..242: note = tr|A0A1H9SA88|A0A1H9SA88_9BACI 7-carboxy-7-deazaguanine synthase OS=Salipaludibacillus aurantiacus OX=1601833 GN=queE PE=3 SV=1
MSKLPVLEVFGPTIQGEGMVVGQKTMFVRTAGCDYSCSWCDSAFTWDGSAKDEIIQMTPEEVWERLNCLAPGNFSHVTVSGGNPALLKNLDGLLDIFEANGVAAALETQGSVWQDWFLRIQDLTLSPKPPSSLMKTNFEVLDDIITRLMDAGRLANMSLKVVIFDDKDFNYAKDVHLRYPAVPFYLQVGNDDTATENNENLTKKLLDKYEWLTDKTAADKDLNNVRVLPQLHTLLWGNKRGV

SEQ ID NO: 33916 - protein, 242 aa, unidentified
  source 1..242: note = Salipaludibacillus keqinensis
  REGION 1..242: note = tr|A0A323TIW3|A0A323TIW3_9BACI 7-carboxy-7-deazaguanine synthase OS=Salipaludibacillus keqinensis OX=2045207 GN=queE PE=3 SV=1
MNKFPILEIFGPTIQGEGMVIGQKTMFVRTAGCDYSCAWCDSAFTWDGSAKDDIVSMTASDIWEKLNELAKGNFSHVTISGGNPALLKNLQEFVKILNDNQIRIALETQGSVWQDWFLTIDDLTISPKPPSSKMVTDFQVLDKIISRLEDGGRKAHISLKVVVFDNKDYEYAKMVARRYSNIQMFLQVGNDDLSTIDDAELTYKLLNKYEWLTDKTMADSELADVKVLPQLHTLLWGNKRGV

SEQ ID NO: 33917 - protein, 242 aa, unidentified
  source 1..242: note = Salipaludibacillus neizhouensis
  REGION 1..242: note = tr|A0A3A9KIB8|A0A3A9KIB8_9BACI 7-carboxy-7-deazaguanine synthase OS=Salipaludibacillus neizhouensis OX=885475 GN=queE PE=3 SV=1
MSKIPVLEIFGPTIQGEGMVIGKKTMFIRTAGCDYSCVWCDSAFTWDGSAKNDIVQMSAEEIWLKLKETGNDRFSHVTISGGNPALLRHLDKVIHLLKENNISIALETQGSRWQDWFLHIDDLTISPKPPSSEMKTDYTVLDHIIKQLKDSNRFPNTSLKVVIFNDEDLLYAKGITKRYPLLPLYLQVGNEDVSTENTTKLTEVLLHHYEDLIDKVVSDKELNEARVLPQLHTLVWGNKRGV

SEQ ID NO: 33918 - protein, 235 aa, unidentified
  source 1..235: note = Salipiger thiooxidans
  REGION 1..235: note = tr|A0A1G7FJ94|A0A1G7FJ94_9RHOB 7-carboxy-7-deazaguanine synthase OS=Salipiger thiooxidans; OX = 282683 GN=queE PE=3 SV=1
MSLRIAEIFGPTIQGEGALIGEPTVFVRTGGCDYRCSWCDSLHAVESRYRDTWAAMSDEAVWDEVLRLSGGQPLTVSLSGGNPAIQDFAPVIARGRAAGYRFACETQGSVARPWFAELDTLVLSPKPPSSGETVDWDAFAACVRAGSAARQTVMKIVIFDGTDYAWARDAHARHPELPLYLQPGNPEVDPETPVDPQALADRLGWLVERTMADTWFTPRILPQLHVLIWGNKRGV

SEQ ID NO: 33919 - protein, 242 aa, unidentified
  source 1..242: note = Salisediminibacterium haloalkalitolerans
  REGION 1..242: note = tr|A0A1H9T7S0|A0A1H9T7S0_9BACI 7-carboxy-7-deazaguanine synthase OS=Salisediminibacterium haloalkalitolerans OX=1464123 GN=queE PE=3 SV=1
MSKLPVLEVFGPTIQGEGMVTGQKTMFVRTAGCDYACSWCDSAFTWDGSAKDGIKQMTPEQIWQSLKEAGGSRFSHVTISGGNPALYPQMGDFVRLLHEERIDVALETQGSRWQDWFVEVDDLTLSPKPPSSNMTADFEKLDLIVARLIDAGRQAHVSQKIVVFDEADYDFAKQAAKRYPQLDTYLQTGNPDVETADDEKLRTDLLSRYEALIDRVMADEEMNDVRVLPQLHTLLWGNMRGV

SEQ ID NO: 33920 - protein, 223 aa, unidentified
  source 1..223: note = Salmonella abony
  REGION 1..223: note = tr|A0A5H6T3N4|A0A5H6T3N4_SALAB 7-carboxy-7-deazaguanine synthase QueE OS=Salmonella abony; OX = 29482 GN=queE PE=4 SV=1
MQYPINEMFQTLQGEGYFTGVPAIFIRLQGCPVGCAWCDTKHTWDKLSDREVSLFSILAKTKESDKWGAASSEDLLAVINRQGYTARHVVITGGEPCIHDLMPLTDLLEKSGFSCQIETSGTHEVRCTPNTWVTVSPKVNMRGGYDVLSQALERANEIKHPVGRVRDIEALDELLATLSDDKPRVIALQPISQKEDATRLCIETCIARNWRLSMQTHKYLNIA

SEQ ID NO: 33921 - protein, 223 aa, unidentified; identical to SEQ ID NO: 33920
  source 1..223: note = Salmonella agona
  REGION 1..223: note = tr|B5F4N8|B5F4N8_SALA4 7-carboxy-7-deazaguanine synthase OS=Salmonella agona (strain SL483) OX=454166; GN = queE PE=3 SV=1

SEQ ID NO: 33922 - protein, 223 aa, unidentified
  source 1..223: note = Salmonella anatum
  REGION 1..223: note = tr|A0A3Y5SEK2|A0A3Y5SEK2_SALAN 7-carboxy-7-deazaguanine synthase OS=Salmonella anatum; OX = 58712 GN=queE PE=3 SV=1
MQYPINEMFQTLQGEGYFTGVPAIFIRLQGCPVGCAWCDTKHTWDKLSDREVSLFSILAKTKESDKWGAASSEDLLAVINRQDYTARHVVITGGEPCIHDLMPLTDLLEKSGFSCQIETSGTHEVRCTPNTWVTVSPKVNMRGGYDVLSQALERANEIKHPVGRVRDIEALDELLATLSDDKPRVIALQPISQKEDATRLCIETCIARNWRLSMQTHKYLNIA

SEQ ID NO: 33923 - protein, 223 aa, unidentified; identical to SEQ ID NO: 33920
  source 1..223: note = Salmonella anatum
  REGION 1..223: note = tr|A0A2T8MKW2|A0A2T8MKW2_SALAN 7-carboxy-7-deazaguanine synthase OS=Salmonella anatum; OX = 58712 GN=queE PE=3 SV=1

SEQ ID NO: 33924 - protein, 223 aa, unidentified
  source 1..223: note = Salmonella arizonae
  REGION 1..223: note = tr|A9MF14|A9MF14_SALAR 7-carboxy-7-deazaguanine synthase OS=Salmonella arizonae (strain ATCC BAA-731 / CDC346-86 / RSK2980) OX=41514 GN=queE PE=3 SV=1
MQYPINEMFQTLQGEGYFTGVPAIFIRLQGCPVGCAWCDTKHTWDKLSDREVSLYSILAKTKESDKWGAASSEDLLTVINRQDYTARHVVITGGEPCIHDLMPLTDLLEKSGFSSQIETSGTHEVLCTPNTWVTVSPKVNMRGGYDVLTQALERANEIKHPVGRIRDIEALDELLATLSDDKPRVIALQPISQKEDATRLCIETCIARNWRLSMQTHKYLNIA

SEQ ID NO: 33925 - protein, 223 aa, unidentified; identical to SEQ ID NO: 33920
  source 1..223: note = Salmonella berta
  REGION 1..223: note = tr|A0A3U8PA49|A0A3U8PA49_SALBE 7-carboxy-7-deazaguanine synthase OS=Salmonella berta; OX = 28142 GN=queE PE=3 SV=1

SEQ ID NO: 33926 - protein, 223 aa, unidentified; identical to SEQ ID NO: 33920
  source 1..223: note = Salmonella blockley
  REGION 1..223: note = tr|A0A5H8H837|A0A5H8H837_SALBL 7-carboxy-7-deazaguanine synthase QueE OS=Salmonella blockley OX=57741 GN=queE PE=4 SV=1

SEQ ID NO: 33927 - protein, 223 aa, Salmonella bongori
  REGION 1..223: note = tr|A0A248K783|A0A248K783_SALBN 7-carboxy-7-deazaguanine synthase OS=Salmonella bongori serovar 66:z41:- str. SA19983605 OX=1243617 GN=queE PE=3; SV = 1
MQYPINEMFQTLQGEGYFTGVPAIFIRLQGCPVGCAWCDTKHTWDKLEDREVSLYSILAKTKESDKWGAASSEDLLAVISRQGYTARHVVITGGEPCIHDLMPLTSLLEKNGFSCQIETSGTHEVRCTPNTWVTVSPKVNMRGGYGVLYQALERANEIKHPVGRVRDIEALDELLATLSDDKPRVIALQPISQKEDATRLCIDTCIARNWRLSMQTHKYLNIA

SEQ ID NO: 33928 - protein, 223 aa, Salmonella bongori; identical to SEQ ID NO: 33927
  REGION 1..223: note = tr|A0A5I6MQD6|A0A5I6MQD6_SALBN 7-carboxy-7-deazaguanine synthase QueE OS=Salmonella bongori CFSAN000510 OX=1299282 GN=queE PE=4 SV=1

SEQ ID NO: 33929 - protein, 223 aa, unidentified
  source 1..223: note = Salmonella choleraesuis
  REGION 1..223: note = tr|Q57KH2|Q57KH2_SALCH 7-carboxy-7-deazaguanine synthase OS=Salmonella choleraesuis (strain SC-B67); OX = 321314 GN=ygcF PE=3 SV=1
MQYPINEMFQTLQGEGYFTGVPAIFIRLQGCPVGCAWCDTKHTWDKLSDREVSLFSILAKTKESDKWGAASSEDLLAVINRQGYTARHVVITGGEPCIHDLMPLTDLLEKSGFSCQIETSGTHEVRCTPNTWVTVSPKVNMRGGYDVLSQALERANEIKHPVGRVRDIEALGELLATLSDDKPRVIALQPISQKEDATRLCIETCIARNWRLSMQTHKYLNIA

SEQ ID NO: 33930 - protein, 223 aa, unidentified; identical to SEQ ID NO: 33920
  source 1..223: note = Salmonella derby
  REGION 1..223: note = tr|A0A3W0AR70|A0A3W0AR70_SALDE 7-carboxy-7-deazaguanine synthase OS=Salmonella derby; OX = 28144 GN=queE PE=3 SV=1

SEQ ID NO: 33931 - protein, 223 aa, unidentified
  source 1..223: note = Salmonella diarizonae
  REGION 1..223: note = tr|A0A2I5HCV2|A0A2I5HCV2_SALDZ 7-carboxy-7-deazaguanine synthase OS=Salmonella diarizonae; OX = 59204 GN=queE PE=3 SV=1
MQYPINEMFQTLQGEGYFTGVPAIFIRLQGCPVGCAWCDTKHTWDKLSDREVSLYSILAKTKESDKWGAASSEDLLAVINRQGYTARHVVITGGEPCIHDLMPLTDLLEKNGFSCQIETSGTHEVRCTPNTWVTVSPKVNMRGGYDVLSQALERANEIKHPVGRVRDIEALDELLATLSDDKPRVIALQPISQKEDATRLCIETCIARNWRLSMQTHKYLNIA

SEQ ID NO: 33932 - protein, 223 aa, unidentified; identical to SEQ ID NO: 33920
  source 1..223: note = Salmonella dublin
  REGION 1..223: note = tr|A0A3T3IFP5|A0A3T3IFP5_SALDU 7-carboxy-7-deazaguanine synthase OS=Salmonella dublin; OX = 98360 GN=queE PE=3 SV=1

SEQ ID NO: 33933 - protein, 145 aa, Salmonella enterica
  REGION 1..145: note = tr|A0A379XLK1|A0A379XLK1_SALER 7-carboxy-7-deazaguanine synthase OS=Salmonella enterica subsp. indica OX=59207 GN=queE_1 PE=3 SV=1
MQYPINEMFQTLQGEGYFTGVPAIFIRLQGCPVGCAWCDTKHTWDKLSDREVSLFSILAKTKESDKWGAASSEDLVAVINRQSYTARHVVITGGEPCIHDLMPLTDLLEKSGFSCQIETSGTHEVRCTPNTWVTVSPKVNMRGGI

SEQ ID NO: 33934 - protein, 223 aa, Salmonella enterica; identical to SEQ ID NO: 33920
  REGION 1..223: note = tr|A0A402MZM9|A0A402MZM9_SALET 7-carboxy-7-deazaguanine synthase OS=Salmonella enterica subsp. enterica serovar Braenderup str. CFSAN001740; OX = 1299119 GN=queE PE=3 S V=1

SEQ ID NO: 33935 - protein, 223 aa, unidentified; identical to SEQ ID NO: 33931
  source 1..223: note = Salmonella enteritidis
  REGION 1..223: note = tr|A0A403FDY3|A0A403FDY3_SALEN 7-carboxy-7-deazaguanine synthase OS=Salmonella enteritidis OX=149539 GN=queE PE=3 SV=1

SEQ ID NO: 33936 - protein, 223 aa, unidentified; identical to SEQ ID NO: 33920
  source 1..223: note = Salmonella enteritidis
  REGION 1..223: note = tr|A0A2R4HMN7|A0A2R4HMN7_SALEN 7-carboxy-7-deazaguanine synthase OS=Salmonella enteritidis OX=149539 GN=queE PE=3 SV=1

SEQ ID NO: 33937 - protein, 223 aa, unidentified; identical to SEQ ID NO: 33920
  source 1..223: note = Salmonella gallinarum
  REGION 1..223: note = tr|B5RDS4|B5RDS4_SALG2 7-carboxy-7-deazaguanine synthase OS=Salmonella gallinarum (strain 287/91 / NCTC 13346) OX=550538 GN=ygcF PE=3 SV=1

SEQ ID NO: 33938 - protein, 223 aa, unidentified; identical to SEQ ID NO: 33920
  source 1..223: note = Salmonella gallinarum
  REGION 1..223: note = tr|A0A3V9NUF6|A0A3V9NUF6_SALGL 7-carboxy-7-deazaguanine synthase OS=Salmonella gallinarum; OX = 594 GN=queE PE=3 SV=1

SEQ ID NO: 33939 - protein, 223 aa, unidentified; identical to SEQ ID NO: 33920
  source 1..223: note = Salmonella hadar
  REGION 1..223: note = tr|A0A3V2W3S3|A0A3V2W3S3_SALHA 7-carboxy-7-deazaguanine synthase OS=Salmonella hadar; OX = 149385 GN=queE PE=3 SV=1

SEQ ID NO: 33940 - protein, 145 aa, unidentified
  source 1..145: note = Salmonella houtenae
  REGION 1..145: note = tr|A0A484VQV9|A0A484VQV9_SALHO 7-carboxy-7-deazaguanine synthase OS=Salmonella houtenae; OX = 59205 GN=queE_1 PE=3 SV=1
MQYPINEMFQTLQGEGYFTGVPAIFIRLQGCPVGCAWCDTKHTWDKLEDREVSLYSILAKTKESDKWGAASSEDLLAVIQRQGYTARHVVITGGEPCIHDLMPLTSLLEKNGFSCQIETSGTHEVRCTPNTWGDRITEGEYARWL

SEQ ID NO: 33941 - protein, 83 aa, unidentified
  source 1..83: note = Salmonella houtenae
  REGION 1..83: note = tr|A0A484VQX8|A0A484VQX8_SALHO Queuosine Biosynthesis QueE Radical SAM OS=Salmonella houtenae; OX = 59205 GN=queE_2 PE=4 SV=1
MRGGYNVLSQALERANEIKHPVGRVRDIEALDELLATLSDDKLRVIALQPISQKEDATRLCIETCIARNWRLSMQTHKYLNIA

SEQ ID NO: 33942 - protein, 223 aa, unidentified; identical to SEQ ID NO: 33929
  source 1..223: note = Salmonella infantis
  REGION 1..223: note = tr|A0A3W0HP89|A0A3W0HP89_SALIN 7-carboxy-7-deazaguanine synthase OS=Salmonella infantis; OX = 595 GN=queE PE=3 SV=1

SEQ ID NO: 33943 - protein, 223 aa, unidentified; identical to SEQ ID NO: 33920
  source 1..223: note = Salmonella infantis
  REGION 1..223: note = tr|A0A3R0DGR9|A0A3R0DGR9_SALIN 7-carboxy-7-deazaguanine synthase OS=Salmonella infantis; OX = 595 GN=queE PE=3 SV=1

SEQ ID NO: 33944 - protein, 223 aa, unidentified; identical to SEQ ID NO: 33922
  source 1..223: note = Salmonella montevideo
  REGION 1..223: note = tr|A0A3U8JHI9|A0A3U8JHI9_SALMO 7-carboxy-7-deazaguanine synthase OS=Salmonella montevideo; OX = 115981 GN=queE PE=3 SV=1

SEQ ID NO: 33945 - protein, 223 aa, unidentified
  source 1..223: note = Salmonella montevideo
  REGION 1..223: note = tr|A0A3V6QIX3|A0A3V6QIX3_SALMO 7-carboxy-7-deazaguanine synthase OS=Salmonella montevideo; OX = 115981 GN=queE PE=3 SV=1
MQYPINEMFQTLQGEGYFTGVPAIFIRLQGCPVGCAWCDTKHTWDKLSDREVSLFSILAKTKESDKWGAASSEDLLAVINRQGYTARHVVITGGEPCIHDLMPLTDLLEKSGFSCQIETSGTHEVCCTPNTWVTVSPKVNMRGGYDVLSQALERANEIKHPVGRVRDIEALDELLATLSDDKPRVIALQPISQKEDATRLCIETCIARNWRLSMQTHKYLNIA

SEQ ID NO: 33946 - protein, 223 aa, unidentified; identical to SEQ ID NO: 33920
  source 1..223: note = Salmonella moscow
  REGION 1..223: note = tr|A0A5H7LHV4|A0A5H7LHV4_SALMC 7-carboxy-7-deazaguanine synthase QueE OS=Salmonella moscow OX=28146 GN=queE PE=4 SV=1

SEQ ID NO: 33947 - protein, 223 aa, unidentified; identical to SEQ ID NO: 33920
  source 1..223: note = Salmonella muenchen
  REGION 1..223: note = tr|A0A3T3ESY7|A0A3T3ESY7_SALMU 7-carboxy-7-deazaguanine synthase OS=Salmonella muenchen; OX = 596 GN=queE PE=3 SV=1

SEQ ID NO: 33948 - protein, 223 aa, unidentified; identical to SEQ ID NO: 33920
  source 1..223: note = Salmonella muenster
  REGION 1..223: note = tr|A0A5J1ARD3|A0A5J1ARD3_SALMS 7-carboxy-7-deazaguanine synthase QueE OS=Salmonella muenster OX=82689 GN=queE PE=4 SV=1

SEQ ID NO: 33949 - protein, 223 aa, unidentified; identical to SEQ ID NO: 33922
  source 1..223: note = Salmonella muenster
  REGION 1..223: note = tr|A0A5I7TMW2|A0A5I7TMW2_SALMS 7-carboxy-7-deazaguanine synthase QueE OS=Salmonella muenster OX=82689 GN=queE PE=3 SV=1

SEQ ID NO: 33950 - protein, 223 aa, unidentified; identical to SEQ ID NO: 33920
  source 1..223: note = Salmonella newport
  REGION 1..223: note = tr|A0A0H3BP81|A0A0H3BP81_SALNS 7-carboxy-7-deazaguanine synthase OS=Salmonella newport (strain SL254) OX=423368 GN=queE PE=3 SV=1

SEQ ID NO: 33951 - protein, 223 aa, unidentified; identical to SEQ ID NO: 33920
  source 1..223: note = Salmonella newport
  REGION 1..223: note = tr|A0A0R9MWK4|A0A0R9MWK4_SALNE 7-carboxy-7-deazaguanine synthase OS=Salmonella newport; OX = 108619 GN=queE PE=3 SV=1

SEQ ID NO: 33952 - protein, 223 aa, unidentified
  source 1..223: note = Salmonella oranienberg
  REGION 1..223: note = tr|A0A5H6QZE1|A0A5H6QZE1_SALON 7-carboxy-7-deazaguanine synthase QueE OS=Salmonella oranienberg OX=28147 GN=queE PE=4 SV=1
MQYPINEMFQTLQGEGYFTGVPAIFIRLQGCPVGCAWCDTKHTWDKLSDREVSLFSILAKTKESDKWGAASSEDLLAVINRQGYTARHVVITGGEPCIHDLMSLTDLLEKSGFSCQIETSGTHEVCCTPNTWVTVSPKVNMRGGYDVLSQALERANEIKHPVGRVRDIEALDELLATLSDDKPRVIALQPISQKEDATRLCIETCIARNWRLSMQTHKYLNIA

SEQ ID NO: 33953 - protein, 223 aa, unidentified; identical to SEQ ID NO: 33920
  source 1..223: note = Salmonella oranienberg
  REGION 1..223: note = tr|A0A3W0KE55|A0A3W0KE55_SALON 7-carboxy-7-deazaguanine synthase OS=Salmonella oranienberg OX=28147 GN=queE PE=3 SV=1

SEQ ID NO: 33954 - protein, 223 aa, unidentified; identical to SEQ ID NO: 33920
  source 1..223: note = Salmonella paratyphi
  REGION 1..223: note = tr|C0PXD4|C0PXD4_SALPC 7-carboxy-7-deazaguanine synthase OS=Salmonella paratyphi C (strain RKS4594); OX = 476213 GN=ygcF PE=3 SV=1

SEQ ID NO: 33955 - protein, 223 aa, unidentified
  source 1..223: note = Salmonella paratyphi
  REGION 1..223: note = tr|A0A5I3QQV8|A0A5I3QQV8_SALPT 7-carboxy-7-deazaguanine synthase QueE OS=Salmonella paratyphi A OX=54388 GN=queE PE=4 SV=1
MQYPINEMFQTLQGEGYFTGVPAIFIRLQGCPVGCAWCDTKHTWDKLSDREVSLYSILAKIKESDKWGAASSEDLLAVINRQGYTARHVVITGGEPCIHDLMPLTDLLEKSGFSCQIETSGTHEVRCTPNTWVTVSPKVNMRGGYNVLSQALERANEIKHPVGRVRDIEALDELLATLSDDKPRVIALQPISQKEDATRLCIETCIARNWRLSMQTHKYLNIA

SEQ ID NO: 33956 - protein, 223 aa, unidentified
  source 1..223: note = Salmonella potsdam
  REGION 1..223: note = tr|A0A5I6RW98|A0A5I6RW98_SALPO 7-carboxy-7-deazaguanine synthase QueE OS=Salmonella potsdam OX=597 GN=queE PE=4 SV=1
MQYPINEMFQTLQGEGYFTGVPAIFIRLQGCPVGCAWCDTKHTWDKLSDREVSLYSILAKTKESDKWGAASSEDLLAVINRQGYTARHVVITGGEPCIHDLMPLTDLLEKSGFSCQIETSGTHEVRCTPNTWVTVSPKVNMRGGYDVLSQALERANEIKHPVGRVRDIEALDELLATLSDDKPRVIALQPISQKEDATRLCIETCIARNWRLSMQTHKYLNIA

SEQ ID NO: 33957 - protein, 223 aa, unidentified; identical to SEQ ID NO: 33920
  source 1..223: note = Salmonella rubislaw
  REGION 1..223: note = tr|A0A5I8H0B3|A0A5I8H0B3_SALRU 7-carboxy-7-deazaguanine synthase QueE OS=Salmonella rubislaw OX=598 GN=queE PE=4 SV=1

SEQ ID NO: 33958 - protein, 223 aa, unidentified; identical to SEQ ID NO: 33922
  source 1..223: note = Salmonella rubislaw
  REGION 1..223: note = tr|A0A3V7ILY5|A0A3V7ILY5_SALRU 7-carboxy-7-deazaguanine synthase OS=Salmonella rubislaw; OX = 598 GN=queE PE=3 SV=1

SEQ ID NO: 33959 - protein, 223 aa, unidentified; identical to SEQ ID NO: 33922
  source 1..223: note = Salmonella schwarzengrund
  REGION 1..223: note = tr|A0A0N1QWS8|A0A0N1QWS8_SALSV 7-carboxy-7-deazaguanine synthase OS=Salmonella schwarzengrund (strain CVM19633) OX=439843 GN=queE PE=3; SV = 1

SEQ ID NO: 33960 - protein, 223 aa, unidentified
  source 1..223: note = Salmonella senftenberg
  REGION 1..223: note = tr|A0A3U8RJN0|A0A3U8RJN0_SALSE 7-carboxy-7-deazaguanine synthase OS=Salmonella senftenberg OX=28150 GN=queE PE=3 SV=1
MQYPINEMFQTLQGEGYFTGVPAIFIRLQGCPVGCAWCDTKHTWDKLSDREVSLFSILAKTKESDKWGAASSEDLLAVINRQGYTARHVVITGGEPCIHDLMPLTDLLEKSGFSCQIETSGTHEVRCMPNTWVTVSPKVNMRGGYDVLSQALERANEIKHPVGRVRDIEALDELLATLSDDKPRVIALQPISQKEDATRLCIETCIARNWRLSMQTHKYLNIA

SEQ ID NO: 33961 - protein, 223 aa, unidentified; identical to SEQ ID NO: 33920
  source 1..223: note = Salmonella senftenberg
  REGION 1..223: note = tr|A0A3V9FH34|A0A3V9FH34_SALSE 7-carboxy-7-deazaguanine synthase OS=Salmonella senftenberg OX=28150 GN=queE PE=3 SV=1

SEQ ID NO: 33962 - protein, 72 aa, Salmonella sp.
  REGION 1..72: note = tr|A0A509BM65|A0A509BM65_9ENTR Queuosine Biosynthesis QueE Radical SAM OS=Salmonella sp. NCTC 6947; OX = 2583581 GN=queE_1 PE=4 SV=1
MQYPINEMFQTLQGEGYFTGVPAIFIRLQGCPVGCAWCDTKHTWDKLSDREVSLFSILAKTKESDKWGCCEQ

SEQ ID NO: 33963 - protein, 83 aa, Salmonella sp.; identical to SEQ ID NO: 33941
  REGION 1..83: note = tr|A0A509CH37|A0A509CH37_9ENTR Queuosine Biosynthesis QueE Radical SAM OS=Salmonella sp. NCTC 7297; OX = 2583578 GN=queE PE=4 SV=1

SEQ ID NO: 33964 - protein, 223 aa, unidentified; identical to SEQ ID NO: 33920
  source 1..223: note = Salmonella thompson
  REGION 1..223: note = tr|A0A3V4QB49|A0A3V4QB49_SALTH 7-carboxy-7-deazaguanine synthase OS=Salmonella thompson; OX = 600 GN=queE PE=3 SV=1

SEQ ID NO: 33965 - protein, 223 aa, unidentified; identical to SEQ ID NO: 33956
  source 1..223: note = Salmonella thompson
  REGION 1..223: note = tr|A0A3Y9ZNX0|A0A3Y9ZNX0_SALTH 7-carboxy-7-deazaguanine synthase QueE OS=Salmonella thompson OX=600 GN=queE PE=3 SV=1

SEQ ID NO: 33966 - protein, 223 aa, unidentified; identical to SEQ ID NO: 33920
  source 1..223: note = Salmonella typhi
  REGION 1..223: note = tr|Q8XEY5|Q8XEY5_SALTI 7-carboxy-7-deazaguanine synthase OS=Salmonella typhi OX=90370 GN=queE PE=3 SV=1

SEQ ID NO: 33967 - protein, 223 aa, unidentified; identical to SEQ ID NO: 33920
  source 1..223: note = Salmonella typhimurium
  REGION 1..223: note = tr|Q7CPW4|Q7CPW4_SALTY 7-carboxy-7-deazaguanine synthase OS=Salmonella typhimurium (strain LT2 / SGSC1412 / ATCC 700720) OX=99287 GN=ygcF PE=3 SV=1

SEQ ID NO: 33968 - protein, 223 aa, unidentified; identical to SEQ ID NO: 33920
  source 1..223: note = Salmonella typhimurium
  REGION 1..223: note = tr|A0A3Z2F8D4|A0A3Z2F8D4_SALTU 7-carboxy-7-deazaguanine synthase OS=Salmonella typhimurium (strain ATCC 68169 / UK-1) OX=990282 GN=queE; PE = 3 SV=1

SEQ ID NO: 33969 - protein, 223 aa, unidentified; identical to SEQ ID NO: 33920
  source 1..223: note = Salmonella virchow
  REGION 1..223: note = tr|A0A3Y8PHA5|A0A3Y8PHA5_SALVI 7-carboxy-7-deazaguanine synthase OS=Salmonella virchow; OX = 48409 GN=queE PE=3 SV=1

SEQ ID NO: 33970 - protein, 239 aa, Salsuginibacillus halophilus
  REGION 1..239: note = tr|A0A2P8HLC6|A0A2P8HLC6_9BACI 7-carboxy-7-deazaguanine synthase OS=Salsuginibacillus halophilus OX=517424 GN=queE PE=3 SV=1
MKKIPVLEVFGPTIQGEGMVAGQKTMFVRTAGCDYRCSWCDSAFTWDGSQKPRMLTAEDVAEELDELAPNNYGHITISGGNPALHAGIGGLVALMAERGVGTAVETQGSVWQDWMLEVDEVTVSPKPPSSNMTTDWEQLDHYMNALGARETKRHSLKVVIFNETDLAYAKTVHFRYPNVPFYLQVGNDDLSTADDLKLRDRLLASYEWLVEQAASDPDWNQARVLPQIHALLWGNKQGV

SEQ ID NO: 33971 - protein, 223 aa, Samsonia erythrinae
  REGION 1..223: note = tr|A0A4R3VGR3|A0A4R3VGR3_9GAMM 7-carboxy-7-deazaguanine synthase OS=Samsonia erythrinae; OX = 160434 GN=queE PE=3 SV=1
MQYPINEMFQTLQGEGYFTGVPAVFIRLQGCPVGCSWCDTKHTWDKLAEREVALDQVLVKTQESDAWGAASADDILAQMARQGYTARHVVITGGEPCIHDLAPLTLQLEKQGFSCQIETSGTHEVRCSPKTWVTVSPKVNMRGGMKVLDEALQRADEIKHPVARERDIEALDTLLARLDDDKPRIVALQPISQKDEATKLCIATCIARNWRLSMQTHKYLNIA

SEQ ID NO: 33972 - protein, 209 aa, unidentified
  source 1..209: note = Sandaracinaceae bacterium
  REGION 1..209: note = tr|A0A520QPA7|A0A520QPA7_9DELT 7-carboxy-7-deazaguanine synthase OS=Sandaracinaceae bacterium OX=2510337 GN=queE PE=3 SV=1
MGYAIKELFYTLQGEGAQAGRPAVFCRFTGCNLWSGREIDRAKAVCQFCDTDFVGTDGVGGGRFDGPAELARAVADAWPGGGAPYVVCTGGEPLLQLDAALVDALHAEGFEVAIETNGTLAPPPGVDWICVSPKAGSALVLTSGDELKLVYPQPGAEPERFVDLAFGRFFLQPMDGPLRDENTRAALAYCLAQPRWSLSLQTHKLLGIP

SEQ ID NO: 33973 - protein, 210 aa, Sandaracinobacter sp.
  REGION 1..210: note = tr|A0A501XVC9|A0A501XVC9_9SPHN 7-carboxy-7-deazaguanine synthase OS=Sandaracinobacter sp. PAMC 28131 OX=1715348 GN=queE PE=3 SV=1
MSYAVKELFLTLQGEGAQTGMRAVFLRFAGCNLWTGREQDRDKAICKFCDTDFVGTDGEGGGKFAEAEALADAVAAMWGPGAVHRLVVCTGGEPLLQLDAALIGALHARGFRIAVESNGTVEAPDGIDWLCISPKAGAETVQRRGDELKLVYPQPDLLPDQVADWAFAHFFVQPMDGPEQKANIDAAIGWCLANPKWRLSLQTHKLTGIP

SEQ ID NO: 33974 - protein, 280 aa, Sandaracinus amylolyticus
  REGION 1..280: note = tr|A0A0F6YKN3|A0A0F6YKN3_9DELT 7-carboxy-7-deazaguanine synthase OS=Sandaracinus amylolyticus OX=927083 GN=queE PE=3 SV=1
MIVRLAAWPCATSRECAHDLIDAPRCPTTSRGEGSRSGESDRVLAVSRPLAPGGARRYTLRPAMAYSVKEIFYTLQGEGARAGRPAVFCRFAGCNLWTGREQDRARAVCQFCDTDFVGIDGVGGGRFADADALADAVASKWPGGGAPYVVCTGGEPLLQLDAAAIGALHARGFEIAIETNGTIEVPPGIDWICVSPKAGSELVVREGHELKLVFPQEGLDPASLESLRFEHFYLQPMDDRTLVGPGARSTSTSTKRAIEHCLAHPRWSLSLQTHKLLGIP

SEQ ID NO: 33975 - protein, 211 aa, Sandaracinus sp.
  REGION 1..211: note = tr|A0A2D9SYX2|A0A2D9SYX2_9DELT 7-carboxy-7-deazaguanine synthase OS=Sandaracinus sp.; OX = 2024858 GN=queE PE=3 SV=1
MLTGVPSVFVRTSACNLRCRWCDTPETSWSPEGVVRTVADVLAEVLAHDTIRHVVLTGGEPLLGKGMPALARALHAEGRHLTVETAGTLVRDLPVDLWSLSPKLSGSVPDDPRWGPRHDRMRLRPDVLRHYVATGRYQLKLVVGHPNELPEVDALVAEVGAAPERVLLMPEGLTAGRLDEVAEWLVPAAMARGARFCDRLHIRLFGHTRGT

SEQ ID NO: 33976 - protein, 230 aa, Sandaracinus sp.; identical to SEQ ID NO: 31932
  REGION 1..230: note = tr|A0A2E0TL45|A0A2E0TL45_9DELT 7-carboxy-7-deazaguanine synthase OS=Sandaracinus sp.; OX = 2024858 GN=queE PE=3 SV=1

SEQ ID NO: 33977 - protein, 210 aa, unidentified
  source 1..210: note = Sandarakinorhabdus cyanobacteriorum
  REGION 1..210: note = tr|A0A255Y507|A0A255Y507_9SPHN 7-carboxy-7-deazaguanine synthase OS=Sandarakinorhabdus cyanobacteriorum OX=1981098 GN=queE PE=3 SV=1
MMYAVKELFLTLQGEGAQTGRRAVFLRFAGCNLWSGREQDRATAVCTFCDTDFVGTDGPGGGKFAAPEALADAVAACWGETAAHRLVVCTGGEPLLQLDAPLVAALHARGFEIAIETNGTQVPPPGIDWICVSPKADAPLVLTAGSELKLVFPQAKAMPDRFAHMDFQHFFLQPMDGPAQAENIQAAIAYCLAHPQWRLSLQTHKLTGIP

SEQ ID NO: 33978 - protein, 209 aa, Sandarakinorhabdus sp.
  REGION 1..209: note = tr|A0A552U910|A0A552U910_9SPHN 7-carboxy-7-deazaguanine synthase OS=Sandarakinorhabdus sp. LB1R16 OX=2593303 GN=queE PE=3 SV=1
MTYTVKELYVTLQGEGAQTGRRAVFLRFAGCNLWTGREADRHRAVCTFCDTDFVGTDGPGGGKFDCAGLVAAVEAAWGPGPDHRLVICTGGEPLLQLDRALIDALHACGFAVGVETNGTQAAPPGLDWVCVSPKAAAPLALTTGDELKLVYPQPLAMPERFEGLAFEHFFLQPMDGPAREANTQAAIAYCLDNPRWRLSLQTHKLTGLP

SEQ ID NO: 33979 - protein, 271 aa, unidentified
  source 1..271: note = Sanguibacteroides justesenii
  REGION 1..271: note = tr|A0A0C3RI34|A0A0C3RI34_9PORP 7-carboxy-7-deazaguanine synthase OS=Sanguibacteroides justesenii OX=1547597 GN=queE PE=3 SV=1
MFIQLAKDGIFPITRDKAGNPLKKLPASGFTFPGTIQGEGKLNGIPSLFIRLAGCNLHCCWQTPEGVVECDTAYAAFKIEESFRLPVTDITRIVKHNRENIRHIIITGGEPLLQAEGVLMLCRELKKEYPFHITLETNGTLFNEACAAEIDFFSISPKLASSTPPSPHDRRHSTTRINLGNIQSFITHARQYGKDFQLKFVYSAEHDGEEIKKILTQLTDWRNEDILLMPMGATPEELQRTIPKTLEHCIRNGWRYCDRLHLSLFGNKQGV

SEQ ID NO: 33980 - protein, 155 aa, unidentified
  source 1..155: note = Sanguibacteroides justesenii
  REGION 1..155: note = tr|A0A0C3RED9|A0A0C3RED9_9PORP Pyrroloquinoline quinone biosynthesis protein (Fragment); OS = Sanguibacteroides justesenii OX=1547597 GN=BA92_12720; PE = 3 SV=1
MSKTLQVGVFFSGVPAIFIRLQGCPVGCAWCDTKHTWEKLEDREVSLFSILAKTKESDKWGAASSEDLLAVIGRQGYTARHVVITGGEPCIHDLLPLTDLLEKNGFSCQIETSGTHEVRCTPNTWVTVSPKLNMRGGYEVLSQALERANEIKHPV

SEQ ID NO: 33981 - protein, 211 aa, unidentified
  source 1..211: note = Sapientia aquatica
  REGION 1..211: note = tr|A0A4R5W6S7|A0A4R5W6S7_9BURK 7-carboxy-7-deazaguanine synthase OS=Sapientia aquatica; OX = 1549640 GN=queE PE=3 SV=1
MTYSVKEIFYTLQGEGNHAGRPAVFCRFAGCNLWSGREADRATAVCQFCDTDFVGTDGELGGKFKQAHELAATINGLWPSSYLDSKYVVFTGGEPLMQLDAALIDAMHAVGFEIAIETNGTIAVPEGVDWVCVSPKMGAELVVLQGDELKVVIPQLGQPLDQYAELDFTHFFVQAMDGPLQAENIRKAIAYCKNNPRWKLSIQTHKLLQIP

SEQ ID NO: 33982 - protein, 255 aa, Saprospira grandis
  REGION 1..255: note = tr|H6L3G8|H6L3G8_SAPGL 7-carboxy-7-deazaguanine synthase OS=Saprospira grandis (strain Lewin) OX=984262; GN = queE PE=3 SV=1
MSTTPNLLAVSEYFYSLQGEGQTMGVPAIFLRLSGCNLICGGKGAEKDGQLHDGASWICDTMEVWMKGESLPFAQLLQRLDDELQFSQRLSQGVHLVITGGEPLLQDKRIAAFLAFLEAERQGLRPIIEVETNGCFLPSAPLLERVSYWNCSPKLQNSGMPAKKRIVPKALKGLAQEAGTIFKFVIAQASDFEEIQSDFLDKGLIKKEQLVLMPAADSLAALLERNKMVAEICIREQIRMCSRLHVEIWDQLTGV

SEQ ID NO: 33983 - protein, 255 aa, Saprospira grandis
  REGION 1..255: note = tr|J0P8V6|J0P8V6_9BACT 7-carboxy-7-deazaguanine synthase OS=Saprospira grandis DSM 2844 OX=694433 GN=queE; PE = 3 SV=1
MSTTPNLLAVSEYFYSLQGEGQTMGVPAIFLRLSGCNLICGGKGAEKDGQLHDGASWICDTMEVWMKGESLPFAQLLQRLDDELQFSQRLAQGVHLVITGGEPLLQDKRIAAFLAFLEAERQGLRPIIEVETNGCFLPSAPLLERVSYWNCSPKLQNSGMPAKKRIVPKALKGLAQEAGTIFKFVIAQASDFEEIQSDFLAKGLIKKEQLVLMPAADSLAALLERNKMVAEICIREQIRMSSRLHVEIWDQLTGV

SEQ ID NO: 33984 - protein, 210 aa, unidentified
  source 1..210: note = Saprospiraceae bacterium
  REGION 1..210: note = tr|A0A521UTD3|A0A521UTD3_9BACT 7-carboxy-7-deazaguanine synthase OS=Saprospiraceae bacterium OX=2202734 GN=queE PE=3 SV=1
MAYKIKEMYYTLQGEGAHAGRPAVFCRFSGCNLWSGREEDRLKAICQFCDTDFWGMDGQNGGAYDSTGLVNVAKKLWGDVKNGRPYVVCTGGEPLLQLDEALVDAFHGGGFEVGVETNGTCLAPPGLDWICVSPKAGAVLKLKKGDELKLVFPQKEAPPALFENLDFSHFFIQPMDSPDIAENTRLAVKFCLENPKWRLSVQTHKWLNIP

SEQ ID NO: 33985 - protein, 299 aa, unidentified
  source 1..299: note = Saprospirales bacterium
  REGION 1..299: note = tr|A0A1Z9N8U8|A0A1Z9N8U8_9BACT 7-carboxy-7-deazaguanine synthase OS=Saprospirales bacterium TMED214 OX=1986670 GN=queE PE=3 SV=1
MTVEKKFYYSEIFHSIQGEGHYTGVPTAWIRFFLCNLQCNGFGQIDPTNPDTYELPFEDFDVSSVNKVEDLPVWDKGCDSSYTWAKKFKDLMGQETPTAIANKIVDIIKTDSNPTGQFLHPVTGQRQHLCVTGGEPLMATGQMATVGIYEELERQDNLPGSMTFETNGTQKLRDPFKEWVDRIDTEVFFSCSPKLWTVAGEKPEKAIKPEIVAEYYKLSKAGQLKFVVGPEEREWVEMESVIEQFRDAGVHWPVWVMPTGAREEEQTAGAGIVAEKAFKRGYNVAARVHVYLFGNAIGT

SEQ ID NO: 33986 - protein, 214 aa, unidentified
  source 1..214: note = Saprospirales bacterium
  REGION 1..214: note = tr|A0A351EZC3|A0A351EZC3_9BACT 7-carboxy-7-deazaguanine synthase OS=Saprospirales bacterium OX=2026790 GN=queE PE=3 SV=1
MSDTLKKYSIKEVFYTLQGEGLYAGRPAVFCRFSGCNFWTGLEKDRKNAICHFCDTDFKGINGKNGGKFDSDSLGDLINSIWPMGKAHKFVVCTGGEPLLQLDKKLIDAFHALGFEIAVETNGSVLAPEGIDWLTVSPKDAGYFKQRSGNELKLVFPQKSLTPGMFDQLPFEHFFLQPMDGPELASNTKAALRYCLENPPWKLSLQTHKILGIE

SEQ ID NO: 33987 - protein, 235 aa, unidentified
  source 1..235: note = Unknown
  REGION 1..235: note = tr|A0A2A4SDU4|A0A2A4SDU4_9CHLR 7-carboxy-7-deazaguanine synthase OS=SAR202 cluster bacterium OX=2030829 GN=queE PE=3 SV=1
  VARIANT 184: note = Xaa can be any naturally occurring amino acid
  VARIANT 188: note = Xaa can be any naturally occurring amino acid
  VARIANT 199: note = Xaa can be any naturally occurring amino acid
  VARIANT 203..204: note = Xaa can be any naturally occurring amino acid
  VARIANT 206..207: note = Xaa can be any naturally occurring amino acid
  VARIANT 210: note = Xaa can be any naturally occurring amino acid
MLKLSRQPGGQPEIFHSLQGEGATIGVATVFLRLSLCNLSCSWCDTKYTWDWENYDYKKEVIALDTEQVREKILSYECPHLVVTGGEPLLQQTELAPLISELKQQGFYCEVETNGTIAPIPEMERDIDQWNVSPKLSTSGNRLERRLVPGTLESFSRIPNAYFKFVVVEPQDIEEVCGLAEKYXIPPXRIILLPEGRDXEVLXXRXXWVXEACVKHGFRFSTRLHILLWGDQRGR

SEQ ID NO: 33988 - protein, 235 aa, unidentified
  source 1..235: note = Unknown
  REGION 1..235: note = tr|A0A2N0LIC4|A0A2N0LIC4_9CHLR 7-carboxy-7-deazaguanine synthase OS=SAR202 cluster bacterium Io17-Chloro-G5 OX=1926614 GN=queE PE=3 SV=1
MLKISQREKGEPEIFHSIQGEGISMGVPSVFLRLATCNLSCHWCDTKYTWDWQNFDYKAEVVELEAPEIQRKIQAFNCSHVVITGGEPMLQQKELEPLVESLAAQGYDFEVETNGTIVPQPGMLRHIGQWNVSPKLRSSGNTSAGRLIPRALETFARLPEAYFKFVVTEESDIDEVCALRDQYELTLDQVLLMPEGRTPDALAKKSAWLSEACVKYGFRFTTRLHIILWGDERGR

SEQ ID NO: 33989 - protein, 194 aa, unidentified
  source 1..194: note = Unknown
  REGION 1..194: note = tr|A0A2A4TAQ1|A0A2A4TAQ1_9DELT 7-carboxy-7-deazaguanine synthase OS=SAR324 cluster bacterium OX=2024889 GN=queE PE=3 SV=1
MKVSEIFYSLQGEGRHAGRAAIFVRFYDCNLACSFCDEPLHKSYYQEMEEAEVFQQIAQHPAKFVVITGGEPTLNDLRPFIAKLQDQGYYVAVETNGYQPTHIANADWVTYSPKNWKHIDFSSFFNEMKLIVHQKTDVEKLEEISRQLETPIFVQPQADQDRVVEENVQFCVNLIKKNPRFTLSLQLHKLLHIP

SEQ ID NO: 33990 - protein, 215 aa, unidentified
  source 1..215: note = Unknown
  REGION 1..215: note = tr|A0A2D6YLG8|A0A2D6YLG8_9DELT 7-carboxy-7-deazaguanine synthase OS=SAR324 cluster bacterium OX=2024889 GN=queE PE=3 SV=1
MTVIKNIQEIIPLTIQGEGFHAGRSCSFIRLFGCPVGCWFCDTGYAPGDLKDLKKLPRLSIDYKFLLERLQSRFVVISGGEPLYHQNFEELLERLLRDNFEVAVETSGARAFPFERFPRVWVTFSPKLHATDYLKDQHSRTFWTNSQEIKVVISKASDWEAYEQLLDQAAQRGILIYLQPEWSKQIEATPLILQILQQKPDWKISVQLHKYLRLP

SEQ ID NO: 33991 - protein, 208 aa, unidentified
  source 1..208: note = Unknown
  REGION 1..208: note = tr|A0A0R2PDD2|A0A0R2PDD2_9GAMM 7-carboxy-7-deazaguanine synthase OS=SAR86 cluster bacterium BACL1 MAG-120507-bin14 OX=1655567 GN=queE PE=3; SV = 1
MMYSIKEIYKTIQGEGAQAGRTAMFVRFSGCNLWSGREQHRSSAICKFCDTDFVGTNGINGGTYAAKDLVLKLTDLWGDQGNRLIVFTGGEPMLQLDARLIEECKKSGFDTAIETNGTIAIDLDLDWICVSPKQGSELIVHQGNELKVVYPQEGQDLDHFLDLKFDHMYLQPMDGLEGKENTRKTIQYCLENPRWKLSIQQHKLIGMA

SEQ ID NO: 33992 - protein, 216 aa, unidentified
  source 1..216: note = Unknown
  REGION 1..216: note = tr|A0A2A4MUD4|A0A2A4MUD4_9GAMM 7-carboxy-7-deazaguanine synthase OS=SAR86 cluster bacterium OX=2030880 GN=queE PE=3 SV=1
MNSSALRITEIFHSLQGETRTAGIPTVFVRLTGCPLRCQYCDTAYAFSGGEMLSVDAIMEQVQGYNCHYITVTGGEPLAQPQCRELLTSLADKGYEISLETSGALSIEGLDTRISVILDLKTPGSLECDRNLESNIALLKTKDQLKFVICDRRDYDWAKAKVDQYDLQSRVSEILFSPSFEQLPAKHLAQWILDDGLNVRMQLQMHKSIWGDDPGH

SEQ ID NO: 33993 - protein, 216 aa, unidentified
  source 1..216: note = Unknown
  REGION 1..216: note = tr|A0A0R2W2R4|A0A0R2W2R4_9GAMM 7-carboxy-7-deazaguanine synthase OS=SAR92 bacterium BACL16 MAG-120619-bin48 OX=1655625 GN=queE PE=3 SV=1
MSDTALRITEIFHSLQGETSTTGLPTVFVRLTGCPLRCGYCDTAYAFEGGTKILISEILDTVKAFGADCVTVTGGEPLAQPQCLELLEELCDAGYRVSLETSGAMPVAEVDPRVVKIVDLKTPGSGELSKNLYENMDHLQPHDEVKFVICDRQDYDWACLKVDQLNLRAKAAEVLFSPSQGQLAPKQLAEWMLADKLNIRMQLQMHKYIWGDQPGH

SEQ ID NO: 33994 - protein, 213 aa, unidentified
  source 1..213: note = Unknown
  REGION 1..213: note = tr|A0A0R2TYF9|A0A0R2TYF9_9GAMM 7-carboxy-7-deazaguanine synthase OS=SAR92 bacterium BACL26 MAG-121220-bin70 OX=1655626 GN=queE PE=3 SV=1
MTYAVKEIFYSLQGEGAHAGRPAIFCRFSGCNLWSGQEKHRANAICQFCDTDFVGTNGDGGGSFTSTTSLVAQVKSYWPQSISDQTHPYVVCTGGEPLLQLDTDLIEAFHAEGMEVAIETNGTLPVPKGVDWVCVSPKSGSTLLVEEGDEIKLVYPQQGHHPSDFVHLKFNHFFLQPMFDDQENNNLETTVEYCLSHPRWSLSLQTHKLLGLP

SEQ ID NO: 33995 - protein, 213 aa, unidentified
  source 1..213: note = Unknown
  REGION 1..213: note = tr|A0A520MIJ0|A0A520MIJ0_9GAMM 7-carboxy-7-deazaguanine synthase OS=SAR92 clade bacterium; OX = 2315479 GN=queE PE=3 SV=1
MAYAVKEIFYSLQGEGAHAGRPAIFCRFTGCNLWSGHEKHRADAVCQFCDTDFVGTDGDGGGSFKNAVDLAKAVVSYWPDSITDVIHPYVICTGGEPLLQLDKDLIEAFHNEGAEVAIETNGTLPVPEGVDWVCVSPKSGSTVVVEEGDEIKLVYPQVGHQPSDFVHLNFEHFFLQPMFDEDENEHVKATIEYCLTHPRWSLSLQSHKLLGLQ

SEQ ID NO: 33996 - protein, 210 aa, Schlegelella thermodepolymerans
  REGION 1..210: note = tr|A0A2S5T500|A0A2S5T500_9BURK 7-carboxy-7-deazaguanine synthase OS=Schlegelella thermodepolymerans OX=215580 GN=queE PE=3 SV=1
MAYQIKEIFYTLQGEGANAGRPAVFCRFAGCNLWSGRERDRGRAVCRFCDTDFVGTDGTLGGRYEAEALADTIAAQWPAGRPGQPLTVLTGGEPLLQVDTALVDALHARGFRIALETNGTLAAPPGIDWICVSPKAGAELVQRSGQELKVVVPQDGLDLDALAALPFEHHFLQAMDGPDLQRNTQWAIARCLQDPRWRLSVQTHKVLDIR

SEQ ID NO: 33997 - protein, 210 aa, Schlegelella thermodepolymerans
  REGION 1..210: note = tr|A0A4R2MG97|A0A4R2MG97_9BURK 7-carboxy-7-deazaguanine synthase OS=Schlegelella thermodepolymerans OX=215580 GN=queE PE=3 SV=1
MAYQIKEIFYTLQGEGANAGRPAVFCRFAGCNLWSGRERDRGRAVCRICDTDFVGTDGTLGGRYEAEALADTIAAQWPAGRPGQPLTVLTGGEPLLQVDTALVDALHARGFRIALETNGTLAAPPGIDWICVSPKAGAELVQRSGQELKVVVPQDGLDLDALAALPFEHHFLQAMDGPDLQRNTQWAIARCLQDPRWRLSVQTHKVLDIR

SEQ ID NO: 33998 - protein, 213 aa, Schleiferia sp.
  REGION 1..213: note = tr|A0A401XNP6|A0A401XNP6_9FLAO 7-carboxy-7-deazaguanine synthase OS=Schleiferia sp. LA; OX = 2173829 GN=queE PE=3 SV=1
MNVHDKEVNERLVADGRYVPLMEEFYTIQGEGFHTGKAAYFVRIGGCDVGCHWCDVKESWNAALHPPTAVEEIAEHAAKHSSTVVVTGGEPLTWNMGPLTKALKDRGITIHLETSGSYPVTGVWDWVCLSPKKTKPPLPEWYALANELKVIVYNRHDLKWAEMHAERVGEGCLLYLQPEWSRRKEVMPMIAEYVMANPKWRVSLQTHKYIGIP

SEQ ID NO: 33999 - protein, 212 aa, Schleiferia thermophila
  REGION 1..212: note = tr|A0A085KZP9|A0A085KZP9_9FLAO 7-carboxy-7-deazaguanine synthase OS=Schleiferia thermophila str. Yellowstone OX=1453500 GN=queE PE=3 SV=1
MNELEVKNLELVSDGYYVPLMEEFYTIQGEGFHTGKAAYFIRIGGCDVGCHWCDVKESWNASLHPPTHVNTIAENARNHADTVVVTGGEPLTWNMGPLTKALKQYKLKIHLETSGAYPLTGIWDWICLSPKKTKPPRDEWYQVANEVKIIVYNRHDLKWAEMHAERVSKDCALFLQPEWSKRNEVMPFITQYILENPKWRISLQTHKYIGIP

SEQ ID NO: 34000 - protein, 212 aa, Schleiferia thermophila
  REGION 1..212: note = tr|A0A369A704|A0A369A704_9FLAO 7-carboxy-7-deazaguanine synthase OS=Schleiferia thermophila OX=884107 GN=queE PE=3 SV=1
MNELEVKNLELVSDGYYVPLMEEFYTIQGEGFHTGKAAYFIRIGGCDVGCHWCDVKESWNASLHPPTHVNTIAENARNHADTVVVTGGEPLTWNMGPLTKALKQYKLKIHLETSGAYPLTGIWDWICLSPKKTKPPRDEWYQVANEVKIIVYNRHDLKWAEMHAERVSKDCALFLQPEWSKRNEVMPIITQYILENPKWRISLQTHKYIGIP

SEQ ID NO: 34001 - protein, 244 aa, Schwartzia succinivorans
  REGION 1..244: note = tr|A0A1M4WBW2|A0A1M4WBW2_9FIRM 7-carboxy-7-deazaguanine synthase OS=Schwartzia succinivorans DSM 10502 OX=1123243 GN=queE PE=3 SV=1
MKENVIEIFSSVQGEGKYAGCRQVFIRLEGCNISCRYCDTEHMTGKHDVCIVESVPGSHEYVEISNPMTAEAVAAEVKRFTDNVPHQAVSITGGEPLLHAEFVRELAKHVDVPVFLETNGTLPEKLKQVVDCVDIISMDIKLPSELNGKTYWAEHRDFLCTAKGKDIYCKIVLTQDTAKEEFEKACRIISDVDDTILLILQPVTPFGGAEPPSAKEMLQWQAEGLKFLKNVRVIPQTHVMMGQL

SEQ ID NO: 34002 - protein, 237 aa, unidentified
  source 1..237: note = Scopulibacillus darangshiensis
  REGION 1..237: note = tr|A0A4R2P4U1|A0A4R2P4U1_9BACL 7-carboxy-7-deazaguanine synthase OS=Scopulibacillus darangshiensis OX=442528 GN=queE PE=3 SV=1
MPSKEEYGNWTLPMVEIFETVEGEGMGQGLPTVFVRVFHCNLRCTWCDTPYSYAPEKPEFEATIDDIVEKVSTFPSRRICFTGGEPLIHRQKSAALIKAMAELDHIVDIHIETNGAIDLMPFDELRRSDDLLMSKVRFVMDYKLPDSGETDKMVHSNFDCLMEQDEVKFVIAGDEDFDYAKRVVSKYNSSGQVLFSPVWEAMAPDRLVEKVLAEPLPDVKISMQLHKVIWDPNRRGV

SEQ ID NO: 34003 - protein, 265 aa, Scytonema hofmannii
  REGION 1..265: note = tr|A0A139XDX1|A0A139XDX1_9CYAN 7-carboxy-7-deazaguanine synthase OS=Scytonema hofmannii PCC 7110 OX=128403 GN=queE PE=3 SV=1
MTAKTTVTPTARLIEIFSAIQGEGLNVGTRQIFIRFALCDLRCHFCDSAHTWNPPATCRIERTPGLRDFETYSNPVPLPMLLQWVEWQNLPFVHDTISLTGGEPLLHASFLLEFLPQVRFITGLPIYLETGGHRPKQLATILPYLDSVGMDFKLPSTSGESYWQEHTEFLQLCHTSNVEVFVKLIVSQTTNPLELERSAELVASVDPSIPVFLQPVTPIESSVMLTNKPILAPSPEQVLTWQALMKRLVKQVRVIPQTHKMLNQL

SEQ ID NO: 34004 - protein, 265 aa, unidentified
  source 1..265: note = Scytonema millei
  REGION 1..265: note = tr|A0A1D2PFC8|A0A1D2PFC8_9CYAN 7-carboxy-7-deazaguanine synthase OS=Scytonema millei VB511283 OX=1245923 GN=queE PE=3 SV=1
MTVKTTVTPTARLIEVFSAIQGEGLNVGTRQIFIRFALCDLRCHFCDSAHTWNAPATCRIEQTPGLRDFEIYSNPVSLPMLLEWVERQNVPCLHDSISLTGGEPLLHTPFLLEFLPQVRSVTGLPIYLETGGHRPEQLDTILPYIDSVGMDFKLPSTSGENRWREHAEFLQLCWKSQLEVFVKIIVSQTTDSTELERAAQLVASVNPSIVVFLQPVTPLDDPSAFNQPPVLAPSPSQVLGWQALMKRFVKQVRVVPQTHKMLNQL

SEQ ID NO: 34005 - protein, 258 aa, unidentified
  source 1..258: note = Scytonema millei
  REGION 1..258: note = tr|A0A4R4IZ58|A0A4R4IZ58_9CYAN 7-carboxy-7-deazaguanine synthase OS=Scytonema millei VB511283 OX=1245923 GN=queE PE=3 SV=1
MTTARLIEIFSAIQGEGLNVGTRQIFIRFALCDLRCHFCDSAHTWSVPSTCCVERSPGLRDFETHTNPVQLNTLLTWIERQNSPGLHDSISLTGGEPLLHAPFLVEFLPLVRRATGLPIYLETGGHRPQQLQLILPYLDSVGMDIKLPSVSGEDRWNEHAEFLQACHQAGVEVFIKAIVSSQTDERDLATAAKLVASVNPEIPVFLQPATPLTPSQQFGGIPIQAPTPAQVLHWQALTKRELKRVRVIPQTHKMLNQL

SEQ ID NO: 34006 - protein, 265 aa, Scytonema sp.
  REGION 1..265: note = tr|A0A1Z4IYY8|A0A1Z4IYY8_9CYAN 7-carboxy-7-deazaguanine synthase OS=Scytonema sp. HK-05; OX = 1137095 GN=queE PE=3 SV=1
MTVKNTITPTARLIEVFSAIQGEGLNVGTRQIFIRFALCDLRCHFCDSAHTWNAPATCKIEQTPGLRDFEIYSNPVPLPMLLSWVERQNLPCLHDSISLTGGEPLLHTPFLLEFLPQVRSVTGLPIYLETGGHRPEQLDTILPYLDSVGMDFKLPSTSGENRWREHAEFLQVCWKSQVEVFVKIIVSQTTDPTELEHSAQLVASVSPSIPVFLQPVTPLDDPIAFNQPPVLAPSPSQVLNWQSLMKRFVKQVRVVPQTHKMLNQL

SEQ ID NO: 34007 - protein, 265 aa, Scytonema sp.
  REGION 1..265: note = tr|A0A1Z4Q1D3|A0A1Z4Q1D3_9CYAN 7-carboxy-7-deazaguanine synthase OS=Scytonema sp. NIES-4073 OX=2005464 GN=queE PE=3 SV=1
MTVKNTITPTARLIEVFSAIQGEGLNVGTRQIFIRFALCDLRCHFCDSAHTWNAPATCKIEQTPGLRDFEIYSNPVPLPMLLSWVERQNLPCLHDTISLTGGEPLLHTPFLLEFLPEVRSVTGLPVYLETGGHRPEQLDTILPYLDSVGMDFKLPSTSGENRWREHAEFLQVCWKSQVEVFVKIIVSQTTDPTELEHSAQLVASVSPSIPVFLQPVTPLDDPIAFNQPPVLAPSPSQVLNWQSLMKRFVKQVRVVPQTHKMLNQL

SEQ ID NO: 34008 - protein, 265 aa, Scytonema tolypothrichoides
  REGION 1..265: note = tr|A0A0C2LEY8|A0A0C2LEY8_9CYAN 7-carboxy-7-deazaguanine synthase OS=Scytonema tolypothrichoides VB-61278 OX=1233231 GN=queE PE=3 SV=1
MTIKTTVTPTARLIEVFSAIQGEGLNVGTRQIFIRFALCDLRCHFCDSAHTWNAPHTCRIEQTPGLRDFEIYSNPVSLPMLLEWVERQNLPCLHDTITITGGEPLLHTPFLVEFLPQVRSLTSLPVYLETGGHRPDQLKNILPLIDSVGMDFKLPSASGENRWREHAEFLHLCWTSQVEVFVKIIVSQTTNPTELEQSAQLVASVNPSIPVFLQSVTPLDDPGAFKQLPVAAPSPSQVLNWQALMKRFVKCVRVVPQTHKMLNQL

SEQ ID NO: 34009 - protein, 223 aa, unidentified
  source 1..223: note = Unknown
  REGION 1..223: note = tr|J3VRH3|J3VRH3_9ENTR 7-carboxy-7-deazaguanine synthase OS=secondary endosymbiont of Ctenarytaina eucalypti OX=1199245 GN=queE PE=3 SV=1
MQYPLNEIFQTLQGEGYFTGVPAIFIRLQGCPVQCSWCDTKHTWQQDVTDQVTLREAPLKKKDNSTWANLTAEEMITIIFQQGWTAQHVVITGGEPCLHDLMPLTYALEQQGFSCQIETSGTQYIHCTPKTWVTVSPKIDMRKGLPVLLQAINRSDEIKHLVARQRDIEELDELLKTLNDAKQPVISLQPISQKEAANRLCIETCISRNWRLSIQTHKYLNIK

SEQ ID NO: 34010 - protein, 223 aa, unidentified
  source 1..223: note = Unknown
  REGION 1..223: note = tr|J3TZ27|J3TZ27_9ENTR 7-carboxy-7-deazaguanine synthase OS=secondary endosymbiont of Heteropsylla cubana; OX = 134287 GN=queE PE=3 SV=1
MKYPVNRIFQTIQGEGCFTGVPAIFIRLQGCSVMCSWCDTKYTWKQDEFERVPSRDILVKTIDNSRWASCTEEDILALILNQDWTACHIVITGGEPCLYNLIPLTEVLEKQGFTCQIETSGTQEIHCTSRTWVTLSPKIDMYHKLPIVPKALIRSDEIKYPIEKKSDINKLDILLASLKDIKKRVIALQPVSQKERATNLCIETCILRNWRLSIQTQKYLKII

SEQ ID NO: 34011 - protein, 221 aa, Sedimentibacter sp.
  REGION 1..221: note = tr|A0A252CIY9|A0A252CIY9_9FIRM 7-carboxy-7-deazaguanine synthase OS=Sedimentibacter sp. SX930 OX=1955060 GN=queE PE=3 SV=1
MVLQVVEKFVSINGEGRRCGQLATFIRFAGCNLNCGYCDTAWANERKVAFDPMTAEEVYAYIKETQVTNVTLTGGEPLLQQDMGELLELLSQDPELYVEIETNGSVLLSKFSDLENPPSFTMDYKLPSSGMERMMALENFDHLTEKDTVKFVSGSMADLEKARELINKYKLTEKTSIFISPVFGDIELESIVDFMKDNQMNGVNMQVQLHKIIWDPNERGV

SEQ ID NO: 34012 - protein, 216 aa, Sedimenticola selenatireducens
  REGION 1..216: note = tr|A0A557SDR3|A0A557SDR3_9GAMM 7-carboxy-7-deazaguanine synthase OS=Sedimenticola selenatireducens OX=191960 GN=queE PE=3 SV=1
MSEMAQLRITEIFYSLQGESSTVGFPTVFVRLTGCPLRCGYCDTAYAFKGGVWQDLQAVMDQVAAYQPQYVTVTGGEPLAQESCLELLTALCDEGYKVSLETSGAIAISPVDPRVMNVMDIKTPGSGEVEKNLWSNIAQLKSTDQVKFVICDESDYRWSCEQLDKWNLSKRCEVLFSPALGLQDATQLAEWILRDRLQVRFQIQLHKYLWGDVSGK

SEQ ID NO: 34013 - protein, 213 aa, Sedimenticola selenatireducens
  REGION 1..213: note = tr|A0A2N6CUV4|A0A2N6CUV4_9GAMM 7-carboxy-7-deazaguanine synthase OS=Sedimenticola selenatireducens OX=191960 GN=queE PE=3 SV=1
MAQLRITEIFYSLQGESNSVGLPTVFVRLTGCPLRCGYCDTTYAFKGGEWLELDTVMEQVAAYAPQYVCVTGGEPLAQEACLELLVALCNAGYRVSLETSGALDISRVDPRVVNVMDLKTPGSGEEEKNLFSNIDRLKPEDQVKFVICDAADYDWALEQLRAWDLGNRCQVLFSPALGLQNATELAEWILRDRLNVRFQIQLHKYLWGDVAGK

SEQ ID NO: 34014 - protein, 213 aa, Sedimenticola sp.
  REGION 1..213: note = tr|A0A2N6GJC4|A0A2N6GJC4_9GAMM 7-carboxy-7-deazaguanine synthase OS=Sedimenticola sp.; OX = 1940285 GN=queE PE=3 SV=1
MSRLRISEIFYSLQGESNTVGMPTVFIRLTGCPLRCGYCDTTYAFKGGEWQTLEQILATVASFGARYVTVTGGEPLAQRECLGLLQALCDAGYQVSLETSGALDVCQVDARVVKVMDLKTPASGEMEKNLLSNIDCLTPKDQVKFVICDQADYLWAREQIDTLHLDRRCELLISPAQGLQDATELADWVIRDRLQVRFQIQLHKALWGNVSGK

SEQ ID NO: 34015 - protein, 213 aa, unidentified
  source 1..213: note = Sedimenticola thiotaurini
  REGION 1..213: note = tr|A0A0F7K3H1|A0A0F7K3H1_9GAMM 7-carboxy-7-deazaguanine synthase OS=Sedimenticola thiotaurini OX=1543721 GN=queE PE=3 SV=1
MTRLRISEIFYSLQGESNSVGLPTVFVRLTGCPLRCGYCDTTYAFKGGEWLELAQVLAQVADYAPRHVTVTGGEPLAQEACLELLGGLCDAGYRVSLETSGALDIGQVDPRVVTVMDLKTPGSGEVEKNRFSNIDHLKQTDQVKFVICDEVDYHWACEQLQAWDLDNRCQVLFSPALGRQDATQLAEWILRDRLHVRFQIQLHKYLWGDVAGK

SEQ ID NO: 34016 - protein, 213 aa, unidentified
  source 1..213: note = Sedimenticola thiotaurini
  REGION 1..213: note = tr|A0A558CVB4|A0A558CVB4_9GAMM 7-carboxy-7-deazaguanine synthase OS=Sedimenticola thiotaurini OX=1543721 GN=queE PE=3 SV=1
MAQLRITEIFYSLQGESNSVGLPTVFVRLTGCPLRCGYCDTTYAFKGGAWLDMQDVMAQVAAYRPKYVTVTGGEPLAQEACLTLLTALCDAGYKVSLETSGAISIAQVDPRVVNVMDLKTPGSGEMGKNLWDNIELLKPTDQVKFVLCDESDYRWACEQVDKWGMIDRCEVLFSPALGLQDATELAEWILRDRLQVRFQIQLHKYLWGDVSGK

SEQ ID NO: 34017 - protein, 172 aa, unidentified
  source 1..172: note = Sedimentisphaera cyanobacteriorum
  REGION 1..172: note = tr|A0A1Q2HNK7|A0A1Q2HNK7_9BACT Putative 7-cyano-7-deazaguanosine (PreQ0) biosynthesis protein QueE; OS = Sedimentisphaera cyanobacteriorum OX=1940790; GN = L21SP3_00583 PE =4 SV=1
MSVAQILRRAEAREGSNVVITGGEPLIQEELPELCYALRGICPHITLETSGILPADDLAVDLMSISPKLSNSVGDAEKSAEYFHPEIISELIEEYSSQIKFVISDLQDVLEAGRAVEQISAIGRADLMLMPLASTLEEYQIKASEVAQYCLGFGYTFCPRLQLTLFGGGRGA

SEQ ID NO: 34018 - protein, 221 aa, unidentified
  source 1..221: note = Sedimentisphaera salicampi
  REGION 1..221: note = tr|A0A1W6LJR8|A0A1W6LJR8_9BACT 7-carboxy-7-deazaguanine synthase OS=Sedimentisphaera salicampi OX=1941349 GN=queE PE=3 SV=1
MKISEIFYSIQGEGRLAGVPSLFIRTAGCPVNCPWCDTDYAKSFDAGEEMSVAQILRRADARDGSNVVITGGEPLIQEDLADLCYGLRAISPHITLETSGILPAGDLAVDLMSISPKLSNAQNDEEKNFEHFYPEIISGLIEEYSSQIKFVVSDLQDVLEAGRAVKEISAVGRADLMLMPMASTFEEYQLKAPEVAQYCLGFGYTFCPRLQLVLFGGGKGA

SEQ ID NO: 34019 - protein, 239 aa, unidentified
  source 1..239: note = Sedimentitalea sp.
  REGION 1..239: note = tr|A0A3T0N208|A0A3T0N208_9RHOB 7-carboxy-7-deazaguanine synthase OS=Sedimentitalea sp. W43 OX=2483033 GN=queE PE=3 SV=1
MNRLRIAEIFGPTIQGEGAVIGVPTVFVRAGGCDYRCSWCDSLHAVDSKFRHDWKMMSAADIFAEVEHLSGGVPLAVSLSGGNPAIQDFSPLIALGHAKGYRFVMETQGSVAQSWFSDLSTLILSPKPPSSGETVDWAKFDDCINQAKQAETVMKIVIFDEADYDWARNVAARYPDLPLYLQPGNHTPPPPEAEDAEIDMDGIMHRYEWLIDKTLGDHWYTPTILPQLHVLVWGNKRGV

SEQ ID NO: 34020 - protein, 242 aa, Sediminibacillus albus
  REGION 1..242: note = tr|A0A1G8X2K9|A0A1G8X2K9_9BACI 7-carboxy-7-deazaguanine synthase OS=Sediminibacillus albus OX=407036 GN=queE PE=3 SV=1
MNRFPVLEIFGPTIQGEGMVVGRKTMFVRTAGCDYSCAWCDSAFTWDGSAKAEIQKMSAGEILGELQRIGGSHFDHVTISGGNPALLRNLAELVDLLHQEGLEVALETQGSRWQDWFLQIDDLTISPKPPSSGMDTNWDMLDSIINRLSEKDRLFHTSLKVVIFNDEDLHYAEKVHKRYPGTAFFLQVGNENLAENSTTNLTAILLDKYQWLIDRVVNSQTLNHVRVLPQVHTLLWGNKRGV

SEQ ID NO: 34021 - protein, 242 aa, Sediminibacillus halophilus
  REGION 1..242: note = tr|A0A1G9P3B2|A0A1G9P3B2_9BACI 7-carboxy-7-deazaguanine synthase OS=Sediminibacillus halophilus OX=482461 GN=queE PE=3 SV=1
MFKFPVLEIFGPTIQGEGMVVGRKTMFVRTAGCDYGCSWCDSAFTWDGSSKKDIRMMSAEEVMEGLQAKGGSRFDHVTISGGNPALLQNLSELIDKLHGQGIEVALETQGSRWQEWFVDIDDLTISPKPPSSGMKTNWQVLDSIINRLADSGRLSHTSLKVVVFDEKDLQYASAVHQRYPKVDFYLQVGNDDLAEADSASLAGKLLEKYQWLIDRVMQSDMLNHVRVLPQVHALVWGNKRGV

SEQ ID NO: 34022 - protein, 207 aa, unidentified
  source 1..207: note = Sediminibacterium ginsengisoli
  REGION 1..207: note = tr|A0A1T4K814|A0A1T4K814_9BACT 7-carboxy-7-deazaguanine synthase OS=Sediminibacterium ginsengisoli OX=413434 GN=queE PE=3 SV=1
MITSPTLTRTSLPVMESFYTIQGEGFHQGRAAYFIRLGGCDVGCFWCDVKESWDASAHPQREIASIVEEAAAYPGRLAVITGGEPLMHDLTELTTALKAAGFETNIETSGSSAFSGSWDWVCLSPKKFKAPRPEIVPLASELKVVIYNKTDFQWAENYAAQASPECKLYLQPEWSKADTITPLIVDYIKANPRWELSMQLHKYINVP

SEQ ID NO: 34023 - protein, 193 aa, Sediminibacterium sp.
  REGION 1..193: note = tr|A0A2M8JT84|A0A2M8JT84_9BACT 7-carboxy-7-deazaguanine synthase OS=Sediminibacterium sp. FEMGT703S OX=2080766 GN=queE PE=3 SV=1
MEAFYTLQGEGAHQGRAAYFIRLGGCDVGCVWCDVKDSWDVTKHPIVSIDEIVAKAISYPGRLAVITGGEPLMHQLDALTNALHMAGFETNIETSGSWPLSGHWDWICLSPKKFKAPLDEVIVKAHELKVVVFNKHDFTWAEKYASLVNPSCKLYLQPEWDKAAEMTPLILDYIQANPQWRLSLQVHKYLNIP

SEQ ID NO: 34024 - protein, 210 aa, Sediminicola luteus
  REGION 1..210: note = tr|A0A2A4G928|A0A2A4G928_9FLAO 7-carboxy-7-deazaguanine synthase OS=Sediminicola luteus; OX = 319238 GN=queE PE=3 SV=1
MLEKQTMDLVDKGLMLPLMEEFYTIQGEGYYKGTAAYFIRVGGCDVGCHWCDVKESWDAEKHPPTAIDVIVENAAKYSDTIVITGGEPLTWDMGPLTQALKAKGMKTHIETSGAYTVSGQWDWFCLSPKKNKLPVPAAHTAAQELKIIVYNKHDLKFAEEQAALVGKDCILYLQPEWSVRDKVVPMIVDYVMAHPKWKVSLQTHKYLNIP

SEQ ID NO: 34025 - protein, 210 aa, Sediminicola sp.
  REGION 1..210: note = tr|A0A0S1SEQ1|A0A0S1SEQ1_9FLAO 7-carboxy-7-deazaguanine synthase OS=Sediminicola sp. YIK13 OX=1453352 GN=queE PE=3 SV=1
MVKNEVLALVDKGEMLPLMEEFYTIQGEGFHKGTAAYFIRVGGCDVGCHWCDVKESWNAETHPPTHISAIVDNAAKYSDTIVVTGGEPLTWEMNPLTTALKDKNLQVHIETSGAYPLTGQWDWICLSPKKNKLPEGIIYDKAHELKMIIFNKHDFIFAEEQAAKVNGNCILYLQPEWSVRDKMVPLIVDYVMKNPKWKVSLQTHKYLNIP

SEQ ID NO: 34026 - protein, 207 aa, Sediminitomix flava
  REGION 1..207: note = tr|A0A315ZC29|A0A315ZC29_9BACT 7-carboxy-7-deazaguanine synthase OS=Sediminitomix flava; OX = 379075 GN=queE PE=3 SV=1
MENLKDTVQITYPVMEAFYTIQGEGKYQGHAAYFIRLAGCDVGCVWCDVKESWEEEGHPILSVDEIVNEAKKYPGRLAVITGGEPCMHDLSPLTTALKEAGFHINIETSGAHELSGHIDWVCFSPKKFKAPLDEFYQKADELKVVIFHKSDFAWAEEHASKLGDDCLLYLQPEWGKSAKILPMIVDYVKDNPKWKISLQVHKYMDIP

SEQ ID NO: 34027 - protein, 207 aa, Segetibacter aerophilus
  REGION 1..207: note = tr|A0A512BBK5|A0A512BBK5_9BACT 7-carboxy-7-deazaguanine synthase OS=Segetibacter aerophilus OX=670293 GN=queE PE=3 SV=1
MDFAQTSVITTLPVMEAFYTIQGEGFHQGRAAYFIRLGGCNVGCFWCDVKESWDADKHPKIAIDEIVETASKEPGRLAVITGGEPLMHNLDELTYRLQSEGFETNIETSGSFPLSGHWNWICVSPKKFRPPTDEALANANELKVIIYNKNDFAWAEKHAANVSAECKLYLQPEWERAPIMTPPIIDYIKENPRWELSLQIHKYINVP

SEQ ID NO: 34028 - protein, 233 aa, Seinonella peptonophila
  REGION 1..233: note = tr|A0A1M4XIP8|A0A1M4XIP8_9BACL 7-carboxy-7-deazaguanine synthase OS=Seinonella peptonophila OX=112248 GN=queE PE=3 SV=1
MSRDISKELPMVEIFQTVEGEGLRAGFPTTFIRLFHCNLRCTWCDTTYSYAPAKPVFTATIAEIVNKVKKLPNPSICLTGGEPLIHGEHSLHLIQELVLLPFIKDIHIETNGAIDLKPYHQWRLSDKNGQKVRFILDYKLPASGEQHRMIEDNFSQLTDTDEVKFVIQDEHDFQVARKILQQKVIRGTPLFSPVWEICDPKQLVTWIQENHLRNVKLNLQLHKYIWDPEARGV

SEQ ID NO: 34029 - protein, 217 aa, Selenihalanaerobacter shriftii
  REGION 1..217: note = tr|A0A1T4K6B7|A0A1T4K6B7_9FIRM 7-carboxy-7-deazaguanine synthase OS=Selenihalanaerobacter shriftii OX=142842 GN=queE PE=3 SV=1
MLVNNIFSSIQGESTYSGFPTTFIRLTGCNLRCSYCDTEYAYKKGEELSIDEVITKVIDLNNDYVCLTGGEPLFQSNIQTLINKLFKEGYEVSIETNGAVDLEGFELDNIKVVMDFKLPSSGEFDNNSEVIYENLQRISKKDDLKFVIGDKEDFLFAKNVIIDKELQKKVNIIFSPIFKRLEPNLLVKWLLESPELNKCRLQLQLHKIIWDEEMKGV

SEQ ID NO: 34030 - protein, 243 aa, Selenomonas artemidis
  REGION 1..243: note = tr|E7N2W3|E7N2W3_9FIRM 7-carboxy-7-deazaguanine synthase OS=Selenomonas artemidis F0399 OX=749551 GN=queE; PE = 3 SV=1
MRENIIEIFSSIQGEGKYVGCRQVFVRLEGCNLDCTYCDTENEIGRHPTCMVEMPAGSHELHSYANPLSIETVAALVAQVAGDVPHHSLSVTGGEPLLHVPFIRALKERVPLPIFLETNGTLHDALARCIDCVSYISMDIKLPGVLLHPVWDAHARFLEIARTKDVYVKVVVAAETREDEVRTAARMVAETAPDVLLILQPVTPYGGCTAPTPARLLALQQIALVHVPDVRVIPQTHRMMDLL

SEQ ID NO: 34031 - protein, 248 aa, Selenomonas flueggei
  REGION 1..248: note = tr|C4V0R7|C4V0R7_9FIRM 7-carboxy-7-deazaguanine synthase OS=Selenomonas flueggei ATCC 43531 OX=638302; GN = queE PE=3 SV=1
MRETDMNENIIEIFSSIQGEGKYVGCRQVFLRLEGCNLNCTYCDTDSKAGTHPNCVVEEGAGTYHLVPYPNPISPERAAELVALAAAGVPHQALSITGGEPLLHASFIRALAPHVHLPIYLETNGTLYAELKKCIDCVAGISMDIKLPSVTAHPVWDAHVRFLEIAKVKDTWIKIVVAAESPDSEIDTAVRLVADTAPETMLILQPVTPCGGCMKPSSEQLLKWQETALRRLANVRVIPQTHRMMDML

SEQ ID NO: 34032 - protein, 243 aa, Selenomonas infelix
  REGION 1..243: note = tr|G5GS61|G5GS61_9FIRM 7-carboxy-7-deazaguanine synthase OS=Selenomonas infelix ATCC 43532 OX=679201; GN = queE PE=3 SV=1
MRENIIEIFSSIQGEGKYVGCRQIFVRLEGCNLDCTYCDTENEIGRHPTCMVEERAGTHELVPYENPLSVEKVAEIVTHLTGAVPHHSLSITGGEPLLHVPFIKELAAHIDLPIFLETNGTLDRALAECIDCISHISMDLKLPDVLSAPVWDAHARFLEIAHTKDVYVKVVVAAETRAEDVEHATHLVADIAPATLLILQPVTPYGGCTAPTPARLLELQRIALCHLSDVRIIPQTHRMMDLL

SEQ ID NO: 34033 - protein, 243 aa, Selenomonas noxia
  REGION 1..243: note = tr|D4S495|D4S495_9FIRM 7-carboxy-7-deazaguanine synthase OS=Selenomonas noxia ATCC 43541 OX=585503 GN=queE; PE = 3 SV=1
MCENIIEIFSSIQGEGKYVGCRQIFVRLEGCNLDCTYCDTENEIGRHPHCMVEEDAGSHALISYENPLSAQRTAEIIARIVGDVPHHSLSMTGGEPLLHVPFIRELAAHVHLPLFLETNGTLDQALAECIDCIDIISMDIKLPDVLSVPVWDAHARFLAVARAKDVYVKIVVAAETADDDIVTAARIVADTAPETLLILQPVTPYGGCTAPTPEHLLAFQRLALRHVSDVRIIPQTHRMMDLL

SEQ ID NO: 34034 - protein, 243 aa, Selenomonas noxia
  REGION 1..243: note = tr|G5H497|G5H497_9FIRM 7-carboxy-7-deazaguanine synthase OS=Selenomonas noxia F0398 OX=702437 GN=queE PE=3; SV = 1
MCENIIEIFSSIQGEGKYVGCRQVFVRLEGCNLDCTYCDTENEIGRHPHCMVEEDAGSHALISYENPLSAQRTAEIIARIVGDVPHHSLSMTGGEPLLHVPFIRELAARVSLPIFLETNGTLDKALAECIDCIDFISMDIKLPDVLSVPVWDAHARFLAVARAKDVYVKIVVAAETADDDIVTAARIVADTAPETLLILQPVTPYGGCTAPTPEHLLAFQRLALRHVSDVRIIPQTHRMMDLL

SEQ ID NO: 34035 - protein, 243 aa, Selenomonas ruminantium
  REGION 1..243: note = tr|A0A1K1QIR7|A0A1K1QIR7_SELRU 7-carboxy-7-deazaguanine synthase OS=Selenomonas ruminantium OX=971 GN=queE PE=3 SV=1
MKENLIEIFSSIQGEGKYVGCRQVFVRLEGCNLDCSYCDTENAPGSHPQCEVETYAGSREFAKLPNPRSAEQVAMEINRLCQEVPHQAVSFTGGEPLLHADFIREVAKEVEVPVFLETNGTLYKQLESIIDITDIISMDIKLPSIVSQPQWEAHRKFIEVAKEKDLYIKLVVADETTEEEFRKAIDLVAETAPETLFIIQPVTPYGGCKAASPEKILICQNYALTKLKDVRVIPQTHKMIGQI

SEQ ID NO: 34036 - protein, 243 aa, Selenomonas ruminantium
  REGION 1..243: note = tr|A0A1H0MV85|A0A1H0MV85_SELRU 7-carboxy-7-deazaguanine synthase OS=Selenomonas ruminantium OX=971 GN=queE PE=3 SV=1
MKENLIEIFSSIQGEGKYVGCRQVFVRLEGCNLDCSYCDTENAPGSHPQCEVETYAGSREFAKLPNPRSAEQVAMEINRLCKEVPHQAVSFTGGEPLLHADFIREVAKEVEVPIFMETNGTLYKQLESIIDITDIISMDIKLPSIVSQPQWEAHRKFIEIAKAKDLYIKLVVADETTEEEFRKAIDLVAETAPETLFIIQPVTPYGGCKAASPEKILMCQNYALTKLKDVRVIPQTHKMIGQI

SEQ ID NO: 34037 - protein, 243 aa, Selenomonas sp.
  REGION 1..243: note = tr|E4LGU7|E4LGU7_9FIRM 7-carboxy-7-deazaguanine synthase OS=Selenomonas sp. oral taxon 137 str. F0430; OX = 879310 GN=queE PE=3 SV=1
MRENIIEIFSSIQGEGKYVGCRQVFVRLEGCNLDCTYCDTEKEIGRHPTCVVEMPAGSHELHSYENPLSIETVAALAAQVAGGVPHHSLSVTGGEPLLHVPFIRALSARIPLPIFLETNGTLYEALAHCIDCVSYISMDIKLPGVLSHPVWDAHARFLKIARTKDVYVKVVVAAETEDDEVRTAARMVADTAPDVPLILQPVTPYGGCTAPTPARLLALQQIALAEVKDVRVIPQTHRMMDLL

SEQ ID NO: 34038 - protein, 243 aa, Selenomonas sp.
  REGION 1..243: note = tr|A0A0X8K971|A0A0X8K971_9FIRM 7-carboxy-7-deazaguanine synthase OS=Selenomonas sp. oral taxon 136 OX=713030 GN=queE PE=3 SV=1
MDENIIEIFSTVQGEGKYVGCRQVFMRLEGCNLHCSYCDTDSAVGMHPDCVVEEGAGTYHLVPYPNPISPQRAAELVEIAAAGIPHQALSITGGEPLLHAAFIRALAPHVHLPIYLETNGTLHEELKKCIDCVAGISMDIKLPSATTHPVWDAHVRFLEIAKAKDTWVKIVVAAESPDGEVDTAIRLVADIAPETMLILQPVTPYGGWTKPSPEQLLAWQGNALRRLAHVRVIPQTHRMMDML

SEQ ID NO: 34039 - protein, 241 aa, Selenomonas sputigena
  REGION 1..241: note = tr|C9LTU0|C9LTU0_SELS3 7-carboxy-7-deazaguanine synthase OS=Selenomonas sputigena (strain ATCC 35185 / DSM 20758 / VPI D19B-28) OX=546271 GN=queE PE=3 SV=1
MEENILEIFSSIQGEGKYIGARQVFLRFAGCNIKCSFCDTAFQPAASCRVEAIPGCGEYEELPNPLSVQEVAARIRAFVVPVRHHSISLTGGEPLLHATFIRALASEVNVPFFLETNGTLYEEMASILDITSYISMDIKLPSVTGKSLWEEHRRFLRLLHNHDTYVKIVVAENTEEEEFQEAVHLVAHIAPQILFVIQPATPFGSVHAPTAKKLLHLQEEAAEHLANVRVIPQAHRMMGLL

SEQ ID NO: 34040 - protein, 231 aa, unidentified
  source 1..231: note = Senegalimassilia anaerobia
  REGION 1..231: note = tr|A0A369LDV8|A0A369LDV8_9ACTN 7-carboxy-7-deazaguanine synthase OS=Senegalimassilia anaerobia OX=1473216 GN=queE PE=3 SV=1
MPVAERFVSINGEGACAGKLAAFIRFAGCNLRCGYCDTMWANVPGAAAKGETPEQLAAWVRQTGVECVTLTGGEPVLQPLLPQLVELLLGEPGPCERGLRVEIETNGAADLGELAALRARIGDATPGVLSFTVDWKLPSSGMEQRMLPANFRLLDTRDTVKFVCGQGDLPRALEVARQLDLPGRVPVYLSPCFGDIEPARIVEFMQENQMTWATAQVQLHKVIWPDVERGV

SEQ ID NO: 34041 - protein, 231 aa, unidentified
  source 1..231: note = Senegalimassilia sp.
  REGION 1..231: note = tr|A0A4Q2K0X5|A0A4Q2K0X5_9ACTN 7-carboxy-7-deazaguanine synthase OS=Senegalimassilia sp. KGMB04484 OX=2509433 GN=queE PE=3 SV=1
MPVVEKFISINGEGRCAGKLAAFIRFAGCNLRCSYCDTMWANEPGAAVQSETVAALVAWVRETGVECVTLTGGEPVLQPHLAQLVRVLCGEAGPTGHGLRVEVETNGAADLAELANLRQQLRGVAPGALTFTVDWKLPSSGMEARMLPTNFALLDARDAVKFVCAESDLPRVLEVARQLDLPGRVPVYLSPCFGRIEPARIVEFMQENGMIWATAQLQLHKIIWPNVERGV

SEQ ID NO: 34042 - protein, 209 aa, unidentified
  source 1..209: note = Seonamhaeicola algicola
  REGION 1..209: note = tr|A0A5C7ANI4|A0A5C7ANI4_9FLAO 7-carboxy-7-deazaguanine synthase OS=Seonamhaeicola algicola OX=1719036 GN=queE PE=3 SV=1
MNREIQTLVDKGEMLPLMEEFYTIQGEGYYKGTAAYFIRVGGCDVGCHWCDVKESWNANLHPPTETTKIVENAKKYSDTIVVTGGEPLTWDMTLLTTQLKAEGLKTHIETSGAYKLTGEWDWICLSPKKMKLPTKEVSKKANELKVIVYNKDDFRFAEEQAAKVSENCILYLQPEWSKRDKVVPLIVDYVMQNPKWKVSLQTHKYLNIP

SEQ ID NO: 34043 - protein, 209 aa, unidentified
  source 1..209: note = Seonamhaeicola aphaedonensis
  REGION 1..209: note = tr|A0A3D9HDP4|A0A3D9HDP4_9FLAO 7-carboxy-7-deazaguanine synthase OS=Seonamhaeicola aphaedonensis OX=1461338 GN=queE PE=3 SV=1
MNTEIQKLVDKGDMLPLMEEFYTIQGEGYHKGTAAYFIRIGGCDVGCHWCDVKESWNADLHPPTATSKIVDNAKKYSDTIVVTGGEPLMWDMTMLTTKLKAFGLKTHIETSGAYKLTGDWDWICLSPKKMKLPTNEVYEKAHELKVIVYNKDDLRFAEEQASKVNKNCILYLQPEWSKRDKVIPLIVDYVMQNPKWKVSLQTHKYLNIP

SEQ ID NO: 34044 - protein, 209 aa, unidentified
  source 1..209: note = Seonamhaeicola marinus
  REGION 1..209: note = tr|A0A5D0ILL1|A0A5D0ILL1_9FLAO 7-carboxy-7-deazaguanine synthase OS=Seonamhaeicola marinus OX=1912246 GN=queE PE=3 SV=1
MDEAIKIKVDKGEMLPLMEEFYTIQGEGYYKGTAAYFIRIGGCDVGCHWCDVKESWNADLHPPTETSKIVENAKKYSDTIVVTGGEPLTWDMTVLTTRLKEEGLKTHIETSGAYKLTGQWDWICLSPKKMKLPTDEVCEKADELKVIVYNKDDLRFAEEQAAKVSKDCILYLQPEWSKRDKVVPLIVDYVMQNPKWKVSLQTHKYLNIP

SEQ ID NO: 34045 - protein, 209 aa, unidentified
  source 1..209: note = Seonamhaeicola sp.
  REGION 1..209: note = tr|A0A562YDX8|A0A562YDX8_9FLAO 7-carboxy-7-deazaguanine synthase OS=Seonamhaeicola sp. W255 OX=2528206 GN=queE PE=3 SV=1
MIKEIQELVDKGEMLPLMEEFYTIQGEGYHKGTAAYFIRIGGCDVGCHWCDVKESWNANLHPPTATSKIVENAKRYSDTIVVTGGEPLTWDMTILTTKLKALGLKTHIETSGAYKLTGEWDWICLSPKKMKLPTDEVYEKAHELKVIVYNKDDLRFAEEQASRVNENCILYLQPEWSKRDKVIPLIVDYVMQYPKWKVSLQTHKYLNIP

SEQ ID NO: 34046 - protein, 209 aa, unidentified
  source 1..209: note = Seonamhaeicola sp.
  REGION 1..209: note = tr|A0A1U7DPL2|A0A1U7DPL2_9FLAO 7-carboxy-7-deazaguanine synthase OS=Seonamhaeicola sp. S2-3 OX=1936081 GN=queE PE=3 SV=1
MNEAIQKQVNKGEMLPLMEEFYTIQGEGFHKGTAAYFVRIGGCDVGCHWCDVKESWNANLHPPTETDKIVENAKKYSDTIVVTGGEPLTWDMTLLTTKLKAEGLQTHIETSGAYKLTGVWDWICLSPKKMKLPTNEIYAKADELKMIVYNKDDLRFAEEQAAKVNKDCILYLQPEWSKRDKVIPLIVDYVMQHPKWKVSLQTHKYLNIP

SEQ ID NO: 34047 - protein, 238 aa, unidentified
  source 1..238: note = Serpentinicella alkaliphila
  REGION 1..238: note = tr|A0A4R2TPQ7|A0A4R2TPQ7_9CLOT 7-carboxy-7-deazaguanine synthase OS=Serpentinicella alkaliphila OX=1734049 GN=queE PE=3 SV=1
MKLLLIAPLMKKVEVIKMSFNVVEKFVSINGEGRRCGQLAVFIRFAGCNLNCSYCDTAWANEEDVSYEIMSIEEIYKYIKSSGVNNITLTGGEPLLQEGIVNLLKTLSSDTELYIEIETNGSVLIDKFVSIKNCPSFTMDYKLPSSGMENKMALENFKYISKNDTIKFVSGSIEDLNRVKELIEEYDLVNKTNVYISSVFGKIALDEIVEFMKNNNMNGVTLQVQLHKIIWDPDKRSV

SEQ ID NO: 34048 - protein, 214 aa, unidentified
  source 1..214: note = Serpentinomonas mccroryi
  REGION 1..214: note = tr|A0A060NP88|A0A060NP88_9BURK 7-carboxy-7-deazaguanine synthase OS=Serpentinomonas mccroryi OX=1458426 GN=queE PE=3 SV=1
MSYSVKEIFYTLQGEGAQSGRAAVFCRFAGCNLWSGREADRASAQCRFCDTDFVGTDGAGGGRFASAQALAQAVRSHWRGGSGAGAGRPLVVCTGGEPLLQLDAALIEALHNEGFEIALETNGTLDLPAGLDWVCVSPKAGTELRVRRGDELKLVYPQPGAEPERFAALDFAHFFLQPLDGPQRAQHTQQAIDYCMAQPQWRLSLQTHKWLGIP

SEQ ID NO: 34049 - protein, 218 aa, unidentified
  source 1..218: note = Serpentinomonas raichei
  REGION 1..218: note = tr|A0A060NQY9|A0A060NQY9_9BURK 7-carboxy-7-deazaguanine synthase OS=Serpentinomonas raichei OX=1458425 GN=queE PE=3 SV=1
MNYSVKEIFYTLQGEGAQSGRAAVFCRFAGCNLWSGREADRASAQCRFCDTDFVGTDGSGGGKFASALALAQAVWACWGGGSGISSGLGAGRPLVVCTGGEPLLQLDAALIEALHAQGFEIAVETNGTLALPEGLDWVCVSPKADAELRVQRGDELKLVYPQAEAPPERFAGLDFAHFFLQPLDGPLRQAHTQQAIGYCMAHPQWRLSLQTHKWLGIP

SEQ ID NO: 34050 - protein, 223 aa, Serratia ficaria
  REGION 1..223: note = tr|A0A240AZR1|A0A240AZR1_SERFI 7-carboxy-7-deazaguanine synthase OS=Serratia ficaria; OX = 61651 GN=queE PE=3 SV=1
MQYPINEMFQTLQGEGFFTGVPAIFIRLQGCPVGCSWCDTKHTWEKEANREVDMQRILVKTAESDAWGSASAEQLLAVMRQQGYTARHVVITGGEPCIYDLTPLTELFEQQGYGCQIETSGTHEIRCSAKTWVTVSPKVNMRGGMKVLDQALQRADEVKHPVARERDIEALDALLATLQDDKARIIALQPISQKEEATRLCIETCIARNWRLSMQTHKYLNIA

SEQ ID NO: 34051 - protein, 223 aa, Serratia fonticola
  REGION 1..223: note = tr|A0A0F7HBV3|A0A0F7HBV3_SERFO 7-carboxy-7-deazaguanine synthase OS=Serratia fonticola; OX = 47917 GN=queE PE=3 SV=1
MQYPINEMFQTLQGEGYFTGVPAIFIRLQGCPVGCSWCDTKHTWEKDADREVDMQRILVKTAESDAWGSASAEQLLEVVEQQGYTARHIVITGGEPCIYDLIPLTKLFENAGYGCQIETSGTHEVLCSPNTWVTVSPKVNMRGGLKVVEQALMRADEIKHPVGRERDIEALDELLATLHDEKHRIIALQPISQKEEATRLCIETCIARNWRLSMQTHKYLNIA

SEQ ID NO: 34052 - protein, 55 aa, Serratia fonticola
  REGION 1..55: note = tr|A0A4U9WFZ1|A0A4U9WFZ1_SERFO 7-carboxy-7-deazaguanine synthase OS=Serratia fonticola; OX = 47917 GN=queE_2 PE=4 SV=1
MQRILVKTAESDAWGSASAEQLLEVVEQQGYTARHIVITGGEPCIYDLIPVDQAV

SEQ ID NO: 34053 - protein, 223 aa, Serratia liquefaciens
  REGION 1..223: note = tr|A0A515D068|A0A515D068_SERLI 7-carboxy-7-deazaguanine synthase OS=Serratia liquefaciens; OX = 614 GN=queE PE=3 SV=1
MQYPINEMFQTLQGEGFFTGVPAIFIRLQGCPVGCSWCDTKHTWEKEANREVDMQRILVKTEESDAWGSANAEQLLAVMRQQGYTARHVVITGGEPCIYDLTPLTQLLEDNGYGCQIETSGTHEIRCSAKTWVTVSPKVNMRGGMKVLDQALQRADEVKHPVGRERDIEALDALLATLHDEKPRIIALQPISQKEEATRLCIETCIARNWRLSMQTHKYLNIA

SEQ ID NO: 34054 - protein, 223 aa, Serratia liquefaciens; identical to SEQ ID NO: 30865
  REGION 1..223: note = tr|A0A484XYY4|A0A484XYY4_SERLI 7-carboxy-7-deazaguanine synthase OS=Serratia liquefaciens; OX = 614 GN=queE PE=3 SV=1

SEQ ID NO: 34055 - protein, 223 aa, Serratia marcescens
  REGION 1..223: note = tr|A0A3E2EE54|A0A3E2EE54_SERMA 7-carboxy-7-deazaguanine synthase OS=Serratia marcescens subsp. sakuensis OX=211760 GN=queE PE=3 SV=1
MQYPINEMFQTLQGEGFFTGVPAIFIRLQGCPVGCSWCDTKHTWEKEAHREVDLQRILVKTEESDAWGNASAEQLLAVMRQQGYTARHVVITGGEPCIYDLAPLTELFEQHGYRCQIETSGTHEIRCSANTWVTVSPKVNMRGGMKVLDQALRRADEVKHPVARERDIEALDALLATLQDDKARIIALQPISQKEEATRLCIETCIARNWRLSMQTHKYLNIA

SEQ ID NO: 34056 - protein, 223 aa, Serratia marcescens
  REGION 1..223: note = tr|A0A2V4GSG1|A0A2V4GSG1_SERMA 7-carboxy-7-deazaguanine synthase OS=Serratia marcescens; OX = 615 GN=queE PE=3 SV=1
MQYPINEMFQTLQGEGFFTGVPAIFIRLQGCPVGCSWCDTKHTWEKEANREVDLQRILVKTEESDAWGNAGAEQLLAVMRQQGYTARHVVITGGEPCIYDLTPLTELFEQHGYGCQIETSGTHEIRCSAKTWVTVSPKVNMRGGMKVLDQALRRADEVKHPVARERDIEALDALLATLQDDKARIIALQPISQKEEATRLCIETCIARNWRLSMQTHKYLNIA

SEQ ID NO: 34057 - protein, 223 aa, Serratia nematodiphila
  REGION 1..223: note = tr|A0A086G8B3|A0A086G8B3_9GAMM 7-carboxy-7-deazaguanine synthase OS=Serratia nematodiphila DZ0503SBS1 OX=1449981 GN=queE PE=3 SV=1
MQYPINEMFQTLQGEGFFTGVPAIFIRLQGCPVGCSWCDTKHTWEKEAHREVDLQRILVKTEESDAWGNASAEQLLAVMRQQGYTARHVVITGGEPCIYDLVPLTELFEQHGYRCQIETSGTHEIRCSANTWVTVSPKVNMRGGMKVLDQALRRADEVKHPVARERDIEALDALLATLQDDKARIIALQPISQKEEATRLCIETCIARNWRLSMQTHKYLNIA

SEQ ID NO: 34058 - protein, 223 aa, Serratia nematodiphila
  REGION 1..223: note = tr|A0A5C7D1F5|A0A5C7D1F5_9GAMM 7-carboxy-7-deazaguanine synthase OS=Serratia nematodiphila OX=458197 GN=queE PE=3 SV=1
MQYPINEMFQTLQGEGFFTGVPAIFIRLQGCPVGCSWCDTKHTWEKEAHREVDLQRILVKTEESDAWGNASAEQLLAVMRQQGYTARHVVITGGEPCIYDLAPLTELFEQHGYRCQIETSGTHEIRCSANTWVTVSPKVNMRGGMKVLDQALRRADEVKHPVARERDIEALDALLATLRDDKARIIALQPISQKEEATRLCIETCIARNWRLSMQTHKYLNIA

SEQ ID NO: 34059 - protein, 223 aa, Serratia odorifera
  REGION 1..223: note = tr|D4DX10|D4DX10_SEROD 7-carboxy-7-deazaguanine synthase OS=Serratia odorifera DSM 4582 OX=667129 GN=nrdG; PE = 3 SV=1
MQYPINEMFQTLQGEGYFTGVPAIFIRLQGCPVGCSWCDTKHTWEKEANREVDMQRILVKTEESDAWGSATAEQLLEVVQRQGYTARHIVITGGEPCIYDLIPLTKLFELNGYACQIETSGTHEILCTPSTWVTVSPKVNMRGGMKVLEQALMRADEIKHPVGRQRDIEALDALLDTLNDEKRRIIALQPISQKDEATRLCIETCIARNWRLSMQTHKYLNIA

SEQ ID NO: 34060 - protein, 223 aa, Serratia odorifera; identical to SEQ ID NO: 34059
  REGION 1..223: note = tr|A0A3S5D6U1|A0A3S5D6U1_SEROD 7-carboxy-7-deazaguanine synthase OS=Serratia odorifera; OX = 618 GN=queE PE=3 SV=1

SEQ ID NO: 34061 - protein, 223 aa, unidentified
  source 1..223: note = Serratia oryzae
  REGION 1..223: note = tr|A0A1S8CJP6|A0A1S8CJP6_9GAMM 7-carboxy-7-deazaguanine synthase OS=Serratia oryzae; OX = 2034155 GN=queE PE=3 SV=1
MQYPINEMFQTLQGEGYFTGVPAIFIRLQGCPVGCSWCDTKHTWEKDTDREVDMQRILVKTAESDAWGSASAEQLLEVIQQQGYTARHIVITGGEPCIYDLIPLTTLFENSGYGCQIETSGTHEILCSPTTWVTVSPKVKMRGGLTVLPQALMRADEIKHPVGRERDIDALDELLATLQDEKRRIIALQPISQKEEATRLCIATCIARNWRLSMQTHKYLNIA

SEQ ID NO: 34062 - protein, 146 aa, Serratia plymuthica
  REGION 1..146: note = tr|A0A3S4GWV2|A0A3S4GWV2_SERPL 7-carboxy-7-deazaguanine synthase OS=Serratia plymuthica; OX = 82996 GN=queE_2 PE=4 SV=1
MIRQQGYTARHVVITGGEPCIYDLTLLTQLLEDNGYGCQIETSGTHEVRCSAKTWVTVSPKVNMRGGMKVLDQALQRADEVKHPVGRERDIEALDALLATLHDEKPRIIALQPISQKEEATRLCIETCIARNWRLSMQTHKYLNIA

SEQ ID NO: 34063 - protein, 223 aa, Serratia plymuthica
  REGION 1..223: note = tr|A0A318P4X3|A0A318P4X3_SERPL 7-carboxy-7-deazaguanine synthase OS=Serratia plymuthica; OX = 82996 GN=queE PE=3 SV=1
MQYPINEMFQTLQGEGFFTGVPAIFIRLQGCPVGCSWCDTKHTWEKEANREVDMQRILVKTEESDAWGSASAEQLLAVMRQQGYTARHVVITGGEPCIYDLTPLTQLLEENGYGCQIETSGTHEIQCSATTWVTVSPKVNMRGGMKVLDQALQRADEVKHPVGRERDIEALDALLATLHDEKPRIIALQPISQKEEATRLCIETCIARNWRLSMQTHKYLNIA

SEQ ID NO: 34064 - protein, 223 aa, Serratia proteamaculans
  REGION 1..223: note = tr|A0A4V1WJU1|A0A4V1WJU1_9GAMM 7-carboxy-7-deazaguanine synthase OS=Serratia proteamaculans OX=28151 GN=queE PE=3 SV=1
MQYPINEMFQTLQGEGFFTGVPAIFIRLQGCPVGCSWCDTKHTWEKEANREVDMQRILVKTEESDAWGSASAEQLLAVIRQQGYTARHVVITGGEPCIYDLTPLTELLEEHGYGCQIETSGTHEIQCSAKTWVTVSPKVNMRGGMKVLSQALQRADEVKHPVGRERDIEALDALLATLHDEKPRIIALQPISQKDEATRLCIETCIARNWRLSMQTHKYLNIA

SEQ ID NO: 34065 - protein, 223 aa, Serratia proteamaculans
  REGION 1..223: note = tr|A8G9X4|A8G9X4_SERP5 7-carboxy-7-deazaguanine synthase OS=Serratia proteamaculans (strain 568) OX=399741; GN = queE PE=3 SV=1
MQYPINEMFQTLQGEGFFTGVPAIFIRLQGCPVGCSWCDTKHTWEKEANREVDMQRILVKTEESDAWGSASAEQLLAVIRQQGYTARHVVITGGEPCIYDLTPLTELLEEHGYGCQIETSGTHEIQCSAKTWVTVSPKVNMRGGMKVLSQALQRADEVKHPVGRERDIEALDALLATLHDEKPRIIALQPISQKEEATRLCIETCIARNWRLSMQTHKYLNIA

SEQ ID NO: 34066 - protein, 223 aa, Serratia quinivorans; identical to SEQ ID NO: 34065
  REGION 1..223: note = tr|A0A2X2J9Y2|A0A2X2J9Y2_9GAMM 7-carboxy-7-deazaguanine synthase OS=Serratia quinivorans; OX = 137545 GN=queE PE=3 SV=1

SEQ ID NO: 34067 - protein, 223 aa, Serratia quinivorans
  REGION 1..223: note = tr|A0A4Q8DCN6|A0A4Q8DCN6_9GAMM 7-carboxy-7-deazaguanine synthase OS=Serratia quinivorans; OX = 137545 GN=queE PE=3 SV=1
MQYPINEMFQTLQGEGFFTGVPAIFIRLQGCPVGCSWCDTKHTWEKEANREVDMQRILVKTEESDAWGSASAEQLLAVIRQQGYTARHVVITGGEPCIYDLTPLTELLEDNGYGCQIETSGTHEIQCSAKTWVTVSPKVNMRGGMKVLSQALQRADEVKHPVGRERDIEALDALLATLHDEKPRIIALQPISQKEEATRLCIETCIARNWRLSMQTHKYLNIA

SEQ ID NO: 34068 - protein, 168 aa, Serratia rubidaea
  REGION 1..168: note = tr|A0A4U9HEB6|A0A4U9HEB6_SERRU 7-carboxy-7-deazaguanine synthase OS=Serratia rubidaea; OX = 61652 GN=queE_1 PE=3 SV=1
MQYPINEMFQTLQGEGYFTGVPAIFIRLQGCPVGCSWCDTKHTWEKDAHREVDMQRILVKTSESDAWGSASAEQLLAVIGQQGYSARHIVITGGEPCIYDLLPLTRLFEAHGYGCQIETSGTHEVRCTENTWVTVSPKVNMRGGMKVLDQALTRADEIKTPGRASAGY

SEQ ID NO: 34069 - protein, 39 aa, Serratia rubidaea
  REGION 1..39: note = tr|A0A447QPG4|A0A447QPG4_SERRU 7-carboxy-7-deazaguanine synthase OS=Serratia rubidaea; OX = 61652 GN=queE_2 PE=4 SV=1
MIALQPISQKDEATKLCIATCIERNWRLSMQTHKYLNIA

SEQ ID NO: 34070 - protein, 223 aa, Serratia sp.
  REGION 1..223: note = tr|I0QYP4|I0QYP4_9GAMM 7-carboxy-7-deazaguanine synthase OS=Serratia sp. M24T3 OX=932213 GN=queE PE=3 SV=1
MQYPINEMFETLQGEGFFTGVPAIFIRLQGCPVGCSWCDTKHTWEKFADREVDMQRILVKTEETDAWGNATAEQLHQVIQKQGWTAKHVVITGGEPCIYDLQPLTKLLEEQGYSCQIETSGTHEVRCSEKTWVTVSPKVNMRGGYDILPQALQRADEIKHPVARQRDVDALEQLLATLNDQKARIIALQPISQKDEATKLCIATCIAKNWRLSMQTHKYLNIA

SEQ ID NO: 34071 - protein, 223 aa, Serratia sp.
  REGION 1..223: note = tr|A0A4R6EK29|A0A4R6EK29_9GAMM 7-carboxy-7-deazaguanine synthase OS=Serratia sp. BIGb0156; OX = 2485132 GN=queE PE=3 SV=1
MQYPINEMFQTLQGEGYFTGVPAIFIRLQGCPVGCAWCDTKHTWDMLEDREVSLFSILAKTKESDKWGAGTPEDLLTAITRQGWTARHVVITGGEPCIHDLTALTSLLEHNGYSCQIETSGTHEVRCSHATWVTVSPKVNMRGGYEVLSQALHRADEIKHPVGRVRDIEALDELLETLSDDKQRVIALQPISQKDDATRLCIETCIARNWRLSMQTHKYLNIV

SEQ ID NO: 34072 - protein, 223 aa, Serratia symbiotica
  REGION 1..223: note = tr|A0A068ZAE3|A0A068ZAE3_9GAMM 7-carboxy-7-deazaguanine synthase OS=Serratia symbiotica; OX = 138074 GN=ygcF PE=3 SV=1
MQYPINEIFQTLQGEGFFTGVPAIFIRLQGCPVGCSWCDTKHTWDKEANREVDMQRILVKTEESAAWGSANAEQLLAVMRQQGYTARHVVITGGEPCIFDLVPLTALLEQQGYGCQIETSGTYEIRCSAKTWVTVSPKVNMRGGMKVLDQALQRADEVKHPVARERDIEALDALLATLHDKKPRIIALQPISKKEEATRLCITTCIARNWRLSMQTHKYLNIA

SEQ ID NO: 34073 - protein, 223 aa, Serratia symbiotica
  REGION 1..223: note = tr|A0A455VFK2|A0A455VFK2_9GAMM 7-carboxy-7-deazaguanine synthase OS=Serratia symbiotica; OX = 138074 GN=queE PE=3 SV=1
MQYPINEIFQTLQGEGFFTGVPAIFIRLQGCPVGCSWCDTKHTWDKEVNREVDMQRILVKTEESATWGSASAEQLLAVMRQQGYTARHVVITGGEPCIYDLVPLTALLEQQGYGCQIETSGTYEIRCSVKTWVTVSPKVNMRGGMKVLDQALQRADEVKHPVARERDIEALDALLATLHDKKPRIIALQPISKKEDATRLCITTCIARNWRLSMQTHKYLNIA

SEQ ID NO: 34074 - protein, 223 aa, Serratia ureilytica
  REGION 1..223: note = tr|A0A5C7C741|A0A5C7C741_9GAMM 7-carboxy-7-deazaguanine synthase OS=Serratia ureilytica; OX = 300181 GN=queE PE=3 SV=1
MQYPINEMFQTLQGEGFFTGVPAIFIRLQGCPVGCSWCDTKHTWEKEAHREVDLQRILVKTEESDAWGNAGAEQLLAVMRQQGYTARHVVITGGEPCIYDLAPLTELFEQHGYRCQIETSGTHEIRCSANTWVTVSPKVNMRGGMKVLDQALRRADEVKHPVARERDIEALDALLATLQDDKARIIALQPISQKEEATRLCIETCIARNWRLSMQTHKYLNIA

SEQ ID NO: 34075 - protein, 222 aa, Shewanella algae
  REGION 1..222: note = tr|A0A1S2AYT9|A0A1S2AYT9_9GAMM 7-carboxy-7-deazaguanine synthase OS=Shewanella algae; OX = 38313 GN=queE PE=3 SV=1
MYYPVNEVFETLQGEGVFTGVPAIFVRLQGCPVGCPWCDTRQTWDKLEHNQVKPADVIRTDGSIGRWAEHDAKSLLEAFKQQGFNAKHIVITGGEPCLYPLTEMTEAFNAAGFRTQIETSGTFEVNCSADTWVTVSPKVGMKGGMPVLRQALERANEIKHPVATEAHIEELDQLLRGLDLKDKAICLQPISQKSRATALAMKVCIERNWRLSIQTHKYLDID

SEQ ID NO: 34076 - protein, 222 aa, Shewanella algae
  REGION 1..222: note = tr|A0A3G4UNM6|A0A3G4UNM6_9GAMM 7-carboxy-7-deazaguanine synthase OS=Shewanella algae; OX = 38313 GN=queE PE=3 SV=1
MYYPVNEVFETLQGEGVFTGVPAIFVRLQGCPVGCPWCDTRQTWDKLEHNQVKPADVIRTDGSIGRWALHDAKSLLEAFKQQGFNARHIVITGGEPCLYPLTEMTEAFNAAGFRAQIETSGTFEVNCSADTWVTVSPKVGMKGGMPVLRQALERANEIKHPVATEAHIEELDQLLQGLDLKDKTICLQPISQKSRATALAMKVCIERNWRLSIQTHKYLDID

SEQ ID NO: 34077 - protein, 233 aa, Shewanella amazonensis
  REGION 1..233: note = tr|A1S6M4|A1S6M4_SHEAM 7-carboxy-7-deazaguanine synthase OS=Shewanella amazonensis (strain ATCC BAA-1098 / SB2B) OX=326297 GN=queE PE=3 SV=1
MATTPTERVLMTEYPINEVFETIQGEGSHTGLPAIFVRLQGCPVACPWCDTAQTWDVLEQSKVAPADVIQVDGSIGRWAMHSASSLVAAFNQKGFTAKLVVITGGEPCMHDLTDLTQGFEAEGFHCQIETSGTFEVHCSDRTYVTVSPKINMKGGYPVLKQALVRANEIKHPVATDAHIDELDALLEGIDTSGKTICLQPISQKPRATELAMKTCIARNWRLSIQTHKYLNID

SEQ ID NO: 34078 - protein, 222 aa, Shewanella atlantica
  REGION 1..222: note = tr|A0A431WEF1|A0A431WEF1_9GAMM 7-carboxy-7-deazaguanine synthase OS=Shewanella atlantica; OX = 271099 GN=queE PE=3 SV=1
MKYPVNEVFETIQGEGFFTGVPALFVRLQGCPVGCSWCDTKHTWDVIEENRVAPELVIQVDGTIGRWAELTAEELISNFKAKGFTAKHVVITGGEPCLHDLIPLTESLNRAGYATQIETSGTFEVICSDETWVTVSPKINMKAGLPILKQALIRANEIKHPVATQAHIDDLDCLLKGITLDEKIICLQPISQKSRATELAMRVCIERNWRLSIQTHKYLEID

SEQ ID NO: 34079 - protein, 222 aa, Shewanella baltica
  REGION 1..222: note = tr|A0A379ZCW3|A0A379ZCW3_9GAMM 7-carboxy-7-deazaguanine synthase OS=Shewanella baltica; OX = 62322 GN=queE PE=3 SV=1
MNYPVNEVFETIQGEGVFTGVPAIFVRLQGCPVGCAWCDTKQTWDVLEVNKVTPEQVITVDGTIGRWAEHTAQSLIAAFHAKGFTARHIVITGGEPCMYDLRELTETLHNQGFATQIETSGTFDINCADDTWVTVSPKVNMKGGYKVLTQALNRANEIKHPIATENHIAELDELLQDIDISAKTICLQPISQKPRATELAMKVCIARNWRLSIQTHKYLNID

SEQ ID NO: 34080 - protein, 222 aa, Shewanella baltica
  REGION 1..222: note = tr|A3D4T7|A3D4T7_SHEB5 7-carboxy-7-deazaguanine synthase OS=Shewanella baltica (strain OS155 / ATCC BAA-1091) OX=325240 GN=queE PE=3 SV=1
MNYPVNEVFETIQGEGVFTGVPAIFVRLQGCPVGCAWCDTKQTWDVLEVNKVMPEQVISVDGTIGRWADHTAQSLIAAFHAKGFTARHIVITGGEPCMYDLCELTETLHSQGFATQIETSGTFDINCADDTWVTVSPKVNMKGGYKVLTQALNRANEIKHPIATENHIAELDELLQDIDISAKTICLQPISQKPRATELAMKVCIARNWRLSIQTHKYLNID

SEQ ID NO: 34081 - protein, 222 aa, Shewanella benthica
  REGION 1..222: note = tr|A9DGZ0|A9DGZ0_9GAMM 7-carboxy-7-deazaguanine synthase OS=Shewanella benthica KT99 OX=314608 GN=queE; PE = 3 SV=1
MKYPVNEVFETIQGEGVFTGVAAIFVRLQGCPVGCSWCDTKHTWDVLEKNRVAPELVIQVDGVIGRWSELTAEELINFFIRKGFNAKHVVITGGEPCIHDLTELTSQLNRQGYGTQIETSGTFEVTCSDKTWVTVSPKVNMKAGMTVLTQALERADEIKHPVARSKHIDDLDELLEGIEVEGKIICLQPISQKPRATELAMKICIERNWRLSIQTHKYLNID

SEQ ID NO: 34082 - protein, 222 aa, Shewanella benthica
  REGION 1..222: note = tr|A0A330M3C8|A0A330M3C8_9GAMM 7-carboxy-7-deazaguanine synthase OS=Shewanella benthica; OX = 43661 GN=ygcF PE=3 SV=1
MKYPVNEVFETIQGEGVFTGVAAIFVRLQGCPVGCSWCDTKHTWDVLQKNRVAPELVIQVDGEIGRWSELTAEELINFFIRKGFNAKHVVITGGEPCIHDLTALTSQLNRQGYGTQIETSGTFEVICSDKTWVTVSPKVNMKAGMTVLTQALERADEIKHPVARSKHIEDLDELLEGIELEGKIICLQPISQKPRATELAMKICIERNWRLSIQTHKYLNID

SEQ ID NO: 34083 - protein, 222 aa, unidentified
  source 1..222: note = Shewanella bicestrii
  REGION 1..222: note = tr|A0A220UM37|A0A220UM37_9GAMM 7-carboxy-7-deazaguanine synthase OS=Shewanella bicestrii; OX = 2018305 GN=queE PE=3 SV=1
MNYPVNEVFETIQGEGVFTGVPAIFVRLQGCPVGCAWCDTKQTWDLLEENKVSPEQVITVDGSVGRWANHTAQSLIEAFNAKGYTARHVVITGGEPCMYDLNELTHALHAAGFATQIETSGTFEVKCDADTWVTVSPKINMKGGYKVLAQALIRANEIKHPIATENHIDELDELLKGIDVSSKTICLQPISQKPRATELAMKVCIARNWRLSIQTHKYLNID

SEQ ID NO: 34084 - protein, 222 aa, Shewanella canadensis
  REGION 1..222: note = tr|A0A3S0IL13|A0A3S0IL13_9GAMM 7-carboxy-7-deazaguanine synthase OS=Shewanella canadensis; OX = 271096 GN=queE PE=3 SV=1
MKYPVNEVFETIQGEGFFTGVPAIFVRLQGCPVGCSWCDTKHTWDVIEDNRVAPELVIQVDGTIGRWAELTAEELISNFKIKGFTAKHVVITGGEPCLHDLIPLTESLHLSGYATQIETSGTFEVICSDKTWVTVSPKINMKAGLPILEQALIRANEIKHPVATQAHIDDLDCLLKGIPLAEKTICLQPISQKSRATELAMRVCIERNWRLSIQTHKYLDID

SEQ ID NO: 34085 - protein, 222 aa, Shewanella chilikensis
  REGION 1..222: note = tr|A0A2V4W956|A0A2V4W956_9GAMM 7-carboxy-7-deazaguanine synthase OS=Shewanella chilikensis OX=558541 GN=queE PE=3 SV=1
MYYPVNEVFETLQGEGVFTGVPAIFVRLQGCPVGCPWCDTRQTWDKLEHNQVKPADVICTDGCIGRWAEHDAKSLLEAFKQQGFNARHIVITGGEPCLYSLTEMTEAFNAAGFRTQIETSGTFEVNCSADTWVTVSPKVGMKGGMPVLRQALERANEIKHPVATEAHIEELDQLLQGLDLKDKTICLQPISQKSRATALAMKVCIERNWRLSIQTHKYLDID

SEQ ID NO: 34086 - protein, 222 aa, Shewanella colwelliana
  REGION 1..222: note = tr|A0A1E5IYY9|A0A1E5IYY9_SHECO 7-carboxy-7-deazaguanine synthase OS=Shewanella colwelliana OX=23 GN=queE PE=3 SV=1
MKYPVNEVFETIQGEGVFTGVPAIFVRLQGCPVGCAWCDTKHTWETLAENRVDPALVIQVDGEVGRWSELGAGELIDALKQKGFTAKHIVITGGEPCMYDLQTLTQTLSEAGFQCQIETSGTFEVKCDDRTWVTVSPKVNMKGGFEVLSQALERANEIKHPVAKASHVAELDALLEGIVLDSKTICLQPISQKPRATELAMKVCIERNWRLSIQTHKYLNID

SEQ ID NO: 34087 - protein, 222 aa, Shewanella decolorationis
  REGION 1..222: note = tr|V1DF73|V1DF73_9GAMM 7-carboxy-7-deazaguanine synthase OS=Shewanella decolorationis S12 OX=1353536; GN = queE PE=3 SV=1
MNYPVNEVFETIQGEGVFTGVPAIFVRLQGCPVGCAWCDTKQTWDLLEENKVSPEQVITVDGSVGRWANHTAQSLIEAFNAKGYTARHVVITGGEPCMYDLHELTHTLHAAGFATQIETSGTFEVKCDADTWVTVSPKINMKGGYKVLAQALSRANEIKHPIATENHIDELDELLKGIDVSAKTICLQPISQKPRATELAMKVCIARNWRLSIQTHKYLNID

SEQ ID NO: 34088 - protein, 222 aa, Shewanella decolorationis; identical to SEQ ID NO: 34087
  REGION 1..222: note = tr|A0A5B8QY19|A0A5B8QY19_9GAMM 7-carboxy-7-deazaguanine synthase OS=Shewanella decolorationis OX=256839 GN=queE PE=3 SV=1

SEQ ID NO: 34089 - protein, 222 aa, Shewanella denitrificans
  REGION 1..222: note = tr|Q12MM9|Q12MM9_SHEDO 7-carboxy-7-deazaguanine synthase OS=Shewanella denitrificans (strain OS217 / ATCC BAA-1090 / DSM 15013) OX=318161 GN=queE PE=3 SV=1
MNYPVNEVFETIQGEGCFTGVPALFVRLQGCPVGCAWCDTKQTWDVLADNKVTPEQVITVDGTIGRWANHDGASLITAFKAKGFTAKHIVLTGGEPCLYDLTDITHDFIAAGYSVQIETSGTFEVKCHQDVWVTVSPKINMKGGYKVLEQALIRANEIKHPIATQNHIDELDELLADIDLSGKTICLQPISQKVRATELAMKTCIARNWRLSIQTHKYLNID

SEQ ID NO: 34090 - protein, 222 aa, Shewanella fodinae
  REGION 1..222: note = tr|A0A4R2F8P3|A0A4R2F8P3_9GAMM 7-carboxy-7-deazaguanine synthase OS=Shewanella fodinae; OX = 552357 GN=queE PE=3 SV=1
MQYPVNEVFETIQGEGVNTGLPAIFVRLQGCPVGCPWCDTRQTWEQKPENEVAPKQVIQTDGSIGRWAWFDARSLLQSFSDGAFSAKHVVLTGGEPCLFDLVELTNVLNHAGYTTQIETSGTFEVKCSDSTWVTVSPKIGMKGGLAVKSQALKRANEIKHPVATSTHIEQLDALLEGVDLTGKVVCLQPISQKSHATALAIKVCIARNWRLSVQTHKYLQID

SEQ ID NO: 34091 - protein, 222 aa, Shewanella frigidimarina
  REGION 1..222: note = tr|A0A106BZ35|A0A106BZ35_SHEFR 7-carboxy-7-deazaguanine synthase OS=Shewanella frigidimarina OX=56812 GN=queE PE=3 SV=1
MKYPVNEVFETIQGEGTYTGVPALFVRLQGCPVGCAWCDTKQTWDVLPENKVTAEQVIQVDGTIGRWADHTGYSLLQAFHDKGFTAKHIVLTGGEPCLYDLTELTTIFIEAGYQVQIETSGTFDVKCHLDVWVTVSPKINMKGGYKVLEQALNRANEIKHPIATEHHIDELDKLLMNIDVSDKTICLQPISQKARATELAMKVCISRNWRLSIQTHKYLNID

SEQ ID NO: 34092 - protein, 222 aa, Shewanella frigidimarina
  REGION 1..222: note = tr|Q082U1|Q082U1_SHEFN 7-carboxy-7-deazaguanine synthase OS=Shewanella frigidimarina (strain NCIMB 400); OX = 318167 GN=queE PE=3 SV=1
MKYPVNEVFETIQGEGTYTGVPALFVRLQGCPVGCAWCDTKQTWDVLPENKVTAEQVIQVDGTIGRWADHTGYTLLQAFHDKGFTAKHIVLTGGEPCLYNLTELTTIFIEAGYQVQIETSGTFDVKCHSDVWVTVSPKINMKGGYKVLEQALNRANEIKHPIATEHHIDELDKLLLNIDVSDKTICLQPISQKARATELAMKVCISRNWRLSIQTHKYLNID

SEQ ID NO: 34093 - protein, 222 aa, Shewanella halifaxensis
  REGION 1..222: note = tr|B0TSC1|B0TSC1_SHEHH 7-carboxy-7-deazaguanine synthase OS=Shewanella halifaxensis (strain HAW-EB4); OX = 458817 GN=queE PE=3 SV=1
MKYPVNEVFETIQGEGTFTGVPAVFVRLQGCPVGCSWCDTKQTWELLEANHVAKELVIQVDGTIGRWSELSAEELVNAFKDKGFNAKHIVITGGEPCLYDLTELTQYLHSQGYQTQIETSGTFDVLCHADTWVTVSPKVNMKGGYKVLAQALNRANEIKHPIATQNHIDELDELLEGIDLTDKTVCLQPISQKARATELAMSTCIARNWRLSIQTHKYLDID

SEQ ID NO: 34094 - protein, 222 aa, Shewanella hanedai
  REGION 1..222: note = tr|A0A553JIJ3|A0A553JIJ3_SHEHA 7-carboxy-7-deazaguanine synthase OS=Shewanella hanedai; OX = 25 GN=queE PE=3 SV=1
MKYPVNEVFETIQGEGFYTGVPAIFVRLQGCPVGCSWCDTKHTWDLLETNRVKPEMVIQVDGTIGRWSELSTSELIHFMKQKGFTASHIVITGGEPCLHDLTAMTDELNNAGYSTQIETSGTFNVLCSDKTWVTVSPKLKMKAGLAVLPQALNRANEIKHPVATQTHIDDLDELLFDIDLTGKTICLQPISQKDRATELAMRVCIERNWRLSIQTHKYLNID

SEQ ID NO: 34095 - protein, 222 aa, Shewanella livingstonensis
  REGION 1..222: note = tr|A0A3G8LV07|A0A3G8LV07_9GAMM 7-carboxy-7-deazaguanine synthase OS=Shewanella livingstonensis OX=150120 GN=queE PE=3 SV=1
MKYPVNEVFETIQGEGSYTGVPALFVRLQGCPVGCAWCDTKQTWDVLPENKVTAEQVIQVDGTIGRWADHNGQTLLQAFAGKGFTAKHIVLTGGEPCLYDLTELTTDFIKAGYQVQIETSGTFEVKCHPDVWVTVSPKINMKGGYKVLEQALNRANEIKHPIATEHHIDELDKLLLNIDISDKTICLQPISQKARATELAMKVCISRNWRLSIQTHKYLNID

SEQ ID NO: 34096 - protein, 222 aa, Shewanella loihica
  REGION 1..222: note = tr|A3QEM9|A3QEM9_SHELP 7-carboxy-7-deazaguanine synthase OS=Shewanella loihica (strain ATCC BAA-1088 / PV-4) OX=323850 GN=queE PE=3 SV=1
MKYPVNEVFETIQGEGVYTGVPAIFVRLQGCPVGCSWCDTKHTWETLAENRVSSEQVIQVDGAIGRWAELDARELLMHFKVQGFSAKHVVITGGEPCIYDLIALTQAFADAGMQCQIETSGTFDVLVDPRAWVTVSPKINMKGGYKVLEQALERADEIKHPVAKASHIEELDELLKGIDTLGKTICLQPISQKPRATELAMKVCIERNWRLSIQTHKYLNID

SEQ ID NO: 34097 - protein, 222 aa, unidentified
  source 1..222: note = Shewanella mangrovi
  REGION 1..222: note = tr|A0A094JVR0|A0A094JVR0_9GAMM 7-carboxy-7-deazaguanine synthase OS=Shewanella mangrovi; OX = 1515746 GN=queE PE=3 SV=1
MQYSVNEIFQTIQGEGLWTGVPALFVRLQGCPVGCSWCDTKQTWELLPENQVANGVIFQTDGSIGRWSELTAEAIIAGFVAQHFTAKHVVITGGEPCMYDLRPLTYALHAAGYTTQIETSGTFDVQCAEQTWVTVSPKVAMQGKLPVLTSALARANEIKHPVATEHHIAQLDELLTQIDIQGKTICLQPISQKPRATELAMRVCIERNWRLSVQTHKYLQID

SEQ ID NO: 34098 - protein, 222 aa, Shewanella marisflavi
  REGION 1..222: note = tr|A0A4Y6J0F3|A0A4Y6J0F3_9GAMM 7-carboxy-7-deazaguanine synthase OS=Shewanella marisflavi; OX = 260364 GN=queE PE=3 SV=1
MKYPVNEVFETIQGEGVYTGVPAIFVRLQGCPVGCSWCDTKHTWETLAENRVSSEQVIQVDGTIGRWAELDARELLMHFKVQGFSAKHVVITGGEPCIYDLTALTQSLADAGLQCQIETSGTFDVLVDPRAWVTVSPKVNMKGGFKVLEQALERADEIKHPVAKASHIEELDELLKGVDTLGKTICLQPISQKPRATELAMKVCIERNWRLSIQTHKYLNID

SEQ ID NO: 34099 - protein, 222 aa, Shewanella morhuae
  REGION 1..222: note = tr|A0A1N6Z670|A0A1N6Z670_9GAMM 7-carboxy-7-deazaguanine synthase OS=Shewanella morhuae; OX = 365591 GN=queE PE=3 SV=1
MNYPVNEVFETIQGEGVFTGVPAIFVRLQGCPVGCAWCDTKQTWDVLEANKVEPAQVITVDGTIGRWAEHTAQSLIVAFNAKGFTARHVVITGGEPCMYDLRDLTQTLHSQGFATQIETSGTFEVLCADDSWVTVSPKVNMKGGYQVLAQALNRANEIKHPIATENHIAELDNLLQDIDISAKTICLQPISQKPRATELAMKVCIARNWRLSIQTHKYLNID

SEQ ID NO: 34100 - protein, 222 aa, Shewanella oneidensis
  REGION 1..222: note = tr|A0A2W5D506|A0A2W5D506_SHEOE 7-carboxy-7-deazaguanine synthase OS=Shewanella oneidensis; OX = 70863 GN=queE PE=3 SV=1
MNYPVNEVFETIQGEGVFTGVPAIFVRLQGCPVGCAWCDTKQTWDLLEENKVSPEQVITVDGSVGRWANHTAQSLIEAFNAKGYTARHVVITGGEPCMYDLNELTLTLHAAGFATQIETSGTFEVKCDADTWVTVSPKINMKGGYKVLAQALTRANEIKHPIATEHHIDELDELLKGIDVSAKTICLQPISQKPRATELAMKVCIARNWRLSIQTHKYLNID

SEQ ID NO: 34101 - protein, 222 aa, Shewanella oneidensis
  REGION 1..222: note = tr|Q8EE87|Q8EE87_SHEON 7-carboxy-7-deazaguanine synthase OS=Shewanella oneidensis (strain MR-1) OX=211586; GN = queE PE=3 SV=1
MNYPVNEVFETIQGEGVFTGVPAIFVRLQGCPVGCAWCDTKQTWDLLETNKVSPEQVITVDGTVGRWANHTAQSLIEAFHAKGYTARHVVITGGEPCMYDLHELTHMLHRAGFATQIETSGTFEVKCDKDTWVTVSPKVNMKGGYPVLAQALNRANEIKHPIATQNHIDELDELLSDIDVSAKTICLQPISQKPRATELAMKVCIARNWRLSIQTHKYLNID

SEQ ID NO: 34102 - protein, 222 aa, Shewanella pealeana
  REGION 1..222: note = tr|A8H531|A8H531_SHEPA 7-carboxy-7-deazaguanine synthase OS=Shewanella pealeana (strain ATCC 700345 / ANG-SQ1) OX=398579 GN=queE PE=3 SV=1
MKYPVNEVFETIQGEGTHTGVPAIFVRLQGCPVGCSWCDTKQTWELLEDNRVAPDLVIQVDGTVGRWSELTVEQLVSAFEDKGFTAKLVVITGGEPCLYDLSELTQYLHAQGYQTQIETSGTFDVLCHPDTWVTVSPKVNMKGGYAVLAQALNRANEIKHPVATQKHIDELDLLLEDINLTGKTVCLQPISQIPRATELAMKTCIERNWRLSVQTHKYLNID

SEQ ID NO: 34103 - protein, 222 aa, Shewanella piezotolerans
  REGION 1..222: note = tr|B8CM63|B8CM63_SHEPW 7-carboxy-7-deazaguanine synthase OS=Shewanella piezotolerans (strain WP3 / JCM 13877) OX=225849 GN=queE PE=3 SV=1
MNYPVNEVFETIQGEGYFTGVPAIFVRLQGCPVGCAWCDTKHTWDVIEENRVAPELVIQVDGTIGRWSELSSEQLVAAFKSKGFTAKHIVITGGEPCMYDLTEFTHYLHQMGYQTQIETSGTFEVACDSGTWVTVSPKINMKGGYKVLAQALERANEIKHPIATRNHIDELDELLADIDINDKTVCLQPISQKARATELAMKTCIERNWRLSIQTHKYLDID

SEQ ID NO: 34104 - protein, 222 aa, Shewanella psychrophila
  REGION 1..222: note = tr|A0A1S6HLA7|A0A1S6HLA7_9GAMM 7-carboxy-7-deazaguanine synthase OS=Shewanella psychrophila OX=225848 GN=queE PE=3 SV=1
MKYPVNEVFETIQGEGFFTGVPAIFVRLQGCPVGCSWCDTKHTWDVFEQNRVVPEQVIQVDGEIGRWSELTAKDLIDFFTRKGFSAKHVVITGGEPCIHDLTELTSMLNCQGYGTQIETSGTFDVICSDKTWVTVSPKVNMKAGMAVLNQALERADEIKHPVATSKHIDDLDDLLEGIELDGKTICLQPISQKPRATELAMKTCIERNWRLSIQTHKYLNID

SEQ ID NO: 34105 - protein, 222 aa, Shewanella putrefaciens
  REGION 1..222: note = tr|A4Y6J5|A4Y6J5_SHEPC 7-carboxy-7-deazaguanine synthase OS=Shewanella putrefaciens (strain CN-32 / ATCC BAA-453) OX=319224 GN=queE PE=3 SV=1
MNYPVNEVFETIQGEGVFTGVPAIFVRLQGCPVGCAWCDTKQTWDVLEANKVSPEQVITVDGTIGRWAEHTADSLIAAFNAKGFTARHIVITGGEPCMYDLRELTETLHSQGFATQIETSGTFEVNCADNTWVTVSPKVNMKGGYPVLAQALNRANEIKHPIATENHIDELDELLQDIDISAKTICLQPISQKPRATELAMKVCIARNWRLSIQTHKYLDID

SEQ ID NO: 34106 - protein, 222 aa, Shewanella putrefaciens
  REGION 1..222: note = tr|A0A252EPI5|A0A252EPI5_SHEPU 7-carboxy-7-deazaguanine synthase OS=Shewanella putrefaciens OX=24 GN=queE PE=3 SV=1
MNYPVNEVFETIQGEGVFTGVPAIFVRLQGCPVGCAWCDTKQTWDLLEENKVSSEQVITVDGSVGRWANHTAQSLIDAFNAKGYTARHVVITGGEPCMYDLNELTHTLHAAGFTTQIETSGTFEVKCDADTWVTVSPKINMKGGYKVLAQALIRANEIKHPIATENHIDELDELLKGIDVSAKTICLQPISQKPRATELAMKVCIARNWRLSIQTHKYLNID

SEQ ID NO: 34107 - protein, 222 aa, Shewanella sediminis
  REGION 1..222: note = tr|A8FUY5|A8FUY5_SHESH 7-carboxy-7-deazaguanine synthase OS=Shewanella sediminis (strain HAW-EB3); OX = 425104 GN=queE PE=3 SV=1
MKYPVNEVFETIQGEGFFTGVPAIFVRLQGCPVGCSWCDTKHTWDVIEENRVAPELVIQVDGTIGRWAELTAEELISNFKAKGFTAKHVVITGGEPCLHDLIPLTESLNLSGYATQIETSGTFEVICSDKTWVTVSPKINMKAGLPILNQALIRANEIKHPVATQAHIDDLDCLLKGISLDEKTICLQPISQKSRATELAMRVCIERNWRLSIQTHKYLEID

SEQ ID NO: 34108 - protein, 222 aa, Shewanella sp.
  REGION 1..222: note = tr|A0A0Q0GAD3|A0A0Q0GAD3_9GAMM 7-carboxy-7-deazaguanine synthase OS=Shewanella sp. P1-14-1 OX=1723761 GN=queE_1 PE=3 SV=1
MNYPVNEVFETIQGEGSFTGVPAIFVRLQGCPVGCAWCDTQQTWEVLAQNKVNQADVIQVDGTIGRWAEHDASSLIQAFQAKGYTAKHIVLTGGEPCMYNVTDLTSEFIAAGYAVQIETSGTFEVLCHDKVFVTVSPKVNMKGGYEVLEQALTRANEIKHPIATQKHIDELDDLLANIDTQDKVVCLQPISQKTRATELAMKTCIARNWRLSIQTHKYLDID

SEQ ID NO: 34109 - protein, 222 aa, Shewanella sp.
  REGION 1..222: note = tr|A0A2G1ZEB6|A0A2G1ZEB6_9GAMM 7-carboxy-7-deazaguanine synthase OS=Shewanella sp.; OX = 50422 GN=queE PE=3 SV=1
MKYPVNEVFETIQGEGVFTGVPAIFVRLQGCPVGCSWCDTKHTWDVLEKNRVAPELVIQVDGEIGRWSELTAEELINFFMRKGFNAKHVVITGGEPCIHDLTELTSQLNSQGYGTQIETSGTFEVICSDKTWVTVSPKVNMKAGMAVLTQALERADEIKHPVATSKHIEDLDELLEGIELEGKTICLQPISQKLRATELAMKTCIERNWRLSIQTHKYLNID

SEQ ID NO: 34110 - protein, 222 aa, Shewanella violacea
  REGION 1..222: note = tr|D4ZKV2|D4ZKV2_SHEVD 7-carboxy-7-deazaguanine synthase OS=Shewanella violacea (strain JCM 10179 / CIP 106290 / LMG 19151 / DSS12) OX=637905 GN=queE PE=3 SV=1
MKYPVNEVFETIQGEGFFTGVPAIFVRLQGCPVGCSWCDTKHTWDVLEKNRVAPELVIQVDGEIGRWSELTAEALINSFIRKGFSANHVVITGGEPCIHDLTELTSQLNSQGYATQIETSGTFEVICSDKTWVTVSPKVNMKAGMAVLTQALERADEIKHPVATSKHIDDLDELLEGIELDGKTICLQPISQKPRATELAMKTCIERNWRLSIQTHKYLNID

SEQ ID NO: 34111 - protein, 222 aa, Shewanella woodyi
  REGION 1..222: note = tr|B1KGV9|B1KGV9_SHEWM 7-carboxy-7-deazaguanine synthase OS=Shewanella woodyi (strain ATCC 51908 / MS32); OX = 392500 GN=queE PE=3 SV=1
MKYPVNEVFETIQGEGFYTGVPAIFVRLQGCPVGCSWCDTKHTWELLDVNKVQPEMVIQVDGTIGRWSELTTSELISFLKQKEFTASHVVITGGEPCLHDLTAMTEEFNDAGYSTQIETSGTFEVHCSEKTWVTVSPKLKMKAGLAVLPQALKRANEIKHPVATASHIDDLDELLNGVDLKGKTICLQPISQKTRATELAMRVCIERNWRLSIQTHKYLDID

SEQ ID NO: 34112 - protein, 222 aa, Shewanella xiamenensis
  REGION 1..222: note = tr|A0A073KNY5|A0A073KNY5_9GAMM 7-carboxy-7-deazaguanine synthase OS=Shewanella xiamenensis OX=332186 GN=queE PE=3 SV=1
MNYPVNEVFETIQGEGVFTGVPAIFVRLQGCPVGCAWCDTKQTWELLEDKKVSPEQVITVDGSVGRWANHTAQSLIEAFNAKGYTARHVVITGGEPCMYDLHELTHTFHAAGFATQIETSGTFEVKCDADTWVTVSPKINMKGGYKVLAQALTRANEIKHPIATEHHIDELDELLKGIDVSAKTICLQPISQKPRATELAMKVCIARNWRLSIQTHKYLNID

SEQ ID NO: 34113 - protein, 222 aa, Shewanella xiamenensis
  REGION 1..222: note = tr|A0A1E3V0V7|A0A1E3V0V7_9GAMM 7-carboxy-7-deazaguanine synthase OS=Shewanella xiamenensis OX=332186 GN=queE PE=3 SV=1
MNYPVNEVFETIQGEGVFTGVPAIFVRLQGCPVGCAWCDTKQTWDLLEENKVSPEQVITVDGSVGRWANHTAQSLIEAFNAKGYTARHVVITGGEPCMYDLHELTHTLHAAGFATQIETSGTFEVKCDADTWVTVSPKINMKGGYKVLAQALTRANEIKHPIATEHHIDELDELLKGIDVSAKTICLQPINQKPRATELAMKVCIARNWRLSIQTHKYLNID

SEQ ID NO: 34114 - protein, 223 aa, Shigella boydii
  REGION 1..223: note = tr|B2TZF9|B2TZF9_SHIB3 7-carboxy-7-deazaguanine synthase OS=Shigella boydii serotype 18 (strain CDC 3083-94 / BS512) OX=344609 GN=queE PE=3 SV=1
MQYPINEMFQTLQGEGYFTGVPAIFIRLQGCPVGCAWCDTKHTWEKLEDREVSLFSILAKTKESDKWGAASSEDLLAVIGRQGYTARHVVITGGEPCIHDLLPLTDLLEKNGFSCQIETSGTHEVRCTPNTWVTVSPKLNMRGGYDVLSQALERANEIKHPVGRVRDIEALDELLATLTDDKPRVIALQPISQKDDATRLCIETCIARNWRLSMQTHKYLNIA

SEQ ID NO: 34115 - protein, 223 aa, Shigella boydii; identical to SEQ ID NO: 29987
  REGION 1..223: note = tr|I6D4G1|I6D4G1_SHIBO 7-carboxy-7-deazaguanine synthase OS=Shigella boydii 965-58 OX=766138 GN=queE PE=3; SV = 1

SEQ ID NO: 34116 - protein, 223 aa, Shigella dysenteriae; identical to SEQ ID NO: 29987
  REGION 1..223: note = tr|Q32CF1|Q32CF1_SHIDS 7-carboxy-7-deazaguanine synthase OS=Shigella dysenteriae serotype 1 (strain Sd197); OX = 300267 GN=ygcF PE=3 SV=1

SEQ ID NO: 34117 - protein, 223 aa, Shigella dysenteriae; identical to SEQ ID NO: 29987
  REGION 1..223: note = tr|A0A090NAF3|A0A090NAF3_SHIDY 7-carboxy-7-deazaguanine synthase OS=Shigella dysenteriae WRSd3 OX=1401327 GN=queE PE=3 SV=1

SEQ ID NO: 34118 - protein, 223 aa, Shigella flexneri
  REGION 1..223: note = tr|Q0T1P5|Q0T1P5_SHIF8 7-carboxy-7-deazaguanine synthase OS=Shigella flexneri serotype 5b (strain 8401); OX = 373384 GN=ygcF PE=3 SV=1
MQYPINEMFQTLQGEGYFTGVPAIFIRLQGCPVGCAWCDTKHAWEKLEDREVSLFSILAKTKESDKWGAASSEDLLAVIGRQGYTARHVVITGGEPCIHDLLPLTDLLEKNGFSCQIETSGTHEVRCTPNTWVTVSPKLNMRGGYEVLSQALERANEIKHPVGRVRDIEALDELLATLTDDKPRVIALQPISQKDDATRLCIETCIARNWRLSMQTHKYLNIA

SEQ ID NO: 34119 - protein, 223 aa, Shigella flexneri; identical to SEQ ID NO: 29987
  REGION 1..223: note = tr|A0A5C2EI93|A0A5C2EI93_SHIFL 7-carboxy-7-deazaguanine synthase OS=Shigella flexneri Y; OX = 424720 GN=queE PE=3 SV=1

SEQ ID NO: 34120 - protein, 223 aa, Shigella sonnei
  REGION 1..223: note = tr|Q3YY83|Q3YY83_SHISS 7-carboxy-7-deazaguanine synthase OS=Shigella sonnei (strain Ss046) OX=300269; GN = ygcF PE=3 SV=1
MQYPINEMFQTLQGEGYFTGVPAIFIRLQGCPVGCAWCDTKHTWEKLEDREVSLFSILAKTKESDKWGAASSEDLLAVISRQGYTARHVVITGGEPCIHDLLPLTDLLEKNGFSCQIETSGTHEVRCTPNTWVTVSPKLNMRGGYDVLSQALERANEIKHPVGRVRDIEALDELLATLTDDKPRVIALQPISQKDDATRLCIETCIARNWRLSMQTHKYLNIA

SEQ ID NO: 34121 - protein, 223 aa, Shigella sonnei; identical to SEQ ID NO: 29987
  REGION 1..223: note = tr|A0A235P2D8|A0A235P2D8_SHISO 7-carboxy-7-deazaguanine synthase OS=Shigella sonnei; OX = 624 GN=queE PE=3 SV=1

SEQ ID NO: 34122 - protein, 223 aa, Shigella sp.
  REGION 1..223: note = tr|A0A1D3DKB3|A0A1D3DKB3_9ENTR 7-carboxy-7-deazaguanine synthase OS=Shigella sp. FC1655; OX = 1898038 GN=queE PE=3 SV=1
MQYPINEVFQTLQGEGVFTGVPALFIRLQGCPVGCSWCDTKHTWEKEDEKKVPLGDIPIKTQESDAWGEASVAEILSLFQQQGYSAKHVVITGGEPCLYDLYPLTEGLEQAGFTCQIETSGTHDILCSEKTWVTLSPKVGMKGGFIVLPSAINRANEIKHPVGREKDIEALDTLLTLRTEHPEPVVALQPISCKKSATTLCIKTCIERNWRFSMQTHKYLNIA

SEQ ID NO: 34123 - protein, 223 aa, Shigella sp.
  REGION 1..223: note = tr|A0A1E3N469|A0A1E3N469_9ENTR 7-carboxy-7-deazaguanine synthase OS=Shigella sp. FC569; OX = 1892897 GN=queE PE=3 SV=1
MQYPINEMFQTLQGEGYFTGVPAIFIRLQGCPVGCAWCDTKHTWEKLEDREVSLFSILAKTKESDKWGAASSEDLLAVIGRQGYTARHVVITGGEPCIHDLLPLTDLLEKNGFSCQIETSGTHEVRCTPNTWVTVSPKLNMRGGYEVLSQALERANEIKHPVGRVRDIEALDELLATLTDDKPRVIALQPISQKEDATRLCIDTCIARNWRLSMQTHKYLNIA

SEQ ID NO: 34124 - protein, 235 aa, Shimia marina
  REGION 1..235: note = tr|A0A0P1EPY5|A0A0P1EPY5_9RHOB 7-carboxy-7-deazaguanine synthase OS=Shimia marina; OX = 321267 GN=queE PE=3 SV=1
MTLRVAEIFGPTIQGEGVLIGAPTVFVRTGGCDYRCSWCDSLHAVDSAHRHDWLPMDPEAVMTEVRALSGDRPLTVSLSGGNPAIHDFAPLIALGKSEGYTFACETQGSIAKPWFAALDTLVLSPKPPSSGEEVDWSAFERCLEAAGNGPESVIKIVIFDDADFAWAQAAHARFPDLPLYLQPGNLMVDPDKPVDLTETTARLEWLIDKVVAAGWFAPRVLPQLHVMVWGNKRGV

SEQ ID NO: 34125 - protein, 223 aa, Shimwellia blattae
  REGION 1..223: note = tr|I2B622|I2B622_SHIBC 7-carboxy-7-deazaguanine synthase OS=Shimwellia blattae (strain ATCC 29907 / DSM 4481 / JCM 1650 / NBRC 105725 / CDC 9005-74) OX=630626; GN = que E PE=3 SV=1
MQYPINEMFQTLQGEGYFTGVPAIFIRLQGCPVGCAWCDTKHTWETREDREVSLFSILAKTRESDKWGNASAEDLLAIIGRQGWTARHVVITGGEPCIHDLTPLTALLEQQGFICQIETSGTHEVRCTPGTWVTVSPKVNMRGGYDVLTQALHRADEIKHPVGRVRDIEALDELLEVITDDKQRIIALQPISQKEDATRLCIETCIARNWRLSVQTHKYLNIA

SEQ ID NO: 34126 - protein, 210 aa, Shinella sp.
  REGION 1..210: note = tr|A0A372NBS5|A0A372NBS5_9RHIZ 7-carboxy-7-deazaguanine synthase OS=Shinella sp. WSJ-2; OX = 2303749 GN=queE PE=3 SV=1
MGYAVKEMFKTLQGEGAQAGRAAVFCRFAGCNLWSGREEDRDQAVCQFCDTDFVGTDGIGGAKFKDAETLAIAIASTWGDTTHRRYVVFTGGEPLLQLDDELVAAVHQQGFEIAIETNGTLEPPAGVDWICVSPKAGAPLKLREGSELKLVYPQPNLLPEALPDVRFEHYFLQPMDGPKRAENTIAVTEYCLEHPKWRLSLQTHKMIGIP

SEQ ID NO: 34127 - protein, 209 aa, unidentified
  source 1..209: note = Siansivirga zeaxanthinifaciens
  REGION 1..209: note = tr|A0A0C5W948|A0A0C5W948_9FLAO 7-carboxy-7-deazaguanine synthase OS=Siansivirga zeaxanthinifaciens CC-SAMT-1 OX=1454006 GN=queE PE=3 SV=1
MKKEIKDLVDTGEMLPLMEEFYTIQGEGFHKGTAAYFIRIGGCDVGCHWCDVKESWNADIHPPTETTKIVENAKKYSDTIVVTGGEPLTWDMTLLTSKLKAEGLQVHIETSGAYKLTGTWDWICLSPKKMKLPTKEVYEKANELKMIIYNKDDFRFAEEQAAKVNKDCILYLQPEWSKRDKVVPEIVDYVMANPKWKVSLQTHKYLNIP

SEQ ID NO: 34128 - protein, 222 aa, unidentified
  source 1..222: note = Siccationidurans arizonensis
  REGION 1..222: note = tr|A0A1I5TTG5|A0A1I5TTG5_9BACT 7-carboxy-7-deazaguanine synthase OS=Siccationidurans arizonensis OX=1227077 GN=queE PE=3 SV=1
MIPVTLLSSELVVPNGAVSAPATGTMLPVMEQFYTIQGEGYNTGRAAYFIRLGGCDVGCVWCDVKESWDADAHPRQSIAQLVDAVLAYPGRDVVITGGEPLMHDCGPLTAALQAAGCRTWLETSGAHPLSGTWDWICLSPKKFKAPLPDVLAAAHELKVVVFNSHDFTWAEEHAAQVPAATRLYLQPEWSRAARMTPELVEYVKQHPRWQVSLQTHKYLDIP

SEQ ID NO: 34129 - protein, 223 aa, unidentified
  source 1..223: note = Siccibacter turicensis
  REGION 1..223: note = tr|A0A2P8VM52|A0A2P8VM52_9ENTR 7-carboxy-7-deazaguanine synthase OS=Siccibacter turicensis OX=357233 GN=queE PE=3 SV=1
MQYPINEMFQTLQGEGYFTGVPAIFIRLQGCPVGCAWCDTKHTWDKLSDREVSLFSVLAKTKESDKWGAASSEDLLAIIERQGWTARHVVITGGEPCIHDLMPLTMALEALGFSCQIETSGTHDVRCTTGTWVTVSPKVNMKGGYDVIAQALQRADEIKHPVGRMRDIEALDDLLATLKDEKQRVIALQPISQKEDATRLCIETCIARNWRLSMQTHKYLNIA

SEQ ID NO: 34130 - protein, 218 aa, unidentified
  source 1..218: note = Sideroxydans lithotrophicus
  REGION 1..218: note = tr|D5CMS7|D5CMS7_SIDLE 7-carboxy-7-deazaguanine synthase OS=Sideroxydans lithotrophicus (strain ES-1); OX = 580332 GN=queE PE=3 SV=1
MSYVTSESLRISEIFYSLQGETSRVGLPTVFVRLTGCPLRCSYCDTAYAFTGGQSMQLSAIMDEVASYAPRYVTVTGGEPLAQKNCLFLLRALCDAGYEVSLETGGALDVSGVDARVMKVLDIKTPGSGEVQKNLWGNLQHLGRHDEIKFVLCGEADYQWAKQVMQEHALAQRCAVLFSPAQGQLAPTELAEWILRDRLPVRLQVQLHKLLWGNEAGH

SEQ ID NO: 34131 - protein, 235 aa, unidentified
  source 1..235: note = Silicibacter sp.
  REGION 1..235: note = tr|C9D360|C9D360_9RHOB 7-carboxy-7-deazaguanine synthase OS=Silicibacter sp. TrichCH4B OX=644076 GN=queE; PE = 3 SV=1
MTLRIAEIFGPTIQGEGALIGEPTVFVRAGGCDYRCSWCDSLHAVESQYRHSWAPMDTDAVWAKVHKLSGGQPLTVSLSGGNPAIQDFGPLITKGRAAGYRFACETQGSIPRPWFADLDTLVLSPKPPSSGENVDWDAFDRCRAIGAGARQQVMKIVIFDETDYQWAREVHRHHSDLALYLQPGNPEVDPATPVDLQTLANRLGWLTEKAMADGWFAPRILPQLHVLIWGNKRGV

SEQ ID NO: 34132 - protein, 243 aa, unidentified
  source 1..243: note = Silvanigrella aquatica
  REGION 1..243: note = tr|A0A1L4CXY4|A0A1L4CXY4_9PROT 7-carboxy-7-deazaguanine synthase OS=Silvanigrella aquatica OX=1915309 GN=queE PE=3 SV=1
MSSSFLLNEIYPCLQGEGVNLGKPSLLVRFQICNLRCVWCDTPYTHTFKSDPLEKENSKSKQKFVRYTLETLVEKIKSFQINHLILTGGEPTLQNLGLLMRTLGNNFTAEVESNGTRIPHLQIPNFLEQDYNLMQWNISPKFSNSGEKIISESLHHWSHLSQNHNSVYFKFVVRKDFVENDMTEILDIVKTYHLEKARVLLMPEGTHLESQINNVWLHDKCIKYGFRYTPRLHVLLFGNLRGV

SEQ ID NO: 34133 - protein, 241 aa, unidentified
  source 1..241: note = Silvanigrellales bacterium
  REGION 1..241: note = tr|A0A4P2VT04|A0A4P2VT04_9PROT 7-carboxy-7-deazaguanine synthase OS=Silvanigrellales bacterium RF1110005 OX=2493639 GN=queE PE=3 SV=1
MSFLINEIYPCLQGEGVNTGSPSLLVRFHICNLRCTWCDTPYTHTFKSDPVDKKNPSGKQKFVRFSLAELVKRLKEFPQKHLILSGGEPTLHNLGLLMRTLGDEYSAEVESNGTRIPHKQIPNFLVTDYNLMQWNISPKFSNAGENLVPEALAHWAELAKNHAHVYFKFVIRKDYLNADMQEIISIINQHKISANKVLLMPEGTTIQSQIENIWLHDECLKHGFRYAPRLHVLLFGNLRGV

SEQ ID NO: 34134 - protein, 229 aa, Simiduia agarivorans
  REGION 1..229: note = tr|K4KP46|K4KP46_SIMAS 7-carboxy-7-deazaguanine synthase OS=Simiduia agarivorans (strain DSM 21679 / JCM 13881 / BCRC 17597 / SA1) OX=1117647 GN=queE PE=3 SV=1
MGIIARFLTSAPAMTDLNLKITEIFLSLQGESRTIGLPTVFVRLTGCPLRCQYCDSAYAFHGGERQTLAQILDRVAEFNCRQVCVTGGEPLAQANCHALLTALCDRGYEVSLETSGALDVGQVDARVSRVVDLKTPGSQESHRNRWENLPLLTRHDQIKFVICDRKDFDWACFKVNEHRLLEQVGDVLFSPSFGQVSPRDLADWVVDCGLPVRFQLQLHKLLWGDEPGR

SEQ ID NO: 34135 - protein, 205 aa, Simonsiella muelleri
  REGION 1..205: note = tr|V9H6K4|V9H6K4_9NEIS 7-carboxy-7-deazaguanine synthase OS=Simonsiella muelleri ATCC 29453 OX=641147; GN = queE PE=3 SV=1
MSEPIFRIVEIFETLQGEGYNTGMPSVFIRFGKCNLACHWCDTNYQQFEMMTLTQIMDQVYDYSAKNIIITGGEPTIQPQLEILLNRLKSEGYFIAIETNGLRAVPEQIDYIATSPKRLYANAYDKTCLSAADEVRIVVDSDDIFSFCEIIEQKIRAKRYYLSPCEQNGEMNILATITLLGKLNARPNQPHWQLSIQTHKLCGID

SEQ ID NO: 34136 - protein, 212 aa, Simplicispira metamorpha
  REGION 1..212: note = tr|A0A4R2NEW1|A0A4R2NEW1_9BURK 7-carboxy-7-deazaguanine synthase OS=Simplicispira metamorpha OX=80881 GN=queE PE=3 SV=1
MTYSVKEIFYTLQGEGAQAGLPAVFCRFAGCNLWSGREADRAAAICRFCDTDFVGTDGTLGGKYPVADALAAQIEALWPAGDSTHRLVVLTGGEPLMQVDVPLIAALHARHFRIAVETNGTLAAPPGIDWLCVSPKAGAPWLQRQGQELKVVWPQPGLDLATLAQAGTFEHRFLQPMDGPAQAHNTALCIAACLQDPRWRLGLQTHKISGIR

SEQ ID NO: 34137 - protein, 211 aa, Simplicispira sp.
  REGION 1..211: note = tr|A0A398C9F3|A0A398C9F3_9BURK 7-carboxy-7-deazaguanine synthase OS=Simplicispira sp. NY-02 OX=2315688 GN=queE PE=3 SV=1
MTYSVKEIFYTLQGEGHHAGRPAVFCRFAGCNLWSGVEEGRASAVCQFCDTDFVGTDGEGGGKFADAASLAARVNALWPVDYPAQKYVVCTGGEPLLQLDAPLIDALHAAGFAVAIETNGTLPVPGGVDWVCVSPKMGAELVVRRGNEIKVVIPQPGQPLDDYAALDFEHHFVQAMDGPLQATNLRLAIGFCKAHPLWNLSVQTHKLLQIP

SEQ ID NO: 34138 - protein, 251 aa, Singulisphaera acidiphila
  REGION 1..251: note = tr|L0DLV1|L0DLV1_SINAD 7-carboxy-7-deazaguanine synthase OS=Singulisphaera acidiphila (strain ATCC BAA-1392 / DSM 18658 / VKM B-2454 / MOB10) OX=886293; GN = queE PE=3SV=1
MPRTLVTINDASVPLTPPGPASTILHPQRLRPLQGKPAGSLMIHEIYRSLQGESTFAGLPCVFIRLTACNLRCGYCDTPHAFTEGNLLSLDEVVERTLALGDPLVELTGGEPLLQPEVFPLMVRLADAGRTVLLETSGSLDIAPVDRRVHVILDLKTPGSGEEKANLWSNLSLVKPTDEIKFVLCDWADFDWAVAQTRAHRLTERCPVLFSGCFGKVDPTELAAWILETQLPIRLQLQQHKILWHPAARGV

SEQ ID NO: 34139 - protein, 255 aa, Singulisphaera sp.
  REGION 1..255: note = tr|A0A1N6F130|A0A1N6F130_9BACT 7-carboxy-7-deazaguanine synthase OS=Singulisphaera sp. GP187 OX=1882752 GN=queE PE=3 SV=1
MSRTLVTINDTSIPVTPAGPVTAAPSVALHPQRLRPLQGKPAGSLVIHEIYRSLQGESTFTGLPCVFIRLTACNLRCVYCDTPHAFTEGNLLSLDEVVERTLALGDPLVELTGGEPLLQPEVFPLMTRLADAGRTVLLETSGSLDIGPVDRRVHVILDLKTPGSGEEHANLWSNLALVKPTDEIKFVLCDRADFEWAVAQTRAHRLTERCPVLFSGCFGKVDPTELAAWILETQLPIRLQLQQHKILWHPAARGV

SEQ ID NO: 34140 - protein, 212 aa, Singulisphaera sp.
  REGION 1..212: note = tr|A0A1N6L3N5|A0A1N6L3N5_9BACT 7-carboxy-7-deazaguanine synthase OS=Singulisphaera sp. GP187 OX=1882752 GN=queE PE=3 SV=1
MSYAVKSIFYTLQGEGANTGRPAVFCRFAGCNLWSGREEDRLTAKCSFCDTDFVGTDGPGGGRFHSAGELAQAVLGYWPSPPAVGRPFVVCTGGEPLLQLDEALVVALHDHGFEIAVETNGTVRPPRGLDWITVSPKAGSDLVIQAGQELKLVFPQAGLRPEPFEGLDFRHFFLQPMDGTEAEVNTRLAVRYCLEHPCWRLSLQTHKMLGIP

SEQ ID NO: 34141 - protein, 230 aa, unidentified
  source 1..230: note = Sinimarinibacterium flocculans
  REGION 1..230: note = tr|A0A318EEG3|A0A318EEG3_9GAMM 7-carboxy-7-deazaguanine synthase OS=Sinimarinibacterium flocculans OX=985250 GN=queE PE=3 SV=1
MKPAADQARSSAENPDGETRLKITEIFCSLQGESSSVGWPTSFVRLTGCPLRCQYCDTAYAFHGGQWMTVAAIVDTVRAHATRHVCVTGGEPLAQKGCLPLLSALCDADWRVSLETSGALDIGSVDARVVRVVDIKTPGSGEVQRNRWDNLPLLRDHDEVKFVICNRDDYDWACGVVREHALDRRATVLFSPSQSELPAAELADWLLADRLPVRFQMQLHKVLWGNVPGR

SEQ ID NO: 34142 - protein, 210 aa, unidentified
  source 1..210: note = Sinimarinibacterium sp.
  REGION 1..210: note = tr|A0A4U0GQE1|A0A4U0GQE1_9GAMM 7-carboxy-7-deazaguanine synthase OS=Sinimarinibacterium sp. CAU 1509 OX=2562283 GN=queE PE=3 SV=1
MRITEIFRSIQGESSSVGWPTVFVRLTGCPLRCSYCDTAYAFHGGQWMDVAQIVDQVRALGVSHVCVTGGEPLAQKNCQGLLTALCDSGYQVSLETSGALDVSSVDPRVMRVIDLKTPGSGEEGRNLWSNLSSLNAKDEIKMVICDRGDYEWAKAVISKHALPQRCTVLMSPSQSQLEPSALADWILEDQLPVRFQLQLHKVLWGNVAGR

SEQ ID NO: 34143 - protein, 239 aa, Sinobaca qinghaiensis
  REGION 1..239: note = tr|A0A419V6Z5|A0A419V6Z5_9BACL 7-carboxy-7-deazaguanine synthase OS=Sinobaca qinghaiensis; OX = 342944 GN=queE PE=3 SV=1
MKKIPVLEIFGPTIQGEGMVIGQKTMFVRTGGCDYRCSWCDSAFTWDGSQKAAVMDAASIVEKLYEKGTNLFSHVTISGGNPAIHPGIHSLIEELRNQGIQTAVETQGSIWAEWMIDIDEVTISPKPPSSLMKTDWEKLDYYINRLERRPNKAFSLKIVIFNKEDLEYAAEVHTRYPNAPMFLQVGNDDLTEKEAGMLRDHLLERYEWLISETMDDARWNDVKILPQLHTLLWGNKQGV

SEQ ID NO: 34144 - protein, 224 aa, unidentified
  source 1..224: note = Sinobacteraceae bacterium
  REGION 1..224: note = tr|A0A2T5MH90|A0A2T5MH90_9GAMM 7-carboxy-7-deazaguanine synthase OS=Sinobacteraceae bacterium GT1R17 OX=2029166 GN=queE PE=3 SV=1
MRAMSIPAPDPSQRLKITEIFLSLQGESSRVGWPTIFIRLTGCPLRCGYCDSAYAFYGGEWHTFDQILDQVRSLGARHICVTGGEPLAQKNCTELMRRLCDEGYQVSLETSGSIDVSKVDVRVSRVVDIKTPGSGEVTRNRWENLPLLNAQDEIKFVLCGREDYDWAKQIIVEHQIEGRSPILFSPSQDQLDPRALADWIVADRLNVRFQLQLHKVLWGNVAGK

SEQ ID NO: 34145 - protein, 210 aa, unidentified
  source 1..210: note = Sinobacteraceae bacterium
  REGION 1..210: note = tr|A0A521N152|A0A521N152_9GAMM 7-carboxy-7-deazaguanine synthase OS=Sinobacteraceae bacterium OX=1969813 GN=queE PE=3 SV=1
MKITEVFLSLQGESSLVGWPTVFVRLTGCPLRCSYCDTAYAFHGGQWRDIPDLLGEVQSHGVRHVCVTGGEPLAQKNCLPLLSALCDAGYVVSLETSGALDIGGVDPRVARIVDIKTPGSGEVARNRWENLPLLTARDELKFVLCSRADYDWAVEQLRQHRLHERCAVLFSPSHKEVSPRELADWIVADRLPVRFQTQLHKQLWGEEAGR

SEQ ID NO: 34146 - protein, 218 aa, unidentified
  source 1..218: note = Sinobacterium caligoides
  REGION 1..218: note = tr|A0A3N2DE34|A0A3N2DE34_9GAMM 7-carboxy-7-deazaguanine synthase OS=Sinobacterium caligoides OX=933926 GN=queE PE=3 SV=1
MAVYSVKEMFYTLQGEGAQAGRPAIFCRFSGCNLWTGREQDRASADCRFCDTDFIGTDGVDGGKFRSADALADAITGLWPSAEVPCFVVITGGEPALQLDEALVTALHQRGCVIAIETNGTLPLPAAIDWVCISPKQGNEVVLRECDELKVVYPQQGIDPADYLHIQAQRYYISPENDPHAAELSLLGTSRYQEAIDYCLQHPQWRLNLQQHKVLNIA

SEQ ID NO: 34147 - protein, 192 aa, unidentified
  source 1..192: note = Sinomicrobium oceani
  REGION 1..192: note = tr|A0A1K1NLY4|A0A1K1NLY4_9FLAO 7-carboxy-7-deazaguanine synthase OS=Sinomicrobium oceani; OX = 1150368 GN=queE PE=3 SV=1
MEEFYTIQGEGYHKGTAAYFIRVGGCDVGCHWCDVKESWNAETHPPTAVEHIIENAARHSDTIVITGGEPLTWNMAPLTSGLKARGLKTHIETSGAYPLTGIWDWICLSPKKIKLPVDEVYEKADELKVIIYNKHDFDFAEEQAAKVNKDCILYLQPEWSRRDKMIPEIVTFVMKNPRWKVSLQTHKYLNIP

SEQ ID NO: 34148 - protein, 210 aa, unidentified
  source 1..210: note = Sinomicrobium pectinilyticum
  REGION 1..210: note = tr|A0A3N0E503|A0A3N0E503_9FLAO 7-carboxy-7-deazaguanine synthase OS=Sinomicrobium pectinilyticum OX=1084421 GN=queE PE=3 SV=1
MIKEEVSGLVAKGEMLPLMEEFYTIQGEGYHKGTAAYFIRVGGCDVGCHWCDVKESWNAETHPPTAVEHIIENAAKHSDTIVITGGEPLTWDMGPLTAGLKARGLKTHIETSGAYPLTGTWDWICLSPKKIKLPLNDIYEKADELKVIIYNQHDFAFAEEQAAKVNTDCILYLQPEWSRREKMIPDIVNFVMKNPRWKVSLQTHKYLNIP

SEQ ID NO: 34149 - protein, 210 aa, unidentified
  source 1..210: note = Sinomicrobium sp.
  REGION 1..210: note = tr|A0A329N3T5|A0A329N3T5_9FLAO 7-carboxy-7-deazaguanine synthase OS=Sinomicrobium sp. N-1-3-6 OX=2219864 GN=queE PE=3 SV=1
MSKAEVLTLVERGEMLPLMEEFYTIQGEGYHKGTAAYFIRIGGCDVGCHWCDVKESWNAETHPPTAVDRIVDNAAKYSDTIVITGGEPLTWNMGPLTSKLRDRGLKTHIETSGAYPLTGVWDWICLSPKKIKLPVEDIYEKAQELKVIVYNKSDFAFAEQQAAKVGPDCILYLQPEWSRREKMIPEIVGFVMKNPRWKVSLQTHKYLNIP

SEQ ID NO: 34150 - protein, 245 aa, Sinorhizobium americanum
  REGION 1..245: note = tr|A0A4R2C1C5|A0A4R2C1C5_9RHIZ 7-carboxy-7-deazaguanine synthase OS=Sinorhizobium americanum OX=194963 GN=queE PE=3 SV=1
MTGMRPAEIRVSEIFGPTIQGEGALTGLPTVFVRTGGCDYRCSWCDSLHAVDSAYRDEWRALTVEEVWAEVTRLSGGVPVMVSLSGGNPAIQPLGELIARGHPEGYRFALETQGSVARDWFADLDMLVLSPKPPSSGMETEWDDFDACLRSSRGKPQTALKIVVFDDADYAYARAAAARHPQLPVYLQPGNHTPPPPDDEDAPIDIDGVMERMRWLVDRVIADKWFEVRVLPQLHVLIWGNRRGV

SEQ ID NO: 34151 - protein, 245 aa, Sinorhizobium americanum
  REGION 1..245: note = tr|A0A1L3LXW7|A0A1L3LXW7_9RHIZ 7-carboxy-7-deazaguanine synthase OS=Sinorhizobium americanum OX=194963 GN=queE PE=3 SV=1
MTGMRPAEIRVSEIFGPTIQGEGALTGLPTVFVRTGGCDYRCSWCDSLHAVDSAYRDEWRALTVEEVWSEVTRLSGGVPVMVSLSGGNPAIQPLGELIARGHREGYRFALETQGSVARDWFADLDMLVLSPKPPSSGMETEWDDFDACLRSSRGKPQTALKIVVFDDADYAYARAAAARHPQLPVYLQPGNHTPPPPDDDDAPIDIDGVMERMRWLVDRVIADKWFEVRVLPQLHVLIWGNRRGV

SEQ ID NO: 34152 - protein, 245 aa, unidentified; identical to SEQ ID NO: 33540
  source 1..245: note = Sinorhizobium fredii
  REGION 1..245: note = tr|A0A2U8GAL9|A0A2U8GAL9_RHIFR 7-carboxy-7-deazaguanine synthase OS=Sinorhizobium fredii CCBAU 45436 OX=1128331 GN=queE PE=3 SV=1

SEQ ID NO: 34153 - protein, 245 aa, unidentified; identical to SEQ ID NO: 33540
  source 1..245: note = Sinorhizobium fredii
  REGION 1..245: note = tr|A0A249Q4B3|A0A249Q4B3_RHIFR 7-carboxy-7-deazaguanine synthase OS=Sinorhizobium fredii CCBAU 83666 OX=1128334 GN=queE PE=3 SV=1

SEQ ID NO: 34154 - protein, 245 aa, unidentified
  source 1..245: note = Sinorhizobium medicae
  REGION 1..245: note = tr|A6UJ89|A6UJ89_SINMW 7-carboxy-7-deazaguanine synthase OS=Sinorhizobium medicae (strain WSM419); OX = 366394 GN=queE PE=3 SV=1
MTNVRSDEIRVSEIFGPTIQGEGVLIGLPTVFVRSGGCDYRCSWCDSLHAVESSYRHEWHAMSTEAVWQEIVRLSRGEAVMVSLSGGNPAIQPFGDLIGRGHRNGYRFALETQGSIAREWFAELDVLVLSPKPPSSGMETDWQAFDVCLRMAAGKPQTVLKFVVFDEADYAYARAAAARHPHLPVYLQPGNHTPPPSDDKDAPIDLEGVMERMRWLVDATIEDGWFEARVLPQLHVLIWGNKRGV

SEQ ID NO: 34155 - protein, 245 aa, unidentified
  source 1..245: note = Sinorhizobium medicae
  REGION 1..245: note = tr|A0A508X4W9|A0A508X4W9_9RHIZ 7-carboxy-7-deazaguanine synthase OS=Sinorhizobium medicae; OX = 110321 GN=queE PE=3 SV=1
MTNVRSDEIRVSEIFGPTIQGEGVLIGLPTVFVRSGGCDYRCSWCDSLHAVESSYRHEWHSMSTEAVWQEIVRLSRGEAVMVSLSGGNPAIQPFGDLIGRGHRNGYRFALETQGSIAREWFAELDVLVLSPKPPSSGMETDWQAFDVCLRMAAGKPQTVLKFVVFDEADYSYARAAAARHPHLPVYLQPGNHTPPPSDDKDAPIDLEGVMERMRWLVDATIEDGWFEARVLPQLHVLIWGNKRGV

SEQ ID NO: 34156 - protein, 245 aa, unidentified; identical to SEQ ID NO: 33561
  source 1..245: note = Sinorhizobium meliloti
  REGION 1..245: note = tr|F7XK43|F7XK43_SINMM 7-carboxy-7-deazaguanine synthase OS=Sinorhizobium meliloti (strain SM11) OX=707241; GN = exsD PE=3 SV=1

SEQ ID NO: 34157 - protein, 245 aa, unidentified; identical to SEQ ID NO: 33561
  source 1..245: note = Sinorhizobium meliloti
  REGION 1..245: note = tr|A0A0E0UMS3|A0A0E0UMS3_SINMB 7-carboxy-7-deazaguanine synthase OS=Sinorhizobium meliloti (strain BL225C) OX=698936 GN=queE PE=3 SV=1

SEQ ID NO: 34158 - protein, 245 aa, unidentified
  source 1..245: note = Sinorhizobium saheli
  REGION 1..245: note = tr|A0A178YIF3|A0A178YIF3_SINSA 7-carboxy-7-deazaguanine synthase OS=Sinorhizobium saheli; OX = 36856 GN=queE PE=3 SV=1
MTSVRPAEIRVSEIFGPTIQGEGILIGLPTVFVRTGGCDYRCSWCDSLHAVDSEYREDWRAMSTEDVWQEVVRLSGGSPVMVTLSGGNPAIQPLGGLIDRGHEEGYRFALETQGSVARDWFAELDVLVLSPKPPSSGMETDWEAFDACLRLSKGRPQTVLKIVVLDEADYAYARAAAARYPHLPVYLQPCNHTPPPPDADDAPIDVEGILERMRWLVDKAAEDRWLEARVLPQLHVLIWGNKRGV

SEQ ID NO: 34159 - protein, 245 aa, Sinorhizobium sp.
  REGION 1..245: note = tr|A0A249P1J3|A0A249P1J3_9RHIZ 7-carboxy-7-deazaguanine synthase OS=Sinorhizobium sp. CCBAU 05631 OX=794846 GN=queE PE=3 SV=1
MTVTRPAEIRVSEIFGPTIQGEGALIGLPTVFVRTGGCDYRCSWCDSLHAVDSAYRDEWRAMTVEEVWSEVTRLSGGVPVMVSLSGGNPAIQPLGPLIDRGHREGYRFALETQGSVARDWFANLDMLVLSPKPPSSGMETDWEAFDACLRSSRGKPQTALKIVVFDEVDYAYARSAAARHPQLPVYLQPGNHTPPPPDDEVAPIDIEGVMERVRWLVDRVSADKWFEVRVLPQLHVLIWGNRRGV

SEQ ID NO: 34160 - protein, 245 aa, Sinorhizobium sp.
  REGION 1..245: note = tr|A0A2A6MEH3|A0A2A6MEH3_9RHIZ 7-carboxy-7-deazaguanine synthase OS=Sinorhizobium sp. NG07B OX=1538174 GN=queE PE=3 SV=1
MTVTRPAEIRVSEIFGPTIQGEGALIGLPTVFVRTGGCDYRCSWCDSLHAVDSAYRDEWRAMTVEEVWSEVTRLSGGVPVMVSLSGGNPAIQPLGPLIDRGHREGYRFALETQGSVARDWFANLDMLVLSPKPPSSGMETDWEAFDACLRSSRGKPQTALKIVVFDEVDYAYARSAAARHPQLPVYLQPGNHTPPPPDDEVAPIDIEGVMERMRWLVDRVSADKWFEARVLPQLHVLIWGNRRGV

SEQ ID NO: 34161 - protein, 210 aa, Siphonobacter aquaeclarae
  REGION 1..210: note = tr|A0A1G9RKE0|A0A1G9RKE0_9BACT 7-carboxy-7-deazaguanine synthase OS=Siphonobacter aquaeclarae OX=563176 GN=queE PE=3 SV=1
MSVSIAEFPVTAKKLPVMESFYTLQGEGFHNGKAAYFIRLGGCEVGCHWCDVKESWDVNAHPSFAVTEIVDGALAYPGRLAVITGGEPLMHDLAELTSALQEAGFQTNIETSGVYPVTGSWDWICFSPKKFKEPHSDIYDKASELKVIVYNKSDFAFAEEHAARVSADCVLLLQPEWSRQDLMLPEIIEYVKDNPKWRVSLQTHKYMQIP

SEQ ID NO: 34162 - protein, 193 aa, unidentified
  source 1..193: note = Siphonobacter curvatus
  REGION 1..193: note = tr|A0A2S7ITX0|A0A2S7ITX0_9BACT 7-carboxy-7-deazaguanine synthase OS=Siphonobacter curvatus OX=2094562 GN=queE PE=3 SV=1
MESFYTLQGEGFHAGKSAYFIRLGGCEVGCHWCDVKESWDASLHPSFGIDSIVAGALQYPGRMAVITGGEPLMHDLTDLTAALQIAGFQTNIETSGVYAVTGSWDWICFSPKKFKEPHSDIYERADELKVIIYNKSDFEFAEEHASRLQTDAQLLLQPEWSKRDVMLPQIIDYVKDNPKWRVSLQTHKYMNIP

SEQ ID NO: 34163 - protein, 193 aa, Siphonobacter sp.
  REGION 1..193: note = tr|A0A2N7BH44|A0A2N7BH44_9BACT 7-carboxy-7-deazaguanine synthase OS=Siphonobacter sp. BAB-5405 OX=1864825 GN=queE PE=3 SV=1
MESFYTLQGEGFHAGKAAYFIRLGGCEVGCHWCDVKESWDASLHPSFGIDSIVAGALQYPGRMAVITGGEPLMHDLTDLTAALQIAGFQTNIETSGVYAVTGSWDWICFSPKKFKEPHSDIYERADELKVIIYNKSDFEFAEEHASRLQTDAQLLLQPEWSKRDVMLPQIIDYVKDNPKWRVSLQTHKYMNIP

SEQ ID NO: 34164 - protein, 193 aa, Siphonobacter sp.
  REGION 1..193: note = tr|A0A261Q6V4|A0A261Q6V4_9BACT 7-carboxy-7-deazaguanine synthase OS=Siphonobacter sp. BAB-5385 OX=1864822 GN=queE PE=3 SV=1
MESFYTLQGEGFHAGKAAYFIRLGGCEVGCHWCDVKESWDASLHPSFGIDFIVAGALQYPGRMAVITGGEPLMHDLTDLTAALQIAGFQTNIETSGVYAVTGSWDWICFSPKKFKEPHSDIYERADELKVIIYNKSDFEFAEEHASRLQTDAQLLLQPEWSKRDVMLPQIIDYVKDNPKWRVSLQTHKYMNIP

SEQ ID NO: 34165 - protein, 213 aa, Skermanella aerolata
  REGION 1..213: note = tr|A0A0D2SN79|A0A0D2SN79_9PROT 7-carboxy-7-deazaguanine synthase OS=Skermanella aerolata KACC 11604 OX=1385368 GN=queE PE=3 SV=1
MSYAVKEIFYTLQGEGAQAGRPAVFCRFAGCNLWSGREADRESAVCRFCDTDFVGTDGTGGGRFSDAAALAAAVAAQWPAGAGGRPYVVCTGGEPLLQLDIPLIDALHAVGFEIAIETNGTKPVPDGIDWICVSPKAGSQLVVERGNELKLVFPQAESEARPENFLNLRFDNFFLQPMDGPERTENLQATIAYCLANPSWRLSLQTHKIMGIP

SEQ ID NO: 34166 - protein, 213 aa, Skermanella aerolata; identical to SEQ ID NO: 34165
  REGION 1..213: note = tr|A0A512E4E4|A0A512E4E4_9PROT 7-carboxy-7-deazaguanine synthase OS=Skermanella aerolata; OX = 393310 GN=queE PE=3 SV=1

SEQ ID NO: 34167 - protein, 210 aa, Skermanella stibiiresistens
  REGION 1..210: note = tr|W9GRP2|W9GRP2_9PROT 7-carboxy-7-deazaguanine synthase OS=Skermanella stibiiresistens SB22 OX=1385369; GN = queE PE=3 SV=1
MAYAVKELFKTLQGEGAQAGRAAVFCRFAGCNLWSGRERDRATATCQFCDTDFVGTDGEGGGRFGTAEDLAAALARGWGPGTERRYVVFTGGEPLLQLDTALVEAVHAEGFEIAIETNGTLEPPPGVDWICVSPKAGADWVLKRGHELKLVFPQEAFDPPELENLPFEHHWLQPMDGPDRLANTARIVDYCKDHPRWRLSLQTHKLIGIP

SEQ ID NO: 34168 - protein, 213 aa, Smithella sp.
  REGION 1..213: note = tr|A0A091FHA2|A0A091FHA2_9DELT 7-carboxy-7-deazaguanine synthase OS=Smithella sp. SCADC; OX = 1499107 GN=queE PE=3 SV=1
MSYFIKEIFYSIQGEGFYSGRPAVFCRFAGCNLWSGKEADRKKAVCKFCDTDFIGCDGSQGGEFPTPDQLVEIICKLWPEKKLKPVRPFVVCTGGEPLLQLNVELIEALHKKGWEIAVETNGTLLPPPGIDWICVSPKAGAKLLLRSGQELKLVFPQQGAQPEKYEALDFQHFFLQPIALPDLEINTRLVLEYVLSHPKWRLSLQTHKILGVK

SEQ ID NO: 34169 - protein, 213 aa, Smithella sp.
  REGION 1..213: note = tr|A0A0Q1A3H2|A0A0Q1A3H2_9DELT 7-carboxy-7-deazaguanine synthase OS=Smithella sp. SDB; OX = 1735324 GN=queE PE=3 SV=1
MSYFIKEIFYSIQGEGFYSGRPAVFCRFAGCNLWSGEETDREKAVCKFCDTDFVGCDGQEGGKYSRPEQLVEKIYRLWLGKNSKAVRPFVVCTGGEPLLQLDTGLIEALHRKGCEVAIETNGTLLPPPGIDWVCVSPKADAKLLLRSGNELKLVFPQFGAEPEKYETLDFQHFFLQPMDSPERETNTRLALEYILTHPKWRLSLQIHKILGVK

SEQ ID NO: 34170 - protein, 204 aa, unidentified
  source 1..204: note = Snodgrassella alvi
  REGION 1..204: note = tr|A0A074V9I7|A0A074V9I7_9NEIS 7-carboxy-7-deazaguanine synthase OS=Snodgrassella alvi SCGC AB-598-J21 OX=1385367 GN=queE PE=3 SV=1
MIQFNIVEIFESLQGEGYNTGMPAIFIRLAACNLKCPWCDTDFMSYQSMSLEHILNTVSQFQGKNIIITGGEPTINKKLPLLLRALKQENYYLAIESNGLGTVDPLIDYIALSPKFYYRHQYPFPLQRQADEVRIVVENHPDFLTFCQNIEQHIQARHYFLSPCEQNNQFNMLTTLQYLGRLNQNRHNNKWLLSIQTHKLANIE

SEQ ID NO: 34171 - protein, 204 aa, unidentified
  source 1..204: note = Snodgrassella alvi
  REGION 1..204: note = tr|A0A1X0TB93|A0A1X0TB93_9NEIS 7-carboxy-7-deazaguanine synthase OS=Snodgrassella alvi; OX = 1196083 GN=queE PE=3 SV=1
MIQFNIVEIFESLQGEGYNTGMPAVFIRLAACNLKCPWCDTDFMSYQSMSLEHILNTVSQFQSKNIIITGGEPTINKKLPLLLRALKQENYYLAIESNGLGTVDPLIDYIALSPKFYYRHQYPFPLQRQADEVRIVVENHPDFLTFCQNIEQHIQARHYFLSPCEQNNQFNMLTTLQYLGRLNQNRHNNKWLLSIQTHKLANIE

SEQ ID NO: 34172 - protein, 204 aa, unidentified
  source 1..204: note = Snodgrassella sp.
  REGION 1..204: note = tr|A0A1C4AX95|A0A1C4AX95_9NEIS 7-carboxy-7-deazaguanine synthase OS=Snodgrassella sp. R-53583 OX=1798181 GN=queE PE=3 SV=1
MTQFNIVEIFESLQGEGYNTGMPAIFIRLAACNLKCPWCDTDFMRYQSMSLQHILDIVQQYQSKNIIITGGEPTIHKKLPLLLQKLKQKNYYIALESNGLGIVDPHIDYIALSPKFHYRQHYPFLAQNRADEVRIVVEDHPEFIAFCQKIEQHIQARHYFLSPCEQNNQFNILTTLQTLGKLNQHRYNNKWLLSLQTHKLANIE

SEQ ID NO: 34173 - protein, 203 aa, unidentified
  source 1..203: note = Snowella sp.
  REGION 1..203: note = tr|A0A2W7B4Z8|A0A2W7B4Z8_9CYAN 7-carboxy-7-deazaguanine synthase OS=Snowella sp.; OX = 2164131 GN=queE PE=3 SV=1
MLALQTLTYPIVETFHSIQGEGAWAGTNAFFIRLGGCDVYCPWCDQKETWNPKRYPQQSIGYLLEQVQAVNPAIAIITGGEPLLYDLLPLTEALREKAIKVHLETSGAHPFSGKFDWVTFSPKSYKLPHPSIYPKASELKVIIGEEKDFQWAEEQSRQISLNIPKYLQPEWNRSESQQLIFNYILCHPQWRMSLQSHKFLGIR

SEQ ID NO: 34174 - protein, 223 aa, Sodalis glossinidius
  REGION 1..223: note = tr|A0A193QH33|A0A193QH33_SODGM 7-carboxy-7-deazaguanine synthase OS=Sodalis glossinidius (strain morsitans) OX=343509 GN=queE PE=3 SV=1
MQYPLNEIFQTLQGEGYFTGVPAIFIRLQGCPVGCSWCDTKHTWQQDEAERVTAGEIPLKTADSSRWASMTAEEIIALMVKQGWTARHVVITGGEPCLHDLMPLTHTLEQQGFSCQIETSGTQEIHCTPQTWVTVSPKINMRGGLPVLAQALGRSDEIKHPAARQSDIDELDALLATLHDTKQRVIALQPISQKEAATRLCIETCIARNWRLSMQTHKYLNIS

SEQ ID NO: 34175 - protein, 223 aa, Sodalis glossinidius
  REGION 1..223: note = tr|Q2NVN6|Q2NVN6_SODGM 7-carboxy-7-deazaguanine synthase OS=Sodalis glossinidius (strain morsitans); OX = 343509 GN=queE PE=3 SV=1
MQYPLNEIFQTLQGEGYFTGVPAIFIRLQGCPVGCSWCDTKHTWQQDEAERVTAGEIPLKTADSSRWASITAEEIIALMVKQGWTARHVVITGGEPCLHDLMPLTHTLEQQGFSCQIETSGTQEIHCTPQTWVTVSPKINMRGGLPVLAQALGRSDEIKHPAARQSDIDELDALLATLHDTKQRVIALQPISQKEAATRLCIETCIARNWRLSMQTHKYLNIS

SEQ ID NO: 34176 - protein, 223 aa, unidentified
  source 1..223: note = Sodalis praecaptivus
  REGION 1..223: note = tr|W0I0C5|W0I0C5_9GAMM 7-carboxy-7-deazaguanine synthase OS=Sodalis praecaptivus OX=1239307 GN=queE PE=3; SV = 1
MQYPLNEIFQTLQGEGYFTGVPAIFIRLQGCPVGCSWCDTKHTWQQDETDHVPAGEIPLKTADSSRWASLTAEEMIAMIAQQGWTARHVVITGGEPCLHDLMPLTHALEQQGYSCQIETSGTQEVHCTPQTWVTVSPKINMRGGLPVLAQALGRSDEIKHPVARQRDIDELDALLQTLHDTKQRVIALQPISQKEAATRLCIETCIARNWRLSMQTHKYLNIA

SEQ ID NO: 34177 - protein, 223 aa, Sodalis sp.
  REGION 1..223: note = tr|A0A4R1NGI0|A0A4R1NGI0_9GAMM 7-carboxy-7-deazaguanine synthase OS=Sodalis sp. 159R; OX = 2529856 GN=queE PE=3 SV=1
MQYPLNELFQTLQGEGYFTGVPAIFIRLQGCPVGCSWCDTKHTWQQDPLEEVPVGDIPLKTADSAKWALVSTEEMLEIITQQGYTARHVVITGGEPCLHDLFALTQMLEQQGYSCQIETSGTHEVRCTSQTWVTVSPKVGMRGGLEILPQALQRADEIKHPVARERDIEQLEALLATLDDDKPRIIALQPVSQQEAATRLCIETCIARNWRLSMQTHKYLNIA

SEQ ID NO: 34178 - protein, 223 aa, Sodalis sp.
  REGION 1..223: note = tr|A0A1J7C540|A0A1J7C540_9GAMM 7-carboxy-7-deazaguanine synthase OS=Sodalis sp. TME1; OX = 1912097 GN=queE PE=3 SV=1
MQYPLNEIFQTLQGEGYFTGVPAIFIRLQGCPVGCSWCDTKHTWQQDETDHVPAGEIPLKTTDSSRWASLTAEEMIAMIAQQGWTARHVVITGGEPCLHDLMPLTHALEQQGFSCQIETSGTQDVHCTPQTWVTVSPKINMRGGLPVLAQALGRSDEIKHPVARQRDIDELDALLQTLHDTKQRVIALQPISQKEAATRLCIETCIARNWRLSMQTHKYLNIA

SEQ ID NO: 34179 - protein, 223 aa, unidentified
  source 1..223: note = Unknown
  REGION 1..223: note = tr|A0A151UKQ6|A0A151UKQ6_9GAMM 7-carboxy-7-deazaguanine synthase OS=Sodalis-like endosymbiont of Proechinophthirus fluctus OX=1462730; GN = queE PE=3 SV=1
MQYPLNEIFQTLQGEGYFTGVPAIFIRLQGCPVGCSWCDTKHSWQQGAADQVATGKIPLKTANNSLWASITVEEMITMIAQQGWAARHVVITGGEPCLHDLIPLTHALEQQGFSCQIETSGTQEVHCTPQTWVTVSPKINMRGGLPVLVQALGRSDEIKHPVARQRDIDELDALLQILHDTKQRIISLQPISQKEAAARLCIKTCIARNWRLSMQTHKYLNIA

SEQ ID NO: 34180 - protein, 213 aa, unidentified
  source 1..213: note = Solemya elarraichensis
  REGION 1..213: note = tr|A0A1T2LAQ1|A0A1T2LAQ1_9GAMM 7-carboxy-7-deazaguanine synthase OS=Solemya elarraichensis gill symbiont OX=1918949 GN=queE PE=3 SV=1
MTQLRITEIFCSLQGESCSVGYATVFVRLTGCPLRCYYCDTTYAYSGGDLLDIDAIVEQVQGNGVPCVTVTGGEPLAQEGAIELLNKLCDAGLTVSLETSGALDIEPVDTRVSRVVDIKTPGSGEASKNLWKNLALLTSNDQVKFVICDRTDFDWSKRILEKYQLTESCEVLFSPSMDEMDATQLADWIVEERLPVRFQLQLHKILWGNKPGV

SEQ ID NO: 34181 - protein, 219 aa, unidentified
  source 1..219: note = Solemya pervernicosa
  REGION 1..219: note = tr|A0A1T2L4T8|A0A1T2L4T8_9GAMM 7-carboxy-7-deazaguanine synthase OS=Solemya pervernicosa gill symbiont OX=642797 GN=queE PE=3 SV=1
MSSNERAQQLRISEIFYSLQGESRSVGWPTVFIRLTGCPLRCNYCDTEYAFTGGESIAIESILEQVAQFGAHHVCVTGGEPLAQKGCLKLLTELCDLGYETSLETSGALDISTVDERVVRVVDVKTPDSGESSRNLLENLQYLTARDQLKFVICSREDYEWSRSIIAEHKLSERCEILFSPIHEAQDPTELAEWILEDRLHVRFQLQLHKLLWRETQGR

SEQ ID NO: 34182 - protein, 213 aa, unidentified
  source 1..213: note = Solemya velesiana
  REGION 1..213: note = tr|A0A1T2KTP4|A0A1T2KTP4_9GAMM 7-carboxy-7-deazaguanine synthase OS=Solemya velesiana gill symbiont OX=1918948 GN=queE PE=3 SV=1
MTRLRITEIFYSLQGESNTVGLPTVFVRLTGCPLRCGYCDTTYAFKGGEWMSLAQILASIIEYTPRYVTVTGGEPMAQKACAKLLTALCDAGYQVSLETSGAVDLSVVDPRVVKVMDLKTPGSGEMEKNLYNNVDTLAATDQVKFVICDEADYLWSRQQVEALGLDGRCEVLFSPALGQQDATELAEWIIRDRLQVRFQIQLHKYLWGDVAGK

SEQ ID NO: 34183 - protein, 213 aa, Solemya velum
  REGION 1..213: note = tr|A0A0B0H5L9|A0A0B0H5L9_SOVGS 7-carboxy-7-deazaguanine synthase OS=Solemya velum gill symbiont OX=2340 GN=queE PE=3 SV=1
MTQLRITEIFCSLQGESRSVGYATVFVRLTGCPLRCYYCDTKYAYSGGTLIDIDAIVEQVQGYAVPYVTVTGGEPLAQEGASELIDKLCDAGLKVSLETSGALDIGSVDTRVSRVLDIKTPGSGEASKNHWNNLSLLTSNDQVKFVICDRNDFDWSKRILEKYQLTDTCEVLFSPSVDEMDATQLADWIVEERLPVRFQLQLHKILWGDKPGV

SEQ ID NO: 34184 - protein, 224 aa, unidentified
  source 1..224: note = Solibacter usitatus
  REGION 1..224: note = tr|Q02CA2|Q02CA2_SOLUE 7-carboxy-7-deazaguanine synthase OS=Solibacter usitatus (strain Ellin6076); OX = 234267 GN=queE PE=3 SV=1
MKIAELFYSIQGEGALLGVPSVFIRTSGCNLRCSWCDTPYTSWRPEGTDLTLEQILDEVGAHPARHVVVTGGEPMIAPDIVALTQRLRARNLHITIETAGTVFEPVACDLMSISPKLANSTPDDARFSRQHERLRIQTPVLAELMARYPYQLKFVISQPGDLEEARSLVETLQADRERVILMPEGVDPARLRERALWLAEICKEEGFRFSPRLHVDLWGDRRGV

SEQ ID NO: 34185 - protein, 245 aa, unidentified
  source 1..245: note = Solimicrobium silvestre
  REGION 1..245: note = tr|A0A2S9GZR9|A0A2S9GZR9_9BURK 7-carboxy-7-deazaguanine synthase OS=Solimicrobium silvestre OX=2099400 GN=queE PE=3 SV=1
MKHKNAHASILVRSTGSFPLSAKLLFIRFFASSALTYSVKEIFYTLQGEGNHAGRPAVFCRFAGCNLWSGREVDRAKAICQFCDTDFVGTDGELGGKFKQAEELADVINGLWPAAYPANKYVVFTGGEPLMQLDAVLINAIHAAGFEIAIETNGTIAVPEGIDWVCVSPKMGAELIVFKGDELKVVIPQTGQDMQKYEQLDFKHFFVQAMDGPLQAENLRKAVNYCKLHPHWKLSLQTHKLLQIP

SEQ ID NO: 34186 - protein, 194 aa, Solimonas aquatica
  REGION 1..194: note = tr|A0A1H9HHB4|A0A1H9HHB4_9GAMM 7-carboxy-7-deazaguanine synthase OS=Solimonas aquatica; OX = 489703 GN=queE PE=3 SV=1
MGWPTVFVRLTGCPLRCQYCDTAYAFHGGQWQSLDDILAQVASYGAAHVCVTGGEPLAQKNCLALLTRLCDAGYQVSLETSGALDIAGVDARVRRIVDIKTPDSGEQARNRWENLDLLQAQDELKFVICSRSDYEWAREQLQTHQLARRCAVLFSPSAAQVAPAQLADWLLADRLPARFQLQLHKILWGNTPGR

SEQ ID NO: 34187 - protein, 224 aa, unidentified
  source 1..224: note = Solimonas fluminis
  REGION 1..224: note = tr|A0A2S5TDK3|A0A2S5TDK3_9GAMM 7-carboxy-7-deazaguanine synthase OS=Solimonas fluminis; OX = 2086571 GN=queE PE=3 SV=1
MSNTAPGSSPEAVRLKITEIFHSLQGESSLAGWPTVFVRLTGCPLRCQYCDTTYSFYGGQYRSLEQVLEEVAGHGARHVCVTGGEPLAQKSCLPLLEALCDAGYVVSLETSGALDIGGVDPRVIRVVDLKTPDSGEQGRNRLANIELLTPRDELKFVLCSRADYDWARGMLAEHRLAERCGVLFSHAHGQLGARELADWIVADRLPVRFQTQLHKALWGSEPGR

SEQ ID NO: 34188 - protein, 224 aa, Solimonas sp.
  REGION 1..224: note = tr|A0A346N1Y2|A0A346N1Y2_9GAMM 7-carboxy-7-deazaguanine synthase OS=Solimonas sp. K1W22B-7 OX=2303331 GN=queE PE=3 SV=1
MSNTAPGSAPEAVRLKITEIFHSLQGESSLVGWPTVFVRLTGCPLRCQYCDTTYSFYGGEWRTLPQILEEVASHGARHVCVTGGEPLAQKNCLPLLAQLCDAGYVVSLETSGALDIGSVDPRVIRVVDLKTPDSGELAKNRLANIELLTPRDELKFVLCSRADYDWARGMLAEHRLAERCGVLFSHAHGQLEARDLADWIIADRLPVRFQTQLHKALWGNQPGR

SEQ ID NO: 34189 - protein, 193 aa, unidentified
  source 1..193: note = Solirubrum puertoriconensis
  REGION 1..193: note = tr|A0A0W8EGS0|A0A0W8EGS0_9BACT 7-carboxy-7-deazaguanine synthase OS=Solirubrum puertoriconensis OX=1751427 GN=queE PE=3 SV=1
MEQFYTIQGEGANAGRAAYFIRLGGCDVGCHWCDVKESWDADAHPRLTIESLIAEVRQHPGRNVVITGGEPLMYDLGPLTQALHAAGCQNWIETSGAHPLSGEWDWICVSPKKFKAPLPEVLLHAHELKVVVFNKSDFAWAEQHAALVGPQCRLFLQPEWSKAAAVTPLIIDYVKQHPQWQVSLQTHKYLDIP

SEQ ID NO: 34190 - protein, 206 aa, Solitalea canadensis
  REGION 1..206: note = tr|H8KQU3|H8KQU3_SOLCM 7-carboxy-7-deazaguanine synthase OS=Solitalea canadensis (strain ATCC 29591 / DSM 3403 / NBRC 15130 / NCIMB 12057 / USAM 9D) OX=929556; GN = que E PE=3 SV=1
MHQIPEDGTSLPLMEEFYTIQGEGFNTGKAAYFIRLGGCDVGCHWCDVKESWDAELHPLTPADTIVDNASKFPSKAVVVTGGEPLIYNLEYLTRQLQSKGIKTFIETSGAYPLSGNWDWICLSPKKFKAPRPDILPLAHELKVIVFNKSDFEWAEQHAKSVSADCKLYLQPEWSKAKEMTPLIVEYVMNNPKWEISLQTHKYLNIP

SEQ ID NO: 34191 - protein, 210 aa, Solitalea koreensis
  REGION 1..210: note = tr|A0A521BLM8|A0A521BLM8_9SPHI 7-carboxy-7-deazaguanine synthase OS=Solitalea koreensis; OX = 543615 GN=queE PE=3 SV=1
MSSVLNKIPTDGTLLPLMEEFYTIQGEGFNTGKAAYFIRLGGCDVGCHWCDVKESWDAELHPLTNSDIIVENAGKFPSKAVVVTGGEPLLYNLDYLTSELQKKGIKTFIETSGAYPLSGSWDWICLSPKKFKSPRPDILPLANELKVIVFNKSDFDWAEQHAAHVSDKCKLYLQPEWSKHSEMTPLIVDYVMNNPRWEISLQTHKYLNIP

SEQ ID NO: 34192 - protein, 207 aa, unidentified
  source 1..207: note = Solitalea longa
  REGION 1..207: note = tr|A0A2S5A0C2|A0A2S5A0C2_9SPHI 7-carboxy-7-deazaguanine synthase OS=Solitalea longa; OX = 2079460 GN=queE PE=3 SV=1
MSVQVPEDGTLLPLMEEFYTIQGEGFNTGKAAYFIRLGGCDVGCHWCDVKESWDAELHPLTKADVIVDHASQYPSKAVVVTGGEPLIYNLEYLTKELQNKGIKTFIETSGAYPLSGSWDWVCLSPKKFKAPRPDILPLADELKVIVFNKSDFEWAEQHAANVSANCKLYLQPEWSKAKEMIPLIVEYVMNNPKWEISLQTHKYLNIP

SEQ ID NO: 34193 - protein, 210 aa, Soonwooa buanensis
  REGION 1..210: note = tr|A0A1T5G2S7|A0A1T5G2S7_9FLAO 7-carboxy-7-deazaguanine synthase OS=Soonwooa buanensis; OX = 619805 GN=queE PE=3 SV=1
MTKEQEDLLLKEGKMLPVMEHFYTIQGEGFHAGKAAYFIRLGGCDVGCHWCDVKESWDPTLHPLMSTEEIAETAAKYCKTIVLTGGEPLMWNLDLLTSKLKSLGCTIHIETSGAYPMSGQLDWITLSPKKTGLPLDDIYKVANELKVIVFNNNDLKFAEEQAARVNPNCELFLQSEWSKKDANYPKITDFILEHPEWRSSIQTHKYLNIP

SEQ ID NO: 34194 - protein, 242 aa, unidentified
  source 1..242: note = Sorangiineae bacterium
  REGION 1..242: note = tr|A0A1W9Q8F4|A0A1W9Q8F4_9DELT 7-carboxy-7-deazaguanine synthase OS=Sorangiineae bacterium NIC37A_2 OX=1970199 GN=queE PE=3 SV=1
MTPAPEQTLLVSERFVSLQGEGVSQGQPAAFLRLGRCNLTCTFCDTPYTWDFENYSYDEELSEVIQDELVAWVLRESPGRLIVTGGEPLIQQKQLAIFFATLDRARQETGGLLEFIEIETNGTVKPRPELEARVNQWNVSPKLKNSGEPRERAVRPDALGRFAELDGAYFKFVVRDEADAEEALGLVRSLSLPTHKVLFMPEARDASDLKERGPRVAELALRARVRYSGRMHLELFGGGRGV

SEQ ID NO: 34195 - protein, 217 aa, Sorangium cellulosum
  REGION 1..217: note = tr|A0A4P2QNN2|A0A4P2QNN2_SORCE 7-carboxy-7-deazaguanine synthase OS=Sorangium cellulosum; OX = 56 GN=queE PE=3 SV=1
MKEDTLVVHEIYASVQGESTFAGLPCTFVRLTGCNLRCAWCDTSQAFYGGKRLRRSDVLERALALGTSLVELTGGEPLLQPGSLPLLKELCDAGRTVLVETSGEADVSRVDPRVHKIMDLKAPGSGESHRNRWSNLDHLTPRDEIKFVLADRADYEWMRDTIRERRLDARGVTLLASCVWGKLAPRDLVQWVLDDGLRVRVQVQLHKVIWGADAQGV

SEQ ID NO: 34196 - protein, 217 aa, Sorangium cellulosum
  REGION 1..217: note = tr|A9G6T5|A9G6T5_SORC5 7-carboxy-7-deazaguanine synthase OS=Sorangium cellulosum (strain So ce56); OX = 448385 GN=queE PE=3 SV=1
MKEDTLVVHEIYASVQGESTFAGLPCTFVRLTGCNLRCAWCDTSQAFYGGKRIRRGEVLERALALGTPLVELTGGEPLLQPGSFPLLAELCDAGRTVLVETSGEADVSRVDPRVHKIMDLKAPGSGESHRNRWSNLDHLTPRDEIKFVLADRADYAWMRDTIRERRLDARGVTLLASCVWGKLSPKELVQWVLDDGLRVRVQVQLHKVIWGADAQGV

SEQ ID NO: 34197 - protein, 218 aa, unidentified
  source 1..218: note = Spartobacteria bacterium
  REGION 1..218: note = tr|A0A2T6CXX6|A0A2T6CXX6_9BACT 7-carboxy-7-deazaguanine synthase OS=Spartobacteria bacterium LR76 OX=2161866 GN=queE PE=3 SV=1
MDENAKLTINEIYLSVQGESTWAGLPCVFIRLTGCDLRCSYCDTEYAFYEGKKRLVSEVLAEVSDMPCPMVEVTGGEPLLQKNVKPLMAALCDAGKTVLIETSGAHDISGIDSRVHRIVDLKTPSSGESGRNRYENIPHLTERDEVKFVLGSREDYEWAREQIGRYDLGTRVRAVLLSPVFGKIDPKDIVQWMLDDQLPARFQLQMHKFIWEPRARGV

SEQ ID NO: 34198 - protein, 217 aa, unidentified
  source 1..217: note = Spartobacteria bacterium
  REGION 1..217: note = tr|A0A3C0R7I7|A0A3C0R7I7_9BACT 7-carboxy-7-deazaguanine synthase OS=Spartobacteria bacterium OX=2052183 GN=queE PE=3 SV=1
MSEKTLTINEIYQSIQGESTWAGQRCVFVRLTFCNLRCNYCDTEYAFYEGKKQTLNEVVDLVAAFNCPLVEITGGEPLLQKNVLPLMSMLADAGHTILLETSGAHDISKVDPRVHRIMDLKTPGSGEVERNLWSNIDHLTLLDEVKFVVGSREDYEWSCEKVQRFNLSKRCHAVLFSPIFGRIDPRQIVEWILADQLDVRFQLQMHKFIWTPTQRGV

SEQ ID NO: 34199 - protein, 204 aa, Sphaerisporangium sp.
  REGION 1..204: note = tr|A0A366LX56|A0A366LX56_9ACTN 7-carboxy-7-deazaguanine synthase OS=Sphaerisporangium sp. LHW63015 OX=2248750 GN=queE PE=3 SV=1
MFIRLSRCNLSCGFCDTPYTWDWARYDPHHEARWQSVAELAEWAGGHSPRLVVITGGEPLIQQDRLLPLVDVLIADGRRVEIETNGTIAPTPGLVREGVQFNVSPKLGNAGLAEDHRIVPAALTALADTGNAIFKFVATEPADLAEVAELEERYALAPIWVMPEGTTTQAVLDRARQLADQVIARGWNLSLRLQVLLWEGERGR

SEQ ID NO: 34200 - protein, 204 aa, Sphaerisporangium sp.
  REGION 1..204: note = tr|A0A2W2HLM9|A0A2W2HLM9_9ACTN 7-carboxy-7-deazaguanine synthase OS=Sphaerisporangium sp. 7K107 OX=2070365 GN=queE PE=3 SV=1
MFIRLSRCNLRCGFCDTPYTWDWARYDPHHEARWQPVAELAEWVGGHSPRLVVITGGEPLLQQDRLLPLVDALIADGRRVEIETNGTIAPTPGLVREGVQFNVSPKLGNAGLAEDHRIVPAVLTALANTGNAIFKFVATEPADLAEVAELEERYALAPIWVMPEGTTTQAVLDRVRQLADQVIARGWSLSLRLQVLLWEAERGR

SEQ ID NO: 34201 - protein, 264 aa, unidentified
  source 1..264: note = Sphaerospermopsis kisseleviana
  REGION 1..264: note = tr|A0A1Z4UQ10|A0A1Z4UQ10_9CYAN 7-carboxy-7-deazaguanine synthase OS=Sphaerospermopsis kisseleviana NIES-73 OX=1973480 GN=queE PE=3 SV=1
MIAKTKVKPTARLIEVFSAIQGEGLNVGTRQIFIRFAICDLRCHFCDSSHTWNAPSVCQIERSPGLRDFEIHSNPIPLSTLIKWVERQNLPFLHDSISLTGGEPLLHAPFLAQFLPEVRSLNLPIYLETGGHRPEQLDMILPYLDSVGMDLKLPSVSGESHWTEHEKFLQICFDANLEIFVKIIVSQRTDPGELERAALLVNGICQDIPIFLQPVTPLAESQKFSQVAVEAPTPNQVLEWQALMKRFVKQVRVIPQTHKMLRQL

SEQ ID NO: 34202 - protein, 264 aa, unidentified
  source 1..264: note = Sphaerospermopsis reniformis
  REGION 1..264: note = tr|A0A480A5G4|A0A480A5G4_9CYAN 7-carboxy-7-deazaguanine synthase OS=Sphaerospermopsis reniformis OX=531300 GN=queE PE=3 SV=1
MIAKTKVKPTARLIEVFSAIQGEGLNVGTRQIFIRFAICDLRCHFCDSSHTWNAPSVCQIERSPGLRDFEIHSNPIPLSTLIKWVERQNLPFLHDSISLTGGEPLLHAPFLAQFLPEVRSLNLPIYLETGGHRPEQLDMILPYLDSVGMDLKLPSVSGESHWTEHEKFLQICFDANLEIFVKIIVSQRTDPGELERAALLVNGICQDIPIFLQPVTPLAESQKFSQVVVEAPTPNQVLEWQALMKRFVKQVRVIPQTHKMLRQL

SEQ ID NO: 34203 - protein, 187 aa, Sphaerotilus hippei
  REGION 1..187: note = tr|A0A318HAX7|A0A318HAX7_9BURK 7-carboxy-7-deazaguanine synthase OS=Sphaerotilus hippei; OX = 744406 GN=queE PE=3 SV=1
MFCRFAGCNLWSGREADRAGAVCRFCDTDFVGTDGTLGGKYERADTLADAVASQWPAGTRPGLVVLTGGEPLLQVDGALIDALHARGFTLAVETNGTIAAPPGLDWICVSPKAGSTLVQTSGHELKVVVPQAGQDLEALAALPFEHHFLQPMDDLLAREHQRLAIELCLRDPRWRLSVQTHKVMGIR

SEQ ID NO: 34204 - protein, 214 aa, Sphaerotilus natans
  REGION 1..214: note = tr|A0A5C1PVI7|A0A5C1PVI7_9BURK 7-carboxy-7-deazaguanine synthase OS=Sphaerotilus natans subsp. sulfidivorans OX=639200 GN=queE PE=3 SV=1
MSYAVKEIFYTLQGEGAQAGRAAVFCRFAGCNLWSGRESDRAAAVCTFCDTDFVGTDGQNGGKFAGADALADAVAARWPGGVAGAAGRPYVVCTGGEPLLQLDDALVEAFHARGFEVAVETNGTQPAPAGLDWICVSPKADAPLLLTAGDELKLVYPQPLALPERFAGLAFDHFFLQPMDGPERLAHTRAATDYCMAHPQWRLGVQMHKIVGIE

SEQ ID NO: 34205 - protein, 131 aa, unidentified
  source 1..131: note = Sphingobacteriaceae bacterium
  REGION 1..131: note = tr|A0A4Q6DN63|A0A4Q6DN63_9SPHI 7-carboxy-7-deazaguanine synthase QueE (Fragment); OS = Sphingobacteriaceae bacterium OX=2021370 GN=EOP47_30290; PE = 4 SV=1
NVVVTGGEPLIYNMDYLTAKLHQRGVKTFIETSGAYPLSGNWDWICLSPKKFKAPTPGVAAAAHELKVIIFNKSDFEFAEQNAKMVSADCKLFLQPEWSKAKEMTPLIVDYVMNNPQWEISLQTHKFLNIP

SEQ ID NO: 34206 - protein, 207 aa, unidentified
  source 1..207: note = Sphingobacteriaceae bacterium
  REGION 1..207: note = tr|A0A1X9Z3I3|A0A1X9Z3I3_9SPHI 7-carboxy-7-deazaguanine synthase OS=Sphingobacteriaceae bacterium GW460-11-11-14-LB5 OX=1986952 GN=queE PE=3 SV=1
MKQEIPEDGTLLPLMEEFYTIQGEGFNTGKAAYFIRLGGCDVGCHWCDVKESWDAEMHPLTPSDVIVENADKFPGKAVVITGGEPLIYNLDYLTNKLKERGILTFIETSGAYPLSGNWDWICLSPKKFKAPRPDITPFAHELKVIVFNKSDFKWAEEYAAMVSPTCKLYLQPEWSKSKEITPLIIEYVMANPKWEISLQTHKFLNIP

SEQ ID NO: 34207 - protein, 207 aa, unidentified
  source 1..207: note = Sphingobacteriales bacterium
  REGION 1..207: note = tr|A0A258WXY9|A0A258WXY9_9SPHI 7-carboxy-7-deazaguanine synthase OS=Sphingobacteriales bacterium 16-39-50 OX=1970581 GN=queE PE=3 SV=1
MAHQIPSDGTLLPLMEEFYTIQGEGFHSGKAAYFIRLGGCDVGCHWCDVKESWDAELHPLTYTDQIVKNAEKYPGKAVVVTGGEPLIYNLDYLTSELQKRGIKTFIETSGAYPLSGTWDWICLSPKKFKAPRPDIAPLAGELKVIVFNKSDFKWAEDYAATVSEGCKLYLQPEWSKSSEVIPLIIDYVMENPKWEISLQTHKYLNIP

SEQ ID NO: 34208 - protein, 193 aa, unidentified
  source 1..193: note = Sphingobacteriales bacterium
  REGION 1..193: note = tr|A0A2P7TSI3|A0A2P7TSI3_9SPHI 7-carboxy-7-deazaguanine synthase OS=Sphingobacteriales bacterium UPWRP_1 OX=2116516 GN=queE PE=3 SV=1
MEQFYTIQGEGAYQGSAAVFIRLGGCDVGCVWCDVKESWNAGNHPQTDITDIIRESGKYESEICVITGGEPLMHNLTALCTGLQKAGKRTHVETSGAHPLTGKWDWICLSPKKFKFPLPEVVAVANELKVVVYHPSDFAWAEQFAAKVPANCQLFLQPEWSKTNTILPLIVDYVKQHPKWQISLQIHKYMNIP

SEQ ID NO: 34209 - protein, 203 aa, unidentified
  source 1..203: note = Sphingobacteriia bacterium
  REGION 1..203: note = tr|A0A259HN41|A0A259HN41_9BACT 7-carboxy-7-deazaguanine synthase OS=Sphingobacteriia bacterium 39-39-8 OX=1970578 GN=queE PE=3 SV=1
MQITNTSLPVMEAFYTLQGEGYHQGRAAYFIRLGGCDVGCVWCDVKDSWDADKHPKISIEAIVAQACKYPGRLAVITGGEPLLHQLDELTKALQDKGFETNIETSGSSPMSGQWDWICLSPKKFKAPVPANLALAQELKVVVFNKHDFEWAELHAAEVAPTCKLYLQPEWDKAAEITPLIVDYIKAHPQWELSLQTHKYINVP

SEQ ID NO: 34210 - protein, 206 aa, unidentified
  source 1..206: note = Sphingobacteriia bacterium
  REGION 1..206: note = tr|A0A1G3J6H1|A0A1G3J6H1_9BACT 7-carboxy-7-deazaguanine synthase OS=Sphingobacteriia bacterium RIFOXYD2_FULL_35_12 OX=1802167 GN=queE PE=3 SV=1
MRAAVNNTLALPVMEAFYTLQGEGAHQGRAAYFIRLGGCDVGCVWCDVKDSWDVTKHPLVSIDEIVAKAVSYPGRLAVVTGGEPLMHHLDALTDALHAAGFETNIETSGSSPLSGNWDWICLSPKKFKAPLDEVIVKAHELKVVVFNKHDFEWAEKYAALVNSSCKLYLQPEWDKAAEMTPLILAYIQANPQWRLSLQVHKYLNIP

SEQ ID NO: 34211 - protein, 207 aa, unidentified
  source 1..207: note = Sphingobacterium alimentarium
  REGION 1..207: note = tr|A0A4R3VRD6|A0A4R3VRD6_9SPHI 7-carboxy-7-deazaguanine synthase OS=Sphingobacterium alimentarium OX=797292 GN=queE PE=3 SV=1
MSHQVPEDGSLLPLMEEFYTIQGEGYHTGKAAYFIRLGGCDVGCHWCDVKESWDASLHPLTHTDTIVHNAKQHPAQTVVITGGEPLLYNLDSLTLKLKDQGIQTFIETSGAYPLSGHWDWICLSPKKFKSPLPEVSAAAGELKVIIFNKSDFLWAEEHASRVNPACKLYLQPEWSKAAEVTPLIIDYVKDNPKWNISLQTHKYLNIP

SEQ ID NO: 34212 - protein, 207 aa, unidentified
  source 1..207: note = Sphingobacterium alkalisoli
  REGION 1..207: note = tr|A0A4U0GWQ1|A0A4U0GWQ1_9SPHI 7-carboxy-7-deazaguanine synthase OS=Sphingobacterium alkalisoli OX=1874115 GN=queE PE=3 SV=1
MSHQVPEDGTQLPLMEEFYTIQGEGYHTGKAAYFIRLGGCDVGCHWCDVKESWNAELHPLTSADQIVKNATQYPSKTVVITGGEPLIYNLDYLTRKLKEAGIKTFIETSGAYPLSGFWDWICLSPKKFKGPRPDVLNAAGELKIIIFNKSDFEWAEEHAKFVGDQCRLYLQPEWSKASEMTPLIIDYVKNNPKWEISLQTHKYLNIP

SEQ ID NO: 34213 - protein, 207 aa, unidentified
  source 1..207: note = Sphingobacterium cellulitidis
  REGION 1..207: note = tr|A0A235E4N4|A0A235E4N4_9SPHI 7-carboxy-7-deazaguanine synthase OS=Sphingobacterium cellulitidis OX=1768011 GN=queE PE=3 SV=1
MSNQVPEDGTFLPLMEEFYTIQGEGYHTGKAAYFIRLGGCDVGCHWCDVKESWDAELHPLTSADVIVEHALQHPAKTVVITGGEPLLYNLTYLTQKLKEAGIKIFLETSGAYPLTGYWDWICLSPKKFKGPREDVLSAAGELKVIVFNKSDFQWAEDHAKFVNANCKLYLQPEWSKAAEMTPLIINYVKDNPRWEISLQTHKYLNIP

SEQ ID NO: 34214 - protein, 207 aa, Sphingobacterium daejeonense
  REGION 1..207: note = tr|A0A4U9K7K1|A0A4U9K7K1_9SPHI 7-carboxy-7-deazaguanine synthase OS=Sphingobacterium daejeonense OX=371142 GN=queE PE=3 SV=1
MSNQVPEDGTFLPLMEEFYTIQGEGYHTGKAAYFIRLGGCDVGCHWCDVKESWDAELHPLTSADVIVEHALQHPAKTVVITGGEPLLYNLTYLTQKLKEAGIKIFLETSGAYPLTGYWDWICLSPKKFKGPREDVLSAAGELKVIVFNKSDFQWAEDHAKFVNANCKLYLQPEWSKAAEMTPLIIDYVKDNPKWEISLQTHKYLNIP

SEQ ID NO: 34215 - protein, 207 aa, unidentified
  source 1..207: note = Sphingobacterium deserti
  REGION 1..207: note = tr|A0A0B8TAG8|A0A0B8TAG8_9SPHI 7-carboxy-7-deazaguanine synthase OS=Sphingobacterium deserti OX=1229276 GN=queE PE=3 SV=1
MSNQVPEDGTLLPLMEDFYTIQGEGYHTGKAAYFIRLGGCDVGCHWCDVKESWDANLHPLTAADEIVENAKRHPAKTVVITGGEPLIYNLDYLTRALKAAGIQTFIETSGAYPLSGFWDWICLSPKKFKGPRPDVLNAAGELKVIIFNKSDFQWAEEHAKFVGKNCKLYLQPEWSKASEMTPLIVEYVKENPHWEISLQTHKYLNIP

SEQ ID NO: 34216 - protein, 214 aa, unidentified
  source 1..214: note = Sphingobacterium detergens
  REGION 1..214: note = tr|A0A420BJ61|A0A420BJ61_9SPHI 7-carboxy-7-deazaguanine synthase OS=Sphingobacterium detergens OX=1145106 GN=queE PE=3 SV=1
MQTQILTMSNQVPEDGTRLPLMEEFYTIQGEGYHTGTAAYFIRLGGCDVGCHWCDVKESWDASIHPLTAADSIIENAKKYPAKTVVITGGEPLIYNLDYLTKGLHAAGIKTFIETSGAYPLSGEWDWICLSPKKFKAPRKDVLDAAGELKVIVFNKSDFAWGEEYAQLVGPNCKLYLQPEWSKSKEMTPSIIDYVKENPKWDISLQTHKFLNIP

SEQ ID NO: 34217 - protein, 207 aa, Sphingobacterium faecium
  REGION 1..207: note = tr|A0A2T5YB00|A0A2T5YB00_9SPHI 7-carboxy-7-deazaguanine synthase OS=Sphingobacterium faecium OX=34087 GN=queE PE=3 SV=1
MSHQVPEDGTLLPLMEEFYTIQGEGFHTGKAAYFIRLGGCDVGCHWCDVKESWDATLHPLTTADQIIENAKKYPAKTVVITGGEPLIYNLDYLTKGLHEAGIQTFIETSGAYPLSGEWDWICLSPKKFKAPRKDVLEAAGELKVIVFNKSDFEWAEEHSKLVNSNCKLYLQPEWSKYSEMTPLIIDHVKDNPKWNISLQTHKYLNIP

SEQ ID NO: 34218 - protein, 207 aa, unidentified
  source 1..207: note = Sphingobacterium gobiense
  REGION 1..207: note = tr|A0A2S9JUJ2|A0A2S9JUJ2_9SPHI 7-carboxy-7-deazaguanine synthase OS=Sphingobacterium gobiense OX=1382456 GN=queE PE=3 SV=1
MSNQVPEDGTLLPLMEEFYTIQGEGYHTGKAAYFIRLGGCDVGCHWCDVKESWDAELHPLTSADAIIENAKKFPAKTVVITGGEPLLYNLDYLTRGLKEAGIQTFIETSGAYPLSGYWDWICLSPKKFKGPRPDVLNAAGELKVIVFNKSDFQWAEEHARFVGKNCKLYLQPEWSKTTEMTPLIIEYVKDNPQWEISLQTHKYLNIP

SEQ ID NO: 34219 - protein, 207 aa, unidentified
  source 1..207: note = Sphingobacterium haloxyli
  REGION 1..207: note = tr|A0A2S9J756|A0A2S9J756_9SPHI 7-carboxy-7-deazaguanine synthase OS=Sphingobacterium haloxyli OX=2100533 GN=queE PE=3 SV=1
MSNQVPEDGTLLPLMEEFYTIQGEGYHTGKAAYFIRLGGCDVGCHWCDVKESWDAELHPLTSAEAIIENAKKFPAKTVVITGGEPLLYNLDYLTRGLKEAGIQTFIETSGAYPLSGYWDWICLSPKKFKGPRPDVLNAAGELKVIVFNKSDFQWAEEHARFVSKNCKLYLQPEWSKSAEMTPLIIEYVKDNPQWEISMQTHKYLNIP

SEQ ID NO: 34220 - protein, 207 aa, unidentified
  source 1..207: note = Sphingobacterium lactis
  REGION 1..207: note = tr|A0A1H5WMR5|A0A1H5WMR5_9SPHI 7-carboxy-7-deazaguanine synthase OS=Sphingobacterium lactis OX=797291 GN=queE PE=3 SV=1
MSNQVPADGTFLPLMEEFYTIQGEGYHTGKAAYFIRLGGCDVGCHWCDVKESWDAALHPLTAAEVIVDNAKKHPAKTVVITGGEPLLYNLTYLTQKLKEAGIKIFLETSGAYPLTGYWDWICLSPKKFKGPREDVLSAAGELKVIVFNKSDFQWAEEHAKFVNANCKLYLQPEWSKAAEMTPLIIDYVKDNPKWEISLQTHKYLNIP

SEQ ID NO: 34221 - protein, 207 aa, Sphingobacterium mizutaii
  REGION 1..207: note = tr|A0A239XE02|A0A239XE02_9SPHI 7-carboxy-7-deazaguanine synthase OS=Sphingobacterium mizutaii OX=1010 GN=queE PE=3 SV=1
MSNQVPEDGTFLPLMEEFYTIQGEGYHTGKAAYFIRLGGCDVGCHWCDVKESWDAEMHPLTSADTIVEHALQHPAKTVVITGGEPLLYNLTYLTQKLKEAGIKIFLETSGAYPLTGYWDWICLSPKKFKGPREDVLSAAGELKVIVFNKSDFQWAEEHAKFVSSNCKLYLQPEWSKAAEMTPLIIDYVKDNPRWEISLQTHKYLNIP

SEQ ID NO: 34222 - protein, 214 aa, Sphingobacterium multivorum
  REGION 1..214: note = tr|A0A380DAD0|A0A380DAD0_SPHMU 7-carboxy-7-deazaguanine synthase OS=Sphingobacterium multivorum OX=28454 GN=queE PE=3 SV=1
MQTEILTMSNQVPEDGTLLPLMEEFYTIQGEGYHTGTAAYFIRLGGCDVGCHWCDVKESWDASIHPLTAADSIIENAKKYPAKTVVITGGEPLIYNLDYLTKGLHEAGIKTFIETSGAYPLSGEWDWICLSPKKFKAPRKDVLEAAGELKVIVFNKSDFAWGEEYAQLVGPNCRLYLQPEWSKSKEMTPSIIDYVKENPKWDISLQTHKFLNIP

SEQ ID NO: 34223 - protein, 214 aa, Sphingobacterium multivorum
  REGION 1..214: note = tr|A0A2X2JFG1|A0A2X2JFG1_SPHMU 7-carboxy-7-deazaguanine synthase OS=Sphingobacterium multivorum OX=28454 GN=queE PE=3 SV=1
MQTEILTMSNQVPEDGTLLPLMEEFYTIQGEGYHTGTAAYFIRLGGCDVGCHWCDVKESWDASIHPLTTADSIIENAKKYPAKTVVITGGEPLIYNLDYLTKGLHEAGIKTFIETSGAYPLSGEWDWICLSPKKFKAPRKDVLEAAGELKVIVFNKSDFAWGEEYAQLVGQNCRLYLQPEWSKSKEMTPSIIDYVKENPKWDISLQTHKFLNIP

SEQ ID NO: 34224 - protein, 232 aa, unidentified
  source 1..232: note = Sphingobacterium nematocida
  REGION 1..232: note = tr|A0A1T5CND7|A0A1T5CND7_9SPHI 7-carboxy-7-deazaguanine synthase OS=Sphingobacterium nematocida OX=1513896 GN=queE PE=3 SV=1
MEFKLFTCVILGLFILPLQAIKYMIMSHQVPENGTKLPLMEEFYTIQGEGFHTGKAAYFIRLGGCDVGCHWCDVKESWDAELHPLTDAETIVENAKKHPAKTVVITGGEPLIYNLDYLTQRLKEEGIKTFIETSGAYPLSGVWDWICLSPKKFKGPKEDVLQAAGELKVIVFNKSDFKWAEEHAKMVGPNCKLYLQPEWSKSNEITPLIIEYVKDHPHWDISLQTHKFLNIP

SEQ ID NO: 34225 - protein, 207 aa, unidentified
  source 1..207: note = Sphingobacterium paludis
  REGION 1..207: note = tr|A0A4R7D7N3|A0A4R7D7N3_9SPHI 7-carboxy-7-deazaguanine synthase OS=Sphingobacterium paludis OX=1476465 GN=queE PE=3 SV=1
MSNQVPEDGTLLPLMEEFYTIQGEGYHTGKAAYFIRLGGCDVGCHWCDVKESWDANLHPLTAADQIVENAKKHPAKTVVITGGEPLIYNLDYLTRALKAAGIQTFIETSGAYPLSGFWDWICLSPKKFKGPRPDVLNAAGELKVIVFNKSDFQWAEEHAKFVGKNCKLYLQPEWSKAAEMTPLIIDYVKENPQWEISLQTHKYLNIP

SEQ ID NO: 34226 - protein, 207 aa, unidentified
  source 1..207: note = Sphingobacterium paucimobilis
  REGION 1..207: note = tr|U2J4V1|U2J4V1_9SPHI 7-carboxy-7-deazaguanine synthase OS=Sphingobacterium paucimobilis HER1398; OX = 1346330 GN=queE PE=3 SV=1
MSHQVPENGSKLPLMEEFYTIQGEGFHTGKAAYFIRLGGCDVGCHWCDVKESWDAELHPLTDAETIVENAKKHPAKTVVITGGEPLIYNLDYLTQRLKDEGIKTFIETSGAYPLSGTWDWICLSPKKFKAPKLEVLQVAGELKVIVFNKSDFKWAEEHAKMVGPNCRLYLQPEWSKATEITPLIIEYVKDNPHWDISLQTHKFLNIP

SEQ ID NO: 34227 - protein, 207 aa, unidentified
  source 1..207: note = Sphingobacterium psychroaquaticum
  REGION 1..207: note = tr|A0A1X7HVV4|A0A1X7HVV4_9SPHI 7-carboxy-7-deazaguanine synthase OS=Sphingobacterium psychroaquaticum OX=561061 GN=queE PE=3 SV=1
MSNQVPEDGSLLPLMEEFYTIQGEGYHMGKAAYFIRLGGCDVGCHWCDVKESWDANLHPLTPADTIIENAKKHPSKTVVITGGEPLLYNLDYLTKGLKEAGIQTFMETSGAYPLSGFWDWICLSPKKFKGPRPDVLNAAGELKVIVFNKSDFQWAEEHARFVGKDCKLYLQPEWSKSAEMTPLIIDYVKENPRWEISLQTHKYLNIP

SEQ ID NO: 34228 - protein, 214 aa, Sphingobacterium siyangense; identical to SEQ ID NO: 34223
  REGION 1..214: note = tr|A0A562MYA8|A0A562MYA8_9SPHI 7-carboxy-7-deazaguanine synthase OS=Sphingobacterium siyangense OX=459529 GN=queE PE=3 SV=1

SEQ ID NO: 34229 - protein, 207 aa, Sphingobacterium siyangense
  REGION 1..207: note = tr|A0A420GAT0|A0A420GAT0_9SPHI 7-carboxy-7-deazaguanine synthase OS=Sphingobacterium siyangense OX=459529 GN=queE PE=3 SV=1
MSNQVPEDGTLLPLMEEFYTIQGEGYHTGTAAYFIRLGGCDVGCHWCDVKESWDASIHPLTTADSIIENAKKYPAKTVVITGGEPLIYNLDYLTKGLHEAGIKTFIETSGAYPLSGEWDWICLSPKKFKAPRKDVLEAAGELKVIVFNKSDFAWGEEYAQLVGQNCRLYLQPEWSKSKEMTPSIIDYVKENPKWDISLQTHKFLNIP

SEQ ID NO: 34230 - protein, 207 aa, Sphingobacterium sp.
  REGION 1..207: note = tr|A0A4V1B3B0|A0A4V1B3B0_9SPHI 7-carboxy-7-deazaguanine synthase OS=Sphingobacterium sp. CZ-2 OX=2557994 GN=queE PE=3 SV=1
MSNQVPADGSMLPLMEEFYTIQGEGYHTGKAAYFIRLGGCDVGCHWCDVKESWDADLHPLTSAETIVENAKKFPAKTVVITGGEPLLYNLSYLTQKLKEAGIQIFLETSGAYPLTGYWDWICLSPKKFKGPRPDVLSAAGELKVIVFNKSDFTWAEEHAKFVGSTCKLYLQPEWSKAAEMTPLIIDYVKDNPKWEISLQTHKYLNIP

SEQ ID NO: 34231 - protein, 207 aa, Sphingobacterium sp.
  REGION 1..207: note = tr|A0A4R2ZVL5|A0A4R2ZVL5_9SPHI 7-carboxy-7-deazaguanine synthase OS=Sphingobacterium sp. JUb78 OX=2485111 GN=queE PE=3 SV=1
MSHQVPEDGTLLPLMEEFYTIQGEGFHTGKAAYFIRLGGCDVGCHWCDVKESWDATLHPLTSADQIIENAKKYPAKTVVITGGEPLIYNLDYLTRGLHAAGIQTFIETSGAYPLSGEWDWICLSPKKFKAPRKDVLEAAGELKVIVFNKSDFEWAEEHSKLVNNDCKLYLQPEWSKYPEMTPLIIDHVKDNPKWNISLQTHKYLNIP

SEQ ID NO: 34232 - protein, 207 aa, Sphingobacterium spiritivorum
  REGION 1..207: note = tr|D7VPY8|D7VPY8_9SPHI 7-carboxy-7-deazaguanine synthase OS=Sphingobacterium spiritivorum ATCC 33861; OX = 525373 GN=queE PE=3 SV=1
MSLQVPENGQQLPLMEEFYTIQGEGYHTGKAAYFIRLGGCDVGCHWCDVKESWDAELHPLTAADTIVEHANVHPSKTVVVTGGEPLIYNLDYLTSQLQNAGIQTFLETSGAYPLSGHWDWICLSPKKFKAPRPDVLANAGELKVIVFNKSDFQWAEEHARLVSDTCKLYLQPEWSKAAEMTPLIIDYVMANPKWEISLQTHKYLNIP

SEQ ID NO: 34233 - protein, 207 aa, Sphingobacterium spiritivorum; identical to SEQ ID NO: 34232
  REGION 1..207: note = tr|A0A380CQI9|A0A380CQI9_9SPHI 7-carboxy-7-deazaguanine synthase OS=Sphingobacterium spiritivorum OX=258 GN=queE PE=3 SV=1

SEQ ID NO: 34234 - protein, 207 aa, Sphingobacterium thalpophilum
  REGION 1..207: note = tr|A0A4U9W5W5|A0A4U9W5W5_9SPHI 7-carboxy-7-deazaguanine synthase OS=Sphingobacterium thalpophilum OX=259 GN=queE PE=3 SV=1
MSNQVPEDGTRLPLMEEFYTIQGEGYHTGTAAYFIRLGGCDVGCHWCDVKESWDASIHPLTAADAIIENAKKYPAKTVVITGGEPLIYNLDYLTKGLHVAGIKTFIETSGAYPLSGEWDWICLSPKKFKAPRKDVLDAAGELKVIVFNKSDFAWGEQYAQLVGPDCRLYLQPEWSKSKEMTPLIIDYVKENPKWDISLQTHKYLNIP

SEQ ID NO: 34235 - protein, 207 aa, Sphingobacterium wenxiniae
  REGION 1..207: note = tr|A0A1I6SXA0|A0A1I6SXA0_9SPHI 7-carboxy-7-deazaguanine synthase OS=Sphingobacterium wenxiniae OX=683125 GN=queE PE=3 SV=1
MARQVPEDGSLLPLMEEFYTIQGEGYHTGKAAYFIRLGGCDVGCHWCDVKESWDAELHPLTPADEIIENAKKYPAKTVVITGGEPLIYNLDYLTRGLKEAGIQTFIETSGAYTLSGYWDWICLSPKKFKGPRPDVLNAAGELKVIVFNKSDFQWAEEHARFVGKNCKLYLQPEWSKAAEMTPLIIDYVKEHPQWEISLQTHKYLNIP

SEQ ID NO: 34236 - protein, 207 aa, unidentified
  source 1..207: note = Sphingobacterium yanglingense
  REGION 1..207: note = tr|A0A4R6WLL2|A0A4R6WLL2_9SPHI 7-carboxy-7-deazaguanine synthase OS=Sphingobacterium yanglingense OX=1437280 GN=queE PE=3 SV=1
MSHQVPENGTKLPLMEEFYTIQGEGFHTGKAAYFIRLGGCDVGCHWCDVKESWDAELHPLTDAETIVENAKKHPAKTVVITGGEPLIYNLDYLTKRLKEEGIRTFIETSGAYPLSGTWDWICLSPKKFKGPKTEVLEAAGELKVIVFNKSDFKWAEEHASQVGPNCKLYLQPEWSKANEITPLIIEYVKDNPHWDISLQTHKFLNIP

SEQ ID NO: 34237 - protein, 215 aa, unidentified
  source 1..215: note = Sphingobium algicola
  REGION 1..215: note = tr|A0A5J5HJ69|A0A5J5HJ69_9SPHN 7-carboxy-7-deazaguanine synthase OS=Sphingobium algicola; OX = 2048546 GN=queE PE=4 SV=1
MTYAVKEMFLTLQGEGVQAGRRAVFLRFAGCNLWSGREQDRRDAVCKFCDTDFVGTDGLGGGKFADADALADAALAFWGEGVAGHYIVLTGGEPMLQVDDALVDALHARGFTIAIESNGTIAAHPGIDWICISPKAGSDVVQRSGNELKLVWPQPDGGHSLADVAVMEGWAFDHHLLQPLDDPHAADNARAAIAVVMDRPQWRLTVQAHKYLGLR

SEQ ID NO: 34238 - protein, 210 aa, unidentified
  source 1..210: note = Sphingobium algorifonticola
  REGION 1..210: note = tr|A0A437JBQ6|A0A437JBQ6_9SPHN 7-carboxy-7-deazaguanine synthase OS=Sphingobium algorifonticola OX=2008318 GN=queE PE=3 SV=1
MAYSVKEMFLTLQGEGMQAGRRAVFLRFAGCNLWSGREGDRATAVCRFCDTDFVGTDGAGGGKFADAAAVVAAVERFWGEGRTLRYIVLTGGEPMLQVDDALVDALHDAGFEIAIETNGTLPVHPRIDWICVSPKAGSEVVQTSGHELKLVWPQPGSDYAAMEGWAFDHWLVQPLDDPDAAAHVDVAIAFVMDRPQWRLTLQTHKTLGLR

SEQ ID NO: 34239 - protein, 215 aa, Sphingobium amiense
  REGION 1..215: note = tr|A0A494WEJ4|A0A494WEJ4_9SPHN 7-carboxy-7-deazaguanine synthase OS=Sphingobium amiense; OX = 135719 GN=queE PE=3 SV=1
MSYAVKEMFLTLQGEGVQAGRRAVFLRFAGCNLWSGREQDRASAVCRFCDTDFVGTDGLGGGRFADARDLADAALRFWGERTEGRYIVLTGGEPMLQIDDALIDALHGHGFTIAIESNGTIPVHPGIDWVCISPKAGSDVVQRSGDELKLVWPQPGAGHSLADVAEMEAWAFAHHLIQPLDDARAADNARAAVDLVMDRPVWRLTVQAHKYLGLR

SEQ ID NO: 34240 - protein, 215 aa, unidentified
  source 1..215: note = Sphingobium baderi
  REGION 1..215: note = tr|T0HVF2|T0HVF2_9SPHN 7-carboxy-7-deazaguanine synthase OS=Sphingobium baderi LL03 OX=1114964 GN=queE; PE = 3 SV=1
MSYAVKEMFLTLQGEGVHGGRRAVFLRFAGCNLWTGRERDRADAVCRFCDTDFVGTDGDGGGKFATAAALADAAQDFWGPNRELRYIVLTGGEPMLQIDDALVDALHDRGFTIAIESNGTLPVHPGIDWVCISPKAGSDVIQQSGNELKLVWPQPGAGHSAQEVDAMERWAFDHLLVQPLDDAAAAANVQAAIAFVMERPRWRLTLQSHKYLGLR

SEQ ID NO: 34241 - protein, 215 aa, unidentified
  source 1..215: note = Sphingobium baderi
  REGION 1..215: note = tr|A0A0S3EXA8|A0A0S3EXA8_9SPHN 7-carboxy-7-deazaguanine synthase OS=Sphingobium baderi; OX = 1332080 GN=queE PE=3 SV=1
MSYAVKEMFLTLQGEGVHAGRRAVFLRFAGCNLWTGRERDRADAVCRFCDTDFVGTDGEGGGKFPDAAALADAAQDFWGQDRALRYIVLTGGEPMLQIDDALVDALHDRGFTIAIESNGTLPVHPGIDWVCISPKAGSDVVQKSGDELKLVWPQPGAGHSVEEVDAMEQWAFGHLLVQPLDDAAAADNVKAAIAFVMERPRWRLTLQSHKYLGLR

SEQ ID NO: 34242 - protein, 215 aa, unidentified
  source 1..215: note = Sphingobium barthaii
  REGION 1..215: note = tr|A0A4R6FGK2|A0A4R6FGK2_9SPHN 7-carboxy-7-deazaguanine synthase OS=Sphingobium barthaii; OX = 1054037 GN=queE PE=3 SV=1
MSYAVKEMFLTLQGEGVHAGRRAVFLRFAGCNLWTGREQDRETAICRFCDTDFVGTDGDGGGKFADADDLAAAALAFWGEGREGRYIVLTGGEPMLQIDDALVDALHARGFAIAIESNGTLPAHPGLDWVCISPKAGSEVVQRSGNELKLVWPQPGQGHSLTDVEDMERWAFDHWLVQPLDDPKAAENAQAAVDLVMGRPRWRLSLQSHKYLGLR

SEQ ID NO: 34243 - protein, 215 aa, Sphingobium chinhatense
  REGION 1..215: note = tr|W1KM69|W1KM69_9SPHN 7-carboxy-7-deazaguanine synthase OS=Sphingobium chinhatense IP26 OX=1346790; GN = queE PE=3 SV=1
MSYAVKEMFLTLQGEGVHAGRRAVFLRFAGCNLWTGREQDRASAVCRFCDTDFVGTDGDGGGRFADADGLADAALALWGEGRDGRYIVLTGGEPMLQVDDALVDALHARGFAIAIESNGTLPAHPGLDWVCISPKAGSEVVQRSGNELKLVWPQPGQGHSIADVEDMEGWAFDHWLVQPLDDPKAADNARAAVELVMERPRWRLSLQSHKYLGLR

SEQ ID NO: 34244 - protein, 215 aa, Sphingobium chlorophenolicum
  REGION 1..215: note = tr|A0A081RGL4|A0A081RGL4_SPHCR 7-carboxy-7-deazaguanine synthase OS=Sphingobium chlorophenolicum OX=46429 GN=queE PE=3 SV=1
MSYAVKEMFLTLQGEGVHAGRRAVFLRFAGCNLWSGREQDRATAICRFCDTDFVGTDGDGGGKFADADSLAEAALAFWGEGPEGRYIVLTGGEPMLQIDDALVDALHARGFAIAVESNGTLPAHPGLDWVCISPKAGSEVVQRSGDELKLVWPQPGQGHGIADVEDMEGWAFDHLLVQPLDDPDAARNAQAAVDLVLARPRWRLSLQSHKYLGLR

SEQ ID NO: 34245 - protein, 215 aa, Sphingobium chlorophenolicum
  REGION 1..215: note = tr|F6F088|F6F088_SPHCR 7-carboxy-7-deazaguanine synthase OS=Sphingobium chlorophenolicum L-1 OX=690566; GN = queE PE=3 SV=1
MSYAVKELFLTLQGEGVHAGRRAVFLRFAGCNLWSGREQDRATAICQFCDTDFVGTDGDGGGKFADADSLAEAALALWGEGAEGRYIVLTGGEPMLQIDDALVDALHARGFAIAVESNGTLPAHPGLDWVCISPKAGSEVVQRSGNELKLVWPQPGQGHGIADVEDMEGWAFDHLLVQPLDDPDAARNAQAAVDLVLARPRWRLSLQSHKYLGLR

SEQ ID NO: 34246 - protein, 215 aa, Sphingobium chungbukense
  REGION 1..215: note = tr|A0A0M3AX01|A0A0M3AX01_9SPHN 7-carboxy-7-deazaguanine synthase OS=Sphingobium chungbukense OX=56193 GN=queE PE=3 SV=1
MSYAVKEMFLTLQGEGVHAGRRAVFLRFAGCNLWSGREQDRASAICRFCDTDFVGTDGDGGGRFADADGLADAALAFWGEGSEGRYIVLTGGEPMLQIDNGLVDALHARGFAIAIESNGTLPAHPGLDWVCISPKAGSEVVQRSGNELKLVWPQPGQGHSLADVEEMEGWAFDHLLVQPLDDPNAVRNAQAAVDLVMDRPRWRLSLQSHKYLGLR

SEQ ID NO: 34247 - protein, 215 aa, Sphingobium cloacae
  REGION 1..215: note = tr|A0A1E1F291|A0A1E1F291_9SPHN 7-carboxy-7-deazaguanine synthase OS=Sphingobium cloacae; OX = 120107 GN=queE PE=3 SV=1
MSYAVKEMFLTLQGEGVHAGRRAVFLRFAGCNLWTGREQDRADAVCRFCDTDFVGTDGDGGGKFADAEALADAAEGFWGPGPDLRYIVLTGGEPMLQIDDALVDALHGRGFTIAIESNGTLPAHPGIDWVCISPKAGSEVVQREGHELKLVWPQPGGGHSRAEVEAMERWAFDHLLVQPLDDADAARNVEAAIAFVMERPRWRLTLQSHKYLGLR

SEQ ID NO: 34248 - protein, 215 aa, unidentified
  source 1..215: note = Sphingobium cupriresistens
  REGION 1..215: note = tr|A0A4Q4JNB0|A0A4Q4JNB0_9SPHN 7-carboxy-7-deazaguanine synthase OS=Sphingobium cupriresistens OX=1132417 GN=queE PE=3 SV=1
MSYAVKEMFLTLQGEGVQAGRRAVFLRFAGCNLWSGREQDRRDAVCRFCDTDFVGTDGLGGGKFADADALADAALAFWGTGGEGRYIVLTGGEPMLQVDDALVDALHARSFIIAIESNGTIAAHAGIDWICISPKAGSDVVQRSGHELKLVWPQPGGGHSLADVAAMEGWAFDHYLLQPLDDPHATDNARAAIALVMDRPQWRLTVQAHKYLGLR

SEQ ID NO: 34249 - protein, 215 aa, unidentified
  source 1..215: note = Sphingobium czechense
  REGION 1..215: note = tr|A0A0J8ARY7|A0A0J8ARY7_9SPHN 7-carboxy-7-deazaguanine synthase OS=Sphingobium czechense LL01 OX=1420583 GN=queE PE=3 SV=1
MSYAVKEMFLTLQGEGVQAGRRAVFLRFAGCNLWSGREQDRRDAVCRFCDTDFVGTDGLGGGKFADADALADAALAFWGTGGEGRYIVLTGGEPMLQVDDALVDALHARSFIIAIESNGTIAAHAGIDWICISPKAGSDVVQRSGHELKLVWPQPGGGHSLADVAAMEGWAFEHYLLQPLDDPHATDNARAAIALVMDRPQWRLTVQAHKYLGLR

SEQ ID NO: 34250 - protein, 215 aa, Sphingobium faniae
  REGION 1..215: note = tr|A0A1G4UH52|A0A1G4UH52_9SPHN 7-carboxy-7-deazaguanine synthase OS=Sphingobium faniae; OX = 570446 GN=queE PE=3 SV=1
MSYAVKEMFLTLQGEGIHAGRRAVFLRFAGCNLWSGREQDRAEAVCRFCDTDFVGTDGDGGGKFADAAALADAAQDFWGPERDLRYIVLTGGEPMLQIDDALVDALHDRGFTIAIESNGTLAVHPGIDWVCISPKAGSEVVQHKGNELKLVWPQPGGGHSRAEVEEMERWVFDHLLVQPLDDADAARNVEAAIAFVMERPRWRLTLQSHKYLGLR

SEQ ID NO: 34251 - protein, 215 aa, Sphingobium francense
  REGION 1..215: note = tr|A0A4Q4J8I9|A0A4Q4J8I9_9SPHN 7-carboxy-7-deazaguanine synthase OS=Sphingobium francense; OX = 332057 GN=queE PE=3 SV=1
MSYAVKEMFLTLQGEGVHAGRRAVFLRFAGCNLWSGREQDRASAICRFCDTDFVGTDGDGGGRFADAKGLADAALAFWGEGRDGRYIVLTGGEPMLQVDDALVDALHARGFAIAIESNGTLPAHPGLDWVCISPKAGSEVVQRSGNELKLVWPQPGQGHSLADVEDMEGWAFDHWLVQPLDDPKAADNARAAVELVMERPRWRLSLQSHKYLGLR

SEQ ID NO: 34252 - protein, 210 aa, Sphingobium fuliginis
  REGION 1..210: note = tr|A0A4Q4ITE6|A0A4Q4ITE6_SPHSA 7-carboxy-7-deazaguanine synthase OS=Sphingobium fuliginis (strain ATCC 27551) OX=336203 GN=queE PE=3 SV=1
MAYAVKEIFKTLQGEGAQSGRAAVFCRFAGCNLWSGRKEDRAGAACNFCDTDFVGMDGMGGGRFADAEALAAAIEREWAGPAHRRYVVLTGGEPLLQVDDALVAALHGRSFQIGVETNGTQPAPEGIDWICVSPKGRAELVLRTGHELKLVYPQAEARPEHFAGLEFEHFFLQPMDSPMASANLEAAIGFCTENPQWRLSIQSHKMIGIR

SEQ ID NO: 34253 - protein, 215 aa, Sphingobium fuliginis
  REGION 1..215: note = tr|A0A292ZJY4|A0A292ZJY4_SPHSA 7-carboxy-7-deazaguanine synthase OS=Sphingobium fuliginis (strain ATCC 27551) OX=336203 GN=queE PE=3 SV=1
MSYAVKEMFLTLQGEGVHAGRRAVFLRFAGCNLWTGREQDRASAVCRFCDTDFVGTDGDGGGRFADADGLAEAALAFWGEGREGRYIVLTGGEPMLQVDDALVDALHARGFAIAIESNGTLPAHPGLDWVCISPKAGSEVVQRSGNELKLVWPQPGRGHSLADVEDMERWAFDHWLVQPLDDPKAAENARAAVDLVMGRPRWRLSLQSHKYLGLR

SEQ ID NO: 34254 - protein, 215 aa, Sphingobium herbicidovorans
  REGION 1..215: note = tr|A0A086P6T3|A0A086P6T3_SPHHM 7-carboxy-7-deazaguanine synthase OS=Sphingobium herbicidovorans (strain ATCC 700291 / DSM 11019 / NBRC 16415 / MH) OX=1219045 GN=queEPE=3 SV=1
MTYAVKEMFLTLQGEGVHSGRRAVFLRFAGCNLWTGREEDRRKAVCQFCDTDFVGTDGDGGGKFADAASLADAALAFWGEGQEGRYIVLTGGEPMLQIDEALIDALHARGFTIAMESNGTIAAHPGIDWVCISPKAGSEVVQRSGNELKLVWPQPGIGHSLADVAGMEGWAFGHLLIQPLDDPNAPANMQAAIDLVMARPRWRLSLQSHKYLGLR

SEQ ID NO: 34255 - protein, 215 aa, unidentified
  source 1..215: note = Sphingobium hydrophobicum
  REGION 1..215: note = tr|A0A249MQB7|A0A249MQB7_9SPHN 7-carboxy-7-deazaguanine synthase OS=Sphingobium hydrophobicum OX=1673076 GN=queE PE=3 SV=1
MSYAVKEMFLTLQGEGVQAGRRAVFLRFAGCNLWSGREQDRAQAICRFCDTDFVGTDGDGGGKFADADALADAALAFWCAGDAGRYIVLTGGEPMLQVDDALVDALHARGFTIAIESNGTLAVHPGIDWICISPKAGSDVVQREGHELKLVWPQPGGGHSIADVAAMEQWAFAHHLLQPLDDPHAQDNARAAIALVMDRPRWRLTVQAHKYLGLR

SEQ ID NO: 34256 - protein, 215 aa, Sphingobium indicum; identical to SEQ ID NO: 34251
  REGION 1..215: note = tr|A0A1L5BQW9|A0A1L5BQW9_SPHIB 7-carboxy-7-deazaguanine synthase OS=Sphingobium indicum (strain DSM 16412 / CCM 7286 / MTCC 6364 / B90A) OX=861109; GN = queE PE=3 SV=1

SEQ ID NO: 34257 - protein, 215 aa, Sphingobium japonicum
  REGION 1..215: note = tr|D4Z5L3|D4Z5L3_SPHJU 7-carboxy-7-deazaguanine synthase OS=Sphingobium japonicum (strain DSM 16413 / CCM 7287 / MTCC 6362 / UT26 / NBRC 101211 / UT26S) OX=452662; GN = queE PE=3 SV=1
MSYAVKEMFLTLQGEGVHAGRRAVFLRFAGCNLWTGREQDRASAVCRFCDTDFVGTDGDGGGRFADADGLADAALALWGEGRDGRYIVLTGGEPMLQVDDALVDALHARGFAIAIESNGTLPAHPGLDWVCISPKAGSEVVQRSGNELKLVWPQPGQGHSLADVEDMEGWAFDHWLVQPLDDPKAADNARAAVELVMERPRWRLSLQSHKYLGLR

SEQ ID NO: 34258 - protein, 210 aa, Sphingobium lactosutens
  REGION 1..210: note = tr|T0I0X7|T0I0X7_9SPHN 7-carboxy-7-deazaguanine synthase OS=Sphingobium lactosutens DS20 OX=1331060; GN = queE PE=3 SV=1
MAYAVKEIFKTLQGEGAQSGRAAVFCRFAGCNLWSGREEDRAGAACTFCDTDFVGMDGTGGGRFVDAEALAVAIEREWAGPAHKRYVVLTGGEPLLQVDETLVAALHGRSFEIGVETNGTQPAPEGIDWICVSPKGRAELVLRTGHELKLVYPQAEARPEHFAGLEFEHFFLQPMDSPMASANLEAAISFCTENPQWRLSIQSHKMIGIR

SEQ ID NO: 34259 - protein, 215 aa, Sphingobium lactosutens
  REGION 1..215: note = tr|T0IFT6|T0IFT6_9SPHN 7-carboxy-7-deazaguanine synthase OS=Sphingobium lactosutens DS20 OX=1331060; GN = queE PE=3 SV=1
MSYAVKEMFLTLQGEGVQAGRRAVFLRFAGCNLWSGREQDRASAICRFCDTDFVGTDGLGGGKFADADALADAALGFWGEGAQGRYIVLTGGEPMLQVDDALVDALHDRGFTIAIESNGTLAAHPGIDWICISPKAGSDVVQRSGHELKLVWPQPGGGHSLADVDAMAGWAFDHHLIQPLDDAHAPDNARAAIALVMDRPQWRLTVQAHKYLGLR

SEQ ID NO: 34260 - protein, 215 aa, unidentified
  source 1..215: note = Sphingobium limneticum
  REGION 1..215: note = tr|A0A5J5HIA0|A0A5J5HIA0_9SPHN 7-carboxy-7-deazaguanine synthase OS=Sphingobium limneticum OX=1007511 GN=queE PE=4 SV=1
MTYAVKEMFLTLQGEGVQAGRRAVFLRFAGCNLWSGREQDRRAAVCKFCDTDFVGTDGLGGGKFADADALADAALAFWGEGVAGHYIVLTGGEPMLQVDDALVDALHARGFTIAIESNGTIAAHPGIDWICISPKAGSDVVQRSGNELKLVWPQPDGGHSLADVAVMEGWAFDHHLLQPLDDPHAADNARAAIAMVMDRPQWRLTVQAHKYLGLR

SEQ ID NO: 34261 - protein, 215 aa, unidentified; identical to SEQ ID NO: 34237
  source 1..215: note = Sphingobium paulinellae
  REGION 1..215: note = tr|A0A5J5IAC0|A0A5J5IAC0_9SPHN 7-carboxy-7-deazaguanine synthase OS=Sphingobium paulinellae OX=2048545 GN=queE PE=4 SV=1

SEQ ID NO: 34262 - protein, 215 aa, Sphingobium quisquiliarum
  REGION 1..215: note = tr|T0I7P8|T0I7P8_9SPHN 7-carboxy-7-deazaguanine synthase OS=Sphingobium quisquiliarum P25 OX=1329909; GN = queE PE=3 SV=1
MTYAVKEMFLTLQGEGVHSGRRAVFLRFAGCNLWTGREEDRRKAVCQFCDTDFVGTDGEGGGKFADADMLADAALAFWGEDGEGRYIVITGGEPMLQIDGALIDALHARGFTIAIESNGTIAAHPGIDWVCISPKAGSEIVQRSGNELKLVWPQPGAGHSLTDIEAMEGWAFDHLLVQPLDDPHAAANMQAAIDLVMARPRWRLSLQTHKYLGLR

SEQ ID NO: 34263 - protein, 215 aa, Sphingobium sp.
  REGION 1..215: note = tr|A0A2E9CNK8|A0A2E9CNK8_9SPHN 7-carboxy-7-deazaguanine synthase OS=Sphingobium sp.; OX = 1912891 GN=queE PE=3 SV=1
MSYAVKEMFLTLQGEGVQAGRRAVFLRFAGCNLWSGREQDRAQAICRFCDTDFVGTDGDGGGKFADADALADAALAFWGAGDAGRYIVLTGGEPMLQVDDALVDALHARGFAIAIESNGTLAVHPGIDWICISPKAGSDVVQREGHELKLVWPQPGGGHSIADVAAMEQWAFAHHLLQPLDDPHAQDNARAAIALVMDRPRWRLTVQAHKYLGLR

SEQ ID NO: 34264 - protein, 215 aa, Sphingobium sp.; identical to SEQ ID NO: 34253
  REGION 1..215: note = tr|A0A0C5X189|A0A0C5X189_SPHYB 7-carboxy-7-deazaguanine synthase OS=Sphingobium sp. (strain YBL2) OX=484429 GN=queE PE=3 SV=1

SEQ ID NO: 34265 - protein, 215 aa, Sphingobium ummariense
  REGION 1..215: note = tr|T0KBC4|T0KBC4_9SPHN 7-carboxy-7-deazaguanine synthase OS=Sphingobium ummariense RL-3 OX=1346791 GN=queE; PE = 3 SV=1
MSYAVKEMFLTLQGEGVQAGRRAVFLRFAGCNLWSGREQDRASAICRFCDTDFVGTDGLGGGRFADAAALADAALGFWGEGGEGRYIVLTGGEPMLQVDDALVEALHARGFTIAIESNGTLPVHPGIDWVCVSPKAGSTVVQTRGDELKLVWPQPGVGHGPDDLAAMEGWAFDHFLIQPLDDPHAADNARAAIDVVMARPRWRLTVQAHKYLGLR

SEQ ID NO: 34266 - protein, 215 aa, Sphingobium wenxiniae
  REGION 1..215: note = tr|A0A562K586|A0A562K586_SPHWJ 7-carboxy-7-deazaguanine synthase OS=Sphingobium wenxiniae (strain DSM 21828 / JZ-1) OX=595605 GN=queE PE=3 SV=1
MSYAVKEMFLTLQGEGVHGGRRAVFLRFAGCNLWTGRERDRADAVCRFCDTDFVGTDGDGGGKFATAAALADAAQDFWGPNRELRYIVLTGGEPMLQIDDALVDALHDRGFTIAIESNGTLSVHPGIDWVCISPKAGSDVIQQSGNELKLVWPQPGAGHSAQEVDAMERWAFDHLLVQPLDDAEAAANVQAAIAFVMERPRWRLTLQSHKYLGLR

SEQ ID NO: 34267 - protein, 215 aa, Sphingobium xenophagum
  REGION 1..215: note = tr|A0A401J586|A0A401J586_SPHXE 7-carboxy-7-deazaguanine synthase OS=Sphingobium xenophagum OX=121428 GN=queE PE=3 SV=1
MSYAVKEMFLTLQGEGVQAGRRAVFLRFAGCNLWSGREQDRAQAICRFCDTDFVGTDGDGGGKFADADALADAALAFWGAGDAGRYIVLTGGEPMLQVDDALVDALHARGFTIAIESNGTLAVHPGIDWICISPKAGSDVVQREGHELKLVWPQPGGGHSIADVAAMEQWAFAHHLLQPLDDPHAQDNARAAIALVMDRPRWRLTVQAHKYLGLR

SEQ ID NO: 34268 - protein, 214 aa, Sphingobium yanoikuyae
  REGION 1..214: note = tr|A0A177J2N3|A0A177J2N3_SPHYA 7-carboxy-7-deazaguanine synthase OS=Sphingobium yanoikuyae OX=13690 GN=queE PE=3 SV=1
MTYAVKEMFLTLQGEGVQAGRRAVFLRFAGCNLWSGREQDRRDAVCRFCDTDFVGTDGDGGGKFATADALADAAFAFWGEGEGPYIVLTGGEPMLQVDDALIDALHARGFTIAIESNGTLPAHPGIDWVCISPKAGSDVVQMKGNELKLVWPQPDGGHSLADVEAMEGWRFDHLLVQPLDDAHAVDNARAAIDLVMARPRWRLTVQAHKYLGLR

SEQ ID NO: 34269 - protein, 214 aa, Sphingobium yanoikuyae
  REGION 1..214: note = tr|A0A085K7Z1|A0A085K7Z1_SPHYA 7-carboxy-7-deazaguanine synthase OS=Sphingobium yanoikuyae OX=13690 GN=queE PE=3 SV=1
MTYAVKEMFLTLQGEGVQAGRRAVFLRFAGCNLWSGREQDRRDAVCRFCDTDFVGTDGDGGGKFATADALADAAFAFWGEGEGPYIVLTGGEPMLQVDDALIDALHARGFTIAIESNGTLPAHPGIDWVCISPKAGSDVVQVKGNELKLVWPQPDGGHSLADVEAMEGWGFDHLLVQPLDDAHAVDNARAAIDLVMARPRWRLTVQAHKYLGLR

SEQ ID NO: 34270 - protein, 210 aa, unidentified
  source 1..210: note = Sphingomonadaceae bacterium
  REGION 1..210: note = tr|A0A431JPS2|A0A431JPS2_9SPHN 7-carboxy-7-deazaguanine synthase OS=Sphingomonadaceae bacterium OX=1930536 GN=queE PE=3 SV=1
MSYAVKEMFLTLQGEGVNAGRRAVFVRFAGCNLWSGREQDRATAVCRFCDTDFVGTDGLGGGKFADARALAAAVAGFWGAGQTDRFVVLTGGEPMLQVDDALVDALHDAGFRIAIESNGTLPVHPDIDWVCISPKAGSVVVQRSGDELKLVWPQAGTDIDAIESWDFAHRLLQPMDDAAGQANVDAAIALVMERPHWRLSLQTHKLLGLR

SEQ ID NO: 34271 - protein, 244 aa, unidentified
  source 1..244: note = Sphingomonadaceae bacterium
  REGION 1..244: note = tr|A0A2D4Y8I0|A0A2D4Y8I0_9SPHN 7-carboxy-7-deazaguanine synthase OS=Sphingomonadaceae bacterium OX=1930536 GN=queE PE=3 SV=1
MALILATDDEGGPEIFASVQGEGPSMGMPVAFMRLSRCNLACVWCDTAYTWHFQGDERPHRGGVEYDRKANQLSLPEDEVAARIMALGQSRLVITGGEPLLQAPALARLLELLPDVSIEIETNGTTKAPAPLDIRIDQFNVSPKLAHSGNPAELALLPERLDAYATDPRAWFKFVIAEPADVDEVLALRDRYRFRPGHVFLMAEGTDSETLRELEKWLAPLCVRHGFRLSDRLHIHLFGDTRAT

SEQ ID NO: 34272 - protein, 210 aa, unidentified
  source 1..210: note = Sphingomonadales bacterium
  REGION 1..210: note = tr|A0A258JC43|A0A258JC43_9SPHN 7-carboxy-7-deazaguanine synthase OS=Sphingomonadales bacterium 32-65-25 OX=1970594 GN=queE PE=3 SV=1
MSYAVKELFLTLQGEGAQTGRRAVFLRFAGCNLWTGREADRAKAICTFCDTDFVGTDGPGGGKFADAEALATAVTACWGETAEHRLVVCTGGEPLLQLDATLVEALHARSFEIAIETNGTQVPPPGIDWICVSPKADAPLALTTGNELKLVYPQPKAMPERFEALDFQHFFLQPMDGPNQAENIQAAIAHCLAHPRWRLSLQTHKLTGIP

SEQ ID NO: 34273 - protein, 210 aa, unidentified
  source 1..210: note = Sphingomonadales bacterium
  REGION 1..210: note = tr|A0A5C7JSL1|A0A5C7JSL1_9SPHN 7-carboxy-7-deazaguanine synthase OS=Sphingomonadales bacterium OX=1978525 GN=queE PE=3 SV=1
MSYAVKELFLTLQGEGAQAGRRAVFLRFAGCNLWSGREVDRAAAVCRFCDTDFVGTDGPGGGRYADAVALAGRVAACWGAEPARRYVVCTGGEPLLQLDAPLIAALHAQGFEIAIETNGTVAVPSGVDWVCVSPKANARTIVRSGDELKLVFPQQDAAPGQYENWAFRHFFLQPMDGPAREENTRAAVAYCLANPLWRLSLQTHKLIGIP

SEQ ID NO: 34274 - protein, 210 aa, Sphingomonas adhaesiva
  REGION 1..210: note = tr|A0A2A4IA72|A0A2A4IA72_9SPHN 7-carboxy-7-deazaguanine synthase OS=Sphingomonas adhaesiva OX=28212 GN=queE PE=3 SV=1
MSYAVKEMFLTLQGEGVQAGRRAVFVRFAGCNLWSGREQDRASAVCRFCDTDFIGTDGLGGGRFADAAALVAAVEDFWGAGRERRFVVLTGGEPMLQVDDALVDALHDAGFFVAIESNGTLPVHPRIDWVCISPKAGSETVQRRGDELKLVWPQPGSDLSMIEGWAFDHFLLQPMDDARGQANVDAAMALVMERPRWRLTLQTHKMLGLR

SEQ ID NO: 34275 - protein, 210 aa, Sphingomonas aerolata
  REGION 1..210: note = tr|A0A2T4YTJ8|A0A2T4YTJ8_9SPHN 7-carboxy-7-deazaguanine synthase OS=Sphingomonas aerolata; OX = 185951 GN=queE PE=3 SV=1
MSYAVKEMFLTLQGEGVNAGRRAVFVRFAGCNLWSGREQDRATAVCRFCDTDFVGTDGLGGGKFADARALADAVAGFWGAGTQDRFVVLTGGEPMLQIDDAIVDALHAAGFRIAIESNGTLPVHPGIDWVCISPKAGSVVVQRHGDELKLVWPQPGTDIADIETWDFANLLLQPLDDPQADANRDACVALVMERPQWRLSLQTHKMLGLR

SEQ ID NO: 34276 - protein, 210 aa, Sphingomonas aquatilis
  REGION 1..210: note = tr|A0A511Q7C7|A0A511Q7C7_9SPHN 7-carboxy-7-deazaguanine synthase OS=Sphingomonas aquatilis NBRC 16722 OX=1219039 GN=queE PE=3 SV=1
MSYAVKEMFLTLQGEGVNAGRRAVFVRFAGCNLWSGREQDRATAVCRFCDTDFVGTDGLGGGKFADAGALAAAVAGFWGAGQTDRFVVLTGGEPMLQVDDALVDALHDAGFRIAIESNGTLPVHPGIDWVCISPKAGSVVVQRSGDELKLVWPQPGTDIDAIETWDFAHRLLQPMDDVAGQANVDAAIALVMERPHWRLSLQTQKLLGLR

SEQ ID NO: 34277 - protein, 210 aa, Sphingomonas aurantiaca
  REGION 1..210: note = tr|A0A2T5GTP9|A0A2T5GTP9_9SPHN 7-carboxy-7-deazaguanine synthase OS=Sphingomonas aurantiaca OX=185949 GN=queE PE=3 SV=1
MSYAVKEMFLTLQGEGVNAGRRAVFVRFAGCNLWSGREQDRATAVCRFCDTEFVGTDGLGGGKFADAQALASAVAGFWGEGSQDRFVVLTGGEPMLQIDDAIVDALHAHGFRIAMESNGTIAAHPGIDWICVSPKAGSVVVQRTGHELKLVWPQPGTDIDDVETWDFANLLLQPLDDPRADANREACVDMVMERPQWRLSLQTHKLLGLR

SEQ ID NO: 34278 - protein, 210 aa, unidentified
  source 1..210: note = Sphingomonas carotinifaciens
  REGION 1..210: note = tr|A0A1G7KJK7|A0A1G7KJK7_9SPHN 7-carboxy-7-deazaguanine synthase OS=Sphingomonas carotinifaciens OX=1166323 GN=queE PE=3 SV=1
MSYAVKEMFLTLQGEGVHAGRRAVFVRFAGCNLWSGREQDRATAVCRFCDTDFVGTDGLGGGKFADAGALVAAVAGFWGEGVANRFVVLTGGEPMLQIDDALVDALHGAGFTIAIESNGTIAAHAGIDWVCISPKAGSVVVQRAGDELKLVWPQAGLDPAALEDWAFTHHLLQPLDDPRADANREACVDMVLARPRWRLSLQTHKLLGLR

SEQ ID NO: 34279 - protein, 210 aa, Sphingomonas changbaiensis
  REGION 1..210: note = tr|A0A0E9MR76|A0A0E9MR76_9SPHN 7-carboxy-7-deazaguanine synthase OS=Sphingomonas changbaiensis NBRC 104936 OX=1219043 GN=queE PE=3 SV=1
MAYSVKEIFYTLQGEGRNAGRATVFCRFAGCNLWSGREQDRGAAVCTFCDTDFVGTNGTGGGKFRDAEALAAAVDAEWQGDGGRKMVVLTGGEPLLQVDPALVEALHARGFEIAVETNGTCPPPPGIDWLCVSPKADAPLAVAGGDELKLVYPQAAAMPERFSDLAFDHFLLQPMDGPALAENTAAAIAYCMAHPKWRLSVQTHKVIGIR

SEQ ID NO: 34280 - protein, 210 aa, Sphingomonas desiccabilis
  REGION 1..210: note = tr|A0A4Q2J064|A0A4Q2J064_9SPHN 7-carboxy-7-deazaguanine synthase OS=Sphingomonas desiccabilis OX=429134 GN=queE PE=3 SV=1
MSYAVKEMFLTLQGEGVHAGRRAVFVRFAGCNLWSGREVDRASAICRFCDTDFVGTDGEGGGKFADAAALVAAVEGFWGAGFERRFVVLTGGEPMLQIDDSLVEALHAAGFTIAIESNGTIAAHPGIDWVCISPKAGSTVVQRSGDELKLVWPQPGLDPAEIEGWNFANFLAQPLDDPQADANREAAVALVLARPKWRLSLQTHKLLGLR

SEQ ID NO: 34281 - protein, 210 aa, Sphingomonas dokdonensis
  REGION 1..210: note = tr|A0A245ZVS0|A0A245ZVS0_9SPHN 7-carboxy-7-deazaguanine synthase OS=Sphingomonas dokdonensis OX=344880 GN=queE PE=3 SV=1
MSYAVKEMFLTLQGEGVQAGRRAVFIRFAGCNLWSGREQDRATAICRFCDTDFVGIDGLGGGRFADAEALAAAAVNMWDGDKGGRFVVLTGGEPMLQVDDALIDALHAAGFFIAIESNGTLPVNPGIDWVCISPKAGSETVQRQGNELKLVWPQPGSDVVAMESWAFDHLLIQPLDDINAAANQEAAMALVMERPRWRLSLQTHKLLGLR

SEQ ID NO: 34282 - protein, 210 aa, unidentified
  source 1..210: note = Sphingomonas edaphi
  REGION 1..210: note = tr|A0A418PZ03|A0A418PZ03_9SPHN 7-carboxy-7-deazaguanine synthase OS=Sphingomonas edaphi; OX = 2315689 GN=queE PE=3 SV=1
MSYAVKEAFLTLQGEGVQAGSRAVFLRFAGCNLWSGREQDRSTAQCNFCDTDFVGIDGPGGGKFANADALSSHVEALWGEERDFRLVVITGGEPMLQLDKALIDALHARDFRVAVESNGTIAATPGIDWLCVSPKAGTEVVQRSGDELKLVWPQPGIDLADLEGWDFRHYLVQPMDCADGQAAVDAAISLVMERPLWRLTLQGHKIVGLK

SEQ ID NO: 34283 - protein, 210 aa, unidentified
  source 1..210: note = Sphingomonas elodea
  REGION 1..210: note = tr|A0A495F0M5|A0A495F0M5_SPHEL 7-carboxy-7-deazaguanine synthase OS=Sphingomonas elodea; OX = 179878 GN=queE PE=3 SV=1
MSYAVKEMFLTLQGEGVNAGARAVFVRFAGCNLWSGREEDRATAVCRFCDTDFVGIDGVGGGRFADAATLVDAVEGHWGPGQDKRFVVLTGGEPMLQIDDALVEALHARGFRIAIESNGTLPVHPGIDWVCISPKAGSAVVQRRGDELKLVWPQAGTDIEAIEGWDFAHFLIQPMDSAEAEANTRAAIAVAMERPRWRLTLQTHKLLGLR

SEQ ID NO: 34284 - protein, 210 aa, unidentified
  source 1..210: note = Sphingomonas endophytica
  REGION 1..210: note = tr|A0A147I8S7|A0A147I8S7_9SPHN 7-carboxy-7-deazaguanine synthase OS=Sphingomonas endophytica OX=869719 GN=queE PE=3 SV=1
MSYAVKEMFLTLQGEGVQAGRRAVFVRFAGCNLWSGREQDRAAAVCRFCDTDFVGTDGLGGGKFADAAALVAAVEGFWGGGDARRFVVLTGGEPMLQIDDALVDALHGAGFEIAIESNGTLAVHPGIDWVCISPKAGSETVQRRGDELKLVWPQAGSDIEAIERWDFAHFLLQPLDDAKGQENVAAAMAVVMERPRWRLSLQTHKLLGLR

SEQ ID NO: 34285 - protein, 210 aa, Sphingomonas faeni
  REGION 1..210: note = tr|A0A2T5U4D5|A0A2T5U4D5_9SPHN 7-carboxy-7-deazaguanine synthase OS=Sphingomonas faeni; OX = 185950 GN=queE PE=3 SV=1
MSYAVKEMFLTLQGEGVNAGRRAVFVRFAGCNLWSGREQDRATAVCKFCDTEFVGTDGLGGGKFADAQALASAVAGFWGEGERDRFVVLTGGEPMLQIDDAIVDALHEQGFRIAMESNGTIPAHPGIDWICISPKAGSIVVQRAGHELKLVWPQPGSDIEEVETWDFENFLLQPLDDPRADANREACVDLVMERPQWRLSLQTHKLLGLR

SEQ ID NO: 34286 - protein, 215 aa, Sphingomonas fennica
  REGION 1..215: note = tr|A0A2T4HQ22|A0A2T4HQ22_9SPHN 7-carboxy-7-deazaguanine synthase OS=Sphingomonas fennica; OX = 114404 GN=queE PE=3 SV=1
MSYAVKEIFLTLQGEGRQAGRRAVFLRFSGCNLWSGRERDRATADCRFCDTDFVGMDGDNGGRYADAQALAARVGELWETGLDRVEGGVPFVVMTGGEPLLQVDDALIAALHDRGFEIAVETNGTIAAPAGIDWICVSPKAGTEIVQRRGNELKIVWPQPGNDHRAMEEWDFDHFLVSPMDGEDRAGTTAAAIAFVLANPRWRLSAQVHKLIGVR

SEQ ID NO: 34287 - protein, 210 aa, unidentified
  source 1..210: note = Sphingomonas gei
  REGION 1..210: note = tr|A0A4S1X2I5|A0A4S1X2I5_9SPHN 7-carboxy-7-deazaguanine synthase OS=Sphingomonas gei; OX = 1395960 GN=queE PE=3 SV=1
MSYAVKEMFLTLQGEGVNAGARAVFVRFAGCNLWSGREQDRAAAVCRFCDTDFVGTDGLGGGKFADADALADAVVGHWGADPERRFVVLTGGEPMLQVDDALVDALHARGFRIAIESNGTLPTHPGIDWVCISPKAGSVVVQRSGDELKLVWPQAGSDLDAIEGWDFAHFLVQPMDDAAGEANIRAAVALVMARPRWRLSLQTHKLLGLR

SEQ ID NO: 34288 - protein, 210 aa, Sphingomonas ginsenosidimutans
  REGION 1..210: note = tr|A0A2A4I3A1|A0A2A4I3A1_9SPHN 7-carboxy-7-deazaguanine synthase OS=Sphingomonas ginsenosidimutans OX=862134 GN=queE PE=3 SV=1
MSYAVKEMFLTLQGEGVQAGRRAVFVRFAGCNLWSGREQDRASAVCRFCDTDFVGTDGLGGGRFGDAAALVAAVEGFWGAGRERRFVVLTGGEPMLQVDDALVDALHDAGFFVAIESNGTLPVHPRIDWICISPKAGSETVQRCGDELKLVWPQPGSDLSAIEGWAFDHFLLQPMDDARGQANVDAAMALVMERPRWRLTLQTHKMLGLR

SEQ ID NO: 34289 - protein, 210 aa, unidentified
  source 1..210: note = Sphingomonas ginsenosidivorax
  REGION 1..210: note = tr|A0A5C6UAR3|A0A5C6UAR3_9SPHN 7-carboxy-7-deazaguanine synthase OS=Sphingomonas ginsenosidivorax OX=862135 GN=queE PE=3 SV=1
MSYAVKEMFLTLQGEGVNAGRRAVFVRFAGCNLWSGREQDRATAVCRFCDTDFVGTDGLGGGKFADADALAAAVEGFWGEGAADRFVVLTGGEPMLQIDDAVVDALHARGFSIAMESNGTIAAHPGIDWVCVSPKAGSVVVQRTGDELKLVWPQPGTDIADIETWDFAHRLLQPLDDPRADANREACVAMVMQRPAWRLSLQTHKLLGLR

SEQ ID NO: 34290 - protein, 230 aa, unidentified
  source 1..230: note = Sphingomonas ginsenosidivorax
  REGION 1..230: note = tr|A0A5C6UGZ5|A0A5C6UGZ5_9SPHN 7-carboxy-7-deazaguanine synthase OS=Sphingomonas ginsenosidivorax OX=862135 GN=queE PE=3 SV=1
MFGGNPARAQEMGDGASLWIQEVFYTLQGEGPFAGDPAVFVRTAGCNIRCYWCDTDFESSTWRPALADLIAAIETHRPAHCDLIVLTGGEPFRQNIAPLVQQLLARGLRVQIETNGTLSIPLPVDDRLTIVCSPKTKQLHDAIVPRITAYKYVLAAGEVDPDDGLPMASTQKAGQRTRLFRPPSNTRVFVMPRDDGDAVANRAHQATAAGIAMRHGYRLCLQLHKLLDLP

SEQ ID NO: 34291 - protein, 210 aa, Sphingomonas glacialis
  REGION 1..210: note = tr|A0A502FZF3|A0A502FZF3_9SPHN 7-carboxy-7-deazaguanine synthase OS=Sphingomonas glacialis OX=658225 GN=queE PE=3 SV=1
MSYAVKEMFLTLQGEGVQAGRRAVFVRFAGCNLWSGREQDRASAICQFCDTDFVGTDGAGGAKFADAAELVAAVAEFWGADPAHRFVVLTGGEPMLQVDDALVDALHAAGFEIAIESNGTLAVHPGIDWVCISPKAGSQVVQRSGDELKLVWPQPGSDVAELETWNFAHYLIQPLDSIAAEANHAAAIDLVMARPQWRLTLQAHKALGLR

SEQ ID NO: 34292 - protein, 210 aa, unidentified
  source 1..210: note = Sphingomonas guangdongensis
  REGION 1..210: note = tr|A0A285Q9R3|A0A285Q9R3_9SPHN 7-carboxy-7-deazaguanine synthase OS=Sphingomonas guangdongensis OX=1141890 GN=queE PE=3 SV=1
MSYAVKELFLTLQGEGANAGRRAVFVRFAGCNLWSGREADRATAVCRFCDTDFVGTDGAGGGRFADASALVAAVVAAWGEDREHRFVVLTGGEPMLQVDDALVDALHAAGFRIAIESNGTLPAHPGIDWVCISPKAGSTVVQRAGDELKLIWPQAGIDPVALEDWAFTHHLLQPMDDVRGQANVAAAIDLVMARPRWTLTLQTHKLLGLR

SEQ ID NO: 34293 - protein, 215 aa, Sphingomonas haloaromaticamans
  REGION 1..215: note = tr|A0A1S1HJ36|A0A1S1HJ36_9SPHN 7-carboxy-7-deazaguanine synthase OS=Sphingomonas haloaromaticamans OX=653954 GN=queE PE=3 SV=1
  VARIANT 97: note = Xaa can be any naturally occurring amino acid
MSYAVKEIFLTLQGEGRQAGRRAVFLRFSGCNLWSGREQDRATADCRFCDTDFVGMDGDNGGRYADARALAARVGELWETGLDRAEGGMPFVVMTGXEPLLQVDDALIAALHDRGFEIAVETNGTIAAPAGIDWICVSPKAGTEIVQRRGNELKIVWPQPGNDHRAMEEWDFDHFLVSPMDGEDRVETTAAAIAFVLANPRWRLSAQVHKLIGVR

SEQ ID NO: 34294 - protein, 211 aa, unidentified
  source 1..211: note = Sphingomonas hengshuiensis
  REGION 1..211: note = tr|A0A2W4ZFN7|A0A2W4ZFN7_9SPHN 7-carboxy-7-deazaguanine synthase OS=Sphingomonas hengshuiensis OX=1609977 GN=queE PE=3 SV=1
MTYSVKEMFLTLQGEGVHAGRRAVFVRFAGCNLWSGREADRANAICRFCDTDFVGTDGIGGGKFADAAALVAAVVGHWDGAADRRFVVLTGGEPMLQIDDAIVDALHAAAFTIAIESNGTIAAHPGIDWVCISPKAGSDVVQRRGDELKLVWPQAGIDVDALERWDFAHHLVQPMDAAGMEIAHREAAVGFAMARPKWRLSLQTHKLLGLR

SEQ ID NO: 34295 - protein, 210 aa, Sphingomonas histidinilytica
  REGION 1..210: note = tr|A0A1T5C345|A0A1T5C345_9SPHN 7-carboxy-7-deazaguanine synthase OS=Sphingomonas histidinilytica OX=439228 GN=queE PE=3 SV=1
MGSYAVKEMFLTLQGEGAQVGRRAVFLRFAGCNLWSGREEDRADAQCRFCDTDFVGLDGDNGGRYPDAGTLADRAIALWGELPGAFIVMTGGEPLLQVDDALVAALKARGFETAVETNGTQPAPAGIDWICVSPKAGTDVVLRRGNELKLVWPQPGIDPAALEDWDFEHFLLQPMDGPRLDEARAVAIAYVMAHPKWRLSTQTHKVVGIR

SEQ ID NO: 34296 - protein, 208 aa, unidentified
  source 1..208: note = Sphingomonas indica
  REGION 1..208: note = tr|A0A1X7FYX4|A0A1X7FYX4_9SPHN 7-carboxy-7-deazaguanine synthase OS=Sphingomonas indica; OX = 941907 GN=queE PE=3 SV=1
MSYAVKEIFLTLQGEGMQAGRRAVFLRFSGCNLWSGREADRATAQCSFCDTDFVGMDGENGGRYDADMLADRVAALWSAGELPLVVITGGEPMLQLDAALIDALHDRGFEIAVESNGTLPAPPGIDWLCISPKAGSEVVQRSGDELKLVWPQAGMEPADLLRWDFAHFLIQPMDCAKGDAARQAAIAYVMAHPGWRLSLQTHKLLGLP

SEQ ID NO: 34297 - protein, 215 aa, unidentified
  source 1..215: note = Sphingomonas jatrophae
  REGION 1..215: note = tr|A0A1I6JY51|A0A1I6JY51_9SPHN 7-carboxy-7-deazaguanine synthase OS=Sphingomonas jatrophae OX=1166337 GN=queE PE=3 SV=1
MAGYAVKEMFLTLQGEGLQAGRRAVFIRFAGCNLWSGREQDRAGADCTFCDTDFVGTDGDGGGRYADGGALADAALGLWGEWLEEPGAPPFAVLTGGEPTLQVDEALIAALKARGFELAIETNGTRPVPDGIDWICVSPKAGNEVVQRSGDELKLVWPQPGVDFKAMEAWDFTHLLIQPMDGNSAVDTRNSAIKFVLTHPRWRLSVQTHKLVGLR

SEQ ID NO: 34298 - protein, 210 aa, unidentified
  source 1..210: note = Sphingomonas jeddahensis
  REGION 1..210: note = tr|A0A1V2EUE6|A0A1V2EUE6_9SPHN 7-carboxy-7-deazaguanine synthase OS=Sphingomonas jeddahensis OX=1915074 GN=queE PE=3 SV=1
MSYAVKEMFLTLQGEGVQAGRRAVFVRFAGCNLWSGREQDRANAICRFCDTDFVGVDGLGGGKFGDAAALAAAVVAMWDRGEAHRFVVLTGGEPMLQIDDPLVEALHAAGFVIAIESNGTLPVHPGIDWVCISPKAGSETVQRAGDELKLVWPQPGSDIAAMEAWDFQHFLLQPLDDPNAAANQAAAMALVMERPKWRLSLQTHKLLGLR

SEQ ID NO: 34299 - protein, 210 aa, Sphingomonas koreensis
  REGION 1..210: note = tr|A0A1L6JEY8|A0A1L6JEY8_9SPHN 7-carboxy-7-deazaguanine synthase OS=Sphingomonas koreensis OX=93064 GN=queE PE=3 SV=1
MSYAVKEMFLTLQGEGVNAGARAVFVRFAGCNLWSGREQDRAAAVCKFCDTDFVGTDGLGGGKFADADALAIAVQGFWGPGIERRFVVLTGGEPMLQVDDALVASLHAQGFRIAIESNGTLPVHPGIDWVCVSPKAGSEVVQRSGDELKLVWPQAGTDVAALETWDFAHFLVQPMDDANGAANVQAAVDFALERPKWRLTLQAHKSLGLR

SEQ ID NO: 34300 - protein, 210 aa, Sphingomonas koreensis
  REGION 1..210: note = tr|A0A2M8WG30|A0A2M8WG30_9SPHN 7-carboxy-7-deazaguanine synthase OS=Sphingomonas koreensis OX=93064 GN=queE PE=3 SV=1
MSYAVKEMFLTLQGEGVNAGARAVFVRFAGCNLWSGREQDRAAAVCKFCDTDFVGTDGLGGGKFADADALAVAVQGFWGPGIERRFVVLTGGEPMLQIDDALVAALHAQGFRIAIESNGTLPVHPGIDWVCISPKAGSEVVQRSGDELKLVWPQAGTDVAALETWDFAHFLVQPMDDANGAANVQAAVDFALERPKWRLTLQAHKSLGLR

SEQ ID NO: 34301 - protein, 216 aa, unidentified
  source 1..216: note = Sphingomonas laterariae
  REGION 1..216: note = tr|A0A239CZ14|A0A239CZ14_9SPHN 7-carboxy-7-deazaguanine synthase OS=Sphingomonas laterariae OX=861865 GN=queE PE=3 SV=1
MTSYAVKEIFLTLQGEGRQAGRRAVFLRFAGCNLWTGREQDRESADCRFCDTDFVGMDGDHGGRYRDAAALADKVAALWAEGLVGEAGAVPFVVMTGGEPLLQVDDALIAALHARGFEIAVETNGTIAAPAGIDWICVSPKAGTEIVQRSGQELKLVWPQPGNDYRAMEGWAFDHFLVSPMDGPDVVETTAAAVAFVLANPRWRLSVQSHKLIGVR

SEQ ID NO: 34302 - protein, 210 aa, Sphingomonas melonis
  REGION 1..210: note = tr|A0A0D1KV86|A0A0D1KV86_9SPHN 7-carboxy-7-deazaguanine synthase OS=Sphingomonas melonis; OX = 152682 GN=queE PE=3 SV=1
MSYAVKEMFLTLQGEGVNAGRRAVFVRFAGCNLWSGREQDRATAVCRFCDTDFVGTDGLGGGKFADAGALAAVVAGFWGAGQADRFVVLTGGEPMLQVDDALVDALHDAGFRIAIESNGTLPVHPGIDWVCISPKAGSEVVQRSGDELKLVWPQPGTDIDAIETWDFAHRLLQPMDDAAGQANVDAAIALVMERPHWRLSLQTHKLLGLR

SEQ ID NO: 34303 - protein, 210 aa, Sphingomonas melonis
  REGION 1..210: note = tr|A0A175XZZ4|A0A175XZZ4_9SPHN 7-carboxy-7-deazaguanine synthase OS=Sphingomonas melonis TY OX=621456 GN=queE PE=3 SV=1
MSYAVKEMFLTLQGEGVNAGRRAVFVRFAGCNLWSGREQDRASAICRFCDTDFVGTDGLGGGKFADAGALVAAVAGFWGAGQAHRFVVLTGGEPMLQVDDALVDALHDAGFRIAIESNGTLPVHPGIDWVCISPKAGSEVVQRSGDELKLVWPQPGTDIDAIETWDFAHRLLQPMDDAAGQANVDAAIALVMERPHWRLSLQTHKLLGLR

SEQ ID NO: 34304 - protein, 210 aa, Sphingomonas mucosissima
  REGION 1..210: note = tr|A0A245ZT33|A0A245ZT33_9SPHN 7-carboxy-7-deazaguanine synthase OS=Sphingomonas mucosissima OX=370959 GN=queE PE=3 SV=1
MSYAVKEMFLTLQGEGVQAGRRAVFVRFAGCNLWSGREQDRARAICRFCDTDFVGVDGLSGGRFADAQGLADAAVQMWSGGEEARFVVLTGGEPMLQVDDALIDALHAAGFFIAIESNGTIPVHPGIDWVCISPKAGSEIVQRRGNELKLVWPQPGSDVTAMEGWDFAHLLIQPLDDANAAANQEAAMALVMERPRWRLSLQTHKLLGLR

SEQ ID NO: 34305 - protein, 210 aa, unidentified
  source 1..210: note = Sphingomonas naasensis
  REGION 1..210: note = tr|A0A4S1W3C5|A0A4S1W3C5_9SPHN 7-carboxy-7-deazaguanine synthase OS=Sphingomonas naasensis OX=1344951 GN=queE PE=3 SV=1
MSYAVKEMFLTLQGEGVNAGARAVFVRFAGCNLWSGREQDRASAVCRFCDTDFVGTDGAGGGRFADAEALAEAVAGHWGAETERRFVVLTGGEPMLQIDDALVDALHARGFRIAIESNGTLPAHPGIDWVCISPKAGSDVVQRSGDELKLVWPQAGTDVAELETWDFAHFLVQPMDSAEAEANTRAAVALAMARPRWRLTLQTHKMLGLR

SEQ ID NO: 34306 - protein, 210 aa, unidentified
  source 1..210: note = Sphingomonas olei
  REGION 1..210: note = tr|A0A4S4GAK8|A0A4S4GAK8_9SPHN 7-carboxy-7-deazaguanine synthase OS=Sphingomonas olei; OX = 1886787 GN=queE PE=3 SV=1
MSYAVKEMLLTLQGEGVQAGRRAVFVRFAGCNLWSGREEDRATAICKFCDTDFVGMDGLGGGRFADADALVAAVVAMWDGGEQDRFVVLTGGEPMLQVDDALVDALHAAGFFLAIESNGTLPVHPGIDWVCISPKAGSETVQRSGDELKVVWPQPGTDLEAMEKWGFRHFLLQPLDDPNAVTNQAAAMAKVMERPRWRLSLQTHKLLGLR

SEQ ID NO: 34307 - protein, 215 aa, unidentified
  source 1..215: note = Sphingomonas oleivorans
  REGION 1..215: note = tr|A0A2T5FTG0|A0A2T5FTG0_9SPHN 7-carboxy-7-deazaguanine synthase OS=Sphingomonas oleivorans OX=1735121 GN=queE PE=3 SV=1
MAGYAVKEMFLTLQGEGLQIGRRAVFLRFAGCNLWSGREQDRATAQCTFCDTDFVGTDGDNGGRYPDAAALAKKAAALWGERLEDEAGHALIVLTGGEPLLQLDAPLIDALKARGFRIAIETNGTIAAPEGIDWICVSPKRGTEIVQRSGNELKMVWPQPGLDFRAMEAWNFDHFLVQPMDGPALQATQEACIDFVLRHPRWRLSIQSHKLIGVR

SEQ ID NO: 34308 - protein, 210 aa, Sphingomonas oligophenolica
  REGION 1..210: note = tr|A0A502CRE5|A0A502CRE5_9SPHN 7-carboxy-7-deazaguanine synthase OS=Sphingomonas oligophenolica OX=301154 GN=queE PE=3 SV=1
MTYAVKEMFLTLQGEGVNAGARAVFVRFAGCNLWSGREQDRAAAICSFCDTDFVGIDGVGGGKFADGDALVAAVERHWGSGRADRFVVLTGGEPMLQVDDALVAALHGAGFRIAIETNGTIAAHPRIDWVCVSPKAGSDVVQRSGDELKLVWPQPGTDIDVLEGWDFAHRLLQPLDSADHTANIAACVDMVMQRPHWRLTLQTHKLLGLR

SEQ ID NO: 34309 - protein, 210 aa, unidentified
  source 1..210: note = Sphingomonas panacis
  REGION 1..210: note = tr|A0A1B3Z996|A0A1B3Z996_9SPHN 7-carboxy-7-deazaguanine synthase OS=Sphingomonas panacis; OX = 1560345 GN=queE PE=3 SV=1
MSYAVKEMFLTLQGEGVNAGRRAVFVRFAGCNLWSGREEDRATAICSFCDTDFVGINGLGGGRFADADALAAAVAGFWGDRPEARFVVLTGGEPMLQVDDALVDALHAGGFTIAIETNGTLPVHPGIDWVCVSPKAGSTVVQRSGDELKLVWPQAGSDPEVLESWDFANFLVQPMDDAAAADNQAAAIALAMARPKWRLSLQTHKFLGLR

SEQ ID NO: 34310 - protein, 210 aa, Sphingomonas parapaucimobilis
  REGION 1..210: note = tr|A0A0A1W4R9|A0A0A1W4R9_9SPHN 7-carboxy-7-deazaguanine synthase OS=Sphingomonas parapaucimobilis NBRC 15100 OX=1219049 GN=queE PE=3 SV=1
MSYAVKEIFKTLQGEGAHSGRAAVFCRFAGCNLWSGRETDRATSVCTFCDTDFVGLNGTGGGRFADADALADAIAAEWGTGLAGRYAVLTGGEPLLQVDQALIDALHAHGFEIGVETNGTQPAPAGLDWICVSPKAGAPLVLETGNELKLVYPQADARPERFEHLSFDHFFLQPMDAPAADDNLAAAIAYCTQNPRWRLSLQSHKMIGIR

SEQ ID NO: 34311 - protein, 210 aa, Sphingomonas parapaucimobilis
  REGION 1..210: note = tr|A0A0A1W419|A0A0A1W419_9SPHN 7-carboxy-7-deazaguanine synthase OS=Sphingomonas parapaucimobilis NBRC 15100 OX=1219049 GN=queE PE=3 SV=1
MSYAVKEMFLTLQGEGVQAGRRAVFVRFAGCNLWSGREQDRASAICRFCDTDFVGVDGLGGGRFVDAAALVAAVEGFWGASHEERFVVLTGGEPMLQVDDALVDALHAAGFFIAIESNGTLAAHPRLDWVCISPKAGSEVVQRSGQELKLVWPQAGIDPVEVESWDFANHLLQPLDDPRAEANREACIAMVMERPRWRLTLQTHKMLGLR

SEQ ID NO: 34312 - protein, 210 aa, Sphingomonas paucimobilis
  REGION 1..210: note = tr|A0A0C9M4B7|A0A0C9M4B7_SPHPI 7-carboxy-7-deazaguanine synthase OS=Sphingomonas paucimobilis NBRC 13935 OX=1219050 GN=queE PE=3 SV=1
MSYAVKEMFLTLQGEGVQAGRRAVFVRFAGCNLWSGREQDRASAICRFCDTDFVGVDGLGGGRFADAGALVAAVEGFWGPERAERFVVLTGGEPMLQVDDALVDALHDAGFFIAIESNGTIAAHPRLDWVCISPKAGSEVVQRSGQELKLVWPQAGIDPAEVEGWDFANHLLQPLDDPRAEANREACIAMVMERPRWRLTLQTHKMLGLR

SEQ ID NO: 34313 - protein, 210 aa, Sphingomonas paucimobilis; identical to SEQ ID NO: 34312
  REGION 1..210: note = tr|A0A411LMB6|A0A411LMB6_SPHPI 7-carboxy-7-deazaguanine synthase OS=Sphingomonas paucimobilis OX=13689 GN=queE PE=3 SV=1

SEQ ID NO: 34314 - protein, 210 aa, unidentified
  source 1..210: note = Sphingomonas pokkalii
  REGION 1..210: note = tr|A0A2U0SEA9|A0A2U0SEA9_9SPHN 7-carboxy-7-deazaguanine synthase OS=Sphingomonas pokkalii; OX = 2175090 GN=queE PE=3 SV=1
MSYAVKEMFLTLQGEGVNAGARAVFVRFAGCNLWSGREVDRAAAVCRFCDTDFVGVDGAGGGRFADATALADAAAAHWGPDGTARFVVLTGGEPMLQVDDSLVEALHARGFRIAIETNGTLPVHPGIDWVCVSPKAGSVVVQQRGNELKLVWPQPGTDLEAIEGWDFGHFLVQPMDDADAAANRDAAIALAMARPRWRLSLQTHKLLGLR

SEQ ID NO: 34315 - protein, 210 aa, Sphingomonas rubra
  REGION 1..210: note = tr|A0A1I5UFW9|A0A1I5UFW9_9SPHN 7-carboxy-7-deazaguanine synthase OS=Sphingomonas rubra; OX = 634430 GN=queE PE=3 SV=1
MTYAVKEMFLTLQGEGVNAGARAVFVRFAGCNLWSGREQDRATAVCRFCDTDFVGTDGLGGGKFADAAALVAAVEGFWGEGRDRRFVVLTGGEPMLQVDDALVDELHAAGFRIAIESNGTLPVHPLIDWVCISPKAGSDVVQRRGDELKLVWPQVGIDPVALEGWNFTHHLLQPLDDARADANREACVATVLERPRWRLSLQTHKLLGLR

SEQ ID NO: 34316 - protein, 210 aa, Sphingomonas sanguinis
  REGION 1..210: note = tr|A0A147IKT3|A0A147IKT3_9SPHN 7-carboxy-7-deazaguanine synthase OS=Sphingomonas sanguinis OX=33051 GN=queE PE=3 SV=1
MSYAVKEMFLTLQGEGVQAGRRAVFVRFAGCNLWSGREQDRASAICRFCDTDFVGVDGLGGGRFADADALVAAVEGFWGESRNERFVVLTGGEPMLQVDDALVDALHAAGFFIAIESNGTIAAHPGIDWVCISPKAGSEVVQRSGQELKLVWPQAGIDPAEVEGWDFANHLLQPLDDPRAEENREVCIAMVMERPRWRLTLQTHKMLGLR

SEQ ID NO: 34317 - protein, 210 aa, Sphingomonas sanguinis
  REGION 1..210: note = tr|A0A147J7L7|A0A147J7L7_9SPHN 7-carboxy-7-deazaguanine synthase OS=Sphingomonas sanguinis OX=33051 GN=queE PE=3 SV=1
MSYAVKEMFLTLQGEGVQAGRRAVFVRFAGCNLWSGREQDRASAICRFCDTDFVGVDGLGGGRFADAAALVAAVEGFWGESRDERFVVLTGGEPMLQVDDALVDALHAAGFFIAIESNGTIAAHPGIDWVCISPKAGSHVVQRSGNELKLVWPQAGIDPVEVEGWDFANHLLQPLDDPRADENREACIGVVMDRPRWRLTLQTHKMLGLR

SEQ ID NO: 34318 - protein, 212 aa, Sphingomonas sanxanigenens
  REGION 1..212: note = tr|W0AF43|W0AF43_9SPHN 7-carboxy-7-deazaguanine synthase OS=Sphingomonas sanxanigenens DSM 19645 = NX02; OX = 1123269 GN=queE PE=3 SV=1
MASYAVKEAFLTLQGEGRRAGRRAVFVRFAGCNLWTGREKDRATAVCRFCDTDFVGTDGDGGGRFADAAALAAHASALWGVAEGARPYVVLTGGEPLLQVDAALIDALHDAGFEIAIESNGTIAAPAGIDWVCISPKAGSAVVQTRGDELKLVWPQPGIDIDALERWDFANFLVQPMDDADYPANRDAAVALAMTRPLWRLTLQTHKMLGLR

SEQ ID NO: 34319 - protein, 210 aa, Sphingomonas sanxanigenens
  REGION 1..210: note = tr|A0A2W5A6G4|A0A2W5A6G4_9SPHN 7-carboxy-7-deazaguanine synthase OS=Sphingomonas sanxanigenens OX=397260 GN=queE PE=3 SV=1
MSYAVKEMFLTLQGEGVQAGRRAVFIRFAGCNLWTGREQDRESAVCRFCDTDFVGMDGTFGGRYDSATKLAAQAKSLWERDNLAGFCVLTGGEPLLQVDAALIDALHAEGFEIAVESNGTIAAPPGIDWLCISPKAGSEVVQTSGDELKLVWPQPGIDLERIEAWDFRNFLVQPMDCAESEAARDAAIALAMERPRWRLTLQNHKQLGLR

SEQ ID NO: 34320 - protein, 210 aa, Sphingomonas sp.
  REGION 1..210: note = tr|A0A2U1G3G0|A0A2U1G3G0_9SPHN 7-carboxy-7-deazaguanine synthase OS=Sphingomonas sp. URHD0007 OX=1298856 GN=queE PE=3 SV=1
MTYAVKECFLTLQGEGVQAGSRAVFLRFAGCNLWSGREQDRATAQCGFCDTDFVGTDGEGGGKFVAADDLADHVARLWGAGEERRLVVITGGEPMLQLDSALVDALHARGFRVAVETNGTLAAVKDVDWICVSPKAGADVVQRSGDELKLVWPQKGIDPAELEAWDFDHFLVQPMDCAEGEAARDAAIRLAMERPKWRLTLQAHKLVGLP

SEQ ID NO: 34321 - protein, 210 aa, Sphingomonas sp.
  REGION 1..210: note = tr|A0A0Q8Q6E3|A0A0Q8Q6E3_9SPHN 7-carboxy-7-deazaguanine synthase OS=Sphingomonas sp. Root710 OX=1736594 GN=queE PE=3 SV=1
MGSYAVKEMFLTLQGEGMQVGRRAVFLRFAGCNLWSGREQDRETAVCRFCDTDFVGTDGDHGGRYPGADALADQALRLWGALPDPFLVMTGGEPLLQIDDALIAALKARGFETAVETNGTQPAPDGIDWICVSPKAGSDVVLRRGNELKLVWPQPGIDPGELATWDFEHFLLQPMDGPTLASARDAAIAYILEHPRWRLSTQTHKVVGIR

SEQ ID NO: 34322 - protein, 210 aa, unidentified
  source 1..210: note = Sphingomonas spermidinifaciens
  REGION 1..210: note = tr|A0A2A4B153|A0A2A4B153_9SPHN 7-carboxy-7-deazaguanine synthase OS=Sphingomonas spermidinifaciens OX=1141889 GN=queE PE=3 SV=1
MSYAVKELFLTLQGEGFHAGRRAVFVRFAGCNLWSGREEDRATAICKFCDTDFVGMDGGGGARFADAGALAAAVVEAWGQGAERRFVVLTGGEPMLQVDDAIVHALHDAGFTIAIESNGTLPVHPGIDWVCISPKAGSEVVQRSGDELKLVWPQPGTDVAEIERWDFRHFLVQPLDDAAGQANWDAATAFAMERPKWRLSLQTHKLLGLR

SEQ ID NO: 34323 - protein, 210 aa, unidentified
  source 1..210: note = Sphingomonas spermidinifaciens
  REGION 1..210: note = tr|A0A2A4B603|A0A2A4B603_9SPHN 7-carboxy-7-deazaguanine synthase OS=Sphingomonas spermidinifaciens OX=1141889 GN=queE PE=3 SV=1
MSYAVKEIFKTLQGEGAQMGRAAVFCRFAGCNLWSGREIDRGQAVCSFCDTDFVGIDGSGGGRFADAGALADAVEAEWGDSRPGRYVVLTGGEPLLQVDQSLVDALHARGFEVWIETNGTQAAPAGLDWVCVSPKADAELVLRAGDELKLVYPQEKAAPERFEHLAFDYFFLQPMDSPQAATNLEAAIAYCTNNPRWRLSLQSHKMIGIR

SEQ ID NO: 34324 - protein, 210 aa, unidentified
  source 1..210: note = Sphingomonas taxi
  REGION 1..210: note = tr|A0A2W4YWT6|A0A2W4YWT6_9SPHN 7-carboxy-7-deazaguanine synthase OS=Sphingomonas taxi; OX = 1549858 GN=queE PE=3 SV=1
MSYAVKEMFLTLQGEGVNAGRRAVFVRFAGCNLWSGREQDRATAVCKFCDTEFVGTDGLGGGKFADARELAAAVAGFWGEGMRDRFVVLTGGEPMLQIDDAIVDALHAEGFRIAMESNGTIVAHPGIDWVCISPKAGSIVVQRTGDELKLVWPQPGTDIADVETWDFANLLLQPLDDPQADANREACVEMVMARPQWRLSLQTHKLLGLR

SEQ ID NO: 34325 - protein, 210 aa, unidentified
  source 1..210: note = Sphingomonas taxi
  REGION 1..210: note = tr|A0A2W5P748|A0A2W5P748_9SPHN 7-carboxy-7-deazaguanine synthase OS=Sphingomonas taxi; OX = 1549858 GN=queE PE=3 SV=1
MSYAVKEMFLTLQGEGVQAGRRAVFVRFAGCNLWTGREQDRARAICRFCDTDFVGVDGAGGGRFADAAALVAAVEGFWGGDGLRRFVVLTGGEPMLQVDDALVDALHAAGFEIAIESNGTLPVHPGIDWVCISPKAGSETVQRRGHELKLVWPQAGSDLDTIERWDFAHFLLQPLDDARGEANVAAAMALVMERPQWRLSLQTHKLLGLR

SEQ ID NO: 34326 - protein, 210 aa, Sphingomonas trueperi
  REGION 1..210: note = tr|A0A543M6K7|A0A543M6K7_9SPHN 7-carboxy-7-deazaguanine synthase OS=Sphingomonas trueperi; OX = 53317 GN=queE PE=3 SV=1
MSYAVKEMFLTLQGEGVNAGARAVFVRFAGCNLWSGREEDRATAVCRFCDTDFVGMDGLGGGRFADADALVSAVEGHWGPGRDKRFVVLTGGEPMLQIDDALVEALHARGFRIAIESNGTLAVHPGIDWVCISPKAGSDVVQRRGDELKLVWPQPGTDLEAIEEWDFAHFLIQPMDSAAAEANTRAAIAVAMERPRWRLTLQTHKLLGLR

SEQ ID NO: 34327 - protein, 210 aa, unidentified
  source 1..210: note = Sphingomonas turrisvirgatae
  REGION 1..210: note = tr|A0A1E3LUQ4|A0A1E3LUQ4_9SPHN 7-carboxy-7-deazaguanine synthase OS=Sphingomonas turrisvirgatae OX=1888892 GN=queE PE=3 SV=1
MTYSVKELFLTLQGEGVNAGARAVFVRFAGCNLWSGREQDRASAICRFCDTDFVGTDGLGGGKFGEAQALAAAVEQHWGEGDERRFVVLTGGEPMLQVDDALVDALHARGFRIAIESNGTLPAHPRIDWVCISPKAGSTVVQRRGDELKLVWPQPGSDVAEIERWDFANFLVQPMDDADAAANVQAAIDFAMARPKWRLTLQAHKALGLR

SEQ ID NO: 34328 - protein, 210 aa, Sphingomonas wittichii
  REGION 1..210: note = tr|A0A1X9UIT7|A0A1X9UIT7_SPHSD 7-carboxy-7-deazaguanine synthase OS=Sphingomonas wittichii (strain DC-6 / KACC 16600) OX=1283312 GN=queE; PE = 3 SV=1
MAGYAVKEMFLTLQGEGVQVGRRAVFLRFAGCNLWSGREEDRADAQCRFCDTDFVGLDGDNGGRYPHADALADKAIALWGDLAGAFIVMTGGEPLLQVDDALVAALKARGFETAVETNGTQPAPAGIDWICVSPKAGTDIVLRRGNELKLVWPQPGIDPAALEGWDFEHFLLQPMDGAQLDEARGAAIAYVMDHPRWRLSTQTHKVVGIR

SEQ ID NO: 34329 - protein, 210 aa, Sphingomonas wittichii
  REGION 1..210: note = tr|A5V651|A5V651_SPHWW 7-carboxy-7-deazaguanine synthase OS=Sphingomonas wittichii (strain RW1 / DSM 6014 / JCM 10273) OX=392499 GN=queE PE=3 SV=1
MAGYAVKEMFLTLQGEGVQVGRRAVFLRFAGCNLWSGREEDRADAQCRFCDTDFVGLDGDNGGRYPHADALADKAIALWGDLAGAFIVMTGGEPLLQVDDALVAALKARGFETAVETNGTQPAPAGIDWICVSPKAGTDIVLRRGNELKLVWPQPGIDPAALEGWDFEHFLLQPMDGAQLDEARAAAIAYVMDHPRWRLSTQTHKVVGIR

SEQ ID NO: 34330 - protein, 210 aa, Sphingomonas yabuuchiae
  REGION 1..210: note = tr|A0A147IJM2|A0A147IJM2_9SPHN 7-carboxy-7-deazaguanine synthase OS=Sphingomonas yabuuchiae OX=172044 GN=queE PE=3 SV=1
MSYAVKEMFLTLQGEGVQAGRRAVFVRFAGCNLWSGREQDRASAICRFCDTDFVGVDGLGGGRFADAGALVAAVEGFWGESRGERFVVLTGGEPMLQVDDALVDALHAAGFFIAIESNGTIAAHPGIDWVCISPKAGSAVVQRSGQELKLVWPQAGIDPAEVEGWDFANHLLQPLDDPRADENREACIAMVMERPRWRLTLQTHKMLGLR

SEQ ID NO: 34331 - protein, 210 aa, Sphingopyxis alaskensis
  REGION 1..210: note = tr|Q1GTF4|Q1GTF4_SPHAL 7-carboxy-7-deazaguanine synthase OS=Sphingopyxis alaskensis (strain DSM 13593 / LMG 18877 / RB2256) OX=317655 GN=queE PE=3 SV=1
MAYSVKEIFLTLQGEGAQAGRRAVFCRFAGCNLWTGREQDRAKAICRFCDTDFVGTDGTLGAKYRDAAALADVIAESWGPGSDDRYVVLTGGEPMLQVDDALIDALHARGFTIAIESNGTLPIPRSIDWICVSPKAGSELVQSSGDELKLVWPQPGSDVAKLAALDFRHLLVQPLDDRNAAANVQACIDLVMADPRWRLSLQTHKSLGLR

SEQ ID NO: 34332 - protein, 210 aa, Sphingopyxis alaskensis
  REGION 1..210: note = tr|Q1GPS2|Q1GPS2_SPHAL 7-carboxy-7-deazaguanine synthase OS=Sphingopyxis alaskensis (strain DSM 13593 / LMG 18877 / RB2256) OX=317655 GN=queE PE=3 SV=1
MSYAVKEIFKTLQGEGAQMGRAAVFCRFAGCNLWSGREGDRTTSVCTFCDTDFVGMDGSGGGRFADDQALADAIESEWAGARADRYVVLTGGEPLLQVDQDLVDALHTRGFEIAIETNGTQPAPRGLDWICVSPKADAELVLLAGNELKLVYPQEKAAPERFEHLAFEHFFLQPMDSPTAAANLEAAITYCTQNPRWRLSLQSHKMIGIR

SEQ ID NO: 34333 - protein, 210 aa, Sphingopyxis bauzanensis
  REGION 1..210: note = tr|A0A246JRX7|A0A246JRX7_9SPHN 7-carboxy-7-deazaguanine synthase OS=Sphingopyxis bauzanensis OX=651663 GN=queE PE=3 SV=1
MTYAVKEIFLTLQGEGAQAGRRAVFCRFAGCNLWTGREQDRGKAICKFCDTDFVGTDGTLGGKYADAVALAAVIAECWGPGGDEHYVVLTGGEPMLQVDAALIDALHEQGFTIAIETNGTFAVPRSIDWICVSPKAGSELVQLSGDELKLVWPQPGSDVERLAALDFTHRLVQPLDDPNAADSVQHCIDLVMADPRWRLSLQTHKSLGLR

SEQ ID NO: 34334 - protein, 210 aa, unidentified
  source 1..210: note = Sphingopyxis flava
  REGION 1..210: note = tr|A0A1T5D6L9|A0A1T5D6L9_9SPHN 7-carboxy-7-deazaguanine synthase OS=Sphingopyxis flava; OX = 1507287 GN=queE PE=3 SV=1
MAYSVKEIFLTLQGEGAQAGRRAVFCRFAGCNLWTGREGDRARAVCRFCDTDFVGTDGTLGGKYPDAGTLADQIAAIWGAGSDDRYVVLTGGEPMLQVDEALIGSLHERGFTIAIETNGTIPVPRSIDWICVSPKSGSKLVQTSGDELKLVWPQPGSDVEHFAALDFAHHLVQPLDDPKAADNVRACIDLVMADPRWRLSLQTHKSLGLR

SEQ ID NO: 34335 - protein, 210 aa, unidentified
  source 1..210: note = Sphingopyxis fribergensis
  REGION 1..210: note = tr|A0A0A7PKJ0|A0A0A7PKJ0_9SPHN 7-carboxy-7-deazaguanine synthase OS=Sphingopyxis fribergensis OX=1515612 GN=queE PE=3 SV=1
MTYAVKEIFLTLQGEGAQAGRRAVFCRFAGCNLWTGREKDRAKAVCQFCDTDFVGTDGTMGGKYKIAAALADVIAESWGAGSDDRYVVLTGGEPMLQVDDALIDALHERGFTIAIESNGTFPIPRSIDWICVSPKAGSELVQLSGDELKLVWPQPGSDVARLAGLDFAHLLVQPLDDPHAAANVQACIDLVMDDPRWRLSLQTHKNLGLR

SEQ ID NO: 34336 - protein, 210 aa, Sphingopyxis granuli
  REGION 1..210: note = tr|A0A109YLX4|A0A109YLX4_9SPHN 7-carboxy-7-deazaguanine synthase OS=Sphingopyxis granuli; OX = 267128 GN=queE PE=3 SV=1
MSYAVKEIFLTLQGEGARSGRRAVFCRFAGCNLWTGREVDRAKAVCRFCDTDFVGTDGTLGGKYADAATLATAIAQSWGEARDRRYVVLTGGEPMLQVDRALIDALHGEGFTIAIETNGTLPVPRAIDWICVSPKAGSELVQTSGDELKLVWPQPGSDVERLAGLDFAHRLIQPLDDAHAADNARACIELVMRDPRWQLSLQTHKHLGLR

SEQ ID NO: 34337 - protein, 210 aa, unidentified
  source 1..210: note = Sphingopyxis indica
  REGION 1..210: note = tr|A0A239E9K2|A0A239E9K2_9SPHN 7-carboxy-7-deazaguanine synthase OS=Sphingopyxis indica; OX = 436663 GN=queE PE=3 SV=1
MTYAVKEIFLTLQGEGVQAGRRAVFCRFAGCNLWTGREQDRAKAICQFCDTDFVGTDGTLGGKYADAAALVRIIAECWGAGGDDRFVVLTGGEPMLQVDDALIDALHAAGFTIAIESNGTQAVPRSIDWICISPKAGSDLVQTSGDELKLVWPQPGSDVDRLAALDFRHRLIQPLDDPNAAANVRACIDLVMADPRWRLSLQAHKALGLR

SEQ ID NO: 34338 - protein, 210 aa, unidentified
  source 1..210: note = Sphingopyxis lindanitolerans
  REGION 1..210: note = tr|A0A2S8BAY7|A0A2S8BAY7_9SPHN 7-carboxy-7-deazaguanine synthase OS=Sphingopyxis lindanitolerans OX=2054227 GN=queE PE=3 SV=1
MTYAVKEIFLTLQGEGAQAGRRAVFCRFAGCNLWTGREQDRGKAICQFCDTDFVGTDGTLGGKYADAAALARVIGACWGEGRADRYVVLTGGEPMLQVDAPLIDALHAEGFTIAIETNGTHNVPRSIDWICVSPKAGSQLVQQSGDELKLVWPQPGSDVAALADLDFAHRLIQPLDDPNAAANVQACIDLVMADPRWRLSLQTHKSLGLR

SEQ ID NO: 34339 - protein, 210 aa, Sphingopyxis macrogoltabida
  REGION 1..210: note = tr|A0A2W5L4P6|A0A2W5L4P6_SPHMC 7-carboxy-7-deazaguanine synthase OS=Sphingopyxis macrogoltabida OX=33050 GN=queE PE=3 SV=1
MAYAVKEIFLTLQGEGAQAGRRAVFCRFAGCNLWTGRERDRAKAVCRFCDTDFVGTDGTLGARYADADALAAVIADCWGGGSADRYVVLTGGEPMLQVDAALIDALHGHGFTIAIETNGTHAVPRAIDWICVSPKAGSVLVQTSGDELKLVWPQPGSDVAALAALDFTHRLVQPLDDPQAAANVRACIDLVMADPRWRLSLQDHKKLGLR

SEQ ID NO: 34340 - protein, 210 aa, Sphingopyxis macrogoltabida
  REGION 1..210: note = tr|A0A0N9UUV0|A0A0N9UUV0_SPHMC 7-carboxy-7-deazaguanine synthase OS=Sphingopyxis macrogoltabida OX=33050 GN=queE PE=3 SV=1
MTYAVKEIFLTLQGEGAQAGRRAVFCRFAGCNLWTGREQDRAKAVCKFCDTDFVGTDGTLGGKYRDAKTLAAVIAESWGEASADRYVVLTGGEPMLQVDDALIDALHAQGFTIAIESNGTLPVPRSIDWICISPKAGSELVQRSGDELKLVWPQPGSDVDMLASLDFAHRLIQPLDDPHAADNVRRCIDLVMADPRWRLSLQTHKSLGLR

SEQ ID NO: 34341 - protein, 210 aa, Sphingopyxis sp.
  REGION 1..210: note = tr|A0A0W1DVB2|A0A0W1DVB2_9SPHN 7-carboxy-7-deazaguanine synthase OS=Sphingopyxis sp. H050; OX = 1759072 GN=queE PE=3 SV=1
MSYAVKEIFLTLQGEGAQAGRRAVFCRFAGCNLWTGREQDRAQAICKFCDTDFVGTDGTLGEKYRTAEALAATIAESWGSGADDRYVVLTGGEPMLQVDEALIDALHAEGFTIAIESNGTQVVPRSIDWICISPKAGSALIQKSGDELKLVWPQPGSDVEALAELDFAHRLIQPLDDPNAAANVQACIDLVMADPRWRLSLQTHKSLGLR

SEQ ID NO: 34342 - protein, 210 aa, Sphingopyxis sp.
  REGION 1..210: note = tr|A0A0Q8RS79|A0A0Q8RS79_9SPHN 7-carboxy-7-deazaguanine synthase OS=Sphingopyxis sp. Root214 OX=1736491 GN=queE PE=3 SV=1
MTYAVKEIFLTLQGEGAQAGRRAVFCRFAGCNLWTGREQDRAKAICQFCDTDFVGTDGTLGGKYSTAAALADVIAESWGQGSDDRYVVLTGGEPMLQVDGALIDALHERGFTIAIESNGTLPVPRSIDWICVSPKAGSDLVQTSGDELKLVWPQPGSDVARLATLDFKHLLVQPLDDPHAAANVQACIDLVMDDPRWRLSLQTHKNLGLR

SEQ ID NO: 34343 - protein, 210 aa, Sphingopyxis terrae
  REGION 1..210: note = tr|A0A142W2N8|A0A142W2N8_9SPHN 7-carboxy-7-deazaguanine synthase OS=Sphingopyxis terrae subsp. terrae NBRC 15098 OX=1219058 GN=queE PE=3 SV=1
MTYAVKEIFLTLQGEGAQAGRRAVFCRFAGCNLWTGREQDRARAICKFCDTDFVGTDGTLGGKYADAAALAERIGETWGAAQGDRYVVLTGGEPMLQVDDALIEALHGEGFTVAIESNGTLPVPRLIDWICISPKAGSELVQTSGDELKLVWPQPGSDVERLAELDFAHRLIQPLDDANAADNVRNCIDLVMRDPRWRLSLQTHKTLGLR

SEQ ID NO: 34344 - protein, 210 aa, Sphingopyxis terrae
  REGION 1..210: note = tr|A0A1Y6EBS3|A0A1Y6EBS3_9SPHN 7-carboxy-7-deazaguanine synthase OS=Sphingopyxis terrae subsp. ummariensis OX=429001 GN=queE PE=3 SV=1
MAYAVKEIFLTLQGEGAQAGRRAVFCRFAGCNLWTGREQDRAKAICKFCDTDFVGTDGTLGGKYADAAALAERIGETWGAAQDDRYVVLTGGEPMLQVDDALIEALHGEGFTVAIESNGTLPVPRLIDWICISPKAGSELVQTSGDELKLVWPQSGSDVERLAELDFAHRLIQPLDDANAADNARHCIDLVMRDPRWRLSLQTHKTLGLR

SEQ ID NO: 34345 - protein, 210 aa, Sphingopyxis witflariensis
  REGION 1..210: note = tr|A0A246K535|A0A246K535_9SPHN 7-carboxy-7-deazaguanine synthase OS=Sphingopyxis witflariensis OX=173675 GN=queE PE=3 SV=1
MTYAVKEIFLTLQGEGAQAGRRAVFCRFAGCNLWTGREVDRAKAVCKFCDTDFVGTDGTLGGKYADAAALAAVIAENWGEGFDDRYVVLTGGEPMLQVDEALIEALHREGFTVAIESNGTLAVPRSIDWICISPKAGSELVQLSGDELKLVWPQPGSDVERLAELDFEHRLVQPLDDPNAADNVQRCIDLVMDDPRWRLSLQAHKSLGLR

SEQ ID NO: 34346 - protein, 212 aa, unidentified
  source 1..212: note = Sphingorhabdus contaminans
  REGION 1..212: note = tr|A0A553WH41|A0A553WH41_9SPHN 7-carboxy-7-deazaguanine synthase OS=Sphingorhabdus contaminans OX=1343899 GN=queE PE=3 SV=1
MSYAVKEIFLTLQGEGVHAGRRAVFLRFAGCNLWTGREEDRASAICQFCDTDFVGMDGENGGRYSADEIATRVAELWGESQSDRYVVLTGGEPMLQVDDALVDGLHARGFTIAIESNGTIETHPRIDWVCISPKAGSEVVQRRGDELKLVWPQNGSDTDAMAHWNFANFLIQPMDSGDSATNQAHVEAATAFVMAHPKWRLSLQNHKILGLP

SEQ ID NO: 34347 - protein, 214 aa, unidentified
  source 1..214: note = Sphingorhabdus marina
  REGION 1..214: note = tr|A0A1N6F569|A0A1N6F569_9SPHN 7-carboxy-7-deazaguanine synthase OS=Sphingorhabdus marina DSM 22363 OX=1123272 GN=queE PE=3 SV=1
MNYAVKEMFLTLQGEGVHAGRRAVFARFAGCNLWSGLEKDRANAVCRFCDTDFVGMDGEGGGRFADADAFADAVARLWGDEKERRFVVLTGGEPMLQVDAALIDALHDAGFEIAIESNGTIAVPRAIDWICISPKAGSETVQKTGDELKLVWPQSGSDWEEMENWDFANLLIQPMDALGDPVVSEANVRSAIKFVQLNPKWRLSLQTHKILGLA

SEQ ID NO: 34348 - protein, 210 aa, unidentified
  source 1..210: note = Sphingorhabdus sp.
  REGION 1..210: note = tr|A0A2D5DJX8|A0A2D5DJX8_9SPHN 7-carboxy-7-deazaguanine synthase OS=Sphingorhabdus sp.; OX = 1902408 GN=queE PE=3 SV=1
MSYAVKEIFPTLQGEGAHAGRRAVFLRFAGCNLWTGREQDREKAICRFCDTDFVGMDGENGARYADAESLGDKVAELWGAGRTRRYVVMTGGEPMLQVDDALIDALHARGFEIAIESNGTLPVPRTIDWICISPKAGSETVQRSGDELKLVWPQPGSDWQAMESWDFSHHLIQPMDSASADENRAEAIAFVEAHPAWRLSLQTHKLLGLP

SEQ ID NO: 34349 - protein, 210 aa, unidentified
  source 1..210: note = Sphingorhabdus sp.
  REGION 1..210: note = tr|A0A5C6ULX4|A0A5C6ULX4_9SPHN 7-carboxy-7-deazaguanine synthase OS=Sphingorhabdus sp. D-2Q-5-6 OX=2601267 GN=queE PE=3 SV=1
MAYAVKELFLTLQGEGVRSGRRAVFCRFAGCNLWSGREQDRASATCKFCDTDFVGTNGAGGGKFADAGALADAITGFWGDDAALRYVVLTGGEPMLQVDDALVDALHDRGFEIAIETNGTLAVPRSIDWICVSPKAGSTTVQRSGDELKLVWPQPGSDIDAMEGWDFVHRLIQPMDDARSAENMRACVDLVIERPHWRLSLQTHKLLGIR

SEQ ID NO: 34350 - protein, 212 aa, unidentified
  source 1..212: note = Sphingorhabdus wooponensis
  REGION 1..212: note = tr|A0A426RU85|A0A426RU85_9SPHN 7-carboxy-7-deazaguanine synthase OS=Sphingorhabdus wooponensis OX=940136 GN=queE PE=3 SV=1
MSYAVKEIFLTLQGEGVHAGRRAVFLRFSGCNLWTGREEDRASAICQFCDTDFVGMDGENGGRYDAEALAAKVAALWGDGTENRYVVITGGEPMLQVDDAIVDALHAQAFQIAIESNGTIEVHPGIDWVCISPKAGSDVIHRRGDELKLVWPQPASNIDAMEQWQFAHFLIQPMDAGDLGVNAANVAEATRFVMERPKWRLSLQNHKILGLP

SEQ ID NO: 34351 - protein, 208 aa, unidentified
  source 1..208: note = Sphingosinicella ginsenosidimutans
  REGION 1..208: note = tr|A0A5C6TP92|A0A5C6TP92_9SPHN 7-carboxy-7-deazaguanine synthase OS=Sphingosinicella ginsenosidimutans OX=1176539 GN=queE PE=3 SV=1
MTYAVKEMFLTLQGEGMQAGRRAVFLRMAGCNLWSGREIDRPTAQCRFCDTDFVGTDGENGGRYAAGALADRAAALWGEGDRPLVVITGGEPTLQLDAALIDALHAAGFEIAIETNGTLPAPAGLDWICVSPKAGTEIVQRRGNELKLVWPQTGIDPAALLGWDFDHFLIQPMDCADAVAARAAAIDYVMRHPRWALSLQTHKLLGLP

SEQ ID NO: 34352 - protein, 210 aa, Sphingosinicella microcystinivorans
  REGION 1..210: note = tr|A0A495RX52|A0A495RX52_SPHMI 7-carboxy-7-deazaguanine synthase OS=Sphingosinicella microcystinivorans OX=335406 GN=queE PE=3 SV=1
MTYTVKELFLTLQGEGAQTGRRAVFLRFSGCNLWSGLERDRAGAVCTFCDTDFIGTDGPGGGKFADAEALADAVAAAWGMGAEHRLVVCTGGEPLLQLDPALIDALHAREFSIAIETNGTLPAPAGIDWICVSPKADAELVQTSGDELKLVYPQPNNSPEMFEQLDFRNFFLQPMDGPAQAENIAAATDYCLTHPKWRLSLQTHKLIGIP

SEQ ID NO: 34353 - protein, 210 aa, Sphingosinicella sp.
  REGION 1..210: note = tr|A0A2P7QJ25|A0A2P7QJ25_9SPHN 7-carboxy-7-deazaguanine synthase OS=Sphingosinicella sp. GL-C-18 OX=2116704 GN=queE PE=3 SV=1
MSYAVKEIFLTLQGEGVQAGRRAVFLRFAGCNLWSGREQDRARAQCTFCDTDFVGTDGENGGRYDADGLVAMVSSLWGEEGRVRRLVVITGGEPMLQLDAALIDALHRAGFEIAMESNGTLAAAAGIDWICVSPKAGTEVVQRSGNELKLVWPQRGLDPQAMLAWDFEHFLIQPLDDTAAPANVQAAIDYVMANPRWRLSLQTHKLLGLP

SEQ ID NO: 34354 - protein, 210 aa, Sphingosinicella sp.
  REGION 1..210: note = tr|A0A4P6FT85|A0A4P6FT85_9SPHN 7-carboxy-7-deazaguanine synthase OS=Sphingosinicella sp. BN140058 OX=1892855 GN=queE PE=3 SV=1
MSYAVKEIFLTLQGEGLQAGRRAVFLRFAGCNLWSGREQDRATAQCTFCDTDFVGTDGENGGRYDAERLVDTVAALWGAESMARRLVVVTGGEPMLQLDAALIDALHGAGFEIAMESNGTLASADGIDWICISPKAGTSIVQRSGDELKLVWPQVGIDPEAMLGWDFRHFLIQPLDAADAASNRQAAIDYVMANPRWRLSLQTHKLLGLP

SEQ ID NO: 34355 - protein, 228 aa, unidentified
  source 1..228: note = Spiribacter salinus
  REGION 1..228: note = tr|A0A540VN03|A0A540VN03_9GAMM 7-carboxy-7-deazaguanine synthase OS=Spiribacter salinus; OX = 1335746 GN=queE PE=3 SV=1
MLDVVAIFSTIQGEGPFSGVPAVFIRLAGCNLQCPFCDTDYTSGRRELNNALLVDAVRSEHPLGVGLVVITGGEPFRQDIGKLIACLVDQGYAVQVETNGTLPPSDLTRYGLEWLVQPRSPLTGAYIVCSPKTGKVHEDVVARACAFKYVIDAWHVDPDDGLPTSVLGHTVKDKVARPPAWWDRPVYIQPADEQDAQCNTLNTDVAIASAMDHGYTLQLQIQKYLGME

SEQ ID NO: 34356 - protein, 243 aa, unidentified
  source 1..243: note = Spirobacillus cienkowskii
  REGION 1..243: note = tr|A0A369KV06|A0A369KV06_9PROT 7-carboxy-7-deazaguanine synthase OS=Spirobacillus cienkowskii OX=495820 GN=queE PE=3 SV=1
MHASFLVNEMYPCLQGEGVNLGKPSLLVRFQICNLRCSWCDTPYTHTFKSDPVSSTEPKGIQKFTRHSLNELVTKIQSFKVNHLILSGGEPTLHNIGLLMRSLGSNYTAEVESNGTRIPHLQIPNFLNSDYFLMQWNISPKFSNANEKINSEALEHWAKLSLQYDQIYFKFVIRKQEAIEDLNEVLKIISKFNISKHKVLLMPEGTNIESQICNVWLHDICLKHSFRYTPRLHVLLFGNLRGV

SEQ ID NO: 34357 - protein, 287 aa, Spirochaeta sp.
  REGION 1..287: note = tr|A0A2D7DMS8|A0A2D7DMS8_9SPIO 7-carboxy-7-deazaguanine synthase OS=Spirochaeta sp.; OX = 28185 GN=queE PE=3 SV=1
  VARIANT 84: note = Xaa can be any naturally occurring amino acid
  VARIANT 206: note = Xaa can be any naturally occurring amino acid
  VARIANT 262: note = Xaa can be any naturally occurring amino acid
  VARIANT 270: note = Xaa can be any naturally occurring amino acid
MASRRTLNASRKSSPRSPWDAQRWNARSMETDPQGNLVEVFWSAQGEGTFVGRPTVFVRFGGCDLRCRWCDSAYTWHPVESCRXEMEPGNQSFASEANPIRMTRILEAIQQLEPQPGSFISLTGGEPLLQPEFAGALAQACQERGWQTHLETHGLDPEGLERVLPSIDLVAMDWKLAGEVKPAASASVTQEDFYRLHREFMALATXQARVNVKVVLTSQTSADDLTAVCQSVSELAPEAALILQPVSEIGSSRPPDPRTLMXLLRHCERXVADVRLIPQTHKVYGAL

SEQ ID NO: 34358 - protein, 262 aa, unidentified; identical to SEQ ID NO: 31197
  source 1..262: note = Spirochaetaceae bacterium
  REGION 1..262: note = tr|A0A2E8PWV7|A0A2E8PWV7_9SPIO 7-carboxy-7-deazaguanine synthase OS=Spirochaetaceae bacterium OX=1898206 GN=queE PE=3 SV=1

SEQ ID NO: 34359 - protein, 242 aa, unidentified
  source 1..242: note = Spirochaetaceae bacterium
  REGION 1..242: note = tr|A0A2E9Q8E7|A0A2E9Q8E7_9SPIO 7-carboxy-7-deazaguanine synthase OS=Spirochaetaceae bacterium OX=1898206 GN=queE PE=3 SV=1
MKKIENRSIIGDSQLTEREATADRDSGSSERFLKLSEVYGTLQGEGSHSGLPCFFLRLAVCDIRCSWCDTPDSWTGGAWKSRAEILAMIPDNMQLVQITGGEPVLQMKRLRLLMEDLHERGKKILLETGGHRNLSEVPEFVHIIMDIKLPSSGEDGHPFEDNFPYLKATDEIKFVVQDERDFRAAVDWIERHNLDRRFQLLVSPVPGLDLKKLAAWVLETKLTMRLQVQLHKYIWGPDAKMV

SEQ ID NO: 34360 - protein, 217 aa, unidentified
  source 1..217: note = Spirochaetae bacterium
  REGION 1..217: note = tr|A0A2N1T9Z8|A0A2N1T9Z8_9SPIR 7-carboxy-7-deazaguanine synthase OS=Spirochaetae bacterium HGW-Spirochaetae-1 OX=2013832 GN=queE PE=3 SV=1
MKLIVKEIFFSLQGETTTTGFPSLFIRLTGCNLRCRYCDSEYAWNGGSEMEIAAIMAKIHNETGIHHITITGGEPLCQENVRYLIKNLCDGGYNVQIETNGSLPLEKIDARARKIVDVKTPSSGEDSSFLMENLTCLNPHDEIKFVIGDTTDYNFARDFTRKHLEKLDSTVNFSPVYGNITYNTMASWILRDRLMVRLNLQLHKIAELETDGEKNFL

SEQ ID NO: 34361 - protein, 209 aa, unidentified
  source 1..209: note = Spirochaetae bacterium
  REGION 1..209: note = tr|A0A2N1RPB5|A0A2N1RPB5_9SPIR 7-carboxy-7-deazaguanine synthase OS=Spirochaetae bacterium HGW-Spirochaetae-5 OX=2013837 GN=queE PE=3 SV=1
MKLKVYEIFYSIQGETTTAGFPSLFIRLAGCNLNCSWCDTVKAKDGGREMDVEDIIDEVNRNKPFHHVTLTGGEPLIQDGALHLLQRLSEEGYTTQVETNGTVLYGTIPDNVRIVTDVKTPSSGEAGSFRDENISHLSKNDEVKFVIAMMEDYEFAKSFVKDKLKNSEAVINFSPASGMMEPWVLANLIIKDKLPVRLNIQLHKIAKFA

SEQ ID NO: 34362 - protein, 214 aa, unidentified
  source 1..214: note = Spirochaetales bacterium
  REGION 1..214: note = tr|A0A2E9KWV0|A0A2E9KWV0_9SPIR 7-carboxy-7-deazaguanine synthase OS=Spirochaetales bacterium OX=2026792 GN=queE PE=3 SV=1
MKLRVNEIFQSIQGEGIQIGAPTIFLRLFGCDLRCAWCDSMHAVEGSDYQNITLDDIIQEAESHDCKNICITGGEPLLQQDVLVPLIDILIQKKYNILLETSGHIRPNEIFYNPNVLISMDCKCPGSTMEKKTDFSILESLQEKDQIKFVINDKSDYEYAKQIITHRHFRATIVFQPVYGTDISFLVDLALKDNLNIKVLPQLHKLIWGDIRGV

SEQ ID NO: 34363 - protein, 238 aa, unidentified
  source 1..238: note = Spirochaetes bacterium
  REGION 1..238: note = tr|A0A522D3T2|A0A522D3T2_9SPIR 7-carboxy-7-deazaguanine synthase OS=Spirochaetes bacterium OX=2202144 GN=queE PE=3 SV=1
MHERIRAGVQLKARAKTVRNTADDRLLVHGIFLSIEGETTTAGFPSAFVRLAGCNLTCSWCDTPEAREGGARMSVDEVVKKVARLGAVHHVTLTGGEPLLQGNSIPLIRKLLAARRNVQVETNGSIPLDAVPPHARIIADVKTPSSGCAGSFVLRNLEFLKASDEIKFVIAGGGDYRFAKRFIKKYLAESAAVVNLSPVSDRMRPDELARLILNDRLRCRLNLQLHTIIWPGGEPKDL

SEQ ID NO: 34364 - protein, 219 aa, unidentified
  source 1..219: note = Spirochaetes bacterium
  REGION 1..219: note = tr|A0A1G3LH67|A0A1G3LH67_9SPIR 7-carboxy-7-deazaguanine synthase OS=Spirochaetes bacterium GWB1_27_13 OX=1802173 GN=queE PE=3 SV=1
MLEIVEKFITISGEAPTIGEPIFLIRLSGCNLTCSYCDTTYNNEVNEYISSDNLKNEIIENVQDFPELKVLFTGGEPLLKERQEDIFAIINDLKYINFYIETNGSVPITNFTLPNCYFVADWKSPTSKNEIDFYLDNLKHFRIDKDCIKFVVSKDDLHWLKTKISHINKINPFLPLYVSPQFNKITLEEIADFIIKNKLPLKMSFQFHKIIWPLKDRGV

SEQ ID NO: 34365 - protein, 210 aa, unidentified
  source 1..210: note = Spirochaetia bacterium
  REGION 1..210: note = tr|A0A3D3AJ97|A0A3D3AJ97_9SPIR 7-carboxy-7-deazaguanine synthase OS=Spirochaetia bacterium OX=2053615 GN=queE PE=3 SV=1
MKLKINEIFYSLQGEGSASGYPFIFIRFSNCNLRCLYCDTKFSFNEGEELPVKEVTERISYLPSVDHILITGGEPLLQKEGLLELLKELFVMKKKIFIETNGSVDISFLPREIVKIIDVKTPSSGYPSSFHIENLKYLTEKDDMKFVISDKEDFDFSVRFIEEHRLINKINLIFSPVYKVLEKEKLAQWILESGLPVRFSIQLHKLLKMK

SEQ ID NO: 34366 - protein, 219 aa, unidentified
  source 1..219: note = Spirochaetia bacterium
  REGION 1..219: note = tr|A0A352VVQ2|A0A352VVQ2_9SPIR 7-carboxy-7-deazaguanine synthase OS=Spirochaetia bacterium OX=2053615 GN=queE PE=3 SV=1
MAAEEKALPPFFLLISEIFFSIEGETEFQGLPCIFVRTAGCNLSCSYCDSPGSRSFSSGRELAITDILTIIKKYACSLICITGGEPLLQKDINPLLEILIKNNYQVLLETNGSRSVADLPAGIIKIIDVKTPSSGQAENFYRKNLLFLEGKDHLKYIIGCREDFDFTLDFIAKNHLEEKINIVQPVYGKLAVNDLAGWVLDCGKKIRVQIQLHKLAGLP

SEQ ID NO: 34367 - protein, 216 aa, unidentified
  source 1..216: note = Spirosoma endophyticum
  REGION 1..216: note = tr|A0A1I1VY91|A0A1I1VY91_9BACT 7-carboxy-7-deazaguanine synthase OS=Spirosoma endophyticum OX=662367 GN=queE PE=3 SV=1
MLLEQKQQTIITSTEPTASLPVMEAFYTLQGEGAHTGRAAYFIRLGGCEVGCHWCDVKESWDVNVHPKIPIDTIVDGALQHPGRMAVITGGEPLMHDLTRLTATLQMAGFQTNIETSGVCKAVTGSWDWICFSPKKFKKPNPDIYRKADELKVIIYNQSDFAFAESFVHELRPNCKLFLQSEWSRSNEMLPLIVDYVKNNPQWQISLQTHKYLDIP

SEQ ID NO: 34368 - protein, 216 aa, unidentified
  source 1..216: note = Spirosoma fluviale
  REGION 1..216: note = tr|A0A286FFG3|A0A286FFG3_9BACT 7-carboxy-7-deazaguanine synthase OS=Spirosoma fluviale; OX = 1597977 GN=queE PE=3 SV=1
MLLTQEQQTKQTDNQSTTALPVMEAFYTLQGEGAHTGRAAYFIRLGGCDVGCHWCDVKESWDADAHPKQTIDALVQGALQYPGRMAVITGGEPLMHDLTELTEALQTAGFQTNIETSGVCQTVTGSWDWICFSPKKFKKPNPAIYERADELKVIIYNQSDFAFAESFVPYLRPDCKLFLQSEWGRSNEMLPRIVDYVKDHPQWQISLQTHKFLDIP

SEQ ID NO: 34369 - protein, 216 aa, Spirosoma linguale
  REGION 1..216: note = tr|D2QQX5|D2QQX5_SPILD 7-carboxy-7-deazaguanine synthase OS=Spirosoma linguale (strain ATCC 33905 / DSM 74 / LMG 10896) OX=504472 GN=queE PE=3 SV=1
MLLTQEQQTKQTDNQSTIALPVMEAFYTIQGEGAHTGRAAYFIRLGGCDVGCHWCDVKESWDADAHPKQSIDALVKGALQYPGRLAVITGGEPLMHDLTALTEALQVAGFKTNIETSGVCQTVTGSWDWICFSPKKFKKPNPAIYEKADELKVIIYNQSDFAFAESFVPYLRPDCKLFLQSEWGRSNEMLPRIVDYVKDHPQWQISLQTHKFLNIP

SEQ ID NO: 34370 - protein, 211 aa, unidentified
  source 1..211: note = Spirosoma montaniterrae
  REGION 1..211: note = tr|A0A1P9WTG6|A0A1P9WTG6_9BACT 7-carboxy-7-deazaguanine synthase OS=Spirosoma montaniterrae OX=1178516 GN=queE PE=3 SV=1
MVSEQQQQTRQTNTLPVMEAFYTLQGEGVHTGRAAYFIRLGGCDVGCHWCDVKESWDVNAHPHHTVDNIVAGALDYPGRLAVITGGEPLMHDLTNLTAALQTAGFQTNIETSGVCEAVTGSWDWICFSPKKFKKPNPAIFEQADELKVIVYNQSDFAFAESFVPFLRPGCTLFLQTEWSRSNEMLPRIVQYIKEHPQWQLSLQTHKYLDIP

SEQ ID NO: 34371 - protein, 209 aa, unidentified
  source 1..209: note = Spirosoma oryzae
  REGION 1..209: note = tr|A0A2T0SLX2|A0A2T0SLX2_9BACT 7-carboxy-7-deazaguanine synthase OS=Spirosoma oryzae; OX = 1469603 GN=queE PE=3 SV=1
MLTEQQTTDTTTLPVMEAFYTLQGEGAHTGRAAYFIRLGGCDVGCHWCDVKESWDASLHPQLSIDQIVAGAAAHPGRMAVITGGEPLMHDLTTLTNALQTAGFSTNIETSGVCTAVTGSWNWICFSPKKFKKPNPAIYGLANELKVIIYNASDFAFAESFVPHLRPDCKLFLQTEWSRSNEMLPRIVDYVKNNPQWQISLQTHKYMDIP

SEQ ID NO: 34372 - protein, 219 aa, unidentified
  source 1..219: note = Spirosoma pollinicola
  REGION 1..219: note = tr|A0A2K8Z7H0|A0A2K8Z7H0_9BACT 7-carboxy-7-deazaguanine synthase OS=Spirosoma pollinicola; OX = 2057025 GN=queE PE=3 SV=1
MLLTQKKQPIEMNSLLAVEATALPVMEAFYTIQGEGAHTGRAAYFIRLGGCDVGCHWCDVKESWDAEAHPKLSIDSLVDGALQYPGRMAVITGGEPLMHDLTELTAALQTAGFQTNIETSGVCQAVTGSWDWICFSPKKFKKPNPAIYDKADELKVIIYNQSDFAFAESFVPYLRPGCKLFLQTEWSRSNEMLPRIVDYVKDHPQWQISLQTHKYLDIP

SEQ ID NO: 34373 - protein, 194 aa, unidentified
  source 1..194: note = Spirosoma radiotolerans
  REGION 1..194: note = tr|A0A0E4A050|A0A0E4A050_9BACT 7-carboxy-7-deazaguanine synthase OS=Spirosoma radiotolerans OX=1379870 GN=queE PE=3 SV=1
MEAFYTIQGEGAHTGRAAYFIRLGGCDVGCHWCDVKESWDASVHPKLSIDSLVAGALQYPGRMAVITGGEPLMHDLTDLTASLQAAGFRTNIETSGVCQVVTGSWDWICFSPKKFKKPNPAIYTQADELKVIIYNQSDFAFAESFAPHLRPDCKLFLQTEWSRSNEMLPRIVEYVKDHPQWQISLQTHKYLDIP

SEQ ID NO: 34374 - protein, 214 aa, Spirosoma sp.
  REGION 1..214: note = tr|A0A4Q2UJV1|A0A4Q2UJV1_9BACT 7-carboxy-7-deazaguanine synthase OS=Spirosoma sp. TY50; OX = 2502893 GN=queE PE=3 SV=1
MLLEQKQQPSTDLLTSSLPVMEAFYTLQGEGAHTGRAAYFIRLGGCDVGCHWCDVKESWDVNAHPQRTIDAIVTGALAYPGRMAVITGGEPLMHNLTPLTRALQTAGFRTNIETSGVCEAVTGSWDWICFSPKKFKKPNPAIFERADELKVIVYNQSDFAFAESFVPSLRPDCKLFLQTEWSRSNEMLPRIVEYVKDHPQWQLSLQTHKYLDIP

SEQ ID NO: 34375 - protein, 194 aa, Spirosoma sp.
  REGION 1..194: note = tr|A0A515AAG0|A0A515AAG0_9BACT 7-carboxy-7-deazaguanine synthase OS=Spirosoma sp. KCTC 42546 OX=2520506 GN=queE PE=3 SV=1
MEAFYTLQGEGAHSGRAAYFIRLGGCDVGCFWCDVKESWDADAHPKLTINSIVDGALQYPGRMAVITGGEPLMHDLSELTSALQSAGFQTNIETSGVCQAVTGSWDWICFSPKKFKAPNPDIYNKANELKVIIYNQSDFAFAESFVPHLRPDCRLFLQTEWGRSNEMLPRIVEYVKDHPQWQISLQTHKYMDIP

SEQ ID NO: 34376 - protein, 215 aa, Spongiibacter sp.
  REGION 1..215: note = tr|A0A2D7WE96|A0A2D7WE96_9GAMM 7-carboxy-7-deazaguanine synthase OS=Spongiibacter sp.; OX = 2024860 GN=queE PE=3 SV=1
MSASLRITEIFYSLQGESRTIGLPTVFVRLTGCPLRCTYCDTEYAFHGGERRSIDDILAQVASYSPRYICVTGGEPLAQPECLTLLRALCDAGYEVSLETSGAMPVADVDPRVSKVVDLKTPASGEQHRNLMENLDHLGANDQVKFVICDRDDYDWARFQVDQHRLPERVGEVLFSPSFEQLPARDLADWIIDDNLPVRFQLQLHKLLWQDAPGH

SEQ ID NO: 34377 - protein, 215 aa, Spongiibacter sp.
  REGION 1..215: note = tr|A0A2E9SQP2|A0A2E9SQP2_9GAMM 7-carboxy-7-deazaguanine synthase OS=Spongiibacter sp.; OX = 2024860 GN=queE PE=3 SV=1
MSASLRITEIFYSLQGESRSIGLPTVFVRLTGCPLRCVYCDTEYAFHGGERQSIDQIVAKVESYAPRYVCVTGGEPLAQPDCLPLLTALCDAGYEVSLETSGAMPVDAVDSRVSRVVDLKTPASGEQHRNLMDNLPHLGANDQIKFVICDRGDYDWARFQLDQYQLNKKVGEVLFSPSFEQLPARQLADWIVEDNLPVRFQLQLHKLLWQDAAGH

SEQ ID NO: 34378 - protein, 218 aa, unidentified
  source 1..218: note = Spongiibacteraceae bacterium
  REGION 1..218: note = tr|A0A2E7IN38|A0A2E7IN38_9GAMM 7-carboxy-7-deazaguanine synthase OS=Spongiibacteraceae bacterium OX=2026793 GN=queE PE=3 SV=1
MTESDNSLRITEIFYSLQGESLTVGLPTVFVRLTGCPLRCQYCDTAYAFHGGERRSQQEILAQVAAHSPRYICVTGGEPLAQPACIPLLTALCDVGYQVSLETSGAMPVGAVDPRVARIVDIKTPDSAECEKNLWDNIDLLTDHDQLKFVICSRSDYEWARFQLDSRQLAARVGQVLFSPSFGQINATELANWIIEDNLPVRFQLQLHKLLWNDEPGH

SEQ ID NO: 34379 - protein, 216 aa, unidentified
  source 1..216: note = Spongiibacteraceae bacterium
  REGION 1..216: note = tr|A0A2E2K3S3|A0A2E2K3S3_9GAMM 7-carboxy-7-deazaguanine synthase OS=Spongiibacteraceae bacterium OX=2026793 GN=queE PE=3 SV=1
MTDTSLRITEIFYSLQGEALTVGLPTVFVRLTGCPLRCQYCDTEYAFHGGERLTQAQVLEQVAAFSPRYICVTGGEPLAQPSCIPLLSALCDAGYQVSLETSGAMPIDKVDARVSRVLDLKTPDSAESSRNLWDNIPLLTKHDQVKFVICSRRDYDWARLQLDQYRLNERAGEVLFSPSFGQQNATELADWIVQDNLPVRFQLQLHKLLWNDEPGH

SEQ ID NO: 34380 - protein, 213 aa, Sporocytophaga myxococcoides
  REGION 1..213: note = tr|A0A098LMT0|A0A098LMT0_9BACT 7-carboxy-7-deazaguanine synthase OS=Sporocytophaga myxococcoides OX=153721 GN=queE PE=3 SV=1
MSIKQDLNKILEHSGSILPVMESFYTIQGEGFFQGHAAYFIRLAGCDVGCHWCDVKESWEIKGHPVYSVEEIAQAGSAHPGRVAVITGGEPLIYPLEQLTESLKKFQFRTHIETSGAYPLSGNWDWICLSPKKFKAPHQSVIENTDELKIIVFNKSDFDWAEQFARQVKPECKLYLQPEWSKQNEVLPLIIEYVKSNPQWNISLQIHKFMNIP

SEQ ID NO: 34381 - protein, 245 aa, Sporolactobacillus sp.
  REGION 1..245: note = tr|A0A4Q4IPJ9|A0A4Q4IPJ9_9BACL 7-carboxy-7-deazaguanine synthase OS=Sporolactobacillus sp. THM7-4 OX=2511170 GN=queE PE=3 SV=1
MKTIAEFDLPAREVYGKWKLPMVEIFETIEGEGMYQGFPTVFVRSFHCNLRCKWCDTPYSFAPAKPAFEARVDEIVDKVASFNSRRICFTGGEPLIHRQKSAALIKALADLDQIIDIHIETNGAIDLAPFARMRKRDAVLMKKMRFVMDYKLAASGESEKMITDNFNCLLNQDEIKFVIGSDEDFEQAKKVMARFHKKGQVLFSPVWETMEPRRLVEKVLADPLPQVKISMQLHKIIWDPNRRGV

SEQ ID NO: 34382 - protein, 245 aa, Sporolactobacillus sp.
  REGION 1..245: note = tr|A0A4Q4J648|A0A4Q4J648_9BACL 7-carboxy-7-deazaguanine synthase OS=Sporolactobacillus sp. THM7-7 OX=2511172 GN=queE PE=3 SV=1
MKTTAEFQLPAREVYGKWSLPMVEIFETVEGEGMSQGFPTVFVRSFHCNLRCKWCDTPYSFAPAKPAFEATIDEIVRKVARYSSRRICFTGGEPLIHRQKSAALIQALARLDHIVDVHIETNGAIDLGPFARMREKDPLLMKKMRFVMDYKLAASGETKKMIRDNFDSLLDQDEIKFVIGSDEDFDQAKTVIERFHKKGQVLFSPVWASMPPKRLVEKVLVEPLPQVKVSLQLHKIIWDPNERGV

SEQ ID NO: 34383 - protein, 196 aa, Sporolituus thermophilus
  REGION 1..196: note = tr|A0A1G7NX05|A0A1G7NX05_9FIRM 7-carboxy-7-deazaguanine synthase OS=Sporolituus thermophilus DSM 23256 OX=1123285 GN=queE PE=3 SV=1
MSAVVYPVIEIFESIQGEGTHMGMPAAFIRLAGCNLRCKWCDTANAFDLKNATYLAPSHIVAKIKQKLVVITGGEPTLHDLKPLVAALHERGKYVAVETNGTNPIPEEWGIDWITASPKPGSGYLLACQADELKYVVDDEFTLDCVAYDAVPPGRIFLQVESGRKESAQKAFALVMKNPERGLRLGIQLHKILGVE

SEQ ID NO: 34384 - protein, 194 aa, Sporomusa acidovorans
  REGION 1..194: note = tr|A0A259UIS6|A0A259UIS6_9FIRM Anaerobic ribonucleoside-triphosphate reductase-activating protein; OS = Sporomusa acidovorans DSM 3132 OX=1123286 GN=queE_3; PE = 3 SV=1
MNPQEKTKGGLINLAAFLPASRSNGPGLRAVVWVQGCERRCPGCFNPDMQEFRKKELVPAAELVKRICALPGIEGVTFSGGEPFAQAGALARLAERLAVQGLTIVIFTGYTFAELTAQPNPAWQQLLAAADLLVAGPYREDLPSQDYLLGSANQQLVFLTDKLKHHPDFAENKGQTMEVIVDAAGNVITTGLVK

SEQ ID NO: 34385 - protein, 441 aa, Sporomusa acidovorans
  REGION 1..441: note = tr|A0A259V167|A0A259V167_9FIRM 7-carboxy-7-deazaguanine synthase OS=Sporomusa acidovorans DSM 3132 OX=1123286 GN=queE_1 PE=4 SV=1
MPDLTNQCETILPVENPALRDYLKIYQAIDLDFLEQIQAAGLAVDVPAGRPAADKIKRLKSLGAIGRNADKSLYSNWLSPACAACRQGIDSISLYLSLMCPRHCYYCFNPNQEAYSYYLANQRDCIRELAALYKANQKLKYIALTGGEPLLHHRETIEFFRYAKSNFKRVHTRLYTAGDLLDRPLLQQLQETQLDEIRFSIKLEDSAATIRQIYEHICWAKEYIPHVLVEMPVIPGSLQKMRHLLRDLDELGVTGINLLEFCFPFHNAAEFRKRSFTIKNPPFQVLYNYRYAGGLPVSQSETACLELIEFAIREKLRLGVHYCSLENKFTEQIYQQNSRHYKLFPLTYFSPHDFFLKTAKVFGDDIPTALRELKSHKTSPYRLDKKYGYLEIPVQAVPRLKKLDLAIGLCSHIIENREGKPCLRELKVDVIRTGGFDIRQL

SEQ ID NO: 34386 - protein, 241 aa, Sporomusa malonica
  REGION 1..241: note = tr|A0A1W2A5Z5|A0A1W2A5Z5_9FIRM 7-carboxy-7-deazaguanine synthase OS=Sporomusa malonica; OX = 112901 GN=queE PE=3 SV=1
MSNIVEIFSSIQGEGLYVGTRQIFVRFAGCNLSCAYCDTPDSRNLCKFALVERTPGKQDFEKIPNPLPIDHLAQMINSLLTVKHHSISLTGGEPLGQADSIVKLAPKLHAPIYLETNGTMFDKLAQVLPHIHIISMDIKLPSAAGKAYWQEHDKFLRLASTKELFVKLVITKQTNSDEFKQAVDLIASANTSIPLILQPVTPCNGCETVTPATMLAYQEQALEILENVRVIPQTHKFMGQL

SEQ ID NO: 34387 - protein, 200 aa, Sporomusa silvacetica
  REGION 1..200: note = tr|A0A259UC74|A0A259UC74_9FIRM 7-carboxy-7-deazaguanine synthase OS=Sporomusa silvacetica DSM 10669 OX=1123289 GN=queE PE=3 SV=1
MGKIDILYPIIEIFSSIQGEGFHMGKGATFIRVAGCNLRCSWCDTGYSFDLSTSKWMSVGDILAAECFSHHHVVITGGEPTLYNLEPLVRALHKLGKYVAIETNGTNSIPVEWGIDWITASPKPASGFALSCQADELKYVVDDEFSIDVISNHAVPAGRIFLQIESGRQESLQKAYDLINRYPELQLRLGIQMHKVLNFK

SEQ ID NO: 34388 - protein, 200 aa, Sporomusa sp.
  REGION 1..200: note = tr|A0A0U1L3W9|A0A0U1L3W9_9FIRM 7-carboxy-7-deazaguanine synthase OS=Sporomusa sp. An4; OX = 411922 GN=queE PE=3 SV=1
MGTIDILYPIIEIFSSIQGEGFHMGKGATFIRVAGCNLRCSWCDTGYSFDLSKSKWMNVDEIVAAECFSHHHVVITGGEPSLYNLEPLVRALHKLGKYVAIETNGTNPIPVEWGIDWITASPKPANGFALACRADELKYVVDDEFSIDVISKHNVPEGRIFLQIESGRQESLQKAYDLINRYPELQLRLGIQMHKVLNFR

SEQ ID NO: 34389 - protein, 198 aa, Sporomusa sp.
  REGION 1..198: note = tr|A0A562GRC5|A0A562GRC5_9FIRM 7-carboxy-7-deazaguanine synthase OS=Sporomusa sp. KB1; OX = 943346 GN=queE PE=3 SV=1
MVDILYPIIEIFSSIQGEGFHMGKGATFIRVAGCNLRCSWCDTGYSFDLSKSKWMSVDAIVAAEHFSHQLVVITGGEPTLYNLEPLVRALHKLGKYVTIETNGTNPIPVEWGIDWITASPKPANGFALSCRADELKYVVDDEFSIDVISKHDVPEGRIFLQIESGRQESLQKAYDLINRYPELQLRLGIQMHKVLNFR

SEQ ID NO: 34390 - protein, 241 aa, Sporomusa sphaeroides
  REGION 1..241: note = tr|A0A1U7MM05|A0A1U7MM05_9FIRM 7-carboxy-7-deazaguanine synthase OS=Sporomusa sphaeroides DSM 2875 OX=1337886 GN=queE PE=3 SV=1
MLNLVEIFSSIQGEGLYVGTRQIFVRFAGCNLTCTYCDTPDSRQFSGQALVERTPGERDFIRIANPVAIDSVAQMINSLLTIRHHSISLTGGEPLCQAKMLAELAPKLNAPLYLETNGTLFEQLAVVLPYIDIVSMDIKLPGTSGKHYWQEHHEFLRLAAAKEVFVKIVIAAQSSKEEIHQAFNLVAGIDDTIPVILQPVTPVNGCEAVSPDNMLAYQAQALALLKNVRVIPQTHKLMGQL

SEQ ID NO: 34391 - protein, 243 aa, Sporomusa termitida
  REGION 1..243: note = tr|A0A517DTH3|A0A517DTH3_9FIRM 7-carboxy-7-deazaguanine synthase OS=Sporomusa termitida; OX = 2377 GN=queE PE=3 SV=1
MANIIELFSSIQGEGLYVGTRQIFVRFAGCNLACDYCDTPASRTLCGHALVETVPGQRIFEKITNPVPIADLARRINSFLTVRHHSISLTGGEPLGQAESIIRLAPQLNSPIYLETNGTLVEKLALVLPYIHIISMDLKLPSVTGNSYWQQHYEFLRLATAKDKEVFVKLVITGQTGEHEFKQAIDLVAAVRTSIPFILQPVTPCNASTAVTPDIMLAYQAEALKQLENVRVIPQTHKFMGQL

SEQ ID NO: 34392 - protein, 197 aa, unidentified
  source 1..197: note = Sporomusaceae bacterium
  REGION 1..197: note = tr|A0A3C0UDC6|A0A3C0UDC6_9FIRM 7-carboxy-7-deazaguanine synthase OS=Sporomusaceae bacterium OX=1917525 GN=queE PE=3 SV=1
MSTQYPIVEVFESIQGEGTFLGLGASFIRLAGCNLRCPWCDTKHSFDVQAASLLSVDAILGTWRFTQPLVVITGGEPTLHDLGPLVRELKKLGKFVTLETNGTNPVPNEWGIDWVTVSPKPGSNYAINCRADELKYVVDDDFEIGVIQTERVPLQRIYLQVESGRPESASRAFTLVTMNPDLHLRVGVQLHKVLHVE

SEQ ID NO: 34393 - protein, 244 aa, unidentified
  source 1..244: note = Sporomusaceae bacterium
  REGION 1..244: note = tr|A0A402BQP0|A0A402BQP0_9FIRM 7-carboxy-7-deazaguanine synthase OS=Sporomusaceae bacterium OX=1917525 GN=queE PE=3 SV=1
MTNAINLVEVFSSIQGEGEYVGCRQVFVRLAGCNLQCNYCDTPTSRQIPDTCRIEGNAGQRDFIEVANPMNPEALAAVINGLLDKPHHSVSFTGGEPLCQAEALNQVAGKIKGKTYLETNGTLPVELEKVIDNIDIISMDIKLPVTTGCPLWEEHRQFLELALAKNVFVKLVIDAGIDIDHFDQAVHLVAAVSTEIPLILQPVTPINDCKAIDPDQVIELQSRALNILKNVKVIPQTHKFLGQL

SEQ ID NO: 34394 - protein, 243 aa, Sporosarcina globispora
  REGION 1..243: note = tr|A0A0M0GG35|A0A0M0GG35_SPOGL 7-carboxy-7-deazaguanine synthase OS=Sporosarcina globispora OX=1459 GN=queE PE=3 SV=1
MSKIPVLEIFGPTIQGEGMVIGQKTMFVRTAGCDYSCSWCDSSFTWDGSAKDSIRQMEPDEIWKKLKKLGGDGFSFVTISGGNPALLKNMNEFISLLKAEQMKICLETQGSRWQDWFYEIDELTLSPKPPSSGMNTDFEVLDLIVNNLQTSRKIKQQFSLKIVIFDDEDYEYAKNVHQRYPGIPFYLQVGNDDTVTADDRNLLQRLLDKYEWLIDKTIHDSDLTDVKVLPQLHTYVWGNKRGV

SEQ ID NO: 34395 - protein, 240 aa, Sporosarcina pasteurii
  REGION 1..240: note = tr|A0A380C272|A0A380C272_SPOPA 7-carboxy-7-deazaguanine synthase OS=Sporosarcina pasteurii OX=1474 GN=queE PE=3 SV=1
MTIPVLEIFGPTIQGEGMVIGQKTMFVRTAGCDYSCSWCDSKFTWDGSEKKNIRKMNAKEILDALIEEGGDRFGHVTISGGNPGLLPQLNSLVDLLHAQGIKIALETQGSRWQPWFTKIDELTLSPKPPSSGMQTDFSVLDQIIESLSIEQKGTFSLKIVVFDDEDLGYARKVHQRYPTVELFIQVGNDDLQKANEAELLVHLLERYERLIDQVMADKELKHVRVLPQLHTYLWGNKRGV

SEQ ID NO: 34396 - protein, 235 aa, Sporosarcina psychrophila
  REGION 1..235: note = tr|A0A127VXV0|A0A127VXV0_SPOPS 7-carboxy-7-deazaguanine synthase OS=Sporosarcina psychrophila OX=1476 GN=queE PE=3 SV=1
MKIPVMEVFGPTIQGEGMVMGLKTMFVRTAGCDYSCSWCDSSFTWDGSGKSTSKQPAEIIDELKAIGGQSFSHVTISGGNPALHKGIGELVDLCHEQGWKVAVETQASFWQDWLLKIDDITLSPKPPSSGMVTDFSKLDTFMEKLIETTATLKVVIFDEKDFKFAEEVHLRYPAFPFFLQTGNDDTTTTDDALLVSTLLQRYEWLIDLTVHSPIMNDAKVLPQLHTLLWGNKRGV

SEQ ID NO: 34397 - protein, 235 aa, Sporosarcina sp.
  REGION 1..235: note = tr|A0A135WAN1|A0A135WAN1_9BACL 7-carboxy-7-deazaguanine synthase OS=Sporosarcina sp. HYO08 OX=1759557 GN=queE PE=3 SV=1
MKIPVMEVFGPTIQGEGMVIGQKTMFVRTAGCDYSCAWCDSSFTWDGTGKSVSKRPQEIIDELKTIGGQSFSHVTISGGNPALHKGIGELVDLCHAEGWKVAVETQATFWQDWLLKIDDITLSPKPPSSKMITDFDKLDLFMEKLSDTNASLKIVIFDEEDFKFAEEVHLRYPSVPFYLQVGNDDTTTTDDAVLIPHLLKRFEWLIDLAVASPIMNDVKVLPQLHALVWGNRRGV

SEQ ID NO: 34398 - protein, 235 aa, Sporosarcina sp.
  REGION 1..235: note = tr|A0A5B0DKI2|A0A5B0DKI2_9BACL 7-carboxy-7-deazaguanine synthase OS=Sporosarcina sp. ANT_H38 OX=2597358 GN=queE PE=3 SV=1
MKIPVMEVFGPTIQGEGMVMGLKTMFVRTAGCDYSCNWCDSSFTWDGSGKSTSKQPVEIIDELKAIGRQSFSHVTISGGNPALHKGIGELVELCHEQGWKVAVETQASFWQDWLLNIDDITLSPKPPSSGMTTDFGKLDSFMEKLIDSNTSLKVVIFNEEDFKFAEEVHLRYPAFPFFLQTGNEDTTTTDDTLLVSTLLQRYEWLIDLTVHSPIMNDAKVLPQLHTLLWGNKRGV

SEQ ID NO: 34399 - protein, 211 aa, Stakelama pacifica
  REGION 1..211: note = tr|A0A4R6FTM9|A0A4R6FTM9_9SPHN 7-carboxy-7-deazaguanine synthase OS=Stakelama pacifica; OX = 517720 GN=queE PE=3 SV=1
MSYAVKEMFLTLQGEGVHAGRRAVFVRFAGCNLWTGREADRASAICRFCDTDFVGMDGPGGGRFADATALAGAAAVTWGDAARGERFVVLTGGEPMLQIDDALIDALHDQGFAIAMESNGTIAAHPGIDWVCISPKAGSEVVQRRGDELKLVWPQDHIDIDSLEHWDFANFLVQPMDSAAREENLRAAIAFAMARPRWRLTLQTHKMLGLP

SEQ ID NO: 34400 - protein, 200 aa, unidentified
  source 1..200: note = Stanieria cyanosphaera
  REGION 1..200: note = tr|K9XVJ7|K9XVJ7_STAC7 7-carboxy-7-deazaguanine synthase OS=Stanieria cyanosphaera (strain ATCC 29371 / PCC 7437) OX=111780 GN=queE PE=3 SV=1
MDTVTYPIVETFHSVQGEGAWTGVNAFFIRLGGCDVGCFWCDTKQSWNAKRHPQRQVQDLAEEVRNAHPAIAVITGGEPLMHNLYPLTAAIKSLGIRVHLETSGAHPFSGDFDWVTFSPKQFKPPHQSVYSHVSELKVVIAKSEDLIWAEQQASLVSPETLKYLQPEWNTPSSKDLIFEYILKHPQWRISLQTHKLLEVR

SEQ ID NO: 34401 - protein, 202 aa, unidentified
  source 1..202: note = Stanieria sp.
  REGION 1..202: note = tr|A0A140K2C4|A0A140K2C4_9CYAN 7-carboxy-7-deazaguanine synthase OS=Stanieria sp. NIES-3757 OX=1807358 GN=queE PE=3 SV=1
MKTVTVTYPIVETFHSVQGEGAWTGVNAFFIRLGGCDVGCPWCDTKQSWNAKRHSQRPVQDLAEEVQIANPAIAVITGGEPLMHDLKPLTAAIKSLGIRVHLETSGAHPFSGDFDWVTFSPKQFKPPHPSIYHQVSELKVVIAKSEDLIWAQQQASLVSPQTLKYLQPEWNTPASKDLIFEYVLRHPQWRISLQTHKLLEVR

SEQ ID NO: 34402 - protein, 237 aa, Staphylococcus agnetis
  REGION 1..237: note = tr|A0A2T4MU41|A0A2T4MU41_9STAP 7-carboxy-7-deazaguanine synthase OS=Staphylococcus agnetis OX=985762 GN=queE PE=3 SV=1
MVKIPVLEIFGPTIQGEGRVIGRKTMFVRTAGCDFRCSWCDSKFTWDGSAKDEIRMMTPEAILHELKAIGGNQFNHVTISGGNPALIKGIQALVDLFQSQDIQTALETQGSKYQPWMRQINDLTVSPKPPSSGMKQNLDILDSVIDQCIPETMNLKVVIFNDDDYHFAQTIHHRYPHLPFYLQVGNPYLETDVDHHTDKLLARYETLIDRVMTDPSMNNVFVLPQLHTLLWSNKKGV

SEQ ID NO: 34403 - protein, 237 aa, Staphylococcus agnetis
  REGION 1..237: note = tr|A0A2T4MLD3|A0A2T4MLD3_9STAP 7-carboxy-7-deazaguanine synthase OS=Staphylococcus agnetis OX=985762 GN=queE PE=3 SV=1
MVKIPVLEIFGPTIQGEGRVIGRKTMFVRTAGCDFRCSWCDSKFTWDGSAKDEIRMMTPEAILHELKAIGGNQFNHVTISGGNPALIKGIQALVDLFQSQDIQTALETQGSKYQPWMRQINDLTVSPKPPSSGMKQNLDILDSVIDQCIPETLNLKVVIFNDDDYHFAQTIHHRYPHLPFYLQVGNPYLETDVDHHTDKLLARYETLIDRVMTDPSMNNVFVLPQLHTLLWSNKKGV

SEQ ID NO: 34404 - protein, 238 aa, unidentified
  source 1..238: note = Staphylococcus argensis
  REGION 1..238: note = tr|A0A2K4FDK3|A0A2K4FDK3_9STAP 7-carboxy-7-deazaguanine synthase OS=Staphylococcus argensis OX=1607738 GN=queE PE=3 SV=1
MAKIPVLEIFGPTIQGEGKVIGRKTMFVRTAGCDYRCDWCDSSFTWDGSAKDEIRMMTAEEVYEELKEVGGDYFNHVTISGGNPALIKAIQDLVDLFQEKGIYTALETQGSKYQPWMRQIDDLTISPKPPSSMMKPNLPLLDEVIEQCVHDTLNLKVVIFEEADFDFAKMIHHRYPSIPFYLQVGNPYLEGEHVDNHTEKLLSLYEHLVDRVMKSSEMNDVYVLPQLHTLLWSNTKGV

SEQ ID NO: 34405 - protein, 237 aa, unidentified
  source 1..237: note = Staphylococcus argenteus
  REGION 1..237: note = tr|A0A348B966|A0A348B966_9STAP 7-carboxy-7-deazaguanine synthase OS=Staphylococcus argenteus OX=985002 GN=queE PE=3 SV=1
MAKIPVLEIFGPTIQGEGRVIGRKTMFVRTAGCDYRCSWCDSAFTWDGSAKGDIKLMTAEEIYDELKHIGGEQFNHVTISGGNPALIKGIQELVDLFQDKGIYSALETQGSKFQPWMTQIDDLTISPKPPSSTMTPDLNKLDEVIQQCVPSSLNLKVVVFDDNDYEFAKMIHHRYPDIPFYLQVGNPYLSESVNNHTAKLLERYEQLVDLVMQSSDMNHVYVLPQLHTLLWSNKKGV

SEQ ID NO: 34406 - protein, 238 aa, Staphylococcus arlettae
  REGION 1..238: note = tr|A0A2T7BWG2|A0A2T7BWG2_9STAP 7-carboxy-7-deazaguanine synthase OS=Staphylococcus arlettae OX=29378 GN=queE PE=3 SV=1
MAKIPVLEIFGPTIQGEGSVIGRKTMFVRTAGCDYRCSWCDSSFTWDGSAKEDIRMMTAAEIYEELYAIGGELFNHVTISGGNPALIKGIQDLVDLFDSKNIQSALETQGSKFQPWMLQIDDLTISPKPPSSLMKPNLPILDNVIEQCHDEALSLKVVIFTDEDYDFAKMIHHRYPNIPFYLQVGNPYLDGEQVADHTSKLLSLYESLVNRVMGSADMNNVYVLPQLHTLLWSNKKGV

SEQ ID NO: 34407 - protein, 238 aa, Staphylococcus arlettae
  REGION 1..238: note = tr|A0A5F0TP08|A0A5F0TP08_9STAP 7-carboxy-7-deazaguanine synthase OS=Staphylococcus arlettae OX=29378 GN=queE PE=3 SV=1
MAKIPVLEIFGPTIQGEGSVIGRKTMFVRTAGCDYRCSWCDSSFTWDGSAKEDIRMMTAAEIYEELYAIGGELFNHVTISGGNPALIKGIQDLVDLFDSKNIQSALETQGSKFQPWMLQIDDLTISPKPPSSLMKPNLPILDNVIEQCHDEALSLKVVIFTDEDYDFAKMIHHRYPNIPFYLQVGNPYLDGEQVADHTSKLLSLYESLVNRAMGSADMNNVYVLPQLHTLLWSNKKGV

SEQ ID NO: 34408 - protein, 236 aa, Staphylococcus aureus
  REGION 1..236: note = tr|A0A033UVZ9|A0A033UVZ9_STAAU 7-carboxy-7-deazaguanine synthase OS=Staphylococcus aureus C0673 OX=1413510 GN=queE PE=3 SV=1
MPKIPVLEIFGPTIQGEGAVIGQKTMFVRTSGCDYRCSWCDSSFTWDGSAKDDIRLLEPEDIISELDQLAPNKYQHVTISGGNPALIKNIGPFVEALKARNIKTALETQGSKFQEWMTQIDDLTISPKPPSSGMKPNLTILDEVIAQCVEESLSLKVVIFDEADYQFAKDIHKRYPSIPFYLQVGNPYLDDSVSNHTEKLLEKYEQLIDKVMNDTLNDIFVLPQLHTLLWSNKKGV

SEQ ID NO: 34409 - protein, 77 aa, Staphylococcus aureus
  REGION 1..77: note = tr|A0A2S6D9W2|A0A2S6D9W2_STAAU 7-carboxy-7-deazaguanine synthase QueE (Fragment); OS = Staphylococcus aureus OX=1280 GN=CSC87_17695 PE=4 SV=1
MKIPVLEIFGPTIQGEGAVIGRKTMFVRTAGCDFSCAWCDSKFTWDGTMKDEIEMLLPETIYERLQSIAPNQFNHVT

SEQ ID NO: 34410 - protein, 238 aa, Staphylococcus auricularis
  REGION 1..238: note = tr|A0A2T4M647|A0A2T4M647_9STAP 7-carboxy-7-deazaguanine synthase OS=Staphylococcus auricularis OX=29379 GN=queE PE=3 SV=1
MAKIPVLEIFGPTIQGEGRVIGRKTMFVRTAGCDYRCSWCDSSFTWDGSAKDQIKMMTAEEIYDELYRIGGDYFNHVTISGGNPALIKGIQELVDLFDEKGIHSALETQGSRFQPWMRQIDDLTISPKPPSSMMKPNLMTLDEVIEQCVPETLNLKVVVFDDTDFDFARDIHHRYPSIPFYLQVGNPYLDGEYIENHTARLLALYESLVDRVINTSDMNDVYVLPQLHTLLWSNKKGV

SEQ ID NO: 34411 - protein, 238 aa, Staphylococcus auricularis
  REGION 1..238: note = tr|A0A2K4C4B0|A0A2K4C4B0_9STAP 7-carboxy-7-deazaguanine synthase OS=Staphylococcus auricularis OX=29379 GN=queE PE=3 SV=1
MAKIPVLEIFGPTIQGEGRVIGRKTMFVRTAGCDYRCSWCDSSFTWDGSAKDQIKMMTAEEIYDELYRVGGDYFNHVTISGGNPALIKGIQELVDLFDEKGIHSALETQGSRFQPWMRQIDDLTISPKPPSSMMKPNLMTLDEVIEQCVPETLNLKVVVFDDTDFDFARDIHHRYPSIPFYLQVGNPYLDGEYIENHTARLLALYESLVDRVINTSDMNDVYVLPQLHTLLWSNKKGV

SEQ ID NO: 34412 - protein, 237 aa, Staphylococcus capitis
  REGION 1..237: note = tr|A0A0U1EI80|A0A0U1EI80_STACP 7-carboxy-7-deazaguanine synthase OS=Staphylococcus capitis OX=29388 GN=queE PE=3 SV=1
MAKIPVLEVFGPTIQGEGRVIGRKTMFVRTAGCDYRCSWCDSAFTWDGSAKEDIRLLTAEEIYEELLEVGGNHFNHVTISGGNPALIKGIQDLVDLFEEKNIYTALETQGSKFQPWMTQINDLTISPKPPSSMMKPNLNTLDSVIDQCVHDTLNLKVVIFNEEDYEFATMIHHRYPSIPFYLQVGNPYLEDEVENHTDKLLERYEKLVDRVMESDEMNHVYVLPQLHTLLWSNKKGV

SEQ ID NO: 34413 - protein, 237 aa, Staphylococcus capitis
  REGION 1..237: note = tr|A0A4U9TJ46|A0A4U9TJ46_STACP 7-carboxy-7-deazaguanine synthase OS=Staphylococcus capitis OX=29388 GN=queE PE=3 SV=1
MAKIPVLEVFGPTIQGEGRVIGRKTMFVRTAGCDYRCSWCDSAFTWDGSAKEDIRLLTAEEIYEELLEVGGNHFNHVTISGGNPALIKGIQDLVDLFEEKNIYTALETQGSKFQPWMTQINDLTISPKPPSSMMKPNLDILDSVIEQCIDDTLNLKVVIFNEEDYEFAKMIHHRYPSIPFYLQVGNPYLEDEVEHHTDKLLERYEKLVDRVMESDDMNHVYVLPQLHTLLWSNKKGV

SEQ ID NO: 34414 - protein, 237 aa, Staphylococcus caprae
  REGION 1..237: note = tr|C5QQ79|C5QQ79_9STAP 7-carboxy-7-deazaguanine synthase OS=Staphylococcus caprae M23864:W1 OX=525378; GN = queE PE=3 SV=1
MAKIPVLEVFGPTIQGEGRVIGRKTMFVRTAGCDYRCSWCDSAFTWDGSAKEDIRLLSAEEIYEELREVGGDNFNHVTISGGNPALIKGIQDLVDLFEEKNIYTALETQGSKFQPWMTQINDLTISPKPPSSTMKPNLDILDSVIEQCVHHTLNLKVVIFNEEDYEFAKMIHHRYPSIPFYLQVGNPYLEDDVEHHTYKLLERYEKLVDRVMESSDMNHVYVLPQLHTLLWSNKKGV

SEQ ID NO: 34415 - protein, 237 aa, Staphylococcus carnosus
  REGION 1..237: note = tr|A0A380F9G1|A0A380F9G1_STACA 7-carboxy-7-deazaguanine synthase OS=Staphylococcus carnosus subsp. utilis OX=147449 GN=queE PE=3 SV=1
MAKIPVLEIFGATIQGEGRVIGRKTMFVRTAGCDYHCSWCDSKFTWDGSAKDQIEMMTAEEIYHQLKEVGGDYFNHVTISGGNPALIKGIQELVDLFEDKNIETALETQGSRYQPWMRQINNLTISPKPPSSGMKPNLEILDDVIAQCVLESLNLKVVIFEDKDFEFAKEIHHRYPSIPFYLQVGNPYLEDEVENHTERLLKRYENLVETVMVSSEMNDVYVLPQLHTLLWSNKKGV

SEQ ID NO: 34416 - protein, 237 aa, Staphylococcus carnosus
  REGION 1..237: note = tr|B9DK39|B9DK39_STACT 7-carboxy-7-deazaguanine synthase OS=Staphylococcus carnosus (strain TM300); OX = 396513 GN=queE PE=3 SV=1
MAKIPVLEIFGPTIQGEGRVIGRKTMFVRTAGCDYHCSWCDSKFTWDGSAKDQIEMMTAEEIYHQLKEVGGDYFNHVTISGGNPALIKGIQELVDLFEDKNIETALETQGSRYQPWMRQINDLTISPKPPSSGMKPNLEILDDVIAQCVLESLNLKVVIFEDKDFEFAKEIHHRYPSIPFYLQVGNPYLEDEVENHTERLLKRYENLVETVMVSSEMNDVYVLPQLHTLLWSNKKGV

SEQ ID NO: 34417 - protein, 237 aa, Staphylococcus chromogenes
  REGION 1..237: note = tr|A0A2T4M0R0|A0A2T4M0R0_STACR 7-carboxy-7-deazaguanine synthase OS=Staphylococcus chromogenes OX=46126 GN=queE PE=3 SV=1
MVKIPVLEIFGPTIQGEGRVIGRKTMFVRTAGCDFRCSWCDSKFTWDGSAKEDIRLMTPEAIYEELKTIGGDYFNHVTISGGNPALIKGIQSLVDLLQTHQIYTALETQGSKFQPWMRQIDDLTISPKPPSSGMHQNLEVLDKVIEQCVTSTLNLKVVVFDEADYTFAQSIHQRYPHLPFYLQVGNPFLQEEVDHHTDKLLMRYETLIDRVMTDASMNNVYVLPQLHTLLWSNKKGV

SEQ ID NO: 34418 - protein, 238 aa, Staphylococcus cohnii; identical to SEQ ID NO: 29431
  REGION 1..238: note = tr|A0A3A0JDK7|A0A3A0JDK7_9STAP 7-carboxy-7-deazaguanine synthase OS=Staphylococcus cohnii; OX = 29382 GN=queE PE=3 SV=1

SEQ ID NO: 34419 - protein, 238 aa, Staphylococcus cohnii; identical to SEQ ID NO: 28254
  REGION 1..238: note = tr|A0A0M2P2B4|A0A0M2P2B4_STACC 7-carboxy-7-deazaguanine synthase OS=Staphylococcus cohnii subsp. cohnii OX=74704 GN=queE PE=3 SV=1

SEQ ID NO: 34420 - protein, 237 aa, Staphylococcus condimenti
  REGION 1..237: note = tr|A0A143PCL1|A0A143PCL1_9STAP 7-carboxy-7-deazaguanine synthase OS=Staphylococcus condimenti OX=70255 GN=queE PE=3 SV=1
MAKIPVLEIFGPTIQGEGRVIGRKTMFVRTAGCDYHCSWCDSKFTWDGSAKDQIEMMTAEEIFHQLKEVGGDYFNHVTISGGNPALIKGIQELVDLFEEKNIETALETQGSRYQPWMRQINDLTISPKPPSSGMKPNLEILDDVIAQCVPESLNLKVVIFEDEDFNFAKEIHHRYPDIPFYLQVGNPYLEDKVEKHTERLLERYENLVETVMHSSEMNKVYVLPQLHTLLWSNQKGV

SEQ ID NO: 34421 - protein, 74 aa, Staphylococcus condimenti
  REGION 1..74: note = tr|A0A4Q7CMM9|A0A4Q7CMM9_9STAP 7-carboxy-7-deazaguanine synthase QueE (Fragment); OS = Staphylococcus condimenti OX=70255 GN=EIG99_11710 PE=4; SV = 1
DFNFAKEIHHRYPDIPFYLQVGNPYLEDKVEKHTERLLERYENLVETVMHSSEMNKVYVLPQLHTLLWSNQKGV

SEQ ID NO: 34422 - protein, 237 aa, Staphylococcus delphini
  REGION 1..237: note = tr|A0A2A4GWL9|A0A2A4GWL9_9STAP 7-carboxy-7-deazaguanine synthase OS=Staphylococcus delphini OX=53344 GN=queE PE=3 SV=1
MAKIPVLEIFGPTIQGEGRVIGRKTMFVRTAGCDFRCSWCDSKFTWDGSMKDDIEMMEAEEILAQLRNIGGNRFNHVTISGGNPALIKGLQSFVDLCEANDIRTALETQGSQFKPWMRQINDLTLSPKPPSSGMQQNLPRLDEVIEQLDISRINLKVVVFDDADYDFAKMIHQRYPNIPFYLQVGNPYLEDHVEQHTAKLLDRYEQLIDRVTADAEMNEVFVLPQLHTLIWSNQKGV

SEQ ID NO: 34423 - protein, 237 aa, Staphylococcus delphini
  REGION 1..237: note = tr|A0A2A4HCM1|A0A2A4HCM1_9STAP 7-carboxy-7-deazaguanine synthase OS=Staphylococcus delphini OX=53344 GN=queE PE=3 SV=1
MAKIPVLEIFGPTIQGEGRVIGRKTMFVRTAGCDFRCSWCDSKFTWDGSMKDDIEMMEAEEILAQLRNIGGNRFNHVTISGGNPALIKGLQSFVDLCEANDIRTALETQGSQFKPWMRQINDLTLSPKPPSSGMQQNLPRLDEVIEQLDISRINLKVVVFDDADYDFAKMIHQRYPDIPFYLQVGNPYLEDHVEQHTAKLLERYEQLIDRVTTDAEMNEVFVLPQLHTLIWSNQKGV

SEQ ID NO: 34424 - protein, 238 aa, Staphylococcus devriesei
  REGION 1..238: note = tr|A0A2K4DUW0|A0A2K4DUW0_9STAP 7-carboxy-7-deazaguanine synthase OS=Staphylococcus devriesei OX=586733 GN=queE PE=3 SV=1
MASKIPVLEIFGPTIQGEGRVIGRKTMFVRTAGCDYRCSWCDSAFTWDGSAKDDIQLMTAEDIYHQLREVGGDQFDHVTISGGNPALIKGIQDLVDLFEEKNIYTALETQGSKFQPWMTQINDLTISPKPPSSNMKPNLEILDSVIEQCVQDSLNLKVVIFNDDDYEFAKMIHHRYPHLPFYLQVGNPYLDDSVANHTEKLLARYESLVDTVMQSSDMNHVYVLPQLHTLLWSNKKGV

SEQ ID NO: 34425 - protein, 238 aa, Staphylococcus devriesei
  REGION 1..238: note = tr|A0A2T4KB19|A0A2T4KB19_9STAP 7-carboxy-7-deazaguanine synthase OS=Staphylococcus devriesei OX=586733 GN=queE PE=3 SV=1
MAPKIPVLEIFGPTIQGEGRVIGRKTMFVRTAGCDYRCSWCDSAFTWDGSAKDEIQLMTAEDIYHQLREVGGDQFDHVTISGGNPALIKGIQDLVDLFEEKNIYTALETQGSKFQPWMTQINDLTISPKPPSSNMKPNLEILDSVIEQCVQNSLNLKVVIFNDKDYEFAKMIHHRYPHLPFYLQVGNPYLDDSEANHTEKLLARYESLVDTVMQSSDMNHVYVLPQLHTLLWSNKKGV

SEQ ID NO: 34426 - protein, 238 aa, unidentified
  source 1..238: note = Staphylococcus edaphicus
  REGION 1..238: note = tr|A0A2C6WSE5|A0A2C6WSE5_9STAP 7-carboxy-7-deazaguanine synthase OS=Staphylococcus edaphicus OX=1955013 GN=queE PE=3 SV=1
MSKIPVLEIFGPTIQGEGRVIGRKTMFVRTAGCDYRCSWCDSSFTWDGSAKEDIRMMTAEEIYDALYEIAGDAFNHVTISGGNPALIKGIQQLVDLFDNKGIQSALETQGSKFQPWMTQIDDLTISPKPPSSKMKPNLPILDEVIEQCVPETLNLKVVIFDDEDYQFAKMIHHRYPTIPFYLQVGNPYLDGEHVEAHTEKLLSLYETLVDRVMISSDMNNVYVLPQLHTLLWSNKKGV

SEQ ID NO: 34427 - protein, 212 aa, Staphylococcus epidermidis
  REGION 1..212: note = tr|Q5HR22|Q5HR22_STAEQ 7-carboxy-7-deazaguanine synthase OS=Staphylococcus epidermidis (strain ATCC 35984 / RP62A) OX=176279 GN=queE PE=3 SV=1
MFVRTAGCDYRCSWCDSAFTWDGSAKEDIKLMTAEEIYDALLEIGGHRFNHVTISGGNPALIKGIQELVDLFEDKHIYTALETQGSRFQSWMTQIDDLTISPKPPSSGMKTNLEILDSVINQCTFHSLNLKVVIFDDADYDFAKLIHHRYPNIPFYLQVGNPYLDDNVDQHTDKLLERYEQLVDRVMQSSDMNHVYVLPQLHTLLWSNKKGV

SEQ ID NO: 34428 - protein, 237 aa, Staphylococcus epidermidis
  REGION 1..237: note = tr|A0A4T0WLY8|A0A4T0WLY8_STAEP 7-carboxy-7-deazaguanine synthase OS=Staphylococcus epidermidis FS1 OX=1008454 GN=queE PE=3 SV=1
MAKIPVLEIFGPTIQGEGRVIGRKTMFVRTAGCDYRCSWCDSAFTWDGSAKEDIKLMTAEEIYDALLEIGGHRFNHVTISGGNPALIKGIQELVDLFEDKHIYTALETQGSRFQSWMTQIDDLTISPKPPSSGMKTNLEVLDSVINQCTFHSLNLKVVIFDDADYDFAKLIHHRYPNIPFYLQVGNPYLDDNVDQHTDKLLERYEQLVDRVMQSSDMNHVYVLPQLHTLLWSNKKGV

SEQ ID NO: 34429 - protein, 237 aa, Staphylococcus equorum
  REGION 1..237: note = tr|A0A431ZY60|A0A431ZY60_9STAP 7-carboxy-7-deazaguanine synthase OS=Staphylococcus equorum subsp. equorum OX=29383 GN=queE PE=3 SV=1
MTKIPVLEIFGPTIQGEGRVIGRKTMFVRTAGCDYRCSWCDSAFTWNGSAKEEIRLLTAKEIYKELRQVGGDNFDHVTISGGNPALIKGIQNLVNLFEEKDIYTALETQGSKFQPWMTQINDLTISPKPPSSNMIPDLDILDSVIEKCVHETLNLKVVVFNEEDYKFAKVIHHRYPSIPFYLQVGNPYLDDDVEHHTDKLLSKYEELVHRVIKSSDMNHVYVLPQLHTLLWSNKKGV

SEQ ID NO: 34430 - protein, 238 aa, Staphylococcus equorum
  REGION 1..238: note = tr|A0A1B1G4R7|A0A1B1G4R7_9STAP 7-carboxy-7-deazaguanine synthase OS=Staphylococcus equorum OX=246432 GN=queE PE=3 SV=1
MSKIPVLEIFGPTIQGEGRVIGRKTMFVRTAGCDYRCSWCDSSFTWDGSAKEDIRMMTAEEIYDSLYEIAGDSFNHVTISGGNPALIKGIQDLVDLFETKNIYSALETQGSKFQPWMTQIDDLTISPKPPSSKMKPNLPILDEVIENCIPASLNLKVVIFDDQDYDFAKMIHHRYPTIPFYLQVGNPYLDGDYVESHTEKLLSLYETLVNRVMASSDMNNVYVLPQLHTLLWSNKKGV

SEQ ID NO: 34431 - protein, 237 aa, Staphylococcus felis
  REGION 1..237: note = tr|A0A3E0IGZ4|A0A3E0IGZ4_9STAP 7-carboxy-7-deazaguanine synthase OS=Staphylococcus felis; OX = 46127 GN=queE PE=3 SV=1
MAKIPVLEIFGPTIQGEGRVVGRKTMFVRTAGCDFRCSWCDSKFTWDGSMKDAIQMMTADEIFESLKLIGGDCFNHVTISGGNPALIKGLQSFVDLCHSQNIKTALETQGSHFKPWMRQIDDLTISPKPPSSGMTHDLNILDGVINQCDENKINLKVVIFDETDYQFAKIIHHRYPDLPFYLQVGNPYLDDQVEHHTSKLLSRYEWLIQLVMKSSDMNDVFVLPQLHTLVWSNQKGV

SEQ ID NO: 34432 - protein, 237 aa, Staphylococcus felis
  REGION 1..237: note = tr|A0A2K3Z2M3|A0A2K3Z2M3_9STAP 7-carboxy-7-deazaguanine synthase OS=Staphylococcus felis; OX = 46127 GN=queE PE=3 SV=1
MAKIPVLEIFGPTIQGEGRVVGRKTMFVRTAGCDFRCSWCDSKFTWDGSMKDAIQMMTADEIFESLKLIGGDCFNHVTISGGNPALIKGLQSFVDLCHSQNIKTALETQGSHFKPWMRQIDDLTISPKPPSSGMTHDLNILDGVIDQCDESKINLKVVIFDETDYQFAKIIHHRYPDLPFYLQVGNPYLDDQVEHHTSKLLSRYEWLIQLVMKSSDMNDVFVLPQLHTLVWSNQKGV

SEQ ID NO: 34433 - protein, 237 aa, Staphylococcus fleurettii
  REGION 1..237: note = tr|A0A3S0M9Q1|A0A3S0M9Q1_9STAP 7-carboxy-7-deazaguanine synthase OS=Staphylococcus fleurettii OX=150056 GN=queE PE=3 SV=1
MAKIPVLEIFGPTIQGEGRVIGRKTMFVRTAGCDFRCSWCDSKFTWDGSMKDEIRMMSAEAIFDQLKAIGGDRFNHVTISGGNPALIKGIQALIDVCQSHGVHTALETQGSHFQPWMRQIDDLTISPKPPSSGMKQDLERLNHVIAQCDVSQINLKVVVFDDADYEFAKMIHHRYPHLPFYLQVGNPYLEDHVEHHTQKLLEHYEQLIDRVTEDAEMNEVYVLPQLHTLVWSNKKGV

SEQ ID NO: 34434 - protein, 236 aa, Staphylococcus fleurettii
  REGION 1..236: note = tr|A0A380FUR4|A0A380FUR4_9STAP 7-carboxy-7-deazaguanine synthase OS=Staphylococcus fleurettii OX=150056 GN=queE PE=3 SV=1
MPKIPVLEIFGPTIQGEGSVIGRKTMFVRTSGCDYRCSWCDSSFTWDGSAKDDIRLLEPEDIISELDALAPNKYQHVTISGGNPALIKNIGPLVETLNDRGIKTALETQGSKFQAWMTLIDDLTISPKPPSSGMKPNLPILDEVITQCVQDSLSLKVVIFDEDDYQFAKDIHNRYPSIPFYLQVGNPYLDDSVSNHTEKLLEKYEQLIDKVMNDTLNDIYVLPQLHTLLWSNKKGV

SEQ ID NO: 34435 - protein, 238 aa, Staphylococcus gallinarum
  REGION 1..238: note = tr|A0A3A0W6V2|A0A3A0W6V2_STAGA 7-carboxy-7-deazaguanine synthase OS=Staphylococcus gallinarum OX=1293 GN=queE PE=3 SV=1
MSKIPVLEIFGPTIQGEGRVIGRKTMFVRTAGCDYRCSWCDSSFTWDGSAKDDIQLMTAEEIYSKLYEIAGDSFNHVTISGGNPALIKGIQSLVDLFDSKGIQSALETQGSKFQPWMTQIDDLTISPKPPSSKMKPNLPILDDVIAQCVPETLNLKVVIFDDEDYQFAKMIHHRYPTIPFYLQVGNPYLDGEYVESHTERLLSLYETLVDRVMSSPDMNNVYVLPQLHTLLWSNKKGV

SEQ ID NO: 34436 - protein, 238 aa, Staphylococcus gallinarum
  REGION 1..238: note = tr|A0A0D0RR91|A0A0D0RR91_STAGA 7-carboxy-7-deazaguanine synthase OS=Staphylococcus gallinarum OX=1293 GN=queE PE=3 SV=1
MSKIPVLEIFGPTIQGEGRVIGRKTMFVRTAGCDYRCSWCDSSFTWDGSAKEDIQLMTAEEIYDKLYEIAGDSFNHVTISGGNPALIKGIQSLVDLFDSKNIQSALETQGSKFQPWMTQIDDLTISPKPPSSKMKPNLPILDDVIAKCVPETLNLKVVIFDDEDYQFAKMIHHRYPEIPFYLQVGNPYLDGEYVESHTERLLTLYETLVDRVMASPDMNNVYVLPQLHTLLWSNKKGV

SEQ ID NO: 34437 - protein, 238 aa, Staphylococcus haemolyticus
  REGION 1..238: note = tr|Q4L4C8|Q4L4C8_STAHJ 7-carboxy-7-deazaguanine synthase OS=Staphylococcus haemolyticus (strain JCSC1435); OX = 279808 GN=queE PE=3 SV=1
MAAKIPVLEIFGPTIQGEGRVIGRKTMFVRTAGCDYRCSWCDSAFTWDGSAKEDIKLMTAEEIYNQLKKIGGDRFDHVTISGGNPALIKGIQDLVDLFEEKQIYTALETQGSKFQPWMRQINDLTISPKPPSSNMKPNIDILDSVIEQCIESTLNLKVVIFDDDDYEFAKMIHHRYPNIPFYLQVGNPYLDDDVDNHTEKLLSRYEALVDRVMASNDMNQVYVLPQLHTLLWSNKKGV

SEQ ID NO: 34438 - protein, 238 aa, Staphylococcus haemolyticus; identical to SEQ ID NO: 34437
  REGION 1..238: note = tr|A0A2A1K9K1|A0A2A1K9K1_STAHA 7-carboxy-7-deazaguanine synthase OS=Staphylococcus haemolyticus OX=1283 GN=queE PE=3 SV=1

SEQ ID NO: 34439 - protein, 238 aa, Staphylococcus hominis
  REGION 1..238: note = tr|A0A4Q9WQM1|A0A4Q9WQM1_STAHO 7-carboxy-7-deazaguanine synthase OS=Staphylococcus hominis OX=1290 GN=queE PE=3 SV=1
MPSKIPVLEIFGPTIQGEGRVIGRKTMFVRTAGCDYRCSWCDSPFTWDGSAKDDIELLTAQDIYDRLKEIGGNQFDHVTISGGNPALIKGIQDLVDLFEEKNIFTALETQGSKFQPWMRQINDLTISPKPPSSNMVPNLEILDDVIEQCIPSTLNLKVVVFDKEDYQFARMIHHRYPNIPFYLQVGNPYLDDDVEHHTEKLLGRYETLVDTVMNSSDMNHVYVLPQLHTLLWSNKKGV

SEQ ID NO: 34440 - protein, 238 aa, Staphylococcus hominis
  REGION 1..238: note = tr|A0A533IXE2|A0A533IXE2_STAHO 7-carboxy-7-deazaguanine synthase OS=Staphylococcus hominis OX=1290 GN=queE PE=3 SV=1
MPSKIPVLEIFGPTIQGEGRVIGRKTMFVRTAGCDYRCSWCDSAFTWDGSAKDDIELLTAQDIYDRLKEIGGNQFDHVTISGGNPALIKGIQDLVDLFEEKNIFTALETQGSKFQPWMRQINDLTISPKPPSSNMVPNLEILDDVIEQCIPSTLNLKVVVFDKEDYQFARMIHHRYPNIPFYLQVGNPYLDDDVEHHTEKLLGRYETLVDTVMNSSDMNHVYVLPQLHTLLWSNKKGV

SEQ ID NO: 34441 - protein, 237 aa, Staphylococcus hyicus
  REGION 1..237: note = tr|A0A0A8HUW8|A0A0A8HUW8_STAHY 7-carboxy-7-deazaguanine synthase OS=Staphylococcus hyicus; OX = 1284 GN=queE PE=3 SV=1
MVKIPVLEIFGPTIQGEGRVIGRKTMFVRTAGCDFRCSWCDSKFTWDGSAKDDIRMMTPEAILDELKAIGGNQFNHVTISGGNPALIKGIQALVDLFQSERIQTALETQGSKFQPWMRQINDLTVSPKPPSSGMKQNLDILDSVINQCVPETLNLKVVIFDEADYHFAQTIHHRYPHLPFYLQVGNPYLEADVDHHTDKLLLRYETLIDRVMTDASMNNVFVLPQLHTLLWSNKKGV

SEQ ID NO: 34442 - protein, 237 aa, Staphylococcus hyicus
  REGION 1..237: note = tr|A0A4U9ZI45|A0A4U9ZI45_STAHY 7-carboxy-7-deazaguanine synthase OS=Staphylococcus hyicus; OX = 1284 GN=queE PE=3 SV=1
MAKIPVLEIFGPTIQGEGRVIGRKTMFVRTAGCDYRCSWCDSAFTWDGSAKGDIKLMTAEEIYDELKRIGGDLFNHVTISGGNPALIKGIQELVDLFQDKGIFSALETQGSKFQPWMTQIDDLTISPKPPSSTMTPDLKKLDEVIAQCVPSSLNLKVVVFDDKDYDFAKMIHHRYPDIPFYLQVGNPYLSDSVDNHTEKLLERYEQLVDLVMQSNDMNHVYVLPQLHTLLWSNKKGV

SEQ ID NO: 34443 - protein, 242 aa, Staphylococcus intermedius
  REGION 1..242: note = tr|A0A380GAR2|A0A380GAR2_STAIN 7-carboxy-7-deazaguanine synthase OS=Staphylococcus intermedius NCTC 11048 OX=1141106 GN=queE_1 PE=3 SV=1
MAKIPFLEVFGPTIQGEGMIIGKKTMFLRTYGCDYSCSWCDTKYTWDGSEKGNVRRNTAQEVFDLLVEEAGDKSFSHVTVSGGNPALIGKAMDEFIDICHKNGVKVGLETQGSIWRDWFLKIDDLTISPKPPSSLMKIDFNVLDDIVSKLLTHKVNFSLKIVYFNDKDKEYAKEVFNRYRDNNIPYYLSVGNESPYTDKDITKQLLNKLDELWNVVINEPEFNDVQALPQLHSIVWGNKRGV

SEQ ID NO: 34444 - protein, 237 aa, Staphylococcus intermedius
  REGION 1..237: note = tr|A0A380GB70|A0A380GB70_STAIN 7-carboxy-7-deazaguanine synthase OS=Staphylococcus intermedius NCTC 11048 OX=1141106 GN=queE_2 PE=3 SV=1
MAKIPVLEIFGPTIQGEGKVIGRKTMFVRTAGCDFRCSWCDSKFTWDGSMKDEIEMMAAENILAQLRNIGGDRFNHVTISGGNPALIKGLQSFVDLCEANNIRTALETQGSQFKPWMRQINDLTLSPKPPSSGMQQDLPRLDEVILQLDVSRINLKVVVFDDADYDFAKMIHHRYPDIPFYLQVGNPYLEEHVEQHTAKLLERYEQLIDRVTADAEMNEVFVLPQLHTLVWSNQKGV

SEQ ID NO: 34445 - protein, 238 aa, Staphylococcus kloosii
  REGION 1..238: note = tr|A0A151A744|A0A151A744_9STAP 7-carboxy-7-deazaguanine synthase OS=Staphylococcus kloosii OX=29384 GN=queE PE=3 SV=1
MAKIPVLEIFGPTIQGEGRVIGRKTMFVRTAGCDYRCSWCDSSFTWDGSAKEDIRMMTAEEIYSELYEIGGDMFNHVTISGGNPALIKGIQELVDLFETKNIYSALETQGSKFQPWMTQIDDLTISPKPPSSKMKPNLLVLDEVIEQCKHDTLNLKVVIFDDEDYDFAKMIHHRYPSIPFYLQVGNPYLDGEHVAQHTEKLLSLYEDLVTRVMESSDMNNVYVLPQLHTLLWSNKKGV

SEQ ID NO: 34446 - protein, 236 aa, Staphylococcus lentus
  REGION 1..236: note = tr|A0A178PF50|A0A178PF50_STALE 7-carboxy-7-deazaguanine synthase OS=Staphylococcus lentus; OX = 42858 GN=queE PE=3 SV=1
MPKIPVLEIFGPTIQGEGSVIGRKTMFVRTSGCDYRCSWCDSSFTWDGSAKDDIRLLEPEQILSELDQLAPNQYQHVTISGGNPALIKNIGPLVEAFKERKIQTALETQGSKFQEWMVDIDDLTISPKPPSSGMKPSLPILDDVISKCTKESLSLKVVIFDDEDYKFAKDIHARYPDIPFYLQVGNPYLDDSVSNHTEKLLSKYEELIDKVMNDTLNDIYVLPQLHTLLWRNKKGV

SEQ ID NO: 34447 - protein, 236 aa, Staphylococcus lentus
  REGION 1..236: note = tr|A0A4Y9K9C0|A0A4Y9K9C0_STALE 7-carboxy-7-deazaguanine synthase OS=Staphylococcus lentus; OX = 42858 GN=queE PE=3 SV=1
MPKIPVLEIFGPTIQGEGSVIGRKTMFVRTSGCDYRCSWCDSSFTWDGSAKDDIRLLEPEQILSELDQLAPNQYQHVTISGGNPALIKNIGPLVEAFKERKIQTALETQGSKFQEWMVDIDDLTISPKPPSSGMKPSLPILDDVISKCTKESLSLKVVIFDDEDYKFAKDIHARYPDIPFYLQVGNPYLDDSVSNHTEKLLSKYEELIDKVMNDTLNDIYVLPQLHTLLWSNKKGV

SEQ ID NO: 34448 - protein, 238 aa, Staphylococcus lugdunensis
  REGION 1..238: note = tr|A0A133Q1C5|A0A133Q1C5_STALU 7-carboxy-7-deazaguanine synthase OS=Staphylococcus lugdunensis OX=28035 GN=queE PE=3 SV=1
MAAKIPVLEIFGPTIQGEGRVIGRKTMFVRTAGCDYRCSWCDSAFTWDGSAKDQIQLMSATEIYEKLIEIGGDCFDHVTISGGNPALIKGIQDLVDLFETEHIATALETQGSKFQPWMTQINDLTISPKPPSSSMTPNLEVLDQVIAQCVPQSLNLKVVVFDDEDYAFAKMIHHRYPDIPFYLQVGNPYLADDVANHTEKLLSRYEQLVEKVMHSNDMNRAYVLPQLHTLLWSNKKGV

SEQ ID NO: 34449 - protein, 237 aa, Staphylococcus lutrae
  REGION 1..237: note = tr|A0A1W6BN52|A0A1W6BN52_9STAP 7-carboxy-7-deazaguanine synthase OS=Staphylococcus lutrae; OX = 155085 GN=queE PE=3 SV=1
MAKIPVLEIFGPTIQGEGRVIGRKTMFVRTAGCDFRCSWCDSKFTWDGSMKDDIEMMEAEDILARLREIGGNRFNHVTISGGNPALIKGLQAFVDLCASHHIYTALETQGTKFQPWMRQINDLTLSPKPPSSGMQHNVHLLDGVINQLDPSRINLKVVVFDDKDYDFAKMIHHRYPDIPFYLQVGNPYLEDHVEQHTEKLLSRYEALIDQVTLDAEMNDVFVLPQLHTLIWSNMKGV

SEQ ID NO: 34450 - protein, 237 aa, Staphylococcus massiliensis
  REGION 1..237: note = tr|K9AME6|K9AME6_9STAP 7-carboxy-7-deazaguanine synthase OS=Staphylococcus massiliensis S46 OX=1229783; GN = queE PE=3 SV=1
MAKIPVLEIFGPTIQGEGRVIGRKTMFVRTSGCDFRCSWCDSSFTWDGSMKDDVHLMTAEAIYDELKAIGGDCFNHVTISGGNPALIKGIQELVDLFEMKGIETALETQGSKFQPWMRQINDLTISPKPPSSGMDQNLDILKAVIAQCKKETVNLKVVIFEEDDYEYAKMIHHTFPVIPFYLQVGNPYLEDDVDNHTMKLLERYENLIDRVMKSDDMNNVYVLPQLHTLLWSNKKSV

SEQ ID NO: 34451 - protein, 238 aa, Staphylococcus microti
  REGION 1..238: note = tr|A0A0D6XTC8|A0A0D6XTC8_9STAP 7-carboxy-7-deazaguanine synthase OS=Staphylococcus microti OX=569857 GN=queE PE=3 SV=1
MTAKIPVLEIFGPTIQGEGQVIGRKTMFVRTAGCDFRCSWCDSKFTWDGSMRDDIEMLTAEDIWQRLKTIGGDCFDHVTISGGNPALIKNLQTFVNLCEAQHIQLALETQGTKFQPWMTQIHNLTISPKPPSSGMNQDLAQLDDVIAQCNQTALSLKVVVFDDDDLAFAQKIHQRYPNIPFYVQVGNPYLEDDVDNHTARLLERYEWLINKVMTNAEMNRVHVLPQLHTLLWSNLKGV

SEQ ID NO: 34452 - protein, 238 aa, Staphylococcus muscae
  REGION 1..238: note = tr|A0A240BWC3|A0A240BWC3_9STAP 7-carboxy-7-deazaguanine synthase OS=Staphylococcus muscae; OX = 1294 GN=queE PE=3 SV=1
MTAIIPVLEIFGPTIQGEGQVIGRKTMFVRTAGCDFRCSWCDSKFTWDGSMKDEIQMMTAEEIWERLTEIGGECFDHVTISGGNPALIKNLQAFVDLCETKHIQLALETQGTKFQPWMRQIHDLTISPKPPSSGMNQDLSQLDTVITQCVPTSLSLKVVVFDEADLTFAQTIHKRYPKTPFYLQVGNPYLEDTVEHHTERLLNRYEWLINKVMSNPTLNRVHVLPQLHTLLWSNLKGV

SEQ ID NO: 34453 - protein, 238 aa, Staphylococcus nepalensis
  REGION 1..238: note = tr|A0A291JN32|A0A291JN32_9STAP 7-carboxy-7-deazaguanine synthase OS=Staphylococcus nepalensis OX=214473 GN=queE PE=3 SV=1
MSKIPVLEIFGPTIQGEGRVIGRKTMFVRTAGCDYRCSWCDSSFTWDGSAKEDIRMMNAEEIYAALYDLAGESFNHVTISGGNPALIRGIQGLVDLFEEKGIQSALETQGSKFQPWMTQIDDLTISPKPPSSMMKPNLPILDDVIAKCVPETLNLKVVIFDDDDYEFAKMIHHRYPDIPFYLQVGNPYLDGEYVEAHTEKLLSLYETLVDRVMVSNDMNNVYVLPQLHTLLWSNKKGV

SEQ ID NO: 34454 - protein, 238 aa, Staphylococcus nepalensis; identical to SEQ ID NO: 29329
  REGION 1..238: note = tr|A0A2T4SCE9|A0A2T4SCE9_9STAP 7-carboxy-7-deazaguanine synthase OS=Staphylococcus nepalensis OX=214473 GN=queE PE=3 SV=1

SEQ ID NO: 34455 - protein, 237 aa, Staphylococcus pasteuri
  REGION 1..237: note = tr|A0A269XJE5|A0A269XJE5_9STAP 7-carboxy-7-deazaguanine synthase OS=Staphylococcus pasteuri OX=45972 GN=queE PE=3 SV=1
MAKIPVLEVFGPTIQGEGRVIGRKTMFVRTAGCDYRCSWCDSAFTWDGSAKEDIQLMSAEEIYNKLREVGGDNFNHVTISGGNPALIKGIQDLVDLFEEHHIQTALETQGSKFQPWMTQIDDLTISPKPPSSNMKPNLDILDSVIEQCVPESLNLKVVIFDEDDFEFAKMIHHRYPSIPFYLQVGNPYLDEEVDNHTSKLLQRYEQLVERVMTSSDMNNVYVLPQLHTLLWSNMKGV

SEQ ID NO: 34456 - protein, 237 aa, Staphylococcus pasteuri
  REGION 1..237: note = tr|A0A0M2NU01|A0A0M2NU01_9STAP 7-carboxy-7-deazaguanine synthase OS=Staphylococcus pasteuri OX=45972 GN=queE PE=3 SV=1
MAKIPVLEVFGPTIQGEGRVIGRKTMFVRTAGCDYRCSWCDSAFTWDGSAKEDIQLMTAEEIYAKLREVGGDNFNHVTISGGNPALIKGIQELVDLFETHHIQTALETQGSKFQPWMTQINDLTISPKPPSSKMKPNLDILDSVIEQCVPESLNLKVVIFEEDDFDFAKMIHHRYPTIPFYLQVGNPYLDDNVDNHTAKLLQRYESLVDRVMTSSDMNNVYVLPQLHTLLWSNMKGV

SEQ ID NO: 34457 - protein, 238 aa, unidentified
  source 1..238: note = Staphylococcus petrasii
  REGION 1..238: note = tr|A0A5F1B1S9|A0A5F1B1S9_9STAP 7-carboxy-7-deazaguanine synthase OS=Staphylococcus petrasii subsp. petrasii OX=1276937 GN=queE PE=3 SV=1
MAAKIPVLEIFGPTIQGEGRVIGRKTMFVRTAGCDYRCSWCDSAFTWDGSAKEDIQLMTAEEIYDQLREVGGDHFDHVTISGGNPALIKGIQDLVDLFEEKNIYTALETQGSKFQPWMTQIDDLTISPKPPSSTMTPNLDILDSVIEQCVHESLNLKVVIFDDKDYEFAKMIHHRYPTIPFYLQVGNPYLDDDVANHTEKLLERYEALVDTVMQSNDMNHVYVLPQLHTLLWSNKKGV

SEQ ID NO: 34458 - protein, 238 aa, unidentified
  source 1..238: note = Staphylococcus petrasii
  REGION 1..238: note = tr|A0A380G3S1|A0A380G3S1_9STAP 7-carboxy-7-deazaguanine synthase OS=Staphylococcus petrasii subsp. jettensis OX=1077965 GN=queE PE=3 SV=1
MAAKIPVLEIFGPTIQGEGRVIGRKTMFVRTAGCDYRCSWCDSAFTWDGSAKEDIQLMTAEEIYHQLREVGGDHFDHVTISGGNPALIKGIQDLVDLFEEKNIYTALETQGSKFQPWMTQIDDLTISPKPPSSTMTPNLDILDSVIEQCVHESLNLKVVIFDDKDYDFAKMIHHRYPTIPFYLQVGNPYLDDDVANHTEKLLERYEALVDTVMQSNDMNHVYVLPQLHTLLWSNKKGV

SEQ ID NO: 34459 - protein, 238 aa, Staphylococcus pettenkoferi
  REGION 1..238: note = tr|A0A2N6QLN0|A0A2N6QLN0_9STAP 7-carboxy-7-deazaguanine synthase OS=Staphylococcus pettenkoferi OX=170573 GN=queE PE=3 SV=1
MAKIPVLEIFGPTIQGEGKVIGRKTMFVRTAGCDYRCDWCDSSFTWDGSAKDEIRMMTAEEIYAELKEVGGDYFNHVTISGGNPALIKAIQDLVDLFQEKGVYTALETQGSKYQPWMRQIDDLTISPKPPSSMMKPNLPLLDEVIEQCVHDTLNLKVVIFEEADFDFAKMIHHRYPSIPFYLQVGNPYLEGEHVDNHTYKLLSLYEDLVDRVMKSSEMNDVYVLPQLHTLLWSNTKGV

SEQ ID NO: 34460 - protein, 237 aa, Staphylococcus piscifermentans
  REGION 1..237: note = tr|A0A239UD84|A0A239UD84_9STAP 7-carboxy-7-deazaguanine synthase OS=Staphylococcus piscifermentans OX=70258 GN=queE PE=3 SV=1
MAKIPVLEIFGPTIQGEGRVIGRKTMFVRTAGCDYHCSWCDSKFTWDGSAKEDIQMMTAEEIYQQLKEVGGDCFNHVTISGGNPALIKGIQALVDLFEEYGIETALETQGSRYQPWMRQINDLTISPKPPSSGMKPNLEILDSVIAQCVPESLNLKVVIFEDRDFEFAKKIHHRYPDIPFYLQVGNPYLEEEVENHTSRLLERYESLVETVMHSSDMNQAYVLPQLHTLLWSNQKGV

SEQ ID NO: 34461 - protein, 238 aa, Staphylococcus piscifermentans
  REGION 1..238: note = tr|A0A3S0M5W0|A0A3S0M5W0_9STAP 7-carboxy-7-deazaguanine synthase OS=Staphylococcus piscifermentans OX=70258 GN=queE PE=3 SV=1
MSKIPVLEIFGPTIQGEGRVIGRKTMFVRTAGCDYRCSWCDSSFTWDGSAKEDIRMMTAEEIYDSLYEIAGDSFNHVTISGGNPALIKGIQDLVDLFETKNIYSALETQGSKFQPWMTQIDDLTISPKPPSSKMKPNLPILDEVIENCIPASLNLKVVIFDDQDYDFAKMIHHRYPTIPFYLQVGNPYLDGDYVESHTEKLLSLYETLVDRVMASSDMNNVYVLPQLHTLLWSNKKGV

SEQ ID NO: 34462 - protein, 43 aa, Staphylococcus pseudintermedius
  REGION 1..43: note = tr|A0A317YNK6|A0A317YNK6_STAPS 7-carboxy-7-deazaguanine synthase QueE (Fragment); OS = Staphylococcus pseudintermedius OX=283734; GN = DD902_14520 PE=4 SV=1
MAKIPVLEIFGPTIQGEGRVIGRKTMFVRTAGCDYRCSWCDSA

SEQ ID NO: 34463 - protein, 237 aa, Staphylococcus pseudintermedius
  REGION 1..237: note = tr|A0A166S3F5|A0A166S3F5_STAPS 7-carboxy-7-deazaguanine synthase OS=Staphylococcus pseudintermedius OX=283734 GN=queE PE=3 SV=1
MAKIPVLEIFGPTIQGEGRVIGRKTMFVRTAGCDFRCSWCDSKFTWDGSMKDDIEMMEAEEILAQLRNIGGNRFNHVTISGGNPALIKGLQSFVDLCEANDIRTALETQGSQFKPWMRQINDLTLSPKPPSSGMQQNLPRLDEVIEQLDISRINLKVVVFDDADYDFAKMIHQRYPDIPFYLQVGNPYLEEHVEQHTAKLLDRYEQLIDRVTADAEMNEVFVLPQLHTLIWSNQKGV

SEQ ID NO: 34464 - protein, 238 aa, Staphylococcus rostri
  REGION 1..238: note = tr|A0A2K3YS24|A0A2K3YS24_9STAP 7-carboxy-7-deazaguanine synthase OS=Staphylococcus rostri; OX = 522262 GN=queE PE=3 SV=1
MTAKIPVLEIFGPTIQGEGQVIGRKTMFVRTAGCDFRCSWCDSKFTWDGSMRDEIEMLTAEDIWQRLKAIGGDCFDHVTISGGNPALLKNLQSFVDLCDAQGIQLALETQGTKFQPWMRQIHDLTISPKPPSSGMDQDLAQLDNVIGQCNPSSLSLKVVVFDETDLAFAQKIHKRYPDLSFYLQVGNPYLEDDVEHHTERLLTRYEWLIDHVMTNPELNRVHVLPQLHTLLWSNLKGV

SEQ ID NO: 34465 - protein, 237 aa, Staphylococcus saccharolyticus; identical to SEQ ID NO: 34429
  REGION 1..237: note = tr|A0A380H9Y3|A0A380H9Y3_9STAP 7-carboxy-7-deazaguanine synthase OS=Staphylococcus saccharolyticus OX=33028 GN=queE PE=3 SV=1

SEQ ID NO: 34466 - protein, 237 aa, Staphylococcus saccharolyticus
  REGION 1..237: note = tr|A0A4Q8N0J4|A0A4Q8N0J4_9STAP 7-carboxy-7-deazaguanine synthase OS=Staphylococcus saccharolyticus OX=33028 GN=queE PE=3 SV=1
MTKIPVLEIFGPTIQGEGRVIGRKTMFVRTAGCDYRCSWCDSAFTWDGSAKEEIRLLTAKEIYKELRQVGGDNFDHVTISGGNPALIKGIQNLVNLFEEKDIYTALETQGSKFQPWMTQINDLTISPKPPSSNMIPDLDKLDSVIEKCVHETLNLKVVVFNEEDYKFAKVIHHRYPSIPFYLQVGNPYLDDDVEHHTDKLLSKYEELVHRVIKSSDMNHVYVLPQLHTLLWSNKKGV

SEQ ID NO: 34467 - protein, 238 aa, Staphylococcus saprophyticus
  REGION 1..238: note = tr|Q49VQ5|Q49VQ5_STAS1 7-carboxy-7-deazaguanine synthase OS=Staphylococcus saprophyticus subsp. saprophyticus (strain ATCC 15305 / DSM 20229 / NCIMB 8711 / NCTC 7292/ S-41) OX=342451 GN=queE PE=3 SV=1
MSKIPVLEIFGPTIQGEGRVIGRKTMFVRTAGCDYRCSWCDSSFTWDGSAKEDIRMMSAEEIYDQLYHIAGDSFNHVTISGGNPALIKGIQQLVDLFDDKGIQSALETQGSKFQPWMTQIDDLTISPKPPSSKMKPNLPILDEVIEQCVPESLNLKVVIFDDEDYQFAKMIHHRYPTVPFYLQVGNPYLDGEHVEAHTEKLLSLYETLVDRVMVSSDMNNVYVLPQLHTLLWSNKKGV

SEQ ID NO: 34468 - protein, 238 aa, Staphylococcus saprophyticus
  REGION 1..238: note = tr|A0A4Y9KPU2|A0A4Y9KPU2_STASA 7-carboxy-7-deazaguanine synthase OS=Staphylococcus saprophyticus OX=29385 GN=queE PE=3 SV=1
MSKIPVLEIFGPTIQGEGRVIGRKTMFVRTAGCDYRCSWCDSSFTWDGSAKEDIRMMTAEEIYDALYEIAGDSFNHVTISGGNPALIKGIQQLVDLFDEKHIQSALETQGSKFQPWMTQIDDLTISPKPPSSKMKPNLPILDEVIEQCVPESLNLKVVIFDDEDYEFAKKIHHRYPAIPFYLQVGNPYLDGEYVESHTKKLLTLYETLVDRVMVSSDMNNVYVLPQLHTLLWSNKKGV

SEQ ID NO: 34469 - protein, 236 aa, Staphylococcus schleiferi
  REGION 1..236: note = tr|A0A3S0MPK7|A0A3S0MPK7_9STAP 7-carboxy-7-deazaguanine synthase OS=Staphylococcus schleiferi subsp. schleiferi OX=74707 GN=queE PE=3 SV=1
MPKIPVLEIFGPTIQGEGAVIGQKTMFVRTSGCDYRCSWCDSSFTWDGSAKDDIRLLEPEDIISELDQLAPNKYQHVTISGGNPALIKNIGPFVEALKARNIKTALETQGSKFQEWMTLIDDLTISPKPPSSGMKPNLTILDEVIAQCVEESLSLKVVIFDEADYQFAKDIHKRYPSIPFYLQVGNPYLDDSVSNHTEKLLEKYEQLIDKVMNDTLNDIFVLPQLHTLLWSNKKGV

SEQ ID NO: 34470 - protein, 237 aa, Staphylococcus schleiferi
  REGION 1..237: note = tr|A0A0M4V299|A0A0M4V299_9STAP 7-carboxy-7-deazaguanine synthase OS=Staphylococcus schleiferi OX=1295 GN=queE PE=3 SV=1
MAKIPVLEIFGPTIQGEGRVIGRKTMFVRTAGCDFRCSWCDSKFTWDGSMKDEIQMMSAEAIFDQLKAIGGDRFNHVTISGGNPALIKGIQALVDVCQSHGVHTALETQGSHFQPWMRQIDDLTISPKPPSSGMKQDLERLDHVIAQCDVSQINLKVVVFDDVDYQFAKMIHHRYPHLPFYLQVGNPYLEDYVKHHTQKLLERYEQLIDHVTEDAEMNEVYVLPQLHTLVWSNKKGV

SEQ ID NO: 34471 - protein, 237 aa, unidentified
  source 1..237: note = Staphylococcus schweitzeri
  REGION 1..237: note = tr|A0A2K4AJX1|A0A2K4AJX1_9STAP 7-carboxy-7-deazaguanine synthase OS=Staphylococcus schweitzeri OX=1654388 GN=queE PE=3 SV=1
MAKIPVLEIFGPTIQGEGRVIGRKTMFVRTAGCDYRCSWCDSAFTWDGSAKGDIKLMTAEEIYDELKRVGGEQFNHVTISGGNPALIKGIQELVDLFQDKGIYSALETQGSKFQPWMTQIDDLTISPKPPSSAMTPDLNKLDEVIKQCVPSSLNLKVVVFDDNDYEFAKMIHHRYPNIPFYLQVGNPYLSESVDNHTAKLLERYEQLVDLVMQSSDMNHVYVLPQLHTLLWSNKKGV

SEQ ID NO: 34472 - protein, 236 aa, Staphylococcus sciuri
  REGION 1..236: note = tr|A0A2T4RWG6|A0A2T4RWG6_STASC 7-carboxy-7-deazaguanine synthase OS=Staphylococcus sciuri; OX = 1296 GN=queE PE=3 SV=1
MPKIPVLEIFGPTIQGEGAVIGQKTMFVRTSGCDYRCSWCDSSFTWDGSAKDDIRLLEPEDIISELDQLAPNKYQHVTISGGNPALIKNIGPFVEALKARNIKTALETQGSKFQEWMTLIDDLTISPKPPSSGMKPNLTILDEVIAQCVEESLSLKVVIFDEDDYQFAKDIHKRYPSIPFYLQVGNPYLDDSVSNHTEKLLEKYEQLIDKVMNDTLNDIFVLPQLHTLLWSNKKGV

SEQ ID NO: 34473 - protein, 236 aa, Staphylococcus sciuri
  REGION 1..236: note = tr|A0A5F0UYQ3|A0A5F0UYQ3_STASC 7-carboxy-7-deazaguanine synthase OS=Staphylococcus sciuri; OX = 1296 GN=queE PE=3 SV=1
MPKIPVLEIFGPTIQGEGAVIGQKTMFVRTSGCDYRCSWCDSSFTWDGSAKDDIRLLEPEDIISELDQLAPNKYQHVTISGGNPALIKNIGPFVEALKARNIKTALETQGSKFQEWMTLIDDLTISPKPPSSGMKPNLTILDEVIAQCVEESLSLKVVIFDEADYQFAKDIHKRYPTIPFYLQVGNPYLDDSVSNHTEKLLEKYEQLIDKVMNDTLNDIFVLPQLHTLLWSNKKGV

SEQ ID NO: 34474 - protein, 237 aa, Staphylococcus simiae
  REGION 1..237: note = tr|G5JG86|G5JG86_9STAP 7-carboxy-7-deazaguanine synthase OS=Staphylococcus simiae CCM 7213 = CCUG 51256; OX = 911238 GN=queE PE=3 SV=1
MAKVPVLEIFGPTIQGEGRVIGRKTMFVRTAGCDYRCSWCDSAFTWDGSAKDDIQLMTAEEIYDQLVKVGGDRFNHVTISGGNPALIKGIQELVDLFDAKGIVSALETQGSKFQPWMTQIDDLTISPKPPSSSMIPDLAKLDDVISQCVKSSLNLKVVIFDDNDFEFAKMIHHRYPDIPFYLQVGNPYLADNVENHTAKLLHRYEQLVDMVIDSNEMNDVYVLPQLHTLLWSNMKGV

SEQ ID NO: 34475 - protein, 237 aa, Staphylococcus simulans
  REGION 1..237: note = tr|A0A2T4R141|A0A2T4R141_STASI 7-carboxy-7-deazaguanine synthase OS=Staphylococcus simulans OX=1286 GN=queE PE=3 SV=1
MAKIPVLEIFGPTIQGEGRVIGRKTMFVRTAGCDYRCSWCDSSFTWDGSMKDEIQMMTAEEIYDRLYEIGGDCFNHVTISGGNPALIKGIQDLVDLFEEKNIESALETQGSRFQPWMRQINDLTISPKPPSSGMKPNLQILDEVIDQCVKETLNLKVVVFDDEDYAFAKQMHHRYPDIPFYLQVGNPYLDDEVENHTARLLKRYEDLVEKVMQSNDMNQVYVLPQLHTLLWSNMKGV

SEQ ID NO: 34476 - protein, 237 aa, Staphylococcus simulans
  REGION 1..237: note = tr|A0A133QNG5|A0A133QNG5_STASI 7-carboxy-7-deazaguanine synthase OS=Staphylococcus simulans OX=1286 GN=queE PE=3 SV=1
MAKIPVLEIFGPTIQGEGRVIGRKTMFVRTAGCDYRCSWCDSSFTWDGSMKDEIQMMTAEEIYDRLYEIGGDCFNHVTISGGNPALIKGIQDLVDLFEEKNIESALETQGSRFQPWMRQINDLTISPKPPSSGMKPNIQILDEVIEQCVKETLNLKVVVFDDDDYEFAKYIHHRYPDLPFYLQVGNPYLDDEVENHTARLLERYENLVDKVMQSNDMNQVYVLPQLHTLLWSNMKGV

SEQ ID NO: 34477 - protein, 236 aa, Staphylococcus sp.
  REGION 1..236: note = tr|A0A1T1D7X7|A0A1T1D7X7_9STAP 7-carboxy-7-deazaguanine synthase OS=Staphylococcus sp. MB371 OX=1663557 GN=queE PE=3 SV=1
MPKIPVLEIFGPTIQGEGAVIGQKTMFVRTSGCDYRCSWCDSSFTWDGSAKDDIRLLEPEDIISELDQLAPNKYQHVTISGGNPALIKNIGPFVEALKARNIKTALETQGSKFQEWMTLIDDLTISPKPPSSGMKPNLTILDEVIAQCVKESLSLKVVIFDEDDYQFAKDIHKRYPSIPFYLQVGNPYLDDSVSNHTEKLLEKYEQLIDKVMNDTLNDIFVLPQLHTLLWSNKKGV

SEQ ID NO: 34478 - protein, 238 aa, Staphylococcus sp.; identical to SEQ ID NO: 34437
  REGION 1..238: note = tr|A0A1F2KUP7|A0A1F2KUP7_9STAP 7-carboxy-7-deazaguanine synthase OS=Staphylococcus sp. HMSC14D01 OX=1581101 GN=queE PE=3 SV=1

SEQ ID NO: 34479 - protein, 236 aa, unidentified
  source 1..236: note = Staphylococcus stepanovicii
  REGION 1..236: note = tr|A0A240A1Z9|A0A240A1Z9_9STAP 7-carboxy-7-deazaguanine synthase OS=Staphylococcus stepanovicii OX=643214 GN=queE PE=3 SV=1
MPKIPVLEIFGPTIQGEGSVIGKKTMFVRTSGCDYRCSWCDSSFTWDGSAKEDIQLLEPEDIISTLDELAPNKYQHVTISGGNPALIKNIGPLVKALQERNIKTALETQGSKFQDWMTEIDDLTISPKPPSSGMKPNLPILDDVINKCNLESLSLKVVIFDDEDYNFAKMIHNRYPEVPFYLQVGNPYLDDTVDNHTERLLEKYEQLIDKVMNDTLNDIYVLPQLHTLLWSNKKGV

SEQ ID NO: 34480 - protein, 238 aa, Staphylococcus succinus
  REGION 1..238: note = tr|A0A2T4Q9J7|A0A2T4Q9J7_9STAP 7-carboxy-7-deazaguanine synthase OS=Staphylococcus succinus OX=61015 GN=queE PE=3 SV=1
MSKIPVLEIFGPTIQGEGRVIGRKTMFVRTAGCDYRCSWCDSSFTWDGSAKDDIRMMTAEEIYTSLYEIAGDSFNHVTISGGNPALIKGIQDLVDLFDSKHIQSALETQGSKFQPWMTQIDDLTISPKPPSSMMKPNLPILDEVIAQCVPESLNLKVVIFDDADYHFAKMIHHRYPTIPFYLQVGNPYLDGEHVESHTEKLLSLYESLVDRVMESSEMNNVYVLPQLHTLLWSNKKGV

SEQ ID NO: 34481 - protein, 236 aa, Staphylococcus vitulinus
  REGION 1..236: note = tr|A0A2T4PVX2|A0A2T4PVX2_9STAP 7-carboxy-7-deazaguanine synthase OS=Staphylococcus vitulinus OX=71237 GN=queE PE=3 SV=1
MPKIPVLEIFGPTIQGEGSVIGRKTMFVRTSGCDYRCSWCDSSFTWDGSAKDDIRLLEPEDIISELDAIAPNKYQHVTISGGNPALIKNIGPLVEALNERNIETALETQGSKFQSWMTLIDDLTISPKPPSSGMKPNLPILDEVIAQCVQDSLSLKVVIFDEEDYQFAKDIHNRYPSIPFYLQVGNPYLDDSVSNHTEKLLEKYEQLIDKVMNDTLNDIYVLPQLHTLLWSNKKGV

SEQ ID NO: 34482 - protein, 237 aa, Staphylococcus warneri; identical to SEQ ID NO: 34455
  REGION 1..237: note = tr|A0A364UR94|A0A364UR94_STAWA 7-carboxy-7-deazaguanine synthase OS=Staphylococcus warneri OX=1292 GN=queE PE=3 SV=1

SEQ ID NO: 34483 - protein, 242 aa, Staphylococcus warneri
  REGION 1..242: note = tr|A0A2V3ZDM8|A0A2V3ZDM8_STAWA 7-carboxy-7-deazaguanine synthase OS=Staphylococcus warneri OX=1292 GN=queE PE=3 SV=1
MAKIPFLEVFGPTIQGEGMVIGKKTMFVRTYGCDYGCIWCDTKYTWDGSEKDNVRRATAEELFELLKETAGDKSFSHVTISGGNPALIGRAMQEFVDLCHANGVKVGLETQGSLWKDWFYDIDDLTISPKPPSSTMKTNFKMLDDIVDKLHKANVNFSLKIVYFNEEDKEYAKDVFARYKGKNIPYYLSVGNTEPYTDRDITKQLIDKLDELWEVVMNEPAFNDVQALPQLHAIVWGNKRGV

SEQ ID NO: 34484 - protein, 238 aa, Staphylococcus xylosus
  REGION 1..238: note = tr|A0A418IGB1|A0A418IGB1_STAXY 7-carboxy-7-deazaguanine synthase OS=Staphylococcus xylosus OX=1288 GN=queE PE=3 SV=1
MSKIPVLEIFGPTIQGEGRVIGRKTMFVRTAGCDYRCSWCDSSFTWDGSAKEDIRMMTAEEIYEALYEIAGDSFNHVTISGGNPALIKGIQQLVDLFDEKHIQSALETQGSKFQPWMTQIDDLTISPKPPSSKMKPNLPILDEVIEQCVPESLNLKVVIFDDEDYEFAKMIHHRYPTIPFYLQVGNPYLDGEYVESHTKKLLTLYETLVDRVMVSSDMNNVYVLPQLHTLLWSNKKGV

SEQ ID NO: 34485 - protein, 238 aa, Staphylococcus xylosus
  REGION 1..238: note = tr|A0A418I8Z1|A0A418I8Z1_STAXY 7-carboxy-7-deazaguanine synthase OS=Staphylococcus xylosus OX=1288 GN=queE PE=3 SV=1
MSKIPVLEIFGPTIQGEGRVIGRKTMFVRTAGCDYRCSWCDSSFTWDGSAKEDIRMMTAEEIYDALYEIAGDSFNHVTISGGNPALIKGIQQLVDLFDEKHIQSALETQGSKFQPWMTQIDDLTISPKPPSSKMKPNLPILDEVIEQCVPKSLNLKVVIFDDEDYEFAKKIHHRYPDIPFYLQVGNPYLDGEYVESHTKKLLTLYETLVDRVMVSSDMNNVYVLPQLHTLLWSNKKGV

SEQ ID NO: 34486 - protein, 242 aa, Stappia sp.
  REGION 1..242: note = tr|A0A5D0WB79|A0A5D0WB79_9RHOB 7-carboxy-7-deazaguanine synthase OS=Stappia sp. BW2; OX = 2592622 GN=queE PE=3 SV=1
MSIEQIRVSEIFGPTIQGEGALIGQPTVFVRTGGCDYRCSWCDTLHAVDSAHRGEWCPMTPQAILMQVEILSGGTPLTVSLSGGNPAIQPLGGLITLGRKEGYRFALETQGSLAKDWFADLDVLTLSPKPPSSGMKTDWQRLAECVEAAGPETQTVLKVVVFDEADYAFARDVSDRYPHLSCFLQPGNHTPPEATETDATIDMSGIMERMRWLVDRVSSDRWYTATVLPQLHTMIWGNLRGV

SEQ ID NO: 34487 - protein, 210 aa, Starkeya novella
  REGION 1..210: note = tr|A0A2W5KP36|A0A2W5KP36_STANO 7-carboxy-7-deazaguanine synthase OS=Starkeya novella; OX = 921 GN=queE PE=3 SV=1
MTYTVKELFKTLQGEGAHAGRAAVFCRFAGCNLWTGREQDRETAVCRFCDTDFVGTDGPGGGKFATAEALAETIAHTWDGAVGRRYVVFTGGEPLLQLDEALVAAMHAENFEIAIETNGTRTPPPGVDWICVSPKAGAALALTSGDELKLVYPQPDAPPEAFASLDFRHFFLQPMDGAAREANTAAAAAYCMANPTWRLSLQTHKLIGLP

SEQ ID NO: 34488 - protein, 211 aa, Stella humosa
  REGION 1..211: note = tr|A0A3N1KVQ6|A0A3N1KVQ6_9PROT 7-carboxy-7-deazaguanine synthase OS=Stella humosa OX=94; GN = queE PE=3 SV=1
MAYAVKEIFYTLQGEGRNAGRAAVFCRFSGCNLWSGREADRATAACRFCDTDFVGMDGAGGGRFAGADELAAAVARLWPHAGTAGRMVVLTGGEPLLQVDDALVAALHGAGFEICVETNGTIAPPAGIDWLCVSPKGANALAVSAGDELKLVFPQADAQPERFEGLGFDHFLLQPMDGPALAANTAAAIAYCLAHPRWRLSLQTHKLLGIP

SEQ ID NO: 34489 - protein, 233 aa, Stenotrophomonas acidaminiphila
  REGION 1..233: note = tr|A0A2L0SJY1|A0A2L0SJY1_9GAMM 7-carboxy-7-deazaguanine synthase OS=Stenotrophomonas acidaminiphila OX=128780 GN=queE PE=3 SV=1
MTAVSLSSAAATPSEIVQSPLPRLKITEIFLSLQGEADTAGWPTVFVRLTGCPLRCGYCDTEYAFHGGQWRDIDDIVAEVRGHGVRHVCVTGGEPLAQKRCLVLLRALCDAGLEVSLETSGALDIGGVDPRVSRVVDLKTPGSGEMPRNRLENLPLLTARDQLKFVLCDRADYDWARDMVAAQRLHERCMVLFSPCKDRLGARELADWIVADRLPVRFQMQLHKILWNDEPGR

SEQ ID NO: 34490 - protein, 227 aa, Stenotrophomonas acidaminiphila
  REGION 1..227: note = tr|A0A2W5L3X7|A0A2W5L3X7_9GAMM 7-carboxy-7-deazaguanine synthase OS=Stenotrophomonas acidaminiphila OX=128780 GN=queE PE=3 SV=1
MNDAARPSEIVQSPLERLKITEIFLSLQGEANAVGWPTVFVRLTGCPLRCQYCDTAYAFHGGEWREIDDIVAEVAAYGVRHVCVTGGEPLSQKRCLLLLRKLCDAGLDVSLETSGAIDIADVDPRVSRVVDLKTPGSNEMARNRLENLPLLTARDQVKFVLCGRADYEWARGMLAEHRLAERCDVLFSPSKSELSPRELADWIVEDRLPVRFQMQLHKLLWNDEPGR

SEQ ID NO: 34491 - protein, 232 aa, Stenotrophomonas chelatiphaga
  REGION 1..232: note = tr|A0A0R0CIX2|A0A0R0CIX2_9GAMM 7-carboxy-7-deazaguanine synthase OS=Stenotrophomonas chelatiphaga OX=517011 GN=queE PE=3 SV=1
MNVTPANAVTTPSDIVQSPLPRLKITEIFTSLQGEADTAGWPTVFVRLTGCPLRCQYCDTAYAFHGGTWWDIDAIVAEVLAQGVRHVCVTGGEPLAQKRCLILLQKLCDAGMDVSLETSGALDVSEVDPRVSRVVDLKTPGSAEMARNKLENLPLLTARDQVKFVICSREDYDWAKAMVVEHHLAERTMVLFSPSKGEITARELADWIVADRLPVRFQMQLHKLLWNDEPGR

SEQ ID NO: 34492 - protein, 229 aa, Stenotrophomonas daejeonensis
  REGION 1..229: note = tr|A0A0R0DWL6|A0A0R0DWL6_9GAMM 7-carboxy-7-deazaguanine synthase OS=Stenotrophomonas daejeonensis OX=659018 GN=queE PE=3 SV=1
MNHPAASVPSEIVQSPLPRLKITEIFLSLQGEADTAGWLTVFVRLTGCPLRCTYCDTEYAFHGGQWRDIDDIVAEVLGHGVRHVCVTGGEPLAQKRCLLLLRQLCDAGLDVSLETSGALDIGGVDPRVSRVVDLKTPGSGEMARNRLQNLPLLTARDQLKFVLCGRGDYEWARDMVATHRLHERCMVLFSPSKSELTPRELADWIVADRLPVRFQMQLHKLLWNDEPGR

SEQ ID NO: 34493 - protein, 230 aa, Stenotrophomonas ginsengisoli
  REGION 1..230: note = tr|A0A0R0DC19|A0A0R0DC19_9GAMM 7-carboxy-7-deazaguanine synthase OS=Stenotrophomonas ginsengisoli OX=336566 GN=queE PE=3 SV=1
MQPAQAFAQPSQIEQSPLSRLKITEIFLSLQGEADTIGWPTVFVRLTGCPLRCQYCDTAYAFHGGQWREIDDIVAEVLGHGVRHVCVTGGEPLAQKRCLTLLAKLCDAGLSVSLETSGALDIAGVDGRISRVVDVKTPDSGEAGRNRAENIDLLTAHDQLKFVICSRSDYEWARDMVLARQLHQRTMVLFSPSKDQVSPRELADWIIADRLPVRFQMQLHKLLWNDEPGR

SEQ ID NO: 34494 - protein, 229 aa, Stenotrophomonas humi
  REGION 1..229: note = tr|A0A0R0C5W6|A0A0R0C5W6_9GAMM 7-carboxy-7-deazaguanine synthase OS=Stenotrophomonas humi; OX = 405444 GN=queE PE=3 SV=1
MNSPAAAVPSEIVQSPLPRLKITEIFLSLQGEADTVGWPTVFVRLTGCPLRCSYCDTEYAFHGGTWWDIDDIVTEVLKQGVRHVCVTGGEPLAQKRCLILLQKLCDAGLDVSLETSGALDIAAVDARVSRVVDLKTPDSAEMARNRLENIPLLTARDQLKFVICSRSDYEWAKTMLVEHGLPARCMVLFSPSKSQVSARELADWIIADRLPVRFQMQLHKLLWDDEPGR

SEQ ID NO: 34495 - protein, 233 aa, Stenotrophomonas koreensis
  REGION 1..233: note = tr|A0A0R0C2X6|A0A0R0C2X6_9GAMM 7-carboxy-7-deazaguanine synthase OS=Stenotrophomonas koreensis OX=266128 GN=queE PE=3 SV=1
MYPMNPVDAVALPSHIEQSPLPRLKITEIFLSLQGEADSIGWPTVFVRLTGCPLRCTYCDTSYAFHGGQWRDIDDIVAEVLGYGVGHVCVTGGEPLAQKRCLALLGKLCDAGLSVSLETSGALDVSAVDPRVSRVIDIKTPDSGEVARNREANLALLTAHDQLKFVICSRADFEWARQRVLEQKLHQRTMVFFSPSKDQVSARELADWIVADRLPVRFQLQLHKLLWNDEPGR

SEQ ID NO: 34496 - protein, 233 aa, unidentified
  source 1..233: note = Stenotrophomonas lactitubi
  REGION 1..233: note = tr|A0A2M9QZ56|A0A2M9QZ56_9GAMM 7-carboxy-7-deazaguanine synthase OS=Stenotrophomonas lactitubi OX=2045214 GN=queE PE=3 SV=1
MTAVSPSAAVATPSEIVQSPLPRLKITEIFTSLQGEADTAGWPTVFVRLTGCPLRCQYCDTAYAFHGGTWWDIDDIVAEVLAQGVRHVCVTGGEPLAQKRCLVLLQKLCDAGLDVSLETSGALDVGAVDPRVSRVVDIKTPGSAEVARNRLENLPLLTTRDQIKFVICNREDYDWAKAMVAEHELVQRTMVFFSPSKGEITARQLADWIVEDRLPVRFQMQLHKILWNDEPGR

SEQ ID NO: 34497 - protein, 232 aa, Stenotrophomonas maltophilia; identical to SEQ ID NO: 34491
  REGION 1..232: note = tr|A0A3N1QT59|A0A3N1QT59_STEMA 7-carboxy-7-deazaguanine synthase OS=Stenotrophomonas maltophilia OX=40324 GN=queE PE=3 SV=1

SEQ ID NO: 34498 - protein, 233 aa, Stenotrophomonas maltophilia
  REGION 1..233: note = tr|T5KDP8|T5KDP8_STEMA 7-carboxy-7-deazaguanine synthase OS=Stenotrophomonas maltophilia MF89 OX=1333853; GN = queE PE=3 SV=1
MTAVTPSSAAATPSEIVQSPLPRLKITEIFTSLQGEADTAGWPTVFVRLTGCPLRCQYCDTAYAFHGGTWWDIDDIVAEVLAQGVRHVCVTGGEPLAQKRCLVLLQKLCDAGMDVSLETSGALDVSAVDSRVSRVVDIKTPGSAEVARNRWENLPLLTARDQIKFVICSREDYDWAKALVAEHELVKRCTVFFSPSKGEITARQLADWIVEDRLPVRFQMQLHKILWNDEPGR

SEQ ID NO: 34499 - protein, 226 aa, unidentified
  source 1..226: note = Stenotrophomonas panacihumi
  REGION 1..226: note = tr|A0A0R0AWR4|A0A0R0AWR4_9GAMM 7-carboxy-7-deazaguanine synthase OS=Stenotrophomonas panacihumi OX=676599 GN=queE PE=3 SV=1
MNAAVPSEIIQSPLPRLKITEIFLSLQGEADTAGWPTVFVRLTGCPLRCQYCDTAYAFHGGEWWDIDDIVKHVLDQGVRHVCVTGGEPLAQKRCLVLLRRLCDAGLDVSLETSGALDVAEVDPRVSRVVDIKTPGSAEEHRNRWENLPLLTARDQIKFVLCSRADYEWAREIVRERGLDRVCTVWFSPSKSEVTPRELADWIVADRLPVRFQMQLHKLLWNDEPGR

SEQ ID NO: 34500 - protein, 233 aa, Stenotrophomonas pavanii; identical to SEQ ID NO: 28236
  REGION 1..233: note = tr|A0A246KT37|A0A246KT37_9GAMM 7-carboxy-7-deazaguanine synthase OS=Stenotrophomonas pavanii OX=487698 GN=queE PE=3 SV=1

SEQ ID NO: 34501 - protein, 229 aa, unidentified
  source 1..229: note = Stenotrophomonas pictorum
  REGION 1..229: note = tr|A0A0R0AF58|A0A0R0AF58_9GAMM 7-carboxy-7-deazaguanine synthase OS=Stenotrophomonas pictorum JCM 9942 OX=1236960 GN=queE PE=3 SV=1
MNSPSAAVPSEIVQSPLPRLKITEIFLSLQGEADSVGWPTVFVRLTGCPLRCQYCDTEYAFHGGTWWDIDAIVDEVLRQGVRHVCVTGGEPLAQKRCVILLQKLCDAGLEVSLETSGALDIAEVDPRVSRVVDLKTPDSAEMARNRLENIPLLTARDQLKFVICSRADYDWAKSMLVEHDLPGRCMVLFSPSKSQVSARELADWIVADRLPVRFQMQLHKLLWNDAPGR

SEQ ID NO: 34502 - protein, 232 aa, Stenotrophomonas rhizophila
  REGION 1..232: note = tr|A0A4U3GGY4|A0A4U3GGY4_9GAMM 7-carboxy-7-deazaguanine synthase OS=Stenotrophomonas rhizophila OX=216778 GN=queE PE=3 SV=1
MTVSLSAAAALPSEIVQSPLPRLKITEIFTSLQGEADTAGWPTVFVRLTGCPLRCTYCDTAYAFHGGTWWDIDAIVAEVLAQGVHHVCVTGGEPLAQKRCLVLLEKLCDAGLDVSLETSGALDVSAVDPRVSRVVDLKTPGSGELARNRLENLPLLTRRDQIKFVLCSREDYEWARGMVAEHRLNQRSMVLFSPSKDQVSPRQLADWIVEDRLPVRFQMQLHKLLWNDEPGR

SEQ ID NO: 34503 - protein, 232 aa, Stenotrophomonas rhizophila
  REGION 1..232: note = tr|A0A1B2N732|A0A1B2N732_9GAMM 7-carboxy-7-deazaguanine synthase OS=Stenotrophomonas rhizophila OX=216778 GN=queE PE=3 SV=1
MTSPLSAAAALPSEIVQSPLPRLKITEIFTSLQGEADTAGWPTVFVRLTGCPLRCTYCDTAYAFHGGTWWDIDEIVREVLAQGVHHVCVTGGEPLAQKRCLVLLEKLCEAGLDVSLETSGALDVGGVDPRVSRVVDLKTPGSGEMARNRLENLPLLTRRDQIKFVLCSREDYDWARGMVREHRLNERSMVLFSPSKGQVSPRELADWIVEDRLPVRFQMQLHKILWDDEPGR

SEQ ID NO: 34504 - protein, 229 aa, Stenotrophomonas sp.
  REGION 1..229: note = tr|A0A4R4IHK5|A0A4R4IHK5_9GAMM 7-carboxy-7-deazaguanine synthase OS=Stenotrophomonas sp. ATCM1_4 OX=2259330 GN=queE PE=3 SV=1
MNSPAAAVPSEIVQSPLPRLKITEIFLSLQGEADTAGWPTVFVRLTGCPLRCLYCDTEYAFHGGEWWDIDAIVAEVLQQGVRHVCVTGGEPLAQKRCLILLQKLCDAGLDVSLETSGALDIAAVDARVSRVVDLKTPDSGEVARNRLENLPLLTARDQLKFVICSRGDYEWARAMVAEHGLPARCTVFFSPSKSQVSARELADWIVADRLPVRFQMQLHKILWNDEPGR

SEQ ID NO: 34505 - protein, 233 aa, Stenotrophomonas sp.
  REGION 1..233: note = tr|A0A1W1H3D4|A0A1W1H3D4_9GAMM 7-carboxy-7-deazaguanine synthase OS=Stenotrophomonas sp. 92mfcol6.1 OX=1761901 GN=queE PE=3 SV=1
MTAVPPSAAVATPSEIVQSPLPRLKITEIFTSLQGEADTAGWPTVFVRLTGCPLRCQYCDTAYAFHGGTWWDIDDIVAHVQAQGVRHVCVTGGEPLAQKRCLVLLQKLCDAGLDVSLETSGALDVSAVDPRVSRVVDIKTPGSAEVARNRWENLPLLTTRDQIKFVICNREDYDWAKAMVAEHQLVQRTMVFFSPSKGEITARQLADWIVEDRLPVRFQMQLHKILWNDEPGR

SEQ ID NO: 34506 - protein, 229 aa, Stenotrophomonas terrae
  REGION 1..229: note = tr|A0A0R0CMT3|A0A0R0CMT3_9GAMM 7-carboxy-7-deazaguanine synthase OS=Stenotrophomonas terrae OX=405446 GN=queE PE=3 SV=1
MNSPSAAVPSEIVQSPLPRLKITEIFLSLQGEADTAGWPTVFVRLTGCPLRCQYCDTEYAFHGGDWWDIDDIVAEVLKQGVRHVCVTGGEPLAQKRCLILLQKLCDAGLDVSLETSGALDIAAVDPRVSRVVDLKTPDSREMARNRLENIPLLSARDQLKFVICSRGDYEWAKAMLAEHRLAERCMVLFSPSKSQLKPRELADWIVADRLPVRFQMQLHKLLWDDAPGY

SEQ ID NO: 34507 - protein, 227 aa, Steroidobacter denitrificans
  REGION 1..227: note = tr|A0A127FC33|A0A127FC33_STEDE 7-carboxy-7-deazaguanine synthase OS=Steroidobacter denitrificans OX=465721 GN=queE PE=3 SV=1
MAISSGSSSFAGKAATRVRLTEIFLSIQGEADSVGWPTVFVRLTGCPLRCSYCDTAYAFHGGEWFRIEAVLEKVASFDTRHVCVTGGEPLAQKGCLVLLQRLCDAGHQVSLETSGAMDVSTVDPRVVRVVDIKTPGSGEVARNRYENLALLRPEEQIKFVICNRADFEWACEQVRTRHLQERCMVLFSPSSGQVEAGELAQWILDARLPVRLQVQLHKYLWGDTPGR

SEQ ID NO: 34508 - protein, 215 aa, Stigmatella aurantiaca
  REGION 1..215: note = tr|A0A1H7ZBT5|A0A1H7ZBT5_STIAU 7-carboxy-7-deazaguanine synthase OS=Stigmatella aurantiaca OX=41 GN=queE PE=3 SV=1
MAYAVKELFYTLQGEGAQTGRAAVFLRFTGCNLWTGLEKDRDRGQGGCSRWCDTDFVGMDGQGGGRFSTAEALASAVQEAWRPGPDGGTPLVVCTGGEPLLQLDAPLVAALHTRGFAIAVETNGTQEAPAGLDWVCVSPKAGGHLVLRAGNELKLIFPQQGLSPDDVEGLAFTHFFLQPLDGPDKLRNMQLAVEYCLAHPKWRLSLQTHKFLGIP

SEQ ID NO: 34509 - protein, 194 aa, Stigmatella aurantiaca
  REGION 1..194: note = tr|Q08U16|Q08U16_STIAD 7-carboxy-7-deazaguanine synthase OS=Stigmatella aurantiaca (strain DW4/3-1); OX = 378806 GN=queE PE=3 SV=1
MLCAFVRLTGCHLRCTYCDSEFAFRGGTRMPNAQVVEQVKALRTPMVEITGGEPLLQPGVYPLMEALLAEGLTVLLETSGAIDVRLVPPAVHKIVDMKTPSSGESDRNDVRNFSSMNARDEMKFVIGSREDYEWSKALIAEHGLATKPFAMLFSTVFDKLHPRELAEWVIADRLPVRFQLQMHKYVWEPEARGV

SEQ ID NO: 34510 - protein, 230 aa, Stigmatella erecta
  REGION 1..230: note = tr|A0A1I0KQS4|A0A1I0KQS4_9DELT 7-carboxy-7-deazaguanine synthase OS=Stigmatella erecta; OX = 83460 GN=queE PE=3 SV=1
MLALRPRIEPHRSPAIDSVMVKELYLSVQGESSHAGLLCAFVRLTGCHLRCTYCDSTFAFRGGTRMTNAQVVQEVKAMRTPMVEITGGEPLLQPGVYPLMEALLAEGLKVLLETSGAIDVRLVPPEVHKIVDIKTPSSGESDRNDLRNFQSMNARDELKFVIGSREDYEWSKALIAEHALATKPFGMLFSTVFSKLHPRELAEWVIDDRLPVRFQLQLHKYMWDPEARGV

SEQ ID NO: 34511 - protein, 234 aa, Streptoalloteichus hindustanus
  REGION 1..234: note = tr|A0A1M5DB62|A0A1M5DB62_STRHI 7-carboxy-7-deazaguanine synthase OS=Streptoalloteichus hindustanus OX=2017 GN=queE PE=3 SV=1
MNTLTVAPERVEGSAILTEKFESFQGEGPWTGQRCVFVRFSRCNLRCGFCDTPESWDWSRYNPAEVSERAPVAELVSWVRERGVDMMVITGGEPMLQQPAMTALARGLANVRVQVETNGTIAPTPELASLVDLWVVSPKLANSGMTYSTRIKPAALSAFAVTDRAVFKFVVTEPDRDLDEIAQLVEEHQLAPVWVMPEGTTREKILAGMDALYSRATERGWNVSTRLHILTGAR
